United States Patent Application Publication US 2022/0090207 A1 - sequence listing, part 28

SEQ ID NO: 375806 - DNA, 267 bp, Homo sapiens; identical to SEQ ID NO: 337057
  chr1:46500322-46500589
  hypo

SEQ ID NO: 375807 - DNA, 48 bp, Homo sapiens; identical to SEQ ID NO: 362457
  chr1:46744609-46744657
  hypo

SEQ ID NO: 375808 - DNA, 41 bp, Homo sapiens
  chr1:46921731-46921772
  hypo
cgcagccaggcccccgagtgtgcgccgtgtaaagtgacaca

SEQ ID NO: 375809 - DNA, 209 bp, Homo sapiens; identical to SEQ ID NO: 337062
  chr1:46963465-46963674
  hypo

SEQ ID NO: 375810 - DNA, 71 bp, Homo sapiens; identical to SEQ ID NO: 337063
  chr1:47033326-47033397
  hypo

SEQ ID NO: 375811 - DNA, 97 bp, Homo sapiens; identical to SEQ ID NO: 352861
  chr1:47035276-47035373
  hypo

SEQ ID NO: 375812 - DNA, 233 bp, Homo sapiens; identical to SEQ ID NO: 352862
  chr1:47035403-47035636
  hypo

SEQ ID NO: 375813 - DNA, 232 bp, Homo sapiens; identical to SEQ ID NO: 352863
  chr1:47041011-47041243
  hypo

SEQ ID NO: 375814 - DNA, 37 bp, Homo sapiens; identical to SEQ ID NO: 352864
  chr1:47041273-47041310
  hypo

SEQ ID NO: 375815 - DNA, 430 bp, Homo sapiens; identical to SEQ ID NO: 345705
  chr1:47685395-47685825
  hypo

SEQ ID NO: 375816 - DNA, 159 bp, Homo sapiens; identical to SEQ ID NO: 349233
  chr1:48190715-48190874
  hypo

SEQ ID NO: 375817 - DNA, 428 bp, Homo sapiens; identical to SEQ ID NO: 337069
  chr1:48459812-48460240
  hypo

SEQ ID NO: 375818 - DNA, 677 bp, Homo sapiens; identical to SEQ ID NO: 356759
  chr1:48462497-48463174
  hypo

SEQ ID NO: 375819 - DNA, 38 bp, Homo sapiens; identical to SEQ ID NO: 330814
  chr1:48463421-48463459
  hypo

SEQ ID NO: 375820 - DNA, 268 bp, Homo sapiens; identical to SEQ ID NO: 337074
  chr1:51439584-51439852
  hypo

SEQ ID NO: 375821 - DNA, 196 bp, Homo sapiens; identical to SEQ ID NO: 345706
  chr1:51763389-51763585
  hypo

SEQ ID NO: 375822 - DNA, 189 bp, Homo sapiens; identical to SEQ ID NO: 330827
  chr1:52081941-52082130
  hypo

SEQ ID NO: 375823 - DNA, 322 bp, Homo sapiens; identical to SEQ ID NO: 197534
  chr1:52194968-52195290
  hypo

SEQ ID NO: 375824 - DNA, 108 bp, Homo sapiens; identical to SEQ ID NO: 337078
  chr1:52659468-52659576
  hypo

SEQ ID NO: 375825 - DNA, 52 bp, Homo sapiens; identical to SEQ ID NO: 337079
  chr1:52879577-52879629
  hypo

SEQ ID NO: 375826 - DNA, 153 bp, Homo sapiens; identical to SEQ ID NO: 337082
  chr1:53238160-53238313
  hypo

SEQ ID NO: 375827 - DNA, 605 bp, Homo sapiens; identical to SEQ ID NO: 349244
  chr1:54204704-54205309
  hypo

SEQ ID NO: 375828 - DNA, 238 bp, Homo sapiens; identical to SEQ ID NO: 337086
  chr1:54408693-54408931
  hypo

SEQ ID NO: 375829 - DNA, 206 bp, Homo sapiens; identical to SEQ ID NO: 337087
  chr1:54474577-54474783
  hypo

SEQ ID NO: 375830 - DNA, 122 bp, Homo sapiens; identical to SEQ ID NO: 352876
  chr1:54694091-54694213
  hypo

SEQ ID NO: 375831 - DNA, 32 bp, Homo sapiens
  chr1:54694462-54694494
  hypo
cgcccatcggaccgtccgagccgggacccatc

SEQ ID NO: 375832 - DNA, 148 bp, Homo sapiens; identical to SEQ ID NO: 337089
  chr1:55066953-55067101
  hypo

SEQ ID NO: 375833 - DNA, 207 bp, Homo sapiens; identical to SEQ ID NO: 330837
  chr1:55352463-55352670
  hypo

SEQ ID NO: 375834 - DNA, 164 bp, Homo sapiens; identical to SEQ ID NO: 337091
  chr1:55620065-55620229
  hypo

SEQ ID NO: 375835 - DNA, 120 bp, Homo sapiens; identical to SEQ ID NO: 369137
  chr1:57110528-57110648
  hypo

SEQ ID NO: 375836 - DNA, 168 bp, Homo sapiens; identical to SEQ ID NO: 278449
  chr1:57110714-57110882
  hypo

SEQ ID NO: 375837 - DNA, 211 bp, Homo sapiens; identical to SEQ ID NO: 337094
  chr1:61601555-61601766
  hypo

SEQ ID NO: 375838 - DNA, 51 bp, Homo sapiens
  chr1:61716891-61716942
  hypo
cgtacaaataaaaatttcactggaaagggaactccgtgatctctttactac

SEQ ID NO: 375839 - DNA, 92 bp, Homo sapiens; identical to SEQ ID NO: 337096
  chr1:61833628-61833720
  hypo

SEQ ID NO: 375840 - DNA, 391 bp, Homo sapiens; identical to SEQ ID NO: 337097
  chr1:61913163-61913554
  hypo

SEQ ID NO: 375841 - DNA, 420 bp, Homo sapiens; identical to SEQ ID NO: 197564
  chr1:62207842-62208262
  hypo

SEQ ID NO: 375842 - DNA, 203 bp, Homo sapiens; identical to SEQ ID NO: 356781
  chr1:62208291-62208494
  hypo

SEQ ID NO: 375843 - DNA, 205 bp, Homo sapiens; identical to SEQ ID NO: 356782
  chr1:62784150-62784355
  hypo

SEQ ID NO: 375844 - DNA, 47 bp, Homo sapiens; identical to SEQ ID NO: 349260
  chr1:67773780-67773827
  hypo

SEQ ID NO: 375845 - DNA, 34 bp, Homo sapiens; identical to SEQ ID NO: 362487
  chr1:70710406-70710440
  hypo

SEQ ID NO: 375846 - DNA, 59 bp, Homo sapiens; identical to SEQ ID NO: 337104
  chr1:78463740-78463799
  hypo

SEQ ID NO: 375847 - DNA, 800 bp, Homo sapiens; identical to SEQ ID NO: 356819
  chr1:85462482-85463282
  hypo

SEQ ID NO: 375848 - DNA, 155 bp, Homo sapiens; identical to SEQ ID NO: 337108
  chr1:85743342-85743497
  hypo

SEQ ID NO: 375849 - DNA, 77 bp, Homo sapiens; identical to SEQ ID NO: 337109
  chr1:86277780-86277857
  hypo

SEQ ID NO: 375850 - DNA, 1156 bp, Homo sapiens; identical to SEQ ID NO: 330887
  chr1:90098160-90099316
  hypo

SEQ ID NO: 375851 - DNA, 437 bp, Homo sapiens; identical to SEQ ID NO: 344960
  chr1:90308855-90309292
  hypo

SEQ ID NO: 375852 - DNA, 134 bp, Homo sapiens; identical to SEQ ID NO: 337113
  chr1:90400255-90400389
  hypo

SEQ ID NO: 375853 - DNA, 154 bp, Homo sapiens; identical to SEQ ID NO: 356828
  chr1:91183993-91184147
  hypo

SEQ ID NO: 375854 - DNA, 202 bp, Homo sapiens; identical to SEQ ID NO: 337116
  chr1:92001241-92001443
  hypo

SEQ ID NO: 375855 - DNA, 181 bp, Homo sapiens; identical to SEQ ID NO: 362495
  chr1:94047877-94048058
  hypo

SEQ ID NO: 375856 - DNA, 329 bp, Homo sapiens; identical to SEQ ID NO: 297512
  chr1:94048088-94048417
  hypo

SEQ ID NO: 375857 - DNA, 37 bp, Homo sapiens; identical to SEQ ID NO: 337119
  chr1:94354617-94354654
  hypo

SEQ ID NO: 375858 - DNA, 244 bp, Homo sapiens; identical to SEQ ID NO: 337120
  chr1:94495968-94496212
  hypo

SEQ ID NO: 375859 - DNA, 501 bp, Homo sapiens; identical to SEQ ID NO: 346354
  chr1:94702434-94702935
  hypo

SEQ ID NO: 375860 - DNA, 88 bp, Homo sapiens; identical to SEQ ID NO: 197650
  chr1:94702990-94703078
  hypo

SEQ ID NO: 375861 - DNA, 221 bp, Homo sapiens; identical to SEQ ID NO: 197651
  chr1:94703103-94703324
  hypo

SEQ ID NO: 375862 - DNA, 157 bp, Homo sapiens; identical to SEQ ID NO: 356839
  chr1:94703357-94703514
  hypo

SEQ ID NO: 375863 - DNA, 759 bp, Homo sapiens; identical to SEQ ID NO: 349289
  chr1:99126872-99127631
  hypo

SEQ ID NO: 375864 - DNA, 325 bp, Homo sapiens; identical to SEQ ID NO: 344965
  chr1:99127671-99127996
  hypo

SEQ ID NO: 375865 - DNA, 78 bp, Homo sapiens; identical to SEQ ID NO: 362505
  chr1:100928315-100928393
  hypo

SEQ ID NO: 375866 - DNA, 60 bp, Homo sapiens; identical to SEQ ID NO: 362506
  chr1:100928423-100928483
  hypo

SEQ ID NO: 375867 - DNA, 288 bp, Homo sapiens; identical to SEQ ID NO: 278688
  chr1:101702081-101702369
  hypo

SEQ ID NO: 375868 - DNA, 392 bp, Homo sapiens; identical to SEQ ID NO: 278689
  chr1:101702796-101703188
  hypo

SEQ ID NO: 375869 - DNA, 1045 bp, Homo sapiens; identical to SEQ ID NO: 356848
  chr1:107599205-107600250
  hypo

SEQ ID NO: 375870 - DNA, 49 bp, Homo sapiens; identical to SEQ ID NO: 349294
  chr1:107684495-107684544
  hypo

SEQ ID NO: 375871 - DNA, 113 bp, Homo sapiens; identical to SEQ ID NO: 349296
  chr1:109204221-109204334
  hypo

SEQ ID NO: 375872 - DNA, 280 bp, Homo sapiens; identical to SEQ ID NO: 337131
  chr1:109839458-109839738
  hypo

SEQ ID NO: 375873 - DNA, 87 bp, Homo sapiens; identical to SEQ ID NO: 337132
  chr1:110167965-110168052
  hypo

SEQ ID NO: 375874 - DNA, 229 bp, Homo sapiens; identical to SEQ ID NO: 337133
  chr1:110170726-110170955
  hypo

SEQ ID NO: 375875 - DNA, 115 bp, Homo sapiens; identical to SEQ ID NO: 337134
  chr1:110305380-110305495
  hypo

SEQ ID NO: 375876 - DNA, 364 bp, Homo sapiens; identical to SEQ ID NO: 349303
  chr1:110753530-110753894
  hypo

SEQ ID NO: 375877 - DNA, 46 bp, Homo sapiens; identical to SEQ ID NO: 197698
  chr1:110753957-110754003
  hypo

SEQ ID NO: 375878 - DNA, 243 bp, Homo sapiens; identical to SEQ ID NO: 337139
  chr1:110771992-110772235
  hypo

SEQ ID NO: 375879 - DNA, 78 bp, Homo sapiens
  chr1:112084812-112084890
  hypo
cgtttagaccagcttaatgaaacagacatccttcgcgtactgacggaaacactggcggcacatattgaggccgtattt

SEQ ID NO: 375880 - DNA, 142 bp, Homo sapiens; identical to SEQ ID NO: 337142
  chr1:113059805-113059947
  hypo

SEQ ID NO: 375881 - DNA, 818 bp, Homo sapiens; identical to SEQ ID NO: 330937
  chr1:113498720-113499538
  hypo

SEQ ID NO: 375882 - DNA, 699 bp, Homo sapiens; identical to SEQ ID NO: 349308
  chr1:113932580-113933279
  hypo

SEQ ID NO: 375883 - DNA, 764 bp, Homo sapiens; identical to SEQ ID NO: 369243
  chr1:113933305-113934069
  hypo

SEQ ID NO: 375884 - DNA, 330 bp, Homo sapiens; identical to SEQ ID NO: 362519
  chr1:114522986-114523316
  hypo

SEQ ID NO: 375885 - DNA, 76 bp, Homo sapiens; identical to SEQ ID NO: 362520
  chr1:115261261-115261337
  hypo

SEQ ID NO: 375886 - DNA, 1132 bp, Homo sapiens; identical to SEQ ID NO: 330944
  chr1:116184428-116185560
  hypo

SEQ ID NO: 375887 - DNA, 51 bp, Homo sapiens; identical to SEQ ID NO: 207134
  chr1:116214053-116214104
  hypo

SEQ ID NO: 375888 - DNA, 118 bp, Homo sapiens; identical to SEQ ID NO: 337151
  chr1:116219361-116219479
  hypo

SEQ ID NO: 375889 - DNA, 200 bp, Homo sapiens; identical to SEQ ID NO: 337153
  chr1:117630364-117630564
  hypo

SEQ ID NO: 375890 - DNA, 144 bp, Homo sapiens; identical to SEQ ID NO: 337154
  chr1:117918966-117919110
  hypo

SEQ ID NO: 375891 - DNA, 204 bp, Homo sapiens; identical to SEQ ID NO: 337155
  chr1:118163688-118163892
  hypo

SEQ ID NO: 375892 - DNA, 199 bp, Homo sapiens; identical to SEQ ID NO: 337156
  chr1:118166377-118166576
  hypo

SEQ ID NO: 375893 - DNA, 109 bp, Homo sapiens; identical to SEQ ID NO: 337157
  chr1:118172998-118173107
  hypo

SEQ ID NO: 375894 - DNA, 208 bp, Homo sapiens; identical to SEQ ID NO: 362528
  chr1:118173578-118173786
  hypo

SEQ ID NO: 375895 - DNA, 63 bp, Homo sapiens; identical to SEQ ID NO: 362529
  chr1:118173816-118173879
  hypo

SEQ ID NO: 375896 - DNA, 49 bp, Homo sapiens; identical to SEQ ID NO: 337160
  chr1:150935078-150935127
  hypo

SEQ ID NO: 375897 - DNA, 68 bp, Homo sapiens; identical to SEQ ID NO: 337162
  chr1:151373761-151373829
  hypo

SEQ ID NO: 375898 - DNA, 271 bp, Homo sapiens; identical to SEQ ID NO: 337163
  chr1:151378250-151378521
  hypo

SEQ ID NO: 375899 - DNA, 77 bp, Homo sapiens; identical to SEQ ID NO: 337164
  chr1:151597643-151597720
  hypo

SEQ ID NO: 375900 - DNA, 181 bp, Homo sapiens; identical to SEQ ID NO: 337166
  chr1:151699304-151699485
  hypo

SEQ ID NO: 375901 - DNA, 369 bp, Homo sapiens; identical to SEQ ID NO: 337167
  chr1:152192964-152193333
  hypo

SEQ ID NO: 375902 - DNA, 298 bp, Homo sapiens; identical to SEQ ID NO: 337168
  chr1:152733117-152733415
  hypo

SEQ ID NO: 375903 - DNA, 253 bp, Homo sapiens; identical to SEQ ID NO: 347831
  chr1:153540242-153540495
  hypo

SEQ ID NO: 375904 - DNA, 193 bp, Homo sapiens; identical to SEQ ID NO: 337172
  chr1:154179803-154179996
  hypo

SEQ ID NO: 375905 - DNA, 447 bp, Homo sapiens; identical to SEQ ID NO: 346369
  chr1:154297543-154297990
  hypo

SEQ ID NO: 375906 - DNA, 72 bp, Homo sapiens; identical to SEQ ID NO: 278861
  chr1:154298038-154298110
  hypo

SEQ ID NO: 375907 - DNA, 244 bp, Homo sapiens; identical to SEQ ID NO: 349324
  chr1:154474305-154474549
  hypo

SEQ ID NO: 375908 - DNA, 178 bp, Homo sapiens; identical to SEQ ID NO: 362541
  chr1:154685569-154685747
  hypo

SEQ ID NO: 375909 - DNA, 78 bp, Homo sapiens; identical to SEQ ID NO: 362542
  chr1:154685777-154685855
  hypo

SEQ ID NO: 375910 - DNA, 223 bp, Homo sapiens; identical to SEQ ID NO: 337176
  chr1:154931252-154931475
  hypo

SEQ ID NO: 375911 - DNA, 140 bp, Homo sapiens; identical to SEQ ID NO: 352914
  chr1:154954433-154954573
  hypo

SEQ ID NO: 375912 - DNA, 207 bp, Homo sapiens; identical to SEQ ID NO: 337178
  chr1:155012870-155013077
  hypo

SEQ ID NO: 375913 - DNA, 47 bp, Homo sapiens
  chr1:155162034-155162081
  hypo
ccacctggggtagagcttgcatgaccagaacccgtaacaactgttgc

SEQ ID NO: 375914 - DNA, 269 bp, Homo sapiens; identical to SEQ ID NO: 356888
  chr1:155164146-155164415
  hypo

SEQ ID NO: 375915 - DNA, 594 bp, Homo sapiens; identical to SEQ ID NO: 356889
  chr1:155164455-155165049
  hypo

SEQ ID NO: 375916 - DNA, 58 bp, Homo sapiens; identical to SEQ ID NO: 352915
  chr1:155311726-155311784
  hypo

SEQ ID NO: 375917 - DNA, 353 bp, Homo sapiens; identical to SEQ ID NO: 352916
  chr1:155911571-155911924
  hypo

SEQ ID NO: 375918 - DNA, 83 bp, Homo sapiens; identical to SEQ ID NO: 352917
  chr1:155911954-155912037
  hypo

SEQ ID NO: 375919 - DNA, 40 bp, Homo sapiens
  chr1:155954396-155954436
  hypo
gcagagctgaagaatttaggagccatgggaacagagcacc

SEQ ID NO: 375920 - DNA, 54 bp, Homo sapiens
  chr1:156010548-156010602
  hypo
cagaatttaacttgggttgcacctggactggacaccacctagtttagctctctc

SEQ ID NO: 375921 - DNA, 282 bp, Homo sapiens; identical to SEQ ID NO: 337187
  chr1:156047227-156047509
  hypo

SEQ ID NO: 375922 - DNA, 467 bp, Homo sapiens; identical to SEQ ID NO: 337188
  chr1:156255276-156255743
  hypo

SEQ ID NO: 375923 - DNA, 91 bp, Homo sapiens; identical to SEQ ID NO: 352918
  chr1:156432033-156432124
  hypo

SEQ ID NO: 375924 - DNA, 187 bp, Homo sapiens; identical to SEQ ID NO: 337193
  chr1:156553606-156553793
  hypo

SEQ ID NO: 375925 - DNA, 202 bp, Homo sapiens; identical to SEQ ID NO: 197783
  chr1:156594227-156594429
  hypo

SEQ ID NO: 375926 - DNA, 145 bp, Homo sapiens; identical to SEQ ID NO: 337196
  chr1:157678824-157678969
  hypo

SEQ ID NO: 375927 - DNA, 47 bp, Homo sapiens; identical to SEQ ID NO: 352919
  chr1:158669657-158669704
  hypo

SEQ ID NO: 375928 - DNA, 58 bp, Homo sapiens; identical to SEQ ID NO: 362555
  chr1:158710986-158711044
  hypo

SEQ ID NO: 375929 - DNA, 62 bp, Homo sapiens; identical to SEQ ID NO: 362556
  chr1:159869545-159869607
  hypo

SEQ ID NO: 375930 - DNA, 58 bp, Homo sapiens
  chr1:159931971-159932029
  hypo
cggcaaggggaacagaggatgggaggcaaagggaaaacatggggtagagggataattt

SEQ ID NO: 375931 - DNA, 57 bp, Homo sapiens; identical to SEQ ID NO: 207245
  chr1:159932101-159932158
  hypo

SEQ ID NO: 375932 - DNA, 329 bp, Homo sapiens; identical to SEQ ID NO: 278955
  chr1:160370270-160370599
  hypo

SEQ ID NO: 375933 - DNA, 232 bp, Homo sapiens; identical to SEQ ID NO: 356902
  chr1:160370629-160370861
  hypo

SEQ ID NO: 375934 - DNA, 86 bp, Homo sapiens; identical to SEQ ID NO: 337203
  chr1:160878353-160878439
  hypo

SEQ ID NO: 375935 - DNA, 287 bp, Homo sapiens; identical to SEQ ID NO: 337204
  chr1:160953524-160953811
  hypo

SEQ ID NO: 375936 - DNA, 158 bp, Homo sapiens; identical to SEQ ID NO: 337206
  chr1:161367435-161367593
  hypo

SEQ ID NO: 375937 - DNA, 293 bp, Homo sapiens; identical to SEQ ID NO: 344978
  chr1:161369566-161369859
  hypo

SEQ ID NO: 375938 - DNA, 299 bp, Homo sapiens; identical to SEQ ID NO: 344979
  chr1:161369945-161370244
  hypo

SEQ ID NO: 375939 - DNA, 712 bp, Homo sapiens; identical to SEQ ID NO: 349339
  chr1:161409991-161410703
  hypo

SEQ ID NO: 375940 - DNA, 59 bp, Homo sapiens; identical to SEQ ID NO: 362565
  chr1:161450487-161450546
  hypo

SEQ ID NO: 375941 - DNA, 903 bp, Homo sapiens; identical to SEQ ID NO: 331011
  chr1:162039148-162040051
  hypo

SEQ ID NO: 375942 - DNA, 55 bp, Homo sapiens; identical to SEQ ID NO: 331013
  chr1:163378364-163378419
  hypo

SEQ ID NO: 375943 - DNA, 180 bp, Homo sapiens; identical to SEQ ID NO: 362568
  chr1:163392854-163393034
  hypo

SEQ ID NO: 375944 - DNA, 35 bp, Homo sapiens; identical to SEQ ID NO: 362569
  chr1:163393064-163393099
  hypo

SEQ ID NO: 375945 - DNA, 132 bp, Homo sapiens; identical to SEQ ID NO: 337214
  chr1:164604732-164604864
  hypo

SEQ ID NO: 375946 - DNA, 55 bp, Homo sapiens; identical to SEQ ID NO: 362571
  chr1:164637890-164637945
  hypo

SEQ ID NO: 375947 - DNA, 198 bp, Homo sapiens; identical to SEQ ID NO: 362572
  chr1:164637985-164638183
  hypo

SEQ ID NO: 375948 - DNA, 295 bp, Homo sapiens; identical to SEQ ID NO: 337216
  chr1:164761703-164761998
  hypo

SEQ ID NO: 375949 - DNA, 515 bp, Homo sapiens; identical to SEQ ID NO: 337217
  chr1:164768766-164769281
  hypo

SEQ ID NO: 375950 - DNA, 103 bp, Homo sapiens; identical to SEQ ID NO: 278995
  chr1:165204594-165204697
  hypo

SEQ ID NO: 375951 - DNA, 93 bp, Homo sapiens; identical to SEQ ID NO: 278996
  chr1:165204732-165204825
  hypo

SEQ ID NO: 375952 - DNA, 73 bp, Homo sapiens; identical to SEQ ID NO: 337219
  chr1:165711421-165711494
  hypo

SEQ ID NO: 375953 - DNA, 629 bp, Homo sapiens; identical to SEQ ID NO: 356926
  chr1:166135586-166136215
  hypo

SEQ ID NO: 375954 - DNA, 238 bp, Homo sapiens; identical to SEQ ID NO: 337221
  chr1:167096217-167096455
  hypo

SEQ ID NO: 375955 - DNA, 81 bp, Homo sapiens; identical to SEQ ID NO: 337222
  chr1:167221039-167221120
  hypo

SEQ ID NO: 375956 - DNA, 31 bp, Homo sapiens; identical to SEQ ID NO: 352929
  chr1:167393552-167393583
  hypo

SEQ ID NO: 375957 - DNA, 187 bp, Homo sapiens; identical to SEQ ID NO: 352930
  chr1:167393613-167393800
  hypo

SEQ ID NO: 375958 - DNA, 205 bp, Homo sapiens; identical to SEQ ID NO: 362582
  chr1:167430238-167430443
  hypo

SEQ ID NO: 375959 - DNA, 200 bp, Homo sapiens; identical to SEQ ID NO: 337225
  chr1:167486836-167487036
  hypo

SEQ ID NO: 375960 - DNA, 160 bp, Homo sapiens; identical to SEQ ID NO: 352932
  chr1:168150817-168150977
  hypo

SEQ ID NO: 375961 - DNA, 39 bp, Homo sapiens; identical to SEQ ID NO: 337229
  chr1:169096476-169096515
  hypo

SEQ ID NO: 375962 - DNA, 69 bp, Homo sapiens; identical to SEQ ID NO: 347838
  chr1:171554936-171555005
  hypo

SEQ ID NO: 375963 - DNA, 122 bp, Homo sapiens; identical to SEQ ID NO: 347839
  chr1:171555061-171555183
  hypo

SEQ ID NO: 375964 - DNA, 181 bp, Homo sapiens; identical to SEQ ID NO: 337233
  chr1:171570080-171570261
  hypo

SEQ ID NO: 375965 - DNA, 426 bp, Homo sapiens; identical to SEQ ID NO: 362588
  chr1:172357766-172358192
  hypo

SEQ ID NO: 375966 - DNA, 301 bp, Homo sapiens; identical to SEQ ID NO: 349355
  chr1:175048508-175048809
  hypo

SEQ ID NO: 375967 - DNA, 180 bp, Homo sapiens; identical to SEQ ID NO: 347840
  chr1:175372314-175372494
  hypo

SEQ ID NO: 375968 - DNA, 145 bp, Homo sapiens; identical to SEQ ID NO: 347841
  chr1:175372572-175372717
  hypo

SEQ ID NO: 375969 - DNA, 152 bp, Homo sapiens; identical to SEQ ID NO: 347842
  chr1:175375048-175375200
  hypo

SEQ ID NO: 375970 - DNA, 111 bp, Homo sapiens; identical to SEQ ID NO: 337242
  chr1:175957595-175957706
  hypo

SEQ ID NO: 375971 - DNA, 693 bp, Homo sapiens; identical to SEQ ID NO: 356940
  chr1:178062419-178063112
  hypo

SEQ ID NO: 375972 - DNA, 475 bp, Homo sapiens; identical to SEQ ID NO: 197861
  chr1:178063150-178063625
  hypo

SEQ ID NO: 375973 - DNA, 112 bp, Homo sapiens; identical to SEQ ID NO: 356942
  chr1:178063733-178063845
  hypo

SEQ ID NO: 375974 - DNA, 109 bp, Homo sapiens; identical to SEQ ID NO: 207313
  chr1:178531644-178531753
  hypo

SEQ ID NO: 375975 - DNA, 51 bp, Homo sapiens; identical to SEQ ID NO: 362598
  chr1:178531798-178531849
  hypo

SEQ ID NO: 375976 - DNA, 62 bp, Homo sapiens; identical to SEQ ID NO: 337246
  chr1:179333937-179333999
  hypo

SEQ ID NO: 375977 - DNA, 43 bp, Homo sapiens; identical to SEQ ID NO: 337247
  chr1:179835828-179835871
  hypo

SEQ ID NO: 375978 - DNA, 194 bp, Homo sapiens; identical to SEQ ID NO: 356943
  chr1:180123493-180123687
  hypo

SEQ ID NO: 375979 - DNA, 883 bp, Homo sapiens; identical to SEQ ID NO: 369332
  chr1:180123700-180124583
  hypo

SEQ ID NO: 375980 - DNA, 131 bp, Homo sapiens; identical to SEQ ID NO: 362603
  chr1:180235795-180235926
  hypo

SEQ ID NO: 375981 - DNA, 67 bp, Homo sapiens; identical to SEQ ID NO: 337250
  chr1:180478120-180478187
  hypo

SEQ ID NO: 375982 - DNA, 75 bp, Homo sapiens; identical to SEQ ID NO: 337251
  chr1:180892057-180892132
  hypo

SEQ ID NO: 375983 - DNA, 128 bp, Homo sapiens; identical to SEQ ID NO: 352945
  chr1:180919554-180919682
  hypo

SEQ ID NO: 375984 - DNA, 47 bp, Homo sapiens; identical to SEQ ID NO: 352946
  chr1:180919718-180919765
  hypo

SEQ ID NO: 375985 - DNA, 192 bp, Homo sapiens; identical to SEQ ID NO: 337254
  chr1:180945775-180945967
  hypo

SEQ ID NO: 375986 - DNA, 226 bp, Homo sapiens; identical to SEQ ID NO: 362609
  chr1:181382621-181382847
  hypo

SEQ ID NO: 375987 - DNA, 121 bp, Homo sapiens; identical to SEQ ID NO: 337256
  chr1:181765823-181765944
  hypo

SEQ ID NO: 375988 - DNA, 202 bp, Homo sapiens; identical to SEQ ID NO: 352947
  chr1:181767556-181767758
  hypo

SEQ ID NO: 375989 - DNA, 85 bp, Homo sapiens; identical to SEQ ID NO: 352948
  chr1:181767807-181767892
  hypo

SEQ ID NO: 375990 - DNA, 110 bp, Homo sapiens; identical to SEQ ID NO: 331048
  chr1:182361452-182361562
  hypo

SEQ ID NO: 375991 - DNA, 249 bp, Homo sapiens; identical to SEQ ID NO: 344982
  chr1:182583799-182584048
  hypo

SEQ ID NO: 375992 - DNA, 40 bp, Homo sapiens; identical to SEQ ID NO: 344983
  chr1:182584613-182584653
  hypo

SEQ ID NO: 375993 - DNA, 151 bp, Homo sapiens; identical to SEQ ID NO: 331054
  chr1:184722819-184722970
  hypo

SEQ ID NO: 375994 - DNA, 388 bp, Homo sapiens; identical to SEQ ID NO: 337262
  chr1:193149436-193149824
  hypo

SEQ ID NO: 375995 - DNA, 149 bp, Homo sapiens; identical to SEQ ID NO: 298115
  chr1:195732539-195732688
  hypo

SEQ ID NO: 375996 - DNA, 146 bp, Homo sapiens; identical to SEQ ID NO: 337264
  chr1:197191306-197191452
  hypo

SEQ ID NO: 375997 - DNA, 255 bp, Homo sapiens; identical to SEQ ID NO: 331068
  chr1:200379717-200379972
  hypo

SEQ ID NO: 375998 - DNA, 135 bp, Homo sapiens; identical to SEQ ID NO: 337267
  chr1:200971336-200971471
  hypo

SEQ ID NO: 375999 - DNA, 329 bp, Homo sapiens; identical to SEQ ID NO: 337268
  chr1:201194921-201195250
  hypo

SEQ ID NO: 376000 - DNA, 133 bp, Homo sapiens; identical to SEQ ID NO: 362622
  chr1:201851148-201851281
  hypo

SEQ ID NO: 376001 - DNA, 44 bp, Homo sapiens; identical to SEQ ID NO: 337271
  chr1:202009839-202009883
  hypo

SEQ ID NO: 376002 - DNA, 137 bp, Homo sapiens
  chr1:202531802-202531939
  hypo
cgaaatacttcttagaaaaggcgcaaactacccctgagcattaccttctccccactactttgttctcaaaaccaatttttatctttaatattatctcccacaggttggaatcgggaggtagtaatcctacaaccagt

SEQ ID NO: 376003 - DNA, 130 bp, Homo sapiens
  chr1:202995171-202995301
  hypo
cgacacaattcactgaagagcatactacagatgtagtatccggatatcaagtttccccacttaaaaaatgggtgcgatcaaaggaaaagcaaggaacgggcaggagagcaagcgtgaaaggtgacaaact

SEQ ID NO: 376004 - DNA, 302 bp, Homo sapiens; identical to SEQ ID NO: 337275
  chr1:203134410-203134712
  hypo

SEQ ID NO: 376005 - DNA, 72 bp, Homo sapiens; identical to SEQ ID NO: 337278
  chr1:203690606-203690678
  hypo

SEQ ID NO: 376006 - DNA, 189 bp, Homo sapiens; identical to SEQ ID NO: 337279
  chr1:204124923-204125112
  hypo

SEQ ID NO: 376007 - DNA, 156 bp, Homo sapiens; identical to SEQ ID NO: 337280
  chr1:204197190-204197346
  hypo

SEQ ID NO: 376008 - DNA, 370 bp, Homo sapiens; identical to SEQ ID NO: 337281
  chr1:204197954-204198324
  hypo

SEQ ID NO: 376009 - DNA, 154 bp, Homo sapiens; identical to SEQ ID NO: 337282
  chr1:204199556-204199710
  hypo

SEQ ID NO: 376010 - DNA, 383 bp, Homo sapiens; identical to SEQ ID NO: 337283
  chr1:204226544-204226927
  hypo

SEQ ID NO: 376011 - DNA, 277 bp, Homo sapiens; identical to SEQ ID NO: 337284
  chr1:204228369-204228646
  hypo

SEQ ID NO: 376012 - DNA, 494 bp, Homo sapiens; identical to SEQ ID NO: 331083
  chr1:204347108-204347602
  hypo

SEQ ID NO: 376013 - DNA, 279 bp, Homo sapiens; identical to SEQ ID NO: 345722
  chr1:204530924-204531203
  hypo

SEQ ID NO: 376014 - DNA, 79 bp, Homo sapiens; identical to SEQ ID NO: 345723
  chr1:204531757-204531836
  hypo

SEQ ID NO: 376015 - DNA, 137 bp, Homo sapiens; identical to SEQ ID NO: 337288
  chr1:204537877-204538014
  hypo

SEQ ID NO: 376016 - DNA, 80 bp, Homo sapiens; identical to SEQ ID NO: 337289
  chr1:204540741-204540821
  hypo

SEQ ID NO: 376017 - DNA, 75 bp, Homo sapiens; identical to SEQ ID NO: 337290
  chr1:204913459-204913534
  hypo

SEQ ID NO: 376018 - DNA, 171 bp, Homo sapiens; identical to SEQ ID NO: 337291
  chr1:204948556-204948727
  hypo

SEQ ID NO: 376019 - DNA, 315 bp, Homo sapiens; identical to SEQ ID NO: 345724
  chr1:204955352-204955667
  hypo

SEQ ID NO: 376020 - DNA, 368 bp, Homo sapiens; identical to SEQ ID NO: 337293
  chr1:205038784-205039152
  hypo

SEQ ID NO: 376021 - DNA, 225 bp, Homo sapiens; identical to SEQ ID NO: 337294
  chr1:205245793-205246018
  hypo

SEQ ID NO: 376022 - DNA, 292 bp, Homo sapiens; identical to SEQ ID NO: 337295
  chr1:205273331-205273623
  hypo

SEQ ID NO: 376023 - DNA, 483 bp, Homo sapiens; identical to SEQ ID NO: 356986
  chr1:205313006-205313489
  hypo

SEQ ID NO: 376024 - DNA, 60 bp, Homo sapiens; identical to SEQ ID NO: 197925
  chr1:205425836-205425896
  hypo

SEQ ID NO: 376025 - DNA, 455 bp, Homo sapiens; identical to SEQ ID NO: 356989
  chr1:205425997-205426452
  hypo

SEQ ID NO: 376026 - DNA, 95 bp, Homo sapiens; identical to SEQ ID NO: 337300
  chr1:205631157-205631252
  hypo

SEQ ID NO: 376027 - DNA, 817 bp, Homo sapiens; identical to SEQ ID NO: 337301
  chr1:205631783-205632600
  hypo

SEQ ID NO: 376028 - DNA, 256 bp, Homo sapiens; identical to SEQ ID NO: 337302
  chr1:207195396-207195652
  hypo

SEQ ID NO: 376029 - DNA, 213 bp, Homo sapiens; identical to SEQ ID NO: 362644
  chr1:207200605-207200818
  hypo

SEQ ID NO: 376030 - DNA, 92 bp, Homo sapiens; identical to SEQ ID NO: 337304
  chr1:207240948-207241040
  hypo

SEQ ID NO: 376031 - DNA, 112 bp, Homo sapiens; identical to SEQ ID NO: 362646
  chr1:207936524-207936636
  hypo

SEQ ID NO: 376032 - DNA, 221 bp, Homo sapiens; identical to SEQ ID NO: 337309
  chr1:212330215-212330436
  hypo

SEQ ID NO: 376033 - DNA, 168 bp, Homo sapiens; identical to SEQ ID NO: 362647
  chr1:212605105-212605273
  hypo

SEQ ID NO: 376034 - DNA, 257 bp, Homo sapiens; identical to SEQ ID NO: 356993
  chr1:212873467-212873724
  hypo

SEQ ID NO: 376035 - DNA, 224 bp, Homo sapiens; identical to SEQ ID NO: 197940
  chr1:212873750-212873974
  hypo

SEQ ID NO: 376036 - DNA, 456 bp, Homo sapiens; identical to SEQ ID NO: 337312
  chr1:213030005-213030461
  hypo

SEQ ID NO: 376037 - DNA, 279 bp, Homo sapiens; identical to SEQ ID NO: 331104
  chr1:214453844-214454123
  hypo

SEQ ID NO: 376038 - DNA, 204 bp, Homo sapiens; identical to SEQ ID NO: 352965
  chr1:214637813-214638017
  hypo

SEQ ID NO: 376039 - DNA, 34 bp, Homo sapiens; identical to SEQ ID NO: 352966
  chr1:214638090-214638124
  hypo

SEQ ID NO: 376040 - DNA, 157 bp, Homo sapiens; identical to SEQ ID NO: 337316
  chr1:214809726-214809883
  hypo

SEQ ID NO: 376041 - DNA, 592 bp, Homo sapiens; identical to SEQ ID NO: 331107
  chr1:216774207-216774799
  hypo

SEQ ID NO: 376042 - DNA, 55 bp, Homo sapiens; identical to SEQ ID NO: 344990
  chr1:219347516-219347571
  hypo

SEQ ID NO: 376043 - DNA, 91 bp, Homo sapiens; identical to SEQ ID NO: 357010
  chr1:220102055-220102146
  hypo

SEQ ID NO: 376044 - DNA, 592 bp, Homo sapiens; identical to SEQ ID NO: 357012
  chr1:220701523-220702115
  hypo

SEQ ID NO: 376045 - DNA, 198 bp, Homo sapiens; identical to SEQ ID NO: 349403
  chr1:220921368-220921566
  hypo

SEQ ID NO: 376046 - DNA, 63 bp, Homo sapiens; identical to SEQ ID NO: 337325
  chr1:224300452-224300515
  hypo

SEQ ID NO: 376047 - DNA, 234 bp, Homo sapiens; identical to SEQ ID NO: 337326
  chr1:224345162-224345396
  hypo

SEQ ID NO: 376048 - DNA, 64 bp, Homo sapiens; identical to SEQ ID NO: 337327
  chr1:224368640-224368704
  hypo

SEQ ID NO: 376049 - DNA, 99 bp, Homo sapiens; identical to SEQ ID NO: 197977
  chr1:225117651-225117750
  hypo

SEQ ID NO: 376050 - DNA, 66 bp, Homo sapiens; identical to SEQ ID NO: 346403
  chr1:225117751-225117817
  hypo

SEQ ID NO: 376051 - DNA, 380 bp, Homo sapiens; identical to SEQ ID NO: 337330
  chr1:225597858-225598238
  hypo

SEQ ID NO: 376052 - DNA, 936 bp, Homo sapiens; identical to SEQ ID NO: 331128
  chr1:225614356-225615292
  hypo

SEQ ID NO: 376053 - DNA, 84 bp, Homo sapiens; identical to SEQ ID NO: 352974
  chr1:226062794-226062878
  hypo

SEQ ID NO: 376054 - DNA, 248 bp, Homo sapiens; identical to SEQ ID NO: 362667
  chr1:226077130-226077378
  hypo

SEQ ID NO: 376055 - DNA, 135 bp, Homo sapiens; identical to SEQ ID NO: 352975
  chr1:226163215-226163350
  hypo

SEQ ID NO: 376056 - DNA, 54 bp, Homo sapiens; identical to SEQ ID NO: 337335
  chr1:226311830-226311884
  hypo

SEQ ID NO: 376057 - DNA, 294 bp, Homo sapiens; identical to SEQ ID NO: 362670
  chr1:226826337-226826631
  hypo

SEQ ID NO: 376058 - DNA, 311 bp, Homo sapiens; identical to SEQ ID NO: 337339
  chr1:226827405-226827716
  hypo

SEQ ID NO: 376059 - DNA, 358 bp, Homo sapiens
  chr1:226829392-226829750
  hypo
agctgggcagggctagaagccactctgctctgaggcctgagccccctacacagccatcccgcctgaggaataggctgatgtctccaaatgtctggccttggggcgggccacccacattctgagcctgtgcctggagaagcttacagcttccaaagggcgctgagagaagccaagccccctgaggtgggcacgggtggggcccgaggctgccctcactcgccggcctcaccttgattccctcgatcctgaaccccagggtggccgtggagctgatggtctcccgccactgcatgtaccgtggcttggtcacagcccgctgtgctttttcctcctcggtgggggcctcggggtccacctc

SEQ ID NO: 376060 - DNA, 84 bp, Homo sapiens; identical to SEQ ID NO: 362672
  chr1:226908290-226908374
  hypo

SEQ ID NO: 376061 - DNA, 1206 bp, Homo sapiens; identical to SEQ ID NO: 197984
  chr1:226925659-226926865
  hypo

SEQ ID NO: 376062 - DNA, 49 bp, Homo sapiens; identical to SEQ ID NO: 344995
  chr1:226926951-226927000
  hypo

SEQ ID NO: 376063 - DNA, 269 bp, Homo sapiens; identical to SEQ ID NO: 352979
  chr1:228081860-228082129
  hypo

SEQ ID NO: 376064 - DNA, 46 bp, Homo sapiens; identical to SEQ ID NO: 352980
  chr1:228083620-228083666
  hypo

SEQ ID NO: 376065 - DNA, 581 bp, Homo sapiens; identical to SEQ ID NO: 337346
  chr1:228109246-228109827
  hypo

SEQ ID NO: 376066 - DNA, 162 bp, Homo sapiens; identical to SEQ ID NO: 337347
  chr1:228111872-228112034
  hypo

SEQ ID NO: 376067 - DNA, 264 bp, Homo sapiens; identical to SEQ ID NO: 337348
  chr1:228112950-228113214
  hypo

SEQ ID NO: 376068 - DNA, 330 bp, Homo sapiens; identical to SEQ ID NO: 337350
  chr1:228280981-228281311
  hypo

SEQ ID NO: 376069 - DNA, 203 bp, Homo sapiens; identical to SEQ ID NO: 337351
  chr1:228361379-228361582
  hypo

SEQ ID NO: 376070 - DNA, 217 bp, Homo sapiens; identical to SEQ ID NO: 337352
  chr1:228459748-228459965
  hypo

SEQ ID NO: 376071 - DNA, 829 bp, Homo sapiens; identical to SEQ ID NO: 337353
  chr1:228461610-228462439
  hypo

SEQ ID NO: 376072 - DNA, 199 bp, Homo sapiens; identical to SEQ ID NO: 352981
  chr1:228473703-228473902
  hypo

SEQ ID NO: 376073 - DNA, 110 bp, Homo sapiens; identical to SEQ ID NO: 352982
  chr1:228473932-228474042
  hypo

SEQ ID NO: 376074 - DNA, 69 bp, Homo sapiens; identical to SEQ ID NO: 352983
  chr1:228504692-228504761
  hypo

SEQ ID NO: 376075 - DNA, 358 bp, Homo sapiens; identical to SEQ ID NO: 347857
  chr1:228528433-228528791
  hypo

SEQ ID NO: 376076 - DNA, 50 bp, Homo sapiens; identical to SEQ ID NO: 347858
  chr1:228529382-228529432
  hypo

SEQ ID NO: 376077 - DNA, 118 bp, Homo sapiens; identical to SEQ ID NO: 331141
  chr1:228646027-228646145
  hypo

SEQ ID NO: 376078 - DNA, 253 bp, Homo sapiens; identical to SEQ ID NO: 279361
  chr1:228646941-228647194
  hypo

SEQ ID NO: 376079 - DNA, 117 bp, Homo sapiens; identical to SEQ ID NO: 279362
  chr1:228647317-228647434
  hypo

SEQ ID NO: 376080 - DNA, 328 bp, Homo sapiens; identical to SEQ ID NO: 198004
  chr1:228870899-228871227
  hypo

SEQ ID NO: 376081 - DNA, 128 bp, Homo sapiens; identical to SEQ ID NO: 337363
  chr1:229038524-229038652
  hypo

SEQ ID NO: 376082 - DNA, 129 bp, Homo sapiens; identical to SEQ ID NO: 337364
  chr1:229160222-229160351
  hypo

SEQ ID NO: 376083 - DNA, 109 bp, Homo sapiens; identical to SEQ ID NO: 337365
  chr1:229606426-229606535
  hypo

SEQ ID NO: 376084 - DNA, 273 bp, Homo sapiens; identical to SEQ ID NO: 337366
  chr1:230256241-230256514
  hypo

SEQ ID NO: 376085 - DNA, 262 bp, Homo sapiens; identical to SEQ ID NO: 337367
  chr1:230266303-230266565
  hypo

SEQ ID NO: 376086 - DNA, 85 bp, Homo sapiens; identical to SEQ ID NO: 337368
  chr1:230272610-230272695
  hypo

SEQ ID NO: 376087 - DNA, 219 bp, Homo sapiens; identical to SEQ ID NO: 337369
  chr1:230308302-230308521
  hypo

SEQ ID NO: 376088 - DNA, 248 bp, Homo sapiens; identical to SEQ ID NO: 337370
  chr1:230346868-230347116
  hypo

SEQ ID NO: 376089 - DNA, 223 bp, Homo sapiens; identical to SEQ ID NO: 337371
  chr1:230379488-230379711
  hypo

SEQ ID NO: 376090 - DNA, 193 bp, Homo sapiens; identical to SEQ ID NO: 352994
  chr1:230404024-230404217
  hypo

SEQ ID NO: 376091 - DNA, 196 bp, Homo sapiens; identical to SEQ ID NO: 352995
  chr1:230404365-230404561
  hypo

SEQ ID NO: 376092 - DNA, 189 bp, Homo sapiens; identical to SEQ ID NO: 337373
  chr1:230529557-230529746
  hypo

SEQ ID NO: 376093 - DNA, 89 bp, Homo sapiens; identical to SEQ ID NO: 337374
  chr1:230821556-230821645
  hypo

SEQ ID NO: 376094 - DNA, 184 bp, Homo sapiens; identical to SEQ ID NO: 337375
  chr1:231037680-231037864
  hypo

SEQ ID NO: 376095 - DNA, 464 bp, Homo sapiens; identical to SEQ ID NO: 337376
  chr1:231038126-231038590
  hypo

SEQ ID NO: 376096 - DNA, 118 bp, Homo sapiens; identical to SEQ ID NO: 337377
  chr1:231046066-231046184
  hypo

SEQ ID NO: 376097 - DNA, 173 bp, Homo sapiens; identical to SEQ ID NO: 337378
  chr1:231122207-231122380
  hypo

SEQ ID NO: 376098 - DNA, 587 bp, Homo sapiens; identical to SEQ ID NO: 349427
  chr1:231175062-231175649
  hypo

SEQ ID NO: 376099 - DNA, 709 bp, Homo sapiens; identical to SEQ ID NO: 349428
  chr1:231175692-231176401
  hypo

SEQ ID NO: 376100 - DNA, 228 bp, Homo sapiens; identical to SEQ ID NO: 198012
  chr1:231297569-231297797
  hypo

SEQ ID NO: 376101 - DNA, 124 bp, Homo sapiens; identical to SEQ ID NO: 337381
  chr1:232104144-232104268
  hypo

SEQ ID NO: 376102 - DNA, 411 bp, Homo sapiens; identical to SEQ ID NO: 349432
  chr1:232765595-232766006
  hypo

SEQ ID NO: 376103 - DNA, 175 bp, Homo sapiens; identical to SEQ ID NO: 337383
  chr1:233085208-233085383
  hypo

SEQ ID NO: 376104 - DNA, 115 bp, Homo sapiens; identical to SEQ ID NO: 337384
  chr1:233601764-233601879
  hypo

SEQ ID NO: 376105 - DNA, 314 bp, Homo sapiens; identical to SEQ ID NO: 198020
  chr1:233749768-233750082
  hypo

SEQ ID NO: 376106 - DNA, 53 bp, Homo sapiens; identical to SEQ ID NO: 337386
  chr1:233799555-233799608
  hypo

SEQ ID NO: 376107 - DNA, 215 bp, Homo sapiens; identical to SEQ ID NO: 353002
  chr1:234724591-234724806
  hypo

SEQ ID NO: 376108 - DNA, 209 bp, Homo sapiens; identical to SEQ ID NO: 353003
  chr1:234724836-234725045
  hypo

SEQ ID NO: 376109 - DNA, 174 bp, Homo sapiens; identical to SEQ ID NO: 349435
  chr1:234736252-234736426
  hypo

SEQ ID NO: 376110 - DNA, 138 bp, Homo sapiens; identical to SEQ ID NO: 347862
  chr1:234795508-234795646
  hypo

SEQ ID NO: 376111 - DNA, 324 bp, Homo sapiens; identical to SEQ ID NO: 207594
  chr1:234845143-234845467
  hypo

SEQ ID NO: 376112 - DNA, 104 bp, Homo sapiens; identical to SEQ ID NO: 337392
  chr1:234868862-234868966
  hypo

SEQ ID NO: 376113 - DNA, 114 bp, Homo sapiens
  chr1:234881099-234881213
  hypo
cgcgtattgtattcctgttgtatattgtacatgtaatgcatgctagctgccatttagaatggaaaagcatgccctcaccacagtcaggcccacattttgctttccgtgttaaag

SEQ ID NO: 376114 - DNA, 184 bp, Homo sapiens; identical to SEQ ID NO: 279411
  chr1:235813161-235813345
  hypo

SEQ ID NO: 376115 - DNA, 32 bp, Homo sapiens; identical to SEQ ID NO: 353007
  chr1:235872558-235872590
  hypo

SEQ ID NO: 376116 - DNA, 134 bp, Homo sapiens; identical to SEQ ID NO: 337399
  chr1:235955204-235955338
  hypo

SEQ ID NO: 376117 - DNA, 499 bp, Homo sapiens; identical to SEQ ID NO: 337400
  chr1:236156658-236157157
  hypo

SEQ ID NO: 376118 - DNA, 71 bp, Homo sapiens; identical to SEQ ID NO: 337401
  chr1:236187380-236187451
  hypo

SEQ ID NO: 376119 - DNA, 145 bp, Homo sapiens; identical to SEQ ID NO: 337402
  chr1:236274591-236274736
  hypo

SEQ ID NO: 376120 - DNA, 694 bp, Homo sapiens; identical to SEQ ID NO: 331162
  chr1:236444211-236444905
  hypo

SEQ ID NO: 376121 - DNA, 98 bp, Homo sapiens; identical to SEQ ID NO: 349438
  chr1:236850212-236850310
  hypo

SEQ ID NO: 376122 - DNA, 128 bp, Homo sapiens; identical to SEQ ID NO: 337406
  chr1:237052581-237052709
  hypo

SEQ ID NO: 376123 - DNA, 36 bp, Homo sapiens; identical to SEQ ID NO: 198032
  chr1:237205188-237205224
  hypo

SEQ ID NO: 376124 - DNA, 116 bp, Homo sapiens; identical to SEQ ID NO: 362723
  chr1:241051980-241052096
  hypo

SEQ ID NO: 376125 - DNA, 50 bp, Homo sapiens; identical to SEQ ID NO: 198037
  chr1:241520533-241520583
  hypo

SEQ ID NO: 376126 - DNA, 147 bp, Homo sapiens; identical to SEQ ID NO: 198038
  chr1:241520612-241520759
  hypo

SEQ ID NO: 376127 - DNA, 91 bp, Homo sapiens; identical to SEQ ID NO: 349442
  chr1:241520789-241520880
  hypo

SEQ ID NO: 376128 - DNA, 120 bp, Homo sapiens; identical to SEQ ID NO: 337413
  chr1:243479828-243479948
  hypo

SEQ ID NO: 376129 - DNA, 650 bp, Homo sapiens; identical to SEQ ID NO: 337414
  chr1:243637544-243638194
  hypo

SEQ ID NO: 376130 - DNA, 307 bp, Homo sapiens; identical to SEQ ID NO: 337415
  chr1:243652455-243652762
  hypo

SEQ ID NO: 376131 - DNA, 836 bp, Homo sapiens; identical to SEQ ID NO: 331173
  chr1:244012299-244013135
  hypo

SEQ ID NO: 376132 - DNA, 168 bp, Homo sapiens; identical to SEQ ID NO: 279435
  chr1:244080795-244080963
  hypo

SEQ ID NO: 376133 - DNA, 45 bp, Homo sapiens; identical to SEQ ID NO: 337419
  chr1:244815271-244815316
  hypo

SEQ ID NO: 376134 - DNA, 46 bp, Homo sapiens
  chr1:244857971-244858017
  hypo
cgtgtgcgtcttattgcgacgctttccaaacgatgatgttgccttc

SEQ ID NO: 376135 - DNA, 317 bp, Homo sapiens; identical to SEQ ID NO: 207644
  chr1:245032200-245032517
  hypo

SEQ ID NO: 376136 - DNA, 69 bp, Homo sapiens; identical to SEQ ID NO: 347864
  chr1:245032603-245032672
  hypo

SEQ ID NO: 376137 - DNA, 253 bp, Homo sapiens; identical to SEQ ID NO: 353018
  chr1:245254446-245254699
  hypo

SEQ ID NO: 376138 - DNA, 31 bp, Homo sapiens; identical to SEQ ID NO: 362734
  chr1:245281788-245281819
  hypo

SEQ ID NO: 376139 - DNA, 442 bp, Homo sapiens; identical to SEQ ID NO: 353019
  chr1:245499151-245499593
  hypo

SEQ ID NO: 376140 - DNA, 129 bp, Homo sapiens; identical to SEQ ID NO: 353020
  chr1:245499775-245499904
  hypo

SEQ ID NO: 376141 - DNA, 365 bp, Homo sapiens; identical to SEQ ID NO: 337425
  chr1:245530148-245530513
  hypo

SEQ ID NO: 376142 - DNA, 587 bp, Homo sapiens; identical to SEQ ID NO: 362738
  chr1:245848539-245849126
  hypo

SEQ ID NO: 376143 - DNA, 202 bp, Homo sapiens; identical to SEQ ID NO: 337428
  chr1:245855725-245855927
  hypo

SEQ ID NO: 376144 - DNA, 531 bp, Homo sapiens; identical to SEQ ID NO: 337429
  chr1:245925703-245926234
  hypo

SEQ ID NO: 376145 - DNA, 81 bp, Homo sapiens
  chr1:245986537-245986618
  hypo
cgattgcaaaatccatttctccttctctgtccctgcttctctgcccttcccccaagctttcttgctctctgccacacgtgc

SEQ ID NO: 376146 - DNA, 105 bp, Homo sapiens; identical to SEQ ID NO: 337431
  chr1:246160284-246160389
  hypo

SEQ ID NO: 376147 - DNA, 216 bp, Homo sapiens
  chr1:246310269-246310485
  hypo
cgttttcttgttaatcggcaggcaggcgtgacagtgttcggcagaggacaatctgttcgagaataattagattccccctcgcttcttgcgttggtggcggaagcacccggagtatttacaatacaccattttgcttccatccgagtccatatgttcgctggtcaggttaaaactgaggctgcatggcacatttttcactgtaaacaacgctgcccc

SEQ ID NO: 376148 - DNA, 764 bp, Homo sapiens
  chr1:246310723-246311487
  hypo
cgtgaatcaggacgtgctcggtggttgtaattccatctattgatggcagctgctgctgcaacagggaggccggctagggctgcacactccatggaggcggtgggagcctcacccattctgggttggggcaggggctccgtgggtgccactgcagccacccaaatcgtggctgcagaccaggcttcctgctctatggagcaggcaggcgccccgccttcctgggtggggctacagctgcccaaactgatgctggagatcggagcttccctgtgctcttggtgggggccgggagcagacaggatctgccctccagggtagagctgcagcctccctgctgcggctgcagacctgggcttcgcgctcaatcgagcaggcaggagccagggacaagagggagccccacctttactgagttggtggagcgtgaactccgcaggtgcagacctggcatctctgcagcctgcaccctggagggcccgggaagacccgccccccacttcatccctgcaggctcgggggtgtctgctcccgcttcccagcccctctcctctccagatgcctgctctgatctccgaccggggttggggccgagcccggggcagcaggaggcagagagattcctgggtggaaggcggcagtccccgtaaggcccctccttcagaccagggagggcctgaaggctgggggccaggatgccagtccgggaccggagtggggacttgtggtgcctcgtctgggtgcacatggaggaccatgggccaatc

SEQ ID NO: 376149 - DNA, 186 bp, Homo sapiens; identical to SEQ ID NO: 337434
  chr1:246324319-246324505
  hypo

SEQ ID NO: 376150 - DNA, 95 bp, Homo sapiens; identical to SEQ ID NO: 337435
  chr1:246324810-246324905
  hypo

SEQ ID NO: 376151 - DNA, 96 bp, Homo sapiens; identical to SEQ ID NO: 362742
  chr1:246330213-246330309
  hypo

SEQ ID NO: 376152 - DNA, 88 bp, Homo sapiens; identical to SEQ ID NO: 337437
  chr1:246655176-246655264
  hypo

SEQ ID NO: 376153 - DNA, 298 bp, Homo sapiens; identical to SEQ ID NO: 337438
  chr1:246930862-246931160
  hypo

SEQ ID NO: 376154 - DNA, 87 bp, Homo sapiens; identical to SEQ ID NO: 337439
  chr1:246931791-246931878
  hypo

SEQ ID NO: 376155 - DNA, 137 bp, Homo sapiens; identical to SEQ ID NO: 349444
  chr1:247170868-247171005
  hypo

SEQ ID NO: 376156 - DNA, 209 bp, Homo sapiens; identical to SEQ ID NO: 337441
  chr1:247348636-247348845
  hypo

SEQ ID NO: 376157 - DNA, 225 bp, Homo sapiens; identical to SEQ ID NO: 337442
  chr1:247542074-247542299
  hypo

SEQ ID NO: 376158 - DNA, 248 bp, Homo sapiens; identical to SEQ ID NO: 337443
  chr1:247614695-247614943
  hypo

SEQ ID NO: 376159 - DNA, 124 bp, Homo sapiens; identical to SEQ ID NO: 353025
  chr1:248074927-248075051
  hypo

SEQ ID NO: 376160 - DNA, 331 bp, Homo sapiens; identical to SEQ ID NO: 347865
  chr1:248099374-248099705
  hypo

SEQ ID NO: 376161 - DNA, 46 bp, Homo sapiens; identical to SEQ ID NO: 362749
  chr1:248328627-248328673
  hypo

SEQ ID NO: 376162 - DNA, 399 bp, Homo sapiens; identical to SEQ ID NO: 337449
  chr1:248469372-248469771
  hypo

SEQ ID NO: 376163 - DNA, 259 bp, Homo sapiens; identical to SEQ ID NO: 369479
  chr2:264204-264463
  hypo

SEQ ID NO: 376164 - DNA, 97 bp, Homo sapiens; identical to SEQ ID NO: 337452
  chr2:272137-272234
  hypo

SEQ ID NO: 376165 - DNA, 130 bp, Homo sapiens; identical to SEQ ID NO: 353027
  chr2:314855-314985
  hypo

SEQ ID NO: 376166 - DNA, 189 bp, Homo sapiens; identical to SEQ ID NO: 353028
  chr2:315015-315204
  hypo

SEQ ID NO: 376167 - DNA, 248 bp, Homo sapiens; identical to SEQ ID NO: 337455
  chr2:318873-319121
  hypo

SEQ ID NO: 376168 - DNA, 425 bp, Homo sapiens; identical to SEQ ID NO: 337456
  chr2:319186-319611
  hypo

SEQ ID NO: 376169 - DNA, 295 bp, Homo sapiens; identical to SEQ ID NO: 337457
  chr2:364121-364416
  hypo

SEQ ID NO: 376170 - DNA, 184 bp, Homo sapiens; identical to SEQ ID NO: 353030
  chr2:502892-503076
  hypo

SEQ ID NO: 376171 - DNA, 96 bp, Homo sapiens; identical to SEQ ID NO: 353031
  chr2:503145-503241
  hypo

SEQ ID NO: 376172 - DNA, 352 bp, Homo sapiens; identical to SEQ ID NO: 337459
  chr2:582796-583148
  hypo

SEQ ID NO: 376173 - DNA, 161 bp, Homo sapiens; identical to SEQ ID NO: 337460
  chr2:817641-817802
  hypo

SEQ ID NO: 376174 - DNA, 70 bp, Homo sapiens; identical to SEQ ID NO: 353032
  chr2:875867-875937
  hypo

SEQ ID NO: 376175 - DNA, 147 bp, Homo sapiens; identical to SEQ ID NO: 337463
  chr2:1282750-1282897
  hypo

SEQ ID NO: 376176 - DNA, 291 bp, Homo sapiens; identical to SEQ ID NO: 337464
  chr2:1482094-1482385
  hypo

SEQ ID NO: 376177 - DNA, 230 bp, Homo sapiens; identical to SEQ ID NO: 337465
  chr2:1488408-1488638
  hypo

SEQ ID NO: 376178 - DNA, 91 bp, Homo sapiens; identical to SEQ ID NO: 337466
  chr2:1520228-1520319
  hypo

SEQ ID NO: 376179 - DNA, 237 bp, Homo sapiens; identical to SEQ ID NO: 337467
  chr2:1543326-1543563
  hypo

SEQ ID NO: 376180 - DNA, 238 bp, Homo sapiens; identical to SEQ ID NO: 337468
  chr2:1647077-1647315
  hypo

SEQ ID NO: 376181 - DNA, 237 bp, Homo sapiens; identical to SEQ ID NO: 362767
  chr2:1651995-1652232
  hypo

SEQ ID NO: 376182 - DNA, 122 bp, Homo sapiens; identical to SEQ ID NO: 347867
  chr2:1688962-1689084
  hypo

SEQ ID NO: 376183 - DNA, 86 bp, Homo sapiens; identical to SEQ ID NO: 347868
  chr2:1689123-1689209
  hypo

SEQ ID NO: 376184 - DNA, 211 bp, Homo sapiens; identical to SEQ ID NO: 337471
  chr2:1709564-1709775
  hypo

SEQ ID NO: 376185 - DNA, 279 bp, Homo sapiens; identical to SEQ ID NO: 337473
  chr2:1771840-1772119
  hypo

SEQ ID NO: 376186 - DNA, 559 bp, Homo sapiens; identical to SEQ ID NO: 337474
  chr2:1846385-1846944
  hypo

SEQ ID NO: 376187 - DNA, 605 bp, Homo sapiens; identical to SEQ ID NO: 362772
  chr2:1863600-1864205
  hypo

SEQ ID NO: 376188 - DNA, 444 bp, Homo sapiens; identical to SEQ ID NO: 337476
  chr2:1895697-1896141
  hypo

SEQ ID NO: 376189 - DNA, 441 bp, Homo sapiens
  chr2:1940969-1941410
  hypo
cgactcccctgacccccacatcgactctgcctcagggcggcctccatgccttgcccagagcagctgcagccatcatttcgcacatcaagaagttcctaacgtccgcggccatcagatcgcacatcaagaaggtcctaatgtctgcagccatcagatcgcacagcgagaaggccctaatgtccgcggccatcagatcgcacagcgagaaagccctaacgtctgcggccatcagatcgtacatcgagaaggccctaacgtccgcagccatcagatcgtacgtcgagaaggccctaacgtccgcggccatcagattgcacatcgagaaggccctaatgtccgcagccatcagatcgcacagtgagaaggccctaatgtccacagccatcagatcgcaagtcgagaaggccctaatgtccacagccatcagatcgcacactgaga

SEQ ID NO: 376190 - DNA, 107 bp, Homo sapiens
  chr2:1941452-1941559
  hypo
ccctaatgtccacagccatcagatcacaagtcgagaaggccctaacgtccacagccatcagatggcaagtcgagaaggccctaatgtccgcggccatcagatcgcac

SEQ ID NO: 376191 - DNA, 617 bp, Homo sapiens; identical to SEQ ID NO: 353040
  chr2:2189479-2190096
  hypo

SEQ ID NO: 376192 - DNA, 33 bp, Homo sapiens; identical to SEQ ID NO: 353041
  chr2:2190245-2190278
  hypo

SEQ ID NO: 376193 - DNA, 116 bp, Homo sapiens; identical to SEQ ID NO: 353042
  chr2:2193566-2193682
  hypo

SEQ ID NO: 376194 - DNA, 321 bp, Homo sapiens; identical to SEQ ID NO: 353043
  chr2:2575361-2575682
  hypo

SEQ ID NO: 376195 - DNA, 57 bp, Homo sapiens; identical to SEQ ID NO: 353044
  chr2:2575769-2575826
  hypo

SEQ ID NO: 376196 - DNA, 41 bp, Homo sapiens; identical to SEQ ID NO: 362779
  chr2:2673043-2673084
  hypo

SEQ ID NO: 376197 - DNA, 205 bp, Homo sapiens; identical to SEQ ID NO: 362780
  chr2:2673114-2673319
  hypo

SEQ ID NO: 376198 - DNA, 176 bp, Homo sapiens; identical to SEQ ID NO: 337482
  chr2:2696901-2697077
  hypo

SEQ ID NO: 376199 - DNA, 110 bp, Homo sapiens; identical to SEQ ID NO: 337483
  chr2:2705311-2705421
  hypo

SEQ ID NO: 376200 - DNA, 249 bp, Homo sapiens; identical to SEQ ID NO: 337484
  chr2:2737154-2737403
  hypo

SEQ ID NO: 376201 - DNA, 228 bp, Homo sapiens; identical to SEQ ID NO: 337485
  chr2:2769802-2770030
  hypo

SEQ ID NO: 376202 - DNA, 442 bp, Homo sapiens
  chr2:2797217-2797659
  hypo
cggcaccacctcctgcctgcaaaaccatgacagccctcggacagctcccagctccagcatctcctccctcagtcccgctgtgtcactgccactcatccagagtgcaaatctgatcaccgctcgctttaaacactcttcagtaacttcccattttctttcataaatacggcagattcccagccaggctcaccgtggaagccccctggctttgcgcctctccccggcttgaaggcctcggttcttgtcactaggaccaactcctggccgctcactgaagcacacctcatacacagccatccccgtgatcggcagattttgttcctacgaatctacctacttgctaaaatccacttgtagcctccacatgaggtgcacttgcagccatctgtggacgcgaacagagcaggattaatacttgagtcgcccgaggcacagtttctgc

SEQ ID NO: 376203 - DNA, 97 bp, Homo sapiens; identical to SEQ ID NO: 353045
  chr2:2854244-2854341
  hypo

SEQ ID NO: 376204 - DNA, 160 bp, Homo sapiens; identical to SEQ ID NO: 353046
  chr2:2854463-2854623
  hypo

SEQ ID NO: 376205 - DNA, 392 bp, Homo sapiens; identical to SEQ ID NO: 337488
  chr2:2893376-2893768
  hypo

SEQ ID NO: 376206 - DNA, 94 bp, Homo sapiens; identical to SEQ ID NO: 353047
  chr2:3294552-3294646
  hypo

SEQ ID NO: 376207 - DNA, 163 bp, Homo sapiens; identical to SEQ ID NO: 337490
  chr2:3321063-3321226
  hypo

SEQ ID NO: 376208 - DNA, 42 bp, Homo sapiens; identical to SEQ ID NO: 337491
  chr2:3349551-3349593
  hypo

SEQ ID NO: 376209 - DNA, 204 bp, Homo sapiens
  chr2:3352473-3352677
  hypo
cgatgcaggtaccgggcattttccagggaatcaacgactgaaaggagcgaggacctgaggcaacaccaggagctattaacccttcccagccaccactccccaggagagctggagctccagagtgagggatggcggcttccgactgtgcaggaggagaccagactccgttgtcacagaaggcaggggcagggctgcagtccacag

SEQ ID NO: 376210 - DNA, 293 bp, Homo sapiens
  chr2:3352710-3353003
  hypo
gtgcacatgcgcacaggcgggctgctcgcagccggaaccatggggcccaggctgttcaggatggagctgtcctgattttcaggacatctcaccccagagacacggcatggcaacagcacgggtgcaccctttccacgtgtgtctgtacaaaagtgtacacttcaggtgcaagagcatacccatggcacatgcctcagagctgaactgcaaattcaaaggagagggaagcgagcagagagaggcagacatgcaggtttcagtcccgattctgccacgcaccagctccacactgc

SEQ ID NO: 376211 - DNA, 93 bp, Homo sapiens; identical to SEQ ID NO: 337493
  chr2:3372645-3372738
  hypo

SEQ ID NO: 376212 - DNA, 488 bp, Homo sapiens; identical to SEQ ID NO: 345732
  chr2:3418350-3418838
  hypo

SEQ ID NO: 376213 - DNA, 289 bp, Homo sapiens; identical to SEQ ID NO: 337495
  chr2:3469110-3469399
  hypo

SEQ ID NO: 376214 - DNA, 314 bp, Homo sapiens; identical to SEQ ID NO: 337496
  chr2:3582036-3582350
  hypo

SEQ ID NO: 376215 - DNA, 270 bp, Homo sapiens; identical to SEQ ID NO: 357079
  chr2:7005163-7005433
  hypo

SEQ ID NO: 376216 - DNA, 728 bp, Homo sapiens; identical to SEQ ID NO: 349448
  chr2:7005469-7006197
  hypo

SEQ ID NO: 376217 - DNA, 291 bp, Homo sapiens; identical to SEQ ID NO: 344998
  chr2:7057762-7058053
  hypo

SEQ ID NO: 376218 - DNA, 41 bp, Homo sapiens; identical to SEQ ID NO: 344999
  chr2:7058391-7058432
  hypo

SEQ ID NO: 376219 - DNA, 247 bp, Homo sapiens; identical to SEQ ID NO: 337500
  chr2:7073094-7073341
  hypo

SEQ ID NO: 376220 - DNA, 154 bp, Homo sapiens; identical to SEQ ID NO: 337503
  chr2:7907371-7907525
  hypo

SEQ ID NO: 376221 - DNA, 84 bp, Homo sapiens; identical to SEQ ID NO: 337504
  chr2:8647920-8648004
  hypo

SEQ ID NO: 376222 - DNA, 97 bp, Homo sapiens; identical to SEQ ID NO: 362800
  chr2:8658450-8658547
  hypo

SEQ ID NO: 376223 - DNA, 174 bp, Homo sapiens
  chr2:8713195-8713369
  hypo
cgcctagatgccaacgtcgggttctaccgctgactagctgcgtcttggccatgttatttcacttctttgtgcctcagtttcctcactggtaaaatggaaagaacaagaagaataatgtctacattatgagagcgttatgccatttcagtgaggtgatacttgtgccagctccgc

SEQ ID NO: 376224 - DNA, 100 bp, Homo sapiens; identical to SEQ ID NO: 353056
  chr2:8736064-8736164
  hypo

SEQ ID NO: 376225 - DNA, 254 bp, Homo sapiens; identical to SEQ ID NO: 362802
  chr2:8834468-8834722
  hypo

SEQ ID NO: 376226 - DNA, 121 bp, Homo sapiens; identical to SEQ ID NO: 362803
  chr2:8834896-8835017
  hypo

SEQ ID NO: 376227 - DNA, 210 bp, Homo sapiens; identical to SEQ ID NO: 337511
  chr2:8860527-8860737
  hypo

SEQ ID NO: 376228 - DNA, 46 bp, Homo sapiens; identical to SEQ ID NO: 337512
  chr2:8868792-8868838
  hypo

SEQ ID NO: 376229 - DNA, 146 bp, Homo sapiens; identical to SEQ ID NO: 345735
  chr2:8870193-8870339
  hypo

SEQ ID NO: 376230 - DNA, 57 bp, Homo sapiens; identical to SEQ ID NO: 207777
  chr2:8978298-8978355
  hypo

SEQ ID NO: 376231 - DNA, 348 bp, Homo sapiens; identical to SEQ ID NO: 337515
  chr2:9078588-9078936
  hypo

SEQ ID NO: 376232 - DNA, 90 bp, Homo sapiens; identical to SEQ ID NO: 337516
  chr2:9135660-9135750
  hypo

SEQ ID NO: 376233 - DNA, 211 bp, Homo sapiens; identical to SEQ ID NO: 369488
  chr2:9143655-9143866
  hypo

SEQ ID NO: 376234 - DNA, 783 bp, Homo sapiens; identical to SEQ ID NO: 353062
  chr2:9236530-9237313
  hypo

SEQ ID NO: 376235 - DNA, 234 bp, Homo sapiens; identical to SEQ ID NO: 337519
  chr2:9245045-9245279
  hypo

SEQ ID NO: 376236 - DNA, 221 bp, Homo sapiens; identical to SEQ ID NO: 362812
  chr2:9481652-9481873
  hypo

SEQ ID NO: 376237 - DNA, 372 bp, Homo sapiens; identical to SEQ ID NO: 337522
  chr2:9609477-9609849
  hypo

SEQ ID NO: 376238 - DNA, 201 bp, Homo sapiens; identical to SEQ ID NO: 337523
  chr2:9720456-9720657
  hypo

SEQ ID NO: 376239 - DNA, 123 bp, Homo sapiens; identical to SEQ ID NO: 337524
  chr2:10047588-10047711
  hypo

SEQ ID NO: 376240 - DNA, 300 bp, Homo sapiens; identical to SEQ ID NO: 207797
  chr2:10150735-10151035
  hypo

SEQ ID NO: 376241 - DNA, 166 bp, Homo sapiens; identical to SEQ ID NO: 331200
  chr2:10152421-10152587
  hypo

SEQ ID NO: 376242 - DNA, 90 bp, Homo sapiens; identical to SEQ ID NO: 353068
  chr2:10152958-10153048
  hypo

SEQ ID NO: 376243 - DNA, 326 bp, Homo sapiens; identical to SEQ ID NO: 353069
  chr2:10153562-10153888
  hypo

SEQ ID NO: 376244 - DNA, 89 bp, Homo sapiens; identical to SEQ ID NO: 207804
  chr2:10155175-10155264
  hypo

SEQ ID NO: 376245 - DNA, 166 bp, Homo sapiens; identical to SEQ ID NO: 337532
  chr2:10155780-10155946
  hypo

SEQ ID NO: 376246 - DNA, 58 bp, Homo sapiens; identical to SEQ ID NO: 207806
  chr2:10156255-10156313
  hypo

SEQ ID NO: 376247 - DNA, 201 bp, Homo sapiens; identical to SEQ ID NO: 357084
  chr2:10183602-10183803
  hypo

SEQ ID NO: 376248 - DNA, 439 bp, Homo sapiens; identical to SEQ ID NO: 357085
  chr2:10183814-10184253
  hypo

SEQ ID NO: 376249 - DNA, 158 bp, Homo sapiens; identical to SEQ ID NO: 362825
  chr2:10306915-10307073
  hypo

SEQ ID NO: 376250 - DNA, 126 bp, Homo sapiens; identical to SEQ ID NO: 337536
  chr2:10328941-10329067
  hypo

SEQ ID NO: 376251 - DNA, 614 bp, Homo sapiens; identical to SEQ ID NO: 337537
  chr2:10334473-10335087
  hypo

SEQ ID NO: 376252 - DNA, 510 bp, Homo sapiens; identical to SEQ ID NO: 337539
  chr2:10512203-10512713
  hypo

SEQ ID NO: 376253 - DNA, 203 bp, Homo sapiens; identical to SEQ ID NO: 337540
  chr2:10517952-10518155
  hypo

SEQ ID NO: 376254 - DNA, 473 bp, Homo sapiens; identical to SEQ ID NO: 337541
  chr2:10566948-10567421
  hypo

SEQ ID NO: 376255 - DNA, 80 bp, Homo sapiens; identical to SEQ ID NO: 337542
  chr2:10580386-10580466
  hypo

SEQ ID NO: 376256 - DNA, 213 bp, Homo sapiens; identical to SEQ ID NO: 331202
  chr2:10587836-10588049
  hypo

SEQ ID NO: 376257 - DNA, 178 bp, Homo sapiens; identical to SEQ ID NO: 345000
  chr2:10588876-10589054
  hypo

SEQ ID NO: 376258 - DNA, 117 bp, Homo sapiens; identical to SEQ ID NO: 198078
  chr2:10589055-10589172
  hypo

SEQ ID NO: 376259 - DNA, 55 bp, Homo sapiens; identical to SEQ ID NO: 347881
  chr2:10600813-10600868
  hypo

SEQ ID NO: 376260 - DNA, 291 bp, Homo sapiens; identical to SEQ ID NO: 337546
  chr2:10666473-10666764
  hypo

SEQ ID NO: 376261 - DNA, 200 bp, Homo sapiens; identical to SEQ ID NO: 353077
  chr2:10742503-10742703
  hypo

SEQ ID NO: 376262 - DNA, 409 bp, Homo sapiens; identical to SEQ ID NO: 369496
  chr2:10862101-10862510
  hypo

SEQ ID NO: 376263 - DNA, 270 bp, Homo sapiens; identical to SEQ ID NO: 337550
  chr2:11965015-11965285
  hypo

SEQ ID NO: 376264 - DNA, 184 bp, Homo sapiens; identical to SEQ ID NO: 357094
  chr2:12857960-12858144
  hypo

SEQ ID NO: 376265 - DNA, 255 bp, Homo sapiens; identical to SEQ ID NO: 198088
  chr2:14774684-14774939
  hypo

SEQ ID NO: 376266 - DNA, 426 bp, Homo sapiens; identical to SEQ ID NO: 337553
  chr2:15307089-15307515
  hypo

SEQ ID NO: 376267 - DNA, 101 bp, Homo sapiens; identical to SEQ ID NO: 353080
  chr2:15783084-15783185
  hypo

SEQ ID NO: 376268 - DNA, 431 bp, Homo sapiens; identical to SEQ ID NO: 337556
  chr2:16124561-16124992
  hypo

SEQ ID NO: 376269 - DNA, 93 bp, Homo sapiens; identical to SEQ ID NO: 362840
  chr2:20456228-20456321
  hypo

SEQ ID NO: 376270 - DNA, 235 bp, Homo sapiens; identical to SEQ ID NO: 337559
  chr2:20574714-20574949
  hypo

SEQ ID NO: 376271 - DNA, 387 bp, Homo sapiens; identical to SEQ ID NO: 357118
  chr2:20646879-20647266
  hypo

SEQ ID NO: 376272 - DNA, 285 bp, Homo sapiens
  chr2:23547040-23547325
  hypo
gcaaacacgcggagtgccagatctcccaacacaaacatggtcccaagcctggcgcacctggattgggcttgggatttttaagccaacaaatggggtgggagacagggaaagagagggccgggaagaaaaaccacaggctcccagaatccaaaggaaagtggcatcctcacccgatgagcagggtctggcacagggctgagcacatgacagccagtaagtctctgctgaaggatgcctgaaatctgcgcggttctaccaccgaaactaatcccgactatgtctccc

SEQ ID NO: 376273 - DNA, 314 bp, Homo sapiens; identical to SEQ ID NO: 337564
  chr2:23785024-23785338
  hypo

SEQ ID NO: 376274 - DNA, 308 bp, Homo sapiens; identical to SEQ ID NO: 362843
  chr2:24584022-24584330
  hypo

SEQ ID NO: 376275 - DNA, 243 bp, Homo sapiens; identical to SEQ ID NO: 357127
  chr2:24714924-24715167
  hypo

SEQ ID NO: 376276 - DNA, 496 bp, Homo sapiens; identical to SEQ ID NO: 362845
  chr2:25044264-25044760
  hypo

SEQ ID NO: 376277 - DNA, 185 bp, Homo sapiens; identical to SEQ ID NO: 337568
  chr2:25047277-25047462
  hypo

SEQ ID NO: 376278 - DNA, 252 bp, Homo sapiens; identical to SEQ ID NO: 337569
  chr2:25075413-25075665
  hypo

SEQ ID NO: 376279 - DNA, 93 bp, Homo sapiens; identical to SEQ ID NO: 331235
  chr2:25464444-25464537
  hypo

SEQ ID NO: 376280 - DNA, 101 bp, Homo sapiens; identical to SEQ ID NO: 337573
  chr2:25623195-25623296
  hypo

SEQ ID NO: 376281 - DNA, 116 bp, Homo sapiens; identical to SEQ ID NO: 337575
  chr2:26524687-26524803
  hypo

SEQ ID NO: 376282 - DNA, 35 bp, Homo sapiens; identical to SEQ ID NO: 337576
  chr2:26688538-26688573
  hypo

SEQ ID NO: 376283 - DNA, 446 bp, Homo sapiens; identical to SEQ ID NO: 337577
  chr2:26986225-26986671
  hypo

SEQ ID NO: 376284 - DNA, 99 bp, Homo sapiens; identical to SEQ ID NO: 337578
  chr2:27007597-27007696
  hypo

SEQ ID NO: 376285 - DNA, 206 bp, Homo sapiens; identical to SEQ ID NO: 337580
  chr2:27303557-27303763
  hypo

SEQ ID NO: 376286 - DNA, 250 bp, Homo sapiens; identical to SEQ ID NO: 198140
  chr2:27308893-27309143
  hypo

SEQ ID NO: 376287 - DNA, 111 bp, Homo sapiens; identical to SEQ ID NO: 1396
  chr2:27309206-27309317
  hypo

SEQ ID NO: 376288 - DNA, 115 bp, Homo sapiens; identical to SEQ ID NO: 345738
  chr2:27433190-27433305
  hypo

SEQ ID NO: 376289 - DNA, 229 bp, Homo sapiens; identical to SEQ ID NO: 362857
  chr2:27668586-27668815
  hypo

SEQ ID NO: 376290 - DNA, 58 bp, Homo sapiens; identical to SEQ ID NO: 346425
  chr2:27938267-27938325
  hypo

SEQ ID NO: 376291 - DNA, 225 bp, Homo sapiens; identical to SEQ ID NO: 337586
  chr2:28065720-28065945
  hypo

SEQ ID NO: 376292 - DNA, 51 bp, Homo sapiens; identical to SEQ ID NO: 349481
  chr2:29033285-29033336
  hypo

SEQ ID NO: 376293 - DNA, 37 bp, Homo sapiens; identical to SEQ ID NO: 345005
  chr2:30453530-30453567
  hypo

SEQ ID NO: 376294 - DNA, 68 bp, Homo sapiens; identical to SEQ ID NO: 198154
  chr2:31361021-31361089
  hypo

SEQ ID NO: 376295 - DNA, 178 bp, Homo sapiens; identical to SEQ ID NO: 198155
  chr2:31361118-31361296
  hypo

SEQ ID NO: 376296 - DNA, 70 bp, Homo sapiens; identical to SEQ ID NO: 346429
  chr2:31361690-31361760
  hypo

SEQ ID NO: 376297 - DNA, 75 bp, Homo sapiens; identical to SEQ ID NO: 337592
  chr2:31550134-31550209
  hypo

SEQ ID NO: 376298 - DNA, 34 bp, Homo sapiens; identical to SEQ ID NO: 337593
  chr2:32367753-32367787
  hypo

SEQ ID NO: 376299 - DNA, 284 bp, Homo sapiens; identical to SEQ ID NO: 337594
  chr2:37035304-37035588
  hypo

SEQ ID NO: 376300 - DNA, 125 bp, Homo sapiens; identical to SEQ ID NO: 337595
  chr2:37287740-37287865
  hypo

SEQ ID NO: 376301 - DNA, 702 bp, Homo sapiens; identical to SEQ ID NO: 357151
  chr2:37899247-37899949
  hypo

SEQ ID NO: 376302 - DNA, 204 bp, Homo sapiens; identical to SEQ ID NO: 353097
  chr2:38742658-38742862
  hypo

SEQ ID NO: 376303 - DNA, 228 bp, Homo sapiens; identical to SEQ ID NO: 362870
  chr2:38762412-38762640
  hypo

SEQ ID NO: 376304 - DNA, 226 bp, Homo sapiens; identical to SEQ ID NO: 345742
  chr2:39186687-39186913
  hypo

SEQ ID NO: 376305 - DNA, 39 bp, Homo sapiens
  chr2:39188224-39188263
  hypo
cgtttctatgttgagaatatggaacacggtgcgccagcc

SEQ ID NO: 376306 - DNA, 199 bp, Homo sapiens; identical to SEQ ID NO: 331262
  chr2:39663585-39663784
  hypo

SEQ ID NO: 376307 - DNA, 250 bp, Homo sapiens; identical to SEQ ID NO: 337602
  chr2:39944194-39944444
  hypo

SEQ ID NO: 376308 - DNA, 1085 bp, Homo sapiens; identical to SEQ ID NO: 279692
  chr2:42274691-42275776
  hypo

SEQ ID NO: 376309 - DNA, 281 bp, Homo sapiens; identical to SEQ ID NO: 357157
  chr2:42721246-42721527
  hypo

SEQ ID NO: 376310 - DNA, 395 bp, Homo sapiens; identical to SEQ ID NO: 345010
  chr2:43452443-43452838
  hypo

SEQ ID NO: 376311 - DNA, 84 bp, Homo sapiens
  chr2:44126131-44126215
  hypo
caattctaaagacatttctagtttgatctggcatctttaaaaccagtaacctaaaatctaccatccagtccttgtcctgcaacc

SEQ ID NO: 376312 - DNA, 71 bp, Homo sapiens; identical to SEQ ID NO: 362876
  chr2:44497628-44497699
  hypo

SEQ ID NO: 376313 - DNA, 686 bp, Homo sapiens; identical to SEQ ID NO: 337611
  chr2:44553759-44554445
  hypo

SEQ ID NO: 376314 - DNA, 65 bp, Homo sapiens; identical to SEQ ID NO: 362878
  chr2:47200517-47200582
  hypo

SEQ ID NO: 376315 - DNA, 73 bp, Homo sapiens; identical to SEQ ID NO: 331292
  chr2:47656947-47657020
  hypo

SEQ ID NO: 376316 - DNA, 59 bp, Homo sapiens; identical to SEQ ID NO: 357170
  chr2:47747991-47748050
  hypo

SEQ ID NO: 376317 - DNA, 203 bp, Homo sapiens; identical to SEQ ID NO: 279765
  chr2:47748523-47748726
  hypo

SEQ ID NO: 376318 - DNA, 42 bp, Homo sapiens; identical to SEQ ID NO: 337619
  chr2:54343989-54344031
  hypo

SEQ ID NO: 376319 - DNA, 41 bp, Homo sapiens; identical to SEQ ID NO: 345744
  chr2:55289053-55289094
  hypo

SEQ ID NO: 376320 - DNA, 61 bp, Homo sapiens; identical to SEQ ID NO: 337621
  chr2:55391637-55391698
  hypo

SEQ ID NO: 376321 - DNA, 121 bp, Homo sapiens; identical to SEQ ID NO: 337622
  chr2:60598584-60598705
  hypo

SEQ ID NO: 376322 - DNA, 124 bp, Homo sapiens; identical to SEQ ID NO: 362884
  chr2:60706396-60706520
  hypo

SEQ ID NO: 376323 - DNA, 207 bp, Homo sapiens; identical to SEQ ID NO: 207992
  chr2:60706550-60706757
  hypo

SEQ ID NO: 376324 - DNA, 373 bp, Homo sapiens; identical to SEQ ID NO: 349503
  chr2:60784505-60784878
  hypo

SEQ ID NO: 376325 - DNA, 128 bp, Homo sapiens; identical to SEQ ID NO: 337625
  chr2:61074853-61074981
  hypo

SEQ ID NO: 376326 - DNA, 428 bp, Homo sapiens; identical to SEQ ID NO: 357184
  chr2:61175657-61176085
  hypo

SEQ ID NO: 376327 - DNA, 90 bp, Homo sapiens; identical to SEQ ID NO: 337627
  chr2:61505031-61505121
  hypo

SEQ ID NO: 376328 - DNA, 66 bp, Homo sapiens; identical to SEQ ID NO: 337628
  chr2:62116634-62116700
  hypo

SEQ ID NO: 376329 - DNA, 43 bp, Homo sapiens; identical to SEQ ID NO: 353106
  chr2:62497692-62497735
  hypo

SEQ ID NO: 376330 - DNA, 92 bp, Homo sapiens; identical to SEQ ID NO: 337630
  chr2:64538788-64538880
  hypo

SEQ ID NO: 376331 - DNA, 99 bp, Homo sapiens; identical to SEQ ID NO: 337633
  chr2:65251127-65251226
  hypo

SEQ ID NO: 376332 - DNA, 951 bp, Homo sapiens; identical to SEQ ID NO: 331322
  chr2:66660936-66661887
  hypo

SEQ ID NO: 376333 - DNA, 163 bp, Homo sapiens; identical to SEQ ID NO: 337636
  chr2:68486689-68486852
  hypo

SEQ ID NO: 376334 - DNA, 311 bp, Homo sapiens; identical to SEQ ID NO: 353107
  chr2:68672378-68672689
  hypo

SEQ ID NO: 376335 - DNA, 122 bp, Homo sapiens; identical to SEQ ID NO: 337639
  chr2:69928507-69928629
  hypo

SEQ ID NO: 376336 - DNA, 205 bp, Homo sapiens; identical to SEQ ID NO: 337640
  chr2:70165952-70166157
  hypo

SEQ ID NO: 376337 - DNA, 224 bp, Homo sapiens; identical to SEQ ID NO: 337641
  chr2:70224820-70225044
  hypo

SEQ ID NO: 376338 - DNA, 317 bp, Homo sapiens; identical to SEQ ID NO: 346441
  chr2:70351179-70351496
  hypo

SEQ ID NO: 376339 - DNA, 280 bp, Homo sapiens; identical to SEQ ID NO: 331330
  chr2:70369049-70369329
  hypo

SEQ ID NO: 376340 - DNA, 125 bp, Homo sapiens; identical to SEQ ID NO: 337645
  chr2:72310184-72310309
  hypo

SEQ ID NO: 376341 - DNA, 346 bp, Homo sapiens; identical to SEQ ID NO: 337646
  chr2:72359340-72359686
  hypo

SEQ ID NO: 376342 - DNA, 127 bp, Homo sapiens; identical to SEQ ID NO: 345014
  chr2:72374248-72374375
  hypo

SEQ ID NO: 376343 - DNA, 259 bp, Homo sapiens; identical to SEQ ID NO: 345015
  chr2:72374932-72375191
  hypo

SEQ ID NO: 376344 - DNA, 698 bp, Homo sapiens; identical to SEQ ID NO: 357207
  chr2:73052641-73053339
  hypo

SEQ ID NO: 376345 - DNA, 84 bp, Homo sapiens
  chr2:73493671-73493755
  hypo
gctgctgatgacctgcagctgccgctcggcacggtcagcccgctcaaggagctcctcaatgaactgctgcagccgcagcttggc

SEQ ID NO: 376346 - DNA, 135 bp, Homo sapiens; identical to SEQ ID NO: 349527
  chr2:73520107-73520242
  hypo

SEQ ID NO: 376347 - DNA, 358 bp, Homo sapiens
  chr2:74152840-74153198
  hypo
cgctccagtagccattaacgccccaccctggttatccttaaaaaattcgattaaaaaaaaagttcttaatatataaacatgacctcagccatcctatatatacatcaacataagaaaaaggtcccgtgctttttatgggaacagcttcaagacaggtatcccagcccccggcccctccccagcccccttgcaatcagatccttgtcttctaaaacctgccacacctaagagcgctgcctgaaggccggtttggcctgttgactcctggttttgactgttggtgatttaagcgattggaactggaagcaccatttgacaacattttgtaaatcattacttctgaggttgttatgacgac

SEQ ID NO: 376348 - DNA, 90 bp, Homo sapiens
  chr2:74153227-74153317
  hypo
cagcagcttaggtccctgccctcctgcagagcacacttcaccgacagcaggactcaggttttatacaagtctctactcgccattgcttac

SEQ ID NO: 376349 - DNA, 228 bp, Homo sapiens; identical to SEQ ID NO: 331345
  chr2:74211299-74211527
  hypo

SEQ ID NO: 376350 - DNA, 218 bp, Homo sapiens; identical to SEQ ID NO: 337654
  chr2:74327579-74327797
  hypo

SEQ ID NO: 376351 - DNA, 275 bp, Homo sapiens; identical to SEQ ID NO: 345016
  chr2:74425444-74425719
  hypo

SEQ ID NO: 376352 - DNA, 395 bp, Homo sapiens; identical to SEQ ID NO: 198298
  chr2:74425790-74426185
  hypo

SEQ ID NO: 376353 - DNA, 228 bp, Homo sapiens; identical to SEQ ID NO: 345018
  chr2:74426214-74426442
  hypo

SEQ ID NO: 376354 - DNA, 235 bp, Homo sapiens; identical to SEQ ID NO: 345022
  chr2:74781700-74781935
  hypo

SEQ ID NO: 376355 - DNA, 1609 bp, Homo sapiens; identical to SEQ ID NO: 357224
  chr2:75060920-75062529
  hypo

SEQ ID NO: 376356 - DNA, 61 bp, Homo sapiens; identical to SEQ ID NO: 347902
  chr2:85280346-85280407
  hypo

SEQ ID NO: 376357 - DNA, 104 bp, Homo sapiens; identical to SEQ ID NO: 337662
  chr2:85356682-85356786
  hypo

SEQ ID NO: 376358 - DNA, 104 bp, Homo sapiens; identical to SEQ ID NO: 337664
  chr2:85776352-85776456
  hypo

SEQ ID NO: 376359 - DNA, 74 bp, Homo sapiens; identical to SEQ ID NO: 337665
  chr2:85819578-85819652
  hypo

SEQ ID NO: 376360 - DNA, 198 bp, Homo sapiens; identical to SEQ ID NO: 337666
  chr2:85871996-85872194
  hypo

SEQ ID NO: 376361 - DNA, 95 bp, Homo sapiens; identical to SEQ ID NO: 337667
  chr2:85878703-85878798
  hypo

SEQ ID NO: 376362 - DNA, 342 bp, Homo sapiens; identical to SEQ ID NO: 353127
  chr2:85890530-85890872
  hypo

SEQ ID NO: 376363 - DNA, 81 bp, Homo sapiens; identical to SEQ ID NO: 353128
  chr2:85890902-85890983
  hypo

SEQ ID NO: 376364 - DNA, 64 bp, Homo sapiens; identical to SEQ ID NO: 337669
  chr2:86914559-86914623
  hypo

SEQ ID NO: 376365 - DNA, 163 bp, Homo sapiens; identical to SEQ ID NO: 349538
  chr2:87018396-87018559
  hypo

SEQ ID NO: 376366 - DNA, 86 bp, Homo sapiens; identical to SEQ ID NO: 337671
  chr2:88591078-88591164
  hypo

SEQ ID NO: 376367 - DNA, 58 bp, Homo sapiens; identical to SEQ ID NO: 353131
  chr2:95941852-95941910
  hypo

SEQ ID NO: 376368 - DNA, 578 bp, Homo sapiens; identical to SEQ ID NO: 280006
  chr2:96011863-96012441
  hypo

SEQ ID NO: 376369 - DNA, 48 bp, Homo sapiens; identical to SEQ ID NO: 346460
  chr2:96012683-96012731
  hypo

SEQ ID NO: 376370 - DNA, 42 bp, Homo sapiens; identical to SEQ ID NO: 346464
  chr2:97203334-97203376
  hypo

SEQ ID NO: 376371 - DNA, 39 bp, Homo sapiens; identical to SEQ ID NO: 346465
  chr2:97203545-97203584
  hypo

SEQ ID NO: 376372 - DNA, 76 bp, Homo sapiens; identical to SEQ ID NO: 362928
  chr2:97427378-97427454
  hypo

SEQ ID NO: 376373 - DNA, 262 bp, Homo sapiens; identical to SEQ ID NO: 353136
  chr2:97435378-97435640
  hypo

SEQ ID NO: 376374 - DNA, 185 bp, Homo sapiens; identical to SEQ ID NO: 362930
  chr2:97437985-97438170
  hypo

SEQ ID NO: 376375 - DNA, 158 bp, Homo sapiens; identical to SEQ ID NO: 337682
  chr2:97530642-97530800
  hypo

SEQ ID NO: 376376 - DNA, 436 bp, Homo sapiens; identical to SEQ ID NO: 353137
  chr2:97544651-97545087
  hypo

SEQ ID NO: 376377 - DNA, 200 bp, Homo sapiens; identical to SEQ ID NO: 337684
  chr2:97545395-97545595
  hypo

SEQ ID NO: 376378 - DNA, 305 bp, Homo sapiens; identical to SEQ ID NO: 337685
  chr2:97576055-97576360
  hypo

SEQ ID NO: 376379 - DNA, 439 bp, Homo sapiens; identical to SEQ ID NO: 337686
  chr2:97587010-97587449
  hypo

SEQ ID NO: 376380 - DNA, 249 bp, Homo sapiens; identical to SEQ ID NO: 337687
  chr2:97589058-97589307
  hypo

SEQ ID NO: 376381 - DNA, 311 bp, Homo sapiens; identical to SEQ ID NO: 208116
  chr2:97651885-97652196
  hypo

SEQ ID NO: 376382 - DNA, 82 bp, Homo sapiens; identical to SEQ ID NO: 208117
  chr2:97652405-97652487
  hypo

SEQ ID NO: 376383 - DNA, 382 bp, Homo sapiens; identical to SEQ ID NO: 362935
  chr2:98350752-98351134
  hypo

SEQ ID NO: 376384 - DNA, 316 bp, Homo sapiens; identical to SEQ ID NO: 353140
  chr2:98377004-98377320
  hypo

SEQ ID NO: 376385 - DNA, 572 bp, Homo sapiens; identical to SEQ ID NO: 337691
  chr2:98408820-98409392
  hypo

SEQ ID NO: 376386 - DNA, 163 bp, Homo sapiens; identical to SEQ ID NO: 337692
  chr2:99097200-99097363
  hypo

SEQ ID NO: 376387 - DNA, 275 bp, Homo sapiens
  chr2:99136317-99136592
  hypo
cgcccccggtaggtcacgttctttctaaatgagagcatgatttctctccatcaccgtccccatggtttcttacaagtgctccttttctcagggctactgccactttagtggactagggctcggtgccagcacttcccgggtaatcaggcgtggtctgaccgaggatcaagaagcacatcatcaccaatgacatcatgacagcaagagagcacagccctcgccatggtgccagggcccgtgcaatgcagcgggcttccaccatcgacgtggcggcc

SEQ ID NO: 376388 - DNA, 146 bp, Homo sapiens; identical to SEQ ID NO: 345030
  chr2:101033445-101033591
  hypo

SEQ ID NO: 376389 - DNA, 134 bp, Homo sapiens; identical to SEQ ID NO: 337696
  chr2:101696603-101696737
  hypo

SEQ ID NO: 376390 - DNA, 231 bp, Homo sapiens; identical to SEQ ID NO: 337697
  chr2:102486147-102486378
  hypo

SEQ ID NO: 376391 - DNA, 143 bp, Homo sapiens; identical to SEQ ID NO: 337698
  chr2:102683385-102683528
  hypo

SEQ ID NO: 376392 - DNA, 519 bp, Homo sapiens; identical to SEQ ID NO: 331387
  chr2:102758965-102759484
  hypo

SEQ ID NO: 376393 - DNA, 96 bp, Homo sapiens; identical to SEQ ID NO: 349556
  chr2:105468467-105468563
  hypo

SEQ ID NO: 376394 - DNA, 144 bp, Homo sapiens; identical to SEQ ID NO: 345031
  chr2:105471069-105471213
  hypo

SEQ ID NO: 376395 - DNA, 115 bp, Homo sapiens; identical to SEQ ID NO: 362945
  chr2:105719504-105719619
  hypo

SEQ ID NO: 376396 - DNA, 264 bp, Homo sapiens; identical to SEQ ID NO: 362946
  chr2:105719654-105719918
  hypo

SEQ ID NO: 376397 - DNA, 454 bp, Homo sapiens; identical to SEQ ID NO: 369697
  chr2:105760109-105760563
  hypo

SEQ ID NO: 376398 - DNA, 200 bp, Homo sapiens; identical to SEQ ID NO: 337706
  chr2:105987680-105987880
  hypo

SEQ ID NO: 376399 - DNA, 64 bp, Homo sapiens; identical to SEQ ID NO: 362948
  chr2:106016398-106016462
  hypo

SEQ ID NO: 376400 - DNA, 85 bp, Homo sapiens; identical to SEQ ID NO: 353149
  chr2:106730126-106730211
  hypo

SEQ ID NO: 376401 - DNA, 160 bp, Homo sapiens; identical to SEQ ID NO: 353150
  chr2:106730256-106730416
  hypo

SEQ ID NO: 376402 - DNA, 35 bp, Homo sapiens; identical to SEQ ID NO: 337709
  chr2:106742088-106742123
  hypo

SEQ ID NO: 376403 - DNA, 44 bp, Homo sapiens; identical to SEQ ID NO: 362952
  chr2:106959115-106959159
  hypo

SEQ ID NO: 376404 - DNA, 59 bp, Homo sapiens; identical to SEQ ID NO: 353151
  chr2:106959841-106959900
  hypo

SEQ ID NO: 376405 - DNA, 386 bp, Homo sapiens; identical to SEQ ID NO: 362954
  chr2:107459644-107460030
  hypo

SEQ ID NO: 376406 - DNA, 156 bp, Homo sapiens; identical to SEQ ID NO: 337713
  chr2:108085842-108085998
  hypo

SEQ ID NO: 376407 - DNA, 701 bp, Homo sapiens; identical to SEQ ID NO: 362956
  chr2:108160925-108161626
  hypo

SEQ ID NO: 376408 - DNA, 73 bp, Homo sapiens; identical to SEQ ID NO: 353153
  chr2:109260013-109260086
  hypo

SEQ ID NO: 376409 - DNA, 65 bp, Homo sapiens; identical to SEQ ID NO: 349561
  chr2:109647974-109648039
  hypo

SEQ ID NO: 376410 - DNA, 205 bp, Homo sapiens; identical to SEQ ID NO: 337718
  chr2:110011299-110011504
  hypo

SEQ ID NO: 376411 - DNA, 186 bp, Homo sapiens; identical to SEQ ID NO: 353156
  chr2:110015134-110015320
  hypo

SEQ ID NO: 376412 - DNA, 112 bp, Homo sapiens; identical to SEQ ID NO: 353157
  chr2:110015364-110015476
  hypo

SEQ ID NO: 376413 - DNA, 215 bp, Homo sapiens; identical to SEQ ID NO: 362962
  chr2:110016725-110016940
  hypo

SEQ ID NO: 376414 - DNA, 134 bp, Homo sapiens
  chr2:110017061-110017195
  hypo
cgtcccttccacatacacacccacacatacacccgtgcacacatgtagacatttatacatgcgcacacacacattggtggatacacacctgcacgcatatgtgtgcacacacacaaacgctggctctcatcggc

SEQ ID NO: 376415 - DNA, 452 bp, Homo sapiens; identical to SEQ ID NO: 337722
  chr2:110021654-110022106
  hypo

SEQ ID NO: 376416 - DNA, 73 bp, Homo sapiens; identical to SEQ ID NO: 337723
  chr2:110022456-110022529
  hypo

SEQ ID NO: 376417 - DNA, 124 bp, Homo sapiens; identical to SEQ ID NO: 337724
  chr2:110028510-110028634
  hypo

SEQ ID NO: 376418 - DNA, 146 bp, Homo sapiens; identical to SEQ ID NO: 337725
  chr2:110048964-110049110
  hypo

SEQ ID NO: 376419 - DNA, 293 bp, Homo sapiens; identical to SEQ ID NO: 198383
  chr2:111490023-111490316
  hypo

SEQ ID NO: 376420 - DNA, 171 bp, Homo sapiens; identical to SEQ ID NO: 369707
  chr2:111490689-111490860
  hypo

SEQ ID NO: 376421 - DNA, 121 bp, Homo sapiens; identical to SEQ ID NO: 337727
  chr2:111929192-111929313
  hypo

SEQ ID NO: 376422 - DNA, 70 bp, Homo sapiens; identical to SEQ ID NO: 349569
  chr2:112656507-112656577
  hypo

SEQ ID NO: 376423 - DNA, 32 bp, Homo sapiens; identical to SEQ ID NO: 280126
  chr2:112657092-112657124
  hypo

SEQ ID NO: 376424 - DNA, 208 bp, Homo sapiens; identical to SEQ ID NO: 353163
  chr2:113103038-113103246
  hypo

SEQ ID NO: 376425 - DNA, 89 bp, Homo sapiens; identical to SEQ ID NO: 353164
  chr2:113103431-113103520
  hypo

SEQ ID NO: 376426 - DNA, 682 bp, Homo sapiens; identical to SEQ ID NO: 337730
  chr2:114736479-114737161
  hypo

SEQ ID NO: 376427 - DNA, 56 bp, Homo sapiens; identical to SEQ ID NO: 337732
  chr2:118736298-118736354
  hypo

SEQ ID NO: 376428 - DNA, 143 bp, Homo sapiens; identical to SEQ ID NO: 345757
  chr2:120005222-120005365
  hypo

SEQ ID NO: 376429 - DNA, 119 bp, Homo sapiens; identical to SEQ ID NO: 337737
  chr2:120754234-120754353
  hypo

SEQ ID NO: 376430 - DNA, 330 bp, Homo sapiens; identical to SEQ ID NO: 353167
  chr2:120974105-120974435
  hypo

SEQ ID NO: 376431 - DNA, 223 bp, Homo sapiens; identical to SEQ ID NO: 337741
  chr2:121108610-121108833
  hypo

SEQ ID NO: 376432 - DNA, 60 bp, Homo sapiens
  chr2:121444213-121444273
  hypo
cgttaccgtccagcctgccgcagcccattctttgatgatcatttcacctgctgtgcgcac

SEQ ID NO: 376433 - DNA, 213 bp, Homo sapiens; identical to SEQ ID NO: 362977
  chr2:121549381-121549594
  hypo

SEQ ID NO: 376434 - DNA, 325 bp, Homo sapiens; identical to SEQ ID NO: 337744
  chr2:121742106-121742431
  hypo

SEQ ID NO: 376435 - DNA, 140 bp, Homo sapiens; identical to SEQ ID NO: 337745
  chr2:122010702-122010842
  hypo

SEQ ID NO: 376436 - DNA, 231 bp, Homo sapiens; identical to SEQ ID NO: 337746
  chr2:122011463-122011694
  hypo

SEQ ID NO: 376437 - DNA, 248 bp, Homo sapiens; identical to SEQ ID NO: 337747
  chr2:122094622-122094870
  hypo

SEQ ID NO: 376438 - DNA, 317 bp, Homo sapiens; identical to SEQ ID NO: 337749
  chr2:122187647-122187964
  hypo

SEQ ID NO: 376439 - DNA, 381 bp, Homo sapiens; identical to SEQ ID NO: 280195
  chr2:127413347-127413728
  hypo

SEQ ID NO: 376440 - DNA, 255 bp, Homo sapiens; identical to SEQ ID NO: 349581
  chr2:127414108-127414363
  hypo

SEQ ID NO: 376441 - DNA, 97 bp, Homo sapiens; identical to SEQ ID NO: 353172
  chr2:127428888-127428985
  hypo

SEQ ID NO: 376442 - DNA, 244 bp, Homo sapiens; identical to SEQ ID NO: 353173
  chr2:127435291-127435535
  hypo

SEQ ID NO: 376443 - DNA, 107 bp, Homo sapiens; identical to SEQ ID NO: 300156
  chr2:127438526-127438633
  hypo

SEQ ID NO: 376444 - DNA, 82 bp, Homo sapiens
  chr2:127801072-127801154
  hypo
cgcagccgaggaggggctcagccgtctaccctgtctccagcggaggagcttctgagaccaggagcgggggccgtcgggtgag

SEQ ID NO: 376445 - DNA, 117 bp, Homo sapiens
  chr2:127801235-127801352
  hypo
aaagtgaaccaagcaagggtcccagaaacgtcacacgtgaactcgcccattcacactcacccattcccatgcacactggccattcactcagccattcacacgtgcacacattcgcac

SEQ ID NO: 376446 - DNA, 121 bp, Homo sapiens; identical to SEQ ID NO: 357296
  chr2:127863367-127863488
  hypo

SEQ ID NO: 376447 - DNA, 427 bp, Homo sapiens; identical to SEQ ID NO: 357297
  chr2:127863878-127864305
  hypo

SEQ ID NO: 376448 - DNA, 268 bp, Homo sapiens; identical to SEQ ID NO: 362988
  chr2:127895375-127895643
  hypo

SEQ ID NO: 376449 - DNA, 164 bp, Homo sapiens; identical to SEQ ID NO: 337759
  chr2:128127780-128127944
  hypo

SEQ ID NO: 376450 - DNA, 587 bp, Homo sapiens
  chr2:128158471-128159058
  hypo
cacccgccccttctgatccagtgtcccgcagtcctgcccgcttcaccgccctcgcctagcccccgcgggtggtaaaagtccagcccggcggagcgcccctgcctccttccacgcccctggcctgccctgcgcagctacgcccagcccgcgtccatcccggaccatcctgttgaaggcagtcccctggcacgcagggctgggagctcttagctgaggatggaaccgactgcaccaggagccgctgggaggaaggccgaggggcgcagaggagaggcaaggaaaaaacagcagcccaagaatcgggcctccctgttacagcaggagtcgcatctatttatatatgttatgtcttattgctcagcaaccagctctcggccggggcgtgggccgggaagaggggtctcctggtgcagcgggttggcgtgactcatcaccgccgcgcactctggcctctgggcctaggttaacagactcccgggtttcaggctgggcccaggcggccaggccctccctgctgaggaatctgggttggggcagtgccagctccctgcttctcacctggccacagaaggggtagcgggaggagc

SEQ ID NO: 376451 - DNA, 105 bp, Homo sapiens; identical to SEQ ID NO: 357301
  chr2:128459397-128459502
  hypo

SEQ ID NO: 376452 - DNA, 197 bp, Homo sapiens; identical to SEQ ID NO: 337762
  chr2:128583666-128583863
  hypo

SEQ ID NO: 376453 - DNA, 154 bp, Homo sapiens; identical to SEQ ID NO: 337763
  chr2:130512142-130512296
  hypo

SEQ ID NO: 376454 - DNA, 96 bp, Homo sapiens
  chr2:130669922-130670018
  hypo
cggcgcactgacaggccgcactgtcccagcctctacgtttgtggtcaaagagcagcaccttcctgaggcctgaggcctagcgggcacgtgaggttc

SEQ ID NO: 376455 - DNA, 110 bp, Homo sapiens; identical to SEQ ID NO: 353176
  chr2:131487004-131487114
  hypo

SEQ ID NO: 376456 - DNA, 174 bp, Homo sapiens; identical to SEQ ID NO: 337769
  chr2:132269055-132269229
  hypo

SEQ ID NO: 376457 - DNA, 268 bp, Homo sapiens; identical to SEQ ID NO: 337770
  chr2:132270135-132270403
  hypo

SEQ ID NO: 376458 - DNA, 295 bp, Homo sapiens; identical to SEQ ID NO: 337771
  chr2:132301071-132301366
  hypo

SEQ ID NO: 376459 - DNA, 484 bp, Homo sapiens; identical to SEQ ID NO: 362997
  chr2:133174959-133175443
  hypo

SEQ ID NO: 376460 - DNA, 74 bp, Homo sapiens; identical to SEQ ID NO: 337773
  chr2:135293582-135293656
  hypo

SEQ ID NO: 376461 - DNA, 353 bp, Homo sapiens; identical to SEQ ID NO: 198445
  chr2:135476396-135476749
  hypo

SEQ ID NO: 376462 - DNA, 912 bp, Homo sapiens; identical to SEQ ID NO: 198448
  chr2:136874020-136874932
  hypo

SEQ ID NO: 376463 - DNA, 482 bp, Homo sapiens; identical to SEQ ID NO: 198449
  chr2:136875399-136875881
  hypo

SEQ ID NO: 376464 - DNA, 60 bp, Homo sapiens; identical to SEQ ID NO: 198452
  chr2:137523039-137523099
  hypo

SEQ ID NO: 376465 - DNA, 69 bp, Homo sapiens; identical to SEQ ID NO: 357317
  chr2:139538166-139538235
  hypo

SEQ ID NO: 376466 - DNA, 189 bp, Homo sapiens
  chr2:147344896-147345085
  hypo
cggcggacaagcgacctcgctctgtggccagtgagttgtttctgattcggatgatttttgtccctcggcgcgtgcccttgctccccgcccccggctgcgagacccccggcccggcactcgctctcctcctgtcacgaaagggtcgcggcctgtagccctgtgggcagccgtgccgcgatgaaccccagc

SEQ ID NO: 376467 - DNA, 186 bp, Homo sapiens; identical to SEQ ID NO: 331461
  chr2:148602743-148602929
  hypo

SEQ ID NO: 376468 - DNA, 169 bp, Homo sapiens; identical to SEQ ID NO: 337783
  chr2:149525294-149525463
  hypo

SEQ ID NO: 376469 - DNA, 50 bp, Homo sapiens; identical to SEQ ID NO: 345044
  chr2:149632592-149632642
  hypo

SEQ ID NO: 376470 - DNA, 699 bp, Homo sapiens; identical to SEQ ID NO: 280266
  chr2:150186988-150187687
  hypo

SEQ ID NO: 376471 - DNA, 170 bp, Homo sapiens; identical to SEQ ID NO: 337786
  chr2:152295736-152295906
  hypo

SEQ ID NO: 376472 - DNA, 120 bp, Homo sapiens; identical to SEQ ID NO: 337787
  chr2:152681239-152681359
  hypo

SEQ ID NO: 376473 - DNA, 593 bp, Homo sapiens; identical to SEQ ID NO: 357332
  chr2:153192142-153192735
  hypo

SEQ ID NO: 376474 - DNA, 60 bp, Homo sapiens; identical to SEQ ID NO: 357335
  chr2:155553956-155554016
  hypo

SEQ ID NO: 376475 - DNA, 612 bp, Homo sapiens; identical to SEQ ID NO: 198483
  chr2:155554076-155554688
  hypo

SEQ ID NO: 376476 - DNA, 349 bp, Homo sapiens; identical to SEQ ID NO: 198484
  chr2:155554689-155555038
  hypo

SEQ ID NO: 376477 - DNA, 461 bp, Homo sapiens; identical to SEQ ID NO: 349603
  chr2:157292161-157292622
  hypo

SEQ ID NO: 376478 - DNA, 1811 bp, Homo sapiens; identical to SEQ ID NO: 331475
  chr2:159313069-159314880
  hypo

SEQ ID NO: 376479 - DNA, 125 bp, Homo sapiens; identical to SEQ ID NO: 337792
  chr2:159528162-159528287
  hypo

SEQ ID NO: 376480 - DNA, 126 bp, Homo sapiens; identical to SEQ ID NO: 337793
  chr2:159994731-159994857
  hypo

SEQ ID NO: 376481 - DNA, 123 bp, Homo sapiens; identical to SEQ ID NO: 357340
  chr2:161264043-161264166
  hypo

SEQ ID NO: 376482 - DNA, 203 bp, Homo sapiens; identical to SEQ ID NO: 198498
  chr2:161264419-161264622
  hypo

SEQ ID NO: 376483 - DNA, 625 bp, Homo sapiens; identical to SEQ ID NO: 357344
  chr2:162271677-162272302
  hypo

SEQ ID NO: 376484 - DNA, 262 bp, Homo sapiens; identical to SEQ ID NO: 198502
  chr2:162930659-162930921
  hypo

SEQ ID NO: 376485 - DNA, 37 bp, Homo sapiens; identical to SEQ ID NO: 198509
  chr2:166650106-166650143
  hypo

SEQ ID NO: 376486 - DNA, 723 bp, Homo sapiens; identical to SEQ ID NO: 345049
  chr2:166650508-166651231
  hypo

SEQ ID NO: 376487 - DNA, 100 bp, Homo sapiens; identical to SEQ ID NO: 349612
  chr2:168148871-168148971
  hypo

SEQ ID NO: 376488 - DNA, 239 bp, Homo sapiens; identical to SEQ ID NO: 198512
  chr2:168149264-168149503
  hypo

SEQ ID NO: 376489 - DNA, 220 bp, Homo sapiens; identical to SEQ ID NO: 198513
  chr2:168149556-168149776
  hypo

SEQ ID NO: 376490 - DNA, 401 bp, Homo sapiens; identical to SEQ ID NO: 349615
  chr2:169312417-169312818
  hypo

SEQ ID NO: 376491 - DNA, 904 bp, Homo sapiens; identical to SEQ ID NO: 349616
  chr2:169312881-169313785
  hypo

SEQ ID NO: 376492 - DNA, 82 bp, Homo sapiens; identical to SEQ ID NO: 353197
  chr2:170282893-170282975
  hypo

SEQ ID NO: 376493 - DNA, 127 bp, Homo sapiens; identical to SEQ ID NO: 337805
  chr2:170569589-170569716
  hypo

SEQ ID NO: 376494 - DNA, 133 bp, Homo sapiens; identical to SEQ ID NO: 337806
  chr2:171730981-171731114
  hypo

SEQ ID NO: 376495 - DNA, 98 bp, Homo sapiens; identical to SEQ ID NO: 337807
  chr2:171815760-171815858
  hypo

SEQ ID NO: 376496 - DNA, 632 bp, Homo sapiens; identical to SEQ ID NO: 353201
  chr2:171822567-171823199
  hypo

SEQ ID NO: 376497 - DNA, 32 bp, Homo sapiens; identical to SEQ ID NO: 357368
  chr2:172379091-172379123
  hypo

SEQ ID NO: 376498 - DNA, 50 bp, Homo sapiens; identical to SEQ ID NO: 363033
  chr2:172411075-172411125
  hypo

SEQ ID NO: 376499 - DNA, 81 bp, Homo sapiens; identical to SEQ ID NO: 337813
  chr2:175431799-175431880
  hypo

SEQ ID NO: 376500 - DNA, 219 bp, Homo sapiens; identical to SEQ ID NO: 280446
  chr2:177052744-177052963
  hypo

SEQ ID NO: 376501 - DNA, 55 bp, Homo sapiens; identical to SEQ ID NO: 357397
  chr2:177502170-177502225
  hypo

SEQ ID NO: 376502 - DNA, 60 bp, Homo sapiens; identical to SEQ ID NO: 198583
  chr2:177502920-177502980
  hypo

SEQ ID NO: 376503 - DNA, 794 bp, Homo sapiens; identical to SEQ ID NO: 331546
  chr2:178257227-178258021
  hypo

SEQ ID NO: 376504 - DNA, 128 bp, Homo sapiens
  chr2:180886599-180886727
  hypo
cgcggggtcggtgtataataccccccgccgcgatgtggggagtgatatcaccctctctcaccctggatattacgaacaacctcgcggggggtggtggtccataatatccgggtggggggagaggctga

SEQ ID NO: 376505 - DNA, 90 bp, Homo sapiens; identical to SEQ ID NO: 345055
  chr2:183902312-183902402
  hypo

SEQ ID NO: 376506 - DNA, 568 bp, Homo sapiens; identical to SEQ ID NO: 198600
  chr2:183902442-183903010
  hypo

SEQ ID NO: 376507 - DNA, 587 bp, Homo sapiens; identical to SEQ ID NO: 346507
  chr2:183903037-183903624
  hypo

SEQ ID NO: 376508 - DNA, 86 bp, Homo sapiens; identical to SEQ ID NO: 345058
  chr2:191044988-191045074
  hypo

SEQ ID NO: 376509 - DNA, 513 bp, Homo sapiens; identical to SEQ ID NO: 345059
  chr2:191045505-191046018
  hypo

SEQ ID NO: 376510 - DNA, 204 bp, Homo sapiens; identical to SEQ ID NO: 353208
  chr2:191796737-191796941
  hypo

SEQ ID NO: 376511 - DNA, 447 bp, Homo sapiens; identical to SEQ ID NO: 345060
  chr2:192109730-192110177
  hypo

SEQ ID NO: 376512 - DNA, 253 bp, Homo sapiens; identical to SEQ ID NO: 198625
  chr2:192110303-192110556
  hypo

SEQ ID NO: 376513 - DNA, 439 bp, Homo sapiens; identical to SEQ ID NO: 345062
  chr2:192110584-192111023
  hypo

SEQ ID NO: 376514 - DNA, 64 bp, Homo sapiens; identical to SEQ ID NO: 337829
  chr2:196411561-196411625
  hypo

SEQ ID NO: 376515 - DNA, 86 bp, Homo sapiens; identical to SEQ ID NO: 337831
  chr2:198276053-198276139
  hypo

SEQ ID NO: 376516 - DNA, 897 bp, Homo sapiens; identical to SEQ ID NO: 331573
  chr2:200320451-200321348
  hypo

SEQ ID NO: 376517 - DNA, 224 bp, Homo sapiens; identical to SEQ ID NO: 369886
  chr2:200321659-200321883
  hypo

SEQ ID NO: 376518 - DNA, 55 bp, Homo sapiens; identical to SEQ ID NO: 369887
  chr2:200321998-200322053
  hypo

SEQ ID NO: 376519 - DNA, 62 bp, Homo sapiens; identical to SEQ ID NO: 357429
  chr2:200322611-200322673
  hypo

SEQ ID NO: 376520 - DNA, 66 bp, Homo sapiens
  chr2:206830660-206830726
  hypo
ggtgagatggcaaacagatgcgcgcttccactgagagcgtgcatgtgtgtgcgtgtatgtgagtgc

SEQ ID NO: 376521 - DNA, 110 bp, Homo sapiens; identical to SEQ ID NO: 337838
  chr2:206896324-206896434
  hypo

SEQ ID NO: 376522 - DNA, 57 bp, Homo sapiens; identical to SEQ ID NO: 357439
  chr2:207307406-207307463
  hypo

SEQ ID NO: 376523 - DNA, 239 bp, Homo sapiens; identical to SEQ ID NO: 198669
  chr2:207308960-207309199
  hypo

SEQ ID NO: 376524 - DNA, 118 bp, Homo sapiens; identical to SEQ ID NO: 337841
  chr2:208688685-208688803
  hypo

SEQ ID NO: 376525 - DNA, 323 bp, Homo sapiens
  chr2:208696085-208696408
  hypo
cgagcaccacgctgccggctgaggcctggccatcccagcgagagcatggagccatcgcatagggaaacgtagggcttccaatcagaacacctgtgtcaaaccacaaatcctttgtagctgagtgacagtgggcaagttactacttaagttcttggtgctttggttttctcatttgtaaaatgctgctcacggtgaaccccttcctattcactgggttgctgtgagactaaaatgagaaatatacttttaagtggaaggactacgcaaaggctgcgacgccgcccctcacaggtgactctagtacccgtctccttgacacaggc

SEQ ID NO: 376526 - DNA, 187 bp, Homo sapiens; identical to SEQ ID NO: 353215
  chr2:209224972-209225159
  hypo

SEQ ID NO: 376527 - DNA, 479 bp, Homo sapiens; identical to SEQ ID NO: 353216
  chr2:209225393-209225872
  hypo

SEQ ID NO: 376528 - DNA, 67 bp, Homo sapiens; identical to SEQ ID NO: 337845
  chr2:216179504-216179571
  hypo

SEQ ID NO: 376529 - DNA, 185 bp, Homo sapiens; identical to SEQ ID NO: 337846
  chr2:216274340-216274525
  hypo

SEQ ID NO: 376530 - DNA, 502 bp, Homo sapiens; identical to SEQ ID NO: 337847
  chr2:217528438-217528940
  hypo

SEQ ID NO: 376531 - DNA, 410 bp, Homo sapiens; identical to SEQ ID NO: 280629
  chr2:217559556-217559966
  hypo

SEQ ID NO: 376532 - DNA, 180 bp, Homo sapiens; identical to SEQ ID NO: 337849
  chr2:217674486-217674666
  hypo

SEQ ID NO: 376533 - DNA, 84 bp, Homo sapiens; identical to SEQ ID NO: 353219
  chr2:217674965-217675049
  hypo

SEQ ID NO: 376534 - DNA, 181 bp, Homo sapiens; identical to SEQ ID NO: 337851
  chr2:217691004-217691185
  hypo

SEQ ID NO: 376535 - DNA, 93 bp, Homo sapiens; identical to SEQ ID NO: 337852
  chr2:218678441-218678534
  hypo

SEQ ID NO: 376536 - DNA, 839 bp, Homo sapiens; identical to SEQ ID NO: 337853
  chr2:218682490-218683329
  hypo

SEQ ID NO: 376537 - DNA, 138 bp, Homo sapiens; identical to SEQ ID NO: 337854
  chr2:218686231-218686369
  hypo

SEQ ID NO: 376538 - DNA, 267 bp, Homo sapiens; identical to SEQ ID NO: 337855
  chr2:218694781-218695048
  hypo

SEQ ID NO: 376539 - DNA, 56 bp, Homo sapiens; identical to SEQ ID NO: 363066
  chr2:218697833-218697889
  hypo

SEQ ID NO: 376540 - DNA, 178 bp, Homo sapiens; identical to SEQ ID NO: 363067
  chr2:218697937-218698115
  hypo

SEQ ID NO: 376541 - DNA, 79 bp, Homo sapiens; identical to SEQ ID NO: 337857
  chr2:218700747-218700826
  hypo

SEQ ID NO: 376542 - DNA, 288 bp, Homo sapiens; identical to SEQ ID NO: 337858
  chr2:218704299-218704587
  hypo

SEQ ID NO: 376543 - DNA, 1042 bp, Homo sapiens; identical to SEQ ID NO: 337859
  chr2:218712694-218713736
  hypo

SEQ ID NO: 376544 - DNA, 171 bp, Homo sapiens; identical to SEQ ID NO: 337860
  chr2:218765473-218765644
  hypo

SEQ ID NO: 376545 - DNA, 302 bp, Homo sapiens; identical to SEQ ID NO: 337861
  chr2:219145053-219145355
  hypo

SEQ ID NO: 376546 - DNA, 324 bp, Homo sapiens; identical to SEQ ID NO: 280633
  chr2:219232221-219232545
  hypo

SEQ ID NO: 376547 - DNA, 32 bp, Homo sapiens; identical to SEQ ID NO: 357453
  chr2:219232859-219232891
  hypo

SEQ ID NO: 376548 - DNA, 291 bp, Homo sapiens
  chr2:219256000-219256291
  hypo
ttaccagggggtgagcgcgggtgggtggggagggcgtgacccagagaggctccccgcctcgggcagggccaccggtcctaccacactcgtccctgcagggcgtgatcctgggctgcctgttcggccccgcggccctctacatctgggccataggtctcctggcggctgggcagagctccaccatgacgggcacctacgcgggacagttcgtgatggaggtagggcagggggcgggcccaggagggcaaggggtccaaggacagcaggcacactactgggggctagaactcc

SEQ ID NO: 376549 - DNA, 113 bp, Homo sapiens; identical to SEQ ID NO: 363075
  chr2:219294067-219294180
  hypo

SEQ ID NO: 376550 - DNA, 433 bp, Homo sapiens; identical to SEQ ID NO: 369923
  chr2:219748345-219748778
  hypo

SEQ ID NO: 376551 - DNA, 594 bp, Homo sapiens; identical to SEQ ID NO: 346517
  chr2:219757371-219757965
  hypo

SEQ ID NO: 376552 - DNA, 334 bp, Homo sapiens; identical to SEQ ID NO: 280653
  chr2:219824452-219824786
  hypo

SEQ ID NO: 376553 - DNA, 832 bp, Homo sapiens; identical to SEQ ID NO: 357460
  chr2:219845565-219846397
  hypo

SEQ ID NO: 376554 - DNA, 41 bp, Homo sapiens; identical to SEQ ID NO: 357462
  chr2:219857682-219857723
  hypo

SEQ ID NO: 376555 - DNA, 177 bp, Homo sapiens; identical to SEQ ID NO: 363079
  chr2:220150664-220150841
  hypo

SEQ ID NO: 376556 - DNA, 336 bp, Homo sapiens; identical to SEQ ID NO: 363080
  chr2:220150871-220151207
  hypo

SEQ ID NO: 376557 - DNA, 113 bp, Homo sapiens; identical to SEQ ID NO: 337874
  chr2:220316370-220316483
  hypo

SEQ ID NO: 376558 - DNA, 98 bp, Homo sapiens; identical to SEQ ID NO: 357468
  chr2:220378995-220379093
  hypo

SEQ ID NO: 376559 - DNA, 360 bp, Homo sapiens; identical to SEQ ID NO: 337877
  chr2:220427099-220427459
  hypo

SEQ ID NO: 376560 - DNA, 123 bp, Homo sapiens; identical to SEQ ID NO: 363083
  chr2:220428136-220428259
  hypo

SEQ ID NO: 376561 - DNA, 81 bp, Homo sapiens; identical to SEQ ID NO: 357470
  chr2:220435308-220435389
  hypo

SEQ ID NO: 376562 - DNA, 406 bp, Homo sapiens; identical to SEQ ID NO: 198725
  chr2:222436961-222437367
  hypo

SEQ ID NO: 376563 - DNA, 806 bp, Homo sapiens; identical to SEQ ID NO: 346522
  chr2:222437421-222438227
  hypo

SEQ ID NO: 376564 - DNA, 863 bp, Homo sapiens; identical to SEQ ID NO: 331634
  chr2:223183542-223184405
  hypo

SEQ ID NO: 376565 - DNA, 94 bp, Homo sapiens; identical to SEQ ID NO: 349691
  chr2:223185036-223185130
  hypo

SEQ ID NO: 376566 - DNA, 38 bp, Homo sapiens
  chr2:223753603-223753641
  hypo
tagacatgtctgtgcctgcgtctctttgagggatatac

SEQ ID NO: 376567 - DNA, 372 bp, Homo sapiens; identical to SEQ ID NO: 331638
  chr2:224808923-224809295
  hypo

SEQ ID NO: 376568 - DNA, 236 bp, Homo sapiens; identical to SEQ ID NO: 198740
  chr2:225906168-225906404
  hypo

SEQ ID NO: 376569 - DNA, 337 bp, Homo sapiens; identical to SEQ ID NO: 337887
  chr2:227841945-227842282
  hypo

SEQ ID NO: 376570 - DNA, 91 bp, Homo sapiens; identical to SEQ ID NO: 363091
  chr2:230795444-230795535
  hypo

SEQ ID NO: 376571 - DNA, 131 bp, Homo sapiens; identical to SEQ ID NO: 337890
  chr2:231676894-231677025
  hypo

SEQ ID NO: 376572 - DNA, 441 bp, Homo sapiens; identical to SEQ ID NO: 331646
  chr2:231902096-231902537
  hypo

SEQ ID NO: 376573 - DNA, 54 bp, Homo sapiens; identical to SEQ ID NO: 337892
  chr2:231977489-231977543
  hypo

SEQ ID NO: 376574 - DNA, 67 bp, Homo sapiens
  chr2:232283630-232283697
  hypo
cggggccccgggagtcgcaggcaccctgcctggacgctgttgtggggcctgaacgaagttcactgct

SEQ ID NO: 376575 - DNA, 34 bp, Homo sapiens
  chr2:232283773-232283807
  hypo
ggtggatctgagagagtggagtctgatcccgccc

SEQ ID NO: 376576 - DNA, 104 bp, Homo sapiens; identical to SEQ ID NO: 280744
  chr2:232479181-232479285
  hypo

SEQ ID NO: 376577 - DNA, 227 bp, Homo sapiens; identical to SEQ ID NO: 349701
  chr2:232479454-232479681
  hypo

SEQ ID NO: 376578 - DNA, 115 bp, Homo sapiens; identical to SEQ ID NO: 357491
  chr2:232527239-232527354
  hypo

SEQ ID NO: 376579 - DNA, 623 bp, Homo sapiens; identical to SEQ ID NO: 346527
  chr2:232790030-232790653
  hypo

SEQ ID NO: 376580 - DNA, 263 bp, Homo sapiens; identical to SEQ ID NO: 280754
  chr2:232790784-232791047
  hypo

SEQ ID NO: 376581 - DNA, 117 bp, Homo sapiens; identical to SEQ ID NO: 337897
  chr2:232850673-232850790
  hypo

SEQ ID NO: 376582 - DNA, 98 bp, Homo sapiens; identical to SEQ ID NO: 353239
  chr2:233198455-233198553
  hypo

SEQ ID NO: 376583 - DNA, 129 bp, Homo sapiens; identical to SEQ ID NO: 353240
  chr2:233198583-233198712
  hypo

SEQ ID NO: 376584 - DNA, 254 bp, Homo sapiens; identical to SEQ ID NO: 357495
  chr2:233283897-233284151
  hypo

SEQ ID NO: 376585 - DNA, 339 bp, Homo sapiens; identical to SEQ ID NO: 280765
  chr2:233497841-233498180
  hypo

SEQ ID NO: 376586 - DNA, 135 bp, Homo sapiens; identical to SEQ ID NO: 337903
  chr2:234206672-234206807
  hypo

SEQ ID NO: 376587 - DNA, 626 bp, Homo sapiens; identical to SEQ ID NO: 353241
  chr2:234372729-234373355
  hypo

SEQ ID NO: 376588 - DNA, 339 bp, Homo sapiens; identical to SEQ ID NO: 353242
  chr2:234373385-234373724
  hypo

SEQ ID NO: 376589 - DNA, 48 bp, Homo sapiens; identical to SEQ ID NO: 363107
  chr2:234737283-234737331
  hypo

SEQ ID NO: 376590 - DNA, 273 bp, Homo sapiens; identical to SEQ ID NO: 363108
  chr2:234737409-234737682
  hypo

SEQ ID NO: 376591 - DNA, 321 bp, Homo sapiens; identical to SEQ ID NO: 337906
  chr2:234751574-234751895
  hypo

SEQ ID NO: 376592 - DNA, 592 bp, Homo sapiens; identical to SEQ ID NO: 198764
  chr2:235860154-235860746
  hypo

SEQ ID NO: 376593 - DNA, 350 bp, Homo sapiens; identical to SEQ ID NO: 337908
  chr2:235950041-235950391
  hypo

SEQ ID NO: 376594 - DNA, 412 bp, Homo sapiens; identical to SEQ ID NO: 337909
  chr2:235961011-235961423
  hypo

SEQ ID NO: 376595 - DNA, 297 bp, Homo sapiens; identical to SEQ ID NO: 198767
  chr2:236402404-236402701
  hypo

SEQ ID NO: 376596 - DNA, 216 bp, Homo sapiens; identical to SEQ ID NO: 337911
  chr2:236452983-236453199
  hypo

SEQ ID NO: 376597 - DNA, 172 bp, Homo sapiens; identical to SEQ ID NO: 337912
  chr2:236459184-236459356
  hypo

SEQ ID NO: 376598 - DNA, 168 bp, Homo sapiens; identical to SEQ ID NO: 337913
  chr2:236603384-236603552
  hypo

SEQ ID NO: 376599 - DNA, 640 bp, Homo sapiens; identical to SEQ ID NO: 337914
  chr2:236648390-236649030
  hypo

SEQ ID NO: 376600 - DNA, 160 bp, Homo sapiens; identical to SEQ ID NO: 337915
  chr2:236672645-236672805
  hypo

SEQ ID NO: 376601 - DNA, 181 bp, Homo sapiens; identical to SEQ ID NO: 337916
  chr2:236675966-236676147
  hypo

SEQ ID NO: 376602 - DNA, 366 bp, Homo sapiens; identical to SEQ ID NO: 337917
  chr2:236685979-236686345
  hypo

SEQ ID NO: 376603 - DNA, 137 bp, Homo sapiens; identical to SEQ ID NO: 337918
  chr2:236722564-236722701
  hypo

SEQ ID NO: 376604 - DNA, 131 bp, Homo sapiens; identical to SEQ ID NO: 337919
  chr2:236791021-236791152
  hypo

SEQ ID NO: 376605 - DNA, 317 bp, Homo sapiens; identical to SEQ ID NO: 337920
  chr2:236801881-236802198
  hypo

SEQ ID NO: 376606 - DNA, 348 bp, Homo sapiens; identical to SEQ ID NO: 337921
  chr2:236826196-236826544
  hypo

SEQ ID NO: 376607 - DNA, 544 bp, Homo sapiens; identical to SEQ ID NO: 337922
  chr2:236839051-236839595
  hypo

SEQ ID NO: 376608 - DNA, 96 bp, Homo sapiens; identical to SEQ ID NO: 337923
  chr2:236840424-236840520
  hypo

SEQ ID NO: 376609 - DNA, 64 bp, Homo sapiens; identical to SEQ ID NO: 337924
  chr2:236897051-236897115
  hypo

SEQ ID NO: 376610 - DNA, 211 bp, Homo sapiens; identical to SEQ ID NO: 337925
  chr2:236949342-236949553
  hypo

SEQ ID NO: 376611 - DNA, 139 bp, Homo sapiens; identical to SEQ ID NO: 337926
  chr2:237018173-237018312
  hypo

SEQ ID NO: 376612 - DNA, 389 bp, Homo sapiens; identical to SEQ ID NO: 337927
  chr2:237032665-237033054
  hypo

SEQ ID NO: 376613 - DNA, 173 bp, Homo sapiens; identical to SEQ ID NO: 337928
  chr2:237542540-237542713
  hypo

SEQ ID NO: 376614 - DNA, 137 bp, Homo sapiens; identical to SEQ ID NO: 337929
  chr2:237999682-237999819
  hypo

SEQ ID NO: 376615 - DNA, 66 bp, Homo sapiens; identical to SEQ ID NO: 347950
  chr2:238280432-238280498
  hypo

SEQ ID NO: 376616 - DNA, 235 bp, Homo sapiens; identical to SEQ ID NO: 347951
  chr2:238280812-238281047
  hypo

SEQ ID NO: 376617 - DNA, 226 bp, Homo sapiens; identical to SEQ ID NO: 331671
  chr2:238617178-238617404
  hypo

SEQ ID NO: 376618 - DNA, 158 bp, Homo sapiens; identical to SEQ ID NO: 337932
  chr2:238625990-238626148
  hypo

SEQ ID NO: 376619 - DNA, 339 bp, Homo sapiens
  chr2:238793969-238794308
  hypo
cgccgcctgcccctgcccggaggcctggccctggagcccacccacctccctgaggcctgtcgtgagcatcaggagctcccagtacagcatctggggctgcctcggtgccctcgtgggtttgttcatggcggtgtccgccctggaacttgccacatgcccacgagcactgggacccctctgtgctctccctggtggctgtggtgctgtcatccctgtgtgtgctggtggaatagcgtgggctccacggaaaggccctcaggcgtggacaggacagatggcagtgcccagcacagccaggtctcagaggatccaaaggcgagcattgcccaggccgaggcc

SEQ ID NO: 376620 - DNA, 34 bp, Homo sapiens; identical to SEQ ID NO: 337934
  chr2:238934785-238934819
  hypo

SEQ ID NO: 376621 - DNA, 52 bp, Homo sapiens
  chr2:239006881-239006933
  hypo
cgtggccaggaacgcgctccggctcagcgtgggccgcagcaccaccagggcc

SEQ ID NO: 376622 - DNA, 270 bp, Homo sapiens; identical to SEQ ID NO: 345782
  chr2:239074309-239074579
  hypo

SEQ ID NO: 376623 - DNA, 147 bp, Homo sapiens; identical to SEQ ID NO: 353252
  chr2:239079151-239079298
  hypo

SEQ ID NO: 376624 - DNA, 67 bp, Homo sapiens; identical to SEQ ID NO: 347954
  chr2:239082208-239082275
  hypo

SEQ ID NO: 376625 - DNA, 42 bp, Homo sapiens; identical to SEQ ID NO: 345783
  chr2:239083093-239083135
  hypo

SEQ ID NO: 376626 - DNA, 34 bp, Homo sapiens; identical to SEQ ID NO: 337940
  chr2:239096420-239096454
  hypo

SEQ ID NO: 376627 - DNA, 108 bp, Homo sapiens; identical to SEQ ID NO: 337941
  chr2:239188890-239188998
  hypo

SEQ ID NO: 376628 - DNA, 193 bp, Homo sapiens; identical to SEQ ID NO: 337942
  chr2:239316302-239316495
  hypo

SEQ ID NO: 376629 - DNA, 448 bp, Homo sapiens; identical to SEQ ID NO: 337943
  chr2:239800534-239800982
  hypo

SEQ ID NO: 376630 - DNA, 104 bp, Homo sapiens; identical to SEQ ID NO: 363139
  chr2:239888414-239888518
  hypo

SEQ ID NO: 376631 - DNA, 76 bp, Homo sapiens; identical to SEQ ID NO: 363140
  chr2:239888789-239888865
  hypo

SEQ ID NO: 376632 - DNA, 314 bp, Homo sapiens; identical to SEQ ID NO: 337945
  chr2:239949585-239949899
  hypo

SEQ ID NO: 376633 - DNA, 902 bp, Homo sapiens; identical to SEQ ID NO: 337947
  chr2:239969842-239970744
  hypo

SEQ ID NO: 376634 - DNA, 811 bp, Homo sapiens; identical to SEQ ID NO: 337948
  chr2:239973912-239974723
  hypo

SEQ ID NO: 376635 - DNA, 161 bp, Homo sapiens; identical to SEQ ID NO: 337949
  chr2:240061326-240061487
  hypo

SEQ ID NO: 376636 - DNA, 139 bp, Homo sapiens; identical to SEQ ID NO: 363145
  chr2:240165157-240165296
  hypo

SEQ ID NO: 376637 - DNA, 120 bp, Homo sapiens; identical to SEQ ID NO: 353256
  chr2:240167455-240167575
  hypo

SEQ ID NO: 376638 - DNA, 310 bp, Homo sapiens; identical to SEQ ID NO: 353257
  chr2:240167605-240167915
  hypo

SEQ ID NO: 376639 - DNA, 49 bp, Homo sapiens; identical to SEQ ID NO: 363148
  chr2:240169135-240169184
  hypo

SEQ ID NO: 376640 - DNA, 141 bp, Homo sapiens; identical to SEQ ID NO: 353258
  chr2:240213554-240213695
  hypo

SEQ ID NO: 376641 - DNA, 31 bp, Homo sapiens; identical to SEQ ID NO: 353259
  chr2:240213811-240213842
  hypo

SEQ ID NO: 376642 - DNA, 287 bp, Homo sapiens; identical to SEQ ID NO: 347956
  chr2:240226690-240226977
  hypo

SEQ ID NO: 376643 - DNA, 154 bp, Homo sapiens; identical to SEQ ID NO: 347957
  chr2:240227007-240227161
  hypo

SEQ ID NO: 376644 - DNA, 82 bp, Homo sapiens; identical to SEQ ID NO: 363153
  chr2:240270283-240270365
  hypo

SEQ ID NO: 376645 - DNA, 516 bp, Homo sapiens; identical to SEQ ID NO: 363154
  chr2:240270511-240271027
  hypo

SEQ ID NO: 376646 - DNA, 95 bp, Homo sapiens; identical to SEQ ID NO: 353262
  chr2:240316126-240316221
  hypo

SEQ ID NO: 376647 - DNA, 80 bp, Homo sapiens; identical to SEQ ID NO: 337957
  chr2:240319796-240319876
  hypo

SEQ ID NO: 376648 - DNA, 155 bp, Homo sapiens; identical to SEQ ID NO: 337958
  chr2:240567524-240567679
  hypo

SEQ ID NO: 376649 - DNA, 107 bp, Homo sapiens; identical to SEQ ID NO: 363158
  chr2:240672200-240672307
  hypo

SEQ ID NO: 376650 - DNA, 43 bp, Homo sapiens; identical to SEQ ID NO: 363159
  chr2:240690358-240690401
  hypo

SEQ ID NO: 376651 - DNA, 339 bp, Homo sapiens; identical to SEQ ID NO: 337962
  chr2:240700344-240700683
  hypo

SEQ ID NO: 376652 - DNA, 225 bp, Homo sapiens; identical to SEQ ID NO: 337963
  chr2:240725299-240725524
  hypo

SEQ ID NO: 376653 - DNA, 34 bp, Homo sapiens
  chr2:240809701-240809735
  hypo
gacacgcagcctcacctgggacacctgtcactcc

SEQ ID NO: 376654 - DNA, 296 bp, Homo sapiens; identical to SEQ ID NO: 337965
  chr2:240906462-240906758
  hypo

SEQ ID NO: 376655 - DNA, 100 bp, Homo sapiens; identical to SEQ ID NO: 337966
  chr2:240928864-240928964
  hypo

SEQ ID NO: 376656 - DNA, 213 bp, Homo sapiens; identical to SEQ ID NO: 337967
  chr2:240930596-240930809
  hypo

SEQ ID NO: 376657 - DNA, 84 bp, Homo sapiens; identical to SEQ ID NO: 363163
  chr2:240965878-240965962
  hypo

SEQ ID NO: 376658 - DNA, 209 bp, Homo sapiens; identical to SEQ ID NO: 353265
  chr2:241157300-241157509
  hypo

SEQ ID NO: 376659 - DNA, 116 bp, Homo sapiens; identical to SEQ ID NO: 363165
  chr2:241262542-241262658
  hypo

SEQ ID NO: 376660 - DNA, 244 bp, Homo sapiens; identical to SEQ ID NO: 337971
  chr2:241286564-241286808
  hypo

SEQ ID NO: 376661 - DNA, 172 bp, Homo sapiens; identical to SEQ ID NO: 337972
  chr2:241373330-241373502
  hypo

SEQ ID NO: 376662 - DNA, 788 bp, Homo sapiens; identical to SEQ ID NO: 363166
  chr2:241380563-241381351
  hypo

SEQ ID NO: 376663 - DNA, 112 bp, Homo sapiens; identical to SEQ ID NO: 357518
  chr2:241393469-241393581
  hypo

SEQ ID NO: 376664 - DNA, 360 bp, Homo sapiens; identical to SEQ ID NO: 347959
  chr2:241542357-241542717
  hypo

SEQ ID NO: 376665 - DNA, 298 bp, Homo sapiens; identical to SEQ ID NO: 337977
  chr2:241689824-241690122
  hypo

SEQ ID NO: 376666 - DNA, 136 bp, Homo sapiens; identical to SEQ ID NO: 363169
  chr2:241697788-241697924
  hypo

SEQ ID NO: 376667 - DNA, 527 bp, Homo sapiens
  chr2:241721648-241722175
  hypo
cgcttcctctcagggctccccagccctctccatgtccgaggggctcctccgcgcccctttcagctcctcccagggcccccacgccccccgggccacactttcccacctcggtgtctcccagcagcccccgccccaggccctgccgtgaggccgccccggacgccctccgtccccgcaggcacaggcaccgcacggggcctcccacacccgctttcttccttcccgggatccacccccacgtcccccatctcccagcgcactcactgcccgccccgcccctcaccacagggcgccaatgcagggcagacaccgccaccagcctcccgcacctgccccggggctgaaggaagccgcttaccttgttgggtccggagtcctgaaaaggaaaagacagagagaggctgaggcccggagcgaagctggcgcgggctgtgggggcggaagagcaggcggcccggctgcctcgccctggccatgactcaggctctaccaccccgtggtctcctagacagcagctcccccaggca

SEQ ID NO: 376668 - DNA, 233 bp, Homo sapiens
  chr2:241722242-241722475
  hypo
ccatagccccactttacaggcggggaaactgagggtcccgggagaaaccagggcccctaccccttctccagcatgtgacactctggccatctccgggctctcccttgaacctggccacctcccagacacagggcccggaaacgagggtgacaggggcaggatggggcgccaaagaccctctggggttctggctatggaagccgggccgggccactcaccatttcagccagggc

SEQ ID NO: 376669 - DNA, 433 bp, Homo sapiens; identical to SEQ ID NO: 337980
  chr2:241724232-241724665
  hypo

SEQ ID NO: 376670 - DNA, 196 bp, Homo sapiens; identical to SEQ ID NO: 353267
  chr2:241989264-241989460
  hypo

SEQ ID NO: 376671 - DNA, 462 bp, Homo sapiens; identical to SEQ ID NO: 345784
  chr2:242004407-242004869
  hypo

SEQ ID NO: 376672 - DNA, 171 bp, Homo sapiens
  chr2:242009173-242009344
  hypo
cgtgccagcccacaccccgcctcggcactgtaccattctccataataaagaatctggcttccagcaaggctgcggcagcccatgtccggttctcaaaccgtgttcttgccagaagaccctgtgggcaccccctcacctctccctgctcctgcctcatccagggcccctgcc

SEQ ID NO: 376673 - DNA, 56 bp, Homo sapiens; identical to SEQ ID NO: 363172
  chr2:242148880-242148936
  hypo

SEQ ID NO: 376674 - DNA, 339 bp, Homo sapiens; identical to SEQ ID NO: 337986
  chr2:242169887-242170226
  hypo

SEQ ID NO: 376675 - DNA, 131 bp, Homo sapiens; identical to SEQ ID NO: 337987
  chr2:242190665-242190796
  hypo

SEQ ID NO: 376676 - DNA, 82 bp, Homo sapiens; identical to SEQ ID NO: 331676
  chr2:242269474-242269556
  hypo

SEQ ID NO: 376677 - DNA, 131 bp, Homo sapiens; identical to SEQ ID NO: 337989
  chr2:242277184-242277315
  hypo

SEQ ID NO: 376678 - DNA, 477 bp, Homo sapiens; identical to SEQ ID NO: 337990
  chr2:242350123-242350600
  hypo

SEQ ID NO: 376679 - DNA, 241 bp, Homo sapiens; identical to SEQ ID NO: 345785
  chr2:242436503-242436744
  hypo

SEQ ID NO: 376680 - DNA, 326 bp, Homo sapiens; identical to SEQ ID NO: 337992
  chr2:242440848-242441174
  hypo

SEQ ID NO: 376681 - DNA, 145 bp, Homo sapiens; identical to SEQ ID NO: 353273
  chr2:242523762-242523907
  hypo

SEQ ID NO: 376682 - DNA, 222 bp, Homo sapiens; identical to SEQ ID NO: 208696
  chr2:242524147-242524369
  hypo

SEQ ID NO: 376683 - DNA, 46 bp, Homo sapiens; identical to SEQ ID NO: 347964
  chr2:242554503-242554549
  hypo

SEQ ID NO: 376684 - DNA, 54 bp, Homo sapiens; identical to SEQ ID NO: 347965
  chr2:242554624-242554678
  hypo

SEQ ID NO: 376685 - DNA, 276 bp, Homo sapiens; identical to SEQ ID NO: 337996
  chr2:242566832-242567108
  hypo

SEQ ID NO: 376686 - DNA, 373 bp, Homo sapiens; identical to SEQ ID NO: 337997
  chr2:242572260-242572633
  hypo

SEQ ID NO: 376687 - DNA, 222 bp, Homo sapiens; identical to SEQ ID NO: 251927
  chr2:242599563-242599785
  hypo

SEQ ID NO: 376688 - DNA, 43 bp, Homo sapiens; identical to SEQ ID NO: 363187
  chr2:242602207-242602250
  hypo

SEQ ID NO: 376689 - DNA, 39 bp, Homo sapiens; identical to SEQ ID NO: 363188
  chr2:242602349-242602388
  hypo

SEQ ID NO: 376690 - DNA, 567 bp, Homo sapiens; identical to SEQ ID NO: 338000
  chr2:242616820-242617387
  hypo

SEQ ID NO: 376691 - DNA, 130 bp, Homo sapiens; identical to SEQ ID NO: 347966
  chr2:242617764-242617894
  hypo

SEQ ID NO: 376692 - DNA, 531 bp, Homo sapiens; identical to SEQ ID NO: 347967
  chr2:242617924-242618455
  hypo

SEQ ID NO: 376693 - DNA, 101 bp, Homo sapiens; identical to SEQ ID NO: 338002
  chr2:242618731-242618832
  hypo

SEQ ID NO: 376694 - DNA, 726 bp, Homo sapiens; identical to SEQ ID NO: 338003
  chr2:242664623-242665349
  hypo

SEQ ID NO: 376695 - DNA, 72 bp, Homo sapiens
  chr2:242713983-242714055
  hypo
cgcccgcctgcagtgtcggctgaagagggtaacgtgcgtgcgccccggctgctcccggctgctcccggctgc

SEQ ID NO: 376696 - DNA, 57 bp, Homo sapiens
  chr2:242714085-242714142
  hypo
ctccccggctgctccccggctgctccccgctgctcccggctgctctcggctgctccc

SEQ ID NO: 376697 - DNA, 75 bp, Homo sapiens; identical to SEQ ID NO: 353281
  chr2:242735082-242735157
  hypo

SEQ ID NO: 376698 - DNA, 268 bp, Homo sapiens; identical to SEQ ID NO: 353282
  chr2:242735246-242735514
  hypo

SEQ ID NO: 376699 - DNA, 68 bp, Homo sapiens
  chr2:242766046-242766114
  hypo
cgacgttctctttgtctgactttctgctcctgccgcgtgcgcagaggggcgaggaggaagcatttgcg

SEQ ID NO: 376700 - DNA, 275 bp, Homo sapiens; identical to SEQ ID NO: 301198
  chr2:242766213-242766488
  hypo

SEQ ID NO: 376701 - DNA, 130 bp, Homo sapiens; identical to SEQ ID NO: 338007
  chr2:242793077-242793207
  hypo

SEQ ID NO: 376702 - DNA, 113 bp, Homo sapiens; identical to SEQ ID NO: 353283
  chr2:242815156-242815269
  hypo

SEQ ID NO: 376703 - DNA, 180 bp, Homo sapiens; identical to SEQ ID NO: 353284
  chr2:242925676-242925856
  hypo

SEQ ID NO: 376704 - DNA, 212 bp, Homo sapiens; identical to SEQ ID NO: 353285
  chr2:242933459-242933671
  hypo

SEQ ID NO: 376705 - DNA, 191 bp, Homo sapiens; identical to SEQ ID NO: 338015
  chr3:4347767-4347958
  hypo

SEQ ID NO: 376706 - DNA, 326 bp, Homo sapiens; identical to SEQ ID NO: 349725
  chr3:4909962-4910288
  hypo

SEQ ID NO: 376707 - DNA, 210 bp, Homo sapiens; identical to SEQ ID NO: 349726
  chr3:4910550-4910760
  hypo

SEQ ID NO: 376708 - DNA, 231 bp, Homo sapiens; identical to SEQ ID NO: 345076
  chr3:5018754-5018985
  hypo

SEQ ID NO: 376709 - DNA, 143 bp, Homo sapiens; identical to SEQ ID NO: 345077
  chr3:5019132-5019275
  hypo

SEQ ID NO: 376710 - DNA, 58 bp, Homo sapiens; identical to SEQ ID NO: 338018
  chr3:5165843-5165901
  hypo

SEQ ID NO: 376711 - DNA, 76 bp, Homo sapiens; identical to SEQ ID NO: 357538
  chr3:6903188-6903264
  hypo

SEQ ID NO: 376712 - DNA, 223 bp, Homo sapiens; identical to SEQ ID NO: 208732
  chr3:8595841-8596064
  hypo

SEQ ID NO: 376713 - DNA, 58 bp, Homo sapiens; identical to SEQ ID NO: 338023
  chr3:10011425-10011483
  hypo

SEQ ID NO: 376714 - DNA, 110 bp, Homo sapiens; identical to SEQ ID NO: 338024
  chr3:10131952-10132062
  hypo

SEQ ID NO: 376715 - DNA, 208 bp, Homo sapiens; identical to SEQ ID NO: 338025
  chr3:10541012-10541220
  hypo

SEQ ID NO: 376716 - DNA, 97 bp, Homo sapiens; identical to SEQ ID NO: 338026
  chr3:10638636-10638733
  hypo

SEQ ID NO: 376717 - DNA, 216 bp, Homo sapiens; identical to SEQ ID NO: 338027
  chr3:11578015-11578231
  hypo

SEQ ID NO: 376718 - DNA, 165 bp, Homo sapiens; identical to SEQ ID NO: 353292
  chr3:11581157-11581322
  hypo

SEQ ID NO: 376719 - DNA, 546 bp, Homo sapiens; identical to SEQ ID NO: 338029
  chr3:11655438-11655984
  hypo

SEQ ID NO: 376720 - DNA, 60 bp, Homo sapiens; identical to SEQ ID NO: 208755
  chr3:12586167-12586227
  hypo

SEQ ID NO: 376721 - DNA, 124 bp, Homo sapiens
  chr3:12596394-12596518
  hypo
cgggaactaaattgacaggagactgagacttttcactttacgcttttaaaatatttgaacataataacgttcagatcgtgaatgtattccataaagaatgagataagctgaattttaaaaataa

SEQ ID NO: 376722 - DNA, 79 bp, Homo sapiens; identical to SEQ ID NO: 338032
  chr3:12605281-12605360
  hypo

SEQ ID NO: 376723 - DNA, 94 bp, Homo sapiens; identical to SEQ ID NO: 338033
  chr3:12626586-12626680
  hypo

SEQ ID NO: 376724 - DNA, 33 bp, Homo sapiens; identical to SEQ ID NO: 338034
  chr3:12743274-12743307
  hypo

SEQ ID NO: 376725 - DNA, 79 bp, Homo sapiens; identical to SEQ ID NO: 353297
  chr3:12976966-12977045
  hypo

SEQ ID NO: 376726 - DNA, 192 bp, Homo sapiens; identical to SEQ ID NO: 353298
  chr3:12977144-12977336
  hypo

SEQ ID NO: 376727 - DNA, 32 bp, Homo sapiens; identical to SEQ ID NO: 363216
  chr3:13367336-13367368
  hypo

SEQ ID NO: 376728 - DNA, 156 bp, Homo sapiens; identical to SEQ ID NO: 363217
  chr3:13367420-13367576
  hypo

SEQ ID NO: 376729 - DNA, 270 bp, Homo sapiens; identical to SEQ ID NO: 363218
  chr3:13611739-13612009
  hypo

SEQ ID NO: 376730 - DNA, 186 bp, Homo sapiens; identical to SEQ ID NO: 363219
  chr3:13612341-13612527
  hypo

SEQ ID NO: 376731 - DNA, 478 bp, Homo sapiens; identical to SEQ ID NO: 349738
  chr3:13936742-13937220
  hypo

SEQ ID NO: 376732 - DNA, 124 bp, Homo sapiens; identical to SEQ ID NO: 349739
  chr3:13937250-13937374
  hypo

SEQ ID NO: 376733 - DNA, 150 bp, Homo sapiens; identical to SEQ ID NO: 338042
  chr3:14386858-14387008
  hypo

SEQ ID NO: 376734 - DNA, 92 bp, Homo sapiens; identical to SEQ ID NO: 331702
  chr3:14443834-14443926
  hypo

SEQ ID NO: 376735 - DNA, 578 bp, Homo sapiens; identical to SEQ ID NO: 331703
  chr3:14443998-14444576
  hypo

SEQ ID NO: 376736 - DNA, 162 bp, Homo sapiens
  chr3:14514245-14514407
  hypo
cgattcggagaagggacccacatttctgtgtgagctgatcattgtctgggccatcgtaataagttgcaagtgcccaggagaagcctacgccacactcaggattctgtgctccctggagcgtgcgaggggctgggcattggctccctcccgtgctttatacac

SEQ ID NO: 376737 - DNA, 53 bp, Homo sapiens; identical to SEQ ID NO: 338047
  chr3:15079942-15079995
  hypo

SEQ ID NO: 376738 - DNA, 78 bp, Homo sapiens; identical to SEQ ID NO: 345789
  chr3:15123770-15123848
  hypo

SEQ ID NO: 376739 - DNA, 42 bp, Homo sapiens; identical to SEQ ID NO: 345790
  chr3:15123992-15124034
  hypo

SEQ ID NO: 376740 - DNA, 78 bp, Homo sapiens; identical to SEQ ID NO: 345081
  chr3:16555426-16555504
  hypo

SEQ ID NO: 376741 - DNA, 107 bp, Homo sapiens; identical to SEQ ID NO: 357559
  chr3:16925425-16925532
  hypo

SEQ ID NO: 376742 - DNA, 73 bp, Homo sapiens; identical to SEQ ID NO: 280940
  chr3:16925583-16925656
  hypo

SEQ ID NO: 376743 - DNA, 230 bp, Homo sapiens; identical to SEQ ID NO: 280941
  chr3:16925705-16925935
  hypo

SEQ ID NO: 376744 - DNA, 255 bp, Homo sapiens; identical to SEQ ID NO: 280942
  chr3:16925965-16926220
  hypo

SEQ ID NO: 376745 - DNA, 340 bp, Homo sapiens; identical to SEQ ID NO: 349744
  chr3:16926663-16927003
  hypo

SEQ ID NO: 376746 - DNA, 102 bp, Homo sapiens; identical to SEQ ID NO: 338052
  chr3:18462342-18462444
  hypo

SEQ ID NO: 376747 - DNA, 269 bp, Homo sapiens; identical to SEQ ID NO: 331711
  chr3:23957838-23958107
  hypo

SEQ ID NO: 376748 - DNA, 400 bp, Homo sapiens; identical to SEQ ID NO: 338054
  chr3:24160995-24161395
  hypo

SEQ ID NO: 376749 - DNA, 989 bp, Homo sapiens; identical to SEQ ID NO: 331712
  chr3:24536360-24537349
  hypo

SEQ ID NO: 376750 - DNA, 295 bp, Homo sapiens; identical to SEQ ID NO: 363238
  chr3:25728355-25728650
  hypo

SEQ ID NO: 376751 - DNA, 243 bp, Homo sapiens; identical to SEQ ID NO: 331723
  chr3:30648808-30649051
  hypo

SEQ ID NO: 376752 - DNA, 155 bp, Homo sapiens; identical to SEQ ID NO: 338059
  chr3:30713687-30713842
  hypo

SEQ ID NO: 376753 - DNA, 123 bp, Homo sapiens; identical to SEQ ID NO: 338060
  chr3:31494150-31494273
  hypo

SEQ ID NO: 376754 - DNA, 168 bp, Homo sapiens; identical to SEQ ID NO: 357574
  chr3:32279558-32279726
  hypo

SEQ ID NO: 376755 - DNA, 558 bp, Homo sapiens; identical to SEQ ID NO: 345084
  chr3:32433054-32433612
  hypo

SEQ ID NO: 376756 - DNA, 200 bp, Homo sapiens; identical to SEQ ID NO: 198867
  chr3:32433665-32433865
  hypo

SEQ ID NO: 376757 - DNA, 81 bp, Homo sapiens; identical to SEQ ID NO: 345086
  chr3:32434068-32434149
  hypo

SEQ ID NO: 376758 - DNA, 328 bp, Homo sapiens; identical to SEQ ID NO: 338063
  chr3:33216338-33216666
  hypo

SEQ ID NO: 376759 - DNA, 92 bp, Homo sapiens; identical to SEQ ID NO: 338065
  chr3:33437677-33437769
  hypo

SEQ ID NO: 376760 - DNA, 123 bp, Homo sapiens; identical to SEQ ID NO: 338066
  chr3:33689123-33689246
  hypo

SEQ ID NO: 376761 - DNA, 173 bp, Homo sapiens; identical to SEQ ID NO: 338067
  chr3:33818924-33819097
  hypo

SEQ ID NO: 376762 - DNA, 118 bp, Homo sapiens; identical to SEQ ID NO: 353315
  chr3:36984260-36984378
  hypo

SEQ ID NO: 376763 - DNA, 240 bp, Homo sapiens; identical to SEQ ID NO: 357579
  chr3:36985571-36985811
  hypo

SEQ ID NO: 376764 - DNA, 1420 bp, Homo sapiens; identical to SEQ ID NO: 331732
  chr3:37033979-37035399
  hypo

SEQ ID NO: 376765 - DNA, 119 bp, Homo sapiens; identical to SEQ ID NO: 338072
  chr3:37438337-37438456
  hypo

SEQ ID NO: 376766 - DNA, 205 bp, Homo sapiens; identical to SEQ ID NO: 338076
  chr3:39185671-39185876
  hypo

SEQ ID NO: 376767 - DNA, 167 bp, Homo sapiens; identical to SEQ ID NO: 331742
  chr3:41240162-41240329
  hypo

SEQ ID NO: 376768 - DNA, 136 bp, Homo sapiens; identical to SEQ ID NO: 363252
  chr3:41289199-41289335
  hypo

SEQ ID NO: 376769 - DNA, 242 bp, Homo sapiens; identical to SEQ ID NO: 338079
  chr3:42190950-42191192
  hypo

SEQ ID NO: 376770 - DNA, 98 bp, Homo sapiens; identical to SEQ ID NO: 363254
  chr3:42222621-42222719
  hypo

SEQ ID NO: 376771 - DNA, 277 bp, Homo sapiens
  chr3:42905952-42906229
  hypo
cgcagcactacaggacgtcgggactgggcatttccttccaacatggccgccactgcctctccgcagccactcgccactgaggatgccgattctgagaatagcagcttctattactatgactacctggatgaagtggccttcatgctctgcaggaaggatgcagtggtgtcctttggcaaagtcttcctcccagtcttctatagcctgatttttgtgttgggcctcagcgggaacctccttcttctcatggtcttgctccgttacgtgcctcgcaggc

SEQ ID NO: 376772 - DNA, 243 bp, Homo sapiens; identical to SEQ ID NO: 345088
  chr3:43147038-43147281
  hypo

SEQ ID NO: 376773 - DNA, 105 bp, Homo sapiens; identical to SEQ ID NO: 345089
  chr3:43147607-43147712
  hypo

SEQ ID NO: 376774 - DNA, 149 bp, Homo sapiens; identical to SEQ ID NO: 345798
  chr3:43655492-43655641
  hypo

SEQ ID NO: 376775 - DNA, 219 bp, Homo sapiens; identical to SEQ ID NO: 338086
  chr3:44945281-44945500
  hypo

SEQ ID NO: 376776 - DNA, 255 bp, Homo sapiens; identical to SEQ ID NO: 338088
  chr3:45719334-45719589
  hypo

SEQ ID NO: 376777 - DNA, 114 bp, Homo sapiens; identical to SEQ ID NO: 338089
  chr3:45750569-45750683
  hypo

SEQ ID NO: 376778 - DNA, 396 bp, Homo sapiens; identical to SEQ ID NO: 353322
  chr3:46009350-46009746
  hypo

SEQ ID NO: 376779 - DNA, 316 bp, Homo sapiens; identical to SEQ ID NO: 353323
  chr3:46009776-46010092
  hypo

SEQ ID NO: 376780 - DNA, 81 bp, Homo sapiens; identical to SEQ ID NO: 338091
  chr3:47239328-47239409
  hypo

SEQ ID NO: 376781 - DNA, 122 bp, Homo sapiens; identical to SEQ ID NO: 338095
  chr3:48703720-48703842
  hypo

SEQ ID NO: 376782 - DNA, 118 bp, Homo sapiens; identical to SEQ ID NO: 363263
  chr3:48731393-48731511
  hypo

SEQ ID NO: 376783 - DNA, 97 bp, Homo sapiens; identical to SEQ ID NO: 338098
  chr3:49662414-49662511
  hypo

SEQ ID NO: 376784 - DNA, 557 bp, Homo sapiens; identical to SEQ ID NO: 347983
  chr3:49720262-49720819
  hypo

SEQ ID NO: 376785 - DNA, 37 bp, Homo sapiens; identical to SEQ ID NO: 363266
  chr3:49755498-49755535
  hypo

SEQ ID NO: 376786 - DNA, 233 bp, Homo sapiens; identical to SEQ ID NO: 363267
  chr3:49755593-49755826
  hypo

SEQ ID NO: 376787 - DNA, 233 bp, Homo sapiens; identical to SEQ ID NO: 349767
  chr3:49906737-49906970
  hypo

SEQ ID NO: 376788 - DNA, 49 bp, Homo sapiens; identical to SEQ ID NO: 349768
  chr3:49907379-49907428
  hypo

SEQ ID NO: 376789 - DNA, 143 bp, Homo sapiens; identical to SEQ ID NO: 338103
  chr3:50144939-50145082
  hypo

SEQ ID NO: 376790 - DNA, 356 bp, Homo sapiens; identical to SEQ ID NO: 346562
  chr3:50374299-50374655
  hypo

SEQ ID NO: 376791 - DNA, 62 bp, Homo sapiens; identical to SEQ ID NO: 338107
  chr3:51623983-51624045
  hypo

SEQ ID NO: 376792 - DNA, 138 bp, Homo sapiens; identical to SEQ ID NO: 357614
  chr3:51990500-51990638
  hypo

SEQ ID NO: 376793 - DNA, 76 bp, Homo sapiens; identical to SEQ ID NO: 363274
  chr3:52415754-52415830
  hypo

SEQ ID NO: 376794 - DNA, 232 bp, Homo sapiens; identical to SEQ ID NO: 338110
  chr3:52440854-52441086
  hypo

SEQ ID NO: 376795 - DNA, 466 bp, Homo sapiens
  chr3:52552661-52553127
  hypo
ctgggtgctctggtggtggccctgcgtgggctgaggcggcagtcagggaccccactcccctcgcgactctgctccaggatgagctggcccggattcgtgcgcatcgccagctggtgtttcgctaccacgtggttggctgtcggcggctgcggagcgaggacctgctggagcaggggtacgccacggccctctcagggcacccactgcgcttcagcgagagggaggtgagccctggccctggcctgccccgctccatcccgccccgccccgcccctgcgcgccattgccccaggccccacggcccacgcagtcaagaaccccacctcccctagccagggggcgcctcctgctgagtccagcccgggactccgcccttgacctgggcctcgcccactgctgtgggcctgtcctgcccagcgcccttgtgtccttccgaggactgagccccgccccctgccctgactcc

SEQ ID NO: 376796 - DNA, 551 bp, Homo sapiens; identical to SEQ ID NO: 363276
  chr3:52899918-52900469
  hypo

SEQ ID NO: 376797 - DNA, 215 bp, Homo sapiens; identical to SEQ ID NO: 208907
  chr3:52900499-52900714
  hypo

SEQ ID NO: 376798 - DNA, 329 bp, Homo sapiens; identical to SEQ ID NO: 208908
  chr3:53032404-53032733
  hypo

SEQ ID NO: 376799 - DNA, 199 bp, Homo sapiens; identical to SEQ ID NO: 331773
  chr3:53195788-53195987
  hypo

SEQ ID NO: 376800 - DNA, 572 bp, Homo sapiens; identical to SEQ ID NO: 357616
  chr3:53527829-53528401
  hypo

SEQ ID NO: 376801 - DNA, 157 bp, Homo sapiens; identical to SEQ ID NO: 338116
  chr3:54237704-54237861
  hypo

SEQ ID NO: 376802 - DNA, 506 bp, Homo sapiens; identical to SEQ ID NO: 338117
  chr3:54660189-54660695
  hypo

SEQ ID NO: 376803 - DNA, 148 bp, Homo sapiens; identical to SEQ ID NO: 345800
  chr3:56718095-56718243
  hypo

SEQ ID NO: 376804 - DNA, 170 bp, Homo sapiens; identical to SEQ ID NO: 345801
  chr3:56718281-56718451
  hypo

SEQ ID NO: 376805 - DNA, 205 bp, Homo sapiens; identical to SEQ ID NO: 370121
  chr3:57261363-57261568
  hypo

SEQ ID NO: 376806 - DNA, 261 bp, Homo sapiens; identical to SEQ ID NO: 338120
  chr3:57679351-57679612
  hypo

SEQ ID NO: 376807 - DNA, 111 bp, Homo sapiens; identical to SEQ ID NO: 338121
  chr3:57679987-57680098
  hypo

SEQ ID NO: 376808 - DNA, 143 bp, Homo sapiens; identical to SEQ ID NO: 66140
  chr3:58136696-58136839
  hypo

SEQ ID NO: 376809 - DNA, 1461 bp, Homo sapiens; identical to SEQ ID NO: 370123
  chr3:61546692-61548153
  hypo

SEQ ID NO: 376810 - DNA, 129 bp, Homo sapiens; identical to SEQ ID NO: 357631
  chr3:64673134-64673263
  hypo

SEQ ID NO: 376811 - DNA, 507 bp, Homo sapiens; identical to SEQ ID NO: 357632
  chr3:64673419-64673926
  hypo

SEQ ID NO: 376812 - DNA, 1318 bp, Homo sapiens; identical to SEQ ID NO: 281269
  chr3:66024122-66025440
  hypo

SEQ ID NO: 376813 - DNA, 56 bp, Homo sapiens; identical to SEQ ID NO: 349784
  chr3:66025506-66025562
  hypo

SEQ ID NO: 376814 - DNA, 435 bp, Homo sapiens; identical to SEQ ID NO: 338126
  chr3:66452230-66452665
  hypo

SEQ ID NO: 376815 - DNA, 1570 bp, Homo sapiens; identical to SEQ ID NO: 331800
  chr3:66550318-66551888
  hypo

SEQ ID NO: 376816 - DNA, 1076 bp, Homo sapiens; identical to SEQ ID NO: 331801
  chr3:67048291-67049367
  hypo

SEQ ID NO: 376817 - DNA, 261 bp, Homo sapiens; identical to SEQ ID NO: 338129
  chr3:69230152-69230413
  hypo

SEQ ID NO: 376818 - DNA, 221 bp, Homo sapiens; identical to SEQ ID NO: 349787
  chr3:69434926-69435147
  hypo

SEQ ID NO: 376819 - DNA, 778 bp, Homo sapiens; identical to SEQ ID NO: 331805
  chr3:69788429-69789207
  hypo

SEQ ID NO: 376820 - DNA, 82 bp, Homo sapiens
  chr3:69937621-69937703
  hypo
cggtgccttaattagccacatgttctttttacctcctgggaaataagtacgggataaaattggggatcaagccgtagacgta

SEQ ID NO: 376821 - DNA, 264 bp, Homo sapiens; identical to SEQ ID NO: 338134
  chr3:71036199-71036463
  hypo

SEQ ID NO: 376822 - DNA, 1710 bp, Homo sapiens; identical to SEQ ID NO: 331806
  chr3:71113110-71114820
  hypo

SEQ ID NO: 376823 - DNA, 76 bp, Homo sapiens; identical to SEQ ID NO: 353343
  chr3:71187313-71187389
  hypo

SEQ ID NO: 376824 - DNA, 123 bp, Homo sapiens; identical to SEQ ID NO: 353344
  chr3:71187419-71187542
  hypo

SEQ ID NO: 376825 - DNA, 1327 bp, Homo sapiens; identical to SEQ ID NO: 349789
  chr3:71630573-71631900
  hypo

SEQ ID NO: 376826 - DNA, 367 bp, Homo sapiens; identical to SEQ ID NO: 370145
  chr3:71834745-71835112
  hypo

SEQ ID NO: 376827 - DNA, 45 bp, Homo sapiens; identical to SEQ ID NO: 338139
  chr3:72420279-72420324
  hypo

SEQ ID NO: 376828 - DNA, 178 bp, Homo sapiens; identical to SEQ ID NO: 338140
  chr3:72618825-72619003
  hypo

SEQ ID NO: 376829 - DNA, 63 bp, Homo sapiens; identical to SEQ ID NO: 338141
  chr3:72703941-72704004
  hypo

SEQ ID NO: 376830 - DNA, 81 bp, Homo sapiens; identical to SEQ ID NO: 338143
  chr3:73045605-73045686
  hypo

SEQ ID NO: 376831 - DNA, 69 bp, Homo sapiens; identical to SEQ ID NO: 338144
  chr3:87297469-87297538
  hypo

SEQ ID NO: 376832 - DNA, 280 bp, Homo sapiens; identical to SEQ ID NO: 345095
  chr3:98619774-98620054
  hypo

SEQ ID NO: 376833 - DNA, 58 bp, Homo sapiens; identical to SEQ ID NO: 345096
  chr3:98621126-98621184
  hypo

SEQ ID NO: 376834 - DNA, 101 bp, Homo sapiens; identical to SEQ ID NO: 346575
  chr3:99594790-99594891
  hypo

SEQ ID NO: 376835 - DNA, 299 bp, Homo sapiens; identical to SEQ ID NO: 349796
  chr3:101497996-101498295
  hypo

SEQ ID NO: 376836 - DNA, 98 bp, Homo sapiens; identical to SEQ ID NO: 349797
  chr3:101498512-101498610
  hypo

SEQ ID NO: 376837 - DNA, 459 bp, Homo sapiens; identical to SEQ ID NO: 346577
  chr3:105088087-105088546
  hypo

SEQ ID NO: 376838 - DNA, 196 bp, Homo sapiens; identical to SEQ ID NO: 338151
  chr3:106362774-106362970
  hypo

SEQ ID NO: 376839 - DNA, 69 bp, Homo sapiens; identical to SEQ ID NO: 338152
  chr3:107520023-107520092
  hypo

SEQ ID NO: 376840 - DNA, 92 bp, Homo sapiens; identical to SEQ ID NO: 353355
  chr3:107530307-107530399
  hypo

SEQ ID NO: 376841 - DNA, 151 bp, Homo sapiens; identical to SEQ ID NO: 199044
  chr3:112930655-112930806
  hypo

SEQ ID NO: 376842 - DNA, 1176 bp, Homo sapiens; identical to SEQ ID NO: 331832
  chr3:113251180-113252356
  hypo

SEQ ID NO: 376843 - DNA, 235 bp, Homo sapiens
  chr3:114070275-114070510
  hypo
cgggagtgccccgcggcgtgtcctggcccgagtcctggatccccgggaacacatcgcccacgttctgtgacacgatgcgcgtgcactcgtcgatgactgttttgatctgcaggatgctggcggccgtgaggatctgcagagcttccgactgcgagacccgtagcacgccgctgtacatgaagtcaatgagcttttgcactgactgcactgacaccaccgacgggatctcgatgtc

SEQ ID NO: 376844 - DNA, 345 bp, Homo sapiens; identical to SEQ ID NO: 370175
  chr3:115377294-115377639
  hypo

SEQ ID NO: 376845 - DNA, 137 bp, Homo sapiens; identical to SEQ ID NO: 338158
  chr3:119535947-119536084
  hypo

SEQ ID NO: 376846 - DNA, 59 bp, Homo sapiens; identical to SEQ ID NO: 199059
  chr3:120627258-120627317
  hypo

SEQ ID NO: 376847 - DNA, 84 bp, Homo sapiens; identical to SEQ ID NO: 345809
  chr3:121500635-121500719
  hypo

SEQ ID NO: 376848 - DNA, 32 bp, Homo sapiens; identical to SEQ ID NO: 363320
  chr3:121637776-121637808
  hypo

SEQ ID NO: 376849 - DNA, 343 bp, Homo sapiens
  chr3:123049661-123050004
  hypo
cggcaggtcagtcagtcgctcgggctgtggacagtcccagggagggagacggtacccggggggtggacacttacgagatggcctcgatcatgtccatgcccatctccacacagcagtgggcgtggtcagcccttgcttcaggcagccccgagacgcagtaataacaatccccaaggatcttaatacgtaaacagtgattctcctggaaagcaaattaattttacaaattaaaaatagtaggaaagagaagtgggagggaaagaaacgagaagcaaaaagattcaccccgtgcctggaataacttgccttttagggcagtgagcgcaggcccacgccggaactc

SEQ ID NO: 376850 - DNA, 154 bp, Homo sapiens; identical to SEQ ID NO: 357668
  chr3:123168102-123168256
  hypo

SEQ ID NO: 376851 - DNA, 276 bp, Homo sapiens; identical to SEQ ID NO: 370184
  chr3:123168265-123168541
  hypo

SEQ ID NO: 376852 - DNA, 731 bp, Homo sapiens; identical to SEQ ID NO: 346580
  chr3:123751654-123752385
  hypo

SEQ ID NO: 376853 - DNA, 167 bp, Homo sapiens; identical to SEQ ID NO: 338168
  chr3:124281735-124281902
  hypo

SEQ ID NO: 376854 - DNA, 360 bp, Homo sapiens; identical to SEQ ID NO: 338169
  chr3:124515276-124515636
  hypo

SEQ ID NO: 376855 - DNA, 435 bp, Homo sapiens; identical to SEQ ID NO: 338170
  chr3:124716572-124717007
  hypo

SEQ ID NO: 376856 - DNA, 438 bp, Homo sapiens; identical to SEQ ID NO: 345099
  chr3:124773932-124774370
  hypo

SEQ ID NO: 376857 - DNA, 224 bp, Homo sapiens; identical to SEQ ID NO: 338172
  chr3:126090337-126090561
  hypo

SEQ ID NO: 376858 - DNA, 93 bp, Homo sapiens; identical to SEQ ID NO: 363327
  chr3:126261836-126261929
  hypo

SEQ ID NO: 376859 - DNA, 187 bp, Homo sapiens; identical to SEQ ID NO: 338174
  chr3:126472179-126472366
  hypo

SEQ ID NO: 376860 - DNA, 174 bp, Homo sapiens; identical to SEQ ID NO: 338175
  chr3:127326124-127326298
  hypo

SEQ ID NO: 376861 - DNA, 420 bp, Homo sapiens
  chr3:127394412-127394832
  hypo
cgcccaggcttgtttttcttaatagtccctgccatcgttaggtagtgggttgattgtcctgcctcactagagtataagttcagcaggacagggacctgtgtctcgttcactgctgtgctccagtgtgtgggacaagcccagccaccaagtcagctctccgttctgtgttgtctgtcttccgtgtgagtgagtatgtgcctgtgtgagtgcacacagacgtgcccattcgcctagcccttgactgggagggtgttggggtcagagtgggcccagggtaatttgggaaggcatcgccagagattcggagccccatgtgtgggaaggtggggaggagggacagggagattagaatttcccccaggccccttccctgctaactggtgagccctgcctcccccaggagcccgctgcgaggccaac

SEQ ID NO: 376862 - DNA, 278 bp, Homo sapiens
  chr3:127394909-127395187
  hypo
cacggcttcctgcaggaggcgggattactatgacgacttcttgcagcggtgagccagggcacacgaggggtgcagcatggggtgcggtggccctggtgggtgtggcgagtctgctctgactgtggcctgcactgggttctgagtgctccgaggaatggggtggggctgtgccaagtatcctccctcctggcttgtccctccccaggcttctagagcagggcatccacagtgacgtggtctttgtagtacacgggaagccattccgggtgcatcgctgc

SEQ ID NO: 376863 - DNA, 113 bp, Homo sapiens; identical to SEQ ID NO: 363330
  chr3:127395778-127395891
  hypo

SEQ ID NO: 376864 - DNA, 154 bp, Homo sapiens; identical to SEQ ID NO: 338178
  chr3:127505560-127505714
  hypo

SEQ ID NO: 376865 - DNA, 70 bp, Homo sapiens; identical to SEQ ID NO: 353363
  chr3:127534744-127534814
  hypo

SEQ ID NO: 376866 - DNA, 67 bp, Homo sapiens; identical to SEQ ID NO: 209038
  chr3:127534897-127534964
  hypo

SEQ ID NO: 376867 - DNA, 122 bp, Homo sapiens; identical to SEQ ID NO: 345100
  chr3:127794271-127794393
  hypo

SEQ ID NO: 376868 - DNA, 61 bp, Homo sapiens; identical to SEQ ID NO: 338182
  chr3:128004552-128004613
  hypo

SEQ ID NO: 376869 - DNA, 57 bp, Homo sapiens
  chr3:128056326-128056383
  hypo
cgccctctctcacaggaaggctcataaacacaaggatctcgctcaagccccggcacg

SEQ ID NO: 376870 - DNA, 46 bp, Homo sapiens
  chr3:128056497-128056543
  hypo
gtcacaaccaggtttctcagcagctcctgtgctgggcactgaggac

SEQ ID NO: 376871 - DNA, 175 bp, Homo sapiens; identical to SEQ ID NO: 338185
  chr3:128340992-128341167
  hypo

SEQ ID NO: 376872 - DNA, 185 bp, Homo sapiens; identical to SEQ ID NO: 338187
  chr3:128737561-128737746
  hypo

SEQ ID NO: 376873 - DNA, 130 bp, Homo sapiens; identical to SEQ ID NO: 338188
  chr3:129231161-129231291
  hypo

SEQ ID NO: 376874 - DNA, 334 bp, Homo sapiens; identical to SEQ ID NO: 338189
  chr3:129290351-129290685
  hypo

SEQ ID NO: 376875 - DNA, 131 bp, Homo sapiens; identical to SEQ ID NO: 363340
  chr3:129982901-129983032
  hypo

SEQ ID NO: 376876 - DNA, 237 bp, Homo sapiens; identical to SEQ ID NO: 363341
  chr3:129983103-129983340
  hypo

SEQ ID NO: 376877 - DNA, 216 bp, Homo sapiens; identical to SEQ ID NO: 338193
  chr3:130424529-130424745
  hypo

SEQ ID NO: 376878 - DNA, 92 bp, Homo sapiens; identical to SEQ ID NO: 338194
  chr3:130460761-130460853
  hypo

SEQ ID NO: 376879 - DNA, 196 bp, Homo sapiens; identical to SEQ ID NO: 346590
  chr3:132756116-132756312
  hypo

SEQ ID NO: 376880 - DNA, 39 bp, Homo sapiens; identical to SEQ ID NO: 346591
  chr3:132756477-132756516
  hypo

SEQ ID NO: 376881 - DNA, 80 bp, Homo sapiens; identical to SEQ ID NO: 281503
  chr3:133748401-133748481
  hypo

SEQ ID NO: 376882 - DNA, 72 bp, Homo sapiens; identical to SEQ ID NO: 281504
  chr3:133748576-133748648
  hypo

SEQ ID NO: 376883 - DNA, 92 bp, Homo sapiens; identical to SEQ ID NO: 363348
  chr3:134080498-134080590
  hypo

SEQ ID NO: 376884 - DNA, 322 bp, Homo sapiens; identical to SEQ ID NO: 370213
  chr3:134513748-134514070
  hypo

SEQ ID NO: 376885 - DNA, 295 bp, Homo sapiens; identical to SEQ ID NO: 345106
  chr3:135684609-135684904
  hypo

SEQ ID NO: 376886 - DNA, 703 bp, Homo sapiens; identical to SEQ ID NO: 199114
  chr3:138067014-138067717
  hypo

SEQ ID NO: 376887 - DNA, 106 bp, Homo sapiens; identical to SEQ ID NO: 346595
  chr3:138067747-138067853
  hypo

SEQ ID NO: 376888 - DNA, 267 bp, Homo sapiens; identical to SEQ ID NO: 349830
  chr3:139258672-139258939
  hypo

SEQ ID NO: 376889 - DNA, 79 bp, Homo sapiens; identical to SEQ ID NO: 338207
  chr3:139352994-139353073
  hypo

SEQ ID NO: 376890 - DNA, 1495 bp, Homo sapiens; identical to SEQ ID NO: 331891
  chr3:140660238-140661733
  hypo

SEQ ID NO: 376891 - DNA, 123 bp, Homo sapiens; identical to SEQ ID NO: 353379
  chr3:141174173-141174296
  hypo

SEQ ID NO: 376892 - DNA, 81 bp, Homo sapiens; identical to SEQ ID NO: 338212
  chr3:141495392-141495473
  hypo

SEQ ID NO: 376893 - DNA, 147 bp, Homo sapiens; identical to SEQ ID NO: 338213
  chr3:141622422-141622569
  hypo

SEQ ID NO: 376894 - DNA, 203 bp, Homo sapiens; identical to SEQ ID NO: 353381
  chr3:141656829-141657032
  hypo

SEQ ID NO: 376895 - DNA, 106 bp, Homo sapiens; identical to SEQ ID NO: 353382
  chr3:141657079-141657185
  hypo

SEQ ID NO: 376896 - DNA, 33 bp, Homo sapiens; identical to SEQ ID NO: 338215
  chr3:141664320-141664353
  hypo

SEQ ID NO: 376897 - DNA, 185 bp, Homo sapiens; identical to SEQ ID NO: 338216
  chr3:141868994-141869179
  hypo

SEQ ID NO: 376898 - DNA, 68 bp, Homo sapiens; identical to SEQ ID NO: 338217
  chr3:142103585-142103653
  hypo

SEQ ID NO: 376899 - DNA, 43 bp, Homo sapiens; identical to SEQ ID NO: 338220
  chr3:142683691-142683734
  hypo

SEQ ID NO: 376900 - DNA, 307 bp, Homo sapiens; identical to SEQ ID NO: 353385
  chr3:142895557-142895864
  hypo

SEQ ID NO: 376901 - DNA, 322 bp, Homo sapiens; identical to SEQ ID NO: 338223
  chr3:143316169-143316491
  hypo

SEQ ID NO: 376902 - DNA, 173 bp, Homo sapiens; identical to SEQ ID NO: 281571
  chr3:145878695-145878868
  hypo

SEQ ID NO: 376903 - DNA, 349 bp, Homo sapiens; identical to SEQ ID NO: 349836
  chr3:145878937-145879286
  hypo

SEQ ID NO: 376904 - DNA, 86 bp, Homo sapiens; identical to SEQ ID NO: 363368
  chr3:148705325-148705411
  hypo

SEQ ID NO: 376905 - DNA, 66 bp, Homo sapiens; identical to SEQ ID NO: 363369
  chr3:148705462-148705528
  hypo

SEQ ID NO: 376906 - DNA, 216 bp, Homo sapiens; identical to SEQ ID NO: 338226
  chr3:148804777-148804993
  hypo

SEQ ID NO: 376907 - DNA, 106 bp, Homo sapiens; identical to SEQ ID NO: 338227
  chr3:149360184-149360290
  hypo

SEQ ID NO: 376908 - DNA, 77 bp, Homo sapiens; identical to SEQ ID NO: 338228
  chr3:150187009-150187086
  hypo

SEQ ID NO: 376909 - DNA, 141 bp, Homo sapiens; identical to SEQ ID NO: 338229
  chr3:150237458-150237599
  hypo

SEQ ID NO: 376910 - DNA, 85 bp, Homo sapiens; identical to SEQ ID NO: 349841
  chr3:150802802-150802887
  hypo

SEQ ID NO: 376911 - DNA, 70 bp, Homo sapiens; identical to SEQ ID NO: 357722
  chr3:150805097-150805167
  hypo

SEQ ID NO: 376912 - DNA, 72 bp, Homo sapiens; identical to SEQ ID NO: 338232
  chr3:150848450-150848522
  hypo

SEQ ID NO: 376913 - DNA, 124 bp, Homo sapiens; identical to SEQ ID NO: 338233
  chr3:151112517-151112641
  hypo

SEQ ID NO: 376914 - DNA, 52 bp, Homo sapiens; identical to SEQ ID NO: 363377
  chr3:156396583-156396635
  hypo

SEQ ID NO: 376915 - DNA, 109 bp, Homo sapiens; identical to SEQ ID NO: 353392
  chr3:156543195-156543304
  hypo

SEQ ID NO: 376916 - DNA, 123 bp, Homo sapiens; identical to SEQ ID NO: 338237
  chr3:168608983-168609106
  hypo

SEQ ID NO: 376917 - DNA, 241 bp, Homo sapiens; identical to SEQ ID NO: 199188
  chr3:169482439-169482680
  hypo

SEQ ID NO: 376918 - DNA, 54 bp, Homo sapiens; identical to SEQ ID NO: 345815
  chr3:169540679-169540733
  hypo

SEQ ID NO: 376919 - DNA, 104 bp, Homo sapiens; identical to SEQ ID NO: 338240
  chr3:170588570-170588674
  hypo

SEQ ID NO: 376920 - DNA, 282 bp, Homo sapiens; identical to SEQ ID NO: 281698
  chr3:170626174-170626456
  hypo

SEQ ID NO: 376921 - DNA, 508 bp, Homo sapiens; identical to SEQ ID NO: 357752
  chr3:170626710-170627218
  hypo

SEQ ID NO: 376922 - DNA, 191 bp, Homo sapiens; identical to SEQ ID NO: 338242
  chr3:171362739-171362930
  hypo

SEQ ID NO: 376923 - DNA, 83 bp, Homo sapiens; identical to SEQ ID NO: 338243
  chr3:171976039-171976122
  hypo

SEQ ID NO: 376924 - DNA, 75 bp, Homo sapiens; identical to SEQ ID NO: 331946
  chr3:176915778-176915853
  hypo

SEQ ID NO: 376925 - DNA, 99 bp, Homo sapiens; identical to SEQ ID NO: 338247
  chr3:177238893-177238992
  hypo

SEQ ID NO: 376926 - DNA, 97 bp, Homo sapiens; identical to SEQ ID NO: 338249
  chr3:179377859-179377956
  hypo

SEQ ID NO: 376927 - DNA, 114 bp, Homo sapiens; identical to SEQ ID NO: 338250
  chr3:179391556-179391670
  hypo

SEQ ID NO: 376928 - DNA, 206 bp, Homo sapiens; identical to SEQ ID NO: 346614
  chr3:180397104-180397310
  hypo

SEQ ID NO: 376929 - DNA, 581 bp, Homo sapiens; identical to SEQ ID NO: 338253
  chr3:180546449-180547030
  hypo

SEQ ID NO: 376930 - DNA, 36 bp, Homo sapiens; identical to SEQ ID NO: 199220
  chr3:181430331-181430367
  hypo

SEQ ID NO: 376931 - DNA, 252 bp, Homo sapiens; identical to SEQ ID NO: 199221
  chr3:181430443-181430695
  hypo

SEQ ID NO: 376932 - DNA, 114 bp, Homo sapiens; identical to SEQ ID NO: 338256
  chr3:182656917-182657031
  hypo

SEQ ID NO: 376933 - DNA, 809 bp, Homo sapiens; identical to SEQ ID NO: 345120
  chr3:183165024-183165833
  hypo

SEQ ID NO: 376934 - DNA, 237 bp, Homo sapiens; identical to SEQ ID NO: 338260
  chr3:183209981-183210218
  hypo

SEQ ID NO: 376935 - DNA, 217 bp, Homo sapiens; identical to SEQ ID NO: 338261
  chr3:183217407-183217624
  hypo

SEQ ID NO: 376936 - DNA, 117 bp, Homo sapiens; identical to SEQ ID NO: 338262
  chr3:183275024-183275141
  hypo

SEQ ID NO: 376937 - DNA, 140 bp, Homo sapiens; identical to SEQ ID NO: 338263
  chr3:183419820-183419960
  hypo

SEQ ID NO: 376938 - DNA, 54 bp, Homo sapiens; identical to SEQ ID NO: 363399
  chr3:183643595-183643649
  hypo

SEQ ID NO: 376939 - DNA, 102 bp, Homo sapiens; identical to SEQ ID NO: 209208
  chr3:183648026-183648128
  hypo

SEQ ID NO: 376940 - DNA, 195 bp, Homo sapiens; identical to SEQ ID NO: 338266
  chr3:183703570-183703765
  hypo

SEQ ID NO: 376941 - DNA, 107 bp, Homo sapiens; identical to SEQ ID NO: 338268
  chr3:183891953-183892060
  hypo

SEQ ID NO: 376942 - DNA, 52 bp, Homo sapiens; identical to SEQ ID NO: 338270
  chr3:184042674-184042726
  hypo

SEQ ID NO: 376943 - DNA, 124 bp, Homo sapiens; identical to SEQ ID NO: 338271
  chr3:184057066-184057190
  hypo

SEQ ID NO: 376944 - DNA, 131 bp, Homo sapiens; identical to SEQ ID NO: 363404
  chr3:184059893-184060024
  hypo

SEQ ID NO: 376945 - DNA, 177 bp, Homo sapiens; identical to SEQ ID NO: 338273
  chr3:184225995-184226172
  hypo

SEQ ID NO: 376946 - DNA, 939 bp, Homo sapiens; identical to SEQ ID NO: 331970
  chr3:184278877-184279816
  hypo

SEQ ID NO: 376947 - DNA, 292 bp, Homo sapiens; identical to SEQ ID NO: 338277
  chr3:184626085-184626377
  hypo

SEQ ID NO: 376948 - DNA, 185 bp, Homo sapiens; identical to SEQ ID NO: 363406
  chr3:184784962-184785147
  hypo

SEQ ID NO: 376949 - DNA, 301 bp, Homo sapiens; identical to SEQ ID NO: 199246
  chr3:184870307-184870608
  hypo

SEQ ID NO: 376950 - DNA, 393 bp, Homo sapiens; identical to SEQ ID NO: 338281
  chr3:185360808-185361201
  hypo

SEQ ID NO: 376951 - DNA, 34 bp, Homo sapiens; identical to SEQ ID NO: 353408
  chr3:185363305-185363339
  hypo

SEQ ID NO: 376952 - DNA, 129 bp, Homo sapiens; identical to SEQ ID NO: 338283
  chr3:185365800-185365929
  hypo

SEQ ID NO: 376953 - DNA, 477 bp, Homo sapiens; identical to SEQ ID NO: 338284
  chr3:185374988-185375465
  hypo

SEQ ID NO: 376954 - DNA, 243 bp, Homo sapiens; identical to SEQ ID NO: 338285
  chr3:185407229-185407472
  hypo

SEQ ID NO: 376955 - DNA, 98 bp, Homo sapiens; identical to SEQ ID NO: 338286
  chr3:185441721-185441819
  hypo

SEQ ID NO: 376956 - DNA, 196 bp, Homo sapiens; identical to SEQ ID NO: 345819
  chr3:185445861-185446057
  hypo

SEQ ID NO: 376957 - DNA, 72 bp, Homo sapiens
  chr3:185643252-185643324
  hypo
cgattcccaacatgacgcctgcgagtagacatgggagaatggctgtggctgtgccgtctacgataatctcga

SEQ ID NO: 376958 - DNA, 290 bp, Homo sapiens; identical to SEQ ID NO: 199253
  chr3:186079331-186079621
  hypo

SEQ ID NO: 376959 - DNA, 90 bp, Homo sapiens; identical to SEQ ID NO: 338290
  chr3:186442824-186442914
  hypo

SEQ ID NO: 376960 - DNA, 139 bp, Homo sapiens; identical to SEQ ID NO: 338291
  chr3:186697410-186697549
  hypo

SEQ ID NO: 376961 - DNA, 334 bp, Homo sapiens; identical to SEQ ID NO: 338292
  chr3:187443068-187443402
  hypo

SEQ ID NO: 376962 - DNA, 45 bp, Homo sapiens; identical to SEQ ID NO: 345123
  chr3:187455297-187455342
  hypo

SEQ ID NO: 376963 - DNA, 446 bp, Homo sapiens; identical to SEQ ID NO: 199256
  chr3:187456666-187457112
  hypo

SEQ ID NO: 376964 - DNA, 522 bp, Homo sapiens; identical to SEQ ID NO: 331987
  chr3:192635635-192636157
  hypo

SEQ ID NO: 376965 - DNA, 134 bp, Homo sapiens; identical to SEQ ID NO: 338297
  chr3:193391768-193391902
  hypo

SEQ ID NO: 376966 - DNA, 61 bp, Homo sapiens; identical to SEQ ID NO: 209288
  chr3:193419641-193419702
  hypo

SEQ ID NO: 376967 - DNA, 275 bp, Homo sapiens; identical to SEQ ID NO: 345825
  chr3:193419732-193420007
  hypo

SEQ ID NO: 376968 - DNA, 346 bp, Homo sapiens; identical to SEQ ID NO: 338299
  chr3:193455077-193455423
  hypo

SEQ ID NO: 376969 - DNA, 370 bp, Homo sapiens; identical to SEQ ID NO: 338300
  chr3:193586985-193587355
  hypo

SEQ ID NO: 376970 - DNA, 352 bp, Homo sapiens; identical to SEQ ID NO: 357789
  chr3:193852659-193853011
  hypo

SEQ ID NO: 376971 - DNA, 246 bp, Homo sapiens; identical to SEQ ID NO: 199271
  chr3:193858636-193858882
  hypo

SEQ ID NO: 376972 - DNA, 261 bp, Homo sapiens; identical to SEQ ID NO: 370326
  chr3:193858949-193859210
  hypo

SEQ ID NO: 376973 - DNA, 74 bp, Homo sapiens; identical to SEQ ID NO: 338304
  chr3:193903180-193903254
  hypo

SEQ ID NO: 376974 - DNA, 153 bp, Homo sapiens; identical to SEQ ID NO: 353419
  chr3:193922622-193922775
  hypo

SEQ ID NO: 376975 - DNA, 296 bp, Homo sapiens; identical to SEQ ID NO: 338306
  chr3:193969977-193970273
  hypo

SEQ ID NO: 376976 - DNA, 324 bp, Homo sapiens; identical to SEQ ID NO: 338308
  chr3:194048948-194049272
  hypo

SEQ ID NO: 376977 - DNA, 142 bp, Homo sapiens; identical to SEQ ID NO: 338309
  chr3:194061709-194061851
  hypo

SEQ ID NO: 376978 - DNA, 296 bp, Homo sapiens; identical to SEQ ID NO: 338312
  chr3:194786359-194786655
  hypo

SEQ ID NO: 376979 - DNA, 60 bp, Homo sapiens; identical to SEQ ID NO: 338313
  chr3:195093160-195093220
  hypo

SEQ ID NO: 376980 - DNA, 97 bp, Homo sapiens; identical to SEQ ID NO: 338314
  chr3:195172966-195173063
  hypo

SEQ ID NO: 376981 - DNA, 362 bp, Homo sapiens; identical to SEQ ID NO: 363433
  chr3:195536308-195536670
  hypo

SEQ ID NO: 376982 - DNA, 54 bp, Homo sapiens; identical to SEQ ID NO: 338317
  chr3:195597381-195597435
  hypo

SEQ ID NO: 376983 - DNA, 393 bp, Homo sapiens; identical to SEQ ID NO: 338318
  chr3:195597835-195598228
  hypo

SEQ ID NO: 376984 - DNA, 582 bp, Homo sapiens; identical to SEQ ID NO: 345130
  chr3:195599104-195599686
  hypo

SEQ ID NO: 376985 - DNA, 246 bp, Homo sapiens; identical to SEQ ID NO: 209343
  chr3:195599840-195600086
  hypo

SEQ ID NO: 376986 - DNA, 49 bp, Homo sapiens; identical to SEQ ID NO: 345828
  chr3:195601363-195601412
  hypo

SEQ ID NO: 376987 - DNA, 666 bp, Homo sapiens; identical to SEQ ID NO: 353426
  chr3:195602576-195603242
  hypo

SEQ ID NO: 376988 - DNA, 339 bp, Homo sapiens; identical to SEQ ID NO: 302575
  chr3:195603923-195604262
  hypo

SEQ ID NO: 376989 - DNA, 159 bp, Homo sapiens; identical to SEQ ID NO: 363440
  chr3:195604388-195604547
  hypo

SEQ ID NO: 376990 - DNA, 83 bp, Homo sapiens; identical to SEQ ID NO: 353427
  chr3:195637425-195637508
  hypo

SEQ ID NO: 376991 - DNA, 254 bp, Homo sapiens
  chr3:195640380-195640634
  hypo
cggagagccatggctacaacttgagcaagtcaaacacgctgtgattcaggccagggagatgagcgtgggtaaagaacactgtacgaactagctcagggcttctggaactgtgtgcggctgaatcaccggggcatcttggtgaactgtaaattctgattcagcaaactgggaggagggcgctgagatccagcatttccatcaagcttcccatggaccacactctgactatcagggccttcgatgcagacagtctc

SEQ ID NO: 376992 - DNA, 32 bp, Homo sapiens; identical to SEQ ID NO: 353428
  chr3:195709683-195709715
  hypo

SEQ ID NO: 376993 - DNA, 473 bp, Homo sapiens; identical to SEQ ID NO: 338325
  chr3:195750601-195751074
  hypo

SEQ ID NO: 376994 - DNA, 76 bp, Homo sapiens; identical to SEQ ID NO: 338326
  chr3:195855364-195855440
  hypo

SEQ ID NO: 376995 - DNA, 106 bp, Homo sapiens; identical to SEQ ID NO: 338328
  chr3:196263362-196263468
  hypo

SEQ ID NO: 376996 - DNA, 78 bp, Homo sapiens; identical to SEQ ID NO: 363446
  chr3:196387781-196387859
  hypo

SEQ ID NO: 376997 - DNA, 93 bp, Homo sapiens; identical to SEQ ID NO: 338331
  chr3:196434743-196434836
  hypo

SEQ ID NO: 376998 - DNA, 284 bp, Homo sapiens; identical to SEQ ID NO: 353430
  chr3:196728448-196728732
  hypo

SEQ ID NO: 376999 - DNA, 104 bp, Homo sapiens; identical to SEQ ID NO: 363448
  chr3:196754412-196754516
  hypo

SEQ ID NO: 377000 - DNA, 118 bp, Homo sapiens; identical to SEQ ID NO: 363449
  chr3:196754758-196754876
  hypo

SEQ ID NO: 377001 - DNA, 80 bp, Homo sapiens; identical to SEQ ID NO: 353431
  chr3:197330147-197330227
  hypo

SEQ ID NO: 377002 - DNA, 307 bp, Homo sapiens; identical to SEQ ID NO: 338336
  chr3:197582093-197582400
  hypo

SEQ ID NO: 377003 - DNA, 79 bp, Homo sapiens; identical to SEQ ID NO: 338337
  chr3:197612493-197612572
  hypo

SEQ ID NO: 377004 - DNA, 210 bp, Homo sapiens; identical to SEQ ID NO: 209390
  chr3:197685522-197685732
  hypo

SEQ ID NO: 377005 - DNA, 409 bp, Homo sapiens; identical to SEQ ID NO: 353433
  chr4:512569-512978
  hypo

SEQ ID NO: 377006 - DNA, 696 bp, Homo sapiens; identical to SEQ ID NO: 209394
  chr4:513008-513704
  hypo

SEQ ID NO: 377007 - DNA, 221 bp, Homo sapiens; identical to SEQ ID NO: 353435
  chr4:513734-513955
  hypo

SEQ ID NO: 377008 - DNA, 76 bp, Homo sapiens; identical to SEQ ID NO: 338340
  chr4:529368-529444
  hypo

SEQ ID NO: 377009 - DNA, 147 bp, Homo sapiens
  chr4:617098-617245
  hypo
cgccctgaacctactcacctacaatcacgacgggctcctggggcaggacaaagccacaggtgaggaacgcggtgctgcgggtggaagctgctgtcacagtcgtgttagggtgagtggactatggccgcagactgtgggctcctccca

SEQ ID NO: 377010 - DNA, 32 bp, Homo sapiens; identical to SEQ ID NO: 353437
  chr4:619879-619911
  hypo

SEQ ID NO: 377011 - DNA, 43 bp, Homo sapiens; identical to SEQ ID NO: 209400
  chr4:628787-628830
  hypo

SEQ ID NO: 377012 - DNA, 420 bp, Homo sapiens; identical to SEQ ID NO: 302690
  chr4:628950-629370
  hypo

SEQ ID NO: 377013 - DNA, 171 bp, Homo sapiens; identical to SEQ ID NO: 357802
  chr4:657350-657521
  hypo

SEQ ID NO: 377014 - DNA, 114 bp, Homo sapiens; identical to SEQ ID NO: 281896
  chr4:657552-657666
  hypo

SEQ ID NO: 377015 - DNA, 139 bp, Homo sapiens; identical to SEQ ID NO: 357804
  chr4:657712-657851
  hypo

SEQ ID NO: 377016 - DNA, 151 bp, Homo sapiens; identical to SEQ ID NO: 353440
  chr4:717901-718052
  hypo

SEQ ID NO: 377017 - DNA, 49 bp, Homo sapiens; identical to SEQ ID NO: 302701
  chr4:718112-718161
  hypo

SEQ ID NO: 377018 - DNA, 160 bp, Homo sapiens; identical to SEQ ID NO: 363465
  chr4:738129-738289
  hypo

SEQ ID NO: 377019 - DNA, 175 bp, Homo sapiens; identical to SEQ ID NO: 338350
  chr4:757757-757932
  hypo

SEQ ID NO: 377020 - DNA, 328 bp, Homo sapiens; identical to SEQ ID NO: 363466
  chr4:759841-760169
  hypo

SEQ ID NO: 377021 - DNA, 289 bp, Homo sapiens; identical to SEQ ID NO: 332005
  chr4:819440-819729
  hypo

SEQ ID NO: 377022 - DNA, 126 bp, Homo sapiens
  chr4:859220-859346
  hypo
cgagtggacgtaggggcaccagcaggcggagcagctcgcaggccaggctgagaacaagcatctgcgcattcccatccaaaagggtttgtcaggaccccactttctgccgccatccccacagcctgc

SEQ ID NO: 377023 - DNA, 188 bp, Homo sapiens; identical to SEQ ID NO: 345829
  chr4:905682-905870
  hypo

SEQ ID NO: 377024 - DNA, 127 bp, Homo sapiens; identical to SEQ ID NO: 302740
  chr4:955057-955184
  hypo

SEQ ID NO: 377025 - DNA, 307 bp, Homo sapiens; identical to SEQ ID NO: 302741
  chr4:955544-955851
  hypo

SEQ ID NO: 377026 - DNA, 250 bp, Homo sapiens; identical to SEQ ID NO: 363471
  chr4:957050-957300
  hypo

SEQ ID NO: 377027 - DNA, 315 bp, Homo sapiens; identical to SEQ ID NO: 338357
  chr4:968846-969161
  hypo

SEQ ID NO: 377028 - DNA, 220 bp, Homo sapiens; identical to SEQ ID NO: 209429
  chr4:1016366-1016586
  hypo

SEQ ID NO: 377029 - DNA, 69 bp, Homo sapiens; identical to SEQ ID NO: 349899
  chr4:1036539-1036608
  hypo

SEQ ID NO: 377030 - DNA, 61 bp, Homo sapiens; identical to SEQ ID NO: 209431
  chr4:1093475-1093536
  hypo

SEQ ID NO: 377031 - DNA, 493 bp, Homo sapiens; identical to SEQ ID NO: 338362
  chr4:1204224-1204717
  hypo

SEQ ID NO: 377032 - DNA, 129 bp, Homo sapiens; identical to SEQ ID NO: 353445
  chr4:1205845-1205974
  hypo

SEQ ID NO: 377033 - DNA, 269 bp, Homo sapiens; identical to SEQ ID NO: 353446
  chr4:1206025-1206294
  hypo

SEQ ID NO: 377034 - DNA, 73 bp, Homo sapiens; identical to SEQ ID NO: 353447
  chr4:1214821-1214894
  hypo

SEQ ID NO: 377035 - DNA, 253 bp, Homo sapiens; identical to SEQ ID NO: 209439
  chr4:1215162-1215415
  hypo

SEQ ID NO: 377036 - DNA, 73 bp, Homo sapiens; identical to SEQ ID NO: 353449
  chr4:1215451-1215524
  hypo

SEQ ID NO: 377037 - DNA, 464 bp, Homo sapiens; identical to SEQ ID NO: 338366
  chr4:1225310-1225774
  hypo

SEQ ID NO: 377038 - DNA, 306 bp, Homo sapiens; identical to SEQ ID NO: 338367
  chr4:1254365-1254671
  hypo

SEQ ID NO: 377039 - DNA, 70 bp, Homo sapiens; identical to SEQ ID NO: 353451
  chr4:1282403-1282473
  hypo

SEQ ID NO: 377040 - DNA, 58 bp, Homo sapiens
  chr4:1290581-1290639
  hypo
cggaccccactgcctcgagacgctcccatcactcggctcccgtgacaccatcctctgg

SEQ ID NO: 377041 - DNA, 355 bp, Homo sapiens
  chr4:1290669-1291024
  hypo
cttgcctatgctgtcttctctagtcttggaggccttttgttttatgtcaccagccagccctccagaggttgtgtggcttcacagacggtctccaagctcctgtccccacactgctgccctccccaggcctctctccctgaggccatcccgtgtagtcacctcccggagctctcttcgcatgtctggaaggcagttcaaagatacgataccaggcgcaaaaccaaatgccgcatctcggccttggggccccagacgagccccagacctgccttactaagccacccttcccaagtcagttgacagcgatgtcccccggcacttgttcagtgacagccgagaactcggaggttttctc

SEQ ID NO: 377042 - DNA, 663 bp, Homo sapiens; identical to SEQ ID NO: 338371
  chr4:1317015-1317678
  hypo

SEQ ID NO: 377043 - DNA, 55 bp, Homo sapiens; identical to SEQ ID NO: 338372
  chr4:1323674-1323729
  hypo

SEQ ID NO: 377044 - DNA, 129 bp, Homo sapiens; identical to SEQ ID NO: 338373
  chr4:1326104-1326233
  hypo

SEQ ID NO: 377045 - DNA, 167 bp, Homo sapiens; identical to SEQ ID NO: 338374
  chr4:1326509-1326676
  hypo

SEQ ID NO: 377046 - DNA, 115 bp, Homo sapiens; identical to SEQ ID NO: 363486
  chr4:1330895-1331010
  hypo

SEQ ID NO: 377047 - DNA, 372 bp, Homo sapiens; identical to SEQ ID NO: 209459
  chr4:1331896-1332268
  hypo

SEQ ID NO: 377048 - DNA, 218 bp, Homo sapiens; identical to SEQ ID NO: 199294
  chr4:1332660-1332878
  hypo

SEQ ID NO: 377049 - DNA, 520 bp, Homo sapiens; identical to SEQ ID NO: 353456
  chr4:1333183-1333703
  hypo

SEQ ID NO: 377050 - DNA, 136 bp, Homo sapiens; identical to SEQ ID NO: 345830
  chr4:1336902-1337038
  hypo

SEQ ID NO: 377051 - DNA, 53 bp, Homo sapiens; identical to SEQ ID NO: 353458
  chr4:1338812-1338865
  hypo

SEQ ID NO: 377052 - DNA, 136 bp, Homo sapiens; identical to SEQ ID NO: 281919
  chr4:1400112-1400248
  hypo

SEQ ID NO: 377053 - DNA, 276 bp, Homo sapiens; identical to SEQ ID NO: 338380
  chr4:1541591-1541867
  hypo

SEQ ID NO: 377054 - DNA, 473 bp, Homo sapiens; identical to SEQ ID NO: 363493
  chr4:1556847-1557320
  hypo

SEQ ID NO: 377055 - DNA, 507 bp, Homo sapiens; identical to SEQ ID NO: 363494
  chr4:1578103-1578610
  hypo

SEQ ID NO: 377056 - DNA, 329 bp, Homo sapiens; identical to SEQ ID NO: 338384
  chr4:1738699-1739028
  hypo

SEQ ID NO: 377057 - DNA, 40 bp, Homo sapiens; identical to SEQ ID NO: 363496
  chr4:1791229-1791269
  hypo

SEQ ID NO: 377058 - DNA, 107 bp, Homo sapiens; identical to SEQ ID NO: 363497
  chr4:1791344-1791451
  hypo

SEQ ID NO: 377059 - DNA, 211 bp, Homo sapiens; identical to SEQ ID NO: 338386
  chr4:1791547-1791758
  hypo

SEQ ID NO: 377060 - DNA, 186 bp, Homo sapiens; identical to SEQ ID NO: 357810
  chr4:1796303-1796489
  hypo

SEQ ID NO: 377061 - DNA, 139 bp, Homo sapiens; identical to SEQ ID NO: 363499
  chr4:1807117-1807256
  hypo

SEQ ID NO: 377062 - DNA, 304 bp, Homo sapiens; identical to SEQ ID NO: 338389
  chr4:1814436-1814740
  hypo

SEQ ID NO: 377063 - DNA, 78 bp, Homo sapiens; identical to SEQ ID NO: 363501
  chr4:1827219-1827297
  hypo

SEQ ID NO: 377064 - DNA, 212 bp, Homo sapiens; identical to SEQ ID NO: 338391
  chr4:1902464-1902676
  hypo

SEQ ID NO: 377065 - DNA, 58 bp, Homo sapiens; identical to SEQ ID NO: 338392
  chr4:1911667-1911725
  hypo

SEQ ID NO: 377066 - DNA, 63 bp, Homo sapiens; identical to SEQ ID NO: 338394
  chr4:1960880-1960943
  hypo

SEQ ID NO: 377067 - DNA, 299 bp, Homo sapiens; identical to SEQ ID NO: 302881
  chr4:1977126-1977425
  hypo

SEQ ID NO: 377068 - DNA, 56 bp, Homo sapiens; identical to SEQ ID NO: 363505
  chr4:1977525-1977581
  hypo

SEQ ID NO: 377069 - DNA, 390 bp, Homo sapiens; identical to SEQ ID NO: 338396
  chr4:1986329-1986719
  hypo

SEQ ID NO: 377070 - DNA, 56 bp, Homo sapiens; identical to SEQ ID NO: 348040
  chr4:1993659-1993715
  hypo

SEQ ID NO: 377071 - DNA, 410 bp, Homo sapiens; identical to SEQ ID NO: 209497
  chr4:1994335-1994745
  hypo

SEQ ID NO: 377072 - DNA, 206 bp, Homo sapiens; identical to SEQ ID NO: 353464
  chr4:1994830-1995036
  hypo

SEQ ID NO: 377073 - DNA, 560 bp, Homo sapiens; identical to SEQ ID NO: 370355
  chr4:2060916-2061476
  hypo

SEQ ID NO: 377074 - DNA, 82 bp, Homo sapiens; identical to SEQ ID NO: 363511
  chr4:2459899-2459981
  hypo

SEQ ID NO: 377075 - DNA, 101 bp, Homo sapiens; identical to SEQ ID NO: 363512
  chr4:2460372-2460473
  hypo

SEQ ID NO: 377076 - DNA, 76 bp, Homo sapiens; identical to SEQ ID NO: 363513
  chr4:2460503-2460579
  hypo

SEQ ID NO: 377077 - DNA, 43 bp, Homo sapiens; identical to SEQ ID NO: 363514
  chr4:2514728-2514771
  hypo

SEQ ID NO: 377078 - DNA, 120 bp, Homo sapiens; identical to SEQ ID NO: 253463
  chr4:2524746-2524866
  hypo

SEQ ID NO: 377079 - DNA, 50 bp, Homo sapiens; identical to SEQ ID NO: 338406
  chr4:2622600-2622650
  hypo

SEQ ID NO: 377080 - DNA, 72 bp, Homo sapiens; identical to SEQ ID NO: 338407
  chr4:2638080-2638152
  hypo

SEQ ID NO: 377081 - DNA, 211 bp, Homo sapiens; identical to SEQ ID NO: 338408
  chr4:2639936-2640147
  hypo

SEQ ID NO: 377082 - DNA, 118 bp, Homo sapiens; identical to SEQ ID NO: 338409
  chr4:2640614-2640732
  hypo

SEQ ID NO: 377083 - DNA, 81 bp, Homo sapiens; identical to SEQ ID NO: 338410
  chr4:2672891-2672972
  hypo

SEQ ID NO: 377084 - DNA, 409 bp, Homo sapiens; identical to SEQ ID NO: 338411
  chr4:2688489-2688898
  hypo

SEQ ID NO: 377085 - DNA, 855 bp, Homo sapiens; identical to SEQ ID NO: 338412
  chr4:2704088-2704943
  hypo

SEQ ID NO: 377086 - DNA, 124 bp, Homo sapiens; identical to SEQ ID NO: 363522
  chr4:2907414-2907538
  hypo

SEQ ID NO: 377087 - DNA, 55 bp, Homo sapiens; identical to SEQ ID NO: 353470
  chr4:2926396-2926451
  hypo

SEQ ID NO: 377088 - DNA, 102 bp, Homo sapiens; identical to SEQ ID NO: 345831
  chr4:3217005-3217107
  hypo

SEQ ID NO: 377089 - DNA, 56 bp, Homo sapiens; identical to SEQ ID NO: 345832
  chr4:3217154-3217210
  hypo

SEQ ID NO: 377090 - DNA, 149 bp, Homo sapiens; identical to SEQ ID NO: 338417
  chr4:3220650-3220799
  hypo

SEQ ID NO: 377091 - DNA, 242 bp, Homo sapiens; identical to SEQ ID NO: 338418
  chr4:3245192-3245434
  hypo

SEQ ID NO: 377092 - DNA, 526 bp, Homo sapiens; identical to SEQ ID NO: 353474
  chr4:3252217-3252743
  hypo

SEQ ID NO: 377093 - DNA, 201 bp, Homo sapiens; identical to SEQ ID NO: 353475
  chr4:3252797-3252998
  hypo

SEQ ID NO: 377094 - DNA, 148 bp, Homo sapiens; identical to SEQ ID NO: 338421
  chr4:3439566-3439714
  hypo

SEQ ID NO: 377095 - DNA, 221 bp, Homo sapiens; identical to SEQ ID NO: 209533
  chr4:3446222-3446443
  hypo

SEQ ID NO: 377096 - DNA, 68 bp, Homo sapiens; identical to SEQ ID NO: 353477
  chr4:3447170-3447238
  hypo

SEQ ID NO: 377097 - DNA, 33 bp, Homo sapiens; identical to SEQ ID NO: 363532
  chr4:3467499-3467532
  hypo

SEQ ID NO: 377098 - DNA, 105 bp, Homo sapiens; identical to SEQ ID NO: 363533
  chr4:3514612-3514717
  hypo

SEQ ID NO: 377099 - DNA, 275 bp, Homo sapiens; identical to SEQ ID NO: 349902
  chr4:3768207-3768482
  hypo

SEQ ID NO: 377100 - DNA, 77 bp, Homo sapiens; identical to SEQ ID NO: 353479
  chr4:4417408-4417485
  hypo

SEQ ID NO: 377101 - DNA, 438 bp, Homo sapiens; identical to SEQ ID NO: 338428
  chr4:4509159-4509597
  hypo

SEQ ID NO: 377102 - DNA, 57 bp, Homo sapiens; identical to SEQ ID NO: 357820
  chr4:5052378-5052435
  hypo

SEQ ID NO: 377103 - DNA, 289 bp, Homo sapiens; identical to SEQ ID NO: 199324
  chr4:5052556-5052845
  hypo

SEQ ID NO: 377104 - DNA, 145 bp, Homo sapiens; identical to SEQ ID NO: 349905
  chr4:5890606-5890751
  hypo

SEQ ID NO: 377105 - DNA, 230 bp, Homo sapiens; identical to SEQ ID NO: 338432
  chr4:6058789-6059019
  hypo

SEQ ID NO: 377106 - DNA, 821 bp, Homo sapiens; identical to SEQ ID NO: 332029
  chr4:6271360-6272181
  hypo

SEQ ID NO: 377107 - DNA, 127 bp, Homo sapiens; identical to SEQ ID NO: 357829
  chr4:6717788-6717915
  hypo

SEQ ID NO: 377108 - DNA, 496 bp, Homo sapiens; identical to SEQ ID NO: 338435
  chr4:6733162-6733658
  hypo

SEQ ID NO: 377109 - DNA, 129 bp, Homo sapiens; identical to SEQ ID NO: 338437
  chr4:6769454-6769583
  hypo

SEQ ID NO: 377110 - DNA, 164 bp, Homo sapiens; identical to SEQ ID NO: 363543
  chr4:6950171-6950335
  hypo

SEQ ID NO: 377111 - DNA, 149 bp, Homo sapiens; identical to SEQ ID NO: 338439
  chr4:7004195-7004344
  hypo

SEQ ID NO: 377112 - DNA, 102 bp, Homo sapiens
  chr4:7035978-7036080
  hypo
gcgtagacgcggacagtggtcagaactgggtttcagactccagccttgtgaatgactcccaagcccttgtcagaaacaccctctaggggagggggcctttgc

SEQ ID NO: 377113 - DNA, 199 bp, Homo sapiens; identical to SEQ ID NO: 353481
  chr4:7047283-7047482
  hypo

SEQ ID NO: 377114 - DNA, 178 bp, Homo sapiens; identical to SEQ ID NO: 338443
  chr4:7844888-7845066
  hypo

SEQ ID NO: 377115 - DNA, 273 bp, Homo sapiens; identical to SEQ ID NO: 338444
  chr4:8070965-8071238
  hypo

SEQ ID NO: 377116 - DNA, 142 bp, Homo sapiens; identical to SEQ ID NO: 357835
  chr4:8160429-8160571
  hypo

SEQ ID NO: 377117 - DNA, 298 bp, Homo sapiens; identical to SEQ ID NO: 338446
  chr4:8372577-8372875
  hypo

SEQ ID NO: 377118 - DNA, 82 bp, Homo sapiens; identical to SEQ ID NO: 338448
  chr4:8386747-8386829
  hypo

SEQ ID NO: 377119 - DNA, 167 bp, Homo sapiens
  chr4:8398721-8398888
  hypo
cgagtggctgagaagcgaagagcgatggccacggccagctttaggttaaggatggccaggctcacgatggagacccggcccgaggacaggctccccagggacgctccaaagcgctgcctgacgtcctacgggagggacacagatgataagctcaagcccggctgcgc

SEQ ID NO: 377120 - DNA, 161 bp, Homo sapiens; identical to SEQ ID NO: 338450
  chr4:8466231-8466392
  hypo

SEQ ID NO: 377121 - DNA, 115 bp, Homo sapiens; identical to SEQ ID NO: 332040
  chr4:8609457-8609572
  hypo

SEQ ID NO: 377122 - DNA, 173 bp, Homo sapiens; identical to SEQ ID NO: 353484
  chr4:8615920-8616093
  hypo

SEQ ID NO: 377123 - DNA, 33 bp, Homo sapiens; identical to SEQ ID NO: 370387
  chr4:8873984-8874017
  hypo

SEQ ID NO: 377124 - DNA, 120 bp, Homo sapiens
  chr4:9523558-9523678
  hypo
cggcagtagctgtcagtgcgcctagcccggcgtgtggacctggggactcaccagaagggcccgatgtggagtctcacggagcgtcggcggaaggcgcacaggatgctaaagctttacaac

SEQ ID NO: 377125 - DNA, 69 bp, Homo sapiens
  chr4:9602020-9602089
  hypo
cgagcaagaaacgccaccaggcgagagccgggttagctccgggcctgctgcgggctcccccggaaggac

SEQ ID NO: 377126 - DNA, 342 bp, Homo sapiens; identical to SEQ ID NO: 353485
  chr4:10087759-10088101
  hypo

SEQ ID NO: 377127 - DNA, 207 bp, Homo sapiens; identical to SEQ ID NO: 332046
  chr4:10090148-10090355
  hypo

SEQ ID NO: 377128 - DNA, 413 bp, Homo sapiens; identical to SEQ ID NO: 338460
  chr4:10120458-10120871
  hypo

SEQ ID NO: 377129 - DNA, 58 bp, Homo sapiens; identical to SEQ ID NO: 338461
  chr4:10128984-10129042
  hypo

SEQ ID NO: 377130 - DNA, 358 bp, Homo sapiens; identical to SEQ ID NO: 338464
  chr4:13600978-13601336
  hypo

SEQ ID NO: 377131 - DNA, 140 bp, Homo sapiens; identical to SEQ ID NO: 199357
  chr4:16228990-16229130
  hypo

SEQ ID NO: 377132 - DNA, 273 bp, Homo sapiens; identical to SEQ ID NO: 357845
  chr4:16229202-16229475
  hypo

SEQ ID NO: 377133 - DNA, 108 bp, Homo sapiens; identical to SEQ ID NO: 338466
  chr4:24534559-24534667
  hypo

SEQ ID NO: 377134 - DNA, 144 bp, Homo sapiens; identical to SEQ ID NO: 357848
  chr4:24914262-24914406
  hypo

SEQ ID NO: 377135 - DNA, 72 bp, Homo sapiens; identical to SEQ ID NO: 357849
  chr4:24914804-24914876
  hypo

SEQ ID NO: 377136 - DNA, 64 bp, Homo sapiens; identical to SEQ ID NO: 353487
  chr4:25013897-25013961
  hypo

SEQ ID NO: 377137 - DNA, 609 bp, Homo sapiens; identical to SEQ ID NO: 332064
  chr4:25863681-25864290
  hypo

SEQ ID NO: 377138 - DNA, 122 bp, Homo sapiens; identical to SEQ ID NO: 338470
  chr4:26855447-26855569
  hypo

SEQ ID NO: 377139 - DNA, 785 bp, Homo sapiens; identical to SEQ ID NO: 349925
  chr4:36245423-36246208
  hypo

SEQ ID NO: 377140 - DNA, 131 bp, Homo sapiens; identical to SEQ ID NO: 349926
  chr4:36246257-36246388
  hypo

SEQ ID NO: 377141 - DNA, 308 bp, Homo sapiens; identical to SEQ ID NO: 353491
  chr4:39447953-39448261
  hypo

SEQ ID NO: 377142 - DNA, 43 bp, Homo sapiens; identical to SEQ ID NO: 338475
  chr4:40261237-40261280
  hypo

SEQ ID NO: 377143 - DNA, 180 bp, Homo sapiens; identical to SEQ ID NO: 338476
  chr4:40485408-40485588
  hypo

SEQ ID NO: 377144 - DNA, 81 bp, Homo sapiens
  chr4:40910486-40910567
  hypo
ctttcctgacggagagagggaggccggcatccccaggccacacctataatgcctctcaccccatacacgtgtgcacaacac

SEQ ID NO: 377145 - DNA, 305 bp, Homo sapiens; identical to SEQ ID NO: 332077
  chr4:41218387-41218692
  hypo

SEQ ID NO: 377146 - DNA, 52 bp, Homo sapiens; identical to SEQ ID NO: 370426
  chr4:41362252-41362304
  hypo

SEQ ID NO: 377147 - DNA, 650 bp, Homo sapiens; identical to SEQ ID NO: 370427
  chr4:41363167-41363817
  hypo

SEQ ID NO: 377148 - DNA, 96 bp, Homo sapiens; identical to SEQ ID NO: 353492
  chr4:42317342-42317438
  hypo

SEQ ID NO: 377149 - DNA, 1067 bp, Homo sapiens; identical to SEQ ID NO: 346638
  chr4:42657902-42658969
  hypo

SEQ ID NO: 377150 - DNA, 145 bp, Homo sapiens; identical to SEQ ID NO: 338485
  chr4:48572780-48572925
  hypo

SEQ ID NO: 377151 - DNA, 133 bp, Homo sapiens; identical to SEQ ID NO: 338486
  chr4:48678686-48678819
  hypo

SEQ ID NO: 377152 - DNA, 172 bp, Homo sapiens; identical to SEQ ID NO: 338487
  chr4:48679706-48679878
  hypo

SEQ ID NO: 377153 - DNA, 70 bp, Homo sapiens; identical to SEQ ID NO: 338488
  chr4:48887296-48887366
  hypo

SEQ ID NO: 377154 - DNA, 76 bp, Homo sapiens; identical to SEQ ID NO: 338489
  chr4:56222936-56223012
  hypo

SEQ ID NO: 377155 - DNA, 958 bp, Homo sapiens; identical to SEQ ID NO: 332106
  chr4:56914942-56915900
  hypo

SEQ ID NO: 377156 - DNA, 87 bp, Homo sapiens; identical to SEQ ID NO: 338491
  chr4:57093728-57093815
  hypo

SEQ ID NO: 377157 - DNA, 864 bp, Homo sapiens; identical to SEQ ID NO: 363573
  chr4:57179991-57180855
  hypo

SEQ ID NO: 377158 - DNA, 1211 bp, Homo sapiens; identical to SEQ ID NO: 209665
  chr4:57180972-57182183
  hypo

SEQ ID NO: 377159 - DNA, 510 bp, Homo sapiens; identical to SEQ ID NO: 353496
  chr4:57182262-57182772
  hypo

SEQ ID NO: 377160 - DNA, 93 bp, Homo sapiens; identical to SEQ ID NO: 346642
  chr4:57687545-57687638
  hypo

SEQ ID NO: 377161 - DNA, 173 bp, Homo sapiens; identical to SEQ ID NO: 363577
  chr4:57777264-57777437
  hypo

SEQ ID NO: 377162 - DNA, 85 bp, Homo sapiens; identical to SEQ ID NO: 338498
  chr4:57896316-57896401
  hypo

SEQ ID NO: 377163 - DNA, 37 bp, Homo sapiens; identical to SEQ ID NO: 338501
  chr4:71566942-71566979
  hypo

SEQ ID NO: 377164 - DNA, 115 bp, Homo sapiens; identical to SEQ ID NO: 338502
  chr4:71706531-71706646
  hypo

SEQ ID NO: 377165 - DNA, 108 bp, Homo sapiens; identical to SEQ ID NO: 338503
  chr4:71857989-71858097
  hypo

SEQ ID NO: 377166 - DNA, 361 bp, Homo sapiens; identical to SEQ ID NO: 357892
  chr4:77227668-77228029
  hypo

SEQ ID NO: 377167 - DNA, 78 bp, Homo sapiens; identical to SEQ ID NO: 357893
  chr4:77228452-77228530
  hypo

SEQ ID NO: 377168 - DNA, 151 bp, Homo sapiens; identical to SEQ ID NO: 357899
  chr4:81124731-81124882
  hypo

SEQ ID NO: 377169 - DNA, 51 bp, Homo sapiens; identical to SEQ ID NO: 363585
  chr4:83839357-83839408
  hypo

SEQ ID NO: 377170 - DNA, 250 bp, Homo sapiens; identical to SEQ ID NO: 199476
  chr4:85503985-85504235
  hypo

SEQ ID NO: 377171 - DNA, 306 bp, Homo sapiens; identical to SEQ ID NO: 357912
  chr4:85886808-85887114
  hypo

SEQ ID NO: 377172 - DNA, 678 bp, Homo sapiens; identical to SEQ ID NO: 282305
  chr4:85887200-85887878
  hypo

SEQ ID NO: 377173 - DNA, 438 bp, Homo sapiens; identical to SEQ ID NO: 282306
  chr4:85887927-85888365
  hypo

SEQ ID NO: 377174 - DNA, 49 bp, Homo sapiens; identical to SEQ ID NO: 370495
  chr4:85888399-85888448
  hypo

SEQ ID NO: 377175 - DNA, 56 bp, Homo sapiens; identical to SEQ ID NO: 338514
  chr4:87946924-87946980
  hypo

SEQ ID NO: 377176 - DNA, 90 bp, Homo sapiens; identical to SEQ ID NO: 338515
  chr4:87993079-87993169
  hypo

SEQ ID NO: 377177 - DNA, 310 bp, Homo sapiens; identical to SEQ ID NO: 338518
  chr4:99399725-99400035
  hypo

SEQ ID NO: 377178 - DNA, 57 bp, Homo sapiens; identical to SEQ ID NO: 338519
  chr4:99936215-99936272
  hypo

SEQ ID NO: 377179 - DNA, 113 bp, Homo sapiens; identical to SEQ ID NO: 338520
  chr4:100555198-100555311
  hypo

SEQ ID NO: 377180 - DNA, 1017 bp, Homo sapiens; identical to SEQ ID NO: 338521
  chr4:100573606-100574623
  hypo

SEQ ID NO: 377181 - DNA, 258 bp, Homo sapiens; identical to SEQ ID NO: 345138
  chr4:100867945-100868203
  hypo

SEQ ID NO: 377182 - DNA, 168 bp, Homo sapiens; identical to SEQ ID NO: 338523
  chr4:103421142-103421310
  hypo

SEQ ID NO: 377183 - DNA, 692 bp, Homo sapiens; identical to SEQ ID NO: 349957
  chr4:103997179-103997871
  hypo

SEQ ID NO: 377184 - DNA, 60 bp, Homo sapiens; identical to SEQ ID NO: 338525
  chr4:104854506-104854566
  hypo

SEQ ID NO: 377185 - DNA, 269 bp, Homo sapiens; identical to SEQ ID NO: 349958
  chr4:106067220-106067489
  hypo

SEQ ID NO: 377186 - DNA, 1352 bp, Homo sapiens; identical to SEQ ID NO: 332159
  chr4:106156138-106157490
  hypo

SEQ ID NO: 377187 - DNA, 185 bp, Homo sapiens; identical to SEQ ID NO: 338528
  chr4:106335558-106335743
  hypo

SEQ ID NO: 377188 - DNA, 232 bp, Homo sapiens; identical to SEQ ID NO: 199554
  chr4:111543735-111543967
  hypo

SEQ ID NO: 377189 - DNA, 242 bp, Homo sapiens; identical to SEQ ID NO: 199560
  chr4:113436585-113436827
  hypo

SEQ ID NO: 377190 - DNA, 228 bp, Homo sapiens; identical to SEQ ID NO: 199561
  chr4:113438278-113438506
  hypo

SEQ ID NO: 377191 - DNA, 215 bp, Homo sapiens; identical to SEQ ID NO: 349969
  chr4:115520945-115521160
  hypo

SEQ ID NO: 377192 - DNA, 305 bp, Homo sapiens; identical to SEQ ID NO: 332186
  chr4:120549993-120550298
  hypo

SEQ ID NO: 377193 - DNA, 276 bp, Homo sapiens; identical to SEQ ID NO: 199580
  chr4:121843731-121844007
  hypo

SEQ ID NO: 377194 - DNA, 170 bp, Homo sapiens; identical to SEQ ID NO: 357955
  chr4:121844206-121844376
  hypo

SEQ ID NO: 377195 - DNA, 281 bp, Homo sapiens; identical to SEQ ID NO: 338537
  chr4:123300379-123300660
  hypo

SEQ ID NO: 377196 - DNA, 1537 bp, Homo sapiens; identical to SEQ ID NO: 332191
  chr4:124317751-124319288
  hypo

SEQ ID NO: 377197 - DNA, 162 bp, Homo sapiens; identical to SEQ ID NO: 338540
  chr4:128702523-128702685
  hypo

SEQ ID NO: 377198 - DNA, 132 bp, Homo sapiens; identical to SEQ ID NO: 338541
  chr4:130168471-130168603
  hypo

SEQ ID NO: 377199 - DNA, 189 bp, Homo sapiens; identical to SEQ ID NO: 338542
  chr4:141007383-141007572
  hypo

SEQ ID NO: 377200 - DNA, 82 bp, Homo sapiens
  chr4:141207770-141207852
  hypo
cggcatgtgcagccgtgtgcccgcgccgttcctcacgtgcacatgggtggcttgagcgcataagcatgactgccaatatcac

SEQ ID NO: 377201 - DNA, 1351 bp, Homo sapiens; identical to SEQ ID NO: 338544
  chr4:141563919-141565270
  hypo

SEQ ID NO: 377202 - DNA, 60 bp, Homo sapiens; identical to SEQ ID NO: 199612
  chr4:142054594-142054654
  hypo

SEQ ID NO: 377203 - DNA, 155 bp, Homo sapiens; identical to SEQ ID NO: 357972
  chr4:142054757-142054912
  hypo

SEQ ID NO: 377204 - DNA, 824 bp, Homo sapiens; identical to SEQ ID NO: 332200
  chr4:142557243-142558067
  hypo

SEQ ID NO: 377205 - DNA, 223 bp, Homo sapiens; identical to SEQ ID NO: 346657
  chr4:149364661-149364884
  hypo

SEQ ID NO: 377206 - DNA, 346 bp, Homo sapiens; identical to SEQ ID NO: 357982
  chr4:149365911-149366257
  hypo

SEQ ID NO: 377207 - DNA, 1048 bp, Homo sapiens; identical to SEQ ID NO: 332213
  chr4:152329824-152330872
  hypo

SEQ ID NO: 377208 - DNA, 116 bp, Homo sapiens; identical to SEQ ID NO: 338551
  chr4:152591291-152591407
  hypo

SEQ ID NO: 377209 - DNA, 43 bp, Homo sapiens
  chr4:153247386-153247429
  hypo
cagagggagaaacagaaaaacaaaacaaaacaaaaaaacccac

SEQ ID NO: 377210 - DNA, 373 bp, Homo sapiens; identical to SEQ ID NO: 363621
  chr4:153943334-153943707
  hypo

SEQ ID NO: 377211 - DNA, 352 bp, Homo sapiens; identical to SEQ ID NO: 209824
  chr4:154216898-154217250
  hypo

SEQ ID NO: 377212 - DNA, 227 bp, Homo sapiens; identical to SEQ ID NO: 370585
  chr4:154387493-154387720
  hypo

SEQ ID NO: 377213 - DNA, 111 bp, Homo sapiens; identical to SEQ ID NO: 338557
  chr4:154421947-154422058
  hypo

SEQ ID NO: 377214 - DNA, 192 bp, Homo sapiens; identical to SEQ ID NO: 350003
  chr4:154714010-154714202
  hypo

SEQ ID NO: 377215 - DNA, 40 bp, Homo sapiens; identical to SEQ ID NO: 350004
  chr4:156298073-156298113
  hypo

SEQ ID NO: 377216 - DNA, 726 bp, Homo sapiens; identical to SEQ ID NO: 370601
  chr4:159690014-159690740
  hypo

SEQ ID NO: 377217 - DNA, 144 bp, Homo sapiens; identical to SEQ ID NO: 338563
  chr4:170043204-170043348
  hypo

SEQ ID NO: 377218 - DNA, 1685 bp, Homo sapiens; identical to SEQ ID NO: 332246
  chr4:174089737-174091422
  hypo

SEQ ID NO: 377219 - DNA, 164 bp, Homo sapiens; identical to SEQ ID NO: 338566
  chr4:183626546-183626710
  hypo

SEQ ID NO: 377220 - DNA, 132 bp, Homo sapiens; identical to SEQ ID NO: 338567
  chr4:183808118-183808250
  hypo

SEQ ID NO: 377221 - DNA, 166 bp, Homo sapiens; identical to SEQ ID NO: 338568
  chr4:183809411-183809577
  hypo

SEQ ID NO: 377222 - DNA, 290 bp, Homo sapiens; identical to SEQ ID NO: 338569
  chr4:183815970-183816260
  hypo

SEQ ID NO: 377223 - DNA, 206 bp, Homo sapiens; identical to SEQ ID NO: 199699
  chr4:184019900-184020106
  hypo

SEQ ID NO: 377224 - DNA, 155 bp, Homo sapiens; identical to SEQ ID NO: 338571
  chr4:184278181-184278336
  hypo

SEQ ID NO: 377225 - DNA, 125 bp, Homo sapiens; identical to SEQ ID NO: 353523
  chr4:184667665-184667790
  hypo

SEQ ID NO: 377226 - DNA, 365 bp, Homo sapiens; identical to SEQ ID NO: 332268
  chr4:185747631-185747996
  hypo

SEQ ID NO: 377227 - DNA, 140 bp, Homo sapiens; identical to SEQ ID NO: 338574
  chr4:185765461-185765601
  hypo

SEQ ID NO: 377228 - DNA, 219 bp, Homo sapiens; identical to SEQ ID NO: 358037
  chr4:185939454-185939673
  hypo

SEQ ID NO: 377229 - DNA, 128 bp, Homo sapiens; identical to SEQ ID NO: 338576
  chr4:186348212-186348340
  hypo

SEQ ID NO: 377230 - DNA, 193 bp, Homo sapiens; identical to SEQ ID NO: 370639
  chr4:187026475-187026668
  hypo

SEQ ID NO: 377231 - DNA, 393 bp, Homo sapiens; identical to SEQ ID NO: 199720
  chr4:187647669-187648062
  hypo

SEQ ID NO: 377232 - DNA, 239 bp, Homo sapiens; identical to SEQ ID NO: 350024
  chr4:187648119-187648358
  hypo

SEQ ID NO: 377233 - DNA, 346 bp, Homo sapiens; identical to SEQ ID NO: 338579
  chr4:188427955-188428301
  hypo

SEQ ID NO: 377234 - DNA, 482 bp, Homo sapiens; identical to SEQ ID NO: 338580
  chr4:189552385-189552867
  hypo

SEQ ID NO: 377235 - DNA, 203 bp, Homo sapiens; identical to SEQ ID NO: 338581
  chr4:189717765-189717968
  hypo

SEQ ID NO: 377236 - DNA, 183 bp, Homo sapiens; identical to SEQ ID NO: 338582
  chr4:190345382-190345565
  hypo

SEQ ID NO: 377237 - DNA, 702 bp, Homo sapiens; identical to SEQ ID NO: 338583
  chr4:190462487-190463189
  hypo

SEQ ID NO: 377238 - DNA, 240 bp, Homo sapiens; identical to SEQ ID NO: 338584
  chr5:110225-110465
  hypo

SEQ ID NO: 377239 - DNA, 337 bp, Homo sapiens
  chr5:110572-110909
  hypo
cgtgcacacatccacacaatctgcaacacgtgtgcacactggccactctgcaacacacatgcacacatccacacaatctgcaacacacgtgcacacacccacgcaatctgcaacacacgcgcacacatccacacaatctgcaacacgtgtgcacacaccggccactctgcaacacacgtgcacacatccacacaatctgcaacacacgtgcacgcacccacacaatctgcagcacacgtgcacacatacaaaatgcaacacgtgtgcacacaccagccactctgcaacaaacgtgcacacatccacacaatctgcaacacgtgcacacacccgcacc

SEQ ID NO: 377240 - DNA, 49 bp, Homo sapiens; identical to SEQ ID NO: 353530
  chr5:139637-139686
  hypo

SEQ ID NO: 377241 - DNA, 248 bp, Homo sapiens; identical to SEQ ID NO: 209893
  chr5:139745-139993
  hypo

SEQ ID NO: 377242 - DNA, 111 bp, Homo sapiens; identical to SEQ ID NO: 353532
  chr5:140023-140134
  hypo

SEQ ID NO: 377243 - DNA, 343 bp, Homo sapiens
  chr5:192307-192650
  hypo
gtgcacaacgtgcggctgcatgcgggccacgtgcagcagcttctggcccaggtgggcttcccccggctggcctcgctcaccctgcccaccaaggcctttgatgcaccccccacctacgcctccactcccgacggcgaggaccccctcctcgcctccatcgcccgggagctcagcaagatggcgcagctcactgagctcagtgtggccttctccacgctgaccgggaagatcccgacgctgcttgggtgagtcttggggaggggactgagggcgggctggtggctgcagaggcaaggagagatcgtccaggggcctgctcatgtccaaggccatgaggctacac

SEQ ID NO: 377244 - DNA, 331 bp, Homo sapiens; identical to SEQ ID NO: 338589
  chr5:453948-454279
  hypo

SEQ ID NO: 377245 - DNA, 173 bp, Homo sapiens; identical to SEQ ID NO: 338590
  chr5:462216-462389
  hypo

SEQ ID NO: 377246 - DNA, 758 bp, Homo sapiens; identical to SEQ ID NO: 353534
  chr5:465064-465822
  hypo

SEQ ID NO: 377247 - DNA, 258 bp, Homo sapiens; identical to SEQ ID NO: 353535
  chr5:465852-466110
  hypo

SEQ ID NO: 377248 - DNA, 1660 bp, Homo sapiens; identical to SEQ ID NO: 332275
  chr5:472600-474260
  hypo

SEQ ID NO: 377249 - DNA, 368 bp, Homo sapiens; identical to SEQ ID NO: 338593
  chr5:476496-476864
  hypo

SEQ ID NO: 377250 - DNA, 351 bp, Homo sapiens; identical to SEQ ID NO: 363653
  chr5:488144-488495
  hypo

SEQ ID NO: 377251 - DNA, 52 bp, Homo sapiens; identical to SEQ ID NO: 363654
  chr5:488553-488605
  hypo

SEQ ID NO: 377252 - DNA, 87 bp, Homo sapiens
  chr5:490615-490702
  hypo
cggggaccattgtgacgtggccacagagccacggagtgtgcccggctctcaaaggagcggccctgacggccagactgatcacaggct

SEQ ID NO: 377253 - DNA, 457 bp, Homo sapiens; identical to SEQ ID NO: 282733
  chr5:490766-491223
  hypo

SEQ ID NO: 377254 - DNA, 512 bp, Homo sapiens; identical to SEQ ID NO: 338596
  chr5:508111-508623
  hypo

SEQ ID NO: 377255 - DNA, 386 bp, Homo sapiens; identical to SEQ ID NO: 363656
  chr5:510026-510412
  hypo

SEQ ID NO: 377256 - DNA, 201 bp, Homo sapiens; identical to SEQ ID NO: 353537
  chr5:520018-520219
  hypo

SEQ ID NO: 377257 - DNA, 60 bp, Homo sapiens; identical to SEQ ID NO: 209918
  chr5:554571-554631
  hypo

SEQ ID NO: 377258 - DNA, 60 bp, Homo sapiens; identical to SEQ ID NO: 209919
  chr5:554751-554811
  hypo

SEQ ID NO: 377259 - DNA, 140 bp, Homo sapiens; identical to SEQ ID NO: 363660
  chr5:554931-555071
  hypo

SEQ ID NO: 377260 - DNA, 386 bp, Homo sapiens; identical to SEQ ID NO: 338601
  chr5:569858-570244
  hypo

SEQ ID NO: 377261 - DNA, 160 bp, Homo sapiens; identical to SEQ ID NO: 353538
  chr5:600977-601137
  hypo

SEQ ID NO: 377262 - DNA, 263 bp, Homo sapiens; identical to SEQ ID NO: 353539
  chr5:601222-601485
  hypo

SEQ ID NO: 377263 - DNA, 54 bp, Homo sapiens; identical to SEQ ID NO: 338603
  chr5:667302-667356
  hypo

SEQ ID NO: 377264 - DNA, 258 bp, Homo sapiens; identical to SEQ ID NO: 350027
  chr5:676510-676768
  hypo

SEQ ID NO: 377265 - DNA, 356 bp, Homo sapiens; identical to SEQ ID NO: 350028
  chr5:676926-677282
  hypo

SEQ ID NO: 377266 - DNA, 267 bp, Homo sapiens
  chr5:851421-851688
  hypo
cgctgcggctgctcctggccagtcaggtggggagggcggcaggggtgggagggacgtggtgtcacagagcggcagtgaaagacactcaacggccgctacggggtggggggttgatcttgaggggctgggcggtctctacagaggagggttaggaagcttcgccacgttatgcctcgctcaaagtccttgttgtctctttgggaaaaaaccttcagaaaatgaagttgatattaaatgtatttctttgagaagagagacattgagaaa

SEQ ID NO: 377267 - DNA, 432 bp, Homo sapiens; identical to SEQ ID NO: 338606
  chr5:883821-884253
  hypo

SEQ ID NO: 377268 - DNA, 187 bp, Homo sapiens; identical to SEQ ID NO: 338607
  chr5:913200-913387
  hypo

SEQ ID NO: 377269 - DNA, 487 bp, Homo sapiens; identical to SEQ ID NO: 338608
  chr5:962533-963020
  hypo

SEQ ID NO: 377270 - DNA, 150 bp, Homo sapiens; identical to SEQ ID NO: 338609
  chr5:1032302-1032452
  hypo

SEQ ID NO: 377271 - DNA, 338 bp, Homo sapiens; identical to SEQ ID NO: 353544
  chr5:1033274-1033612
  hypo

SEQ ID NO: 377272 - DNA, 40 bp, Homo sapiens; identical to SEQ ID NO: 353545
  chr5:1033674-1033714
  hypo

SEQ ID NO: 377273 - DNA, 143 bp, Homo sapiens; identical to SEQ ID NO: 353546
  chr5:1037852-1037995
  hypo

SEQ ID NO: 377274 - DNA, 454 bp, Homo sapiens; identical to SEQ ID NO: 353547
  chr5:1038035-1038489
  hypo

SEQ ID NO: 377275 - DNA, 318 bp, Homo sapiens; identical to SEQ ID NO: 353548
  chr5:1039295-1039613
  hypo

SEQ ID NO: 377276 - DNA, 132 bp, Homo sapiens; identical to SEQ ID NO: 353549
  chr5:1039683-1039815
  hypo

SEQ ID NO: 377277 - DNA, 236 bp, Homo sapiens; identical to SEQ ID NO: 338614
  chr5:1049758-1049994
  hypo

SEQ ID NO: 377278 - DNA, 263 bp, Homo sapiens; identical to SEQ ID NO: 338615
  chr5:1051312-1051575
  hypo

SEQ ID NO: 377279 - DNA, 1232 bp, Homo sapiens; identical to SEQ ID NO: 338616
  chr5:1051905-1053137
  hypo

SEQ ID NO: 377280 - DNA, 1614 bp, Homo sapiens; identical to SEQ ID NO: 338617
  chr5:1053406-1055020
  hypo

SEQ ID NO: 377281 - DNA, 123 bp, Homo sapiens; identical to SEQ ID NO: 353554
  chr5:1055426-1055549
  hypo

SEQ ID NO: 377282 - DNA, 418 bp, Homo sapiens; identical to SEQ ID NO: 338619
  chr5:1055588-1056006
  hypo

SEQ ID NO: 377283 - DNA, 1823 bp, Homo sapiens; identical to SEQ ID NO: 338620
  chr5:1056108-1057931
  hypo

SEQ ID NO: 377284 - DNA, 327 bp, Homo sapiens; identical to SEQ ID NO: 345841
  chr5:1058847-1059174
  hypo

SEQ ID NO: 377285 - DNA, 98 bp, Homo sapiens; identical to SEQ ID NO: 209967
  chr5:1059425-1059523
  hypo

SEQ ID NO: 377286 - DNA, 317 bp, Homo sapiens; identical to SEQ ID NO: 345843
  chr5:1059556-1059873
  hypo

SEQ ID NO: 377287 - DNA, 97 bp, Homo sapiens; identical to SEQ ID NO: 338622
  chr5:1060676-1060773
  hypo

SEQ ID NO: 377288 - DNA, 342 bp, Homo sapiens; identical to SEQ ID NO: 338623
  chr5:1060864-1061206
  hypo

SEQ ID NO: 377289 - DNA, 207 bp, Homo sapiens; identical to SEQ ID NO: 332281
  chr5:1061585-1061792
  hypo

SEQ ID NO: 377290 - DNA, 811 bp, Homo sapiens; identical to SEQ ID NO: 338625
  chr5:1062902-1063713
  hypo

SEQ ID NO: 377291 - DNA, 860 bp, Homo sapiens; identical to SEQ ID NO: 332282
  chr5:1064412-1065272
  hypo

SEQ ID NO: 377292 - DNA, 890 bp, Homo sapiens; identical to SEQ ID NO: 338627
  chr5:1065329-1066219
  hypo

SEQ ID NO: 377293 - DNA, 1417 bp, Homo sapiens; identical to SEQ ID NO: 345846
  chr5:1068627-1070044
  hypo

SEQ ID NO: 377294 - DNA, 806 bp, Homo sapiens; identical to SEQ ID NO: 353565
  chr5:1074389-1075195
  hypo

SEQ ID NO: 377295 - DNA, 4905 bp, Homo sapiens; identical to SEQ ID NO: 338632
  chr5:1075478-1080383
  hypo

SEQ ID NO: 377296 - DNA, 69 bp, Homo sapiens; identical to SEQ ID NO: 338633
  chr5:1081429-1081498
  hypo

SEQ ID NO: 377297 - DNA, 304 bp, Homo sapiens; identical to SEQ ID NO: 338634
  chr5:1081824-1082128
  hypo

SEQ ID NO: 377298 - DNA, 708 bp, Homo sapiens; identical to SEQ ID NO: 338635
  chr5:1083641-1084349
  hypo

SEQ ID NO: 377299 - DNA, 545 bp, Homo sapiens; identical to SEQ ID NO: 353570
  chr5:1084386-1084931
  hypo

SEQ ID NO: 377300 - DNA, 1665 bp, Homo sapiens; identical to SEQ ID NO: 363696
  chr5:1085196-1086861
  hypo

SEQ ID NO: 377301 - DNA, 2187 bp, Homo sapiens; identical to SEQ ID NO: 338638
  chr5:1087088-1089275
  hypo

SEQ ID NO: 377302 - DNA, 212 bp, Homo sapiens; identical to SEQ ID NO: 338639
  chr5:1090437-1090649
  hypo

SEQ ID NO: 377303 - DNA, 247 bp, Homo sapiens; identical to SEQ ID NO: 338640
  chr5:1091634-1091881
  hypo

SEQ ID NO: 377304 - DNA, 134 bp, Homo sapiens; identical to SEQ ID NO: 348073
  chr5:1094049-1094183
  hypo

SEQ ID NO: 377305 - DNA, 625 bp, Homo sapiens; identical to SEQ ID NO: 363701
  chr5:1094563-1095188
  hypo

SEQ ID NO: 377306 - DNA, 390 bp, Homo sapiens; identical to SEQ ID NO: 338643
  chr5:1095619-1096009
  hypo

SEQ ID NO: 377307 - DNA, 991 bp, Homo sapiens; identical to SEQ ID NO: 332283
  chr5:1111396-1112387
  hypo

SEQ ID NO: 377308 - DNA, 239 bp, Homo sapiens; identical to SEQ ID NO: 338645
  chr5:1114657-1114896
  hypo

SEQ ID NO: 377309 - DNA, 635 bp, Homo sapiens; identical to SEQ ID NO: 338646
  chr5:1115157-1115792
  hypo

SEQ ID NO: 377310 - DNA, 601 bp, Homo sapiens; identical to SEQ ID NO: 338647
  chr5:1116675-1117276
  hypo

SEQ ID NO: 377311 - DNA, 191 bp, Homo sapiens; identical to SEQ ID NO: 353578
  chr5:1120359-1120550
  hypo

SEQ ID NO: 377312 - DNA, 103 bp, Homo sapiens; identical to SEQ ID NO: 363707
  chr5:1120577-1120680
  hypo

SEQ ID NO: 377313 - DNA, 178 bp, Homo sapiens; identical to SEQ ID NO: 338650
  chr5:1122647-1122825
  hypo

SEQ ID NO: 377314 - DNA, 923 bp, Homo sapiens
  chr5:1143146-1144069
  hypo
cgggcaccacagagcttacggctccatctgtgacacgggccttccttccctgagggccccaacacagcctcctgggcaacatgcccctccatccgcagggtcagaagccgcagctcaaggatcacctgcggaaggtggcatttcccaagaccggagcttcccgacatcccgccacctcccgcagcgctggtgccagtcctgtcggataaggggcaagtgtaagaccggcctcatcagctccagcaattgtaacaaagcgccatgggcgggggcttcaacactagaaattgttccctcgcagcctgggggctggaagtcccagaccaaggggctgctgggcggtttctcccaaggcctattcatggcccgcagacggtggcttctcctgtgtcctcccacggccgctcctctgcacacacgcatccctggtgtcgctttctcttcttacaaggacacgtcctattgggtcagggccttcctcacaacctcatttaaccttaagtccctccctcaaggtcctagctccagatacagtcccgttggggctgggcctcagctgcgaatctgggggcacgactcagtcggcagctgtctgtgtcctgcatgcgcctccactgaccttcccagggttctccctgtgtcctggtgctgcttcttcacccagagcgctgccacccactgctgagcttcagacatgtgacctgcccagtcccctctgcaagccctgcaccttcctcagtaccaaccagcaaacccgtggctgcaccggggccagcagacactctcgggcagagtgctgggcaccctggcctcctgggcaccctggcgcttggcaccctggcctcctgggcaccctggcgctgggaaacctggcctcctgggcaccctggcgctgggaaacctggcctcctgggcaccctggc

SEQ ID NO: 377315 - DNA, 259 bp, Homo sapiens; identical to SEQ ID NO: 338654
  chr5:1331488-1331747
  hypo

SEQ ID NO: 377316 - DNA, 343 bp, Homo sapiens; identical to SEQ ID NO: 338655
  chr5:1409813-1410156
  hypo

SEQ ID NO: 377317 - DNA, 373 bp, Homo sapiens; identical to SEQ ID NO: 338656
  chr5:1476334-1476707
  hypo

SEQ ID NO: 377318 - DNA, 254 bp, Homo sapiens; identical to SEQ ID NO: 338657
  chr5:1551543-1551797
  hypo

SEQ ID NO: 377319 - DNA, 327 bp, Homo sapiens; identical to SEQ ID NO: 338658
  chr5:1553050-1553377
  hypo

SEQ ID NO: 377320 - DNA, 131 bp, Homo sapiens; identical to SEQ ID NO: 363712
  chr5:1641261-1641392
  hypo

SEQ ID NO: 377321 - DNA, 277 bp, Homo sapiens; identical to SEQ ID NO: 338660
  chr5:1702104-1702381
  hypo

SEQ ID NO: 377322 - DNA, 41 bp, Homo sapiens; identical to SEQ ID NO: 363714
  chr5:1729774-1729815
  hypo

SEQ ID NO: 377323 - DNA, 330 bp, Homo sapiens; identical to SEQ ID NO: 210022
  chr5:1729886-1730216
  hypo

SEQ ID NO: 377324 - DNA, 56 bp, Homo sapiens; identical to SEQ ID NO: 363716
  chr5:1730252-1730308
  hypo

SEQ ID NO: 377325 - DNA, 53 bp, Homo sapiens
  chr5:1787325-1787378
  hypo
cgcccaggctgctgggcaggctgaggctgggggaagcagagctcctgggcagg

SEQ ID NO: 377326 - DNA, 174 bp, Homo sapiens
  chr5:1787418-1787592
  hypo
tgcctgcattccccacgcagcccatggctttcccaggtgaggccgaggtaaacacaaggaaactcgctgtgcggcagtttcctttgccacgcactcttccatcagagatggcctccagcctacccccagccacctcccatcttccatatccctgtcctggagggctgcctcgcc

SEQ ID NO: 377327 - DNA, 185 bp, Homo sapiens; identical to SEQ ID NO: 338665
  chr5:1808331-1808516
  hypo

SEQ ID NO: 377328 - DNA, 625 bp, Homo sapiens; identical to SEQ ID NO: 353582
  chr5:1809065-1809690
  hypo

SEQ ID NO: 377329 - DNA, 335 bp, Homo sapiens; identical to SEQ ID NO: 338669
  chr5:1910394-1910729
  hypo

SEQ ID NO: 377330 - DNA, 160 bp, Homo sapiens; identical to SEQ ID NO: 363719
  chr5:1922827-1922987
  hypo

SEQ ID NO: 377331 - DNA, 48 bp, Homo sapiens; identical to SEQ ID NO: 363720
  chr5:1923074-1923122
  hypo

SEQ ID NO: 377332 - DNA, 129 bp, Homo sapiens
  chr5:1951382-1951511
  hypo
cgccgtctgctgtgcgtgcgccgtctgctgtgcgtgagtcgtctgctgtgcgtgtgccgtctgctgtgcgtgagtcgtctgctgtgcgtgtgtcgtttgctgtgcgtgtgccgtctgctgtgcgtgtgt

SEQ ID NO: 377333 - DNA, 146 bp, Homo sapiens; identical to SEQ ID NO: 210032
  chr5:1951710-1951856
  hypo

SEQ ID NO: 377334 - DNA, 194 bp, Homo sapiens; identical to SEQ ID NO: 353583
  chr5:2007541-2007735
  hypo

SEQ ID NO: 377335 - DNA, 36 bp, Homo sapiens; identical to SEQ ID NO: 353584
  chr5:2007797-2007833
  hypo

SEQ ID NO: 377336 - DNA, 61 bp, Homo sapiens; identical to SEQ ID NO: 353585
  chr5:2225378-2225439
  hypo

SEQ ID NO: 377337 - DNA, 133 bp, Homo sapiens; identical to SEQ ID NO: 353586
  chr5:2225469-2225602
  hypo

SEQ ID NO: 377338 - DNA, 297 bp, Homo sapiens; identical to SEQ ID NO: 304031
  chr5:2261313-2261610
  hypo

SEQ ID NO: 377339 - DNA, 418 bp, Homo sapiens; identical to SEQ ID NO: 338677
  chr5:2371462-2371880
  hypo

SEQ ID NO: 377340 - DNA, 132 bp, Homo sapiens
  chr5:2412076-2412208
  hypo
cgctctggccggattcggccattctcatggaaaccaggggcccttcccagggcgcctcctcacttcatctccaagctgagaggcaattagtaggagtccgtctcagagtttctggagcctcagccatgatgg

SEQ ID NO: 377341 - DNA, 51 bp, Homo sapiens
  chr5:2412238-2412289
  hypo
gggagcacagtcagaagtgaggagcagccgtggtaacaaatctcatctgtc

SEQ ID NO: 377342 - DNA, 155 bp, Homo sapiens; identical to SEQ ID NO: 338679
  chr5:2524957-2525112
  hypo

SEQ ID NO: 377343 - DNA, 47 bp, Homo sapiens; identical to SEQ ID NO: 363727
  chr5:2547115-2547162
  hypo

SEQ ID NO: 377344 - DNA, 128 bp, Homo sapiens; identical to SEQ ID NO: 363728
  chr5:2547192-2547320
  hypo

SEQ ID NO: 377345 - DNA, 36 bp, Homo sapiens; identical to SEQ ID NO: 353589
  chr5:3221011-3221047
  hypo

SEQ ID NO: 377346 - DNA, 142 bp, Homo sapiens; identical to SEQ ID NO: 353590
  chr5:3221181-3221323
  hypo

SEQ ID NO: 377347 - DNA, 317 bp, Homo sapiens; identical to SEQ ID NO: 338683
  chr5:3282952-3283269
  hypo

SEQ ID NO: 377348 - DNA, 51 bp, Homo sapiens; identical to SEQ ID NO: 348077
  chr5:3324702-3324753
  hypo

SEQ ID NO: 377349 - DNA, 283 bp, Homo sapiens; identical to SEQ ID NO: 348078
  chr5:3325333-3325616
  hypo

SEQ ID NO: 377350 - DNA, 130 bp, Homo sapiens; identical to SEQ ID NO: 338685
  chr5:3326328-3326458
  hypo

SEQ ID NO: 377351 - DNA, 75 bp, Homo sapiens; identical to SEQ ID NO: 363735
  chr5:3454429-3454504
  hypo

SEQ ID NO: 377352 - DNA, 216 bp, Homo sapiens; identical to SEQ ID NO: 338687
  chr5:3627893-3628109
  hypo

SEQ ID NO: 377353 - DNA, 113 bp, Homo sapiens; identical to SEQ ID NO: 304098
  chr5:3740590-3740703
  hypo

SEQ ID NO: 377354 - DNA, 327 bp, Homo sapiens; identical to SEQ ID NO: 304099
  chr5:3761240-3761567
  hypo

SEQ ID NO: 377355 - DNA, 301 bp, Homo sapiens; identical to SEQ ID NO: 353596
  chr5:3761623-3761924
  hypo

SEQ ID NO: 377356 - DNA, 130 bp, Homo sapiens; identical to SEQ ID NO: 338690
  chr5:3781386-3781516
  hypo

SEQ ID NO: 377357 - DNA, 147 bp, Homo sapiens
  chr5:3865172-3865319
  hypo
cgtgactggagaaggcggtatttacaagtctactgtgggcccatattaaacttcactttgacataggctcacttctttggcagtgagagtgaaaggggtggagtgagtgtgccacgctagttggctccgggacacaatggggctggc

SEQ ID NO: 377358 - DNA, 208 bp, Homo sapiens; identical to SEQ ID NO: 353598
  chr5:3932149-3932357
  hypo

SEQ ID NO: 377359 - DNA, 520 bp, Homo sapiens; identical to SEQ ID NO: 304106
  chr5:4144516-4145036
  hypo

SEQ ID NO: 377360 - DNA, 146 bp, Homo sapiens; identical to SEQ ID NO: 363742
  chr5:4145066-4145212
  hypo

SEQ ID NO: 377361 - DNA, 106 bp, Homo sapiens; identical to SEQ ID NO: 338695
  chr5:7825260-7825366
  hypo

SEQ ID NO: 377362 - DNA, 382 bp, Homo sapiens; identical to SEQ ID NO: 338696
  chr5:9122712-9123094
  hypo

SEQ ID NO: 377363 - DNA, 158 bp, Homo sapiens; identical to SEQ ID NO: 338697
  chr5:9497496-9497654
  hypo

SEQ ID NO: 377364 - DNA, 176 bp, Homo sapiens; identical to SEQ ID NO: 338699
  chr5:10256093-10256269
  hypo

SEQ ID NO: 377365 - DNA, 125 bp, Homo sapiens; identical to SEQ ID NO: 363746
  chr5:10479713-10479838
  hypo

SEQ ID NO: 377366 - DNA, 170 bp, Homo sapiens; identical to SEQ ID NO: 345154
  chr5:10564301-10564471
  hypo

SEQ ID NO: 377367 - DNA, 73 bp, Homo sapiens; identical to SEQ ID NO: 338702
  chr5:10702280-10702353
  hypo

SEQ ID NO: 377368 - DNA, 359 bp, Homo sapiens; identical to SEQ ID NO: 338703
  chr5:12794972-12795331
  hypo

SEQ ID NO: 377369 - DNA, 717 bp, Homo sapiens; identical to SEQ ID NO: 370674
  chr5:14142816-14143533
  hypo

SEQ ID NO: 377370 - DNA, 453 bp, Homo sapiens; identical to SEQ ID NO: 338705
  chr5:14328256-14328709
  hypo

SEQ ID NO: 377371 - DNA, 274 bp, Homo sapiens; identical to SEQ ID NO: 338706
  chr5:14332870-14333144
  hypo

SEQ ID NO: 377372 - DNA, 259 bp, Homo sapiens; identical to SEQ ID NO: 338707
  chr5:14461130-14461389
  hypo

SEQ ID NO: 377373 - DNA, 157 bp, Homo sapiens; identical to SEQ ID NO: 363752
  chr5:14492755-14492912
  hypo

SEQ ID NO: 377374 - DNA, 112 bp, Homo sapiens; identical to SEQ ID NO: 338709
  chr5:14681608-14681720
  hypo

SEQ ID NO: 377375 - DNA, 41 bp, Homo sapiens; identical to SEQ ID NO: 370677
  chr5:15500076-15500117
  hypo

SEQ ID NO: 377376 - DNA, 270 bp, Homo sapiens; identical to SEQ ID NO: 338712
  chr5:16794700-16794970
  hypo

SEQ ID NO: 377377 - DNA, 88 bp, Homo sapiens; identical to SEQ ID NO: 358074
  chr5:16935468-16935556
  hypo

SEQ ID NO: 377378 - DNA, 266 bp, Homo sapiens; identical to SEQ ID NO: 199773
  chr5:16935617-16935883
  hypo

SEQ ID NO: 377379 - DNA, 33 bp, Homo sapiens; identical to SEQ ID NO: 199774
  chr5:16936321-16936354
  hypo

SEQ ID NO: 377380 - DNA, 70 bp, Homo sapiens; identical to SEQ ID NO: 199775
  chr5:16936514-16936584
  hypo

SEQ ID NO: 377381 - DNA, 52 bp, Homo sapiens; identical to SEQ ID NO: 350050
  chr5:17217629-17217681
  hypo

SEQ ID NO: 377382 - DNA, 216 bp, Homo sapiens; identical to SEQ ID NO: 363759
  chr5:17275369-17275585
  hypo

SEQ ID NO: 377383 - DNA, 380 bp, Homo sapiens; identical to SEQ ID NO: 363760
  chr5:17275617-17275997
  hypo

SEQ ID NO: 377384 - DNA, 337 bp, Homo sapiens; identical to SEQ ID NO: 338716
  chr5:17354400-17354737
  hypo

SEQ ID NO: 377385 - DNA, 118 bp, Homo sapiens
  chr5:27523835-27523953
  hypo
cgcacctgctgaggatgagcccctcgaggagcggcgcggggtgtgtgggagaacaatcacgggctccggccaccgtgcacagccacgcacaccggctagcacagtggggagggcagct

SEQ ID NO: 377386 - DNA, 71 bp, Homo sapiens; identical to SEQ ID NO: 338718
  chr5:31410355-31410426
  hypo

SEQ ID NO: 377387 - DNA, 478 bp, Homo sapiens; identical to SEQ ID NO: 346679
  chr5:31854462-31854940
  hypo

SEQ ID NO: 377388 - DNA, 799 bp, Homo sapiens; identical to SEQ ID NO: 350063
  chr5:41870076-41870875
  hypo

SEQ ID NO: 377389 - DNA, 277 bp, Homo sapiens; identical to SEQ ID NO: 358097
  chr5:42424338-42424615
  hypo

SEQ ID NO: 377390 - DNA, 328 bp, Homo sapiens; identical to SEQ ID NO: 332354
  chr5:43557434-43557762
  hypo

SEQ ID NO: 377391 - DNA, 214 bp, Homo sapiens; identical to SEQ ID NO: 350071
  chr5:43603571-43603785
  hypo

SEQ ID NO: 377392 - DNA, 50 bp, Homo sapiens; identical to SEQ ID NO: 345162
  chr5:49737299-49737349
  hypo

SEQ ID NO: 377393 - DNA, 552 bp, Homo sapiens; identical to SEQ ID NO: 358113
  chr5:56112644-56113196
  hypo

SEQ ID NO: 377394 - DNA, 133 bp, Homo sapiens; identical to SEQ ID NO: 338731
  chr5:61681266-61681399
  hypo

SEQ ID NO: 377395 - DNA, 111 bp, Homo sapiens; identical to SEQ ID NO: 345853
  chr5:67590957-67591068
  hypo

SEQ ID NO: 377396 - DNA, 114 bp, Homo sapiens; identical to SEQ ID NO: 304477
  chr5:67591157-67591271
  hypo

SEQ ID NO: 377397 - DNA, 96 bp, Homo sapiens; identical to SEQ ID NO: 338733
  chr5:67717809-67717905
  hypo

SEQ ID NO: 377398 - DNA, 143 bp, Homo sapiens; identical to SEQ ID NO: 338734
  chr5:71714802-71714945
  hypo

SEQ ID NO: 377399 - DNA, 216 bp, Homo sapiens; identical to SEQ ID NO: 199888
  chr5:72744481-72744697
  hypo

SEQ ID NO: 377400 - DNA, 64 bp, Homo sapiens; identical to SEQ ID NO: 338739
  chr5:73205673-73205737
  hypo

SEQ ID NO: 377401 - DNA, 164 bp, Homo sapiens; identical to SEQ ID NO: 332389
  chr5:73843900-73844064
  hypo

SEQ ID NO: 377402 - DNA, 181 bp, Homo sapiens; identical to SEQ ID NO: 338741
  chr5:73932104-73932285
  hypo

SEQ ID NO: 377403 - DNA, 368 bp, Homo sapiens; identical to SEQ ID NO: 370751
  chr5:74349128-74349496
  hypo

SEQ ID NO: 377404 - DNA, 62 bp, Homo sapiens; identical to SEQ ID NO: 338743
  chr5:74753672-74753734
  hypo

SEQ ID NO: 377405 - DNA, 373 bp, Homo sapiens; identical to SEQ ID NO: 199901
  chr5:75379694-75380067
  hypo

SEQ ID NO: 377406 - DNA, 50 bp, Homo sapiens; identical to SEQ ID NO: 283051
  chr5:75698194-75698244
  hypo

SEQ ID NO: 377407 - DNA, 1185 bp, Homo sapiens; identical to SEQ ID NO: 199902
  chr5:75698274-75699459
  hypo

SEQ ID NO: 377408 - DNA, 80 bp, Homo sapiens; identical to SEQ ID NO: 338746
  chr5:76327297-76327377
  hypo

SEQ ID NO: 377409 - DNA, 116 bp, Homo sapiens; identical to SEQ ID NO: 370764
  chr5:76506029-76506145
  hypo

SEQ ID NO: 377410 - DNA, 96 bp, Homo sapiens; identical to SEQ ID NO: 358151
  chr5:76507202-76507298
  hypo

SEQ ID NO: 377411 - DNA, 37 bp, Homo sapiens; identical to SEQ ID NO: 346704
  chr5:77268330-77268367
  hypo

SEQ ID NO: 377412 - DNA, 173 bp, Homo sapiens; identical to SEQ ID NO: 338750
  chr5:77291967-77292140
  hypo

SEQ ID NO: 377413 - DNA, 35 bp, Homo sapiens; identical to SEQ ID NO: 338751
  chr5:77425063-77425098
  hypo

SEQ ID NO: 377414 - DNA, 43 bp, Homo sapiens; identical to SEQ ID NO: 353623
  chr5:78105396-78105439
  hypo

SEQ ID NO: 377415 - DNA, 70 bp, Homo sapiens; identical to SEQ ID NO: 353624
  chr5:78105545-78105615
  hypo

SEQ ID NO: 377416 - DNA, 78 bp, Homo sapiens; identical to SEQ ID NO: 338753
  chr5:79097441-79097519
  hypo

SEQ ID NO: 377417 - DNA, 40 bp, Homo sapiens
  chr5:79598641-79598681
  hypo
cgagagcagtgatatcgtcatgcatggtgagctggcagca

SEQ ID NO: 377418 - DNA, 41 bp, Homo sapiens; identical to SEQ ID NO: 199922
  chr5:79865662-79865703
  hypo

SEQ ID NO: 377419 - DNA, 90 bp, Homo sapiens; identical to SEQ ID NO: 199923
  chr5:79865744-79865834
  hypo

SEQ ID NO: 377420 - DNA, 240 bp, Homo sapiens; identical to SEQ ID NO: 363789
  chr5:79911325-79911565
  hypo

SEQ ID NO: 377421 - DNA, 112 bp, Homo sapiens; identical to SEQ ID NO: 338757
  chr5:86672217-86672329
  hypo

SEQ ID NO: 377422 - DNA, 735 bp, Homo sapiens; identical to SEQ ID NO: 345179
  chr5:87436769-87437504
  hypo

SEQ ID NO: 377423 - DNA, 102 bp, Homo sapiens; identical to SEQ ID NO: 338761
  chr5:90670755-90670857
  hypo

SEQ ID NO: 377424 - DNA, 52 bp, Homo sapiens; identical to SEQ ID NO: 338762
  chr5:90672526-90672578
  hypo

SEQ ID NO: 377425 - DNA, 446 bp, Homo sapiens; identical to SEQ ID NO: 338765
  chr5:96111437-96111883
  hypo

SEQ ID NO: 377426 - DNA, 71 bp, Homo sapiens; identical to SEQ ID NO: 353628
  chr5:96114516-96114587
  hypo

SEQ ID NO: 377427 - DNA, 53 bp, Homo sapiens; identical to SEQ ID NO: 353629
  chr5:96114632-96114685
  hypo

SEQ ID NO: 377428 - DNA, 132 bp, Homo sapiens; identical to SEQ ID NO: 338767
  chr5:96121466-96121598
  hypo

SEQ ID NO: 377429 - DNA, 70 bp, Homo sapiens; identical to SEQ ID NO: 338768
  chr5:96362713-96362783
  hypo

SEQ ID NO: 377430 - DNA, 44 bp, Homo sapiens; identical to SEQ ID NO: 363798
  chr5:98200950-98200994
  hypo

SEQ ID NO: 377431 - DNA, 91 bp, Homo sapiens; identical to SEQ ID NO: 338770
  chr5:98239940-98240031
  hypo

SEQ ID NO: 377432 - DNA, 298 bp, Homo sapiens; identical to SEQ ID NO: 199969
  chr5:107005685-107005983
  hypo

SEQ ID NO: 377433 - DNA, 449 bp, Homo sapiens; identical to SEQ ID NO: 199970
  chr5:107006260-107006709
  hypo

SEQ ID NO: 377434 - DNA, 309 bp, Homo sapiens; identical to SEQ ID NO: 338773
  chr5:107703589-107703898
  hypo

SEQ ID NO: 377435 - DNA, 281 bp, Homo sapiens; identical to SEQ ID NO: 350137
  chr5:109024730-109025011
  hypo

SEQ ID NO: 377436 - DNA, 738 bp, Homo sapiens; identical to SEQ ID NO: 332448
  chr5:110847638-110848376
  hypo

SEQ ID NO: 377437 - DNA, 213 bp, Homo sapiens; identical to SEQ ID NO: 350143
  chr5:114506308-114506521
  hypo

SEQ ID NO: 377438 - DNA, 497 bp, Homo sapiens; identical to SEQ ID NO: 338778
  chr5:115783187-115783684
  hypo

SEQ ID NO: 377439 - DNA, 37 bp, Homo sapiens; identical to SEQ ID NO: 346733
  chr5:124084158-124084195
  hypo

SEQ ID NO: 377440 - DNA, 60 bp, Homo sapiens; identical to SEQ ID NO: 346734
  chr5:124084302-124084362
  hypo

SEQ ID NO: 377441 - DNA, 111 bp, Homo sapiens; identical to SEQ ID NO: 345192
  chr5:124084660-124084771
  hypo

SEQ ID NO: 377442 - DNA, 64 bp, Homo sapiens; identical to SEQ ID NO: 345193
  chr5:124084977-124085041
  hypo

SEQ ID NO: 377443 - DNA, 246 bp, Homo sapiens; identical to SEQ ID NO: 338782
  chr5:126213748-126213994
  hypo

SEQ ID NO: 377444 - DNA, 269 bp, Homo sapiens; identical to SEQ ID NO: 338783
  chr5:126250520-126250789
  hypo

SEQ ID NO: 377445 - DNA, 167 bp, Homo sapiens; identical to SEQ ID NO: 370850
  chr5:129239570-129239737
  hypo

SEQ ID NO: 377446 - DNA, 34 bp, Homo sapiens; identical to SEQ ID NO: 200020
  chr5:129240901-129240935
  hypo

SEQ ID NO: 377447 - DNA, 143 bp, Homo sapiens; identical to SEQ ID NO: 200021
  chr5:129240962-129241105
  hypo

SEQ ID NO: 377448 - DNA, 273 bp, Homo sapiens; identical to SEQ ID NO: 200022
  chr5:129241140-129241413
  hypo

SEQ ID NO: 377449 - DNA, 160 bp, Homo sapiens; identical to SEQ ID NO: 338787
  chr5:131037398-131037558
  hypo

SEQ ID NO: 377450 - DNA, 431 bp, Homo sapiens; identical to SEQ ID NO: 304697
  chr5:131607799-131608230
  hypo

SEQ ID NO: 377451 - DNA, 241 bp, Homo sapiens; identical to SEQ ID NO: 358234
  chr5:131831522-131831763
  hypo

SEQ ID NO: 377452 - DNA, 104 bp, Homo sapiens; identical to SEQ ID NO: 363819
  chr5:132083964-132084068
  hypo

SEQ ID NO: 377453 - DNA, 805 bp, Homo sapiens; identical to SEQ ID NO: 332483
  chr5:132386973-132387778
  hypo

SEQ ID NO: 377454 - DNA, 252 bp, Homo sapiens; identical to SEQ ID NO: 338792
  chr5:132607933-132608185
  hypo

SEQ ID NO: 377455 - DNA, 550 bp, Homo sapiens; identical to SEQ ID NO: 370860
  chr5:133450698-133451248
  hypo

SEQ ID NO: 377456 - DNA, 873 bp, Homo sapiens; identical to SEQ ID NO: 332486
  chr5:133862738-133863611
  hypo

SEQ ID NO: 377457 - DNA, 63 bp, Homo sapiens; identical to SEQ ID NO: 353650
  chr5:134273891-134273954
  hypo

SEQ ID NO: 377458 - DNA, 128 bp, Homo sapiens; identical to SEQ ID NO: 338797
  chr5:134278947-134279075
  hypo

SEQ ID NO: 377459 - DNA, 172 bp, Homo sapiens; identical to SEQ ID NO: 358243
  chr5:134370281-134370453
  hypo

SEQ ID NO: 377460 - DNA, 38 bp, Homo sapiens; identical to SEQ ID NO: 358244
  chr5:134370508-134370546
  hypo

SEQ ID NO: 377461 - DNA, 192 bp, Homo sapiens; identical to SEQ ID NO: 363826
  chr5:134524773-134524965
  hypo

SEQ ID NO: 377462 - DNA, 257 bp, Homo sapiens; identical to SEQ ID NO: 338800
  chr5:134579620-134579877
  hypo

SEQ ID NO: 377463 - DNA, 391 bp, Homo sapiens; identical to SEQ ID NO: 338801
  chr5:135091190-135091581
  hypo

SEQ ID NO: 377464 - DNA, 145 bp, Homo sapiens; identical to SEQ ID NO: 338802
  chr5:135188298-135188443
  hypo

SEQ ID NO: 377465 - DNA, 102 bp, Homo sapiens; identical to SEQ ID NO: 338804
  chr5:136983271-136983373
  hypo

SEQ ID NO: 377466 - DNA, 196 bp, Homo sapiens; identical to SEQ ID NO: 338805
  chr5:137895663-137895859
  hypo

SEQ ID NO: 377467 - DNA, 118 bp, Homo sapiens; identical to SEQ ID NO: 338806
  chr5:137912556-137912674
  hypo

SEQ ID NO: 377468 - DNA, 469 bp, Homo sapiens; identical to SEQ ID NO: 332510
  chr5:139088846-139089315
  hypo

SEQ ID NO: 377469 - DNA, 211 bp, Homo sapiens; identical to SEQ ID NO: 338808
  chr5:139113843-139114054
  hypo

SEQ ID NO: 377470 - DNA, 276 bp, Homo sapiens; identical to SEQ ID NO: 332516
  chr5:139554306-139554582
  hypo

SEQ ID NO: 377471 - DNA, 127 bp, Homo sapiens; identical to SEQ ID NO: 338810
  chr5:140905588-140905715
  hypo

SEQ ID NO: 377472 - DNA, 689 bp, Homo sapiens; identical to SEQ ID NO: 338811
  chr5:141248116-141248805
  hypo

SEQ ID NO: 377473 - DNA, 65 bp, Homo sapiens; identical to SEQ ID NO: 338812
  chr5:141355864-141355929
  hypo

SEQ ID NO: 377474 - DNA, 31 bp, Homo sapiens; identical to SEQ ID NO: 363838
  chr5:142625544-142625575
  hypo

SEQ ID NO: 377475 - DNA, 624 bp, Homo sapiens; identical to SEQ ID NO: 283411
  chr5:142781875-142782499
  hypo

SEQ ID NO: 377476 - DNA, 124 bp, Homo sapiens; identical to SEQ ID NO: 283412
  chr5:142782625-142782749
  hypo

SEQ ID NO: 377477 - DNA, 410 bp, Homo sapiens; identical to SEQ ID NO: 345197
  chr5:142782794-142783204
  hypo

SEQ ID NO: 377478 - DNA, 1069 bp, Homo sapiens; identical to SEQ ID NO: 350188
  chr5:142783606-142784675
  hypo

SEQ ID NO: 377479 - DNA, 201 bp, Homo sapiens; identical to SEQ ID NO: 338816
  chr5:145887336-145887537
  hypo

SEQ ID NO: 377480 - DNA, 110 bp, Homo sapiens; identical to SEQ ID NO: 350190
  chr5:148206075-148206185
  hypo

SEQ ID NO: 377481 - DNA, 36 bp, Homo sapiens; identical to SEQ ID NO: 350191
  chr5:148206432-148206468
  hypo

SEQ ID NO: 377482 - DNA, 252 bp, Homo sapiens; identical to SEQ ID NO: 346754
  chr5:148650971-148651223
  hypo

SEQ ID NO: 377483 - DNA, 87 bp, Homo sapiens; identical to SEQ ID NO: 332540
  chr5:148724812-148724899
  hypo

SEQ ID NO: 377484 - DNA, 100 bp, Homo sapiens; identical to SEQ ID NO: 338820
  chr5:148821027-148821127
  hypo

SEQ ID NO: 377485 - DNA, 413 bp, Homo sapiens; identical to SEQ ID NO: 338821
  chr5:149323779-149324192
  hypo

SEQ ID NO: 377486 - DNA, 66 bp, Homo sapiens; identical to SEQ ID NO: 338822
  chr5:149375694-149375760
  hypo

SEQ ID NO: 377487 - DNA, 41 bp, Homo sapiens; identical to SEQ ID NO: 363849
  chr5:150911164-150911205
  hypo

SEQ ID NO: 377488 - DNA, 293 bp, Homo sapiens; identical to SEQ ID NO: 200114
  chr5:151150270-151150563
  hypo

SEQ ID NO: 377489 - DNA, 229 bp, Homo sapiens; identical to SEQ ID NO: 346758
  chr5:151150681-151150910
  hypo

SEQ ID NO: 377490 - DNA, 79 bp, Homo sapiens; identical to SEQ ID NO: 338829
  chr5:156485569-156485648
  hypo

SEQ ID NO: 377491 - DNA, 61 bp, Homo sapiens; identical to SEQ ID NO: 363853
  chr5:156558383-156558444
  hypo

SEQ ID NO: 377492 - DNA, 116 bp, Homo sapiens; identical to SEQ ID NO: 338831
  chr5:156811500-156811616
  hypo

SEQ ID NO: 377493 - DNA, 225 bp, Homo sapiens; identical to SEQ ID NO: 338832
  chr5:156895577-156895802
  hypo

SEQ ID NO: 377494 - DNA, 290 bp, Homo sapiens; identical to SEQ ID NO: 346761
  chr5:157002817-157003107
  hypo

SEQ ID NO: 377495 - DNA, 135 bp, Homo sapiens; identical to SEQ ID NO: 338834
  chr5:158139227-158139362
  hypo

SEQ ID NO: 377496 - DNA, 1199 bp, Homo sapiens; identical to SEQ ID NO: 350208
  chr5:158634816-158636015
  hypo

SEQ ID NO: 377497 - DNA, 172 bp, Homo sapiens; identical to SEQ ID NO: 350209
  chr5:159343215-159343387
  hypo

SEQ ID NO: 377498 - DNA, 152 bp, Homo sapiens; identical to SEQ ID NO: 350210
  chr5:159343648-159343800
  hypo

SEQ ID NO: 377499 - DNA, 168 bp, Homo sapiens; identical to SEQ ID NO: 338839
  chr5:159489238-159489406
  hypo

SEQ ID NO: 377500 - DNA, 58 bp, Homo sapiens; identical to SEQ ID NO: 338840
  chr5:159659095-159659153
  hypo

SEQ ID NO: 377501 - DNA, 435 bp, Homo sapiens; identical to SEQ ID NO: 338841
  chr5:159691947-159692382
  hypo

SEQ ID NO: 377502 - DNA, 398 bp, Homo sapiens; identical to SEQ ID NO: 338842
  chr5:159707402-159707800
  hypo

SEQ ID NO: 377503 - DNA, 162 bp, Homo sapiens; identical to SEQ ID NO: 353677
  chr5:159776164-159776326
  hypo

SEQ ID NO: 377504 - DNA, 147 bp, Homo sapiens; identical to SEQ ID NO: 353678
  chr5:159776588-159776735
  hypo

SEQ ID NO: 377505 - DNA, 72 bp, Homo sapiens; identical to SEQ ID NO: 283509
  chr5:160974540-160974612
  hypo

SEQ ID NO: 377506 - DNA, 210 bp, Homo sapiens; identical to SEQ ID NO: 283510
  chr5:160974861-160975071
  hypo

SEQ ID NO: 377507 - DNA, 196 bp, Homo sapiens; identical to SEQ ID NO: 338845
  chr5:168112681-168112877
  hypo

SEQ ID NO: 377508 - DNA, 214 bp, Homo sapiens; identical to SEQ ID NO: 338846
  chr5:168189525-168189739
  hypo

SEQ ID NO: 377509 - DNA, 129 bp, Homo sapiens; identical to SEQ ID NO: 348113
  chr5:168195266-168195395
  hypo

SEQ ID NO: 377510 - DNA, 144 bp, Homo sapiens; identical to SEQ ID NO: 338848
  chr5:168284824-168284968
  hypo

SEQ ID NO: 377511 - DNA, 226 bp, Homo sapiens; identical to SEQ ID NO: 283530
  chr5:169930945-169931171
  hypo

SEQ ID NO: 377512 - DNA, 243 bp, Homo sapiens; identical to SEQ ID NO: 283532
  chr5:170171140-170171383
  hypo

SEQ ID NO: 377513 - DNA, 388 bp, Homo sapiens; identical to SEQ ID NO: 350214
  chr5:170171413-170171801
  hypo

SEQ ID NO: 377514 - DNA, 250 bp, Homo sapiens; identical to SEQ ID NO: 338852
  chr5:171471000-171471250
  hypo

SEQ ID NO: 377515 - DNA, 293 bp, Homo sapiens; identical to SEQ ID NO: 338853
  chr5:171478667-171478960
  hypo

SEQ ID NO: 377516 - DNA, 266 bp, Homo sapiens; identical to SEQ ID NO: 363875
  chr5:171523258-171523524
  hypo

SEQ ID NO: 377517 - DNA, 173 bp, Homo sapiens; identical to SEQ ID NO: 348114
  chr5:171533446-171533619
  hypo

SEQ ID NO: 377518 - DNA, 50 bp, Homo sapiens; identical to SEQ ID NO: 353685
  chr5:171724013-171724063
  hypo

SEQ ID NO: 377519 - DNA, 465 bp, Homo sapiens; identical to SEQ ID NO: 338857
  chr5:171766390-171766855
  hypo

SEQ ID NO: 377520 - DNA, 123 bp, Homo sapiens
  chr5:171859485-171859608
  hypo
cgtgcacgttgggtgacgcaaatttttcaccgctctgcacgtgcccatgtccgaaaatgcccacaaaagtgcttcgagtatcgcttttgagttacaaataaattttagcaagtaggcaaattc

SEQ ID NO: 377521 - DNA, 306 bp, Homo sapiens; identical to SEQ ID NO: 338859
  chr5:171916875-171917181
  hypo

SEQ ID NO: 377522 - DNA, 108 bp, Homo sapiens; identical to SEQ ID NO: 338860
  chr5:172191069-172191177
  hypo

SEQ ID NO: 377523 - DNA, 258 bp, Homo sapiens; identical to SEQ ID NO: 348116
  chr5:172353785-172354043
  hypo

SEQ ID NO: 377524 - DNA, 84 bp, Homo sapiens; identical to SEQ ID NO: 348117
  chr5:172354118-172354202
  hypo

SEQ ID NO: 377525 - DNA, 291 bp, Homo sapiens; identical to SEQ ID NO: 338862
  chr5:172461494-172461785
  hypo

SEQ ID NO: 377526 - DNA, 142 bp, Homo sapiens; identical to SEQ ID NO: 358314
  chr5:172665306-172665448
  hypo

SEQ ID NO: 377527 - DNA, 297 bp, Homo sapiens; identical to SEQ ID NO: 358315
  chr5:172665949-172666246
  hypo

SEQ ID NO: 377528 - DNA, 224 bp, Homo sapiens; identical to SEQ ID NO: 338865
  chr5:172724564-172724788
  hypo

SEQ ID NO: 377529 - DNA, 501 bp, Homo sapiens; identical to SEQ ID NO: 338866
  chr5:172744598-172745099
  hypo

SEQ ID NO: 377530 - DNA, 78 bp, Homo sapiens; identical to SEQ ID NO: 358328
  chr5:174220739-174220817
  hypo

SEQ ID NO: 377531 - DNA, 34 bp, Homo sapiens; identical to SEQ ID NO: 370969
  chr5:175084709-175084743
  hypo

SEQ ID NO: 377532 - DNA, 75 bp, Homo sapiens; identical to SEQ ID NO: 200181
  chr5:175084744-175084819
  hypo

SEQ ID NO: 377533 - DNA, 93 bp, Homo sapiens; identical to SEQ ID NO: 338870
  chr5:175578331-175578424
  hypo

SEQ ID NO: 377534 - DNA, 211 bp, Homo sapiens; identical to SEQ ID NO: 338871
  chr5:175777496-175777707
  hypo

SEQ ID NO: 377535 - DNA, 90 bp, Homo sapiens; identical to SEQ ID NO: 363891
  chr5:175831167-175831257
  hypo

SEQ ID NO: 377536 - DNA, 460 bp, Homo sapiens; identical to SEQ ID NO: 363892
  chr5:175831326-175831786
  hypo

SEQ ID NO: 377537 - DNA, 256 bp, Homo sapiens
  chr5:175832697-175832953
  hypo
cgtggagggcacgggacgagcgctggacactccatcagaggggctgggctttacatcccccttctgccactcactggactcgcgacctttgagaagtcccttccctgggcagcttggctttcaaacctgttaaatgagtgacaatatcctactaccggtgggaagtgaggcttacgagatgctatggtaacactctgcagcccatagagggcgtgtgcgtatgagggacagcatggctgctgtggcctgctgttcc

SEQ ID NO: 377538 - DNA, 209 bp, Homo sapiens; identical to SEQ ID NO: 200186
  chr5:176057164-176057373
  hypo

SEQ ID NO: 377539 - DNA, 113 bp, Homo sapiens; identical to SEQ ID NO: 353693
  chr5:176225713-176225826
  hypo

SEQ ID NO: 377540 - DNA, 194 bp, Homo sapiens; identical to SEQ ID NO: 345870
  chr5:176558657-176558851
  hypo

SEQ ID NO: 377541 - DNA, 144 bp, Homo sapiens; identical to SEQ ID NO: 345871
  chr5:176558908-176559052
  hypo

SEQ ID NO: 377542 - DNA, 248 bp, Homo sapiens; identical to SEQ ID NO: 283604
  chr5:176560001-176560249
  hypo

SEQ ID NO: 377543 - DNA, 290 bp, Homo sapiens; identical to SEQ ID NO: 345203
  chr5:176560318-176560608
  hypo

SEQ ID NO: 377544 - DNA, 59 bp, Homo sapiens; identical to SEQ ID NO: 338880
  chr5:176596473-176596532
  hypo

SEQ ID NO: 377545 - DNA, 50 bp, Homo sapiens; identical to SEQ ID NO: 338881
  chr5:176663899-176663949
  hypo

SEQ ID NO: 377546 - DNA, 90 bp, Homo sapiens
  chr5:176698046-176698136
  hypo
cggagtataaggaataccgcaggtctgagcctgcctaagctctgagattctgccttaatcagggggtttctaggtgcctctgacttcttc

SEQ ID NO: 377547 - DNA, 192 bp, Homo sapiens; identical to SEQ ID NO: 345874
  chr5:176764238-176764430
  hypo

SEQ ID NO: 377548 - DNA, 76 bp, Homo sapiens; identical to SEQ ID NO: 210489
  chr5:176795049-176795125
  hypo

SEQ ID NO: 377549 - DNA, 238 bp, Homo sapiens; identical to SEQ ID NO: 348125
  chr5:176795288-176795526
  hypo

SEQ ID NO: 377550 - DNA, 130 bp, Homo sapiens; identical to SEQ ID NO: 338885
  chr5:176901651-176901781
  hypo

SEQ ID NO: 377551 - DNA, 121 bp, Homo sapiens; identical to SEQ ID NO: 363905
  chr5:176911172-176911293
  hypo

SEQ ID NO: 377552 - DNA, 842 bp, Homo sapiens; identical to SEQ ID NO: 353703
  chr5:176918897-176919739
  hypo

SEQ ID NO: 377553 - DNA, 59 bp, Homo sapiens; identical to SEQ ID NO: 338888
  chr5:176922905-176922964
  hypo

SEQ ID NO: 377554 - DNA, 158 bp, Homo sapiens; identical to SEQ ID NO: 338890
  chr5:177310267-177310425
  hypo

SEQ ID NO: 377555 - DNA, 53 bp, Homo sapiens; identical to SEQ ID NO: 338891
  chr5:177525861-177525914
  hypo

SEQ ID NO: 377556 - DNA, 294 bp, Homo sapiens; identical to SEQ ID NO: 353705
  chr5:177650761-177651055
  hypo

SEQ ID NO: 377557 - DNA, 165 bp, Homo sapiens; identical to SEQ ID NO: 338893
  chr5:177654009-177654174
  hypo

SEQ ID NO: 377558 - DNA, 90 bp, Homo sapiens; identical to SEQ ID NO: 305156
  chr5:177680784-177680874
  hypo

SEQ ID NO: 377559 - DNA, 117 bp, Homo sapiens; identical to SEQ ID NO: 338895
  chr5:177802468-177802585
  hypo

SEQ ID NO: 377560 - DNA, 87 bp, Homo sapiens; identical to SEQ ID NO: 363912
  chr5:177882646-177882733
  hypo

SEQ ID NO: 377561 - DNA, 57 bp, Homo sapiens; identical to SEQ ID NO: 363913
  chr5:177882763-177882820
  hypo

SEQ ID NO: 377562 - DNA, 421 bp, Homo sapiens; identical to SEQ ID NO: 338897
  chr5:177892711-177893132
  hypo

SEQ ID NO: 377563 - DNA, 315 bp, Homo sapiens; identical to SEQ ID NO: 338898
  chr5:178220780-178221095
  hypo

SEQ ID NO: 377564 - DNA, 143 bp, Homo sapiens; identical to SEQ ID NO: 338899
  chr5:178259527-178259670
  hypo

SEQ ID NO: 377565 - DNA, 93 bp, Homo sapiens; identical to SEQ ID NO: 353706
  chr5:178411761-178411854
  hypo

SEQ ID NO: 377566 - DNA, 112 bp, Homo sapiens; identical to SEQ ID NO: 353707
  chr5:178580401-178580513
  hypo

SEQ ID NO: 377567 - DNA, 118 bp, Homo sapiens; identical to SEQ ID NO: 353708
  chr5:178580543-178580661
  hypo

SEQ ID NO: 377568 - DNA, 184 bp, Homo sapiens; identical to SEQ ID NO: 358338
  chr5:178594471-178594655
  hypo

SEQ ID NO: 377569 - DNA, 149 bp, Homo sapiens
  chr5:178650433-178650582
  hypo
cgaacgcactcacacacgcacactcacacacgaatgcactcacacacaaatggactcacactcacatgcacactcatacgaatgcactcacacacatgcactcacactcacacgaatgcactcacacacacgcgaatgcactcgcacac

SEQ ID NO: 377570 - DNA, 128 bp, Homo sapiens; identical to SEQ ID NO: 338904
  chr5:178651199-178651327
  hypo

SEQ ID NO: 377571 - DNA, 102 bp, Homo sapiens; identical to SEQ ID NO: 338905
  chr5:178652545-178652647
  hypo

SEQ ID NO: 377572 - DNA, 288 bp, Homo sapiens; identical to SEQ ID NO: 350229
  chr5:178770455-178770743
  hypo

SEQ ID NO: 377573 - DNA, 121 bp, Homo sapiens; identical to SEQ ID NO: 338907
  chr5:179023553-179023674
  hypo

SEQ ID NO: 377574 - DNA, 727 bp, Homo sapiens; identical to SEQ ID NO: 332613
  chr5:179245848-179246575
  hypo

SEQ ID NO: 377575 - DNA, 422 bp, Homo sapiens; identical to SEQ ID NO: 353712
  chr5:179401775-179402197
  hypo

SEQ ID NO: 377576 - DNA, 205 bp, Homo sapiens; identical to SEQ ID NO: 305254
  chr5:179448886-179449091
  hypo

SEQ ID NO: 377577 - DNA, 243 bp, Homo sapiens; identical to SEQ ID NO: 350231
  chr5:179498011-179498254
  hypo

SEQ ID NO: 377578 - DNA, 504 bp, Homo sapiens; identical to SEQ ID NO: 200203
  chr5:179498363-179498867
  hypo

SEQ ID NO: 377579 - DNA, 137 bp, Homo sapiens; identical to SEQ ID NO: 363928
  chr5:179546922-179547059
  hypo

SEQ ID NO: 377580 - DNA, 149 bp, Homo sapiens; identical to SEQ ID NO: 363929
  chr5:179564196-179564345
  hypo

SEQ ID NO: 377581 - DNA, 108 bp, Homo sapiens; identical to SEQ ID NO: 338914
  chr5:179708846-179708954
  hypo

SEQ ID NO: 377582 - DNA, 165 bp, Homo sapiens; identical to SEQ ID NO: 338915
  chr5:179743768-179743933
  hypo

SEQ ID NO: 377583 - DNA, 127 bp, Homo sapiens; identical to SEQ ID NO: 350235
  chr5:180018679-180018806
  hypo

SEQ ID NO: 377584 - DNA, 280 bp, Homo sapiens; identical to SEQ ID NO: 338918
  chr5:180036597-180036877
  hypo

SEQ ID NO: 377585 - DNA, 365 bp, Homo sapiens; identical to SEQ ID NO: 358348
  chr5:180046947-180047312
  hypo

SEQ ID NO: 377586 - DNA, 366 bp, Homo sapiens; identical to SEQ ID NO: 363935
  chr5:180055788-180056154
  hypo

SEQ ID NO: 377587 - DNA, 596 bp, Homo sapiens; identical to SEQ ID NO: 338922
  chr5:180218508-180219104
  hypo

SEQ ID NO: 377588 - DNA, 418 bp, Homo sapiens; identical to SEQ ID NO: 353718
  chr5:180326156-180326574
  hypo

SEQ ID NO: 377589 - DNA, 594 bp, Homo sapiens; identical to SEQ ID NO: 350238
  chr5:180479644-180480238
  hypo

SEQ ID NO: 377590 - DNA, 829 bp, Homo sapiens; identical to SEQ ID NO: 346765
  chr5:180480302-180481131
  hypo

SEQ ID NO: 377591 - DNA, 55 bp, Homo sapiens; identical to SEQ ID NO: 346767
  chr6:393764-393819
  hypo

SEQ ID NO: 377592 - DNA, 120 bp, Homo sapiens; identical to SEQ ID NO: 338926
  chr6:550612-550732
  hypo

SEQ ID NO: 377593 - DNA, 393 bp, Homo sapiens; identical to SEQ ID NO: 346768
  chr6:710660-711053
  hypo

SEQ ID NO: 377594 - DNA, 543 bp, Homo sapiens; identical to SEQ ID NO: 338928
  chr6:1080648-1081191
  hypo

SEQ ID NO: 377595 - DNA, 138 bp, Homo sapiens
  chr6:1515515-1515653
  hypo
cgttgccacgttcatcccggggctggagctgctgcttcacactgacttacacggtgagcagcggcggcaggggaggaggtggaacccgcggcgagctgctgcttcacactgacttacaccgtgagcagcggcggcagg

SEQ ID NO: 377596 - DNA, 123 bp, Homo sapiens
  chr6:1515702-1515825
  hypo
cacacactcacgcacttgcacacgctccaaggcccggaaggaagctgaggccggcccgcctcccgccaaagggccgaggaatcccgccacctaacggcaggggcaggggccacagctggcaac

SEQ ID NO: 377597 - DNA, 306 bp, Homo sapiens
  chr6:1523653-1523959
  hypo
cgccttgcttggtttccactcctcttgaaggaagaggtgctggcatctgcaccattcttagcgtcggcactgctttgcaccccccggctggccagcgcgggatgtgggtggggaaatagccactacagtccggagtctccccactccctccccaggcccacttccccgacgaagtttcactccattgttcctgggcatctccaggggtgtctagtttgaacaagaaaaggaatgttctggatggctggtcctgggcgctcaccgggaatgaacgtgagccactctttcgcacacaggccactctgc

SEQ ID NO: 377598 - DNA, 175 bp, Homo sapiens; identical to SEQ ID NO: 363944
  chr6:1708438-1708613
  hypo

SEQ ID NO: 377599 - DNA, 96 bp, Homo sapiens; identical to SEQ ID NO: 363945
  chr6:1708643-1708739
  hypo

SEQ ID NO: 377600 - DNA, 96 bp, Homo sapiens; identical to SEQ ID NO: 363946
  chr6:1726588-1726684
  hypo

SEQ ID NO: 377601 - DNA, 48 bp, Homo sapiens; identical to SEQ ID NO: 363947
  chr6:1726859-1726907
  hypo

SEQ ID NO: 377602 - DNA, 155 bp, Homo sapiens; identical to SEQ ID NO: 338934
  chr6:2108917-2109072
  hypo

SEQ ID NO: 377603 - DNA, 551 bp, Homo sapiens; identical to SEQ ID NO: 338935
  chr6:2434643-2435194
  hypo

SEQ ID NO: 377604 - DNA, 197 bp, Homo sapiens; identical to SEQ ID NO: 353723
  chr6:2920938-2921135
  hypo

SEQ ID NO: 377605 - DNA, 138 bp, Homo sapiens; identical to SEQ ID NO: 338938
  chr6:3263649-3263787
  hypo

SEQ ID NO: 377606 - DNA, 266 bp, Homo sapiens; identical to SEQ ID NO: 345875
  chr6:3285535-3285801
  hypo

SEQ ID NO: 377607 - DNA, 182 bp, Homo sapiens; identical to SEQ ID NO: 353725
  chr6:3333155-3333337
  hypo

SEQ ID NO: 377608 - DNA, 684 bp, Homo sapiens; identical to SEQ ID NO: 332639
  chr6:3457545-3458229
  hypo

SEQ ID NO: 377609 - DNA, 199 bp, Homo sapiens; identical to SEQ ID NO: 338943
  chr6:3579868-3580067
  hypo

SEQ ID NO: 377610 - DNA, 432 bp, Homo sapiens
  chr6:3593183-3593615
  hypo
cgcagtgggggccccggggttttaccaactggtccacttggccctattatttctcttcattctttgtgagccatgtggctcctcactggtggctgctgctaatattttagacccaccatttgtgtcctacaccttcgaaactgcaggaaagtctccgggggagtgggggcaacgggctctcccccccgcaccccattaatcgtatcttgctggaaggggctgcaaagcggtgcttagggaaacctctatttccaccgataaccctttccctcaaaaatacatactccttattttgctgatgatgaaaaccaagtttcaggttgttgaagagatttgccttagatttcctcttgagaagacagtagacgggaaataaatccagccggaaacccattcaactaaccaacactgcctctttgcatgtttgtgcat

SEQ ID NO: 377611 - DNA, 504 bp, Homo sapiens; identical to SEQ ID NO: 353727
  chr6:3618094-3618598
  hypo

SEQ ID NO: 377612 - DNA, 349 bp, Homo sapiens; identical to SEQ ID NO: 338946
  chr6:3646980-3647329
  hypo

SEQ ID NO: 377613 - DNA, 114 bp, Homo sapiens; identical to SEQ ID NO: 338947
  chr6:3654816-3654930
  hypo

SEQ ID NO: 377614 - DNA, 307 bp, Homo sapiens; identical to SEQ ID NO: 338948
  chr6:3724319-3724626
  hypo

SEQ ID NO: 377615 - DNA, 416 bp, Homo sapiens; identical to SEQ ID NO: 338949
  chr6:3725763-3726179
  hypo

SEQ ID NO: 377616 - DNA, 87 bp, Homo sapiens; identical to SEQ ID NO: 338950
  chr6:3734377-3734464
  hypo

SEQ ID NO: 377617 - DNA, 699 bp, Homo sapiens; identical to SEQ ID NO: 332640
  chr6:3750702-3751401
  hypo

SEQ ID NO: 377618 - DNA, 210 bp, Homo sapiens; identical to SEQ ID NO: 338952
  chr6:3880057-3880267
  hypo

SEQ ID NO: 377619 - DNA, 126 bp, Homo sapiens; identical to SEQ ID NO: 338953
  chr6:4061573-4061699
  hypo

SEQ ID NO: 377620 - DNA, 406 bp, Homo sapiens; identical to SEQ ID NO: 338954
  chr6:4559591-4559997
  hypo

SEQ ID NO: 377621 - DNA, 95 bp, Homo sapiens; identical to SEQ ID NO: 200248
  chr6:4775543-4775638
  hypo

SEQ ID NO: 377622 - DNA, 358 bp, Homo sapiens; identical to SEQ ID NO: 200249
  chr6:4775639-4775997
  hypo

SEQ ID NO: 377623 - DNA, 76 bp, Homo sapiens; identical to SEQ ID NO: 358382
  chr6:4776187-4776263
  hypo

SEQ ID NO: 377624 - DNA, 96 bp, Homo sapiens; identical to SEQ ID NO: 363965
  chr6:4874031-4874127
  hypo

SEQ ID NO: 377625 - DNA, 37 bp, Homo sapiens; identical to SEQ ID NO: 345876
  chr6:4910947-4910984
  hypo

SEQ ID NO: 377626 - DNA, 161 bp, Homo sapiens; identical to SEQ ID NO: 338958
  chr6:4932028-4932189
  hypo

SEQ ID NO: 377627 - DNA, 465 bp, Homo sapiens; identical to SEQ ID NO: 332643
  chr6:4948996-4949461
  hypo

SEQ ID NO: 377628 - DNA, 123 bp, Homo sapiens; identical to SEQ ID NO: 338962
  chr6:5108225-5108348
  hypo

SEQ ID NO: 377629 - DNA, 55 bp, Homo sapiens; identical to SEQ ID NO: 338963
  chr6:5413113-5413168
  hypo

SEQ ID NO: 377630 - DNA, 80 bp, Homo sapiens; identical to SEQ ID NO: 350268
  chr6:6009552-6009632
  hypo

SEQ ID NO: 377631 - DNA, 119 bp, Homo sapiens; identical to SEQ ID NO: 350269
  chr6:6546401-6546520
  hypo

SEQ ID NO: 377632 - DNA, 90 bp, Homo sapiens; identical to SEQ ID NO: 350270
  chr6:6547222-6547312
  hypo

SEQ ID NO: 377633 - DNA, 95 bp, Homo sapiens; identical to SEQ ID NO: 338966
  chr6:6780570-6780665
  hypo

SEQ ID NO: 377634 - DNA, 108 bp, Homo sapiens; identical to SEQ ID NO: 338967
  chr6:6984882-6984990
  hypo

SEQ ID NO: 377635 - DNA, 133 bp, Homo sapiens; identical to SEQ ID NO: 363973
  chr6:7204388-7204521
  hypo

SEQ ID NO: 377636 - DNA, 184 bp, Homo sapiens; identical to SEQ ID NO: 353738
  chr6:7237796-7237980
  hypo

SEQ ID NO: 377637 - DNA, 194 bp, Homo sapiens; identical to SEQ ID NO: 338970
  chr6:7247353-7247547
  hypo

SEQ ID NO: 377638 - DNA, 348 bp, Homo sapiens; identical to SEQ ID NO: 338972
  chr6:7882630-7882978
  hypo

SEQ ID NO: 377639 - DNA, 327 bp, Homo sapiens; identical to SEQ ID NO: 338973
  chr6:7887548-7887875
  hypo

SEQ ID NO: 377640 - DNA, 861 bp, Homo sapiens; identical to SEQ ID NO: 338974
  chr6:7888481-7889342
  hypo

SEQ ID NO: 377641 - DNA, 188 bp, Homo sapiens; identical to SEQ ID NO: 338975
  chr6:7890532-7890720
  hypo

SEQ ID NO: 377642 - DNA, 127 bp, Homo sapiens; identical to SEQ ID NO: 338976
  chr6:7891513-7891640
  hypo

SEQ ID NO: 377643 - DNA, 94 bp, Homo sapiens; identical to SEQ ID NO: 338977
  chr6:7891873-7891967
  hypo

SEQ ID NO: 377644 - DNA, 242 bp, Homo sapiens; identical to SEQ ID NO: 338978
  chr6:7893721-7893963
  hypo

SEQ ID NO: 377645 - DNA, 181 bp, Homo sapiens; identical to SEQ ID NO: 338979
  chr6:7898587-7898768
  hypo

SEQ ID NO: 377646 - DNA, 123 bp, Homo sapiens; identical to SEQ ID NO: 353743
  chr6:7920003-7920126
  hypo

SEQ ID NO: 377647 - DNA, 451 bp, Homo sapiens; identical to SEQ ID NO: 338981
  chr6:10319622-10320073
  hypo

SEQ ID NO: 377648 - DNA, 77 bp, Homo sapiens; identical to SEQ ID NO: 346777
  chr6:11043624-11043701
  hypo

SEQ ID NO: 377649 - DNA, 430 bp, Homo sapiens; identical to SEQ ID NO: 338983
  chr6:11273720-11274150
  hypo

SEQ ID NO: 377650 - DNA, 249 bp, Homo sapiens; identical to SEQ ID NO: 338985
  chr6:12338243-12338492
  hypo

SEQ ID NO: 377651 - DNA, 230 bp, Homo sapiens; identical to SEQ ID NO: 338986
  chr6:13318572-13318802
  hypo

SEQ ID NO: 377652 - DNA, 144 bp, Homo sapiens; identical to SEQ ID NO: 338987
  chr6:13386531-13386675
  hypo

SEQ ID NO: 377653 - DNA, 394 bp, Homo sapiens; identical to SEQ ID NO: 345879
  chr6:15513386-15513780
  hypo

SEQ ID NO: 377654 - DNA, 48 bp, Homo sapiens; identical to SEQ ID NO: 345880
  chr6:15513981-15514029
  hypo

SEQ ID NO: 377655 - DNA, 120 bp, Homo sapiens; identical to SEQ ID NO: 338991
  chr6:16322061-16322181
  hypo

SEQ ID NO: 377656 - DNA, 65 bp, Homo sapiens; identical to SEQ ID NO: 200293
  chr6:17281262-17281327
  hypo

SEQ ID NO: 377657 - DNA, 89 bp, Homo sapiens; identical to SEQ ID NO: 200294
  chr6:17281328-17281417
  hypo

SEQ ID NO: 377658 - DNA, 564 bp, Homo sapiens; identical to SEQ ID NO: 200295
  chr6:17281534-17282098
  hypo

SEQ ID NO: 377659 - DNA, 1440 bp, Homo sapiens; identical to SEQ ID NO: 332674
  chr6:18263786-18265226
  hypo

SEQ ID NO: 377660 - DNA, 235 bp, Homo sapiens; identical to SEQ ID NO: 338995
  chr6:18368676-18368911
  hypo

SEQ ID NO: 377661 - DNA, 813 bp, Homo sapiens; identical to SEQ ID NO: 332677
  chr6:20212279-20213092
  hypo

SEQ ID NO: 377662 - DNA, 70 bp, Homo sapiens; identical to SEQ ID NO: 338997
  chr6:20640182-20640252
  hypo

SEQ ID NO: 377663 - DNA, 187 bp, Homo sapiens; identical to SEQ ID NO: 338998
  chr6:20686909-20687096
  hypo

SEQ ID NO: 377664 - DNA, 162 bp, Homo sapiens; identical to SEQ ID NO: 338999
  chr6:21202340-21202502
  hypo

SEQ ID NO: 377665 - DNA, 177 bp, Homo sapiens
  chr6:21602337-21602514
  hypo
cgccccagctggactaccaccatggaactcagggccgaatacctcagggagaagctgcagcgggacctggcggcggagcatgtggcggtggaggacaacacgaccctcaaccattgcgcctgtagcttctggcggtgtcggccaagttcgaggggaagccgctgcttcagagacacc

SEQ ID NO: 377666 - DNA, 94 bp, Homo sapiens; identical to SEQ ID NO: 339001
  chr6:24662806-24662900
  hypo

SEQ ID NO: 377667 - DNA, 412 bp, Homo sapiens; identical to SEQ ID NO: 353755
  chr6:25726863-25727275
  hypo

SEQ ID NO: 377668 - DNA, 255 bp, Homo sapiens; identical to SEQ ID NO: 353756
  chr6:25727391-25727646
  hypo

SEQ ID NO: 377669 - DNA, 200 bp, Homo sapiens; identical to SEQ ID NO: 339003
  chr6:26025541-26025741
  hypo

SEQ ID NO: 377670 - DNA, 213 bp, Homo sapiens; identical to SEQ ID NO: 200330
  chr6:26198924-26199137
  hypo

SEQ ID NO: 377671 - DNA, 125 bp, Homo sapiens; identical to SEQ ID NO: 283866
  chr6:26241269-26241394
  hypo

SEQ ID NO: 377672 - DNA, 104 bp, Homo sapiens; identical to SEQ ID NO: 339007
  chr6:27428748-27428852
  hypo

SEQ ID NO: 377673 - DNA, 133 bp, Homo sapiens; identical to SEQ ID NO: 358478
  chr6:27805774-27805907
  hypo

SEQ ID NO: 377674 - DNA, 535 bp, Homo sapiens; identical to SEQ ID NO: 358479
  chr6:27805936-27806471
  hypo

SEQ ID NO: 377675 - DNA, 126 bp, Homo sapiens; identical to SEQ ID NO: 339009
  chr6:28327754-28327880
  hypo

SEQ ID NO: 377676 - DNA, 174 bp, Homo sapiens; identical to SEQ ID NO: 371146
  chr6:28414768-28414942
  hypo

SEQ ID NO: 377677 - DNA, 149 bp, Homo sapiens; identical to SEQ ID NO: 339011
  chr6:33914107-33914256
  hypo

SEQ ID NO: 377678 - DNA, 96 bp, Homo sapiens; identical to SEQ ID NO: 353761
  chr6:33995852-33995948
  hypo

SEQ ID NO: 377679 - DNA, 47 bp, Homo sapiens; identical to SEQ ID NO: 210744
  chr6:34170821-34170868
  hypo

SEQ ID NO: 377680 - DNA, 54 bp, Homo sapiens; identical to SEQ ID NO: 339015
  chr6:34219827-34219881
  hypo

SEQ ID NO: 377681 - DNA, 52 bp, Homo sapiens; identical to SEQ ID NO: 364008
  chr6:34518788-34518840
  hypo

SEQ ID NO: 377682 - DNA, 70 bp, Homo sapiens; identical to SEQ ID NO: 364009
  chr6:34518870-34518940
  hypo

SEQ ID NO: 377683 - DNA, 144 bp, Homo sapiens; identical to SEQ ID NO: 353763
  chr6:34520750-34520894
  hypo

SEQ ID NO: 377684 - DNA, 70 bp, Homo sapiens
  chr6:35109297-35109367
  hypo
cgaggccagagcatgcatggggcttttcttcaggctgtttggacagccgagaagccgagccacacccagg

SEQ ID NO: 377685 - DNA, 125 bp, Homo sapiens
  chr6:35109423-35109548
  hypo
tgtgggagaagcggaggagccgccagggctggggccaggctctgcccactggggttccgcccgttgtcgccctccgcctcctgggctctagcccttgcctttcttgactctaagtctactctgtc

SEQ ID NO: 377686 - DNA, 480 bp, Homo sapiens
  chr6:35454062-35454542
  hypo
cgagcccggcttgtttatgaggaggagcgcggaggaggatccagacacacaggcttgcgcgcccagactcgcccggccagcggctggcggcctccgacgtcaccaaaccggttgggtgagagggcagagagcagggggaagggccgcagtcccgcccgcgccccccggcacgcaccgtacatcttgccctcgtctgacaggatgatcttccgccggccgcagggcgggtagatggccagggcctcctggaagctctgctcgatgtccgggctccacacgccctccgcatcgttgtccagccccttgtccaggccctcgggcccatcctcccgggcctccccggggctgctgctggcgttccagctgttggacgctattgtgctggttgctctgggctctgggcctgagcccactgggcggctgagcctgggggacagacagacaggaactgggaccagggtcctcctcgaccacagcaat

SEQ ID NO: 377687 - DNA, 245 bp, Homo sapiens
  chr6:35454589-35454834
  hypo
gcccaccctaggagcaggtgctccaggtggaacggaggtaaccagaggaacaaccacagcttgttcagagctgtgtgacctgggatgcacgcgctacttcacctctctaggcctcagtcctgtaaaacgagaaaagggtctccttgaggagacctccttgaggttgtgagggttaaaatgtaaatgagctcatgacaaagtaccaaccacatgcccagctcataatactcaagaaataggtaatc

SEQ ID NO: 377688 - DNA, 1248 bp, Homo sapiens; identical to SEQ ID NO: 332764
  chr6:35655519-35656767
  hypo

SEQ ID NO: 377689 - DNA, 109 bp, Homo sapiens; identical to SEQ ID NO: 339022
  chr6:36165692-36165801
  hypo

SEQ ID NO: 377690 - DNA, 223 bp, Homo sapiens; identical to SEQ ID NO: 339024
  chr6:36198250-36198473
  hypo

SEQ ID NO: 377691 - DNA, 49 bp, Homo sapiens; identical to SEQ ID NO: 364014
  chr6:36214794-36214843
  hypo

SEQ ID NO: 377692 - DNA, 107 bp, Homo sapiens; identical to SEQ ID NO: 353767
  chr6:36238212-36238319
  hypo

SEQ ID NO: 377693 - DNA, 97 bp, Homo sapiens; identical to SEQ ID NO: 339027
  chr6:36939067-36939164
  hypo

SEQ ID NO: 377694 - DNA, 313 bp, Homo sapiens; identical to SEQ ID NO: 348142
  chr6:37023826-37024139
  hypo

SEQ ID NO: 377695 - DNA, 90 bp, Homo sapiens; identical to SEQ ID NO: 353769
  chr6:37275483-37275573
  hypo

SEQ ID NO: 377696 - DNA, 60 bp, Homo sapiens; identical to SEQ ID NO: 353770
  chr6:37358463-37358523
  hypo

SEQ ID NO: 377697 - DNA, 321 bp, Homo sapiens; identical to SEQ ID NO: 353771
  chr6:37358553-37358874
  hypo

SEQ ID NO: 377698 - DNA, 70 bp, Homo sapiens; identical to SEQ ID NO: 339031
  chr6:37450290-37450360
  hypo

SEQ ID NO: 377699 - DNA, 158 bp, Homo sapiens; identical to SEQ ID NO: 339032
  chr6:37450665-37450823
  hypo

SEQ ID NO: 377700 - DNA, 462 bp, Homo sapiens; identical to SEQ ID NO: 358502
  chr6:37665241-37665703
  hypo

SEQ ID NO: 377701 - DNA, 369 bp, Homo sapiens; identical to SEQ ID NO: 345232
  chr6:37666475-37666844
  hypo

SEQ ID NO: 377702 - DNA, 218 bp, Homo sapiens; identical to SEQ ID NO: 345233
  chr6:37666866-37667084
  hypo

SEQ ID NO: 377703 - DNA, 49 bp, Homo sapiens; identical to SEQ ID NO: 339035
  chr6:38020529-38020578
  hypo

SEQ ID NO: 377704 - DNA, 132 bp, Homo sapiens; identical to SEQ ID NO: 339036
  chr6:38084382-38084514
  hypo

SEQ ID NO: 377705 - DNA, 219 bp, Homo sapiens; identical to SEQ ID NO: 339037
  chr6:38118812-38119031
  hypo

SEQ ID NO: 377706 - DNA, 502 bp, Homo sapiens; identical to SEQ ID NO: 339038
  chr6:38141432-38141934
  hypo

SEQ ID NO: 377707 - DNA, 802 bp, Homo sapiens; identical to SEQ ID NO: 339039
  chr6:39158588-39159390
  hypo

SEQ ID NO: 377708 - DNA, 261 bp, Homo sapiens; identical to SEQ ID NO: 339041
  chr6:39895099-39895360
  hypo

SEQ ID NO: 377709 - DNA, 291 bp, Homo sapiens; identical to SEQ ID NO: 364031
  chr6:40360252-40360543
  hypo

SEQ ID NO: 377710 - DNA, 707 bp, Homo sapiens; identical to SEQ ID NO: 353774
  chr6:40399988-40400695
  hypo

SEQ ID NO: 377711 - DNA, 156 bp, Homo sapiens; identical to SEQ ID NO: 358507
  chr6:40554364-40554520
  hypo

SEQ ID NO: 377712 - DNA, 315 bp, Homo sapiens; identical to SEQ ID NO: 284013
  chr6:40554860-40555175
  hypo

SEQ ID NO: 377713 - DNA, 151 bp, Homo sapiens; identical to SEQ ID NO: 200432
  chr6:41339070-41339221
  hypo

SEQ ID NO: 377714 - DNA, 360 bp, Homo sapiens; identical to SEQ ID NO: 358510
  chr6:41340027-41340387
  hypo

SEQ ID NO: 377715 - DNA, 312 bp, Homo sapiens; identical to SEQ ID NO: 339048
  chr6:41620850-41621162
  hypo

SEQ ID NO: 377716 - DNA, 249 bp, Homo sapiens; identical to SEQ ID NO: 339049
  chr6:41715240-41715489
  hypo

SEQ ID NO: 377717 - DNA, 556 bp, Homo sapiens; identical to SEQ ID NO: 210797
  chr6:41773903-41774459
  hypo

SEQ ID NO: 377718 - DNA, 171 bp, Homo sapiens; identical to SEQ ID NO: 339051
  chr6:41827211-41827382
  hypo

SEQ ID NO: 377719 - DNA, 96 bp, Homo sapiens; identical to SEQ ID NO: 364041
  chr6:42762779-42762875
  hypo

SEQ ID NO: 377720 - DNA, 236 bp, Homo sapiens; identical to SEQ ID NO: 339054
  chr6:43096747-43096983
  hypo

SEQ ID NO: 377721 - DNA, 57 bp, Homo sapiens; identical to SEQ ID NO: 364043
  chr6:43478745-43478802
  hypo

SEQ ID NO: 377722 - DNA, 293 bp, Homo sapiens; identical to SEQ ID NO: 339057
  chr6:43641288-43641581
  hypo

SEQ ID NO: 377723 - DNA, 278 bp, Homo sapiens; identical to SEQ ID NO: 339058
  chr6:43745076-43745354
  hypo

SEQ ID NO: 377724 - DNA, 173 bp, Homo sapiens; identical to SEQ ID NO: 345885
  chr6:43748290-43748463
  hypo

SEQ ID NO: 377725 - DNA, 126 bp, Homo sapiens; identical to SEQ ID NO: 339060
  chr6:43752469-43752595
  hypo

SEQ ID NO: 377726 - DNA, 85 bp, Homo sapiens; identical to SEQ ID NO: 339061
  chr6:43814642-43814727
  hypo

SEQ ID NO: 377727 - DNA, 176 bp, Homo sapiens; identical to SEQ ID NO: 346816
  chr6:44044201-44044377
  hypo

SEQ ID NO: 377728 - DNA, 97 bp, Homo sapiens; identical to SEQ ID NO: 346817
  chr6:44044450-44044547
  hypo

SEQ ID NO: 377729 - DNA, 116 bp, Homo sapiens; identical to SEQ ID NO: 339063
  chr6:44077041-44077157
  hypo

SEQ ID NO: 377730 - DNA, 204 bp, Homo sapiens; identical to SEQ ID NO: 339064
  chr6:44120364-44120568
  hypo

SEQ ID NO: 377731 - DNA, 320 bp, Homo sapiens; identical to SEQ ID NO: 371190
  chr6:45390544-45390864
  hypo

SEQ ID NO: 377732 - DNA, 38 bp, Homo sapiens; identical to SEQ ID NO: 350372
  chr6:45631098-45631136
  hypo

SEQ ID NO: 377733 - DNA, 372 bp, Homo sapiens; identical to SEQ ID NO: 345236
  chr6:46097250-46097622
  hypo

SEQ ID NO: 377734 - DNA, 521 bp, Homo sapiens; identical to SEQ ID NO: 345237
  chr6:46097694-46098215
  hypo

SEQ ID NO: 377735 - DNA, 357 bp, Homo sapiens; identical to SEQ ID NO: 353786
  chr6:47202003-47202360
  hypo

SEQ ID NO: 377736 - DNA, 155 bp, Homo sapiens; identical to SEQ ID NO: 353787
  chr6:47202453-47202608
  hypo

SEQ ID NO: 377737 - DNA, 198 bp, Homo sapiens; identical to SEQ ID NO: 339069
  chr6:52141070-52141268
  hypo

SEQ ID NO: 377738 - DNA, 636 bp, Homo sapiens; identical to SEQ ID NO: 346822
  chr6:52227115-52227751
  hypo

SEQ ID NO: 377739 - DNA, 72 bp, Homo sapiens; identical to SEQ ID NO: 348152
  chr6:52344303-52344375
  hypo

SEQ ID NO: 377740 - DNA, 159 bp, Homo sapiens; identical to SEQ ID NO: 348153
  chr6:52344405-52344564
  hypo

SEQ ID NO: 377741 - DNA, 110 bp, Homo sapiens; identical to SEQ ID NO: 339072
  chr6:52409363-52409473
  hypo

SEQ ID NO: 377742 - DNA, 115 bp, Homo sapiens; identical to SEQ ID NO: 339073
  chr6:53139871-53139986
  hypo

SEQ ID NO: 377743 - DNA, 126 bp, Homo sapiens; identical to SEQ ID NO: 339076
  chr6:56894243-56894369
  hypo

SEQ ID NO: 377744 - DNA, 78 bp, Homo sapiens
  chr6:57085548-57085626
  hypo
cgggggagcgatagatttgttctacatccttactgtagtggtggttacatgagtctaaaattcgcagaactgtacatc

SEQ ID NO: 377745 - DNA, 294 bp, Homo sapiens; identical to SEQ ID NO: 200490
  chr6:69344649-69344943
  hypo

SEQ ID NO: 377746 - DNA, 570 bp, Homo sapiens; identical to SEQ ID NO: 350396
  chr6:71123134-71123704
  hypo

SEQ ID NO: 377747 - DNA, 289 bp, Homo sapiens; identical to SEQ ID NO: 350397
  chr6:71123746-71124035
  hypo

SEQ ID NO: 377748 - DNA, 222 bp, Homo sapiens; identical to SEQ ID NO: 200499
  chr6:71665723-71665945
  hypo

SEQ ID NO: 377749 - DNA, 71 bp, Homo sapiens; identical to SEQ ID NO: 353797
  chr6:71955569-71955640
  hypo

SEQ ID NO: 377750 - DNA, 155 bp, Homo sapiens; identical to SEQ ID NO: 350399
  chr6:72129577-72129732
  hypo

SEQ ID NO: 377751 - DNA, 40 bp, Homo sapiens; identical to SEQ ID NO: 346834
  chr6:74019373-74019413
  hypo

SEQ ID NO: 377752 - DNA, 102 bp, Homo sapiens; identical to SEQ ID NO: 346835
  chr6:74020094-74020196
  hypo

SEQ ID NO: 377753 - DNA, 192 bp, Homo sapiens; identical to SEQ ID NO: 339088
  chr6:74079530-74079722
  hypo

SEQ ID NO: 377754 - DNA, 178 bp, Homo sapiens; identical to SEQ ID NO: 200507
  chr6:74161321-74161499
  hypo

SEQ ID NO: 377755 - DNA, 290 bp, Homo sapiens; identical to SEQ ID NO: 284165
  chr6:74405623-74405913
  hypo

SEQ ID NO: 377756 - DNA, 174 bp, Homo sapiens; identical to SEQ ID NO: 358578
  chr6:74406015-74406189
  hypo

SEQ ID NO: 377757 - DNA, 63 bp, Homo sapiens; identical to SEQ ID NO: 339091
  chr6:75985977-75986040
  hypo

SEQ ID NO: 377758 - DNA, 83 bp, Homo sapiens; identical to SEQ ID NO: 350409
  chr6:80657600-80657683
  hypo

SEQ ID NO: 377759 - DNA, 53 bp, Homo sapiens; identical to SEQ ID NO: 339094
  chr6:86325389-86325442
  hypo

SEQ ID NO: 377760 - DNA, 129 bp, Homo sapiens; identical to SEQ ID NO: 339096
  chr6:89554102-89554231
  hypo

SEQ ID NO: 377761 - DNA, 304 bp, Homo sapiens; identical to SEQ ID NO: 200552
  chr6:90121293-90121597
  hypo

SEQ ID NO: 377762 - DNA, 255 bp, Homo sapiens; identical to SEQ ID NO: 346839
  chr6:90142647-90142902
  hypo

SEQ ID NO: 377763 - DNA, 79 bp, Homo sapiens; identical to SEQ ID NO: 339100
  chr6:90359827-90359906
  hypo

SEQ ID NO: 377764 - DNA, 206 bp, Homo sapiens; identical to SEQ ID NO: 339101
  chr6:90367697-90367903
  hypo

SEQ ID NO: 377765 - DNA, 1051 bp, Homo sapiens; identical to SEQ ID NO: 284249
  chr6:91005702-91006753
  hypo

SEQ ID NO: 377766 - DNA, 134 bp, Homo sapiens; identical to SEQ ID NO: 358617
  chr6:105628083-105628217
  hypo

SEQ ID NO: 377767 - DNA, 35 bp, Homo sapiens; identical to SEQ ID NO: 364085
  chr6:105750354-105750389
  hypo

SEQ ID NO: 377768 - DNA, 83 bp, Homo sapiens; identical to SEQ ID NO: 364086
  chr6:105750646-105750729
  hypo

SEQ ID NO: 377769 - DNA, 142 bp, Homo sapiens; identical to SEQ ID NO: 339108
  chr6:106456830-106456972
  hypo

SEQ ID NO: 377770 - DNA, 352 bp, Homo sapiens; identical to SEQ ID NO: 346842
  chr6:106533693-106534045
  hypo

SEQ ID NO: 377771 - DNA, 155 bp, Homo sapiens; identical to SEQ ID NO: 345249
  chr6:106961023-106961178
  hypo

SEQ ID NO: 377772 - DNA, 314 bp, Homo sapiens; identical to SEQ ID NO: 200609
  chr6:107810308-107810622
  hypo

SEQ ID NO: 377773 - DNA, 430 bp, Homo sapiens; identical to SEQ ID NO: 350445
  chr6:107810665-107811095
  hypo

SEQ ID NO: 377774 - DNA, 163 bp, Homo sapiens; identical to SEQ ID NO: 332893
  chr6:108455187-108455350
  hypo

SEQ ID NO: 377775 - DNA, 85 bp, Homo sapiens; identical to SEQ ID NO: 339113
  chr6:109053387-109053472
  hypo

SEQ ID NO: 377776 - DNA, 121 bp, Homo sapiens; identical to SEQ ID NO: 339114
  chr6:109058656-109058777
  hypo

SEQ ID NO: 377777 - DNA, 114 bp, Homo sapiens; identical to SEQ ID NO: 339115
  chr6:109059982-109060096
  hypo

SEQ ID NO: 377778 - DNA, 120 bp, Homo sapiens; identical to SEQ ID NO: 353814
  chr6:109647757-109647877
  hypo

SEQ ID NO: 377779 - DNA, 94 bp, Homo sapiens; identical to SEQ ID NO: 339117
  chr6:110768091-110768185
  hypo

SEQ ID NO: 377780 - DNA, 93 bp, Homo sapiens; identical to SEQ ID NO: 339118
  chr6:110842285-110842378
  hypo

SEQ ID NO: 377781 - DNA, 572 bp, Homo sapiens; identical to SEQ ID NO: 358635
  chr6:111408744-111409316
  hypo

SEQ ID NO: 377782 - DNA, 273 bp, Homo sapiens; identical to SEQ ID NO: 200623
  chr6:111409368-111409641
  hypo

SEQ ID NO: 377783 - DNA, 184 bp, Homo sapiens; identical to SEQ ID NO: 339120
  chr6:111751880-111752064
  hypo

SEQ ID NO: 377784 - DNA, 135 bp, Homo sapiens; identical to SEQ ID NO: 339121
  chr6:111766152-111766287
  hypo

SEQ ID NO: 377785 - DNA, 66 bp, Homo sapiens; identical to SEQ ID NO: 339122
  chr6:112021634-112021700
  hypo

SEQ ID NO: 377786 - DNA, 73 bp, Homo sapiens; identical to SEQ ID NO: 353821
  chr6:119510833-119510906
  hypo

SEQ ID NO: 377787 - DNA, 70 bp, Homo sapiens; identical to SEQ ID NO: 353822
  chr6:119510942-119511012
  hypo

SEQ ID NO: 377788 - DNA, 439 bp, Homo sapiens; identical to SEQ ID NO: 284440
  chr6:127836226-127836665
  hypo

SEQ ID NO: 377789 - DNA, 31 bp, Homo sapiens; identical to SEQ ID NO: 350458
  chr6:127837749-127837780
  hypo

SEQ ID NO: 377790 - DNA, 428 bp, Homo sapiens; identical to SEQ ID NO: 348167
  chr6:128901277-128901705
  hypo

SEQ ID NO: 377791 - DNA, 89 bp, Homo sapiens; identical to SEQ ID NO: 339129
  chr6:130499429-130499518
  hypo

SEQ ID NO: 377792 - DNA, 365 bp, Homo sapiens; identical to SEQ ID NO: 332922
  chr6:131383375-131383740
  hypo

SEQ ID NO: 377793 - DNA, 103 bp, Homo sapiens; identical to SEQ ID NO: 348168
  chr6:131455849-131455952
  hypo

SEQ ID NO: 377794 - DNA, 41 bp, Homo sapiens; identical to SEQ ID NO: 339134
  chr6:136552688-136552729
  hypo

SEQ ID NO: 377795 - DNA, 132 bp, Homo sapiens; identical to SEQ ID NO: 348169
  chr6:136556331-136556463
  hypo

SEQ ID NO: 377796 - DNA, 176 bp, Homo sapiens; identical to SEQ ID NO: 339136
  chr6:136682773-136682949
  hypo

SEQ ID NO: 377797 - DNA, 135 bp, Homo sapiens; identical to SEQ ID NO: 339137
  chr6:136901469-136901604
  hypo

SEQ ID NO: 377798 - DNA, 97 bp, Homo sapiens; identical to SEQ ID NO: 339138
  chr6:136980882-136980979
  hypo

SEQ ID NO: 377799 - DNA, 48 bp, Homo sapiens; identical to SEQ ID NO: 200668
  chr6:137243410-137243458
  hypo

SEQ ID NO: 377800 - DNA, 249 bp, Homo sapiens; identical to SEQ ID NO: 332941
  chr6:138724531-138724780
  hypo

SEQ ID NO: 377801 - DNA, 131 bp, Homo sapiens; identical to SEQ ID NO: 358662
  chr6:142622583-142622714
  hypo

SEQ ID NO: 377802 - DNA, 486 bp, Homo sapiens; identical to SEQ ID NO: 358663
  chr6:142622963-142623449
  hypo

SEQ ID NO: 377803 - DNA, 528 bp, Homo sapiens; identical to SEQ ID NO: 346860
  chr6:146136035-146136563
  hypo

SEQ ID NO: 377804 - DNA, 232 bp, Homo sapiens; identical to SEQ ID NO: 346861
  chr6:146136564-146136796
  hypo

SEQ ID NO: 377805 - DNA, 455 bp, Homo sapiens; identical to SEQ ID NO: 339145
  chr6:149915200-149915655
  hypo

SEQ ID NO: 377806 - DNA, 462 bp, Homo sapiens; identical to SEQ ID NO: 339146
  chr6:150654152-150654614
  hypo

SEQ ID NO: 377807 - DNA, 752 bp, Homo sapiens; identical to SEQ ID NO: 332955
  chr6:150921277-150922029
  hypo

SEQ ID NO: 377808 - DNA, 44 bp, Homo sapiens; identical to SEQ ID NO: 364124
  chr6:151346267-151346311
  hypo

SEQ ID NO: 377809 - DNA, 37 bp, Homo sapiens; identical to SEQ ID NO: 364125
  chr6:151346372-151346409
  hypo

SEQ ID NO: 377810 - DNA, 69 bp, Homo sapiens; identical to SEQ ID NO: 358678
  chr6:151562596-151562665
  hypo

SEQ ID NO: 377811 - DNA, 256 bp, Homo sapiens; identical to SEQ ID NO: 339150
  chr6:151687263-151687519
  hypo

SEQ ID NO: 377812 - DNA, 96 bp, Homo sapiens; identical to SEQ ID NO: 339151
  chr6:152527379-152527475
  hypo

SEQ ID NO: 377813 - DNA, 101 bp, Homo sapiens; identical to SEQ ID NO: 339154
  chr6:154727653-154727754
  hypo

SEQ ID NO: 377814 - DNA, 146 bp, Homo sapiens; identical to SEQ ID NO: 339155
  chr6:154826922-154827068
  hypo

SEQ ID NO: 377815 - DNA, 296 bp, Homo sapiens; identical to SEQ ID NO: 210964
  chr6:155568912-155569208
  hypo

SEQ ID NO: 377816 - DNA, 140 bp, Homo sapiens; identical to SEQ ID NO: 353840
  chr6:155569349-155569489
  hypo

SEQ ID NO: 377817 - DNA, 398 bp, Homo sapiens; identical to SEQ ID NO: 339158
  chr6:155577660-155578058
  hypo

SEQ ID NO: 377818 - DNA, 63 bp, Homo sapiens; identical to SEQ ID NO: 339159
  chr6:157159632-157159695
  hypo

SEQ ID NO: 377819 - DNA, 65 bp, Homo sapiens; identical to SEQ ID NO: 339160
  chr6:157193703-157193768
  hypo

SEQ ID NO: 377820 - DNA, 210 bp, Homo sapiens; identical to SEQ ID NO: 339161
  chr6:157351875-157352085
  hypo

SEQ ID NO: 377821 - DNA, 147 bp, Homo sapiens; identical to SEQ ID NO: 339162
  chr6:157430380-157430527
  hypo

SEQ ID NO: 377822 - DNA, 55 bp, Homo sapiens; identical to SEQ ID NO: 353843
  chr6:157478478-157478533
  hypo

SEQ ID NO: 377823 - DNA, 253 bp, Homo sapiens; identical to SEQ ID NO: 364136
  chr6:157502185-157502438
  hypo

SEQ ID NO: 377824 - DNA, 217 bp, Homo sapiens; identical to SEQ ID NO: 210972
  chr6:157505865-157506082
  hypo

SEQ ID NO: 377825 - DNA, 693 bp, Homo sapiens; identical to SEQ ID NO: 339166
  chr6:158024060-158024753
  hypo

SEQ ID NO: 377826 - DNA, 62 bp, Homo sapiens; identical to SEQ ID NO: 339167
  chr6:158057907-158057969
  hypo

SEQ ID NO: 377827 - DNA, 138 bp, Homo sapiens; identical to SEQ ID NO: 348174
  chr6:158093637-158093775
  hypo

SEQ ID NO: 377828 - DNA, 172 bp, Homo sapiens; identical to SEQ ID NO: 348175
  chr6:158094082-158094254
  hypo

SEQ ID NO: 377829 - DNA, 56 bp, Homo sapiens; identical to SEQ ID NO: 339169
  chr6:158321417-158321473
  hypo

SEQ ID NO: 377830 - DNA, 520 bp, Homo sapiens; identical to SEQ ID NO: 346865
  chr6:158402113-158402633
  hypo

SEQ ID NO: 377831 - DNA, 172 bp, Homo sapiens; identical to SEQ ID NO: 339171
  chr6:158651816-158651988
  hypo

SEQ ID NO: 377832 - DNA, 39 bp, Homo sapiens; identical to SEQ ID NO: 358683
  chr6:158957708-158957747
  hypo

SEQ ID NO: 377833 - DNA, 206 bp, Homo sapiens; identical to SEQ ID NO: 284595
  chr6:158957988-158958194
  hypo

SEQ ID NO: 377834 - DNA, 433 bp, Homo sapiens; identical to SEQ ID NO: 339173
  chr6:159045072-159045505
  hypo

SEQ ID NO: 377835 - DNA, 175 bp, Homo sapiens; identical to SEQ ID NO: 339174
  chr6:159076962-159077137
  hypo

SEQ ID NO: 377836 - DNA, 69 bp, Homo sapiens; identical to SEQ ID NO: 339175
  chr6:159203076-159203145
  hypo

SEQ ID NO: 377837 - DNA, 84 bp, Homo sapiens; identical to SEQ ID NO: 339176
  chr6:159205631-159205715
  hypo

SEQ ID NO: 377838 - DNA, 200 bp, Homo sapiens; identical to SEQ ID NO: 339177
  chr6:159206098-159206298
  hypo

SEQ ID NO: 377839 - DNA, 41 bp, Homo sapiens; identical to SEQ ID NO: 346866
  chr6:159591277-159591318
  hypo

SEQ ID NO: 377840 - DNA, 195 bp, Homo sapiens; identical to SEQ ID NO: 339179
  chr6:160452681-160452876
  hypo

SEQ ID NO: 377841 - DNA, 50 bp, Homo sapiens; identical to SEQ ID NO: 339180
  chr6:160455514-160455564
  hypo

SEQ ID NO: 377842 - DNA, 255 bp, Homo sapiens; identical to SEQ ID NO: 353852
  chr6:160512209-160512464
  hypo

SEQ ID NO: 377843 - DNA, 447 bp, Homo sapiens; identical to SEQ ID NO: 339182
  chr6:160679377-160679824
  hypo

SEQ ID NO: 377844 - DNA, 155 bp, Homo sapiens; identical to SEQ ID NO: 364152
  chr6:161585085-161585240
  hypo

SEQ ID NO: 377845 - DNA, 112 bp, Homo sapiens; identical to SEQ ID NO: 339185
  chr6:161725123-161725235
  hypo

SEQ ID NO: 377846 - DNA, 238 bp, Homo sapiens; identical to SEQ ID NO: 200741
  chr6:163837231-163837469
  hypo

SEQ ID NO: 377847 - DNA, 116 bp, Homo sapiens
  chr6:164441373-164441489
  hypo
atattcaagggtacggatgtgtctcagctgggcagggcactcgctaacccccagctggggcgggagcaggggtacctgcggcaccagaggtacgtggggcctggccccggctgcgc

SEQ ID NO: 377848 - DNA, 228 bp, Homo sapiens; identical to SEQ ID NO: 284635
  chr6:166667296-166667524
  hypo

SEQ ID NO: 377849 - DNA, 65 bp, Homo sapiens; identical to SEQ ID NO: 339194
  chr6:166742989-166743054
  hypo

SEQ ID NO: 377850 - DNA, 263 bp, Homo sapiens; identical to SEQ ID NO: 364155
  chr6:167140099-167140362
  hypo

SEQ ID NO: 377851 - DNA, 1797 bp, Homo sapiens; identical to SEQ ID NO: 339197
  chr6:167314272-167316069
  hypo

SEQ ID NO: 377852 - DNA, 105 bp, Homo sapiens; identical to SEQ ID NO: 364157
  chr6:167834910-167835015
  hypo

SEQ ID NO: 377853 - DNA, 84 bp, Homo sapiens
  chr6:167836474-167836558
  hypo
cggctccctcatacactgcggcttcccccccaacacatgacggctcacccacatctggcggctccccctctacacggctcccgt

SEQ ID NO: 377854 - DNA, 305 bp, Homo sapiens
  chr6:167836629-167836934
  hypo
cagcagttcccacacacacactgcggctcccccgcacatggtggcttccccccaccacactggggttcccccccagggcagctcccacacacacgacggctccccccatactgtggcttccctgcacacgacagctccccccccacacaccatggttccccccacacggtggctccccctcacacagcagctcccccgctacacggcggctcccccgacacggtggctccccacacgtaagcagcagctccccccacacacggccctccccacacacacacacccggcggctccccccaccacac

SEQ ID NO: 377855 - DNA, 722 bp, Homo sapiens; identical to SEQ ID NO: 339200
  chr6:168062973-168063695
  hypo

SEQ ID NO: 377856 - DNA, 233 bp, Homo sapiens; identical to SEQ ID NO: 339201
  chr6:168137821-168138054
  hypo

SEQ ID NO: 377857 - DNA, 644 bp, Homo sapiens; identical to SEQ ID NO: 339202
  chr6:168378621-168379265
  hypo

SEQ ID NO: 377858 - DNA, 35 bp, Homo sapiens; identical to SEQ ID NO: 364160
  chr6:168462450-168462485
  hypo

SEQ ID NO: 377859 - DNA, 186 bp, Homo sapiens; identical to SEQ ID NO: 364161
  chr6:168462521-168462707
  hypo

SEQ ID NO: 377860 - DNA, 513 bp, Homo sapiens; identical to SEQ ID NO: 339204
  chr6:168529700-168530213
  hypo

SEQ ID NO: 377861 - DNA, 365 bp, Homo sapiens; identical to SEQ ID NO: 339205
  chr6:168672446-168672811
  hypo

SEQ ID NO: 377862 - DNA, 611 bp, Homo sapiens; identical to SEQ ID NO: 339206
  chr6:168709592-168710203
  hypo

SEQ ID NO: 377863 - DNA, 385 bp, Homo sapiens; identical to SEQ ID NO: 339207
  chr6:169567224-169567609
  hypo

SEQ ID NO: 377864 - DNA, 314 bp, Homo sapiens; identical to SEQ ID NO: 339208
  chr6:169641077-169641391
  hypo

SEQ ID NO: 377865 - DNA, 506 bp, Homo sapiens; identical to SEQ ID NO: 345259
  chr6:170124879-170125385
  hypo

SEQ ID NO: 377866 - DNA, 117 bp, Homo sapiens; identical to SEQ ID NO: 339210
  chr6:170178959-170179076
  hypo

SEQ ID NO: 377867 - DNA, 226 bp, Homo sapiens; identical to SEQ ID NO: 211060
  chr6:170339178-170339404
  hypo

SEQ ID NO: 377868 - DNA, 229 bp, Homo sapiens; identical to SEQ ID NO: 353862
  chr6:170339543-170339772
  hypo

SEQ ID NO: 377869 - DNA, 678 bp, Homo sapiens
  chr6:170454200-170454878
  hypo
aacagcggtgcccttgagcacgtggagaacggcagtgccctttagtacatggagaacagcagtgcccgtgagcacctggagaacagcggtgccctttagtatatggagaacggcggtgcccttgagcatgcagcgaactgcagtgccctttagtacatggagaacggcagtgccctttagtacatggagaatggcagtgcccgtgagcacctggagaacggcggtgcccttgagcacgtggagaacggcagtgccctttagtacgtggagaacggcggtgccctttagtatatggagaacggcggtgcccttgagcatgcagcgaactgcagtgccctttagtacatggagaacggcagtgcccgtgagcacctggagaacggcagtgccctttagtacgtggagaacggcggtgccctttagtacatggagaacagcagtgcccgtgagcacctggagaacggcagtgcccttgagcatgtggagaacggcggtgccctttagtacgtggagaacgacggtgcccttgagcacgtggagaacggcggtgcccgtgagcacctggagaatggcggtgcccttgagcacgtggagaacggcggtgccctttagtacatggagaacggtggtgcccgtgagcacgtggagaacggcagtgcccttgagcactcggagaac

SEQ ID NO: 377870 - DNA, 271 bp, Homo sapiens; identical to SEQ ID NO: 353863
  chr6:170474572-170474843
  hypo

SEQ ID NO: 377871 - DNA, 163 bp, Homo sapiens; identical to SEQ ID NO: 353864
  chr6:170531590-170531753
  hypo

SEQ ID NO: 377872 - DNA, 316 bp, Homo sapiens; identical to SEQ ID NO: 339215
  chr6:170667214-170667530
  hypo

SEQ ID NO: 377873 - DNA, 148 bp, Homo sapiens; identical to SEQ ID NO: 339216
  chr6:170871281-170871429
  hypo

SEQ ID NO: 377874 - DNA, 190 bp, Homo sapiens; identical to SEQ ID NO: 339217
  chr7:84219-84409
  hypo

SEQ ID NO: 377875 - DNA, 86 bp, Homo sapiens; identical to SEQ ID NO: 350497
  chr7:149024-149110
  hypo

SEQ ID NO: 377876 - DNA, 575 bp, Homo sapiens; identical to SEQ ID NO: 350498
  chr7:149220-149795
  hypo

SEQ ID NO: 377877 - DNA, 154 bp, Homo sapiens
  chr7:168483-168637
  hypo
cgtctcctggagggtccgtgtccctggtggatccgtgtccctagtagatccgtctcctggagggtccgtgtccctggcggatccgtctctgaccgcgcgtgctcttcaccatggaaggaggtgctggtagccaagccgccctccccaagtgggc

SEQ ID NO: 377878 - DNA, 255 bp, Homo sapiens; identical to SEQ ID NO: 339220
  chr7:170034-170289
  hypo

SEQ ID NO: 377879 - DNA, 272 bp, Homo sapiens; identical to SEQ ID NO: 306667
  chr7:173194-173466
  hypo

SEQ ID NO: 377880 - DNA, 163 bp, Homo sapiens; identical to SEQ ID NO: 364177
  chr7:173496-173659
  hypo

SEQ ID NO: 377881 - DNA, 437 bp, Homo sapiens; identical to SEQ ID NO: 358708
  chr7:191993-192430
  hypo

SEQ ID NO: 377882 - DNA, 362 bp, Homo sapiens; identical to SEQ ID NO: 284670
  chr7:192614-192976
  hypo

SEQ ID NO: 377883 - DNA, 511 bp, Homo sapiens; identical to SEQ ID NO: 284671
  chr7:193101-193612
  hypo

SEQ ID NO: 377884 - DNA, 276 bp, Homo sapiens; identical to SEQ ID NO: 284672
  chr7:193708-193984
  hypo

SEQ ID NO: 377885 - DNA, 321 bp, Homo sapiens; identical to SEQ ID NO: 339223
  chr7:212459-212780
  hypo

SEQ ID NO: 377886 - DNA, 197 bp, Homo sapiens; identical to SEQ ID NO: 339224
  chr7:229498-229695
  hypo

SEQ ID NO: 377887 - DNA, 736 bp, Homo sapiens; identical to SEQ ID NO: 339225
  chr7:286020-286756
  hypo

SEQ ID NO: 377888 - DNA, 550 bp, Homo sapiens; identical to SEQ ID NO: 348180
  chr7:287728-288278
  hypo

SEQ ID NO: 377889 - DNA, 468 bp, Homo sapiens; identical to SEQ ID NO: 348181
  chr7:288328-288796
  hypo

SEQ ID NO: 377890 - DNA, 217 bp, Homo sapiens; identical to SEQ ID NO: 339227
  chr7:290557-290774
  hypo

SEQ ID NO: 377891 - DNA, 427 bp, Homo sapiens; identical to SEQ ID NO: 364186
  chr7:293618-294045
  hypo

SEQ ID NO: 377892 - DNA, 829 bp, Homo sapiens; identical to SEQ ID NO: 364187
  chr7:294114-294943
  hypo

SEQ ID NO: 377893 - DNA, 1047 bp, Homo sapiens; identical to SEQ ID NO: 339229
  chr7:299930-300977
  hypo

SEQ ID NO: 377894 - DNA, 118 bp, Homo sapiens; identical to SEQ ID NO: 339230
  chr7:325309-325427
  hypo

SEQ ID NO: 377895 - DNA, 45 bp, Homo sapiens; identical to SEQ ID NO: 353871
  chr7:345250-345295
  hypo

SEQ ID NO: 377896 - DNA, 147 bp, Homo sapiens; identical to SEQ ID NO: 353872
  chr7:345608-345755
  hypo

SEQ ID NO: 377897 - DNA, 246 bp, Homo sapiens; identical to SEQ ID NO: 339233
  chr7:373783-374029
  hypo

SEQ ID NO: 377898 - DNA, 345 bp, Homo sapiens; identical to SEQ ID NO: 339234
  chr7:378637-378982
  hypo

SEQ ID NO: 377899 - DNA, 234 bp, Homo sapiens; identical to SEQ ID NO: 339235
  chr7:380956-381190
  hypo

SEQ ID NO: 377900 - DNA, 100 bp, Homo sapiens; identical to SEQ ID NO: 364192
  chr7:409502-409602
  hypo

SEQ ID NO: 377901 - DNA, 45 bp, Homo sapiens; identical to SEQ ID NO: 306721
  chr7:409781-409826
  hypo

SEQ ID NO: 377902 - DNA, 94 bp, Homo sapiens; identical to SEQ ID NO: 306722
  chr7:409892-409986
  hypo

SEQ ID NO: 377903 - DNA, 52 bp, Homo sapiens; identical to SEQ ID NO: 364195
  chr7:431783-431835
  hypo

SEQ ID NO: 377904 - DNA, 302 bp, Homo sapiens; identical to SEQ ID NO: 353873
  chr7:455133-455435
  hypo

SEQ ID NO: 377905 - DNA, 365 bp, Homo sapiens; identical to SEQ ID NO: 339239
  chr7:455747-456112
  hypo

SEQ ID NO: 377906 - DNA, 183 bp, Homo sapiens; identical to SEQ ID NO: 339240
  chr7:462339-462522
  hypo

SEQ ID NO: 377907 - DNA, 561 bp, Homo sapiens; identical to SEQ ID NO: 364197
  chr7:462752-463313
  hypo

SEQ ID NO: 377908 - DNA, 291 bp, Homo sapiens; identical to SEQ ID NO: 339242
  chr7:479019-479310
  hypo

SEQ ID NO: 377909 - DNA, 576 bp, Homo sapiens; identical to SEQ ID NO: 306744
  chr7:503100-503676
  hypo

SEQ ID NO: 377910 - DNA, 367 bp, Homo sapiens; identical to SEQ ID NO: 339245
  chr7:531216-531583
  hypo

SEQ ID NO: 377911 - DNA, 265 bp, Homo sapiens; identical to SEQ ID NO: 339246
  chr7:540536-540801
  hypo

SEQ ID NO: 377912 - DNA, 99 bp, Homo sapiens; identical to SEQ ID NO: 353875
  chr7:551473-551572
  hypo

SEQ ID NO: 377913 - DNA, 256 bp, Homo sapiens; identical to SEQ ID NO: 306754
  chr7:551697-551953
  hypo

SEQ ID NO: 377914 - DNA, 116 bp, Homo sapiens; identical to SEQ ID NO: 353877
  chr7:552019-552135
  hypo

SEQ ID NO: 377915 - DNA, 294 bp, Homo sapiens; identical to SEQ ID NO: 200769
  chr7:557697-557991
  hypo

SEQ ID NO: 377916 - DNA, 48 bp, Homo sapiens
  chr7:564189-564237
  hypo
cggcgttaagaccaggccctcacggagccctcactctctgaggaggaa

SEQ ID NO: 377917 - DNA, 107 bp, Homo sapiens
  chr7:564271-564378
  hypo
aggcaaaggatttcaggcccaggtcaggaaggccttgtctgaggagtctgagaagaagtcaattgacaacagctagaacatctaggtcaggcactccaggccgacac

SEQ ID NO: 377918 - DNA, 473 bp, Homo sapiens
  chr7:617508-617981
  hypo
cgctcccgctaggcagtgcgctgagggtagcagctcagggcgcttttgcagtcccatttatacccactttaaattatgtgcacattaaggggtgggttatacacagctctctggttaagggtggtaattttccgggtcatcagaccacattgccatggaaaggggcgggagcgcccgggtgttgtcatggcaacggtaaactgacaatggtgcacgggtgggcgtggcttacggagagtggcttgcaccctggccctgttttagccagtcctcaattaggtccagtgtcccagccccacctctggagtcgagtcccacctgctaactctcaggcacggagtccctcgccggcacccggaatgggagttcacacgcgaattcctgccgtgtcctcaggacagctgctcggcccacccaacagtctgcgtgcggccaccacggactgcggccccagcacatcccgggagctccac

SEQ ID NO: 377919 - DNA, 144 bp, Homo sapiens
  chr7:653114-653258
  hypo
cgtctgaggaagcgtacgggatcagaaccagcagctccgttcacagccaaactcgccttcaaaaggcaaggagatggcgcgccaagctcagcccctgaaatcacacacgcggggttgaacgtgagtaactcagcccatcgttcc

SEQ ID NO: 377920 - DNA, 274 bp, Homo sapiens
  chr7:653522-653796
  hypo
cggccccaggacagggaagcctgcggagccaagagggtgcagtgctgggaggtccccgcaggggcaagcagggctgccaccaagcgggtgggagacacccaaggactcgtccaccacccagggaaccggactgtgaggttcaggtcagcatggagggcgggaggcgtggcgcccacagaggggaggggagccaggcccagatgacagacgcctgcagactccacgccccgcacgcccgaccaggacaggccaacgcagggctgggcacttcttc

SEQ ID NO: 377921 - DNA, 316 bp, Homo sapiens
  chr7:667329-667645
  hypo
cgggcgctctccatccagagccccccgcccagctcacgcccgccctccccgggcactgggggaggaggtgagcacccgccactcaggctcaggcagcctggaagatccaggccacgactgccagcgctcaactccactcggccctcactggtattttccgagtgcccgctatgtacaggcaggtctgtgctgggcgccaggttgccgggaaatggggcacacacagcccctgtctcataaaggcaccagcaaaacaggggtgaacatcgaatgggtggggcccttctgactgtcactcacggaacaaacacaggcc

SEQ ID NO: 377922 - DNA, 40 bp, Homo sapiens; identical to SEQ ID NO: 339254
  chr7:711727-711767
  hypo

SEQ ID NO: 377923 - DNA, 252 bp, Homo sapiens; identical to SEQ ID NO: 339255
  chr7:716729-716981
  hypo

SEQ ID NO: 377924 - DNA, 90 bp, Homo sapiens; identical to SEQ ID NO: 72679
  chr7:778947-779037
  hypo

SEQ ID NO: 377925 - DNA, 36 bp, Homo sapiens; identical to SEQ ID NO: 211119
  chr7:803211-803247
  hypo

SEQ ID NO: 377926 - DNA, 222 bp, Homo sapiens
  chr7:803615-803837
  hypo
gccgtcccgacagctggcgtgccgtgcctggccccactcaggctacacacctgctcccccaggtgctcagcaggtaccagcgccgaccagctgagctgtggttcactgaagcgtgttgttaaaagtacccaatagtcactcttgcctggggagaagcagcattttaaggagcatcgcattgaagactgtgggacgcagctcttccacttggcccgggcacac

SEQ ID NO: 377927 - DNA, 136 bp, Homo sapiens; identical to SEQ ID NO: 364207
  chr7:808392-808528
  hypo

SEQ ID NO: 377928 - DNA, 241 bp, Homo sapiens; identical to SEQ ID NO: 211121
  chr7:808577-808818
  hypo

SEQ ID NO: 377929 - DNA, 382 bp, Homo sapiens; identical to SEQ ID NO: 364209
  chr7:808848-809230
  hypo

SEQ ID NO: 377930 - DNA, 245 bp, Homo sapiens; identical to SEQ ID NO: 364210
  chr7:818254-818499
  hypo

SEQ ID NO: 377931 - DNA, 41 bp, Homo sapiens
  chr7:819359-819400
  hypo
cgcagcagggcctgggccgcctccactctgttggctggggt

SEQ ID NO: 377932 - DNA, 138 bp, Homo sapiens
  chr7:819698-819836
  hypo
tcagagcagtgtccagtacctgtaccgagagttgctggttcaccttgacgatccagagagggccatccaggatgcaattttaggtgagactccgacggcttggccttcgttccgatgcctgctttcggcgcctgccac

SEQ ID NO: 377933 - DNA, 238 bp, Homo sapiens; identical to SEQ ID NO: 332992
  chr7:822395-822633
  hypo

SEQ ID NO: 377934 - DNA, 58 bp, Homo sapiens; identical to SEQ ID NO: 353880
  chr7:834245-834303
  hypo

SEQ ID NO: 377935 - DNA, 317 bp, Homo sapiens; identical to SEQ ID NO: 353881
  chr7:834873-835190
  hypo

SEQ ID NO: 377936 - DNA, 274 bp, Homo sapiens; identical to SEQ ID NO: 332994
  chr7:889360-889634
  hypo

SEQ ID NO: 377937 - DNA, 372 bp, Homo sapiens; identical to SEQ ID NO: 353882
  chr7:907709-908081
  hypo

SEQ ID NO: 377938 - DNA, 176 bp, Homo sapiens; identical to SEQ ID NO: 348182
  chr7:920980-921156
  hypo

SEQ ID NO: 377939 - DNA, 742 bp, Homo sapiens; identical to SEQ ID NO: 339267
  chr7:925633-926375
  hypo

SEQ ID NO: 377940 - DNA, 594 bp, Homo sapiens; identical to SEQ ID NO: 339268
  chr7:943355-943949
  hypo

SEQ ID NO: 377941 - DNA, 170 bp, Homo sapiens; identical to SEQ ID NO: 364218
  chr7:965802-965972
  hypo

SEQ ID NO: 377942 - DNA, 501 bp, Homo sapiens; identical to SEQ ID NO: 364219
  chr7:966009-966510
  hypo

SEQ ID NO: 377943 - DNA, 192 bp, Homo sapiens; identical to SEQ ID NO: 339271
  chr7:987241-987433
  hypo

SEQ ID NO: 377944 - DNA, 333 bp, Homo sapiens; identical to SEQ ID NO: 332995
  chr7:1001822-1002155
  hypo

SEQ ID NO: 377945 - DNA, 91 bp, Homo sapiens; identical to SEQ ID NO: 364221
  chr7:1029909-1030000
  hypo

SEQ ID NO: 377946 - DNA, 177 bp, Homo sapiens; identical to SEQ ID NO: 339275
  chr7:1075890-1076067
  hypo

SEQ ID NO: 377947 - DNA, 114 bp, Homo sapiens; identical to SEQ ID NO: 364222
  chr7:1115608-1115722
  hypo

SEQ ID NO: 377948 - DNA, 420 bp, Homo sapiens; identical to SEQ ID NO: 339277
  chr7:1202650-1203070
  hypo

SEQ ID NO: 377949 - DNA, 75 bp, Homo sapiens
  chr7:1303350-1303425
  hypo
cgattaccccgctccccgcctgggaacatgtggcctggcatatgtggggccaacctcagcagaaatccacgtgca

SEQ ID NO: 377950 - DNA, 123 bp, Homo sapiens; identical to SEQ ID NO: 353887
  chr7:1308164-1308287
  hypo

SEQ ID NO: 377951 - DNA, 139 bp, Homo sapiens; identical to SEQ ID NO: 211166
  chr7:1315705-1315844
  hypo

SEQ ID NO: 377952 - DNA, 281 bp, Homo sapiens
  chr7:1328613-1328894
  hypo
cagacacagctcccgtcattcaatatggcaaagtgtggtggtgctggctccgcagaccccactgtggaggcgaaaggtaagaagtcagggttcgaggttggggttccgtgaacacagccccgagaccgggtgtctaccccaccgagaggaggggtctcgtcggggggcctcgctgagcctccgtgtcccacccggagccagggtgggcaccctcccgtccccgcagccccggaagatctggcaggtggcatgacacccacccgggggccctggtcaccggc

SEQ ID NO: 377953 - DNA, 178 bp, Homo sapiens; identical to SEQ ID NO: 364226
  chr7:1333680-1333858
  hypo

SEQ ID NO: 377954 - DNA, 422 bp, Homo sapiens; identical to SEQ ID NO: 364227
  chr7:1370055-1370477
  hypo

SEQ ID NO: 377955 - DNA, 124 bp, Homo sapiens
  chr7:1451120-1451244
  hypo
cgtatccggggtgttcgaacaattgtgcggcgccgacgatgcaagctgttgacctgcacagataaaccgtgcgtgcggaggaatcgggggcggcggacggggtggggggagtgtacatggctgt

SEQ ID NO: 377956 - DNA, 101 bp, Homo sapiens; identical to SEQ ID NO: 353889
  chr7:1460672-1460773
  hypo

SEQ ID NO: 377957 - DNA, 576 bp, Homo sapiens; identical to SEQ ID NO: 339288
  chr7:1473784-1474360
  hypo

SEQ ID NO: 377958 - DNA, 267 bp, Homo sapiens; identical to SEQ ID NO: 339289
  chr7:1475105-1475372
  hypo

SEQ ID NO: 377959 - DNA, 882 bp, Homo sapiens; identical to SEQ ID NO: 339290
  chr7:1476273-1477155
  hypo

SEQ ID NO: 377960 - DNA, 883 bp, Homo sapiens; identical to SEQ ID NO: 339291
  chr7:1477156-1478039
  hypo

SEQ ID NO: 377961 - DNA, 524 bp, Homo sapiens; identical to SEQ ID NO: 339292
  chr7:1479741-1480265
  hypo

SEQ ID NO: 377962 - DNA, 1005 bp, Homo sapiens; identical to SEQ ID NO: 333003
  chr7:1498587-1499592
  hypo

SEQ ID NO: 377963 - DNA, 532 bp, Homo sapiens; identical to SEQ ID NO: 339294
  chr7:1533923-1534455
  hypo

SEQ ID NO: 377964 - DNA, 137 bp, Homo sapiens; identical to SEQ ID NO: 339295
  chr7:1556125-1556262
  hypo

SEQ ID NO: 377965 - DNA, 233 bp, Homo sapiens; identical to SEQ ID NO: 339296
  chr7:1563405-1563638
  hypo

SEQ ID NO: 377966 - DNA, 336 bp, Homo sapiens; identical to SEQ ID NO: 339297
  chr7:1584054-1584390
  hypo

SEQ ID NO: 377967 - DNA, 297 bp, Homo sapiens; identical to SEQ ID NO: 211199
  chr7:1615093-1615390
  hypo

SEQ ID NO: 377968 - DNA, 113 bp, Homo sapiens; identical to SEQ ID NO: 364236
  chr7:1615444-1615557
  hypo

SEQ ID NO: 377969 - DNA, 421 bp, Homo sapiens; identical to SEQ ID NO: 353892
  chr7:1641978-1642399
  hypo

SEQ ID NO: 377970 - DNA, 312 bp, Homo sapiens
  chr7:1694568-1694880
  hypo
cgaagggggtgcccagcctcgccccgcccagcgcacccctgcagcagcccgggagggcaggccgtggctcctgggaacacggcgcccagctgcaatccacattgctgctagtgaatatggacaattcagagacatgaaataaggcagacagagaaaaagcatcggtgactctgccaggctacatatgtgtgtgcgtgtctgcatatatatacacacacgtgtatacgcacacacagagccacacatcactcaacgacagggacacgttctgagaaatacatggttccgtgattttgtcatcgcgcgtacatc

SEQ ID NO: 377971 - DNA, 233 bp, Homo sapiens; identical to SEQ ID NO: 284724
  chr7:1705153-1705386
  hypo

SEQ ID NO: 377972 - DNA, 502 bp, Homo sapiens; identical to SEQ ID NO: 284725
  chr7:1705693-1706195
  hypo

SEQ ID NO: 377973 - DNA, 147 bp, Homo sapiens; identical to SEQ ID NO: 358727
  chr7:1708913-1709060
  hypo

SEQ ID NO: 377974 - DNA, 473 bp, Homo sapiens
  chr7:1714474-1714947
  hypo
cgggcgggaaacatccttcggcccgggccagcccagccatcaccaggtccactgtgtttgctagagcccccaattcaatctctgaattttaaagatagggacactgaggcgcagacagggcagtggccgcaagccactgaggcttgcaggcagtggtatctgggctcagccctgctcccatgctgggctccccacacctcatatccgggctcagctgggagagtgccctggccttaccgacggggacccggcagcccacggcgtggaggtgaaccagcttgtctgggaagccacattccacccctgtgcacccccaggccctctgtggcccactaccccctctaggaccccaccccacagaagcgcatctctctgctgtccgccccactccagtggtaacttctgtcagagggcttgtcacagagtgctgaccgcgctgagagcttctcaccagcgctggacatgtggccagg

SEQ ID NO: 377975 - DNA, 35 bp, Homo sapiens; identical to SEQ ID NO: 364241
  chr7:1733131-1733166
  hypo

SEQ ID NO: 377976 - DNA, 233 bp, Homo sapiens; identical to SEQ ID NO: 211210
  chr7:1784457-1784690
  hypo

SEQ ID NO: 377977 - DNA, 370 bp, Homo sapiens
  chr7:1784927-1785297
  hypo
gggccagggccgccgcggccaccgcagcatcctcagcaaactgcagtcagtctgcaccgaggactcgtacgcggctgaggtggtcgggcccccacgtccagcatccgggcgctcacagccgggccgctccccgccgcccccgcctccgccggagcccagtgacatgccctgtgccgatgatgagtgcttctccggggacggcaccacgccactggtggccctgcccacgctggccacgcaggccgaggcccgccccctcatcaaggtcaagcagctcactcagaactcggccaccatcaccgtccagctgcccagcccgttccaccggatgtacaccctggagcatttcaacaacagcaaggcctccacc

SEQ ID NO: 377978 - DNA, 206 bp, Homo sapiens; identical to SEQ ID NO: 348186
  chr7:1931663-1931869
  hypo

SEQ ID NO: 377979 - DNA, 212 bp, Homo sapiens; identical to SEQ ID NO: 339312
  chr7:1932177-1932389
  hypo

SEQ ID NO: 377980 - DNA, 45 bp, Homo sapiens; identical to SEQ ID NO: 348187
  chr7:1970797-1970842
  hypo

SEQ ID NO: 377981 - DNA, 88 bp, Homo sapiens; identical to SEQ ID NO: 348188
  chr7:1970921-1971009
  hypo

SEQ ID NO: 377982 - DNA, 307 bp, Homo sapiens; identical to SEQ ID NO: 364246
  chr7:1997037-1997344
  hypo

SEQ ID NO: 377983 - DNA, 171 bp, Homo sapiens; identical to SEQ ID NO: 364247
  chr7:2006407-2006578
  hypo

SEQ ID NO: 377984 - DNA, 324 bp, Homo sapiens
  chr7:2019121-2019445
  hypo
cgcactggatggggcagcgccaacacaggcaccaaagcggagcccggagctccacctgcatctgcctggaaacctcttgcctgaggaccctgatgggtccacaaggcgggggagaggcagagagctctagaaaagcagcccggcctgcagaccctgctctaggggcgccgtgtgcaagcaggagctggggtgagggtggcctaggacagtgcagtggcagagagctggcagcatgtctgaagcggagcccaagggctgctggacacgcctggctgctgcactgcctgggctctgctctgagccacactcccgtgcagccatctc

SEQ ID NO: 377985 - DNA, 108 bp, Homo sapiens; identical to SEQ ID NO: 353897
  chr7:2024704-2024812
  hypo

SEQ ID NO: 377986 - DNA, 384 bp, Homo sapiens; identical to SEQ ID NO: 353898
  chr7:2024842-2025226
  hypo

SEQ ID NO: 377987 - DNA, 548 bp, Homo sapiens; identical to SEQ ID NO: 339319
  chr7:2041390-2041938
  hypo

SEQ ID NO: 377988 - DNA, 147 bp, Homo sapiens; identical to SEQ ID NO: 339320
  chr7:2068947-2069094
  hypo

SEQ ID NO: 377989 - DNA, 109 bp, Homo sapiens; identical to SEQ ID NO: 339321
  chr7:2069789-2069898
  hypo

SEQ ID NO: 377990 - DNA, 142 bp, Homo sapiens; identical to SEQ ID NO: 339322
  chr7:2070150-2070292
  hypo

SEQ ID NO: 377991 - DNA, 253 bp, Homo sapiens; identical to SEQ ID NO: 348189
  chr7:2071776-2072029
  hypo

SEQ ID NO: 377992 - DNA, 309 bp, Homo sapiens; identical to SEQ ID NO: 339324
  chr7:2102525-2102834
  hypo

SEQ ID NO: 377993 - DNA, 382 bp, Homo sapiens; identical to SEQ ID NO: 339325
  chr7:2113550-2113932
  hypo

SEQ ID NO: 377994 - DNA, 177 bp, Homo sapiens; identical to SEQ ID NO: 339326
  chr7:2158537-2158714
  hypo

SEQ ID NO: 377995 - DNA, 294 bp, Homo sapiens
  chr7:2163000-2163294
  hypo
cgctacagcttggagacattgcgggagggctcccagcaagcgaaactgggctggggtgcaggacggagagagggcgctggtgaggccctggtcctgtgtgtgagggcggctgacacccggtgggctctgtttgcgcttgagctggtgacggtagggtttccttccctgtcaagcaggagagcaccccagtccacccagggagcacccaggaggagccagccccgccaagggcacgcatgggaggcgtcaatccgctggagggcagcagccctcaagcgaggactcacggggaca

SEQ ID NO: 377996 - DNA, 375 bp, Homo sapiens
  chr7:2163467-2163842
  hypo
aagccagaaataaataaataaagctgccaattagccagcgcccttttccgctctggcaagggctttttagcttctccaaatacaccagagtcctgcaaggctgcacacaagcaaaggcagcccaggcagcaaggggcgggggcttaggccccgggggcaagaactctgcttcctgggaagccccctgtagccaggtcaggctcctcctctagacggggaagccgggcaaacacctccaggagcaaggcgaaggctctcagtacccccagtacagatgcagccgggagcccccagctctccacaggtcagaggccacgccacgcccctgctcaactcgcagagcagcaaggcaggaggggcaggccatcgggcagc

SEQ ID NO: 377997 - DNA, 403 bp, Homo sapiens; identical to SEQ ID NO: 353901
  chr7:2196807-2197210
  hypo

SEQ ID NO: 377998 - DNA, 326 bp, Homo sapiens; identical to SEQ ID NO: 345891
  chr7:2208344-2208670
  hypo

SEQ ID NO: 377999 - DNA, 91 bp, Homo sapiens; identical to SEQ ID NO: 345892
  chr7:2208844-2208935
  hypo

SEQ ID NO: 378000 - DNA, 199 bp, Homo sapiens; identical to SEQ ID NO: 339330
  chr7:2222256-2222455
  hypo

SEQ ID NO: 378001 - DNA, 236 bp, Homo sapiens; identical to SEQ ID NO: 211252
  chr7:2233056-2233292
  hypo

SEQ ID NO: 378002 - DNA, 156 bp, Homo sapiens; identical to SEQ ID NO: 339332
  chr7:2236075-2236231
  hypo

SEQ ID NO: 378003 - DNA, 114 bp, Homo sapiens; identical to SEQ ID NO: 339333
  chr7:2237109-2237223
  hypo

SEQ ID NO: 378004 - DNA, 136 bp, Homo sapiens; identical to SEQ ID NO: 345894
  chr7:2237982-2238118
  hypo

SEQ ID NO: 378005 - DNA, 261 bp, Homo sapiens
  chr7:2255762-2256023
  hypo
cggctgccccatcccccgcaacccctcaccgcaggtgcgcgctctcctcccgcagctgcttcagctcccgttccagcctagggagccgtaccagctcagacttcatgttcttcacaatcgctgcatcctgctcttgcagggacagcttctgctccagatcctgatggaggccagggacagagaagaagggaaaaatgagccacgaagagacctggagaaaatcacacgcacacggctaagagaaggaagccggtctgcaac

SEQ ID NO: 378006 - DNA, 475 bp, Homo sapiens; identical to SEQ ID NO: 339336
  chr7:2264018-2264493
  hypo

SEQ ID NO: 378007 - DNA, 289 bp, Homo sapiens; identical to SEQ ID NO: 211260
  chr7:2265241-2265530
  hypo

SEQ ID NO: 378008 - DNA, 392 bp, Homo sapiens; identical to SEQ ID NO: 339338
  chr7:2298049-2298441
  hypo

SEQ ID NO: 378009 - DNA, 316 bp, Homo sapiens; identical to SEQ ID NO: 353908
  chr7:2349432-2349748
  hypo

SEQ ID NO: 378010 - DNA, 242 bp, Homo sapiens; identical to SEQ ID NO: 339340
  chr7:2448743-2448985
  hypo

SEQ ID NO: 378011 - DNA, 468 bp, Homo sapiens; identical to SEQ ID NO: 348195
  chr7:2472811-2473279
  hypo

SEQ ID NO: 378012 - DNA, 328 bp, Homo sapiens; identical to SEQ ID NO: 345896
  chr7:2473779-2474107
  hypo

SEQ ID NO: 378013 - DNA, 254 bp, Homo sapiens; identical to SEQ ID NO: 339342
  chr7:2477361-2477615
  hypo

SEQ ID NO: 378014 - DNA, 237 bp, Homo sapiens; identical to SEQ ID NO: 211274
  chr7:2566658-2566895
  hypo

SEQ ID NO: 378015 - DNA, 195 bp, Homo sapiens
  chr7:2566939-2567134
  hypo
ccctagggccgtgcctgtgcgtgtgcgtgtgcgtgtgtgtgtgtgtgtactgcatgcccacccgggtagcaggctgctgggcagttctgctctgtggaggggcgggcaccagcgccacttatgtgcctctgctccgagggccagtgggctgcagggcctgcttggaggaaggatttgtgtgtcggaggccactcc

SEQ ID NO: 378016 - DNA, 440 bp, Homo sapiens; identical to SEQ ID NO: 257151
  chr7:2643038-2643478
  hypo

SEQ ID NO: 378017 - DNA, 327 bp, Homo sapiens; identical to SEQ ID NO: 339345
  chr7:2679783-2680110
  hypo

SEQ ID NO: 378018 - DNA, 48 bp, Homo sapiens
  chr7:2686911-2686959
  hypo
aggagcactcttgctgctccggagccccacgtctgcgcgaggacgggc

SEQ ID NO: 378019 - DNA, 43 bp, Homo sapiens; identical to SEQ ID NO: 284742
  chr7:2728259-2728302
  hypo

SEQ ID NO: 378020 - DNA, 361 bp, Homo sapiens; identical to SEQ ID NO: 364275
  chr7:2751985-2752346
  hypo

SEQ ID NO: 378021 - DNA, 399 bp, Homo sapiens; identical to SEQ ID NO: 364276
  chr7:2770640-2771039
  hypo

SEQ ID NO: 378022 - DNA, 145 bp, Homo sapiens; identical to SEQ ID NO: 339351
  chr7:2804422-2804567
  hypo

SEQ ID NO: 378023 - DNA, 157 bp, Homo sapiens; identical to SEQ ID NO: 339352
  chr7:2959057-2959214
  hypo

SEQ ID NO: 378024 - DNA, 84 bp, Homo sapiens; identical to SEQ ID NO: 350505
  chr7:3083602-3083686
  hypo

SEQ ID NO: 378025 - DNA, 74 bp, Homo sapiens; identical to SEQ ID NO: 339354
  chr7:3211469-3211543
  hypo

SEQ ID NO: 378026 - DNA, 43 bp, Homo sapiens; identical to SEQ ID NO: 353916
  chr7:3283455-3283498
  hypo

SEQ ID NO: 378027 - DNA, 367 bp, Homo sapiens; identical to SEQ ID NO: 339357
  chr7:4153573-4153940
  hypo

SEQ ID NO: 378028 - DNA, 276 bp, Homo sapiens; identical to SEQ ID NO: 339358
  chr7:4211365-4211641
  hypo

SEQ ID NO: 378029 - DNA, 761 bp, Homo sapiens; identical to SEQ ID NO: 339359
  chr7:4219149-4219910
  hypo

SEQ ID NO: 378030 - DNA, 203 bp, Homo sapiens; identical to SEQ ID NO: 339360
  chr7:4243576-4243779
  hypo

SEQ ID NO: 378031 - DNA, 123 bp, Homo sapiens; identical to SEQ ID NO: 339361
  chr7:4254687-4254810
  hypo

SEQ ID NO: 378032 - DNA, 304 bp, Homo sapiens; identical to SEQ ID NO: 364284
  chr7:4349444-4349748
  hypo

SEQ ID NO: 378033 - DNA, 316 bp, Homo sapiens; identical to SEQ ID NO: 339363
  chr7:4410656-4410972
  hypo

SEQ ID NO: 378034 - DNA, 188 bp, Homo sapiens
  chr7:4751238-4751426
  hypo
cggcattgtgtggatgggcggtagtgagaataattactaagggcgtcataccctctcgtatctgcatcacccataaggggtgggcagtggtgctgccgtgtcttgtcaggaggccagctctgtgtcacccaccaggctgggctcagccacaagtcggcaacgtagtgcctccagggcagatgccacgg

SEQ ID NO: 378035 - DNA, 299 bp, Homo sapiens
  chr7:4751607-4751906
  hypo
acgcggcaggtcacagagcccaccaagtccgaagctggaagttcagattctttgatattcagaggtggatcatctgtgcttttttttttttatcagtctctcactttttatccatcatctaattgtgacagcttatttgcctttataccataagatggggagtagggttgagatgaaatccaagcatcgtttcccttccccgatggtcgcctccctggggtgagacgttcgacgtgtcagacttcaccaagagcatctcccgcctcggtgcagtaatggacttggaaacgatttactcc

SEQ ID NO: 378036 - DNA, 49 bp, Homo sapiens; identical to SEQ ID NO: 364285
  chr7:4771516-4771565
  hypo

SEQ ID NO: 378037 - DNA, 105 bp, Homo sapiens; identical to SEQ ID NO: 364286
  chr7:4800779-4800884
  hypo

SEQ ID NO: 378038 - DNA, 902 bp, Homo sapiens; identical to SEQ ID NO: 353918
  chr7:4801650-4802552
  hypo

SEQ ID NO: 378039 - DNA, 430 bp, Homo sapiens; identical to SEQ ID NO: 364288
  chr7:4802589-4803019
  hypo

SEQ ID NO: 378040 - DNA, 204 bp, Homo sapiens
  chr7:4855734-4855938
  hypo
cgctcagggagcaggaggccaaaaagggcagagccgcctccaggagctggcgagggaggcgccagcagccgtcatgtccaggaatgtgagcccccgacccctcaaccctgcacgaggccctcacccctgtcgaggagctggttgagaagcagtgtcccggagaagaagaagaggtaggcgagcatctgcgaggccacctcgggg

SEQ ID NO: 378041 - DNA, 468 bp, Homo sapiens
  chr7:4856090-4856558
  hypo
cagggactggcgggggcaagaggagaacagcaaccagcatttccaggagcgctggcggccgaacggggggcctgacccagcgagctccccacccacgcactgcttgcagggacccggcctcggtagcttcctgctggacaggccatggctttgcaaatgtccagtgtgggatgtggggacacaggagctgcctcctggggctgctgggagcagaggtggggtgcagggggctcagggggatctgctgtcggaggcacagatgaactcagaaggcgcacagaggtggcgcctggggggatgggctccaacaaaggggctccaacaaaatgacgggagagtcaccactcccccagaaagtggctcaccgcacccccgatgcaccccaagctggccagggccacagggggaccggcggcagcacctctggcacccgtgggtccagggtgacaacagggccatgtcccttgc

SEQ ID NO: 378042 - DNA, 224 bp, Homo sapiens; identical to SEQ ID NO: 345897
  chr7:4856619-4856843
  hypo

SEQ ID NO: 378043 - DNA, 100 bp, Homo sapiens; identical to SEQ ID NO: 345898
  chr7:4857296-4857396
  hypo

SEQ ID NO: 378044 - DNA, 111 bp, Homo sapiens; identical to SEQ ID NO: 353921
  chr7:4857860-4857971
  hypo

SEQ ID NO: 378045 - DNA, 258 bp, Homo sapiens; identical to SEQ ID NO: 339371
  chr7:4913172-4913430
  hypo

SEQ ID NO: 378046 - DNA, 527 bp, Homo sapiens; identical to SEQ ID NO: 353922
  chr7:4917102-4917629
  hypo

SEQ ID NO: 378047 - DNA, 237 bp, Homo sapiens; identical to SEQ ID NO: 339373
  chr7:5230941-5231178
  hypo

SEQ ID NO: 378048 - DNA, 55 bp, Homo sapiens; identical to SEQ ID NO: 339374
  chr7:5240151-5240206
  hypo

SEQ ID NO: 378049 - DNA, 344 bp, Homo sapiens; identical to SEQ ID NO: 364296
  chr7:5262623-5262967
  hypo

SEQ ID NO: 378050 - DNA, 190 bp, Homo sapiens; identical to SEQ ID NO: 339376
  chr7:5396687-5396877
  hypo

SEQ ID NO: 378051 - DNA, 545 bp, Homo sapiens; identical to SEQ ID NO: 364297
  chr7:5428491-5429036
  hypo

SEQ ID NO: 378052 - DNA, 635 bp, Homo sapiens; identical to SEQ ID NO: 346875
  chr7:5632268-5632903
  hypo

SEQ ID NO: 378053 - DNA, 123 bp, Homo sapiens; identical to SEQ ID NO: 350511
  chr7:5633472-5633595
  hypo

SEQ ID NO: 378054 - DNA, 122 bp, Homo sapiens; identical to SEQ ID NO: 339382
  chr7:6034958-6035080
  hypo

SEQ ID NO: 378055 - DNA, 145 bp, Homo sapiens; identical to SEQ ID NO: 339383
  chr7:6058662-6058807
  hypo

SEQ ID NO: 378056 - DNA, 67 bp, Homo sapiens; identical to SEQ ID NO: 353926
  chr7:6060523-6060590
  hypo

SEQ ID NO: 378057 - DNA, 104 bp, Homo sapiens; identical to SEQ ID NO: 211371
  chr7:6060612-6060716
  hypo

SEQ ID NO: 378058 - DNA, 71 bp, Homo sapiens; identical to SEQ ID NO: 353928
  chr7:6060772-6060843
  hypo

SEQ ID NO: 378059 - DNA, 521 bp, Homo sapiens; identical to SEQ ID NO: 339388
  chr7:6207763-6208284
  hypo

SEQ ID NO: 378060 - DNA, 183 bp, Homo sapiens; identical to SEQ ID NO: 339389
  chr7:6222712-6222895
  hypo

SEQ ID NO: 378061 - DNA, 107 bp, Homo sapiens; identical to SEQ ID NO: 211378
  chr7:6443719-6443826
  hypo

SEQ ID NO: 378062 - DNA, 100 bp, Homo sapiens; identical to SEQ ID NO: 211379
  chr7:6443856-6443956
  hypo

SEQ ID NO: 378063 - DNA, 60 bp, Homo sapiens; identical to SEQ ID NO: 211380
  chr7:6443990-6444050
  hypo

SEQ ID NO: 378064 - DNA, 177 bp, Homo sapiens; identical to SEQ ID NO: 339393
  chr7:6448767-6448944
  hypo

SEQ ID NO: 378065 - DNA, 61 bp, Homo sapiens; identical to SEQ ID NO: 358742
  chr7:6570393-6570454
  hypo

SEQ ID NO: 378066 - DNA, 62 bp, Homo sapiens; identical to SEQ ID NO: 284778
  chr7:6655356-6655418
  hypo

SEQ ID NO: 378067 - DNA, 220 bp, Homo sapiens; identical to SEQ ID NO: 284779
  chr7:6655448-6655668
  hypo

SEQ ID NO: 378068 - DNA, 153 bp, Homo sapiens; identical to SEQ ID NO: 358745
  chr7:6655854-6656007
  hypo

SEQ ID NO: 378069 - DNA, 145 bp, Homo sapiens; identical to SEQ ID NO: 339400
  chr7:6682673-6682818
  hypo

SEQ ID NO: 378070 - DNA, 162 bp, Homo sapiens; identical to SEQ ID NO: 339401
  chr7:6694972-6695134
  hypo

SEQ ID NO: 378071 - DNA, 56 bp, Homo sapiens; identical to SEQ ID NO: 364315
  chr7:7102882-7102938
  hypo

SEQ ID NO: 378072 - DNA, 37 bp, Homo sapiens; identical to SEQ ID NO: 364316
  chr7:7102968-7103005
  hypo

SEQ ID NO: 378073 - DNA, 209 bp, Homo sapiens; identical to SEQ ID NO: 211394
  chr7:7605822-7606031
  hypo

SEQ ID NO: 378074 - DNA, 76 bp, Homo sapiens; identical to SEQ ID NO: 339406
  chr7:7612745-7612821
  hypo

SEQ ID NO: 378075 - DNA, 157 bp, Homo sapiens; identical to SEQ ID NO: 339407
  chr7:7613138-7613295
  hypo

SEQ ID NO: 378076 - DNA, 31 bp, Homo sapiens; identical to SEQ ID NO: 339408
  chr7:7839208-7839239
  hypo

SEQ ID NO: 378077 - DNA, 271 bp, Homo sapiens; identical to SEQ ID NO: 350515
  chr7:16793071-16793342
  hypo

SEQ ID NO: 378078 - DNA, 182 bp, Homo sapiens; identical to SEQ ID NO: 114656
  chr7:16793380-16793562
  hypo

SEQ ID NO: 378079 - DNA, 104 bp, Homo sapiens; identical to SEQ ID NO: 346877
  chr7:18125868-18125972
  hypo

SEQ ID NO: 378080 - DNA, 218 bp, Homo sapiens; identical to SEQ ID NO: 200838
  chr7:18126225-18126443
  hypo

SEQ ID NO: 378081 - DNA, 59 bp, Homo sapiens; identical to SEQ ID NO: 200840
  chr7:19156644-19156703
  hypo

SEQ ID NO: 378082 - DNA, 85 bp, Homo sapiens; identical to SEQ ID NO: 371457
  chr7:20817295-20817380
  hypo

SEQ ID NO: 378083 - DNA, 127 bp, Homo sapiens; identical to SEQ ID NO: 200844
  chr7:20817410-20817537
  hypo

SEQ ID NO: 378084 - DNA, 297 bp, Homo sapiens; identical to SEQ ID NO: 200847
  chr7:20826202-20826499
  hypo

SEQ ID NO: 378085 - DNA, 1116 bp, Homo sapiens; identical to SEQ ID NO: 350525
  chr7:21984770-21985886
  hypo

SEQ ID NO: 378086 - DNA, 140 bp, Homo sapiens; identical to SEQ ID NO: 345262
  chr7:22893437-22893577
  hypo

SEQ ID NO: 378087 - DNA, 1088 bp, Homo sapiens; identical to SEQ ID NO: 345263
  chr7:22893607-22894695
  hypo

SEQ ID NO: 378088 - DNA, 209 bp, Homo sapiens; identical to SEQ ID NO: 346882
  chr7:23052818-23053027
  hypo

SEQ ID NO: 378089 - DNA, 713 bp, Homo sapiens; identical to SEQ ID NO: 284856
  chr7:23053080-23053793
  hypo

SEQ ID NO: 378090 - DNA, 246 bp, Homo sapiens; identical to SEQ ID NO: 350530
  chr7:23053819-23054065
  hypo

SEQ ID NO: 378091 - DNA, 760 bp, Homo sapiens; identical to SEQ ID NO: 350533
  chr7:23510081-23510841
  hypo

SEQ ID NO: 378092 - DNA, 228 bp, Homo sapiens; identical to SEQ ID NO: 346885
  chr7:23513246-23513474
  hypo

SEQ ID NO: 378093 - DNA, 221 bp, Homo sapiens; identical to SEQ ID NO: 333064
  chr7:23570157-23570378
  hypo

SEQ ID NO: 378094 - DNA, 133 bp, Homo sapiens; identical to SEQ ID NO: 353950
  chr7:23749573-23749706
  hypo

SEQ ID NO: 378095 - DNA, 364 bp, Homo sapiens; identical to SEQ ID NO: 353951
  chr7:23749829-23750193
  hypo

SEQ ID NO: 378096 - DNA, 1196 bp, Homo sapiens; identical to SEQ ID NO: 371485
  chr7:25019058-25020254
  hypo

SEQ ID NO: 378097 - DNA, 188 bp, Homo sapiens; identical to SEQ ID NO: 200878
  chr7:25892243-25892431
  hypo

SEQ ID NO: 378098 - DNA, 98 bp, Homo sapiens; identical to SEQ ID NO: 371492
  chr7:25989912-25990010
  hypo

SEQ ID NO: 378099 - DNA, 585 bp, Homo sapiens; identical to SEQ ID NO: 371493
  chr7:25990228-25990813
  hypo

SEQ ID NO: 378100 - DNA, 79 bp, Homo sapiens; identical to SEQ ID NO: 339428
  chr7:26198616-26198695
  hypo

SEQ ID NO: 378101 - DNA, 164 bp, Homo sapiens; identical to SEQ ID NO: 348217
  chr7:26283815-26283979
  hypo

SEQ ID NO: 378102 - DNA, 108 bp, Homo sapiens; identical to SEQ ID NO: 339430
  chr7:26667960-26668068
  hypo

SEQ ID NO: 378103 - DNA, 142 bp, Homo sapiens; identical to SEQ ID NO: 345270
  chr7:27136790-27136932
  hypo

SEQ ID NO: 378104 - DNA, 37 bp, Homo sapiens; identical to SEQ ID NO: 350552
  chr7:27278957-27278994
  hypo

SEQ ID NO: 378105 - DNA, 136 bp, Homo sapiens; identical to SEQ ID NO: 350553
  chr7:27279659-27279795
  hypo

SEQ ID NO: 378106 - DNA, 456 bp, Homo sapiens; identical to SEQ ID NO: 353956
  chr7:27531253-27531709
  hypo

SEQ ID NO: 378107 - DNA, 88 bp, Homo sapiens; identical to SEQ ID NO: 339436
  chr7:27651058-27651146
  hypo

SEQ ID NO: 378108 - DNA, 31 bp, Homo sapiens; identical to SEQ ID NO: 211454
  chr7:27686737-27686768
  hypo

SEQ ID NO: 378109 - DNA, 45 bp, Homo sapiens; identical to SEQ ID NO: 353958
  chr7:27686815-27686860
  hypo

SEQ ID NO: 378110 - DNA, 126 bp, Homo sapiens; identical to SEQ ID NO: 339438
  chr7:27831654-27831780
  hypo

SEQ ID NO: 378111 - DNA, 189 bp, Homo sapiens; identical to SEQ ID NO: 348220
  chr7:27907637-27907826
  hypo

SEQ ID NO: 378112 - DNA, 70 bp, Homo sapiens; identical to SEQ ID NO: 348221
  chr7:27908068-27908138
  hypo

SEQ ID NO: 378113 - DNA, 120 bp, Homo sapiens; identical to SEQ ID NO: 339440
  chr7:27914823-27914943
  hypo

SEQ ID NO: 378114 - DNA, 37 bp, Homo sapiens; identical to SEQ ID NO: 200915
  chr7:29186197-29186234
  hypo

SEQ ID NO: 378115 - DNA, 496 bp, Homo sapiens; identical to SEQ ID NO: 200916
  chr7:29234008-29234504
  hypo

SEQ ID NO: 378116 - DNA, 159 bp, Homo sapiens; identical to SEQ ID NO: 345272
  chr7:29234886-29235045
  hypo

SEQ ID NO: 378117 - DNA, 62 bp, Homo sapiens; identical to SEQ ID NO: 339445
  chr7:29390389-29390451
  hypo

SEQ ID NO: 378118 - DNA, 94 bp, Homo sapiens; identical to SEQ ID NO: 339446
  chr7:30205901-30205995
  hypo

SEQ ID NO: 378119 - DNA, 34 bp, Homo sapiens; identical to SEQ ID NO: 339447
  chr7:30341584-30341618
  hypo

SEQ ID NO: 378120 - DNA, 54 bp, Homo sapiens; identical to SEQ ID NO: 339448
  chr7:30599500-30599554
  hypo

SEQ ID NO: 378121 - DNA, 53 bp, Homo sapiens
  chr7:30603338-30603391
  hypo
cgactcaccgttctggaggctggaagaccaagatcaaagtgttggccgagcca

SEQ ID NO: 378122 - DNA, 110 bp, Homo sapiens
  chr7:30603436-30603546
  hypo
agccccaggcatttgtggcgtgtggcagcatctctccgatctctgcctccatcttcacacggcggtctctgctctgtgtgtgtccagatttccctcttcttaataaggac

SEQ ID NO: 378123 - DNA, 126 bp, Homo sapiens; identical to SEQ ID NO: 339450
  chr7:30656768-30656894
  hypo

SEQ ID NO: 378124 - DNA, 123 bp, Homo sapiens; identical to SEQ ID NO: 339451
  chr7:30675617-30675740
  hypo

SEQ ID NO: 378125 - DNA, 175 bp, Homo sapiens; identical to SEQ ID NO: 339453
  chr7:30972844-30973019
  hypo

SEQ ID NO: 378126 - DNA, 277 bp, Homo sapiens; identical to SEQ ID NO: 339454
  chr7:31032061-31032338
  hypo

SEQ ID NO: 378127 - DNA, 69 bp, Homo sapiens; identical to SEQ ID NO: 200930
  chr7:31091826-31091895
  hypo

SEQ ID NO: 378128 - DNA, 89 bp, Homo sapiens; identical to SEQ ID NO: 339457
  chr7:32609681-32609770
  hypo

SEQ ID NO: 378129 - DNA, 338 bp, Homo sapiens; identical to SEQ ID NO: 358822
  chr7:32981774-32982112
  hypo

SEQ ID NO: 378130 - DNA, 687 bp, Homo sapiens; identical to SEQ ID NO: 371530
  chr7:32982270-32982957
  hypo

SEQ ID NO: 378131 - DNA, 212 bp, Homo sapiens; identical to SEQ ID NO: 358824
  chr7:32996732-32996944
  hypo

SEQ ID NO: 378132 - DNA, 155 bp, Homo sapiens; identical to SEQ ID NO: 358825
  chr7:32997454-32997609
  hypo

SEQ ID NO: 378133 - DNA, 254 bp, Homo sapiens; identical to SEQ ID NO: 339463
  chr7:36124398-36124652
  hypo

SEQ ID NO: 378134 - DNA, 490 bp, Homo sapiens; identical to SEQ ID NO: 339464
  chr7:36338992-36339482
  hypo

SEQ ID NO: 378135 - DNA, 335 bp, Homo sapiens; identical to SEQ ID NO: 339465
  chr7:36352569-36352904
  hypo

SEQ ID NO: 378136 - DNA, 543 bp, Homo sapiens; identical to SEQ ID NO: 364367
  chr7:36894954-36895497
  hypo

SEQ ID NO: 378137 - DNA, 168 bp, Homo sapiens; identical to SEQ ID NO: 345273
  chr7:37960958-37961126
  hypo

SEQ ID NO: 378138 - DNA, 257 bp, Homo sapiens; identical to SEQ ID NO: 339469
  chr7:38725412-38725669
  hypo

SEQ ID NO: 378139 - DNA, 41 bp, Homo sapiens; identical to SEQ ID NO: 339471
  chr7:39503999-39504040
  hypo

SEQ ID NO: 378140 - DNA, 259 bp, Homo sapiens; identical to SEQ ID NO: 364371
  chr7:42237185-42237444
  hypo

SEQ ID NO: 378141 - DNA, 408 bp, Homo sapiens; identical to SEQ ID NO: 200954
  chr7:42276904-42277312
  hypo

SEQ ID NO: 378142 - DNA, 60 bp, Homo sapiens; identical to SEQ ID NO: 200955
  chr7:42277588-42277648
  hypo

SEQ ID NO: 378143 - DNA, 180 bp, Homo sapiens; identical to SEQ ID NO: 339474
  chr7:42834387-42834567
  hypo

SEQ ID NO: 378144 - DNA, 173 bp, Homo sapiens; identical to SEQ ID NO: 339475
  chr7:43116313-43116486
  hypo

SEQ ID NO: 378145 - DNA, 271 bp, Homo sapiens; identical to SEQ ID NO: 353972
  chr7:44153157-44153428
  hypo

SEQ ID NO: 378146 - DNA, 38 bp, Homo sapiens; identical to SEQ ID NO: 350573
  chr7:44364447-44364485
  hypo

SEQ ID NO: 378147 - DNA, 369 bp, Homo sapiens; identical to SEQ ID NO: 346904
  chr7:44365258-44365627
  hypo

SEQ ID NO: 378148 - DNA, 190 bp, Homo sapiens; identical to SEQ ID NO: 364378
  chr7:44431034-44431224
  hypo

SEQ ID NO: 378149 - DNA, 112 bp, Homo sapiens; identical to SEQ ID NO: 339481
  chr7:44611096-44611208
  hypo

SEQ ID NO: 378150 - DNA, 51 bp, Homo sapiens; identical to SEQ ID NO: 348228
  chr7:44740672-44740723
  hypo

SEQ ID NO: 378151 - DNA, 366 bp, Homo sapiens; identical to SEQ ID NO: 364381
  chr7:44746549-44746915
  hypo

SEQ ID NO: 378152 - DNA, 79 bp, Homo sapiens; identical to SEQ ID NO: 364382
  chr7:44746945-44747024
  hypo

SEQ ID NO: 378153 - DNA, 160 bp, Homo sapiens; identical to SEQ ID NO: 350576
  chr7:44924093-44924253
  hypo

SEQ ID NO: 378154 - DNA, 309 bp, Homo sapiens; identical to SEQ ID NO: 200961
  chr7:44924469-44924778
  hypo

SEQ ID NO: 378155 - DNA, 149 bp, Homo sapiens; identical to SEQ ID NO: 339487
  chr7:45091550-45091699
  hypo

SEQ ID NO: 378156 - DNA, 47 bp, Homo sapiens; identical to SEQ ID NO: 364386
  chr7:45222971-45223018
  hypo

SEQ ID NO: 378157 - DNA, 168 bp, Homo sapiens; identical to SEQ ID NO: 358843
  chr7:45299683-45299851
  hypo

SEQ ID NO: 378158 - DNA, 93 bp, Homo sapiens; identical to SEQ ID NO: 339491
  chr7:47370861-47370954
  hypo

SEQ ID NO: 378159 - DNA, 77 bp, Homo sapiens; identical to SEQ ID NO: 353979
  chr7:47515282-47515359
  hypo

SEQ ID NO: 378160 - DNA, 147 bp, Homo sapiens; identical to SEQ ID NO: 353980
  chr7:47515405-47515552
  hypo

SEQ ID NO: 378161 - DNA, 437 bp, Homo sapiens; identical to SEQ ID NO: 339493
  chr7:47605260-47605697
  hypo

SEQ ID NO: 378162 - DNA, 219 bp, Homo sapiens; identical to SEQ ID NO: 371555
  chr7:47621704-47621923
  hypo

SEQ ID NO: 378163 - DNA, 58 bp, Homo sapiens; identical to SEQ ID NO: 339495
  chr7:47639927-47639985
  hypo

SEQ ID NO: 378164 - DNA, 94 bp, Homo sapiens; identical to SEQ ID NO: 339497
  chr7:48147036-48147130
  hypo

SEQ ID NO: 378165 - DNA, 95 bp, Homo sapiens; identical to SEQ ID NO: 353982
  chr7:50251628-50251723
  hypo

SEQ ID NO: 378166 - DNA, 102 bp, Homo sapiens; identical to SEQ ID NO: 345274
  chr7:50344738-50344840
  hypo

SEQ ID NO: 378167 - DNA, 56 bp, Homo sapiens; identical to SEQ ID NO: 345910
  chr7:50560501-50560557
  hypo

SEQ ID NO: 378168 - DNA, 220 bp, Homo sapiens; identical to SEQ ID NO: 345911
  chr7:50560663-50560883
  hypo

SEQ ID NO: 378169 - DNA, 590 bp, Homo sapiens; identical to SEQ ID NO: 339503
  chr7:50660402-50660992
  hypo

SEQ ID NO: 378170 - DNA, 178 bp, Homo sapiens; identical to SEQ ID NO: 339504
  chr7:50687526-50687704
  hypo

SEQ ID NO: 378171 - DNA, 177 bp, Homo sapiens; identical to SEQ ID NO: 364399
  chr7:50715837-50716014
  hypo

SEQ ID NO: 378172 - DNA, 88 bp, Homo sapiens; identical to SEQ ID NO: 339506
  chr7:50823307-50823395
  hypo

SEQ ID NO: 378173 - DNA, 332 bp, Homo sapiens; identical to SEQ ID NO: 339507
  chr7:51092672-51093004
  hypo

SEQ ID NO: 378174 - DNA, 154 bp, Homo sapiens; identical to SEQ ID NO: 353987
  chr7:52736911-52737065
  hypo

SEQ ID NO: 378175 - DNA, 587 bp, Homo sapiens; identical to SEQ ID NO: 307760
  chr7:53103586-53104173
  hypo

SEQ ID NO: 378176 - DNA, 64 bp, Homo sapiens; identical to SEQ ID NO: 353989
  chr7:53104233-53104297
  hypo

SEQ ID NO: 378177 - DNA, 619 bp, Homo sapiens; identical to SEQ ID NO: 353990
  chr7:55145980-55146599
  hypo

SEQ ID NO: 378178 - DNA, 45 bp, Homo sapiens
  chr7:55223544-55223589
  hypo
cggctcgtgcgtccgagcctgtggggccgacagctatgagatgga

SEQ ID NO: 378179 - DNA, 87 bp, Homo sapiens
  chr7:55506201-55506288
  hypo
cggtaaccatgacaccaaagtcaacactcggagaaagtgaagaggctggcaggtgaataagtgtggacagggcgcctcacagagcag

SEQ ID NO: 378180 - DNA, 573 bp, Homo sapiens; identical to SEQ ID NO: 339513
  chr7:55553240-55553813
  hypo

SEQ ID NO: 378181 - DNA, 158 bp, Homo sapiens; identical to SEQ ID NO: 339514
  chr7:55571348-55571506
  hypo

SEQ ID NO: 378182 - DNA, 131 bp, Homo sapiens; identical to SEQ ID NO: 339515
  chr7:56037272-56037403
  hypo

SEQ ID NO: 378183 - DNA, 56 bp, Homo sapiens; identical to SEQ ID NO: 339516
  chr7:56075649-56075705
  hypo

SEQ ID NO: 378184 - DNA, 102 bp, Homo sapiens
  chr7:57247618-57247720
  hypo
cgtcggttgtccaaatcggcagggaagctccagaggccacccagctccttgggctcccgcgacggactctccttggggtacagcatcccgccttgcagtgcc

SEQ ID NO: 378185 - DNA, 158 bp, Homo sapiens
  chr7:57247887-57248045
  hypo
gggcgagtgccaggcctagaggggcgggatgggcctggcgctgcccagtggggcctgtggctggaaccccgggctaggcctttggggaagcgggaccctcactctcagccccagccaagaagggcaaggtcggttccccaccccagcacagtctggac

SEQ ID NO: 378186 - DNA, 294 bp, Homo sapiens; identical to SEQ ID NO: 339518
  chr7:57324312-57324606
  hypo

SEQ ID NO: 378187 - DNA, 188 bp, Homo sapiens; identical to SEQ ID NO: 339519
  chr7:57706384-57706572
  hypo

SEQ ID NO: 378188 - DNA, 247 bp, Homo sapiens; identical to SEQ ID NO: 339520
  chr7:57706651-57706898
  hypo

SEQ ID NO: 378189 - DNA, 118 bp, Homo sapiens; identical to SEQ ID NO: 339521
  chr7:63569143-63569261
  hypo

SEQ ID NO: 378190 - DNA, 53 bp, Homo sapiens; identical to SEQ ID NO: 364411
  chr7:63652630-63652683
  hypo

SEQ ID NO: 378191 - DNA, 122 bp, Homo sapiens; identical to SEQ ID NO: 364412
  chr7:63652839-63652961
  hypo

SEQ ID NO: 378192 - DNA, 405 bp, Homo sapiens; identical to SEQ ID NO: 339524
  chr7:64146495-64146900
  hypo

SEQ ID NO: 378193 - DNA, 494 bp, Homo sapiens; identical to SEQ ID NO: 339525
  chr7:64332690-64333184
  hypo

SEQ ID NO: 378194 - DNA, 56 bp, Homo sapiens
  chr7:64345105-64345161
  hypo
cggattcttgcacacagactctttcgggaatggagtccaaagagaagttcccagcg

SEQ ID NO: 378195 - DNA, 241 bp, Homo sapiens
  chr7:64345211-64345452
  hypo
gagacggcccgaggatgccctatggtagttacttttaggcttccacagtgattgtcgcaggcagcattttccctagactaggccggctctgccttcccattttcctctgctcaggcaggctgacagccctgacagccctgacagcctggccccagcacctgcctcgcggattcgcatgcgccagtcgcgggacacctgtcgcgagcggtgagccttggctcgcgtgtcagtgtatgccacc

SEQ ID NO: 378196 - DNA, 412 bp, Homo sapiens; identical to SEQ ID NO: 200989
  chr7:64349470-64349882
  hypo

SEQ ID NO: 378197 - DNA, 48 bp, Homo sapiens; identical to SEQ ID NO: 371572
  chr7:64350036-64350084
  hypo

SEQ ID NO: 378198 - DNA, 60 bp, Homo sapiens; identical to SEQ ID NO: 200992
  chr7:64974448-64974508
  hypo

SEQ ID NO: 378199 - DNA, 51 bp, Homo sapiens; identical to SEQ ID NO: 346909
  chr7:65037711-65037762
  hypo

SEQ ID NO: 378200 - DNA, 91 bp, Homo sapiens; identical to SEQ ID NO: 353996
  chr7:65553884-65553975
  hypo

SEQ ID NO: 378201 - DNA, 314 bp, Homo sapiens; identical to SEQ ID NO: 353997
  chr7:65554018-65554332
  hypo

SEQ ID NO: 378202 - DNA, 54 bp, Homo sapiens; identical to SEQ ID NO: 339532
  chr7:65562589-65562643
  hypo

SEQ ID NO: 378203 - DNA, 245 bp, Homo sapiens; identical to SEQ ID NO: 353998
  chr7:65877904-65878149
  hypo

SEQ ID NO: 378204 - DNA, 96 bp, Homo sapiens; identical to SEQ ID NO: 339534
  chr7:66204269-66204365
  hypo

SEQ ID NO: 378205 - DNA, 90 bp, Homo sapiens; identical to SEQ ID NO: 354000
  chr7:66293278-66293368
  hypo

SEQ ID NO: 378206 - DNA, 115 bp, Homo sapiens; identical to SEQ ID NO: 339536
  chr7:67353388-67353503
  hypo

SEQ ID NO: 378207 - DNA, 67 bp, Homo sapiens; identical to SEQ ID NO: 339537
  chr7:67648558-67648625
  hypo

SEQ ID NO: 378208 - DNA, 156 bp, Homo sapiens; identical to SEQ ID NO: 350587
  chr7:69062203-69062359
  hypo

SEQ ID NO: 378209 - DNA, 421 bp, Homo sapiens; identical to SEQ ID NO: 201000
  chr7:69063038-69063459
  hypo

SEQ ID NO: 378210 - DNA, 318 bp, Homo sapiens; identical to SEQ ID NO: 201001
  chr7:69063552-69063870
  hypo

SEQ ID NO: 378211 - DNA, 282 bp, Homo sapiens; identical to SEQ ID NO: 201002
  chr7:69063900-69064182
  hypo

SEQ ID NO: 378212 - DNA, 112 bp, Homo sapiens; identical to SEQ ID NO: 339539
  chr7:70543004-70543116
  hypo

SEQ ID NO: 378213 - DNA, 121 bp, Homo sapiens; identical to SEQ ID NO: 364426
  chr7:76106210-76106331
  hypo

SEQ ID NO: 378214 - DNA, 102 bp, Homo sapiens; identical to SEQ ID NO: 364427
  chr7:76106380-76106482
  hypo

SEQ ID NO: 378215 - DNA, 75 bp, Homo sapiens; identical to SEQ ID NO: 364428
  chr7:76631604-76631679
  hypo

SEQ ID NO: 378216 - DNA, 87 bp, Homo sapiens; identical to SEQ ID NO: 364429
  chr7:77309610-77309697
  hypo

SEQ ID NO: 378217 - DNA, 163 bp, Homo sapiens; identical to SEQ ID NO: 354005
  chr7:77324199-77324362
  hypo

SEQ ID NO: 378218 - DNA, 441 bp, Homo sapiens; identical to SEQ ID NO: 285106
  chr7:79082579-79083020
  hypo

SEQ ID NO: 378219 - DNA, 236 bp, Homo sapiens; identical to SEQ ID NO: 358878
  chr7:80548021-80548257
  hypo

SEQ ID NO: 378220 - DNA, 446 bp, Homo sapiens; identical to SEQ ID NO: 358879
  chr7:80548403-80548849
  hypo

SEQ ID NO: 378221 - DNA, 492 bp, Homo sapiens; identical to SEQ ID NO: 364434
  chr7:86415591-86416083
  hypo

SEQ ID NO: 378222 - DNA, 37 bp, Homo sapiens; identical to SEQ ID NO: 364435
  chr7:86416125-86416162
  hypo

SEQ ID NO: 378223 - DNA, 45 bp, Homo sapiens; identical to SEQ ID NO: 346914
  chr7:87258398-87258443
  hypo

SEQ ID NO: 378224 - DNA, 215 bp, Homo sapiens; identical to SEQ ID NO: 285133
  chr7:87563614-87563829
  hypo

SEQ ID NO: 378225 - DNA, 439 bp, Homo sapiens; identical to SEQ ID NO: 285134
  chr7:87563890-87564329
  hypo

SEQ ID NO: 378226 - DNA, 207 bp, Homo sapiens; identical to SEQ ID NO: 350608
  chr7:87564359-87564566
  hypo

SEQ ID NO: 378227 - DNA, 636 bp, Homo sapiens; identical to SEQ ID NO: 358892
  chr7:90225109-90225745
  hypo

SEQ ID NO: 378228 - DNA, 211 bp, Homo sapiens; identical to SEQ ID NO: 201040
  chr7:90226057-90226268
  hypo

SEQ ID NO: 378229 - DNA, 352 bp, Homo sapiens; identical to SEQ ID NO: 354013
  chr7:97925221-97925573
  hypo

SEQ ID NO: 378230 - DNA, 235 bp, Homo sapiens; identical to SEQ ID NO: 358902
  chr7:98030416-98030651
  hypo

SEQ ID NO: 378231 - DNA, 336 bp, Homo sapiens; identical to SEQ ID NO: 339558
  chr7:98598608-98598944
  hypo

SEQ ID NO: 378232 - DNA, 170 bp, Homo sapiens; identical to SEQ ID NO: 339559
  chr7:98599246-98599416
  hypo

SEQ ID NO: 378233 - DNA, 201 bp, Homo sapiens; identical to SEQ ID NO: 339560
  chr7:98639739-98639940
  hypo

SEQ ID NO: 378234 - DNA, 216 bp, Homo sapiens; identical to SEQ ID NO: 339561
  chr7:98955444-98955660
  hypo

SEQ ID NO: 378235 - DNA, 47 bp, Homo sapiens; identical to SEQ ID NO: 354015
  chr7:98966410-98966457
  hypo

SEQ ID NO: 378236 - DNA, 77 bp, Homo sapiens; identical to SEQ ID NO: 201060
  chr7:98971600-98971677
  hypo

SEQ ID NO: 378237 - DNA, 396 bp, Homo sapiens; identical to SEQ ID NO: 346916
  chr7:98971810-98972206
  hypo

SEQ ID NO: 378238 - DNA, 215 bp, Homo sapiens; identical to SEQ ID NO: 339565
  chr7:99084631-99084846
  hypo

SEQ ID NO: 378239 - DNA, 215 bp, Homo sapiens; identical to SEQ ID NO: 201064
  chr7:99156600-99156815
  hypo

SEQ ID NO: 378240 - DNA, 77 bp, Homo sapiens; identical to SEQ ID NO: 345277
  chr7:99156982-99157059
  hypo

SEQ ID NO: 378241 - DNA, 70 bp, Homo sapiens; identical to SEQ ID NO: 364451
  chr7:99723240-99723310
  hypo

SEQ ID NO: 378242 - DNA, 260 bp, Homo sapiens; identical to SEQ ID NO: 339568
  chr7:99819908-99820168
  hypo

SEQ ID NO: 378243 - DNA, 87 bp, Homo sapiens; identical to SEQ ID NO: 339569
  chr7:100030648-100030735
  hypo

SEQ ID NO: 378244 - DNA, 342 bp, Homo sapiens; identical to SEQ ID NO: 364454
  chr7:100034752-100035094
  hypo

SEQ ID NO: 378245 - DNA, 42 bp, Homo sapiens; identical to SEQ ID NO: 364455
  chr7:100035124-100035166
  hypo

SEQ ID NO: 378246 - DNA, 236 bp, Homo sapiens; identical to SEQ ID NO: 339571
  chr7:100064586-100064822
  hypo

SEQ ID NO: 378247 - DNA, 157 bp, Homo sapiens; identical to SEQ ID NO: 339572
  chr7:100179313-100179470
  hypo

SEQ ID NO: 378248 - DNA, 188 bp, Homo sapiens; identical to SEQ ID NO: 354023
  chr7:100179940-100180128
  hypo

SEQ ID NO: 378249 - DNA, 831 bp, Homo sapiens; identical to SEQ ID NO: 339574
  chr7:100402457-100403288
  hypo

SEQ ID NO: 378250 - DNA, 217 bp, Homo sapiens; identical to SEQ ID NO: 339575
  chr7:100405032-100405249
  hypo

SEQ ID NO: 378251 - DNA, 380 bp, Homo sapiens; identical to SEQ ID NO: 339576
  chr7:100421158-100421538
  hypo

SEQ ID NO: 378252 - DNA, 74 bp, Homo sapiens; identical to SEQ ID NO: 339578
  chr7:100838061-100838135
  hypo

SEQ ID NO: 378253 - DNA, 201 bp, Homo sapiens; identical to SEQ ID NO: 339579
  chr7:100849441-100849642
  hypo

SEQ ID NO: 378254 - DNA, 487 bp, Homo sapiens; identical to SEQ ID NO: 350630
  chr7:101460542-101461029
  hypo

SEQ ID NO: 378255 - DNA, 116 bp, Homo sapiens; identical to SEQ ID NO: 354027
  chr7:101475674-101475790
  hypo

SEQ ID NO: 378256 - DNA, 236 bp, Homo sapiens; identical to SEQ ID NO: 354028
  chr7:101475858-101476094
  hypo

SEQ ID NO: 378257 - DNA, 132 bp, Homo sapiens; identical to SEQ ID NO: 339582
  chr7:101536683-101536815
  hypo

SEQ ID NO: 378258 - DNA, 332 bp, Homo sapiens; identical to SEQ ID NO: 354030
  chr7:101566736-101567068
  hypo

SEQ ID NO: 378259 - DNA, 196 bp, Homo sapiens; identical to SEQ ID NO: 345915
  chr7:101603073-101603269
  hypo

SEQ ID NO: 378260 - DNA, 242 bp, Homo sapiens; identical to SEQ ID NO: 345916
  chr7:101603308-101603550
  hypo

SEQ ID NO: 378261 - DNA, 288 bp, Homo sapiens; identical to SEQ ID NO: 339585
  chr7:101616410-101616698
  hypo

SEQ ID NO: 378262 - DNA, 81 bp, Homo sapiens; identical to SEQ ID NO: 354033
  chr7:101627660-101627741
  hypo

SEQ ID NO: 378263 - DNA, 282 bp, Homo sapiens; identical to SEQ ID NO: 354034
  chr7:101627846-101628128
  hypo

SEQ ID NO: 378264 - DNA, 429 bp, Homo sapiens; identical to SEQ ID NO: 339587
  chr7:101649223-101649652
  hypo

SEQ ID NO: 378265 - DNA, 311 bp, Homo sapiens; identical to SEQ ID NO: 348244
  chr7:101652279-101652590
  hypo

SEQ ID NO: 378266 - DNA, 115 bp, Homo sapiens; identical to SEQ ID NO: 354037
  chr7:102782159-102782274
  hypo

SEQ ID NO: 378267 - DNA, 176 bp, Homo sapiens; identical to SEQ ID NO: 371652
  chr7:103086734-103086910
  hypo

SEQ ID NO: 378268 - DNA, 63 bp, Homo sapiens; identical to SEQ ID NO: 339592
  chr7:104917805-104917868
  hypo

SEQ ID NO: 378269 - DNA, 465 bp, Homo sapiens; identical to SEQ ID NO: 339593
  chr7:105254063-105254528
  hypo

SEQ ID NO: 378270 - DNA, 31 bp, Homo sapiens; identical to SEQ ID NO: 354039
  chr7:105279344-105279375
  hypo

SEQ ID NO: 378271 - DNA, 75 bp, Homo sapiens; identical to SEQ ID NO: 339595
  chr7:105280248-105280323
  hypo

SEQ ID NO: 378272 - DNA, 147 bp, Homo sapiens; identical to SEQ ID NO: 354041
  chr7:106622687-106622834
  hypo

SEQ ID NO: 378273 - DNA, 251 bp, Homo sapiens; identical to SEQ ID NO: 201131
  chr7:106684920-106685171
  hypo

SEQ ID NO: 378274 - DNA, 118 bp, Homo sapiens; identical to SEQ ID NO: 345917
  chr7:107483576-107483694
  hypo

SEQ ID NO: 378275 - DNA, 482 bp, Homo sapiens; identical to SEQ ID NO: 285340
  chr7:113726887-113727369
  hypo

SEQ ID NO: 378276 - DNA, 750 bp, Homo sapiens; identical to SEQ ID NO: 350641
  chr7:120496826-120497576
  hypo

SEQ ID NO: 378277 - DNA, 51 bp, Homo sapiens; identical to SEQ ID NO: 350645
  chr7:126891155-126891206
  hypo

SEQ ID NO: 378278 - DNA, 37 bp, Homo sapiens; identical to SEQ ID NO: 285393
  chr7:126988120-126988157
  hypo

SEQ ID NO: 378279 - DNA, 56 bp, Homo sapiens; identical to SEQ ID NO: 350648
  chr7:126988206-126988262
  hypo

SEQ ID NO: 378280 - DNA, 87 bp, Homo sapiens; identical to SEQ ID NO: 354049
  chr7:127371042-127371129
  hypo

SEQ ID NO: 378281 - DNA, 252 bp, Homo sapiens; identical to SEQ ID NO: 354050
  chr7:127371249-127371501
  hypo

SEQ ID NO: 378282 - DNA, 174 bp, Homo sapiens; identical to SEQ ID NO: 339608
  chr7:127670460-127670634
  hypo

SEQ ID NO: 378283 - DNA, 208 bp, Homo sapiens; identical to SEQ ID NO: 285400
  chr7:127671450-127671658
  hypo

SEQ ID NO: 378284 - DNA, 67 bp, Homo sapiens; identical to SEQ ID NO: 339610
  chr7:127673475-127673542
  hypo

SEQ ID NO: 378285 - DNA, 90 bp, Homo sapiens; identical to SEQ ID NO: 339611
  chr7:127679932-127680022
  hypo

SEQ ID NO: 378286 - DNA, 94 bp, Homo sapiens; identical to SEQ ID NO: 371693
  chr7:128509984-128510078
  hypo

SEQ ID NO: 378287 - DNA, 188 bp, Homo sapiens; identical to SEQ ID NO: 339616
  chr7:128597312-128597500
  hypo

SEQ ID NO: 378288 - DNA, 56 bp, Homo sapiens; identical to SEQ ID NO: 339617
  chr7:128602091-128602147
  hypo

SEQ ID NO: 378289 - DNA, 264 bp, Homo sapiens; identical to SEQ ID NO: 285416
  chr7:128828640-128828904
  hypo

SEQ ID NO: 378290 - DNA, 46 bp, Homo sapiens; identical to SEQ ID NO: 348248
  chr7:129330248-129330294
  hypo

SEQ ID NO: 378291 - DNA, 89 bp, Homo sapiens; identical to SEQ ID NO: 348249
  chr7:129330351-129330440
  hypo

SEQ ID NO: 378292 - DNA, 194 bp, Homo sapiens; identical to SEQ ID NO: 339621
  chr7:129470923-129471117
  hypo

SEQ ID NO: 378293 - DNA, 177 bp, Homo sapiens; identical to SEQ ID NO: 348251
  chr7:129483449-129483626
  hypo

SEQ ID NO: 378294 - DNA, 311 bp, Homo sapiens; identical to SEQ ID NO: 339623
  chr7:129780417-129780728
  hypo

SEQ ID NO: 378295 - DNA, 252 bp, Homo sapiens
  chr7:129782272-129782524
  hypo
cgcccctcctgggggccgaggactgtcaccatgtcactacggcactctccagctgctgaccaaagccctcgctaaccgcagccctgccatactctgggtctttcctctggagcaaggtgaagagactgcagcgaggcgtggaattgggaagctcttctggttttattaaaaactcgttccaccacaggagtcagcctggccactcaggtgtggggcgggtctctcctcatttagctttcacctgcgtgccca

SEQ ID NO: 378296 - DNA, 379 bp, Homo sapiens
  chr7:129782554-129782933
  hypo
ttgtagggagtaagcatcctgccctggcaaagctgagtgaacgtgggtagcttcagcccagtgaagcagcagcagggacgcctgtggaaacctgggtggaggtgccttctgaccttggtttgtctgggccagggggcgaatgcttctggcagtggagcttccaggcccggaaaacccaggcctcttctcctcacgtgggccctcaggtgcttgtggactgcccggagacagaacagaactgagggtgggagggcctgcttttgcctgcagaacaccctgaaatgtcccatttacccagctctctccagggcccgcacagtccaaacttctctggcctcaactcctaccactgtgcctttgctcactctcgaccagccac

SEQ ID NO: 378297 - DNA, 31 bp, Homo sapiens; identical to SEQ ID NO: 364499
  chr7:129800434-129800465
  hypo

SEQ ID NO: 378298 - DNA, 55 bp, Homo sapiens; identical to SEQ ID NO: 354057
  chr7:129846024-129846079
  hypo

SEQ ID NO: 378299 - DNA, 72 bp, Homo sapiens; identical to SEQ ID NO: 354058
  chr7:129846109-129846181
  hypo

SEQ ID NO: 378300 - DNA, 31 bp, Homo sapiens; identical to SEQ ID NO: 345918
  chr7:131041484-131041515
  hypo

SEQ ID NO: 378301 - DNA, 61 bp, Homo sapiens; identical to SEQ ID NO: 345919
  chr7:132418888-132418949
  hypo

SEQ ID NO: 378302 - DNA, 42 bp, Homo sapiens; identical to SEQ ID NO: 345920
  chr7:132419066-132419108
  hypo

SEQ ID NO: 378303 - DNA, 58 bp, Homo sapiens; identical to SEQ ID NO: 339630
  chr7:132527738-132527796
  hypo

SEQ ID NO: 378304 - DNA, 141 bp, Homo sapiens; identical to SEQ ID NO: 339631
  chr7:133630779-133630920
  hypo

SEQ ID NO: 378305 - DNA, 163 bp, Homo sapiens; identical to SEQ ID NO: 339633
  chr7:134613459-134613622
  hypo

SEQ ID NO: 378306 - DNA, 128 bp, Homo sapiens; identical to SEQ ID NO: 339634
  chr7:134862682-134862810
  hypo

SEQ ID NO: 378307 - DNA, 157 bp, Homo sapiens; identical to SEQ ID NO: 348255
  chr7:134880754-134880911
  hypo

SEQ ID NO: 378308 - DNA, 211 bp, Homo sapiens; identical to SEQ ID NO: 348256
  chr7:134880941-134881152
  hypo

SEQ ID NO: 378309 - DNA, 177 bp, Homo sapiens; identical to SEQ ID NO: 339636
  chr7:134898284-134898461
  hypo

SEQ ID NO: 378310 - DNA, 85 bp, Homo sapiens; identical to SEQ ID NO: 345921
  chr7:134918319-134918404
  hypo

SEQ ID NO: 378311 - DNA, 132 bp, Homo sapiens; identical to SEQ ID NO: 345922
  chr7:134918661-134918793
  hypo

SEQ ID NO: 378312 - DNA, 209 bp, Homo sapiens; identical to SEQ ID NO: 364512
  chr7:135412177-135412386
  hypo

SEQ ID NO: 378313 - DNA, 165 bp, Homo sapiens; identical to SEQ ID NO: 339639
  chr7:135611103-135611268
  hypo

SEQ ID NO: 378314 - DNA, 151 bp, Homo sapiens; identical to SEQ ID NO: 339640
  chr7:137564632-137564783
  hypo

SEQ ID NO: 378315 - DNA, 169 bp, Homo sapiens; identical to SEQ ID NO: 364515
  chr7:138042035-138042204
  hypo

SEQ ID NO: 378316 - DNA, 75 bp, Homo sapiens; identical to SEQ ID NO: 339642
  chr7:138993466-138993541
  hypo

SEQ ID NO: 378317 - DNA, 256 bp, Homo sapiens; identical to SEQ ID NO: 339645
  chr7:139257804-139258060
  hypo

SEQ ID NO: 378318 - DNA, 241 bp, Homo sapiens; identical to SEQ ID NO: 339646
  chr7:139690720-139690961
  hypo

SEQ ID NO: 378319 - DNA, 176 bp, Homo sapiens; identical to SEQ ID NO: 339647
  chr7:139717431-139717607
  hypo

SEQ ID NO: 378320 - DNA, 362 bp, Homo sapiens; identical to SEQ ID NO: 345285
  chr7:139930346-139930708
  hypo

SEQ ID NO: 378321 - DNA, 31 bp, Homo sapiens; identical to SEQ ID NO: 345924
  chr7:140156493-140156524
  hypo

SEQ ID NO: 378322 - DNA, 88 bp, Homo sapiens; identical to SEQ ID NO: 339650
  chr7:140156968-140157056
  hypo

SEQ ID NO: 378323 - DNA, 183 bp, Homo sapiens; identical to SEQ ID NO: 285462
  chr7:140340368-140340551
  hypo

SEQ ID NO: 378324 - DNA, 140 bp, Homo sapiens; identical to SEQ ID NO: 201208
  chr7:140774419-140774559
  hypo

SEQ ID NO: 378325 - DNA, 999 bp, Homo sapiens; identical to SEQ ID NO: 333283
  chr7:142985430-142986429
  hypo

SEQ ID NO: 378326 - DNA, 134 bp, Homo sapiens; identical to SEQ ID NO: 339656
  chr7:147354952-147355086
  hypo

SEQ ID NO: 378327 - DNA, 669 bp, Homo sapiens; identical to SEQ ID NO: 333286
  chr7:148036392-148037061
  hypo

SEQ ID NO: 378328 - DNA, 202 bp, Homo sapiens; identical to SEQ ID NO: 339658
  chr7:148079472-148079674
  hypo

SEQ ID NO: 378329 - DNA, 125 bp, Homo sapiens; identical to SEQ ID NO: 339659
  chr7:148448819-148448944
  hypo

SEQ ID NO: 378330 - DNA, 503 bp, Homo sapiens; identical to SEQ ID NO: 339660
  chr7:148480954-148481457
  hypo

SEQ ID NO: 378331 - DNA, 168 bp, Homo sapiens; identical to SEQ ID NO: 333288
  chr7:148523540-148523708
  hypo

SEQ ID NO: 378332 - DNA, 163 bp, Homo sapiens; identical to SEQ ID NO: 345926
  chr7:148851234-148851397
  hypo

SEQ ID NO: 378333 - DNA, 130 bp, Homo sapiens
  chr7:148884017-148884147
  hypo
atttttaatgtttttgtaagaataaggattattgtcatgaaaaaggtcctggaaaacaagtcaggaggccagagttttaaccttgctttcagttttctcattcataatgtgaggataatacctagtttac

SEQ ID NO: 378334 - DNA, 98 bp, Homo sapiens; identical to SEQ ID NO: 339664
  chr7:148907697-148907795
  hypo

SEQ ID NO: 378335 - DNA, 158 bp, Homo sapiens; identical to SEQ ID NO: 339665
  chr7:148979109-148979267
  hypo

SEQ ID NO: 378336 - DNA, 135 bp, Homo sapiens; identical to SEQ ID NO: 364532
  chr7:149418013-149418148
  hypo

SEQ ID NO: 378337 - DNA, 117 bp, Homo sapiens; identical to SEQ ID NO: 339668
  chr7:150006604-150006721
  hypo

SEQ ID NO: 378338 - DNA, 112 bp, Homo sapiens; identical to SEQ ID NO: 339669
  chr7:150006790-150006902
  hypo

SEQ ID NO: 378339 - DNA, 99 bp, Homo sapiens; identical to SEQ ID NO: 211907
  chr7:150069580-150069679
  hypo

SEQ ID NO: 378340 - DNA, 114 bp, Homo sapiens; identical to SEQ ID NO: 211908
  chr7:150069820-150069934
  hypo

SEQ ID NO: 378341 - DNA, 115 bp, Homo sapiens; identical to SEQ ID NO: 364537
  chr7:150079390-150079505
  hypo

SEQ ID NO: 378342 - DNA, 127 bp, Homo sapiens; identical to SEQ ID NO: 364538
  chr7:150081308-150081435
  hypo

SEQ ID NO: 378343 - DNA, 846 bp, Homo sapiens; identical to SEQ ID NO: 333298
  chr7:150671471-150672317
  hypo

SEQ ID NO: 378344 - DNA, 351 bp, Homo sapiens; identical to SEQ ID NO: 333299
  chr7:150676178-150676529
  hypo

SEQ ID NO: 378345 - DNA, 112 bp, Homo sapiens; identical to SEQ ID NO: 346943
  chr7:150714968-150715080
  hypo

SEQ ID NO: 378346 - DNA, 295 bp, Homo sapiens; identical to SEQ ID NO: 285522
  chr7:150715323-150715618
  hypo

SEQ ID NO: 378347 - DNA, 340 bp, Homo sapiens; identical to SEQ ID NO: 345927
  chr7:150758626-150758966
  hypo

SEQ ID NO: 378348 - DNA, 148 bp, Homo sapiens; identical to SEQ ID NO: 348269
  chr7:150774065-150774213
  hypo

SEQ ID NO: 378349 - DNA, 346 bp, Homo sapiens; identical to SEQ ID NO: 308623
  chr7:150774358-150774704
  hypo

SEQ ID NO: 378350 - DNA, 960 bp, Homo sapiens; identical to SEQ ID NO: 333303
  chr7:150784079-150785039
  hypo

SEQ ID NO: 378351 - DNA, 312 bp, Homo sapiens; identical to SEQ ID NO: 364546
  chr7:150812868-150813180
  hypo

SEQ ID NO: 378352 - DNA, 114 bp, Homo sapiens; identical to SEQ ID NO: 364547
  chr7:150813210-150813324
  hypo

SEQ ID NO: 378353 - DNA, 557 bp, Homo sapiens; identical to SEQ ID NO: 339682
  chr7:150816833-150817390
  hypo

SEQ ID NO: 378354 - DNA, 370 bp, Homo sapiens; identical to SEQ ID NO: 364549
  chr7:150889157-150889527
  hypo

SEQ ID NO: 378355 - DNA, 370 bp, Homo sapiens; identical to SEQ ID NO: 333305
  chr7:151038589-151038959
  hypo

SEQ ID NO: 378356 - DNA, 271 bp, Homo sapiens; identical to SEQ ID NO: 339686
  chr7:151165408-151165679
  hypo

SEQ ID NO: 378357 - DNA, 211 bp, Homo sapiens; identical to SEQ ID NO: 339687
  chr7:151411325-151411536
  hypo

SEQ ID NO: 378358 - DNA, 137 bp, Homo sapiens; identical to SEQ ID NO: 339688
  chr7:151506379-151506516
  hypo

SEQ ID NO: 378359 - DNA, 968 bp, Homo sapiens; identical to SEQ ID NO: 358996
  chr7:151572574-151573542
  hypo

SEQ ID NO: 378360 - DNA, 697 bp, Homo sapiens; identical to SEQ ID NO: 346946
  chr7:151722447-151723144
  hypo

SEQ ID NO: 378361 - DNA, 34 bp, Homo sapiens; identical to SEQ ID NO: 346947
  chr7:151723206-151723240
  hypo

SEQ ID NO: 378362 - DNA, 195 bp, Homo sapiens; identical to SEQ ID NO: 339691
  chr7:151791364-151791559
  hypo

SEQ ID NO: 378363 - DNA, 154 bp, Homo sapiens; identical to SEQ ID NO: 339692
  chr7:151802406-151802560
  hypo

SEQ ID NO: 378364 - DNA, 146 bp, Homo sapiens; identical to SEQ ID NO: 339693
  chr7:152152776-152152922
  hypo

SEQ ID NO: 378365 - DNA, 313 bp, Homo sapiens; identical to SEQ ID NO: 339694
  chr7:152273159-152273472
  hypo

SEQ ID NO: 378366 - DNA, 193 bp, Homo sapiens; identical to SEQ ID NO: 339696
  chr7:152562704-152562897
  hypo

SEQ ID NO: 378367 - DNA, 219 bp, Homo sapiens; identical to SEQ ID NO: 339697
  chr7:152569939-152570158
  hypo

SEQ ID NO: 378368 - DNA, 273 bp, Homo sapiens; identical to SEQ ID NO: 364560
  chr7:154540240-154540513
  hypo

SEQ ID NO: 378369 - DNA, 127 bp, Homo sapiens; identical to SEQ ID NO: 354095
  chr7:154541944-154542071
  hypo

SEQ ID NO: 378370 - DNA, 135 bp, Homo sapiens; identical to SEQ ID NO: 354096
  chr7:154542290-154542425
  hypo

SEQ ID NO: 378371 - DNA, 172 bp, Homo sapiens; identical to SEQ ID NO: 339700
  chr7:155079954-155080126
  hypo

SEQ ID NO: 378372 - DNA, 139 bp, Homo sapiens; identical to SEQ ID NO: 339705
  chr7:155502704-155502843
  hypo

SEQ ID NO: 378373 - DNA, 238 bp, Homo sapiens; identical to SEQ ID NO: 211970
  chr7:155581980-155582218
  hypo

SEQ ID NO: 378374 - DNA, 711 bp, Homo sapiens
  chr7:155623753-155624464
  hypo
ggcaccaagggagagtgagttctgaccgggttgtcggggggtcagggactctgccctcagccactttggctgctggttctgccgagccactgcccgaacagcaccccggatgcacccgaggaggtgaggctctgcggaccgggtgccctgtgagtgacaggggagaggcccctgaggtttgcacagtgcctgtcacttctcaaagcacctccttcgttctggcaatttagtgagggaggctgggcagccggggctgtccattttatagaggaggacaccaagcctcagggagggagagggaagccggtggagccgggcagaagcctgtggagctgggtagaggccggcgggtttcccagcagcggtcttctgcatcttctggctgagtcctccgctgtcaggagaccccggcctgggccaggaggtccgattctgggatgcgaacgtggtggggctgttgccatagataccgatgtggtcaccagcctgaaacccttgagccacggagagatcagacggtggtccccactcctcagcctggagcctggcagagacgctcaaggaagagggtgggctgaccgcgcacgcctctcctttcttcatatcctgcgcggctcgggcgctgtgcaggaggcctgtgctcagcgaggagagagacagagagtgcagtgggaggagcgcggggtcggggggctctgcttcccacggtgc

SEQ ID NO: 378375 - DNA, 593 bp, Homo sapiens; identical to SEQ ID NO: 339709
  chr7:155679115-155679708
  hypo

SEQ ID NO: 378376 - DNA, 78 bp, Homo sapiens; identical to SEQ ID NO: 354099
  chr7:155898307-155898385
  hypo

SEQ ID NO: 378377 - DNA, 270 bp, Homo sapiens
  chr7:155913340-155913610
  hypo
cggggagggagatacagagatggcgaggcgcttcttcacgtgtcccacctgctctgatctgctccccgggagatacagagatggcgaggcgcttcttcacgtgtcccacctgctctgatctgctccccgggagatgcagagatggcgaggcgcttcttcacgtgtcccacttgcactgttctgctccccggctgctcactctccccctgatgtgacgcgttgtcagacatgaccaaatgccacggttacttgggagacaacagcagaaac

SEQ ID NO: 378378 - DNA, 288 bp, Homo sapiens; identical to SEQ ID NO: 339712
  chr7:155916075-155916363
  hypo

SEQ ID NO: 378379 - DNA, 265 bp, Homo sapiens; identical to SEQ ID NO: 339713
  chr7:156347383-156347648
  hypo

SEQ ID NO: 378380 - DNA, 103 bp, Homo sapiens; identical to SEQ ID NO: 339714
  chr7:156435920-156436023
  hypo

SEQ ID NO: 378381 - DNA, 31 bp, Homo sapiens; identical to SEQ ID NO: 339715
  chr7:156734692-156734723
  hypo

SEQ ID NO: 378382 - DNA, 50 bp, Homo sapiens; identical to SEQ ID NO: 364570
  chr7:156744799-156744849
  hypo

SEQ ID NO: 378383 - DNA, 169 bp, Homo sapiens; identical to SEQ ID NO: 339717
  chr7:156782599-156782768
  hypo

SEQ ID NO: 378384 - DNA, 249 bp, Homo sapiens; identical to SEQ ID NO: 201268
  chr7:156802164-156802413
  hypo

SEQ ID NO: 378385 - DNA, 213 bp, Homo sapiens; identical to SEQ ID NO: 359013
  chr7:156802537-156802750
  hypo

SEQ ID NO: 378386 - DNA, 179 bp, Homo sapiens; identical to SEQ ID NO: 364574
  chr7:156832501-156832680
  hypo

SEQ ID NO: 378387 - DNA, 131 bp, Homo sapiens; identical to SEQ ID NO: 339721
  chr7:156974878-156975009
  hypo

SEQ ID NO: 378388 - DNA, 458 bp, Homo sapiens; identical to SEQ ID NO: 339722
  chr7:157052694-157053152
  hypo

SEQ ID NO: 378389 - DNA, 150 bp, Homo sapiens; identical to SEQ ID NO: 364577
  chr7:157086147-157086297
  hypo

SEQ ID NO: 378390 - DNA, 144 bp, Homo sapiens; identical to SEQ ID NO: 339724
  chr7:157100035-157100179
  hypo

SEQ ID NO: 378391 - DNA, 53 bp, Homo sapiens; identical to SEQ ID NO: 339725
  chr7:157128236-157128289
  hypo

SEQ ID NO: 378392 - DNA, 146 bp, Homo sapiens; identical to SEQ ID NO: 339727
  chr7:157151185-157151331
  hypo

SEQ ID NO: 378393 - DNA, 650 bp, Homo sapiens; identical to SEQ ID NO: 348277
  chr7:157202474-157203124
  hypo

SEQ ID NO: 378394 - DNA, 41 bp, Homo sapiens; identical to SEQ ID NO: 364581
  chr7:157262486-157262527
  hypo

SEQ ID NO: 378395 - DNA, 215 bp, Homo sapiens; identical to SEQ ID NO: 354106
  chr7:157263471-157263686
  hypo

SEQ ID NO: 378396 - DNA, 141 bp, Homo sapiens; identical to SEQ ID NO: 339731
  chr7:157281193-157281334
  hypo

SEQ ID NO: 378397 - DNA, 219 bp, Homo sapiens
  chr7:157334647-157334866
  hypo
cgcggcctcttagtgtacgtgttagaacctattattaaaggagtcaactgagcctggcggccacctcagggtgggacccggggagatgtgtctgcctgcgccccgtctctctcccctctgcactgccagagggcacctttctgctcctcgaaattacgtgggagctgcccctgtgggggcaggggctcaggtcgggctgtgccgggaaggtccgcaaac

SEQ ID NO: 378398 - DNA, 309 bp, Homo sapiens; identical to SEQ ID NO: 339733
  chr7:157336700-157337009
  hypo

SEQ ID NO: 378399 - DNA, 261 bp, Homo sapiens
  chr7:157341254-157341515
  hypo
cgcaggccccggagaggccgggcagcgctcagagagctcagaacatcctcctgagggttctgggatttatcgtcaacctctttctacaaaaatgcagcgttctccccccacccccaaatctagtgaatggaaagagccagtggatcgagttcctaggacttgagatgtggctgcatctggaggtgttgcaggaaacgccagtggacctttgggggcccagaagtgaccccgcccatgcaaggccggcatggacgaggccgg

SEQ ID NO: 378400 - DNA, 120 bp, Homo sapiens
  chr7:157341671-157341791
  hypo
tcaagtgctccagggtcgctgcgatatcaatctctttagcacctgcaacaaaccacaaattgggctgagttcagagcacaagataatccatgccacatctgtcaatctcctgctagccac

SEQ ID NO: 378401 - DNA, 475 bp, Homo sapiens; identical to SEQ ID NO: 354107
  chr7:157347322-157347797
  hypo

SEQ ID NO: 378402 - DNA, 157 bp, Homo sapiens
  chr7:157370313-157370470
  hypo
cggaccccacttaaaggcttgttatatgggaccgggaccacgctgtgaggcgaatgttttttctactctgttatcatttggatttagaaaaatctaaaagataaaaaccacaccacactcccagggtctggttcatgagcacacagccgtgtgaacc

SEQ ID NO: 378403 - DNA, 116 bp, Homo sapiens
  chr7:157370789-157370905
  hypo
gtgtcagcatgacgatcaccacgcagccgctctcccacaccatctgcggacaaagaaggcccgtggccgcggtgtgactgtctcatcaccgcgtgacatgtgtaattactgcactc

SEQ ID NO: 378404 - DNA, 158 bp, Homo sapiens; identical to SEQ ID NO: 354108
  chr7:157404210-157404368
  hypo

SEQ ID NO: 378405 - DNA, 46 bp, Homo sapiens; identical to SEQ ID NO: 354109
  chr7:157404566-157404612
  hypo

SEQ ID NO: 378406 - DNA, 315 bp, Homo sapiens; identical to SEQ ID NO: 339738
  chr7:157410957-157411272
  hypo

SEQ ID NO: 378407 - DNA, 152 bp, Homo sapiens; identical to SEQ ID NO: 339739
  chr7:157414227-157414379
  hypo

SEQ ID NO: 378408 - DNA, 296 bp, Homo sapiens; identical to SEQ ID NO: 348278
  chr7:157445780-157446076
  hypo

SEQ ID NO: 378409 - DNA, 69 bp, Homo sapiens; identical to SEQ ID NO: 339741
  chr7:157446148-157446217
  hypo

SEQ ID NO: 378410 - DNA, 267 bp, Homo sapiens; identical to SEQ ID NO: 339742
  chr7:157446450-157446717
  hypo

SEQ ID NO: 378411 - DNA, 75 bp, Homo sapiens; identical to SEQ ID NO: 364591
  chr7:157448328-157448403
  hypo

SEQ ID NO: 378412 - DNA, 39 bp, Homo sapiens; identical to SEQ ID NO: 364592
  chr7:157448526-157448565
  hypo

SEQ ID NO: 378413 - DNA, 36 bp, Homo sapiens; identical to SEQ ID NO: 364593
  chr7:157464624-157464660
  hypo

SEQ ID NO: 378414 - DNA, 232 bp, Homo sapiens; identical to SEQ ID NO: 339746
  chr7:157507378-157507610
  hypo

SEQ ID NO: 378415 - DNA, 284 bp, Homo sapiens; identical to SEQ ID NO: 339747
  chr7:157510178-157510462
  hypo

SEQ ID NO: 378416 - DNA, 115 bp, Homo sapiens; identical to SEQ ID NO: 354113
  chr7:157511495-157511610
  hypo

SEQ ID NO: 378417 - DNA, 408 bp, Homo sapiens; identical to SEQ ID NO: 339749
  chr7:157513007-157513415
  hypo

SEQ ID NO: 378418 - DNA, 44 bp, Homo sapiens; identical to SEQ ID NO: 364598
  chr7:157550880-157550924
  hypo

SEQ ID NO: 378419 - DNA, 262 bp, Homo sapiens; identical to SEQ ID NO: 308881
  chr7:157550958-157551220
  hypo

SEQ ID NO: 378420 - DNA, 250 bp, Homo sapiens; identical to SEQ ID NO: 339753
  chr7:157589680-157589930
  hypo

SEQ ID NO: 378421 - DNA, 242 bp, Homo sapiens; identical to SEQ ID NO: 333344
  chr7:157594777-157595019
  hypo

SEQ ID NO: 378422 - DNA, 228 bp, Homo sapiens
  chr7:157607768-157607996
  hypo
cgcgggaggcagtggagacgtggaagcaggctccggctgctgggcctgcatgaccggtttccctgcagaagattctgcgcccttcagcctcaccgtcctcacctggcctgggtgctgctgtgggcaggcgctgggcacgctgggaagagcagggccagccgtttgcaggacgggaggctgaggctgtgtgcacctcctgagggctgggccacaggtgggctcaggcct

SEQ ID NO: 378423 - DNA, 332 bp, Homo sapiens; identical to SEQ ID NO: 339756
  chr7:157621949-157622281
  hypo

SEQ ID NO: 378424 - DNA, 469 bp, Homo sapiens; identical to SEQ ID NO: 339757
  chr7:157625840-157626309
  hypo

SEQ ID NO: 378425 - DNA, 203 bp, Homo sapiens; identical to SEQ ID NO: 339758
  chr7:157642963-157643166
  hypo

SEQ ID NO: 378426 - DNA, 230 bp, Homo sapiens; identical to SEQ ID NO: 339759
  chr7:157653875-157654105
  hypo

SEQ ID NO: 378427 - DNA, 37 bp, Homo sapiens
  chr7:157659219-157659256
  hypo
cgcatgtgcctctcagcccttgccatgacaaccatga

SEQ ID NO: 378428 - DNA, 79 bp, Homo sapiens; identical to SEQ ID NO: 354119
  chr7:157703411-157703490
  hypo

SEQ ID NO: 378429 - DNA, 239 bp, Homo sapiens; identical to SEQ ID NO: 339762
  chr7:157730053-157730292
  hypo

SEQ ID NO: 378430 - DNA, 227 bp, Homo sapiens; identical to SEQ ID NO: 339763
  chr7:157736806-157737033
  hypo

SEQ ID NO: 378431 - DNA, 273 bp, Homo sapiens; identical to SEQ ID NO: 339764
  chr7:157738113-157738386
  hypo

SEQ ID NO: 378432 - DNA, 145 bp, Homo sapiens; identical to SEQ ID NO: 339765
  chr7:157744287-157744432
  hypo

SEQ ID NO: 378433 - DNA, 410 bp, Homo sapiens; identical to SEQ ID NO: 339766
  chr7:157853839-157854249
  hypo

SEQ ID NO: 378434 - DNA, 337 bp, Homo sapiens; identical to SEQ ID NO: 339767
  chr7:157860325-157860662
  hypo

SEQ ID NO: 378435 - DNA, 74 bp, Homo sapiens; identical to SEQ ID NO: 364612
  chr7:157877353-157877427
  hypo

SEQ ID NO: 378436 - DNA, 425 bp, Homo sapiens; identical to SEQ ID NO: 308937
  chr7:157890859-157891284
  hypo

SEQ ID NO: 378437 - DNA, 98 bp, Homo sapiens; identical to SEQ ID NO: 364614
  chr7:157891519-157891617
  hypo

SEQ ID NO: 378438 - DNA, 218 bp, Homo sapiens; identical to SEQ ID NO: 339770
  chr7:157916520-157916738
  hypo

SEQ ID NO: 378439 - DNA, 241 bp, Homo sapiens; identical to SEQ ID NO: 339771
  chr7:157919964-157920205
  hypo

SEQ ID NO: 378440 - DNA, 234 bp, Homo sapiens; identical to SEQ ID NO: 339772
  chr7:157929571-157929805
  hypo

SEQ ID NO: 378441 - DNA, 111 bp, Homo sapiens; identical to SEQ ID NO: 339773
  chr7:157934031-157934142
  hypo

SEQ ID NO: 378442 - DNA, 38 bp, Homo sapiens; identical to SEQ ID NO: 348284
  chr7:157934555-157934593
  hypo

SEQ ID NO: 378443 - DNA, 92 bp, Homo sapiens; identical to SEQ ID NO: 348285
  chr7:157934659-157934751
  hypo

SEQ ID NO: 378444 - DNA, 119 bp, Homo sapiens; identical to SEQ ID NO: 364621
  chr7:157935699-157935818
  hypo

SEQ ID NO: 378445 - DNA, 264 bp, Homo sapiens; identical to SEQ ID NO: 339776
  chr7:157936035-157936299
  hypo

SEQ ID NO: 378446 - DNA, 224 bp, Homo sapiens; identical to SEQ ID NO: 339777
  chr7:157949173-157949397
  hypo

SEQ ID NO: 378447 - DNA, 105 bp, Homo sapiens; identical to SEQ ID NO: 339779
  chr7:157959868-157959973
  hypo

SEQ ID NO: 378448 - DNA, 392 bp, Homo sapiens; identical to SEQ ID NO: 364625
  chr7:158037726-158038118
  hypo

SEQ ID NO: 378449 - DNA, 142 bp, Homo sapiens; identical to SEQ ID NO: 364626
  chr7:158039908-158040050
  hypo

SEQ ID NO: 378450 - DNA, 787 bp, Homo sapiens; identical to SEQ ID NO: 354133
  chr7:158066162-158066949
  hypo

SEQ ID NO: 378451 - DNA, 219 bp, Homo sapiens; identical to SEQ ID NO: 348289
  chr7:158067069-158067288
  hypo

SEQ ID NO: 378452 - DNA, 264 bp, Homo sapiens; identical to SEQ ID NO: 339783
  chr7:158072920-158073184
  hypo

SEQ ID NO: 378453 - DNA, 412 bp, Homo sapiens
  chr7:158075395-158075807
  hypo
cggctgatccctcctcgtgctcccacatgcagcagccagacacagacggctcatccctcctcgtgctcccacacacagcagccggacagacagctgatccctcctcgtgctcccacacacacagcagccggacacagatggcttgtccctccctgtgctcccacacacagcagcgggacacagagggctcatccctcctcatgctcccacacagcagcgggatatagacggtggtccctcctcgtgctcccacgcagcagcaggacatagacggctcgtccctcctcatgctcccacacgcacagcagccggacacagatggctgatccctcctcgtgctcccacatgcaggggcctcagctctcaggaggaaaacactcttgagagaagagaactgaggaaaggtagcgct

SEQ ID NO: 378454 - DNA, 201 bp, Homo sapiens
  chr7:158075851-158076052
  hypo
acttcttgttacgttcatgccatgcttttgtattcgccacaataagaaaaccaagcaagtacttcagtcaggcggcagccgtcacaggtaaacaaactcctatgtgggaaatgaaccgaggctgtgagcctcaggcagctccccagacccccaagaggagagggagcagtgaccgagcaggccccgtctgcagttcacacc

SEQ ID NO: 378455 - DNA, 127 bp, Homo sapiens; identical to SEQ ID NO: 339785
  chr7:158087705-158087832
  hypo

SEQ ID NO: 378456 - DNA, 195 bp, Homo sapiens; identical to SEQ ID NO: 364630
  chr7:158103405-158103600
  hypo

SEQ ID NO: 378457 - DNA, 338 bp, Homo sapiens; identical to SEQ ID NO: 339787
  chr7:158136094-158136432
  hypo

SEQ ID NO: 378458 - DNA, 118 bp, Homo sapiens; identical to SEQ ID NO: 339788
  chr7:158198545-158198663
  hypo

SEQ ID NO: 378459 - DNA, 479 bp, Homo sapiens; identical to SEQ ID NO: 354136
  chr7:158270795-158271274
  hypo

SEQ ID NO: 378460 - DNA, 293 bp, Homo sapiens
  chr7:158277387-158277680
  hypo
cgtgacttttgtgactcggtttcttcctctgagcacggcgattcccaggttcctccgcgtcagtgtgccggtgcttcctgcctccctttccacggccggacagcactccaccatcacagacgtcctcggttcctggtggttttctgccctcttcagtggagaaagggcttggaatagaagaagctgcagttggagacgtgaaggctgtggctgtgacgccgccacggggagtcggctgcaggaggagcctccccaccatcagcgtggccggcggagtgagccacgagcgcaag

SEQ ID NO: 378461 - DNA, 275 bp, Homo sapiens; identical to SEQ ID NO: 212079
  chr7:158277727-158278002
  hypo

SEQ ID NO: 378462 - DNA, 514 bp, Homo sapiens; identical to SEQ ID NO: 308995
  chr7:158282327-158282841
  hypo

SEQ ID NO: 378463 - DNA, 162 bp, Homo sapiens; identical to SEQ ID NO: 364634
  chr7:158282873-158283035
  hypo

SEQ ID NO: 378464 - DNA, 69 bp, Homo sapiens; identical to SEQ ID NO: 354137
  chr7:158349387-158349456
  hypo

SEQ ID NO: 378465 - DNA, 361 bp, Homo sapiens; identical to SEQ ID NO: 354138
  chr7:158349747-158350108
  hypo

SEQ ID NO: 378466 - DNA, 107 bp, Homo sapiens; identical to SEQ ID NO: 350690
  chr7:158379699-158379806
  hypo

SEQ ID NO: 378467 - DNA, 177 bp, Homo sapiens; identical to SEQ ID NO: 339795
  chr7:158451052-158451229
  hypo

SEQ ID NO: 378468 - DNA, 340 bp, Homo sapiens; identical to SEQ ID NO: 339797
  chr7:158552753-158553093
  hypo

SEQ ID NO: 378469 - DNA, 140 bp, Homo sapiens; identical to SEQ ID NO: 339798
  chr7:158556274-158556414
  hypo

SEQ ID NO: 378470 - DNA, 207 bp, Homo sapiens; identical to SEQ ID NO: 348291
  chr7:158570568-158570775
  hypo

SEQ ID NO: 378471 - DNA, 210 bp, Homo sapiens; identical to SEQ ID NO: 339800
  chr7:158583831-158584041
  hypo

SEQ ID NO: 378472 - DNA, 33 bp, Homo sapiens; identical to SEQ ID NO: 354144
  chr7:158713060-158713093
  hypo

SEQ ID NO: 378473 - DNA, 171 bp, Homo sapiens; identical to SEQ ID NO: 364643
  chr7:158741267-158741438
  hypo

SEQ ID NO: 378474 - DNA, 844 bp, Homo sapiens
  chr7:158962544-158963388
  hypo
cgagggcataaccgggctccatcccaatgctgcctcatccctgcagtcaccccgcacaggtgacgcaggcttcagagggccccggacctcgcctgagggtgaagaaaatcacggcatcactgacaaggccgccatgaggatcgcgtgagcagaaacacgatgatcatggctcactgatggggcagctctgaggatcgcgtgagcagaaacacacagataatcacagaatcactgacggggcagctctgaggatcacgtgagcagaaacacacagataatcacagaatcactgacggggctgctgtgaggatcccgtgagcagaaacatggatgatcacggctcactgacggggcagctctgaggatcgcgtgagcagaaacacacagataatcacagaatcactgacggggccgctgtgaggatcccgtgagcagaaacatggatgatcacggctcactgacggggcagctctgaggatcacgtgagcagaaacacacagataatcacagaatcactgacgaggcctctgtgaggatcccgtgagcagaaacatggatgatcgcggcctgactggcggggctgctgtgaggatcatatgaccagaaacacgtggaagatcatggctcactgacggggctgctgtgactattgcgtgagcagaaacacgatgatcatggctcactgaatgggcagctctgaggatcgcgtgagcagaaacatggatgatcatggctcactgacagggaggtctgaggattgcgtgagcagaaacacagataatcacagaatcactgagggggccactgtgaggatcgcatgagcagaaacacacagatgatcacg

SEQ ID NO: 378475 - DNA, 42 bp, Homo sapiens; identical to SEQ ID NO: 350693
  chr8:495481-495523
  hypo

SEQ ID NO: 378476 - DNA, 68 bp, Homo sapiens; identical to SEQ ID NO: 201278
  chr8:495635-495703
  hypo

SEQ ID NO: 378477 - DNA, 260 bp, Homo sapiens; identical to SEQ ID NO: 354147
  chr8:591683-591943
  hypo

SEQ ID NO: 378478 - DNA, 32 bp, Homo sapiens
  chr8:593299-593331
  hypo
cagggacgggaagctggccaggcgcaggctgc

SEQ ID NO: 378479 - DNA, 366 bp, Homo sapiens; identical to SEQ ID NO: 364647
  chr8:644802-645168
  hypo

SEQ ID NO: 378480 - DNA, 159 bp, Homo sapiens; identical to SEQ ID NO: 371772
  chr8:798791-798950
  hypo

SEQ ID NO: 378481 - DNA, 376 bp, Homo sapiens; identical to SEQ ID NO: 364648
  chr8:972329-972705
  hypo

SEQ ID NO: 378482 - DNA, 298 bp, Homo sapiens; identical to SEQ ID NO: 339811
  chr8:1026288-1026586
  hypo

SEQ ID NO: 378483 - DNA, 233 bp, Homo sapiens; identical to SEQ ID NO: 354148
  chr8:1078113-1078346
  hypo

SEQ ID NO: 378484 - DNA, 438 bp, Homo sapiens; identical to SEQ ID NO: 364650
  chr8:1132651-1133089
  hypo

SEQ ID NO: 378485 - DNA, 269 bp, Homo sapiens
  chr8:1150825-1151094
  hypo
cgctttgttttccgttcccacatatcggtttggcatcgaacgatgcgtccgctgctggctcccgtgctcggtttctccacgccgcctccgggcggtgcgcgattcagctccaggagcgtgttgtgcacggcggggcgctgcgctcggccttagggaaagaaggcgcggctgtctccccggaccccaccgttagggacccacacctagaggtgagtgtggcgtgagcggccaggcgggtgccgagatgcccagagaccagcactggggag

SEQ ID NO: 378486 - DNA, 203 bp, Homo sapiens
  chr8:1151189-1151392
  hypo
gtccatcagggttctcgagagacgcagaaccaggggtgcatgcacgcgtgtgattgtggaggctggcaggtcccaaccacagagccgaagtccccagcatccccgcgcaggtgtgaggccctcagcgaccctggaaccagcaggagctctgctcccgctcaggggccgtggggcagggggctcccccttcctcgggaagggac

SEQ ID NO: 378487 - DNA, 117 bp, Homo sapiens; identical to SEQ ID NO: 364651
  chr8:1326617-1326734
  hypo

SEQ ID NO: 378488 - DNA, 49 bp, Homo sapiens
  chr8:1379963-1380012
  hypo
cgtgcatgacagggactcttctgatgcctccgtgtcgatggccaccaag

SEQ ID NO: 378489 - DNA, 51 bp, Homo sapiens
  chr8:1380172-1380223
  hypo
catgccagccagcaccgctacggctgccatccatcggggctgaaccctgcc

SEQ ID NO: 378490 - DNA, 131 bp, Homo sapiens; identical to SEQ ID NO: 364652
  chr8:1471350-1471481
  hypo

SEQ ID NO: 378491 - DNA, 49 bp, Homo sapiens; identical to SEQ ID NO: 364653
  chr8:1471664-1471713
  hypo

SEQ ID NO: 378492 - DNA, 104 bp, Homo sapiens; identical to SEQ ID NO: 339820
  chr8:1724066-1724170
  hypo

SEQ ID NO: 378493 - DNA, 88 bp, Homo sapiens; identical to SEQ ID NO: 258895
  chr8:1783965-1784053
  hypo

SEQ ID NO: 378494 - DNA, 494 bp, Homo sapiens; identical to SEQ ID NO: 339822
  chr8:1797609-1798103
  hypo

SEQ ID NO: 378495 - DNA, 329 bp, Homo sapiens; identical to SEQ ID NO: 339823
  chr8:1885046-1885375
  hypo

SEQ ID NO: 378496 - DNA, 169 bp, Homo sapiens; identical to SEQ ID NO: 339824
  chr8:3509598-3509767
  hypo

SEQ ID NO: 378497 - DNA, 313 bp, Homo sapiens; identical to SEQ ID NO: 339825
  chr8:6414561-6414874
  hypo

SEQ ID NO: 378498 - DNA, 174 bp, Homo sapiens
  chr8:6434512-6434686
  hypo
ctgctgcctgctgtgaggaggccccctttgccacggaacctgaaattcctgccactggaattacgctctggacaagcggcaagatactcctttcagtcccagccactgggttcctgctgcacaggaggccagggtgctgtgaacctgctctcagccccgggcaaagggaatctc

SEQ ID NO: 378499 - DNA, 95 bp, Homo sapiens; identical to SEQ ID NO: 339827
  chr8:6633002-6633097
  hypo

SEQ ID NO: 378500 - DNA, 110 bp, Homo sapiens; identical to SEQ ID NO: 354150
  chr8:8560686-8560796
  hypo

SEQ ID NO: 378501 - DNA, 42 bp, Homo sapiens; identical to SEQ ID NO: 354151
  chr8:8561032-8561074
  hypo

SEQ ID NO: 378502 - DNA, 106 bp, Homo sapiens; identical to SEQ ID NO: 350705
  chr8:8639980-8640086
  hypo

SEQ ID NO: 378503 - DNA, 166 bp, Homo sapiens; identical to SEQ ID NO: 339830
  chr8:8651879-8652045
  hypo

SEQ ID NO: 378504 - DNA, 110 bp, Homo sapiens; identical to SEQ ID NO: 339831
  chr8:8680452-8680562
  hypo

SEQ ID NO: 378505 - DNA, 59 bp, Homo sapiens; identical to SEQ ID NO: 339832
  chr8:8680894-8680953
  hypo

SEQ ID NO: 378506 - DNA, 61 bp, Homo sapiens
  chr8:8681197-8681258
  hypo
cgtcttcagtctttgacacaggtaatgaacccacaggtcaccgagaagagcatcacctgcg

SEQ ID NO: 378507 - DNA, 416 bp, Homo sapiens; identical to SEQ ID NO: 339834
  chr8:8731310-8731726
  hypo

SEQ ID NO: 378508 - DNA, 124 bp, Homo sapiens; identical to SEQ ID NO: 354154
  chr8:8748226-8748350
  hypo

SEQ ID NO: 378509 - DNA, 533 bp, Homo sapiens; identical to SEQ ID NO: 354155
  chr8:8749088-8749621
  hypo

SEQ ID NO: 378510 - DNA, 143 bp, Homo sapiens; identical to SEQ ID NO: 339836
  chr8:8780059-8780202
  hypo

SEQ ID NO: 378511 - DNA, 101 bp, Homo sapiens; identical to SEQ ID NO: 339837
  chr8:8898512-8898613
  hypo

SEQ ID NO: 378512 - DNA, 260 bp, Homo sapiens; identical to SEQ ID NO: 285637
  chr8:9761155-9761415
  hypo

SEQ ID NO: 378513 - DNA, 206 bp, Homo sapiens; identical to SEQ ID NO: 359041
  chr8:10587216-10587422
  hypo

SEQ ID NO: 378514 - DNA, 240 bp, Homo sapiens; identical to SEQ ID NO: 201296
  chr8:10873649-10873889
  hypo

SEQ ID NO: 378515 - DNA, 376 bp, Homo sapiens; identical to SEQ ID NO: 285647
  chr8:11058799-11059175
  hypo

SEQ ID NO: 378516 - DNA, 251 bp, Homo sapiens; identical to SEQ ID NO: 285656
  chr8:11550368-11550619
  hypo

SEQ ID NO: 378517 - DNA, 81 bp, Homo sapiens; identical to SEQ ID NO: 364674
  chr8:11708345-11708426
  hypo

SEQ ID NO: 378518 - DNA, 140 bp, Homo sapiens; identical to SEQ ID NO: 333372
  chr8:11726011-11726151
  hypo

SEQ ID NO: 378519 - DNA, 130 bp, Homo sapiens; identical to SEQ ID NO: 339848
  chr8:12959279-12959409
  hypo

SEQ ID NO: 378520 - DNA, 84 bp, Homo sapiens; identical to SEQ ID NO: 201316
  chr8:16884239-16884323
  hypo

SEQ ID NO: 378521 - DNA, 78 bp, Homo sapiens; identical to SEQ ID NO: 339850
  chr8:18541368-18541446
  hypo

SEQ ID NO: 378522 - DNA, 1070 bp, Homo sapiens; identical to SEQ ID NO: 333379
  chr8:18870226-18871296
  hypo

SEQ ID NO: 378523 - DNA, 590 bp, Homo sapiens; identical to SEQ ID NO: 359062
  chr8:19796843-19797433
  hypo

SEQ ID NO: 378524 - DNA, 45 bp, Homo sapiens; identical to SEQ ID NO: 339853
  chr8:21624023-21624068
  hypo

SEQ ID NO: 378525 - DNA, 56 bp, Homo sapiens; identical to SEQ ID NO: 339854
  chr8:21959292-21959348
  hypo

SEQ ID NO: 378526 - DNA, 229 bp, Homo sapiens; identical to SEQ ID NO: 364682
  chr8:21959610-21959839
  hypo

SEQ ID NO: 378527 - DNA, 287 bp, Homo sapiens; identical to SEQ ID NO: 339856
  chr8:22256736-22257023
  hypo

SEQ ID NO: 378528 - DNA, 878 bp, Homo sapiens; identical to SEQ ID NO: 346966
  chr8:22436855-22437733
  hypo

SEQ ID NO: 378529 - DNA, 429 bp, Homo sapiens; identical to SEQ ID NO: 339858
  chr8:22874780-22875209
  hypo

SEQ ID NO: 378530 - DNA, 127 bp, Homo sapiens; identical to SEQ ID NO: 345299
  chr8:23021590-23021717
  hypo

SEQ ID NO: 378531 - DNA, 92 bp, Homo sapiens
  chr8:23399632-23399724
  hypo
tccatatgtgatgagacagtgatcccatagattatagtggagctgaaaaattcctattacctaggggcatcacaacgcattgcatttcgccc

SEQ ID NO: 378532 - DNA, 196 bp, Homo sapiens; identical to SEQ ID NO: 345934
  chr8:23423722-23423918
  hypo

SEQ ID NO: 378533 - DNA, 311 bp, Homo sapiens; identical to SEQ ID NO: 350731
  chr8:26148757-26149068
  hypo

SEQ ID NO: 378534 - DNA, 167 bp, Homo sapiens; identical to SEQ ID NO: 364688
  chr8:26193961-26194128
  hypo

SEQ ID NO: 378535 - DNA, 106 bp, Homo sapiens; identical to SEQ ID NO: 339867
  chr8:26267649-26267755
  hypo

SEQ ID NO: 378536 - DNA, 576 bp, Homo sapiens; identical to SEQ ID NO: 333408
  chr8:26436208-26436784
  hypo

SEQ ID NO: 378537 - DNA, 146 bp, Homo sapiens; identical to SEQ ID NO: 339869
  chr8:26481184-26481330
  hypo

SEQ ID NO: 378538 - DNA, 191 bp, Homo sapiens
  chr8:27315867-27316058
  hypo
cggctggcacagcagaacgccgtgacctccctaagtgaggagtgcaagaggcagatgctgacggcttcacacaccctggctgtggacgccaagaacctgctcgacgctgtggaccaggccaaggttctggccaatctggcccacccacctgcagagtgacggagggtgggggccacctgcctgcgtcttcc

SEQ ID NO: 378539 - DNA, 319 bp, Homo sapiens; identical to SEQ ID NO: 354167
  chr8:27779460-27779779
  hypo

SEQ ID NO: 378540 - DNA, 128 bp, Homo sapiens; identical to SEQ ID NO: 339872
  chr8:28207473-28207601
  hypo

SEQ ID NO: 378541 - DNA, 89 bp, Homo sapiens; identical to SEQ ID NO: 339873
  chr8:28207908-28207997
  hypo

SEQ ID NO: 378542 - DNA, 92 bp, Homo sapiens; identical to SEQ ID NO: 339874
  chr8:28237888-28237980
  hypo

SEQ ID NO: 378543 - DNA, 138 bp, Homo sapiens; identical to SEQ ID NO: 354168
  chr8:28938419-28938557
  hypo

SEQ ID NO: 378544 - DNA, 136 bp, Homo sapiens; identical to SEQ ID NO: 212229
  chr8:28938587-28938723
  hypo

SEQ ID NO: 378545 - DNA, 84 bp, Homo sapiens; identical to SEQ ID NO: 339876
  chr8:29053260-29053344
  hypo

SEQ ID NO: 378546 - DNA, 1886 bp, Homo sapiens; identical to SEQ ID NO: 333411
  chr8:29205985-29207871
  hypo

SEQ ID NO: 378547 - DNA, 267 bp, Homo sapiens; identical to SEQ ID NO: 339878
  chr8:30561955-30562222
  hypo

SEQ ID NO: 378548 - DNA, 231 bp, Homo sapiens; identical to SEQ ID NO: 359092
  chr8:33372206-33372437
  hypo

SEQ ID NO: 378549 - DNA, 1274 bp, Homo sapiens; identical to SEQ ID NO: 333416
  chr8:37552902-37554176
  hypo

SEQ ID NO: 378550 - DNA, 402 bp, Homo sapiens; identical to SEQ ID NO: 339882
  chr8:37702286-37702688
  hypo

SEQ ID NO: 378551 - DNA, 226 bp, Homo sapiens; identical to SEQ ID NO: 201396
  chr8:38326050-38326276
  hypo

SEQ ID NO: 378552 - DNA, 85 bp, Homo sapiens; identical to SEQ ID NO: 339884
  chr8:38697075-38697160
  hypo

SEQ ID NO: 378553 - DNA, 95 bp, Homo sapiens; identical to SEQ ID NO: 364702
  chr8:41478653-41478748
  hypo

SEQ ID NO: 378554 - DNA, 49 bp, Homo sapiens; identical to SEQ ID NO: 354174
  chr8:41553941-41553990
  hypo

SEQ ID NO: 378555 - DNA, 68 bp, Homo sapiens; identical to SEQ ID NO: 212255
  chr8:41643317-41643385
  hypo

SEQ ID NO: 378556 - DNA, 39 bp, Homo sapiens; identical to SEQ ID NO: 354175
  chr8:41668308-41668347
  hypo

SEQ ID NO: 378557 - DNA, 65 bp, Homo sapiens; identical to SEQ ID NO: 339891
  chr8:42134216-42134281
  hypo

SEQ ID NO: 378558 - DNA, 157 bp, Homo sapiens; identical to SEQ ID NO: 339892
  chr8:42146058-42146215
  hypo

SEQ ID NO: 378559 - DNA, 100 bp, Homo sapiens; identical to SEQ ID NO: 339894
  chr8:42316852-42316952
  hypo

SEQ ID NO: 378560 - DNA, 293 bp, Homo sapiens; identical to SEQ ID NO: 354177
  chr8:42333256-42333549
  hypo

SEQ ID NO: 378561 - DNA, 172 bp, Homo sapiens; identical to SEQ ID NO: 348297
  chr8:42750012-42750184
  hypo

SEQ ID NO: 378562 - DNA, 45 bp, Homo sapiens; identical to SEQ ID NO: 364709
  chr8:48044665-48044710
  hypo

SEQ ID NO: 378563 - DNA, 410 bp, Homo sapiens; identical to SEQ ID NO: 339898
  chr8:48292766-48293176
  hypo

SEQ ID NO: 378564 - DNA, 198 bp, Homo sapiens; identical to SEQ ID NO: 339899
  chr8:48396539-48396737
  hypo

SEQ ID NO: 378565 - DNA, 553 bp, Homo sapiens
  chr8:48744128-48744681
  hypo
cggctgatcccaggccggccacacttccacccgcggagagaactgggcgcactcctggacccccaccagagcgccatgagggctgcatccctgtgggggagccccaggaggctggtttggagcagtcccgcaacctggtttgcaggtgacattggaggcagtgtctggcaggaagcctgttcacttcgtctgtatcctgtgacagaaactgcatcgttctgatcaaattcttgacaagatacaaaccttctctcgtttttgctcagcaacgccttttctggcatacatcaaactgagcttctcctggtccctcataaaccgtctgcgcagtcgtagtaggtccgtccggccggccgcacctggagagggaaagcaggcccagttactccccgccgcccagacacttggctctgctggttcattttcacctcgggtttcctcaaagacaaaacctacaggtgccgcagaggcagcgaccgggagcaggagtgcaggggccacagctgcaactggaactgctcagcagtggattcagcaggcatgagcgctgaac

SEQ ID NO: 378566 - DNA, 166 bp, Homo sapiens; identical to SEQ ID NO: 339901
  chr8:48801168-48801334
  hypo

SEQ ID NO: 378567 - DNA, 207 bp, Homo sapiens; identical to SEQ ID NO: 339902
  chr8:49241546-49241753
  hypo

SEQ ID NO: 378568 - DNA, 68 bp, Homo sapiens; identical to SEQ ID NO: 345936
  chr8:49334914-49334982
  hypo

SEQ ID NO: 378569 - DNA, 201 bp, Homo sapiens; identical to SEQ ID NO: 339904
  chr8:49339738-49339939
  hypo

SEQ ID NO: 378570 - DNA, 31 bp, Homo sapiens; identical to SEQ ID NO: 354182
  chr8:49382262-49382293
  hypo

SEQ ID NO: 378571 - DNA, 439 bp, Homo sapiens; identical to SEQ ID NO: 354183
  chr8:49382383-49382822
  hypo

SEQ ID NO: 378572 - DNA, 96 bp, Homo sapiens; identical to SEQ ID NO: 364718
  chr8:49390203-49390299
  hypo

SEQ ID NO: 378573 - DNA, 52 bp, Homo sapiens; identical to SEQ ID NO: 364719
  chr8:49390625-49390677
  hypo

SEQ ID NO: 378574 - DNA, 143 bp, Homo sapiens; identical to SEQ ID NO: 364720
  chr8:49496420-49496563
  hypo

SEQ ID NO: 378575 - DNA, 187 bp, Homo sapiens; identical to SEQ ID NO: 354184
  chr8:49571728-49571915
  hypo

SEQ ID NO: 378576 - DNA, 262 bp, Homo sapiens; identical to SEQ ID NO: 339911
  chr8:49747358-49747620
  hypo

SEQ ID NO: 378577 - DNA, 210 bp, Homo sapiens
  chr8:49808471-49808681
  hypo
cgaagcactatatgagactataaatggaattaatttttgtgaaaacaagaaaaggagtccccgaattaattactgctgtaagattgagcttgagaatttgtcttacaaaatcttttaataatgtattattctactcacaaaacagatattggttttgtgcctagtatgttccctgaggtgtacagggaacctcaaggagctcccagacta

SEQ ID NO: 378578 - DNA, 256 bp, Homo sapiens; identical to SEQ ID NO: 339913
  chr8:50313987-50314243
  hypo

SEQ ID NO: 378579 - DNA, 127 bp, Homo sapiens; identical to SEQ ID NO: 359106
  chr8:53853387-53853514
  hypo

SEQ ID NO: 378580 - DNA, 118 bp, Homo sapiens; identical to SEQ ID NO: 339917
  chr8:54645736-54645854
  hypo

SEQ ID NO: 378581 - DNA, 116 bp, Homo sapiens; identical to SEQ ID NO: 201413
  chr8:56014011-56014127
  hypo

SEQ ID NO: 378582 - DNA, 205 bp, Homo sapiens
  chr8:56364032-56364237
  hypo
cgagtctgcctggaactggcctggagaaggtgcgttctgggccttaaagagtccgactacacctatgccgtacaggcccccagaatgcagcagtactgccttggaccgccggatgcgccagcagacaacggtgaagcggttctggcggtagcagtaggacacgcgctgcagggcgttgtcctggacactctggggcacgatcagc

SEQ ID NO: 378583 - DNA, 159 bp, Homo sapiens
  chr8:56364333-56364492
  hypo
cccaggccaaggcactgatagtcgcggcagcaagccctttccaccaggaggctgctcatggtcatgccgtccgagggcttcaaggctgaggacggggtcagtgtgctgggctccagctcttccgacactgagatctcctcctcctggtcctcagagggc

SEQ ID NO: 378584 - DNA, 156 bp, Homo sapiens; identical to SEQ ID NO: 354187
  chr8:56602062-56602218
  hypo

SEQ ID NO: 378585 - DNA, 72 bp, Homo sapiens; identical to SEQ ID NO: 354188
  chr8:56602280-56602352
  hypo

SEQ ID NO: 378586 - DNA, 172 bp, Homo sapiens; identical to SEQ ID NO: 359111
  chr8:56791852-56792024
  hypo

SEQ ID NO: 378587 - DNA, 1176 bp, Homo sapiens; identical to SEQ ID NO: 359112
  chr8:56792065-56793241
  hypo

SEQ ID NO: 378588 - DNA, 606 bp, Homo sapiens; identical to SEQ ID NO: 333447
  chr8:57122656-57123262
  hypo

SEQ ID NO: 378589 - DNA, 238 bp, Homo sapiens; identical to SEQ ID NO: 201421
  chr8:60030908-60031146
  hypo

SEQ ID NO: 378590 - DNA, 349 bp, Homo sapiens; identical to SEQ ID NO: 201422
  chr8:60031791-60032140
  hypo

SEQ ID NO: 378591 - DNA, 114 bp, Homo sapiens; identical to SEQ ID NO: 339934
  chr8:61156160-61156274
  hypo

SEQ ID NO: 378592 - DNA, 292 bp, Homo sapiens; identical to SEQ ID NO: 201424
  chr8:61193765-61194057
  hypo

SEQ ID NO: 378593 - DNA, 144 bp, Homo sapiens; identical to SEQ ID NO: 201426
  chr8:61822883-61823027
  hypo

SEQ ID NO: 378594 - DNA, 267 bp, Homo sapiens; identical to SEQ ID NO: 350760
  chr8:65494311-65494578
  hypo

SEQ ID NO: 378595 - DNA, 69 bp, Homo sapiens; identical to SEQ ID NO: 339940
  chr8:66877733-66877802
  hypo

SEQ ID NO: 378596 - DNA, 349 bp, Homo sapiens; identical to SEQ ID NO: 339943
  chr8:68115303-68115652
  hypo

SEQ ID NO: 378597 - DNA, 42 bp, Homo sapiens; identical to SEQ ID NO: 350765
  chr8:69242761-69242803
  hypo

SEQ ID NO: 378598 - DNA, 56 bp, Homo sapiens; identical to SEQ ID NO: 201448
  chr8:69243011-69243067
  hypo

SEQ ID NO: 378599 - DNA, 110 bp, Homo sapiens; identical to SEQ ID NO: 339945
  chr8:70246389-70246499
  hypo

SEQ ID NO: 378600 - DNA, 1459 bp, Homo sapiens; identical to SEQ ID NO: 350767
  chr8:70745324-70746783
  hypo

SEQ ID NO: 378601 - DNA, 31 bp, Homo sapiens; identical to SEQ ID NO: 354200
  chr8:71017208-71017239
  hypo

SEQ ID NO: 378602 - DNA, 311 bp, Homo sapiens; identical to SEQ ID NO: 333477
  chr8:71316520-71316831
  hypo

SEQ ID NO: 378603 - DNA, 226 bp, Homo sapiens; identical to SEQ ID NO: 339949
  chr8:71447632-71447858
  hypo

SEQ ID NO: 378604 - DNA, 145 bp, Homo sapiens; identical to SEQ ID NO: 354201
  chr8:71447942-71448087
  hypo

SEQ ID NO: 378605 - DNA, 50 bp, Homo sapiens; identical to SEQ ID NO: 354202
  chr8:71448124-71448174
  hypo

SEQ ID NO: 378606 - DNA, 100 bp, Homo sapiens; identical to SEQ ID NO: 339951
  chr8:71522547-71522647
  hypo

SEQ ID NO: 378607 - DNA, 55 bp, Homo sapiens; identical to SEQ ID NO: 346990
  chr8:72756949-72757004
  hypo

SEQ ID NO: 378608 - DNA, 94 bp, Homo sapiens; identical to SEQ ID NO: 359138
  chr8:73448692-73448786
  hypo

SEQ ID NO: 378609 - DNA, 252 bp, Homo sapiens; identical to SEQ ID NO: 285959
  chr8:73448832-73449084
  hypo

SEQ ID NO: 378610 - DNA, 263 bp, Homo sapiens; identical to SEQ ID NO: 285960
  chr8:73449114-73449377
  hypo

SEQ ID NO: 378611 - DNA, 207 bp, Homo sapiens; identical to SEQ ID NO: 285961
  chr8:73449432-73449639
  hypo

SEQ ID NO: 378612 - DNA, 145 bp, Homo sapiens; identical to SEQ ID NO: 339955
  chr8:73979624-73979769
  hypo

SEQ ID NO: 378613 - DNA, 90 bp, Homo sapiens; identical to SEQ ID NO: 348305
  chr8:74674345-74674435
  hypo

SEQ ID NO: 378614 - DNA, 194 bp, Homo sapiens; identical to SEQ ID NO: 350770
  chr8:77589904-77590098
  hypo

SEQ ID NO: 378615 - DNA, 208 bp, Homo sapiens; identical to SEQ ID NO: 201482
  chr8:80803900-80804108
  hypo

SEQ ID NO: 378616 - DNA, 141 bp, Homo sapiens; identical to SEQ ID NO: 354208
  chr8:81213177-81213318
  hypo

SEQ ID NO: 378617 - DNA, 327 bp, Homo sapiens; identical to SEQ ID NO: 354209
  chr8:81213356-81213683
  hypo

SEQ ID NO: 378618 - DNA, 273 bp, Homo sapiens; identical to SEQ ID NO: 201484
  chr8:81398155-81398428
  hypo

SEQ ID NO: 378619 - DNA, 917 bp, Homo sapiens; identical to SEQ ID NO: 350777
  chr8:81785915-81786832
  hypo

SEQ ID NO: 378620 - DNA, 196 bp, Homo sapiens; identical to SEQ ID NO: 350778
  chr8:82192428-82192624
  hypo

SEQ ID NO: 378621 - DNA, 99 bp, Homo sapiens; identical to SEQ ID NO: 345308
  chr8:82193698-82193797
  hypo

SEQ ID NO: 378622 - DNA, 33 bp, Homo sapiens; identical to SEQ ID NO: 364762
  chr8:82903010-82903043
  hypo

SEQ ID NO: 378623 - DNA, 245 bp, Homo sapiens; identical to SEQ ID NO: 350781
  chr8:91657421-91657666
  hypo

SEQ ID NO: 378624 - DNA, 71 bp, Homo sapiens; identical to SEQ ID NO: 339971
  chr8:92120822-92120893
  hypo

SEQ ID NO: 378625 - DNA, 107 bp, Homo sapiens; identical to SEQ ID NO: 339972
  chr8:94684099-94684206
  hypo

SEQ ID NO: 378626 - DNA, 136 bp, Homo sapiens; identical to SEQ ID NO: 339973
  chr8:94685462-94685598
  hypo

SEQ ID NO: 378627 - DNA, 248 bp, Homo sapiens; identical to SEQ ID NO: 286033
  chr8:94712881-94713129
  hypo

SEQ ID NO: 378628 - DNA, 60 bp, Homo sapiens; identical to SEQ ID NO: 339975
  chr8:94747749-94747809
  hypo

SEQ ID NO: 378629 - DNA, 39 bp, Homo sapiens; identical to SEQ ID NO: 339976
  chr8:95556587-95556626
  hypo

SEQ ID NO: 378630 - DNA, 58 bp, Homo sapiens; identical to SEQ ID NO: 364769
  chr8:95816370-95816428
  hypo

SEQ ID NO: 378631 - DNA, 78 bp, Homo sapiens; identical to SEQ ID NO: 339978
  chr8:95848311-95848389
  hypo

SEQ ID NO: 378632 - DNA, 765 bp, Homo sapiens; identical to SEQ ID NO: 286064
  chr8:98881052-98881817
  hypo

SEQ ID NO: 378633 - DNA, 43 bp, Homo sapiens; identical to SEQ ID NO: 359180
  chr8:98881884-98881927
  hypo

SEQ ID NO: 378634 - DNA, 74 bp, Homo sapiens; identical to SEQ ID NO: 286069
  chr8:99438739-99438813
  hypo

SEQ ID NO: 378635 - DNA, 418 bp, Homo sapiens; identical to SEQ ID NO: 201528
  chr8:99954762-99955180
  hypo

SEQ ID NO: 378636 - DNA, 826 bp, Homo sapiens; identical to SEQ ID NO: 346999
  chr8:99956460-99957286
  hypo

SEQ ID NO: 378637 - DNA, 383 bp, Homo sapiens
  chr8:100708328-100708711
  hypo
cgcacggtggcgagagtgccatggacctctgccacagtggattttatggttgcgggacctcggtgccttcctgtgcacagctggcactcttcacgccgtgtctctgatgacttggtagtagagaagtccctcaagtccttcaaggacaagaacaagaagcttgaggaaggcggccaagtgtacacccccaccccacagaggtggtggtgaataagtcgctcgggcagagggagctggatgagctgaagcgctactgccttggcttctgcctgctgtggatccatgccaagatcgtggtgctcatgctgtggcacatccttgacagccacaccctgaccaggcaaagcgcaggcagtttctccggatccgcgccgacctcctcc

SEQ ID NO: 378638 - DNA, 448 bp, Homo sapiens; identical to SEQ ID NO: 354219
  chr8:100796506-100796954
  hypo

SEQ ID NO: 378639 - DNA, 76 bp, Homo sapiens; identical to SEQ ID NO: 339988
  chr8:100851164-100851240
  hypo

SEQ ID NO: 378640 - DNA, 39 bp, Homo sapiens; identical to SEQ ID NO: 364778
  chr8:101717122-101717161
  hypo

SEQ ID NO: 378641 - DNA, 162 bp, Homo sapiens; identical to SEQ ID NO: 354221
  chr8:102039330-102039492
  hypo

SEQ ID NO: 378642 - DNA, 160 bp, Homo sapiens; identical to SEQ ID NO: 339991
  chr8:102190390-102190550
  hypo

SEQ ID NO: 378643 - DNA, 251 bp, Homo sapiens
  chr8:102450881-102451132
  hypo
cgaaacttcctcgaggcgctggggtggggaggctgtaggctgcaggcctgcttagcgcccttctcaacaactgctgtcatcagggagagcgagcagagtgcgtgcactccgggcggcgaagccccagcagaggcctgcctggctgtgctctgggtgccactcattcatgagggctgcgctgcgctgcgggcaccacgattcccacggaggggctgtaggtacttaaggggccctcagacgtcaggacaaac

SEQ ID NO: 378644 - DNA, 40 bp, Homo sapiens; identical to SEQ ID NO: 201544
  chr8:102506365-102506405
  hypo

SEQ ID NO: 378645 - DNA, 89 bp, Homo sapiens; identical to SEQ ID NO: 339994
  chr8:103315038-103315127
  hypo

SEQ ID NO: 378646 - DNA, 126 bp, Homo sapiens; identical to SEQ ID NO: 364783
  chr8:103572766-103572892
  hypo

SEQ ID NO: 378647 - DNA, 429 bp, Homo sapiens; identical to SEQ ID NO: 201548
  chr8:104511554-104511983
  hypo

SEQ ID NO: 378648 - DNA, 622 bp, Homo sapiens; identical to SEQ ID NO: 347003
  chr8:107669381-107670003
  hypo

SEQ ID NO: 378649 - DNA, 225 bp, Homo sapiens; identical to SEQ ID NO: 350815
  chr8:109799189-109799414
  hypo

SEQ ID NO: 378650 - DNA, 42 bp, Homo sapiens; identical to SEQ ID NO: 350816
  chr8:109799903-109799945
  hypo

SEQ ID NO: 378651 - DNA, 142 bp, Homo sapiens; identical to SEQ ID NO: 340000
  chr8:117336931-117337073
  hypo

SEQ ID NO: 378652 - DNA, 120 bp, Homo sapiens; identical to SEQ ID NO: 340001
  chr8:117631330-117631450
  hypo

SEQ ID NO: 378653 - DNA, 221 bp, Homo sapiens; identical to SEQ ID NO: 340002
  chr8:118531602-118531823
  hypo

SEQ ID NO: 378654 - DNA, 90 bp, Homo sapiens; identical to SEQ ID NO: 340003
  chr8:119057056-119057146
  hypo

SEQ ID NO: 378655 - DNA, 194 bp, Homo sapiens; identical to SEQ ID NO: 350823
  chr8:119123513-119123707
  hypo

SEQ ID NO: 378656 - DNA, 123 bp, Homo sapiens; identical to SEQ ID NO: 364791
  chr8:120846246-120846369
  hypo

SEQ ID NO: 378657 - DNA, 540 bp, Homo sapiens; identical to SEQ ID NO: 347007
  chr8:121823361-121823901
  hypo

SEQ ID NO: 378658 - DNA, 211 bp, Homo sapiens; identical to SEQ ID NO: 347008
  chr8:121824481-121824692
  hypo

SEQ ID NO: 378659 - DNA, 233 bp, Homo sapiens; identical to SEQ ID NO: 340008
  chr8:123830706-123830939
  hypo

SEQ ID NO: 378660 - DNA, 149 bp, Homo sapiens; identical to SEQ ID NO: 340009
  chr8:123865814-123865963
  hypo

SEQ ID NO: 378661 - DNA, 303 bp, Homo sapiens; identical to SEQ ID NO: 340011
  chr8:124186923-124187226
  hypo

SEQ ID NO: 378662 - DNA, 57 bp, Homo sapiens; identical to SEQ ID NO: 340012
  chr8:124238881-124238938
  hypo

SEQ ID NO: 378663 - DNA, 308 bp, Homo sapiens; identical to SEQ ID NO: 340013
  chr8:124730010-124730318
  hypo

SEQ ID NO: 378664 - DNA, 62 bp, Homo sapiens; identical to SEQ ID NO: 340014
  chr8:125498221-125498283
  hypo

SEQ ID NO: 378665 - DNA, 49 bp, Homo sapiens; identical to SEQ ID NO: 340015
  chr8:125498538-125498587
  hypo

SEQ ID NO: 378666 - DNA, 41 bp, Homo sapiens
  chr8:125573965-125574006
  hypo
cgaccctttgccctctctgcttgtgagcagcacatatggtt

SEQ ID NO: 378667 - DNA, 165 bp, Homo sapiens
  chr8:125574036-125574201
  hypo
ccttacagaccaagccaagcaccccaggtgggacacgcactctcaagcactctcaaactatagccgtggctcttggctctgagtgcgtttaaaattgagtgtgtatccaaggaaggcagacagaggccacagtccccaggatggctgaaaaatgctaatgggagc

SEQ ID NO: 378668 - DNA, 104 bp, Homo sapiens; identical to SEQ ID NO: 354234
  chr8:125580698-125580802
  hypo

SEQ ID NO: 378669 - DNA, 73 bp, Homo sapiens; identical to SEQ ID NO: 340018
  chr8:125680364-125680437
  hypo

SEQ ID NO: 378670 - DNA, 335 bp, Homo sapiens; identical to SEQ ID NO: 117170
  chr8:125985496-125985831
  hypo

SEQ ID NO: 378671 - DNA, 132 bp, Homo sapiens; identical to SEQ ID NO: 340020
  chr8:126042734-126042866
  hypo

SEQ ID NO: 378672 - DNA, 43 bp, Homo sapiens; identical to SEQ ID NO: 348315
  chr8:126044399-126044442
  hypo

SEQ ID NO: 378673 - DNA, 200 bp, Homo sapiens; identical to SEQ ID NO: 340022
  chr8:126061282-126061482
  hypo

SEQ ID NO: 378674 - DNA, 971 bp, Homo sapiens; identical to SEQ ID NO: 333568
  chr8:127569937-127570908
  hypo

SEQ ID NO: 378675 - DNA, 354 bp, Homo sapiens; identical to SEQ ID NO: 340025
  chr8:128867892-128868246
  hypo

SEQ ID NO: 378676 - DNA, 630 bp, Homo sapiens; identical to SEQ ID NO: 345945
  chr8:128871653-128872283
  hypo

SEQ ID NO: 378677 - DNA, 191 bp, Homo sapiens; identical to SEQ ID NO: 345946
  chr8:128872459-128872650
  hypo

SEQ ID NO: 378678 - DNA, 61 bp, Homo sapiens; identical to SEQ ID NO: 345947
  chr8:128888848-128888909
  hypo

SEQ ID NO: 378679 - DNA, 43 bp, Homo sapiens; identical to SEQ ID NO: 345948
  chr8:128889422-128889465
  hypo

SEQ ID NO: 378680 - DNA, 440 bp, Homo sapiens; identical to SEQ ID NO: 340028
  chr8:128893135-128893575
  hypo

SEQ ID NO: 378681 - DNA, 85 bp, Homo sapiens; identical to SEQ ID NO: 364808
  chr8:128931048-128931133
  hypo

SEQ ID NO: 378682 - DNA, 142 bp, Homo sapiens; identical to SEQ ID NO: 364809
  chr8:128931261-128931403
  hypo

SEQ ID NO: 378683 - DNA, 107 bp, Homo sapiens; identical to SEQ ID NO: 340030
  chr8:128957492-128957599
  hypo

SEQ ID NO: 378684 - DNA, 159 bp, Homo sapiens; identical to SEQ ID NO: 340032
  chr8:131064030-131064189
  hypo

SEQ ID NO: 378685 - DNA, 105 bp, Homo sapiens; identical to SEQ ID NO: 359228
  chr8:131455079-131455184
  hypo

SEQ ID NO: 378686 - DNA, 188 bp, Homo sapiens; identical to SEQ ID NO: 372005
  chr8:133491923-133492111
  hypo

SEQ ID NO: 378687 - DNA, 65 bp, Homo sapiens; identical to SEQ ID NO: 372006
  chr8:133492127-133492192
  hypo

SEQ ID NO: 378688 - DNA, 310 bp, Homo sapiens; identical to SEQ ID NO: 286199
  chr8:133493185-133493495
  hypo

SEQ ID NO: 378689 - DNA, 101 bp, Homo sapiens; identical to SEQ ID NO: 340037
  chr8:134254220-134254321
  hypo

SEQ ID NO: 378690 - DNA, 123 bp, Homo sapiens
  chr8:134268431-134268554
  hypo
cggtgataaaaattctcacctcctagagttactatgaagattaactgagatcatgcacacacagcaacgtagaatgaaactagcacatggtaaactctcaatctacgttagctaattattatc

SEQ ID NO: 378691 - DNA, 171 bp, Homo sapiens; identical to SEQ ID NO: 340039
  chr8:134335659-134335830
  hypo

SEQ ID NO: 378692 - DNA, 937 bp, Homo sapiens; identical to SEQ ID NO: 372008
  chr8:134582236-134583173
  hypo

SEQ ID NO: 378693 - DNA, 926 bp, Homo sapiens; identical to SEQ ID NO: 359232
  chr8:134583293-134584219
  hypo

SEQ ID NO: 378694 - DNA, 66 bp, Homo sapiens; identical to SEQ ID NO: 340041
  chr8:135805728-135805794
  hypo

SEQ ID NO: 378695 - DNA, 853 bp, Homo sapiens; identical to SEQ ID NO: 286211
  chr8:136469302-136470155
  hypo

SEQ ID NO: 378696 - DNA, 206 bp, Homo sapiens; identical to SEQ ID NO: 359234
  chr8:136470313-136470519
  hypo

SEQ ID NO: 378697 - DNA, 102 bp, Homo sapiens; identical to SEQ ID NO: 286213
  chr8:139509549-139509651
  hypo

SEQ ID NO: 378698 - DNA, 199 bp, Homo sapiens; identical to SEQ ID NO: 340045
  chr8:140770366-140770565
  hypo

SEQ ID NO: 378699 - DNA, 368 bp, Homo sapiens; identical to SEQ ID NO: 340046
  chr8:140785341-140785709
  hypo

SEQ ID NO: 378700 - DNA, 322 bp, Homo sapiens; identical to SEQ ID NO: 340047
  chr8:140799730-140800052
  hypo

SEQ ID NO: 378701 - DNA, 482 bp, Homo sapiens; identical to SEQ ID NO: 340048
  chr8:140815079-140815561
  hypo

SEQ ID NO: 378702 - DNA, 131 bp, Homo sapiens; identical to SEQ ID NO: 340049
  chr8:140932087-140932218
  hypo

SEQ ID NO: 378703 - DNA, 641 bp, Homo sapiens; identical to SEQ ID NO: 340050
  chr8:140937017-140937658
  hypo

SEQ ID NO: 378704 - DNA, 110 bp, Homo sapiens; identical to SEQ ID NO: 340051
  chr8:140950018-140950128
  hypo

SEQ ID NO: 378705 - DNA, 147 bp, Homo sapiens; identical to SEQ ID NO: 354246
  chr8:140963396-140963543
  hypo

SEQ ID NO: 378706 - DNA, 320 bp, Homo sapiens; identical to SEQ ID NO: 348321
  chr8:140971025-140971345
  hypo

SEQ ID NO: 378707 - DNA, 148 bp, Homo sapiens; identical to SEQ ID NO: 348322
  chr8:140971375-140971523
  hypo

SEQ ID NO: 378708 - DNA, 90 bp, Homo sapiens; identical to SEQ ID NO: 340054
  chr8:140992426-140992516
  hypo

SEQ ID NO: 378709 - DNA, 139 bp, Homo sapiens; identical to SEQ ID NO: 364830
  chr8:141107001-141107140
  hypo

SEQ ID NO: 378710 - DNA, 132 bp, Homo sapiens
  chr8:141107408-141107540
  hypo
cggctcacccgagtccgccatgcgcagccctgccactgtctgcagggtaaggacgcccacctgggttcttgtgccagccacagttgtgccacagtccgtagggtaaggactcccccagagtaaggactcccg

SEQ ID NO: 378711 - DNA, 156 bp, Homo sapiens
  chr8:141107863-141108019
  hypo
cctgcctgggtcctccatacgcagtcgcagctgtgccgctgctcccagggtcatgacgcctacccaggtccttagtgcgtggctacagacgtgccgcagtcctaccgggaaagatgccagctcatgtcctcaatgagcagctgcagaattgccgcc

SEQ ID NO: 378712 - DNA, 392 bp, Homo sapiens; identical to SEQ ID NO: 340057
  chr8:141147354-141147746
  hypo

SEQ ID NO: 378713 - DNA, 46 bp, Homo sapiens; identical to SEQ ID NO: 354251
  chr8:141159949-141159995
  hypo

SEQ ID NO: 378714 - DNA, 140 bp, Homo sapiens; identical to SEQ ID NO: 354252
  chr8:141249621-141249761
  hypo

SEQ ID NO: 378715 - DNA, 261 bp, Homo sapiens; identical to SEQ ID NO: 340060
  chr8:141458771-141459032
  hypo

SEQ ID NO: 378716 - DNA, 48 bp, Homo sapiens; identical to SEQ ID NO: 340061
  chr8:141525521-141525569
  hypo

SEQ ID NO: 378717 - DNA, 107 bp, Homo sapiens; identical to SEQ ID NO: 345951
  chr8:141534525-141534632
  hypo

SEQ ID NO: 378718 - DNA, 49 bp, Homo sapiens; identical to SEQ ID NO: 354255
  chr8:141559645-141559694
  hypo

SEQ ID NO: 378719 - DNA, 35 bp, Homo sapiens; identical to SEQ ID NO: 354256
  chr8:141559724-141559759
  hypo

SEQ ID NO: 378720 - DNA, 296 bp, Homo sapiens; identical to SEQ ID NO: 345952
  chr8:141599879-141600175
  hypo

SEQ ID NO: 378721 - DNA, 50 bp, Homo sapiens; identical to SEQ ID NO: 345953
  chr8:141600284-141600334
  hypo

SEQ ID NO: 378722 - DNA, 172 bp, Homo sapiens
  chr8:141613224-141613396
  hypo
cggatggtgcgggttgactcaggcccccacggcggcgtggcggagattaaagatggggtctaatctggccctgtggacccggctcagcagacgatggaatcccagatctcatcgggaagtctgtcagccaaaaacacacacctcaaagcggagtgcgtggtgcctccacacc

SEQ ID NO: 378723 - DNA, 62 bp, Homo sapiens; identical to SEQ ID NO: 354259
  chr8:141623736-141623798
  hypo

SEQ ID NO: 378724 - DNA, 82 bp, Homo sapiens; identical to SEQ ID NO: 340069
  chr8:141624866-141624948
  hypo

SEQ ID NO: 378725 - DNA, 104 bp, Homo sapiens; identical to SEQ ID NO: 340070
  chr8:141634072-141634176
  hypo

SEQ ID NO: 378726 - DNA, 1631 bp, Homo sapiens; identical to SEQ ID NO: 333579
  chr8:142138208-142139839
  hypo

SEQ ID NO: 378727 - DNA, 327 bp, Homo sapiens; identical to SEQ ID NO: 354261
  chr8:142227279-142227606
  hypo

SEQ ID NO: 378728 - DNA, 934 bp, Homo sapiens; identical to SEQ ID NO: 340073
  chr8:142235190-142236124
  hypo

SEQ ID NO: 378729 - DNA, 840 bp, Homo sapiens; identical to SEQ ID NO: 340074
  chr8:142240180-142241020
  hypo

SEQ ID NO: 378730 - DNA, 190 bp, Homo sapiens; identical to SEQ ID NO: 364848
  chr8:142242748-142242938
  hypo

SEQ ID NO: 378731 - DNA, 88 bp, Homo sapiens; identical to SEQ ID NO: 354263
  chr8:142243860-142243948
  hypo

SEQ ID NO: 378732 - DNA, 66 bp, Homo sapiens; identical to SEQ ID NO: 354264
  chr8:142244214-142244280
  hypo

SEQ ID NO: 378733 - DNA, 204 bp, Homo sapiens; identical to SEQ ID NO: 340078
  chr8:142248320-142248524
  hypo

SEQ ID NO: 378734 - DNA, 593 bp, Homo sapiens; identical to SEQ ID NO: 340079
  chr8:142262690-142263283
  hypo

SEQ ID NO: 378735 - DNA, 449 bp, Homo sapiens; identical to SEQ ID NO: 345316
  chr8:142317706-142318155
  hypo

SEQ ID NO: 378736 - DNA, 415 bp, Homo sapiens; identical to SEQ ID NO: 345317
  chr8:142318184-142318599
  hypo

SEQ ID NO: 378737 - DNA, 378 bp, Homo sapiens
  chr8:142349773-142350151
  hypo
cgcccagccctcacccagccccgagtcctgtgtggaaggcgattcctcccactttaccggggaggacacagaggctgagcgtggtcacggccggagccccagcgcagcatctgagctgcaggctggccgccccccaccccgctgcacccccatattccactcacagaccttcttcctgctgaacacagctgggccctgacgcctctgtgccttggccacaaggcaccttctgctcactcagctgtccctccagtccccgtagggctgcagacccaggcccacccagtcacaggcctggcagcgagggggaacaaaagggtcaaggggccgcccagggctgggaagggccttgctccacctcgctctcctccattcccc

SEQ ID NO: 378738 - DNA, 192 bp, Homo sapiens; identical to SEQ ID NO: 345956
  chr8:142367176-142367368
  hypo

SEQ ID NO: 378739 - DNA, 287 bp, Homo sapiens; identical to SEQ ID NO: 212577
  chr8:142367824-142368111
  hypo

SEQ ID NO: 378740 - DNA, 106 bp, Homo sapiens; identical to SEQ ID NO: 350835
  chr8:142427489-142427595
  hypo

SEQ ID NO: 378741 - DNA, 327 bp, Homo sapiens; identical to SEQ ID NO: 286229
  chr8:142427700-142428027
  hypo

SEQ ID NO: 378742 - DNA, 73 bp, Homo sapiens; identical to SEQ ID NO: 364859
  chr8:142439127-142439200
  hypo

SEQ ID NO: 378743 - DNA, 165 bp, Homo sapiens; identical to SEQ ID NO: 340087
  chr8:142590914-142591079
  hypo

SEQ ID NO: 378744 - DNA, 76 bp, Homo sapiens; identical to SEQ ID NO: 364860
  chr8:142630171-142630247
  hypo

SEQ ID NO: 378745 - DNA, 337 bp, Homo sapiens; identical to SEQ ID NO: 364861
  chr8:142630288-142630625
  hypo

SEQ ID NO: 378746 - DNA, 181 bp, Homo sapiens; identical to SEQ ID NO: 364862
  chr8:142880985-142881166
  hypo

SEQ ID NO: 378747 - DNA, 122 bp, Homo sapiens; identical to SEQ ID NO: 364863
  chr8:142881196-142881318
  hypo

SEQ ID NO: 378748 - DNA, 69 bp, Homo sapiens
  chr8:142984443-142984512
  hypo
cgcaggtccgctctatcgcaggccgggcacgctttgctcagaggcccacactgcagaagtccagtctca

SEQ ID NO: 378749 - DNA, 120 bp, Homo sapiens; identical to SEQ ID NO: 212589
  chr8:143054871-143054991
  hypo

SEQ ID NO: 378750 - DNA, 219 bp, Homo sapiens; identical to SEQ ID NO: 364865
  chr8:143089100-143089319
  hypo

SEQ ID NO: 378751 - DNA, 241 bp, Homo sapiens; identical to SEQ ID NO: 340094
  chr8:143234575-143234816
  hypo

SEQ ID NO: 378752 - DNA, 55 bp, Homo sapiens; identical to SEQ ID NO: 354273
  chr8:143333267-143333322
  hypo

SEQ ID NO: 378753 - DNA, 36 bp, Homo sapiens; identical to SEQ ID NO: 364868
  chr8:143334502-143334538
  hypo

SEQ ID NO: 378754 - DNA, 640 bp, Homo sapiens
  chr8:143386158-143386798
  hypo
cgctgtgagctacggggtagagacgttcctcccaggggggacatggccatacacgcccctggagagcggcatgacggttgagcacagcctcctcctgccagcggtgacaggccctacaacagccccactgactggggtcccgtggcctgggtaaagtcaaagcccccaggtaaacataacaaacttttgaggtaagaggtccccggggcagcccggctggtgtgcccgaggacggagatgtaggagcctgccctcggccctgacagcaaacagccacaggcgagggggctggaggaaatgtgctccctcccacgatgaaatcctccagggcagctaatgcgggcgagtgagatggccaggtggagaaggcaccacaggacgttctgtgcgatgttccctggacttgggggtttcagtgacagctccccaggagctgtgggcagagggtgccaggcacccatggagacctgcctcggatctgtgccttgggattgatgccacctcctgcatgtggagaaggggaagctcaggaggataggggagggcgcaggggtgggaggggggtgcaaacggggttccgtgtggacgcccaggaaagcggccaggctggggtgcgggctgtgtggacacccaggaaggc

SEQ ID NO: 378755 - DNA, 388 bp, Homo sapiens; identical to SEQ ID NO: 364870
  chr8:143386940-143387328
  hypo

SEQ ID NO: 378756 - DNA, 162 bp, Homo sapiens; identical to SEQ ID NO: 364871
  chr8:143397305-143397467
  hypo

SEQ ID NO: 378757 - DNA, 141 bp, Homo sapiens; identical to SEQ ID NO: 364872
  chr8:143436836-143436977
  hypo

SEQ ID NO: 378758 - DNA, 107 bp, Homo sapiens; identical to SEQ ID NO: 364873
  chr8:143509044-143509151
  hypo

SEQ ID NO: 378759 - DNA, 64 bp, Homo sapiens; identical to SEQ ID NO: 359243
  chr8:143531771-143531835
  hypo

SEQ ID NO: 378760 - DNA, 120 bp, Homo sapiens; identical to SEQ ID NO: 347012
  chr8:143531858-143531978
  hypo

SEQ ID NO: 378761 - DNA, 296 bp, Homo sapiens; identical to SEQ ID NO: 117271
  chr8:143556722-143557018
  hypo

SEQ ID NO: 378762 - DNA, 68 bp, Homo sapiens; identical to SEQ ID NO: 345958
  chr8:143558643-143558711
  hypo

SEQ ID NO: 378763 - DNA, 220 bp, Homo sapiens; identical to SEQ ID NO: 340107
  chr8:143582357-143582577
  hypo

SEQ ID NO: 378764 - DNA, 311 bp, Homo sapiens; identical to SEQ ID NO: 364879
  chr8:143614687-143614998
  hypo

SEQ ID NO: 378765 - DNA, 241 bp, Homo sapiens; identical to SEQ ID NO: 364880
  chr8:143660391-143660632
  hypo

SEQ ID NO: 378766 - DNA, 260 bp, Homo sapiens; identical to SEQ ID NO: 354278
  chr8:143662794-143663054
  hypo

SEQ ID NO: 378767 - DNA, 321 bp, Homo sapiens; identical to SEQ ID NO: 340114
  chr8:144178383-144178704
  hypo

SEQ ID NO: 378768 - DNA, 423 bp, Homo sapiens; identical to SEQ ID NO: 354279
  chr8:144205313-144205736
  hypo

SEQ ID NO: 378769 - DNA, 112 bp, Homo sapiens; identical to SEQ ID NO: 364884
  chr8:144222962-144223074
  hypo

SEQ ID NO: 378770 - DNA, 41 bp, Homo sapiens; identical to SEQ ID NO: 364885
  chr8:144292304-144292345
  hypo

SEQ ID NO: 378771 - DNA, 254 bp, Homo sapiens; identical to SEQ ID NO: 364886
  chr8:144292470-144292724
  hypo

SEQ ID NO: 378772 - DNA, 202 bp, Homo sapiens; identical to SEQ ID NO: 364887
  chr8:144293893-144294095
  hypo

SEQ ID NO: 378773 - DNA, 65 bp, Homo sapiens; identical to SEQ ID NO: 310299
  chr8:144343416-144343481
  hypo

SEQ ID NO: 378774 - DNA, 227 bp, Homo sapiens; identical to SEQ ID NO: 212625
  chr8:144343992-144344219
  hypo

SEQ ID NO: 378775 - DNA, 231 bp, Homo sapiens; identical to SEQ ID NO: 340121
  chr8:144351704-144351935
  hypo

SEQ ID NO: 378776 - DNA, 283 bp, Homo sapiens; identical to SEQ ID NO: 345959
  chr8:144359694-144359977
  hypo

SEQ ID NO: 378777 - DNA, 91 bp, Homo sapiens; identical to SEQ ID NO: 345960
  chr8:144360545-144360636
  hypo

SEQ ID NO: 378778 - DNA, 307 bp, Homo sapiens; identical to SEQ ID NO: 354285
  chr8:144380308-144380615
  hypo

SEQ ID NO: 378779 - DNA, 214 bp, Homo sapiens; identical to SEQ ID NO: 354286
  chr8:144380645-144380859
  hypo

SEQ ID NO: 378780 - DNA, 129 bp, Homo sapiens; identical to SEQ ID NO: 354287
  chr8:144383407-144383536
  hypo

SEQ ID NO: 378781 - DNA, 236 bp, Homo sapiens; identical to SEQ ID NO: 354288
  chr8:144413516-144413752
  hypo

SEQ ID NO: 378782 - DNA, 244 bp, Homo sapiens; identical to SEQ ID NO: 354289
  chr8:144413782-144414026
  hypo

SEQ ID NO: 378783 - DNA, 207 bp, Homo sapiens; identical to SEQ ID NO: 348337
  chr8:144414283-144414490
  hypo

SEQ ID NO: 378784 - DNA, 51 bp, Homo sapiens; identical to SEQ ID NO: 354291
  chr8:144457685-144457736
  hypo

SEQ ID NO: 378785 - DNA, 70 bp, Homo sapiens; identical to SEQ ID NO: 354292
  chr8:144457835-144457905
  hypo

SEQ ID NO: 378786 - DNA, 538 bp, Homo sapiens; identical to SEQ ID NO: 364901
  chr8:144461002-144461540
  hypo

SEQ ID NO: 378787 - DNA, 101 bp, Homo sapiens; identical to SEQ ID NO: 286248
  chr8:144512372-144512473
  hypo

SEQ ID NO: 378788 - DNA, 139 bp, Homo sapiens
  chr8:144557088-144557227
  hypo
cggccccaggtgtgcgctcgcccgggcgtgtttgccgtacctggcatcatcctttttccaaaagcgaaacatggtgcttgtgagcaactctcccccaccccacagaaaatcaggggccgctcagccacgcgaggtgggc

SEQ ID NO: 378789 - DNA, 231 bp, Homo sapiens; identical to SEQ ID NO: 340131
  chr8:144575951-144576182
  hypo

SEQ ID NO: 378790 - DNA, 47 bp, Homo sapiens; identical to SEQ ID NO: 364902
  chr8:144589930-144589977
  hypo

SEQ ID NO: 378791 - DNA, 220 bp, Homo sapiens; identical to SEQ ID NO: 364903
  chr8:144590082-144590302
  hypo

SEQ ID NO: 378792 - DNA, 161 bp, Homo sapiens; identical to SEQ ID NO: 340134
  chr8:144621169-144621330
  hypo

SEQ ID NO: 378793 - DNA, 120 bp, Homo sapiens; identical to SEQ ID NO: 286253
  chr8:144636569-144636689
  hypo

SEQ ID NO: 378794 - DNA, 394 bp, Homo sapiens; identical to SEQ ID NO: 350842
  chr8:144640377-144640771
  hypo

SEQ ID NO: 378795 - DNA, 173 bp, Homo sapiens
  chr8:144656945-144657118
  hypo
aggacaagctgtggggaaaagtgagtgattcgtgttgtttccagtcagccccgctccgagtctcagggggactgccccgcacacagactgttcaccagggcctgcagcctctcggacagcaccacctgcagggagcagaggacaggagcggtgggcagggtgagggcgggggc

SEQ ID NO: 378796 - DNA, 214 bp, Homo sapiens; identical to SEQ ID NO: 354295
  chr8:144658291-144658505
  hypo

SEQ ID NO: 378797 - DNA, 88 bp, Homo sapiens; identical to SEQ ID NO: 345961
  chr8:144676118-144676206
  hypo

SEQ ID NO: 378798 - DNA, 93 bp, Homo sapiens; identical to SEQ ID NO: 364909
  chr8:144683804-144683897
  hypo

SEQ ID NO: 378799 - DNA, 270 bp, Homo sapiens; identical to SEQ ID NO: 340143
  chr8:145226085-145226355
  hypo

SEQ ID NO: 378800 - DNA, 154 bp, Homo sapiens; identical to SEQ ID NO: 340144
  chr8:145661380-145661534
  hypo

SEQ ID NO: 378801 - DNA, 429 bp, Homo sapiens; identical to SEQ ID NO: 333598
  chr8:145733644-145734073
  hypo

SEQ ID NO: 378802 - DNA, 72 bp, Homo sapiens
  chr8:145745207-145745279
  hypo
gctgttcaaggtggccttcatggacaagaagacagtggtactgcgcgagttggtacacacgtggcccttccc

SEQ ID NO: 378803 - DNA, 41 bp, Homo sapiens; identical to SEQ ID NO: 364913
  chr8:145758485-145758526
  hypo

SEQ ID NO: 378804 - DNA, 36 bp, Homo sapiens; identical to SEQ ID NO: 364914
  chr8:145758692-145758728
  hypo

SEQ ID NO: 378805 - DNA, 541 bp, Homo sapiens; identical to SEQ ID NO: 340149
  chr8:145813621-145814162
  hypo

SEQ ID NO: 378806 - DNA, 632 bp, Homo sapiens; identical to SEQ ID NO: 340150
  chr8:145845229-145845861
  hypo

SEQ ID NO: 378807 - DNA, 96 bp, Homo sapiens; identical to SEQ ID NO: 340151
  chr8:145854692-145854788
  hypo

SEQ ID NO: 378808 - DNA, 526 bp, Homo sapiens; identical to SEQ ID NO: 333600
  chr8:145910996-145911522
  hypo

SEQ ID NO: 378809 - DNA, 52 bp, Homo sapiens
  chr8:146079313-146079365
  hypo
tgacaggttgggtgcggtggctcacgcctgtaatcccagcactttgggaggc

SEQ ID NO: 378810 - DNA, 63 bp, Homo sapiens; identical to SEQ ID NO: 340154
  chr8:146105109-146105172
  hypo

SEQ ID NO: 378811 - DNA, 81 bp, Homo sapiens; identical to SEQ ID NO: 340155
  chr8:146176654-146176735
  hypo

SEQ ID NO: 378812 - DNA, 65 bp, Homo sapiens; identical to SEQ ID NO: 340157
  chr9:173878-173943
  hypo

SEQ ID NO: 378813 - DNA, 92 bp, Homo sapiens; identical to SEQ ID NO: 359261
  chr9:214559-214651
  hypo

SEQ ID NO: 378814 - DNA, 878 bp, Homo sapiens; identical to SEQ ID NO: 333605
  chr9:503936-504814
  hypo

SEQ ID NO: 378815 - DNA, 771 bp, Homo sapiens; identical to SEQ ID NO: 372043
  chr9:504833-505604
  hypo

SEQ ID NO: 378816 - DNA, 82 bp, Homo sapiens; identical to SEQ ID NO: 372044
  chr9:505639-505721
  hypo

SEQ ID NO: 378817 - DNA, 440 bp, Homo sapiens; identical to SEQ ID NO: 340164
  chr9:2047360-2047800
  hypo

SEQ ID NO: 378818 - DNA, 165 bp, Homo sapiens; identical to SEQ ID NO: 310441
  chr9:2177850-2178015
  hypo

SEQ ID NO: 378819 - DNA, 71 bp, Homo sapiens
  chr9:2178158-2178229
  hypo
catggccacgtcgcggtgtctgttcacttccatgaagaggagaggttcttgtccaccaacacctgtgaacc

SEQ ID NO: 378820 - DNA, 200 bp, Homo sapiens; identical to SEQ ID NO: 354303
  chr9:2876419-2876619
  hypo

SEQ ID NO: 378821 - DNA, 714 bp, Homo sapiens
  chr9:2933129-2933843
  hypo
cgctgccatgacgccggctgcagtggggtacaggagtaggtcgcgggtcctcaggtacagactctgaggtgtgcagcccctggagcctgcacctaggagcgcccccggaacctgctgccctgagaactcacccctgggagccccgggaatagggctgggcccagccaccccctggagggagagtagggaggtgaggcacagaaaatgggcagagagggtccccaagacagaactgggcccagggcggtgccgcgcttgcacgcggagcatgggggccgggcccgagacatggaactggggccccgcttcaggggcccagggcaagaagtgggagcggcacccacttcgaggacctgcccagtggcatgaccactgcgcccaacccgccgatggcgccaagttcctgcgcctcaggaagaggctccgtatggggccgcctgaggccgtatccccaggacctgccccacattaaggtgaccgctaagccagacaatcctgatggtgaggccccgtgcctgccatctgctcctggagacgccccccaaccccaggcatggccgtcagccggcgaggcggtactgaggcagggggcgcgtcctggtcattggagagtttcagcccagtgggtgaaccagacacactgttcaagggggcagcggttagtaagcaggacgagggggagccccaggccgcagggagaactcgtgacaacgt

SEQ ID NO: 378822 - DNA, 98 bp, Homo sapiens
  chr9:2933873-2933971
  hypo
agtgaggacatgaagcccccgcctcaggctgcaaggaggcgccaccagggctgcaagctccacggagctggtgggacctggagacaggcgagaacccc

SEQ ID NO: 378823 - DNA, 167 bp, Homo sapiens; identical to SEQ ID NO: 340170
  chr9:4864421-4864588
  hypo

SEQ ID NO: 378824 - DNA, 70 bp, Homo sapiens; identical to SEQ ID NO: 359268
  chr9:6412900-6412970
  hypo

SEQ ID NO: 378825 - DNA, 201 bp, Homo sapiens; identical to SEQ ID NO: 354305
  chr9:6868324-6868525
  hypo

SEQ ID NO: 378826 - DNA, 205 bp, Homo sapiens; identical to SEQ ID NO: 340173
  chr9:6997072-6997277
  hypo

SEQ ID NO: 378827 - DNA, 229 bp, Homo sapiens; identical to SEQ ID NO: 340174
  chr9:7028698-7028927
  hypo

SEQ ID NO: 378828 - DNA, 203 bp, Homo sapiens; identical to SEQ ID NO: 340175
  chr9:7172217-7172420
  hypo

SEQ ID NO: 378829 - DNA, 347 bp, Homo sapiens; identical to SEQ ID NO: 286324
  chr9:13278956-13279303
  hypo

SEQ ID NO: 378830 - DNA, 227 bp, Homo sapiens; identical to SEQ ID NO: 201670
  chr9:13279406-13279633
  hypo

SEQ ID NO: 378831 - DNA, 125 bp, Homo sapiens; identical to SEQ ID NO: 354307
  chr9:13323322-13323447
  hypo

SEQ ID NO: 378832 - DNA, 194 bp, Homo sapiens; identical to SEQ ID NO: 340178
  chr9:14232126-14232320
  hypo

SEQ ID NO: 378833 - DNA, 2011 bp, Homo sapiens; identical to SEQ ID NO: 350852
  chr9:14313785-14315796
  hypo

SEQ ID NO: 378834 - DNA, 131 bp, Homo sapiens; identical to SEQ ID NO: 372065
  chr9:16871284-16871415
  hypo

SEQ ID NO: 378835 - DNA, 43 bp, Homo sapiens; identical to SEQ ID NO: 364936
  chr9:19374763-19374806
  hypo

SEQ ID NO: 378836 - DNA, 591 bp, Homo sapiens; identical to SEQ ID NO: 350855
  chr9:20620754-20621345
  hypo

SEQ ID NO: 378837 - DNA, 184 bp, Homo sapiens; identical to SEQ ID NO: 340185
  chr9:27212729-27212913
  hypo

SEQ ID NO: 378838 - DNA, 568 bp, Homo sapiens; identical to SEQ ID NO: 345323
  chr9:27528536-27529104
  hypo

SEQ ID NO: 378839 - DNA, 182 bp, Homo sapiens; identical to SEQ ID NO: 201692
  chr9:27529157-27529339
  hypo

SEQ ID NO: 378840 - DNA, 567 bp, Homo sapiens; identical to SEQ ID NO: 345325
  chr9:27529340-27529907
  hypo

SEQ ID NO: 378841 - DNA, 299 bp, Homo sapiens; identical to SEQ ID NO: 286381
  chr9:29212828-29213127
  hypo

SEQ ID NO: 378842 - DNA, 70 bp, Homo sapiens; identical to SEQ ID NO: 340188
  chr9:33023517-33023587
  hypo

SEQ ID NO: 378843 - DNA, 665 bp, Homo sapiens; identical to SEQ ID NO: 340190
  chr9:34318282-34318947
  hypo

SEQ ID NO: 378844 - DNA, 729 bp, Homo sapiens; identical to SEQ ID NO: 354317
  chr9:34372076-34372805
  hypo

SEQ ID NO: 378845 - DNA, 264 bp, Homo sapiens; identical to SEQ ID NO: 359298
  chr9:34591191-34591455
  hypo

SEQ ID NO: 378846 - DNA, 31 bp, Homo sapiens; identical to SEQ ID NO: 359299
  chr9:34591656-34591687
  hypo

SEQ ID NO: 378847 - DNA, 282 bp, Homo sapiens; identical to SEQ ID NO: 350864
  chr9:35161771-35162053
  hypo

SEQ ID NO: 378848 - DNA, 294 bp, Homo sapiens; identical to SEQ ID NO: 354319
  chr9:35711931-35712225
  hypo

SEQ ID NO: 378849 - DNA, 41 bp, Homo sapiens; identical to SEQ ID NO: 340196
  chr9:35712966-35713007
  hypo

SEQ ID NO: 378850 - DNA, 241 bp, Homo sapiens; identical to SEQ ID NO: 286422
  chr9:37035886-37036127
  hypo

SEQ ID NO: 378851 - DNA, 83 bp, Homo sapiens; identical to SEQ ID NO: 340200
  chr9:37118395-37118478
  hypo

SEQ ID NO: 378852 - DNA, 60 bp, Homo sapiens; identical to SEQ ID NO: 340201
  chr9:37118799-37118859
  hypo

SEQ ID NO: 378853 - DNA, 224 bp, Homo sapiens
  chr9:37928524-37928748
  hypo
cgctgctaaataccctacgacgcacagcacagcccccacaacaaagaataatgtagcccagcttcccacagtgcctaggctaaagccacaccactcgctagacggccagtgcctcaaattctgcatccacaacatgggaataaccagagtccacccttgctgctgtggtgaggggcagatgagaacctccacatgaagtgtgaacgtctgacgaatcccggctc

SEQ ID NO: 378854 - DNA, 360 bp, Homo sapiens; identical to SEQ ID NO: 340203
  chr9:37950454-37950814
  hypo

SEQ ID NO: 378855 - DNA, 62 bp, Homo sapiens; identical to SEQ ID NO: 340205
  chr9:71760295-71760357
  hypo

SEQ ID NO: 378856 - DNA, 380 bp, Homo sapiens; identical to SEQ ID NO: 350871
  chr9:71788570-71788950
  hypo

SEQ ID NO: 378857 - DNA, 149 bp, Homo sapiens; identical to SEQ ID NO: 359313
  chr9:74061513-74061662
  hypo

SEQ ID NO: 378858 - DNA, 163 bp, Homo sapiens; identical to SEQ ID NO: 333671
  chr9:74640002-74640165
  hypo

SEQ ID NO: 378859 - DNA, 112 bp, Homo sapiens; identical to SEQ ID NO: 340209
  chr9:75271069-75271181
  hypo

SEQ ID NO: 378860 - DNA, 233 bp, Homo sapiens; identical to SEQ ID NO: 340210
  chr9:76089552-76089785
  hypo

SEQ ID NO: 378861 - DNA, 76 bp, Homo sapiens
  chr9:78557022-78557098
  hypo
cgggcatgcgccaaagcgtagcgcactcgttgcctgcccggagcagctgctaccaactgaggccggctgtcctcag

SEQ ID NO: 378862 - DNA, 422 bp, Homo sapiens; identical to SEQ ID NO: 372116
  chr9:79520881-79521303
  hypo

SEQ ID NO: 378863 - DNA, 210 bp, Homo sapiens; identical to SEQ ID NO: 372117
  chr9:79521333-79521543
  hypo

SEQ ID NO: 378864 - DNA, 472 bp, Homo sapiens; identical to SEQ ID NO: 201742
  chr9:79630544-79631016
  hypo

SEQ ID NO: 378865 - DNA, 96 bp, Homo sapiens; identical to SEQ ID NO: 340216
  chr9:80007524-80007620
  hypo

SEQ ID NO: 378866 - DNA, 110 bp, Homo sapiens; identical to SEQ ID NO: 340217
  chr9:80475592-80475702
  hypo

SEQ ID NO: 378867 - DNA, 421 bp, Homo sapiens; identical to SEQ ID NO: 201747
  chr9:80645902-80646323
  hypo

SEQ ID NO: 378868 - DNA, 662 bp, Homo sapiens; identical to SEQ ID NO: 201748
  chr9:80646509-80647171
  hypo

SEQ ID NO: 378869 - DNA, 35 bp, Homo sapiens; identical to SEQ ID NO: 364963
  chr9:80833898-80833933
  hypo

SEQ ID NO: 378870 - DNA, 182 bp, Homo sapiens; identical to SEQ ID NO: 364964
  chr9:80834011-80834193
  hypo

SEQ ID NO: 378871 - DNA, 330 bp, Homo sapiens; identical to SEQ ID NO: 340220
  chr9:81892891-81893221
  hypo

SEQ ID NO: 378872 - DNA, 260 bp, Homo sapiens; identical to SEQ ID NO: 286495
  chr9:82185383-82185643
  hypo

SEQ ID NO: 378873 - DNA, 469 bp, Homo sapiens; identical to SEQ ID NO: 347033
  chr9:82185703-82186172
  hypo

SEQ ID NO: 378874 - DNA, 64 bp, Homo sapiens; identical to SEQ ID NO: 333690
  chr9:82188495-82188559
  hypo

SEQ ID NO: 378875 - DNA, 42 bp, Homo sapiens; identical to SEQ ID NO: 340223
  chr9:82275758-82275800
  hypo

SEQ ID NO: 378876 - DNA, 128 bp, Homo sapiens; identical to SEQ ID NO: 340224
  chr9:85843823-85843951
  hypo

SEQ ID NO: 378877 - DNA, 396 bp, Homo sapiens; identical to SEQ ID NO: 354332
  chr9:86590191-86590587
  hypo

SEQ ID NO: 378878 - DNA, 218 bp, Homo sapiens; identical to SEQ ID NO: 333696
  chr9:88355794-88356012
  hypo

SEQ ID NO: 378879 - DNA, 92 bp, Homo sapiens; identical to SEQ ID NO: 340227
  chr9:88661274-88661366
  hypo

SEQ ID NO: 378880 - DNA, 431 bp, Homo sapiens; identical to SEQ ID NO: 201763
  chr9:89561318-89561749
  hypo

SEQ ID NO: 378881 - DNA, 494 bp, Homo sapiens; identical to SEQ ID NO: 350894
  chr9:89561779-89562273
  hypo

SEQ ID NO: 378882 - DNA, 276 bp, Homo sapiens; identical to SEQ ID NO: 350895
  chr9:90112514-90112790
  hypo

SEQ ID NO: 378883 - DNA, 167 bp, Homo sapiens; identical to SEQ ID NO: 354336
  chr9:91993499-91993666
  hypo

SEQ ID NO: 378884 - DNA, 62 bp, Homo sapiens; identical to SEQ ID NO: 348354
  chr9:91996203-91996265
  hypo

SEQ ID NO: 378885 - DNA, 152 bp, Homo sapiens; identical to SEQ ID NO: 354338
  chr9:92227900-92228052
  hypo

SEQ ID NO: 378886 - DNA, 544 bp, Homo sapiens; identical to SEQ ID NO: 347038
  chr9:93955385-93955929
  hypo

SEQ ID NO: 378887 - DNA, 267 bp, Homo sapiens; identical to SEQ ID NO: 201780
  chr9:93956177-93956444
  hypo

SEQ ID NO: 378888 - DNA, 146 bp, Homo sapiens; identical to SEQ ID NO: 340236
  chr9:95381233-95381379
  hypo

SEQ ID NO: 378889 - DNA, 221 bp, Homo sapiens; identical to SEQ ID NO: 364982
  chr9:95417651-95417872
  hypo

SEQ ID NO: 378890 - DNA, 46 bp, Homo sapiens
  chr9:95484997-95485043
  hypo
cgagtagtcctgcagcagacgagcttcccggaatttgtactccttg

SEQ ID NO: 378891 - DNA, 310 bp, Homo sapiens; identical to SEQ ID NO: 340239
  chr9:95492133-95492443
  hypo

SEQ ID NO: 378892 - DNA, 369 bp, Homo sapiens; identical to SEQ ID NO: 201783
  chr9:95570986-95571355
  hypo

SEQ ID NO: 378893 - DNA, 370 bp, Homo sapiens; identical to SEQ ID NO: 340241
  chr9:96069038-96069408
  hypo

SEQ ID NO: 378894 - DNA, 55 bp, Homo sapiens; identical to SEQ ID NO: 340242
  chr9:96155825-96155880
  hypo

SEQ ID NO: 378895 - DNA, 280 bp, Homo sapiens; identical to SEQ ID NO: 340243
  chr9:96348822-96349102
  hypo

SEQ ID NO: 378896 - DNA, 139 bp, Homo sapiens; identical to SEQ ID NO: 354343
  chr9:96435988-96436127
  hypo

SEQ ID NO: 378897 - DNA, 280 bp, Homo sapiens; identical to SEQ ID NO: 354344
  chr9:96573430-96573710
  hypo

SEQ ID NO: 378898 - DNA, 174 bp, Homo sapiens; identical to SEQ ID NO: 201793
  chr9:96717633-96717807
  hypo

SEQ ID NO: 378899 - DNA, 429 bp, Homo sapiens; identical to SEQ ID NO: 347043
  chr9:97767434-97767863
  hypo

SEQ ID NO: 378900 - DNA, 124 bp, Homo sapiens; identical to SEQ ID NO: 340250
  chr9:97808146-97808270
  hypo

SEQ ID NO: 378901 - DNA, 182 bp, Homo sapiens; identical to SEQ ID NO: 348359
  chr9:97865087-97865269
  hypo

SEQ ID NO: 378902 - DNA, 293 bp, Homo sapiens; identical to SEQ ID NO: 364993
  chr9:97867233-97867526
  hypo

SEQ ID NO: 378903 - DNA, 37 bp, Homo sapiens; identical to SEQ ID NO: 364994
  chr9:97867556-97867593
  hypo

SEQ ID NO: 378904 - DNA, 1264 bp, Homo sapiens; identical to SEQ ID NO: 333721
  chr9:98272643-98273907
  hypo

SEQ ID NO: 378905 - DNA, 262 bp, Homo sapiens; identical to SEQ ID NO: 340254
  chr9:99139238-99139500
  hypo

SEQ ID NO: 378906 - DNA, 723 bp, Homo sapiens; identical to SEQ ID NO: 364997
  chr9:99258639-99259362
  hypo

SEQ ID NO: 378907 - DNA, 251 bp, Homo sapiens; identical to SEQ ID NO: 364998
  chr9:99259405-99259656
  hypo

SEQ ID NO: 378908 - DNA, 41 bp, Homo sapiens; identical to SEQ ID NO: 359367
  chr9:99984107-99984148
  hypo

SEQ ID NO: 378909 - DNA, 115 bp, Homo sapiens
  chr9:100267724-100267839
  hypo
gtgatgagttgtgaccactgcgttgttgctctccatgcccaaaggaatgaaggaaagcagaactgcctctgggcatccttcagcctccttcatagactcatcgctgctgcccatc

SEQ ID NO: 378910 - DNA, 107 bp, Homo sapiens; identical to SEQ ID NO: 340259
  chr9:100299592-100299699
  hypo

SEQ ID NO: 378911 - DNA, 131 bp, Homo sapiens; identical to SEQ ID NO: 354350
  chr9:100843158-100843289
  hypo

SEQ ID NO: 378912 - DNA, 150 bp, Homo sapiens; identical to SEQ ID NO: 340263
  chr9:100849678-100849828
  hypo

SEQ ID NO: 378913 - DNA, 703 bp, Homo sapiens; identical to SEQ ID NO: 333740
  chr9:101569830-101570533
  hypo

SEQ ID NO: 378914 - DNA, 151 bp, Homo sapiens; identical to SEQ ID NO: 340267
  chr9:103493427-103493578
  hypo

SEQ ID NO: 378915 - DNA, 148 bp, Homo sapiens; identical to SEQ ID NO: 201823
  chr9:104248697-104248845
  hypo

SEQ ID NO: 378916 - DNA, 499 bp, Homo sapiens; identical to SEQ ID NO: 201824
  chr9:104248975-104249474
  hypo

SEQ ID NO: 378917 - DNA, 68 bp, Homo sapiens; identical to SEQ ID NO: 372188
  chr9:108418403-108418471
  hypo

SEQ ID NO: 378918 - DNA, 171 bp, Homo sapiens; identical to SEQ ID NO: 372189
  chr9:108418947-108419118
  hypo

SEQ ID NO: 378919 - DNA, 181 bp, Homo sapiens; identical to SEQ ID NO: 340270
  chr9:109689799-109689980
  hypo

SEQ ID NO: 378920 - DNA, 250 bp, Homo sapiens; identical to SEQ ID NO: 340271
  chr9:109690731-109690981
  hypo

SEQ ID NO: 378921 - DNA, 321 bp, Homo sapiens; identical to SEQ ID NO: 340272
  chr9:110390680-110391001
  hypo

SEQ ID NO: 378922 - DNA, 179 bp, Homo sapiens; identical to SEQ ID NO: 340273
  chr9:112040343-112040522
  hypo

SEQ ID NO: 378923 - DNA, 130 bp, Homo sapiens; identical to SEQ ID NO: 201836
  chr9:112081563-112081693
  hypo

SEQ ID NO: 378924 - DNA, 860 bp, Homo sapiens; identical to SEQ ID NO: 350926
  chr9:112081773-112082633
  hypo

SEQ ID NO: 378925 - DNA, 178 bp, Homo sapiens; identical to SEQ ID NO: 333756
  chr9:113017465-113017643
  hypo

SEQ ID NO: 378926 - DNA, 188 bp, Homo sapiens; identical to SEQ ID NO: 340276
  chr9:114556879-114557067
  hypo

SEQ ID NO: 378927 - DNA, 153 bp, Homo sapiens; identical to SEQ ID NO: 340277
  chr9:114860736-114860889
  hypo

SEQ ID NO: 378928 - DNA, 46 bp, Homo sapiens; identical to SEQ ID NO: 340278
  chr9:115087431-115087477
  hypo

SEQ ID NO: 378929 - DNA, 273 bp, Homo sapiens; identical to SEQ ID NO: 345966
  chr9:116059825-116060098
  hypo

SEQ ID NO: 378930 - DNA, 631 bp, Homo sapiens; identical to SEQ ID NO: 345967
  chr9:116060128-116060759
  hypo

SEQ ID NO: 378931 - DNA, 190 bp, Homo sapiens; identical to SEQ ID NO: 354358
  chr9:116065600-116065790
  hypo

SEQ ID NO: 378932 - DNA, 302 bp, Homo sapiens; identical to SEQ ID NO: 354359
  chr9:116065827-116066129
  hypo

SEQ ID NO: 378933 - DNA, 395 bp, Homo sapiens; identical to SEQ ID NO: 333758
  chr9:116111663-116112058
  hypo

SEQ ID NO: 378934 - DNA, 106 bp, Homo sapiens; identical to SEQ ID NO: 365017
  chr9:116299412-116299518
  hypo

SEQ ID NO: 378935 - DNA, 149 bp, Homo sapiens; identical to SEQ ID NO: 340283
  chr9:116708859-116709008
  hypo

SEQ ID NO: 378936 - DNA, 127 bp, Homo sapiens; identical to SEQ ID NO: 340284
  chr9:116728180-116728307
  hypo

SEQ ID NO: 378937 - DNA, 121 bp, Homo sapiens; identical to SEQ ID NO: 340285
  chr9:116749805-116749926
  hypo

SEQ ID NO: 378938 - DNA, 280 bp, Homo sapiens; identical to SEQ ID NO: 340286
  chr9:116750660-116750940
  hypo

SEQ ID NO: 378939 - DNA, 134 bp, Homo sapiens; identical to SEQ ID NO: 340287
  chr9:116761540-116761674
  hypo

SEQ ID NO: 378940 - DNA, 244 bp, Homo sapiens; identical to SEQ ID NO: 365021
  chr9:116770596-116770840
  hypo

SEQ ID NO: 378941 - DNA, 299 bp, Homo sapiens; identical to SEQ ID NO: 340289
  chr9:116790949-116791248
  hypo

SEQ ID NO: 378942 - DNA, 113 bp, Homo sapiens; identical to SEQ ID NO: 340290
  chr9:116796590-116796703
  hypo

SEQ ID NO: 378943 - DNA, 42 bp, Homo sapiens; identical to SEQ ID NO: 354364
  chr9:116800647-116800689
  hypo

SEQ ID NO: 378944 - DNA, 563 bp, Homo sapiens; identical to SEQ ID NO: 354365
  chr9:116800730-116801293
  hypo

SEQ ID NO: 378945 - DNA, 1421 bp, Homo sapiens; identical to SEQ ID NO: 340292
  chr9:116810967-116812388
  hypo

SEQ ID NO: 378946 - DNA, 390 bp, Homo sapiens; identical to SEQ ID NO: 340293
  chr9:116813618-116814008
  hypo

SEQ ID NO: 378947 - DNA, 216 bp, Homo sapiens; identical to SEQ ID NO: 340294
  chr9:116857267-116857483
  hypo

SEQ ID NO: 378948 - DNA, 404 bp, Homo sapiens; identical to SEQ ID NO: 340295
  chr9:116971577-116971981
  hypo

SEQ ID NO: 378949 - DNA, 124 bp, Homo sapiens; identical to SEQ ID NO: 340296
  chr9:117045899-117046023
  hypo

SEQ ID NO: 378950 - DNA, 88 bp, Homo sapiens; identical to SEQ ID NO: 340297
  chr9:119976921-119977009
  hypo

SEQ ID NO: 378951 - DNA, 213 bp, Homo sapiens
  chr9:123146246-123146459
  hypo
cgaggccagggcgaccttgttctcttatttccctgtgtctgcccacaccgtcggccagtgtcacacacgagctgggaccacatgctgttctgtttggaacgagaaagtggcattaatacaaacagagggtcgttttagacctgaaaccatgtaattaagctctcccgtgaatgcctgttaacaaggaggtgctttcgcatttgagagaagcac

SEQ ID NO: 378952 - DNA, 126 bp, Homo sapiens; identical to SEQ ID NO: 340300
  chr9:123176142-123176268
  hypo

SEQ ID NO: 378953 - DNA, 398 bp, Homo sapiens; identical to SEQ ID NO: 340301
  chr9:123210124-123210522
  hypo

SEQ ID NO: 378954 - DNA, 1023 bp, Homo sapiens; identical to SEQ ID NO: 333767
  chr9:124131788-124132811
  hypo

SEQ ID NO: 378955 - DNA, 250 bp, Homo sapiens; identical to SEQ ID NO: 340303
  chr9:124289769-124290019
  hypo

SEQ ID NO: 378956 - DNA, 55 bp, Homo sapiens; identical to SEQ ID NO: 340304
  chr9:124639413-124639468
  hypo

SEQ ID NO: 378957 - DNA, 90 bp, Homo sapiens; identical to SEQ ID NO: 365036
  chr9:124751515-124751605
  hypo

SEQ ID NO: 378958 - DNA, 99 bp, Homo sapiens; identical to SEQ ID NO: 365037
  chr9:124816011-124816110
  hypo

SEQ ID NO: 378959 - DNA, 82 bp, Homo sapiens; identical to SEQ ID NO: 345328
  chr9:124990438-124990520
  hypo

SEQ ID NO: 378960 - DNA, 142 bp, Homo sapiens; identical to SEQ ID NO: 345329
  chr9:124991012-124991154
  hypo

SEQ ID NO: 378961 - DNA, 78 bp, Homo sapiens; identical to SEQ ID NO: 340308
  chr9:125126554-125126632
  hypo

SEQ ID NO: 378962 - DNA, 60 bp, Homo sapiens; identical to SEQ ID NO: 340309
  chr9:125986796-125986856
  hypo

SEQ ID NO: 378963 - DNA, 179 bp, Homo sapiens; identical to SEQ ID NO: 340310
  chr9:126092355-126092534
  hypo

SEQ ID NO: 378964 - DNA, 146 bp, Homo sapiens; identical to SEQ ID NO: 365043
  chr9:126139066-126139212
  hypo

SEQ ID NO: 378965 - DNA, 121 bp, Homo sapiens; identical to SEQ ID NO: 365044
  chr9:126153103-126153224
  hypo

SEQ ID NO: 378966 - DNA, 166 bp, Homo sapiens; identical to SEQ ID NO: 354372
  chr9:126158115-126158281
  hypo

SEQ ID NO: 378967 - DNA, 253 bp, Homo sapiens; identical to SEQ ID NO: 340314
  chr9:126165468-126165721
  hypo

SEQ ID NO: 378968 - DNA, 203 bp, Homo sapiens; identical to SEQ ID NO: 340315
  chr9:126180763-126180966
  hypo

SEQ ID NO: 378969 - DNA, 109 bp, Homo sapiens; identical to SEQ ID NO: 340316
  chr9:126321044-126321153
  hypo

SEQ ID NO: 378970 - DNA, 137 bp, Homo sapiens; identical to SEQ ID NO: 354375
  chr9:126348901-126349038
  hypo

SEQ ID NO: 378971 - DNA, 40 bp, Homo sapiens; identical to SEQ ID NO: 212977
  chr9:126349104-126349144
  hypo

SEQ ID NO: 378972 - DNA, 90 bp, Homo sapiens; identical to SEQ ID NO: 340320
  chr9:127120340-127120430
  hypo

SEQ ID NO: 378973 - DNA, 55 bp, Homo sapiens; identical to SEQ ID NO: 340321
  chr9:128103464-128103519
  hypo

SEQ ID NO: 378974 - DNA, 33 bp, Homo sapiens; identical to SEQ ID NO: 365052
  chr9:128118022-128118055
  hypo

SEQ ID NO: 378975 - DNA, 36 bp, Homo sapiens; identical to SEQ ID NO: 365053
  chr9:128118095-128118131
  hypo

SEQ ID NO: 378976 - DNA, 445 bp, Homo sapiens; identical to SEQ ID NO: 340323
  chr9:128200066-128200511
  hypo

SEQ ID NO: 378977 - DNA, 139 bp, Homo sapiens; identical to SEQ ID NO: 340324
  chr9:128274083-128274222
  hypo

SEQ ID NO: 378978 - DNA, 57 bp, Homo sapiens; identical to SEQ ID NO: 340325
  chr9:128274789-128274846
  hypo

SEQ ID NO: 378979 - DNA, 125 bp, Homo sapiens; identical to SEQ ID NO: 354380
  chr9:128759727-128759852
  hypo

SEQ ID NO: 378980 - DNA, 380 bp, Homo sapiens; identical to SEQ ID NO: 340328
  chr9:129455261-129455641
  hypo

SEQ ID NO: 378981 - DNA, 275 bp, Homo sapiens; identical to SEQ ID NO: 340329
  chr9:129458627-129458902
  hypo

SEQ ID NO: 378982 - DNA, 116 bp, Homo sapiens; identical to SEQ ID NO: 340330
  chr9:129645183-129645299
  hypo

SEQ ID NO: 378983 - DNA, 196 bp, Homo sapiens; identical to SEQ ID NO: 354383
  chr9:130496563-130496759
  hypo

SEQ ID NO: 378984 - DNA, 233 bp, Homo sapiens; identical to SEQ ID NO: 340332
  chr9:130637231-130637464
  hypo

SEQ ID NO: 378985 - DNA, 209 bp, Homo sapiens; identical to SEQ ID NO: 372239
  chr9:130639769-130639978
  hypo

SEQ ID NO: 378986 - DNA, 125 bp, Homo sapiens; identical to SEQ ID NO: 372240
  chr9:130640012-130640137
  hypo

SEQ ID NO: 378987 - DNA, 456 bp, Homo sapiens; identical to SEQ ID NO: 333795
  chr9:130674546-130675002
  hypo

SEQ ID NO: 378988 - DNA, 233 bp, Homo sapiens; identical to SEQ ID NO: 340335
  chr9:130907031-130907264
  hypo

SEQ ID NO: 378989 - DNA, 66 bp, Homo sapiens; identical to SEQ ID NO: 365063
  chr9:131399183-131399249
  hypo

SEQ ID NO: 378990 - DNA, 36 bp, Homo sapiens; identical to SEQ ID NO: 340337
  chr9:131461564-131461600
  hypo

SEQ ID NO: 378991 - DNA, 83 bp, Homo sapiens; identical to SEQ ID NO: 340338
  chr9:131675071-131675154
  hypo

SEQ ID NO: 378992 - DNA, 165 bp, Homo sapiens; identical to SEQ ID NO: 365066
  chr9:131821444-131821609
  hypo

SEQ ID NO: 378993 - DNA, 41 bp, Homo sapiens; identical to SEQ ID NO: 365067
  chr9:131821644-131821685
  hypo

SEQ ID NO: 378994 - DNA, 704 bp, Homo sapiens; identical to SEQ ID NO: 350949
  chr9:131842946-131843650
  hypo

SEQ ID NO: 378995 - DNA, 269 bp, Homo sapiens; identical to SEQ ID NO: 340341
  chr9:132071041-132071310
  hypo

SEQ ID NO: 378996 - DNA, 280 bp, Homo sapiens; identical to SEQ ID NO: 333801
  chr9:132145475-132145755
  hypo

SEQ ID NO: 378997 - DNA, 610 bp, Homo sapiens; identical to SEQ ID NO: 340343
  chr9:132230776-132231386
  hypo

SEQ ID NO: 378998 - DNA, 728 bp, Homo sapiens; identical to SEQ ID NO: 359438
  chr9:132245345-132246073
  hypo

SEQ ID NO: 378999 - DNA, 690 bp, Homo sapiens; identical to SEQ ID NO: 333804
  chr9:132258226-132258916
  hypo

SEQ ID NO: 379000 - DNA, 355 bp, Homo sapiens; identical to SEQ ID NO: 365073
  chr9:132393701-132394056
  hypo

SEQ ID NO: 379001 - DNA, 294 bp, Homo sapiens; identical to SEQ ID NO: 340349
  chr9:132501760-132502054
  hypo

SEQ ID NO: 379002 - DNA, 277 bp, Homo sapiens; identical to SEQ ID NO: 340350
  chr9:132633604-132633881
  hypo

SEQ ID NO: 379003 - DNA, 35 bp, Homo sapiens; identical to SEQ ID NO: 365076
  chr9:132643756-132643791
  hypo

SEQ ID NO: 379004 - DNA, 193 bp, Homo sapiens; identical to SEQ ID NO: 365077
  chr9:132643821-132644014
  hypo

SEQ ID NO: 379005 - DNA, 112 bp, Homo sapiens; identical to SEQ ID NO: 345331
  chr9:132804293-132804405
  hypo

SEQ ID NO: 379006 - DNA, 207 bp, Homo sapiens; identical to SEQ ID NO: 201905
  chr9:132804455-132804662
  hypo

SEQ ID NO: 379007 - DNA, 292 bp, Homo sapiens; identical to SEQ ID NO: 201908
  chr9:132805445-132805737
  hypo

SEQ ID NO: 379008 - DNA, 477 bp, Homo sapiens; identical to SEQ ID NO: 340353
  chr9:132874127-132874604
  hypo

SEQ ID NO: 379009 - DNA, 77 bp, Homo sapiens; identical to SEQ ID NO: 340354
  chr9:132874650-132874727
  hypo

SEQ ID NO: 379010 - DNA, 343 bp, Homo sapiens; identical to SEQ ID NO: 348378
  chr9:132881052-132881395
  hypo

SEQ ID NO: 379011 - DNA, 35 bp, Homo sapiens; identical to SEQ ID NO: 348379
  chr9:132881495-132881530
  hypo

SEQ ID NO: 379012 - DNA, 113 bp, Homo sapiens; identical to SEQ ID NO: 340356
  chr9:133300407-133300520
  hypo

SEQ ID NO: 379013 - DNA, 140 bp, Homo sapiens; identical to SEQ ID NO: 359446
  chr9:133308607-133308747
  hypo

SEQ ID NO: 379014 - DNA, 67 bp, Homo sapiens; identical to SEQ ID NO: 286803
  chr9:133308769-133308836
  hypo

SEQ ID NO: 379015 - DNA, 344 bp, Homo sapiens; identical to SEQ ID NO: 365088
  chr9:133366650-133366994
  hypo

SEQ ID NO: 379016 - DNA, 108 bp, Homo sapiens; identical to SEQ ID NO: 340359
  chr9:133484764-133484872
  hypo

SEQ ID NO: 379017 - DNA, 131 bp, Homo sapiens; identical to SEQ ID NO: 340360
  chr9:133513763-133513894
  hypo

SEQ ID NO: 379018 - DNA, 144 bp, Homo sapiens; identical to SEQ ID NO: 340364
  chr9:133592887-133593031
  hypo

SEQ ID NO: 379019 - DNA, 133 bp, Homo sapiens; identical to SEQ ID NO: 340365
  chr9:133641518-133641651
  hypo

SEQ ID NO: 379020 - DNA, 1351 bp, Homo sapiens; identical to SEQ ID NO: 333814
  chr9:133710055-133711406
  hypo

SEQ ID NO: 379021 - DNA, 81 bp, Homo sapiens; identical to SEQ ID NO: 340367
  chr9:133738154-133738235
  hypo

SEQ ID NO: 379022 - DNA, 458 bp, Homo sapiens; identical to SEQ ID NO: 340368
  chr9:133760420-133760878
  hypo

SEQ ID NO: 379023 - DNA, 495 bp, Homo sapiens; identical to SEQ ID NO: 340369
  chr9:133761121-133761616
  hypo

SEQ ID NO: 379024 - DNA, 63 bp, Homo sapiens; identical to SEQ ID NO: 365093
  chr9:133799052-133799115
  hypo

SEQ ID NO: 379025 - DNA, 399 bp, Homo sapiens; identical to SEQ ID NO: 365094
  chr9:133799196-133799595
  hypo

SEQ ID NO: 379026 - DNA, 306 bp, Homo sapiens; identical to SEQ ID NO: 286811
  chr9:133814911-133815217
  hypo

SEQ ID NO: 379027 - DNA, 85 bp, Homo sapiens; identical to SEQ ID NO: 340373
  chr9:133945101-133945186
  hypo

SEQ ID NO: 379028 - DNA, 53 bp, Homo sapiens; identical to SEQ ID NO: 354398
  chr9:134126741-134126794
  hypo

SEQ ID NO: 379029 - DNA, 123 bp, Homo sapiens; identical to SEQ ID NO: 359451
  chr9:135037440-135037563
  hypo

SEQ ID NO: 379030 - DNA, 329 bp, Homo sapiens; identical to SEQ ID NO: 340378
  chr9:135267105-135267434
  hypo

SEQ ID NO: 379031 - DNA, 231 bp, Homo sapiens; identical to SEQ ID NO: 340379
  chr9:135275329-135275560
  hypo

SEQ ID NO: 379032 - DNA, 630 bp, Homo sapiens; identical to SEQ ID NO: 345338
  chr9:135286324-135286954
  hypo

SEQ ID NO: 379033 - DNA, 553 bp, Homo sapiens; identical to SEQ ID NO: 365099
  chr9:135513114-135513667
  hypo

SEQ ID NO: 379034 - DNA, 141 bp, Homo sapiens; identical to SEQ ID NO: 340384
  chr9:135523845-135523986
  hypo

SEQ ID NO: 379035 - DNA, 33 bp, Homo sapiens; identical to SEQ ID NO: 354401
  chr9:135548276-135548309
  hypo

SEQ ID NO: 379036 - DNA, 95 bp, Homo sapiens; identical to SEQ ID NO: 354402
  chr9:135767923-135768018
  hypo

SEQ ID NO: 379037 - DNA, 203 bp, Homo sapiens; identical to SEQ ID NO: 340387
  chr9:135781263-135781466
  hypo

SEQ ID NO: 379038 - DNA, 33 bp, Homo sapiens; identical to SEQ ID NO: 348382
  chr9:135865230-135865263
  hypo

SEQ ID NO: 379039 - DNA, 113 bp, Homo sapiens; identical to SEQ ID NO: 340390
  chr9:135908551-135908664
  hypo

SEQ ID NO: 379040 - DNA, 258 bp, Homo sapiens; identical to SEQ ID NO: 340391
  chr9:135926595-135926853
  hypo

SEQ ID NO: 379041 - DNA, 222 bp, Homo sapiens; identical to SEQ ID NO: 340392
  chr9:135945862-135946084
  hypo

SEQ ID NO: 379042 - DNA, 381 bp, Homo sapiens; identical to SEQ ID NO: 340393
  chr9:136372653-136373034
  hypo

SEQ ID NO: 379043 - DNA, 321 bp, Homo sapiens; identical to SEQ ID NO: 340395
  chr9:136380597-136380918
  hypo

SEQ ID NO: 379044 - DNA, 115 bp, Homo sapiens; identical to SEQ ID NO: 345980
  chr9:136384021-136384136
  hypo

SEQ ID NO: 379045 - DNA, 574 bp, Homo sapiens; identical to SEQ ID NO: 340397
  chr9:136385211-136385785
  hypo

SEQ ID NO: 379046 - DNA, 146 bp, Homo sapiens; identical to SEQ ID NO: 340398
  chr9:136393635-136393781
  hypo

SEQ ID NO: 379047 - DNA, 313 bp, Homo sapiens; identical to SEQ ID NO: 340399
  chr9:136397028-136397341
  hypo

SEQ ID NO: 379048 - DNA, 643 bp, Homo sapiens; identical to SEQ ID NO: 340400
  chr9:136402186-136402829
  hypo

SEQ ID NO: 379049 - DNA, 188 bp, Homo sapiens; identical to SEQ ID NO: 340401
  chr9:136508536-136508724
  hypo

SEQ ID NO: 379050 - DNA, 211 bp, Homo sapiens; identical to SEQ ID NO: 340402
  chr9:136667535-136667746
  hypo

SEQ ID NO: 379051 - DNA, 106 bp, Homo sapiens; identical to SEQ ID NO: 348385
  chr9:136698796-136698902
  hypo

SEQ ID NO: 379052 - DNA, 105 bp, Homo sapiens; identical to SEQ ID NO: 365117
  chr9:136728494-136728599
  hypo

SEQ ID NO: 379053 - DNA, 426 bp, Homo sapiens; identical to SEQ ID NO: 340405
  chr9:137017050-137017476
  hypo

SEQ ID NO: 379054 - DNA, 351 bp, Homo sapiens; identical to SEQ ID NO: 340406
  chr9:137620493-137620844
  hypo

SEQ ID NO: 379055 - DNA, 50 bp, Homo sapiens; identical to SEQ ID NO: 345981
  chr9:137623301-137623351
  hypo

SEQ ID NO: 379056 - DNA, 153 bp, Homo sapiens; identical to SEQ ID NO: 345982
  chr9:137623543-137623696
  hypo

SEQ ID NO: 379057 - DNA, 473 bp, Homo sapiens; identical to SEQ ID NO: 354414
  chr9:137642188-137642661
  hypo

SEQ ID NO: 379058 - DNA, 305 bp, Homo sapiens; identical to SEQ ID NO: 340409
  chr9:137645508-137645813
  hypo

SEQ ID NO: 379059 - DNA, 163 bp, Homo sapiens; identical to SEQ ID NO: 340410
  chr9:137646079-137646242
  hypo

SEQ ID NO: 379060 - DNA, 191 bp, Homo sapiens; identical to SEQ ID NO: 365124
  chr9:137648346-137648537
  hypo

SEQ ID NO: 379061 - DNA, 1004 bp, Homo sapiens; identical to SEQ ID NO: 340412
  chr9:138011461-138012465
  hypo

SEQ ID NO: 379062 - DNA, 335 bp, Homo sapiens; identical to SEQ ID NO: 340413
  chr9:138143914-138144249
  hypo

SEQ ID NO: 379063 - DNA, 172 bp, Homo sapiens; identical to SEQ ID NO: 365127
  chr9:138247974-138248146
  hypo

SEQ ID NO: 379064 - DNA, 79 bp, Homo sapiens; identical to SEQ ID NO: 365128
  chr9:138265272-138265351
  hypo

SEQ ID NO: 379065 - DNA, 52 bp, Homo sapiens; identical to SEQ ID NO: 365129
  chr9:138563280-138563332
  hypo

SEQ ID NO: 379066 - DNA, 274 bp, Homo sapiens; identical to SEQ ID NO: 354416
  chr9:138660497-138660771
  hypo

SEQ ID NO: 379067 - DNA, 51 bp, Homo sapiens; identical to SEQ ID NO: 354417
  chr9:138661962-138662013
  hypo

SEQ ID NO: 379068 - DNA, 323 bp, Homo sapiens; identical to SEQ ID NO: 354418
  chr9:138662685-138663008
  hypo

SEQ ID NO: 379069 - DNA, 134 bp, Homo sapiens; identical to SEQ ID NO: 365133
  chr9:138663353-138663487
  hypo

SEQ ID NO: 379070 - DNA, 141 bp, Homo sapiens; identical to SEQ ID NO: 311724
  chr9:138670510-138670651
  hypo

SEQ ID NO: 379071 - DNA, 33 bp, Homo sapiens; identical to SEQ ID NO: 354420
  chr9:138670778-138670811
  hypo

SEQ ID NO: 379072 - DNA, 185 bp, Homo sapiens; identical to SEQ ID NO: 340424
  chr9:138719269-138719454
  hypo

SEQ ID NO: 379073 - DNA, 98 bp, Homo sapiens; identical to SEQ ID NO: 354422
  chr9:138743599-138743697
  hypo

SEQ ID NO: 379074 - DNA, 142 bp, Homo sapiens; identical to SEQ ID NO: 340426
  chr9:138774077-138774219
  hypo

SEQ ID NO: 379075 - DNA, 90 bp, Homo sapiens; identical to SEQ ID NO: 340427
  chr9:138774525-138774615
  hypo

SEQ ID NO: 379076 - DNA, 166 bp, Homo sapiens
  chr9:138780870-138781036
  hypo
aggggagaggatcccagagaagagggggctggatagggagaccctctaaatctgtgtcacatcctggccactcctgaagcaactacagtggcacagcagccactctgagggccacagcccacagcccagccagagcggcaggacgaagaccgaaaatgaaacctac

SEQ ID NO: 379077 - DNA, 179 bp, Homo sapiens; identical to SEQ ID NO: 365140
  chr9:138873235-138873414
  hypo

SEQ ID NO: 379078 - DNA, 538 bp, Homo sapiens; identical to SEQ ID NO: 340430
  chr9:138877542-138878080
  hypo

SEQ ID NO: 379079 - DNA, 99 bp, Homo sapiens; identical to SEQ ID NO: 359460
  chr9:138986173-138986272
  hypo

SEQ ID NO: 379080 - DNA, 824 bp, Homo sapiens; identical to SEQ ID NO: 201927
  chr9:138986333-138987157
  hypo

SEQ ID NO: 379081 - DNA, 563 bp, Homo sapiens; identical to SEQ ID NO: 359462
  chr9:138987167-138987730
  hypo

SEQ ID NO: 379082 - DNA, 485 bp, Homo sapiens; identical to SEQ ID NO: 340433
  chr9:139028149-139028634
  hypo

SEQ ID NO: 379083 - DNA, 93 bp, Homo sapiens; identical to SEQ ID NO: 340434
  chr9:139079359-139079452
  hypo

SEQ ID NO: 379084 - DNA, 33 bp, Homo sapiens; identical to SEQ ID NO: 365146
  chr9:139103631-139103664
  hypo

SEQ ID NO: 379085 - DNA, 216 bp, Homo sapiens; identical to SEQ ID NO: 340438
  chr9:139106812-139107028
  hypo

SEQ ID NO: 379086 - DNA, 264 bp, Homo sapiens; identical to SEQ ID NO: 345984
  chr9:139110897-139111161
  hypo

SEQ ID NO: 379087 - DNA, 81 bp, Homo sapiens; identical to SEQ ID NO: 345985
  chr9:139111384-139111465
  hypo

SEQ ID NO: 379088 - DNA, 195 bp, Homo sapiens; identical to SEQ ID NO: 354428
  chr9:139268627-139268822
  hypo

SEQ ID NO: 379089 - DNA, 127 bp, Homo sapiens; identical to SEQ ID NO: 311797
  chr9:139268912-139269039
  hypo

SEQ ID NO: 379090 - DNA, 441 bp, Homo sapiens; identical to SEQ ID NO: 354430
  chr9:139269121-139269562
  hypo

SEQ ID NO: 379091 - DNA, 144 bp, Homo sapiens; identical to SEQ ID NO: 213214
  chr9:139317510-139317654
  hypo

SEQ ID NO: 379092 - DNA, 380 bp, Homo sapiens; identical to SEQ ID NO: 345987
  chr9:139317866-139318246
  hypo

SEQ ID NO: 379093 - DNA, 233 bp, Homo sapiens; identical to SEQ ID NO: 340442
  chr9:139374838-139375071
  hypo

SEQ ID NO: 379094 - DNA, 357 bp, Homo sapiens; identical to SEQ ID NO: 333839
  chr9:139401232-139401589
  hypo

SEQ ID NO: 379095 - DNA, 418 bp, Homo sapiens
  chr9:139421476-139421894
  hypo
cgtgagacgcgctagctggggggaaccgggccgagcctggagaaagttttgagccaggtgtgggggtctgtgtgtggggggcagctttgggcccagtctcccgctgctgctgtgggcagcctccagcctgtgcccgccccagtctgtacctctctcccacatggccacagagctggagcaccctacagacggcgaacacctgccctccgcacagcacccagacgtccctgagaaggtgggagggacctcaggcctgcagcatggccatggccaggaccaccagcctgtgagcaaatccttcacagctttggcgctggccacacccccggtacccgggccactctgtcttcaatgctgtcccggcggccaggtgggtgtgggccgcgaggtgggcgccagggcttggccgagtgaggtg

SEQ ID NO: 379096 - DNA, 100 bp, Homo sapiens
  chr9:139422123-139422223
  hypo
ccacgccaggtgtgcccccgtggactccccttccgtgcgtccctcttagggtcacccggcacctgcctgtcccatcccccacgctcagtggcctggcggc

SEQ ID NO: 379097 - DNA, 217 bp, Homo sapiens; identical to SEQ ID NO: 372289
  chr9:139440686-139440903
  hypo

SEQ ID NO: 379098 - DNA, 291 bp, Homo sapiens; identical to SEQ ID NO: 354434
  chr9:139506149-139506440
  hypo

SEQ ID NO: 379099 - DNA, 653 bp, Homo sapiens; identical to SEQ ID NO: 340448
  chr9:139586531-139587184
  hypo

SEQ ID NO: 379100 - DNA, 252 bp, Homo sapiens; identical to SEQ ID NO: 340449
  chr9:139611146-139611398
  hypo

SEQ ID NO: 379101 - DNA, 45 bp, Homo sapiens; identical to SEQ ID NO: 340450
  chr9:139687851-139687896
  hypo

SEQ ID NO: 379102 - DNA, 205 bp, Homo sapiens; identical to SEQ ID NO: 345988
  chr9:139698453-139698658
  hypo

SEQ ID NO: 379103 - DNA, 174 bp, Homo sapiens; identical to SEQ ID NO: 340453
  chr9:139730175-139730349
  hypo

SEQ ID NO: 379104 - DNA, 106 bp, Homo sapiens; identical to SEQ ID NO: 354436
  chr9:139793021-139793127
  hypo

SEQ ID NO: 379105 - DNA, 53 bp, Homo sapiens; identical to SEQ ID NO: 354437
  chr9:139793190-139793243
  hypo

SEQ ID NO: 379106 - DNA, 309 bp, Homo sapiens; identical to SEQ ID NO: 340455
  chr9:139803935-139804244
  hypo

SEQ ID NO: 379107 - DNA, 344 bp, Homo sapiens; identical to SEQ ID NO: 365162
  chr9:139804283-139804627
  hypo

SEQ ID NO: 379108 - DNA, 42 bp, Homo sapiens; identical to SEQ ID NO: 354439
  chr9:139809677-139809719
  hypo

SEQ ID NO: 379109 - DNA, 37 bp, Homo sapiens; identical to SEQ ID NO: 354440
  chr9:139818622-139818659
  hypo

SEQ ID NO: 379110 - DNA, 154 bp, Homo sapiens; identical to SEQ ID NO: 340459
  chr9:139833922-139834076
  hypo

SEQ ID NO: 379111 - DNA, 1801 bp, Homo sapiens; identical to SEQ ID NO: 354441
  chr9:139834961-139836762
  hypo

SEQ ID NO: 379112 - DNA, 594 bp, Homo sapiens; identical to SEQ ID NO: 354442
  chr9:139836968-139837562
  hypo

SEQ ID NO: 379113 - DNA, 650 bp, Homo sapiens; identical to SEQ ID NO: 354443
  chr9:139846908-139847558
  hypo

SEQ ID NO: 379114 - DNA, 33 bp, Homo sapiens; identical to SEQ ID NO: 348397
  chr9:139889104-139889137
  hypo

SEQ ID NO: 379115 - DNA, 216 bp, Homo sapiens; identical to SEQ ID NO: 365170
  chr9:139901954-139902170
  hypo

SEQ ID NO: 379116 - DNA, 482 bp, Homo sapiens; identical to SEQ ID NO: 365171
  chr9:139902492-139902974
  hypo

SEQ ID NO: 379117 - DNA, 195 bp, Homo sapiens; identical to SEQ ID NO: 365172
  chr9:139903035-139903230
  hypo

SEQ ID NO: 379118 - DNA, 159 bp, Homo sapiens; identical to SEQ ID NO: 354445
  chr9:139904532-139904691
  hypo

SEQ ID NO: 379119 - DNA, 126 bp, Homo sapiens; identical to SEQ ID NO: 340466
  chr9:139909050-139909176
  hypo

SEQ ID NO: 379120 - DNA, 327 bp, Homo sapiens
  chr9:139913401-139913728
  hypo
ccagctgctgcaggagggccatgccactgggcagcgagaagttgtcctgtctcagggccggcggcagctcatccagtgacaggttcagtgcctcggggtgcagccgcagctctgctacatacttggggtggaggggcggctcagagggggacctgcgcctgccgagccgggcagagaggggctccccacaccacccacagccgcctccctcgcgggcacccttggcacctgctgcagccagcgcaggtgttgctgcagcctgccctgctccaggaagctgcggatctccgccgagatgttgagccagacctgggcatagtgagtcac

SEQ ID NO: 379121 - DNA, 520 bp, Homo sapiens; identical to SEQ ID NO: 350968
  chr9:139948370-139948890
  hypo

SEQ ID NO: 379122 - DNA, 711 bp, Homo sapiens; identical to SEQ ID NO: 286870
  chr9:140023901-140024612
  hypo

SEQ ID NO: 379123 - DNA, 53 bp, Homo sapiens; identical to SEQ ID NO: 365177
  chr9:140041698-140041751
  hypo

SEQ ID NO: 379124 - DNA, 302 bp, Homo sapiens; identical to SEQ ID NO: 311906
  chr9:140107736-140108038
  hypo

SEQ ID NO: 379125 - DNA, 180 bp, Homo sapiens; identical to SEQ ID NO: 348399
  chr9:140108461-140108641
  hypo

SEQ ID NO: 379126 - DNA, 613 bp, Homo sapiens; identical to SEQ ID NO: 340474
  chr9:140110575-140111188
  hypo

SEQ ID NO: 379127 - DNA, 42 bp, Homo sapiens; identical to SEQ ID NO: 340475
  chr9:140166945-140166987
  hypo

SEQ ID NO: 379128 - DNA, 292 bp, Homo sapiens; identical to SEQ ID NO: 311918
  chr9:140167091-140167383
  hypo

SEQ ID NO: 379129 - DNA, 322 bp, Homo sapiens; identical to SEQ ID NO: 354452
  chr9:140167413-140167735
  hypo

SEQ ID NO: 379130 - DNA, 636 bp, Homo sapiens; identical to SEQ ID NO: 347066
  chr9:140196486-140197122
  hypo

SEQ ID NO: 379131 - DNA, 155 bp, Homo sapiens; identical to SEQ ID NO: 347067
  chr9:140197263-140197418
  hypo

SEQ ID NO: 379132 - DNA, 373 bp, Homo sapiens; identical to SEQ ID NO: 348402
  chr9:140265361-140265734
  hypo

SEQ ID NO: 379133 - DNA, 183 bp, Homo sapiens; identical to SEQ ID NO: 348403
  chr9:140265902-140266085
  hypo

SEQ ID NO: 379134 - DNA, 422 bp, Homo sapiens; identical to SEQ ID NO: 365188
  chr9:140267962-140268384
  hypo

SEQ ID NO: 379135 - DNA, 153 bp, Homo sapiens; identical to SEQ ID NO: 365189
  chr9:140333146-140333299
  hypo

SEQ ID NO: 379136 - DNA, 240 bp, Homo sapiens; identical to SEQ ID NO: 365190
  chr9:140379693-140379933
  hypo

SEQ ID NO: 379137 - DNA, 105 bp, Homo sapiens; identical to SEQ ID NO: 365191
  chr9:140379963-140380068
  hypo

SEQ ID NO: 379138 - DNA, 319 bp, Homo sapiens; identical to SEQ ID NO: 365192
  chr9:140382238-140382557
  hypo

SEQ ID NO: 379139 - DNA, 78 bp, Homo sapiens; identical to SEQ ID NO: 365193
  chr9:140382625-140382703
  hypo

SEQ ID NO: 379140 - DNA, 308 bp, Homo sapiens; identical to SEQ ID NO: 311951
  chr9:140389001-140389309
  hypo

SEQ ID NO: 379141 - DNA, 120 bp, Homo sapiens; identical to SEQ ID NO: 365195
  chr9:140389523-140389643
  hypo

SEQ ID NO: 379142 - DNA, 150 bp, Homo sapiens; identical to SEQ ID NO: 354457
  chr9:140392858-140393008
  hypo

SEQ ID NO: 379143 - DNA, 240 bp, Homo sapiens; identical to SEQ ID NO: 213279
  chr9:140396742-140396982
  hypo

SEQ ID NO: 379144 - DNA, 201 bp, Homo sapiens; identical to SEQ ID NO: 365198
  chr9:140397203-140397404
  hypo

SEQ ID NO: 379145 - DNA, 406 bp, Homo sapiens; identical to SEQ ID NO: 311956
  chr9:140400469-140400875
  hypo

SEQ ID NO: 379146 - DNA, 516 bp, Homo sapiens; identical to SEQ ID NO: 311957
  chr9:140400905-140401421
  hypo

SEQ ID NO: 379147 - DNA, 249 bp, Homo sapiens; identical to SEQ ID NO: 348404
  chr9:140582119-140582368
  hypo

SEQ ID NO: 379148 - DNA, 233 bp, Homo sapiens; identical to SEQ ID NO: 340488
  chr9:140623363-140623596
  hypo

SEQ ID NO: 379149 - DNA, 232 bp, Homo sapiens; identical to SEQ ID NO: 340489
  chr9:140645189-140645421
  hypo

SEQ ID NO: 379150 - DNA, 68 bp, Homo sapiens; identical to SEQ ID NO: 365204
  chr9:140682727-140682795
  hypo

SEQ ID NO: 379151 - DNA, 175 bp, Homo sapiens; identical to SEQ ID NO: 365205
  chr9:140682922-140683097
  hypo

SEQ ID NO: 379152 - DNA, 306 bp, Homo sapiens; identical to SEQ ID NO: 340492
  chr9:140692095-140692401
  hypo

SEQ ID NO: 379153 - DNA, 188 bp, Homo sapiens; identical to SEQ ID NO: 345339
  chr9:140703858-140704046
  hypo

SEQ ID NO: 379154 - DNA, 327 bp, Homo sapiens; identical to SEQ ID NO: 345340
  chr9:140704131-140704458
  hypo

SEQ ID NO: 379155 - DNA, 90 bp, Homo sapiens; identical to SEQ ID NO: 354463
  chr9:140704673-140704763
  hypo

SEQ ID NO: 379156 - DNA, 133 bp, Homo sapiens; identical to SEQ ID NO: 354464
  chr9:140707377-140707510
  hypo

SEQ ID NO: 379157 - DNA, 58 bp, Homo sapiens; identical to SEQ ID NO: 354465
  chr9:140707900-140707958
  hypo

SEQ ID NO: 379158 - DNA, 479 bp, Homo sapiens; identical to SEQ ID NO: 345993
  chr9:140708213-140708692
  hypo

SEQ ID NO: 379159 - DNA, 215 bp, Homo sapiens; identical to SEQ ID NO: 213315
  chr9:140708771-140708986
  hypo

SEQ ID NO: 379160 - DNA, 781 bp, Homo sapiens; identical to SEQ ID NO: 340498
  chr9:140937919-140938700
  hypo

SEQ ID NO: 379161 - DNA, 259 bp, Homo sapiens
  chr9:140970069-140970328
  hypo
cggcacatgtgtagctacggagagggcgtctatactgggaatgcacactggcctctcccgggtgggagttctctggtgtggggcagtcgcccatctcacgtggggtccttgtacggctcgcacgccctctctggctcggtccacctggcgcggctcctgcagacccagcagggtccgtgccattgctcttctccattgcaggtgtttgggaatattgccctggatgatgacaccagcatcaaccgccacaacaacttcc

SEQ ID NO: 379162 - DNA, 171 bp, Homo sapiens; identical to SEQ ID NO: 340501
  chr10:373939-374110
  hypo

SEQ ID NO: 379163 - DNA, 190 bp, Homo sapiens; identical to SEQ ID NO: 340502
  chr10:396943-397133
  hypo

SEQ ID NO: 379164 - DNA, 168 bp, Homo sapiens
  chr10:422180-422348
  hypo
cgacctcggcccccgacagagccggcagggagaaggacccaggcccacctcggcccccgacggagccggcagggagaaggacccaggcccacctcggcccccgacggagccggcacagagcaagaatgaggtggtgctcatcccacacacgacgttccctgtgctggc

SEQ ID NO: 379165 - DNA, 479 bp, Homo sapiens; identical to SEQ ID NO: 340504
  chr10:425893-426372
  hypo

SEQ ID NO: 379166 - DNA, 249 bp, Homo sapiens; identical to SEQ ID NO: 365216
  chr10:482039-482288
  hypo

SEQ ID NO: 379167 - DNA, 137 bp, Homo sapiens; identical to SEQ ID NO: 365217
  chr10:482318-482455
  hypo

SEQ ID NO: 379168 - DNA, 46 bp, Homo sapiens; identical to SEQ ID NO: 354469
  chr10:518263-518309
  hypo

SEQ ID NO: 379169 - DNA, 131 bp, Homo sapiens; identical to SEQ ID NO: 354470
  chr10:518339-518470
  hypo

SEQ ID NO: 379170 - DNA, 101 bp, Homo sapiens; identical to SEQ ID NO: 348411
  chr10:524407-524508
  hypo

SEQ ID NO: 379171 - DNA, 83 bp, Homo sapiens; identical to SEQ ID NO: 213327
  chr10:524671-524754
  hypo

SEQ ID NO: 379172 - DNA, 270 bp, Homo sapiens; identical to SEQ ID NO: 340508
  chr10:630309-630579
  hypo

SEQ ID NO: 379173 - DNA, 141 bp, Homo sapiens; identical to SEQ ID NO: 354473
  chr10:851108-851249
  hypo

SEQ ID NO: 379174 - DNA, 175 bp, Homo sapiens; identical to SEQ ID NO: 354474
  chr10:851504-851679
  hypo

SEQ ID NO: 379175 - DNA, 258 bp, Homo sapiens; identical to SEQ ID NO: 340510
  chr10:851928-852186
  hypo

SEQ ID NO: 379176 - DNA, 256 bp, Homo sapiens; identical to SEQ ID NO: 340511
  chr10:894796-895052
  hypo

SEQ ID NO: 379177 - DNA, 148 bp, Homo sapiens; identical to SEQ ID NO: 354476
  chr10:978663-978811
  hypo

SEQ ID NO: 379178 - DNA, 225 bp, Homo sapiens; identical to SEQ ID NO: 340513
  chr10:1053566-1053791
  hypo

SEQ ID NO: 379179 - DNA, 49 bp, Homo sapiens; identical to SEQ ID NO: 354477
  chr10:1120729-1120778
  hypo

SEQ ID NO: 379180 - DNA, 357 bp, Homo sapiens; identical to SEQ ID NO: 340515
  chr10:1167479-1167836
  hypo

SEQ ID NO: 379181 - DNA, 155 bp, Homo sapiens; identical to SEQ ID NO: 354479
  chr10:1443319-1443474
  hypo

SEQ ID NO: 379182 - DNA, 311 bp, Homo sapiens; identical to SEQ ID NO: 354480
  chr10:1443566-1443877
  hypo

SEQ ID NO: 379183 - DNA, 101 bp, Homo sapiens; identical to SEQ ID NO: 354481
  chr10:1506151-1506252
  hypo

SEQ ID NO: 379184 - DNA, 51 bp, Homo sapiens; identical to SEQ ID NO: 365234
  chr10:1558541-1558592
  hypo

SEQ ID NO: 379185 - DNA, 46 bp, Homo sapiens; identical to SEQ ID NO: 365235
  chr10:1558836-1558882
  hypo

SEQ ID NO: 379186 - DNA, 53 bp, Homo sapiens; identical to SEQ ID NO: 213365
  chr10:1585239-1585292
  hypo

SEQ ID NO: 379187 - DNA, 73 bp, Homo sapiens; identical to SEQ ID NO: 365237
  chr10:1585421-1585494
  hypo

SEQ ID NO: 379188 - DNA, 96 bp, Homo sapiens; identical to SEQ ID NO: 365238
  chr10:1708231-1708327
  hypo

SEQ ID NO: 379189 - DNA, 173 bp, Homo sapiens; identical to SEQ ID NO: 213368
  chr10:1708478-1708651
  hypo

SEQ ID NO: 379190 - DNA, 130 bp, Homo sapiens; identical to SEQ ID NO: 365240
  chr10:1708689-1708819
  hypo

SEQ ID NO: 379191 - DNA, 52 bp, Homo sapiens
  chr10:1767929-1767981
  hypo
tgttatgagtgacaagaacgctgacacaagacactaacctttctagaggtgc

SEQ ID NO: 379192 - DNA, 45 bp, Homo sapiens; identical to SEQ ID NO: 354482
  chr10:1789180-1789225
  hypo

SEQ ID NO: 379193 - DNA, 139 bp, Homo sapiens; identical to SEQ ID NO: 354483
  chr10:1789266-1789405
  hypo

SEQ ID NO: 379194 - DNA, 264 bp, Homo sapiens; identical to SEQ ID NO: 340524
  chr10:1994498-1994762
  hypo

SEQ ID NO: 379195 - DNA, 166 bp, Homo sapiens; identical to SEQ ID NO: 340525
  chr10:2006696-2006862
  hypo

SEQ ID NO: 379196 - DNA, 416 bp, Homo sapiens; identical to SEQ ID NO: 340526
  chr10:2932075-2932491
  hypo

SEQ ID NO: 379197 - DNA, 192 bp, Homo sapiens; identical to SEQ ID NO: 286895
  chr10:3109168-3109360
  hypo

SEQ ID NO: 379198 - DNA, 1896 bp, Homo sapiens; identical to SEQ ID NO: 359478
  chr10:3109459-3111355
  hypo

SEQ ID NO: 379199 - DNA, 542 bp, Homo sapiens; identical to SEQ ID NO: 340528
  chr10:3121888-3122430
  hypo

SEQ ID NO: 379200 - DNA, 445 bp, Homo sapiens; identical to SEQ ID NO: 365249
  chr10:3151595-3152040
  hypo

SEQ ID NO: 379201 - DNA, 161 bp, Homo sapiens; identical to SEQ ID NO: 354486
  chr10:3160827-3160988
  hypo

SEQ ID NO: 379202 - DNA, 125 bp, Homo sapiens; identical to SEQ ID NO: 354487
  chr10:3161171-3161296
  hypo

SEQ ID NO: 379203 - DNA, 227 bp, Homo sapiens; identical to SEQ ID NO: 340531
  chr10:3194438-3194665
  hypo

SEQ ID NO: 379204 - DNA, 114 bp, Homo sapiens; identical to SEQ ID NO: 354489
  chr10:3196890-3197004
  hypo

SEQ ID NO: 379205 - DNA, 294 bp, Homo sapiens; identical to SEQ ID NO: 354490
  chr10:3197113-3197407
  hypo

SEQ ID NO: 379206 - DNA, 307 bp, Homo sapiens; identical to SEQ ID NO: 213394
  chr10:3329809-3330116
  hypo

SEQ ID NO: 379207 - DNA, 226 bp, Homo sapiens; identical to SEQ ID NO: 312172
  chr10:3330188-3330414
  hypo

SEQ ID NO: 379208 - DNA, 297 bp, Homo sapiens; identical to SEQ ID NO: 354493
  chr10:3678862-3679159
  hypo

SEQ ID NO: 379209 - DNA, 188 bp, Homo sapiens; identical to SEQ ID NO: 340536
  chr10:3954899-3955087
  hypo

SEQ ID NO: 379210 - DNA, 54 bp, Homo sapiens; identical to SEQ ID NO: 354494
  chr10:5523206-5523260
  hypo

SEQ ID NO: 379211 - DNA, 474 bp, Homo sapiens; identical to SEQ ID NO: 340538
  chr10:5529540-5530014
  hypo

SEQ ID NO: 379212 - DNA, 69 bp, Homo sapiens; identical to SEQ ID NO: 348413
  chr10:5538706-5538775
  hypo

SEQ ID NO: 379213 - DNA, 192 bp, Homo sapiens; identical to SEQ ID NO: 348414
  chr10:5538938-5539130
  hypo

SEQ ID NO: 379214 - DNA, 380 bp, Homo sapiens; identical to SEQ ID NO: 348415
  chr10:5540271-5540651
  hypo

SEQ ID NO: 379215 - DNA, 198 bp, Homo sapiens; identical to SEQ ID NO: 348416
  chr10:5541528-5541726
  hypo

SEQ ID NO: 379216 - DNA, 145 bp, Homo sapiens; identical to SEQ ID NO: 213410
  chr10:5576085-5576230
  hypo

SEQ ID NO: 379217 - DNA, 277 bp, Homo sapiens; identical to SEQ ID NO: 365264
  chr10:5638918-5639195
  hypo

SEQ ID NO: 379218 - DNA, 136 bp, Homo sapiens; identical to SEQ ID NO: 340544
  chr10:5898121-5898257
  hypo

SEQ ID NO: 379219 - DNA, 421 bp, Homo sapiens; identical to SEQ ID NO: 340545
  chr10:5960358-5960779
  hypo

SEQ ID NO: 379220 - DNA, 134 bp, Homo sapiens; identical to SEQ ID NO: 354500
  chr10:6003855-6003989
  hypo

SEQ ID NO: 379221 - DNA, 130 bp, Homo sapiens; identical to SEQ ID NO: 340547
  chr10:6023448-6023578
  hypo

SEQ ID NO: 379222 - DNA, 145 bp, Homo sapiens; identical to SEQ ID NO: 354502
  chr10:6161993-6162138
  hypo

SEQ ID NO: 379223 - DNA, 666 bp, Homo sapiens; identical to SEQ ID NO: 350978
  chr10:6621854-6622520
  hypo

SEQ ID NO: 379224 - DNA, 87 bp, Homo sapiens; identical to SEQ ID NO: 350979
  chr10:6622706-6622793
  hypo

SEQ ID NO: 379225 - DNA, 70 bp, Homo sapiens; identical to SEQ ID NO: 365271
  chr10:7202899-7202969
  hypo

SEQ ID NO: 379226 - DNA, 34 bp, Homo sapiens; identical to SEQ ID NO: 354505
  chr10:7212711-7212745
  hypo

SEQ ID NO: 379227 - DNA, 122 bp, Homo sapiens; identical to SEQ ID NO: 365273
  chr10:7214457-7214579
  hypo

SEQ ID NO: 379228 - DNA, 35 bp, Homo sapiens; identical to SEQ ID NO: 354506
  chr10:7409523-7409558
  hypo

SEQ ID NO: 379229 - DNA, 151 bp, Homo sapiens; identical to SEQ ID NO: 354507
  chr10:7409632-7409783
  hypo

SEQ ID NO: 379230 - DNA, 60 bp, Homo sapiens; identical to SEQ ID NO: 201967
  chr10:7453036-7453096
  hypo

SEQ ID NO: 379231 - DNA, 85 bp, Homo sapiens; identical to SEQ ID NO: 365277
  chr10:7608166-7608251
  hypo

SEQ ID NO: 379232 - DNA, 297 bp, Homo sapiens; identical to SEQ ID NO: 340559
  chr10:7618377-7618674
  hypo

SEQ ID NO: 379233 - DNA, 155 bp, Homo sapiens; identical to SEQ ID NO: 340560
  chr10:7871238-7871393
  hypo

SEQ ID NO: 379234 - DNA, 112 bp, Homo sapiens; identical to SEQ ID NO: 354510
  chr10:7985048-7985160
  hypo

SEQ ID NO: 379235 - DNA, 115 bp, Homo sapiens; identical to SEQ ID NO: 354511
  chr10:7985194-7985309
  hypo

SEQ ID NO: 379236 - DNA, 183 bp, Homo sapiens; identical to SEQ ID NO: 354512
  chr10:8055498-8055681
  hypo

SEQ ID NO: 379237 - DNA, 86 bp, Homo sapiens; identical to SEQ ID NO: 354513
  chr10:8055764-8055850
  hypo

SEQ ID NO: 379238 - DNA, 117 bp, Homo sapiens; identical to SEQ ID NO: 350982
  chr10:8075813-8075930
  hypo

SEQ ID NO: 379239 - DNA, 51 bp, Homo sapiens; identical to SEQ ID NO: 286936
  chr10:8097537-8097588
  hypo

SEQ ID NO: 379240 - DNA, 198 bp, Homo sapiens; identical to SEQ ID NO: 365285
  chr10:10965181-10965379
  hypo

SEQ ID NO: 379241 - DNA, 42 bp, Homo sapiens; identical to SEQ ID NO: 350990
  chr10:11060746-11060788
  hypo

SEQ ID NO: 379242 - DNA, 148 bp, Homo sapiens; identical to SEQ ID NO: 340567
  chr10:11204060-11204208
  hypo

SEQ ID NO: 379243 - DNA, 441 bp, Homo sapiens
  chr10:11846800-11847241
  hypo
cggtgcgcaccttcccgaaagggtggcgtgtggtcaggggtctgtgcggagacctcctggctctccccacacgcggtaggtattcatgcagccgcgtcacgcggaggccccactccgtgcggccaacacagggtcttccagcccctccttccctggctatgtgacttgtagcctcattctgggaaccttccccagctacgtgacttataccttgattctgggaaccacagagttcagaccttggtgctgaaatgggagacgtcccccctgccccccgcaacaccccaccccgttcctcacccaccaccctcgacactgggcttttctcagaatccagaaagcccagggtaccctctgcacgcgatcacctgccctcagtggccgcagcaagctgaagtgtcccttcccccttttcctgcccgacgcctgcagaaccaggac

SEQ ID NO: 379244 - DNA, 124 bp, Homo sapiens; identical to SEQ ID NO: 350993
  chr10:12390701-12390825
  hypo

SEQ ID NO: 379245 - DNA, 875 bp, Homo sapiens; identical to SEQ ID NO: 201983
  chr10:12390995-12391870
  hypo

SEQ ID NO: 379246 - DNA, 324 bp, Homo sapiens; identical to SEQ ID NO: 345344
  chr10:12392327-12392651
  hypo

SEQ ID NO: 379247 - DNA, 380 bp, Homo sapiens; identical to SEQ ID NO: 340570
  chr10:12827582-12827962
  hypo

SEQ ID NO: 379248 - DNA, 60 bp, Homo sapiens; identical to SEQ ID NO: 340572
  chr10:13711305-13711365
  hypo

SEQ ID NO: 379249 - DNA, 275 bp, Homo sapiens; identical to SEQ ID NO: 354520
  chr10:13771131-13771406
  hypo

SEQ ID NO: 379250 - DNA, 127 bp, Homo sapiens; identical to SEQ ID NO: 354521
  chr10:13771447-13771574
  hypo

SEQ ID NO: 379251 - DNA, 190 bp, Homo sapiens; identical to SEQ ID NO: 201987
  chr10:13933246-13933436
  hypo

SEQ ID NO: 379252 - DNA, 76 bp, Homo sapiens; identical to SEQ ID NO: 359505
  chr10:14646259-14646335
  hypo

SEQ ID NO: 379253 - DNA, 87 bp, Homo sapiens; identical to SEQ ID NO: 359506
  chr10:14646653-14646740
  hypo

SEQ ID NO: 379254 - DNA, 411 bp, Homo sapiens; identical to SEQ ID NO: 340577
  chr10:14816098-14816509
  hypo

SEQ ID NO: 379255 - DNA, 139 bp, Homo sapiens; identical to SEQ ID NO: 340579
  chr10:14979037-14979176
  hypo

SEQ ID NO: 379256 - DNA, 193 bp, Homo sapiens; identical to SEQ ID NO: 365298
  chr10:15254646-15254839
  hypo

SEQ ID NO: 379257 - DNA, 184 bp, Homo sapiens; identical to SEQ ID NO: 340581
  chr10:15255054-15255238
  hypo

SEQ ID NO: 379258 - DNA, 40 bp, Homo sapiens
  chr10:15484072-15484112
  hypo
cgtctcaaaaataaaacgaaacaaaacaaaattctggctt

SEQ ID NO: 379259 - DNA, 247 bp, Homo sapiens
  chr10:15484142-15484389
  hypo
tttctagcgtcatggctccacactgcgtttccttatctgggaatcccagccttactgaactttcagcttctgcagccagccacgctctttctggcctccggctttgctgtgtgctgtttctccagcctggcgatttgctctgtccccagcccctgcactcctttacctgatctgctccgattgatcctgcagtcctccgcggctgagtcacttccttctgcagggaagccgtcctgggttctcctcc

SEQ ID NO: 379260 - DNA, 174 bp, Homo sapiens; identical to SEQ ID NO: 359507
  chr10:15762154-15762328
  hypo

SEQ ID NO: 379261 - DNA, 157 bp, Homo sapiens; identical to SEQ ID NO: 340584
  chr10:15828305-15828462
  hypo

SEQ ID NO: 379262 - DNA, 313 bp, Homo sapiens; identical to SEQ ID NO: 340585
  chr10:16716483-16716796
  hypo

SEQ ID NO: 379263 - DNA, 80 bp, Homo sapiens; identical to SEQ ID NO: 340586
  chr10:16806491-16806571
  hypo

SEQ ID NO: 379264 - DNA, 90 bp, Homo sapiens; identical to SEQ ID NO: 340587
  chr10:17157485-17157575
  hypo

SEQ ID NO: 379265 - DNA, 208 bp, Homo sapiens; identical to SEQ ID NO: 201993
  chr10:17270445-17270653
  hypo

SEQ ID NO: 379266 - DNA, 53 bp, Homo sapiens
  chr10:17347083-17347136
  hypo
cggtcgtaatattcagagggagatagggtgatagtacccctaatgtcgcaggg

SEQ ID NO: 379267 - DNA, 262 bp, Homo sapiens
  chr10:17347174-17347436
  hypo
aggggggacagaatgatagtaccccccatatcacatgtggcgttttcactcccctgtgattccggatattatttccaggaagggacaggatgatagtgaccccaatgtcgcagagagtttgtactcccctttatgatactggtcaaaaaacccagcggggggaagattcatagtacccccgatatcgcagggcatgtatacacccccctatgatagcggtcgtaatatccaggaagagaaaggatgatagtacccctatgtc

SEQ ID NO: 379268 - DNA, 259 bp, Homo sapiens; identical to SEQ ID NO: 351000
  chr10:17495133-17495392
  hypo

SEQ ID NO: 379269 - DNA, 322 bp, Homo sapiens; identical to SEQ ID NO: 201996
  chr10:17495680-17496002
  hypo

SEQ ID NO: 379270 - DNA, 458 bp, Homo sapiens; identical to SEQ ID NO: 365308
  chr10:21797632-21798090
  hypo

SEQ ID NO: 379271 - DNA, 873 bp, Homo sapiens; identical to SEQ ID NO: 347076
  chr10:21815648-21816521
  hypo

SEQ ID NO: 379272 - DNA, 127 bp, Homo sapiens; identical to SEQ ID NO: 340594
  chr10:21915244-21915371
  hypo

SEQ ID NO: 379273 - DNA, 277 bp, Homo sapiens; identical to SEQ ID NO: 340595
  chr10:22042735-22043012
  hypo

SEQ ID NO: 379274 - DNA, 91 bp, Homo sapiens; identical to SEQ ID NO: 354532
  chr10:22047245-22047336
  hypo

SEQ ID NO: 379275 - DNA, 62 bp, Homo sapiens; identical to SEQ ID NO: 351007
  chr10:22540645-22540707
  hypo

SEQ ID NO: 379276 - DNA, 82 bp, Homo sapiens; identical to SEQ ID NO: 365314
  chr10:22833864-22833946
  hypo

SEQ ID NO: 379277 - DNA, 70 bp, Homo sapiens; identical to SEQ ID NO: 365315
  chr10:22834010-22834080
  hypo

SEQ ID NO: 379278 - DNA, 149 bp, Homo sapiens; identical to SEQ ID NO: 365316
  chr10:22869787-22869936
  hypo

SEQ ID NO: 379279 - DNA, 87 bp, Homo sapiens; identical to SEQ ID NO: 340601
  chr10:22883126-22883213
  hypo

SEQ ID NO: 379280 - DNA, 214 bp, Homo sapiens; identical to SEQ ID NO: 287005
  chr10:23001984-23002198
  hypo

SEQ ID NO: 379281 - DNA, 286 bp, Homo sapiens; identical to SEQ ID NO: 351010
  chr10:23002228-23002514
  hypo

SEQ ID NO: 379282 - DNA, 211 bp, Homo sapiens; identical to SEQ ID NO: 354537
  chr10:24841853-24842064
  hypo

SEQ ID NO: 379283 - DNA, 223 bp, Homo sapiens; identical to SEQ ID NO: 340607
  chr10:24863037-24863260
  hypo

SEQ ID NO: 379284 - DNA, 66 bp, Homo sapiens; identical to SEQ ID NO: 365322
  chr10:24908462-24908528
  hypo

SEQ ID NO: 379285 - DNA, 627 bp, Homo sapiens; identical to SEQ ID NO: 202018
  chr10:25463893-25464520
  hypo

SEQ ID NO: 379286 - DNA, 56 bp, Homo sapiens; identical to SEQ ID NO: 340612
  chr10:27144571-27144627
  hypo

SEQ ID NO: 379287 - DNA, 54 bp, Homo sapiens; identical to SEQ ID NO: 340613
  chr10:27825982-27826036
  hypo

SEQ ID NO: 379288 - DNA, 111 bp, Homo sapiens; identical to SEQ ID NO: 340617
  chr10:29581547-29581658
  hypo

SEQ ID NO: 379289 - DNA, 59 bp, Homo sapiens; identical to SEQ ID NO: 340618
  chr10:29666997-29667056
  hypo

SEQ ID NO: 379290 - DNA, 734 bp, Homo sapiens; identical to SEQ ID NO: 202032
  chr10:30024793-30025527
  hypo

SEQ ID NO: 379291 - DNA, 137 bp, Homo sapiens; identical to SEQ ID NO: 340620
  chr10:30736731-30736868
  hypo

SEQ ID NO: 379292 - DNA, 105 bp, Homo sapiens; identical to SEQ ID NO: 365329
  chr10:31134746-31134851
  hypo

SEQ ID NO: 379293 - DNA, 790 bp, Homo sapiens; identical to SEQ ID NO: 345352
  chr10:31607954-31608744
  hypo

SEQ ID NO: 379294 - DNA, 252 bp, Homo sapiens; identical to SEQ ID NO: 202037
  chr10:31609416-31609668
  hypo

SEQ ID NO: 379295 - DNA, 68 bp, Homo sapiens; identical to SEQ ID NO: 340623
  chr10:35043989-35044057
  hypo

SEQ ID NO: 379296 - DNA, 544 bp, Homo sapiens; identical to SEQ ID NO: 202046
  chr10:35103534-35104078
  hypo

SEQ ID NO: 379297 - DNA, 96 bp, Homo sapiens; identical to SEQ ID NO: 365334
  chr10:35152237-35152333
  hypo

SEQ ID NO: 379298 - DNA, 92 bp, Homo sapiens; identical to SEQ ID NO: 340626
  chr10:35503808-35503900
  hypo

SEQ ID NO: 379299 - DNA, 34 bp, Homo sapiens; identical to SEQ ID NO: 287084
  chr10:43600323-43600357
  hypo

SEQ ID NO: 379300 - DNA, 217 bp, Homo sapiens; identical to SEQ ID NO: 354546
  chr10:44163386-44163603
  hypo

SEQ ID NO: 379301 - DNA, 70 bp, Homo sapiens; identical to SEQ ID NO: 340633
  chr10:44163720-44163790
  hypo

SEQ ID NO: 379302 - DNA, 413 bp, Homo sapiens; identical to SEQ ID NO: 340634
  chr10:44198155-44198568
  hypo

SEQ ID NO: 379303 - DNA, 269 bp, Homo sapiens; identical to SEQ ID NO: 340635
  chr10:44874128-44874397
  hypo

SEQ ID NO: 379304 - DNA, 45 bp, Homo sapiens
  chr10:46009889-46009934
  hypo
agctgccaccctacagctgccagcagcagcacatggctggctgtc

SEQ ID NO: 379305 - DNA, 94 bp, Homo sapiens; identical to SEQ ID NO: 351040
  chr10:50606762-50606856
  hypo

SEQ ID NO: 379306 - DNA, 81 bp, Homo sapiens; identical to SEQ ID NO: 340640
  chr10:50948764-50948845
  hypo

SEQ ID NO: 379307 - DNA, 215 bp, Homo sapiens; identical to SEQ ID NO: 359568
  chr10:50969681-50969896
  hypo

SEQ ID NO: 379308 - DNA, 192 bp, Homo sapiens; identical to SEQ ID NO: 359569
  chr10:50970412-50970604
  hypo

SEQ ID NO: 379309 - DNA, 180 bp, Homo sapiens; identical to SEQ ID NO: 340643
  chr10:52180055-52180235
  hypo

SEQ ID NO: 379310 - DNA, 398 bp, Homo sapiens; identical to SEQ ID NO: 340646
  chr10:70184294-70184692
  hypo

SEQ ID NO: 379311 - DNA, 139 bp, Homo sapiens; identical to SEQ ID NO: 340647
  chr10:70218986-70219125
  hypo

SEQ ID NO: 379312 - DNA, 1236 bp, Homo sapiens; identical to SEQ ID NO: 333960
  chr10:71078140-71079376
  hypo

SEQ ID NO: 379313 - DNA, 634 bp, Homo sapiens; identical to SEQ ID NO: 340649
  chr10:71133924-71134558
  hypo

SEQ ID NO: 379314 - DNA, 204 bp, Homo sapiens; identical to SEQ ID NO: 365346
  chr10:71158354-71158558
  hypo

SEQ ID NO: 379315 - DNA, 234 bp, Homo sapiens
  chr10:71405328-71405562
  hypo
cgttttccccactcacggcgaacctgaagccttctccaaagggcttcacacccagggccactgaggcctggaaagcattttatttatacgaggtattcctggtaaccttctccgcctttcatagggtgcgtgagtggtcaccacagagaaacaggccaaagctgacccggtgcccaccttttctgcccacagtgtccttccaggcccctgacttgttccatgccgccaatgcac

SEQ ID NO: 379316 - DNA, 643 bp, Homo sapiens; identical to SEQ ID NO: 351052
  chr10:71892158-71892801
  hypo

SEQ ID NO: 379317 - DNA, 323 bp, Homo sapiens; identical to SEQ ID NO: 347095
  chr10:72238261-72238584
  hypo

SEQ ID NO: 379318 - DNA, 156 bp, Homo sapiens; identical to SEQ ID NO: 340655
  chr10:72288415-72288571
  hypo

SEQ ID NO: 379319 - DNA, 217 bp, Homo sapiens; identical to SEQ ID NO: 340656
  chr10:72765340-72765557
  hypo

SEQ ID NO: 379320 - DNA, 95 bp, Homo sapiens; identical to SEQ ID NO: 365350
  chr10:72784980-72785075
  hypo

SEQ ID NO: 379321 - DNA, 162 bp, Homo sapiens; identical to SEQ ID NO: 340658
  chr10:73445891-73446053
  hypo

SEQ ID NO: 379322 - DNA, 238 bp, Homo sapiens; identical to SEQ ID NO: 340659
  chr10:73514960-73515198
  hypo

SEQ ID NO: 379323 - DNA, 134 bp, Homo sapiens; identical to SEQ ID NO: 340660
  chr10:73591528-73591662
  hypo

SEQ ID NO: 379324 - DNA, 402 bp, Homo sapiens
  chr10:73767536-73767938
  hypo
cgccgctgcggccccctcaacgtgacgctggccgcagaggcctgccgccgcaaggagcacatggccctcaaggcggtgcgcatccggcagctggagttcctgcagccgctggccgaggacccccgcctggacctgcgcgtcatccagctggtgcgcgacccccgggccgtgctggcctcgcgcatggtggccttcgccggcaagtataagacctggaagaagtggctggacgacgagggccaggacggcctgagggaagaggaggtgcagcggctgcggggcaactgcgagagcatccgcctgtccgcggagctggggctgcggcagcccgcctggctgcggggccgctacatgctggtgcgctacgaggacgtggcacgcgggccgctgcagaaggcccgc

SEQ ID NO: 379325 - DNA, 412 bp, Homo sapiens; identical to SEQ ID NO: 345356
  chr10:74079281-74079693
  hypo

SEQ ID NO: 379326 - DNA, 179 bp, Homo sapiens; identical to SEQ ID NO: 345357
  chr10:74079752-74079931
  hypo

SEQ ID NO: 379327 - DNA, 61 bp, Homo sapiens; identical to SEQ ID NO: 365356
  chr10:74100516-74100577
  hypo

SEQ ID NO: 379328 - DNA, 38 bp, Homo sapiens; identical to SEQ ID NO: 354557
  chr10:74451119-74451157
  hypo

SEQ ID NO: 379329 - DNA, 116 bp, Homo sapiens; identical to SEQ ID NO: 340667
  chr10:75574077-75574193
  hypo

SEQ ID NO: 379330 - DNA, 102 bp, Homo sapiens; identical to SEQ ID NO: 340668
  chr10:76287784-76287886
  hypo

SEQ ID NO: 379331 - DNA, 168 bp, Homo sapiens; identical to SEQ ID NO: 340669
  chr10:76524062-76524230
  hypo

SEQ ID NO: 379332 - DNA, 74 bp, Homo sapiens; identical to SEQ ID NO: 365360
  chr10:76784656-76784730
  hypo

SEQ ID NO: 379333 - DNA, 73 bp, Homo sapiens; identical to SEQ ID NO: 340671
  chr10:76966489-76966562
  hypo

SEQ ID NO: 379334 - DNA, 404 bp, Homo sapiens; identical to SEQ ID NO: 340672
  chr10:76998426-76998830
  hypo

SEQ ID NO: 379335 - DNA, 1015 bp, Homo sapiens; identical to SEQ ID NO: 287250
  chr10:77160017-77161032
  hypo

SEQ ID NO: 379336 - DNA, 42 bp, Homo sapiens; identical to SEQ ID NO: 365364
  chr10:77892406-77892448
  hypo

SEQ ID NO: 379337 - DNA, 112 bp, Homo sapiens; identical to SEQ ID NO: 312774
  chr10:77892478-77892590
  hypo

SEQ ID NO: 379338 - DNA, 499 bp, Homo sapiens; identical to SEQ ID NO: 340677
  chr10:79601557-79602056
  hypo

SEQ ID NO: 379339 - DNA, 433 bp, Homo sapiens; identical to SEQ ID NO: 340678
  chr10:79610504-79610937
  hypo

SEQ ID NO: 379340 - DNA, 76 bp, Homo sapiens; identical to SEQ ID NO: 340679
  chr10:79770259-79770335
  hypo

SEQ ID NO: 379341 - DNA, 138 bp, Homo sapiens; identical to SEQ ID NO: 340680
  chr10:80848861-80848999
  hypo

SEQ ID NO: 379342 - DNA, 226 bp, Homo sapiens; identical to SEQ ID NO: 340681
  chr10:80855265-80855491
  hypo

SEQ ID NO: 379343 - DNA, 423 bp, Homo sapiens; identical to SEQ ID NO: 340682
  chr10:80878255-80878678
  hypo

SEQ ID NO: 379344 - DNA, 253 bp, Homo sapiens; identical to SEQ ID NO: 340683
  chr10:80921761-80922014
  hypo

SEQ ID NO: 379345 - DNA, 178 bp, Homo sapiens; identical to SEQ ID NO: 340684
  chr10:80928401-80928579
  hypo

SEQ ID NO: 379346 - DNA, 80 bp, Homo sapiens; identical to SEQ ID NO: 365373
  chr10:81023804-81023884
  hypo

SEQ ID NO: 379347 - DNA, 69 bp, Homo sapiens; identical to SEQ ID NO: 365374
  chr10:81023914-81023983
  hypo

SEQ ID NO: 379348 - DNA, 240 bp, Homo sapiens; identical to SEQ ID NO: 340687
  chr10:81032458-81032698
  hypo

SEQ ID NO: 379349 - DNA, 197 bp, Homo sapiens; identical to SEQ ID NO: 340688
  chr10:81036003-81036200
  hypo

SEQ ID NO: 379350 - DNA, 261 bp, Homo sapiens; identical to SEQ ID NO: 340689
  chr10:81050762-81051023
  hypo

SEQ ID NO: 379351 - DNA, 82 bp, Homo sapiens; identical to SEQ ID NO: 340690
  chr10:81060524-81060606
  hypo

SEQ ID NO: 379352 - DNA, 447 bp, Homo sapiens; identical to SEQ ID NO: 340691
  chr10:81063491-81063938
  hypo

SEQ ID NO: 379353 - DNA, 366 bp, Homo sapiens; identical to SEQ ID NO: 340692
  chr10:81065719-81066085
  hypo

SEQ ID NO: 379354 - DNA, 137 bp, Homo sapiens; identical to SEQ ID NO: 340693
  chr10:81142199-81142336
  hypo

SEQ ID NO: 379355 - DNA, 186 bp, Homo sapiens; identical to SEQ ID NO: 340694
  chr10:88200334-88200520
  hypo

SEQ ID NO: 379356 - DNA, 635 bp, Homo sapiens; identical to SEQ ID NO: 348435
  chr10:88441134-88441769
  hypo

SEQ ID NO: 379357 - DNA, 740 bp, Homo sapiens; identical to SEQ ID NO: 340696
  chr10:88702294-88703034
  hypo

SEQ ID NO: 379358 - DNA, 118 bp, Homo sapiens; identical to SEQ ID NO: 340697
  chr10:88857179-88857297
  hypo

SEQ ID NO: 379359 - DNA, 81 bp, Homo sapiens; identical to SEQ ID NO: 287311
  chr10:92617016-92617097
  hypo

SEQ ID NO: 379360 - DNA, 508 bp, Homo sapiens; identical to SEQ ID NO: 287312
  chr10:92617539-92618047
  hypo

SEQ ID NO: 379361 - DNA, 64 bp, Homo sapiens; identical to SEQ ID NO: 359627
  chr10:92618077-92618141
  hypo

SEQ ID NO: 379362 - DNA, 141 bp, Homo sapiens; identical to SEQ ID NO: 365389
  chr10:93567138-93567279
  hypo

SEQ ID NO: 379363 - DNA, 185 bp, Homo sapiens; identical to SEQ ID NO: 340700
  chr10:93572713-93572898
  hypo

SEQ ID NO: 379364 - DNA, 57 bp, Homo sapiens; identical to SEQ ID NO: 345362
  chr10:93647662-93647719
  hypo

SEQ ID NO: 379365 - DNA, 79 bp, Homo sapiens; identical to SEQ ID NO: 287325
  chr10:94449318-94449397
  hypo

SEQ ID NO: 379366 - DNA, 384 bp, Homo sapiens; identical to SEQ ID NO: 287332
  chr10:94833649-94834033
  hypo

SEQ ID NO: 379367 - DNA, 112 bp, Homo sapiens; identical to SEQ ID NO: 359634
  chr10:95753372-95753484
  hypo

SEQ ID NO: 379368 - DNA, 372 bp, Homo sapiens; identical to SEQ ID NO: 287338
  chr10:95753760-95754132
  hypo

SEQ ID NO: 379369 - DNA, 173 bp, Homo sapiens; identical to SEQ ID NO: 334004
  chr10:97051022-97051195
  hypo

SEQ ID NO: 379370 - DNA, 51 bp, Homo sapiens; identical to SEQ ID NO: 340707
  chr10:97322758-97322809
  hypo

SEQ ID NO: 379371 - DNA, 51 bp, Homo sapiens; identical to SEQ ID NO: 365397
  chr10:98292796-98292847
  hypo

SEQ ID NO: 379372 - DNA, 82 bp, Homo sapiens; identical to SEQ ID NO: 354577
  chr10:98364552-98364634
  hypo

SEQ ID NO: 379373 - DNA, 32 bp, Homo sapiens; identical to SEQ ID NO: 340711
  chr10:98983004-98983036
  hypo

SEQ ID NO: 379374 - DNA, 371 bp, Homo sapiens; identical to SEQ ID NO: 340712
  chr10:99206760-99207131
  hypo

SEQ ID NO: 379375 - DNA, 114 bp, Homo sapiens; identical to SEQ ID NO: 359641
  chr10:99474279-99474393
  hypo

SEQ ID NO: 379376 - DNA, 62 bp, Homo sapiens; identical to SEQ ID NO: 359642
  chr10:99474467-99474529
  hypo

SEQ ID NO: 379377 - DNA, 194 bp, Homo sapiens; identical to SEQ ID NO: 359643
  chr10:99530903-99531097
  hypo

SEQ ID NO: 379378 - DNA, 107 bp, Homo sapiens; identical to SEQ ID NO: 340716
  chr10:100171106-100171213
  hypo

SEQ ID NO: 379379 - DNA, 287 bp, Homo sapiens; identical to SEQ ID NO: 287412
  chr10:102507993-102508280
  hypo

SEQ ID NO: 379380 - DNA, 569 bp, Homo sapiens; identical to SEQ ID NO: 334036
  chr10:102822304-102822873
  hypo

SEQ ID NO: 379381 - DNA, 246 bp, Homo sapiens; identical to SEQ ID NO: 287435
  chr10:102988365-102988611
  hypo

SEQ ID NO: 379382 - DNA, 141 bp, Homo sapiens; identical to SEQ ID NO: 340725
  chr10:103372842-103372983
  hypo

SEQ ID NO: 379383 - DNA, 42 bp, Homo sapiens; identical to SEQ ID NO: 354580
  chr10:103425908-103425950
  hypo

SEQ ID NO: 379384 - DNA, 126 bp, Homo sapiens; identical to SEQ ID NO: 287446
  chr10:103535496-103535622
  hypo

SEQ ID NO: 379385 - DNA, 211 bp, Homo sapiens; identical to SEQ ID NO: 202239
  chr10:103535916-103536127
  hypo

SEQ ID NO: 379386 - DNA, 168 bp, Homo sapiens; identical to SEQ ID NO: 340728
  chr10:103817648-103817816
  hypo

SEQ ID NO: 379387 - DNA, 129 bp, Homo sapiens; identical to SEQ ID NO: 372517
  chr10:103985878-103986007
  hypo

SEQ ID NO: 379388 - DNA, 279 bp, Homo sapiens; identical to SEQ ID NO: 354581
  chr10:104416719-104416998
  hypo

SEQ ID NO: 379389 - DNA, 142 bp, Homo sapiens; identical to SEQ ID NO: 354582
  chr10:104417062-104417204
  hypo

SEQ ID NO: 379390 - DNA, 124 bp, Homo sapiens; identical to SEQ ID NO: 340732
  chr10:105403473-105403597
  hypo

SEQ ID NO: 379391 - DNA, 722 bp, Homo sapiens; identical to SEQ ID NO: 351100
  chr10:106097237-106097959
  hypo

SEQ ID NO: 379392 - DNA, 165 bp, Homo sapiens; identical to SEQ ID NO: 351101
  chr10:106098025-106098190
  hypo

SEQ ID NO: 379393 - DNA, 334 bp, Homo sapiens; identical to SEQ ID NO: 372524
  chr10:106113480-106113814
  hypo

SEQ ID NO: 379394 - DNA, 737 bp, Homo sapiens; identical to SEQ ID NO: 334066
  chr10:111767130-111767867
  hypo

SEQ ID NO: 379395 - DNA, 174 bp, Homo sapiens; identical to SEQ ID NO: 340737
  chr10:111987876-111988050
  hypo

SEQ ID NO: 379396 - DNA, 232 bp, Homo sapiens; identical to SEQ ID NO: 287530
  chr10:112403994-112404226
  hypo

SEQ ID NO: 379397 - DNA, 37 bp, Homo sapiens; identical to SEQ ID NO: 351106
  chr10:112431835-112431872
  hypo

SEQ ID NO: 379398 - DNA, 235 bp, Homo sapiens; identical to SEQ ID NO: 202288
  chr10:112432125-112432360
  hypo

SEQ ID NO: 379399 - DNA, 164 bp, Homo sapiens; identical to SEQ ID NO: 340740
  chr10:114200406-114200570
  hypo

SEQ ID NO: 379400 - DNA, 65 bp, Homo sapiens; identical to SEQ ID NO: 340741
  chr10:114252654-114252719
  hypo

SEQ ID NO: 379401 - DNA, 45 bp, Homo sapiens; identical to SEQ ID NO: 340742
  chr10:114343145-114343190
  hypo

SEQ ID NO: 379402 - DNA, 208 bp, Homo sapiens; identical to SEQ ID NO: 340743
  chr10:114591706-114591914
  hypo

SEQ ID NO: 379403 - DNA, 169 bp, Homo sapiens; identical to SEQ ID NO: 359682
  chr10:114711931-114712100
  hypo

SEQ ID NO: 379404 - DNA, 427 bp, Homo sapiens; identical to SEQ ID NO: 359683
  chr10:114712446-114712873
  hypo

SEQ ID NO: 379405 - DNA, 98 bp, Homo sapiens; identical to SEQ ID NO: 354591
  chr10:116045880-116045978
  hypo

SEQ ID NO: 379406 - DNA, 180 bp, Homo sapiens; identical to SEQ ID NO: 354592
  chr10:116046022-116046202
  hypo

SEQ ID NO: 379407 - DNA, 115 bp, Homo sapiens; identical to SEQ ID NO: 340746
  chr10:116050056-116050171
  hypo

SEQ ID NO: 379408 - DNA, 916 bp, Homo sapiens; identical to SEQ ID NO: 334075
  chr10:116527415-116528331
  hypo

SEQ ID NO: 379409 - DNA, 51 bp, Homo sapiens; identical to SEQ ID NO: 359690
  chr10:119001564-119001615
  hypo

SEQ ID NO: 379410 - DNA, 203 bp, Homo sapiens; identical to SEQ ID NO: 372555
  chr10:119302490-119302693
  hypo

SEQ ID NO: 379411 - DNA, 93 bp, Homo sapiens; identical to SEQ ID NO: 354593
  chr10:119807131-119807224
  hypo

SEQ ID NO: 379412 - DNA, 79 bp, Homo sapiens; identical to SEQ ID NO: 340753
  chr10:120601836-120601915
  hypo

SEQ ID NO: 379413 - DNA, 239 bp, Homo sapiens; identical to SEQ ID NO: 354595
  chr10:121265805-121266044
  hypo

SEQ ID NO: 379414 - DNA, 131 bp, Homo sapiens; identical to SEQ ID NO: 347121
  chr10:121301363-121301494
  hypo

SEQ ID NO: 379415 - DNA, 760 bp, Homo sapiens; identical to SEQ ID NO: 345370
  chr10:121301911-121302671
  hypo

SEQ ID NO: 379416 - DNA, 216 bp, Homo sapiens; identical to SEQ ID NO: 365434
  chr10:121398054-121398270
  hypo

SEQ ID NO: 379417 - DNA, 43 bp, Homo sapiens; identical to SEQ ID NO: 340757
  chr10:121591491-121591534
  hypo

SEQ ID NO: 379418 - DNA, 137 bp, Homo sapiens; identical to SEQ ID NO: 340758
  chr10:121702253-121702390
  hypo

SEQ ID NO: 379419 - DNA, 276 bp, Homo sapiens; identical to SEQ ID NO: 359707
  chr10:124134313-124134589
  hypo

SEQ ID NO: 379420 - DNA, 134 bp, Homo sapiens; identical to SEQ ID NO: 340762
  chr10:125017540-125017674
  hypo

SEQ ID NO: 379421 - DNA, 271 bp, Homo sapiens; identical to SEQ ID NO: 354600
  chr10:125617057-125617328
  hypo

SEQ ID NO: 379422 - DNA, 1193 bp, Homo sapiens; identical to SEQ ID NO: 334112
  chr10:126106668-126107861
  hypo

SEQ ID NO: 379423 - DNA, 48 bp, Homo sapiens; identical to SEQ ID NO: 340765
  chr10:126190228-126190276
  hypo

SEQ ID NO: 379424 - DNA, 57 bp, Homo sapiens; identical to SEQ ID NO: 365442
  chr10:126198892-126198949
  hypo

SEQ ID NO: 379425 - DNA, 358 bp, Homo sapiens; identical to SEQ ID NO: 340767
  chr10:126296075-126296433
  hypo

SEQ ID NO: 379426 - DNA, 69 bp, Homo sapiens; identical to SEQ ID NO: 354604
  chr10:126314669-126314738
  hypo

SEQ ID NO: 379427 - DNA, 185 bp, Homo sapiens; identical to SEQ ID NO: 213781
  chr10:126332086-126332271
  hypo

SEQ ID NO: 379428 - DNA, 319 bp, Homo sapiens; identical to SEQ ID NO: 340771
  chr10:126354246-126354565
  hypo

SEQ ID NO: 379429 - DNA, 229 bp, Homo sapiens; identical to SEQ ID NO: 340772
  chr10:126696804-126697033
  hypo

SEQ ID NO: 379430 - DNA, 114 bp, Homo sapiens; identical to SEQ ID NO: 340773
  chr10:126711488-126711602
  hypo

SEQ ID NO: 379431 - DNA, 1801 bp, Homo sapiens; identical to SEQ ID NO: 340774
  chr10:126714633-126716434
  hypo

SEQ ID NO: 379432 - DNA, 295 bp, Homo sapiens; identical to SEQ ID NO: 340775
  chr10:126721936-126722231
  hypo

SEQ ID NO: 379433 - DNA, 261 bp, Homo sapiens; identical to SEQ ID NO: 340776
  chr10:126767714-126767975
  hypo

SEQ ID NO: 379434 - DNA, 549 bp, Homo sapiens; identical to SEQ ID NO: 340777
  chr10:126771776-126772325
  hypo

SEQ ID NO: 379435 - DNA, 92 bp, Homo sapiens; identical to SEQ ID NO: 340778
  chr10:126775448-126775540
  hypo

SEQ ID NO: 379436 - DNA, 409 bp, Homo sapiens; identical to SEQ ID NO: 340779
  chr10:126794880-126795289
  hypo

SEQ ID NO: 379437 - DNA, 392 bp, Homo sapiens; identical to SEQ ID NO: 340780
  chr10:126819324-126819716
  hypo

SEQ ID NO: 379438 - DNA, 75 bp, Homo sapiens
  chr10:126828919-126828994
  hypo
cgatgactgccgcttaaacctgccctcagcctgactgatgtgatgagggaaggggacaaagaatgagctccgaaa

SEQ ID NO: 379439 - DNA, 379 bp, Homo sapiens; identical to SEQ ID NO: 340782
  chr10:126830153-126830532
  hypo

SEQ ID NO: 379440 - DNA, 143 bp, Homo sapiens; identical to SEQ ID NO: 340783
  chr10:127415629-127415772
  hypo

SEQ ID NO: 379441 - DNA, 141 bp, Homo sapiens; identical to SEQ ID NO: 346009
  chr10:127451818-127451959
  hypo

SEQ ID NO: 379442 - DNA, 38 bp, Homo sapiens; identical to SEQ ID NO: 346010
  chr10:127452067-127452105
  hypo

SEQ ID NO: 379443 - DNA, 218 bp, Homo sapiens; identical to SEQ ID NO: 340785
  chr10:127817236-127817454
  hypo

SEQ ID NO: 379444 - DNA, 213 bp, Homo sapiens; identical to SEQ ID NO: 340786
  chr10:128813812-128814025
  hypo

SEQ ID NO: 379445 - DNA, 307 bp, Homo sapiens; identical to SEQ ID NO: 340787
  chr10:129195296-129195603
  hypo

SEQ ID NO: 379446 - DNA, 413 bp, Homo sapiens; identical to SEQ ID NO: 340788
  chr10:129195681-129196094
  hypo

SEQ ID NO: 379447 - DNA, 105 bp, Homo sapiens; identical to SEQ ID NO: 365461
  chr10:129228001-129228106
  hypo

SEQ ID NO: 379448 - DNA, 176 bp, Homo sapiens; identical to SEQ ID NO: 340790
  chr10:129241072-129241248
  hypo

SEQ ID NO: 379449 - DNA, 166 bp, Homo sapiens; identical to SEQ ID NO: 340791
  chr10:129242401-129242567
  hypo

SEQ ID NO: 379450 - DNA, 669 bp, Homo sapiens; identical to SEQ ID NO: 340792
  chr10:129245272-129245941
  hypo

SEQ ID NO: 379451 - DNA, 37 bp, Homo sapiens; identical to SEQ ID NO: 365464
  chr10:129897014-129897051
  hypo

SEQ ID NO: 379452 - DNA, 175 bp, Homo sapiens; identical to SEQ ID NO: 340794
  chr10:130300191-130300366
  hypo

SEQ ID NO: 379453 - DNA, 105 bp, Homo sapiens; identical to SEQ ID NO: 365466
  chr10:131348408-131348513
  hypo

SEQ ID NO: 379454 - DNA, 161 bp, Homo sapiens; identical to SEQ ID NO: 340796
  chr10:131566947-131567108
  hypo

SEQ ID NO: 379455 - DNA, 351 bp, Homo sapiens; identical to SEQ ID NO: 340797
  chr10:131638488-131638839
  hypo

SEQ ID NO: 379456 - DNA, 295 bp, Homo sapiens; identical to SEQ ID NO: 365469
  chr10:131647424-131647719
  hypo

SEQ ID NO: 379457 - DNA, 260 bp, Homo sapiens; identical to SEQ ID NO: 313321
  chr10:131844765-131845025
  hypo

SEQ ID NO: 379458 - DNA, 135 bp, Homo sapiens; identical to SEQ ID NO: 354615
  chr10:131987142-131987277
  hypo

SEQ ID NO: 379459 - DNA, 98 bp, Homo sapiens; identical to SEQ ID NO: 340805
  chr10:132869762-132869860
  hypo

SEQ ID NO: 379460 - DNA, 202 bp, Homo sapiens; identical to SEQ ID NO: 213827
  chr10:133783038-133783240
  hypo

SEQ ID NO: 379461 - DNA, 238 bp, Homo sapiens; identical to SEQ ID NO: 340810
  chr10:133834585-133834823
  hypo

SEQ ID NO: 379462 - DNA, 348 bp, Homo sapiens; identical to SEQ ID NO: 365475
  chr10:133920829-133921177
  hypo

SEQ ID NO: 379463 - DNA, 163 bp, Homo sapiens; identical to SEQ ID NO: 365476
  chr10:133921207-133921370
  hypo

SEQ ID NO: 379464 - DNA, 361 bp, Homo sapiens
  chr10:133982448-133982809
  hypo
cgggcgcaagaagggaaccgcggggacggcctttcccctcccgccctgtgtggggacgctgcacgagccgtggaccaagaggctgacaggtaagggctgccatctgtccgcggggagggcctttgcaccctccctgcgaggtgagctccagcttcttcacacctctgtgtccccgtctgcacatgcgtgacgctgccaccccgtccactgctgacccgtcaagatcacctctcccgccactgacgggacagggcctgggggctggtgtggagcgtggcgtgagctgtcgctggggcagggtctgcagacatggtgctccacggggacctggcgtctggcagagctggtcctcctcccactt

SEQ ID NO: 379465 - DNA, 479 bp, Homo sapiens
  chr10:133982961-133983440
  hypo
actctgggtgctcccagcagggagggagggaggtcaggactctgggcatgctccaccgtggagctttcctcgccagcggggttccctatgggagggtttgtggatccgttgtgtctgtgggactcagcggggccctggggcagggtgagccggttcttggggaggcagtggcagccccatggggggccgcccagggagcgctccatctcccccacctccgacccacaccgtgtctgagagccacctgtgtctcctgcagtgggcagcggctgtgggccacgggcactgttgttcccgggagatgctccctgcgtagaaaatgggagggggaggaggaggtgcgaccaccaccctggactcaggagagggcggcagctccatcttcacccttgactcaggaggggtccgcagcgaggaggaggtgcgaagggggcggcggctccgtcttgcaggtcccctggggcgcgttcttcaggtgc

SEQ ID NO: 379466 - DNA, 429 bp, Homo sapiens; identical to SEQ ID NO: 340815
  chr10:134049521-134049950
  hypo

SEQ ID NO: 379467 - DNA, 405 bp, Homo sapiens; identical to SEQ ID NO: 340817
  chr10:134116378-134116783
  hypo

SEQ ID NO: 379468 - DNA, 128 bp, Homo sapiens; identical to SEQ ID NO: 359725
  chr10:134209485-134209613
  hypo

SEQ ID NO: 379469 - DNA, 126 bp, Homo sapiens; identical to SEQ ID NO: 359726
  chr10:134209650-134209776
  hypo

SEQ ID NO: 379470 - DNA, 381 bp, Homo sapiens; identical to SEQ ID NO: 365480
  chr10:134212590-134212971
  hypo

SEQ ID NO: 379471 - DNA, 167 bp, Homo sapiens; identical to SEQ ID NO: 340821
  chr10:134298551-134298718
  hypo

SEQ ID NO: 379472 - DNA, 161 bp, Homo sapiens
  chr10:134300856-134301017
  hypo
cgcaccaggtgtgggtgcaggaggacgtctggttagaggtcagaggcgtcatccccaaccccggccgatgttatcttacgtgcggggaaaggcaaggactggactcgttcatcttttacggaacgtggtgagtcaggcaagagacccgggccctgtgctcc

SEQ ID NO: 379473 - DNA, 199 bp, Homo sapiens; identical to SEQ ID NO: 354619
  chr10:134477298-134477497
  hypo

SEQ ID NO: 379474 - DNA, 267 bp, Homo sapiens; identical to SEQ ID NO: 365483
  chr10:134491114-134491381
  hypo

SEQ ID NO: 379475 - DNA, 591 bp, Homo sapiens; identical to SEQ ID NO: 354620
  chr10:134527015-134527606
  hypo

SEQ ID NO: 379476 - DNA, 345 bp, Homo sapiens; identical to SEQ ID NO: 354621
  chr10:134527839-134528184
  hypo

SEQ ID NO: 379477 - DNA, 529 bp, Homo sapiens; identical to SEQ ID NO: 340827
  chr10:134529092-134529621
  hypo

SEQ ID NO: 379478 - DNA, 252 bp, Homo sapiens; identical to SEQ ID NO: 348449
  chr10:134562467-134562719
  hypo

SEQ ID NO: 379479 - DNA, 324 bp, Homo sapiens; identical to SEQ ID NO: 313431
  chr10:134562783-134563107
  hypo

SEQ ID NO: 379480 - DNA, 417 bp, Homo sapiens; identical to SEQ ID NO: 354624
  chr10:134592912-134593329
  hypo

SEQ ID NO: 379481 - DNA, 134 bp, Homo sapiens; identical to SEQ ID NO: 354625
  chr10:134593416-134593550
  hypo

SEQ ID NO: 379482 - DNA, 128 bp, Homo sapiens; identical to SEQ ID NO: 372592
  chr10:134602414-134602542
  hypo

SEQ ID NO: 379483 - DNA, 117 bp, Homo sapiens; identical to SEQ ID NO: 365491
  chr10:134607715-134607832
  hypo

SEQ ID NO: 379484 - DNA, 40 bp, Homo sapiens; identical to SEQ ID NO: 354626
  chr10:134610534-134610574
  hypo

SEQ ID NO: 379485 - DNA, 195 bp, Homo sapiens; identical to SEQ ID NO: 365493
  chr10:134639765-134639960
  hypo

SEQ ID NO: 379486 - DNA, 51 bp, Homo sapiens
  chr10:134659606-134659657
  hypo
gtggtggtcctgtcttggcaccggagctggtgctgtagctgcagcagggcc

SEQ ID NO: 379487 - DNA, 201 bp, Homo sapiens; identical to SEQ ID NO: 213869
  chr10:134664806-134665007
  hypo

SEQ ID NO: 379488 - DNA, 118 bp, Homo sapiens; identical to SEQ ID NO: 365494
  chr10:134680051-134680169
  hypo

SEQ ID NO: 379489 - DNA, 119 bp, Homo sapiens; identical to SEQ ID NO: 340838
  chr10:134694283-134694402
  hypo

SEQ ID NO: 379490 - DNA, 242 bp, Homo sapiens; identical to SEQ ID NO: 313464
  chr10:134699406-134699648
  hypo

SEQ ID NO: 379491 - DNA, 164 bp, Homo sapiens
  chr10:134729798-134729962
  hypo
cgtttcctcgtagtaacagcaaactacgcctggggtcttgcgaggaacgacggctaaaaacaggagaggccacgtcaccccattttctctttcatggtctcagtcatttacgtgacgatggacacgtcccccacgcaagaagccggtgtccttacgaatgcaaa

SEQ ID NO: 379492 - DNA, 230 bp, Homo sapiens; identical to SEQ ID NO: 313470
  chr10:134733835-134734065
  hypo

SEQ ID NO: 379493 - DNA, 162 bp, Homo sapiens; identical to SEQ ID NO: 313471
  chr10:134734534-134734696
  hypo

SEQ ID NO: 379494 - DNA, 116 bp, Homo sapiens; identical to SEQ ID NO: 365499
  chr10:134738029-134738145
  hypo

SEQ ID NO: 379495 - DNA, 298 bp, Homo sapiens; identical to SEQ ID NO: 365500
  chr10:134738688-134738986
  hypo

SEQ ID NO: 379496 - DNA, 152 bp, Homo sapiens; identical to SEQ ID NO: 340844
  chr10:134758138-134758290
  hypo

SEQ ID NO: 379497 - DNA, 113 bp, Homo sapiens
  chr10:134787917-134788030
  hypo
cgctgcctgtgagatgaggccagatcctcgccgcccgcacctgcctctccccaactcgccctgcgcgggacaggtggacgccgcccacacctacctctcccccactcaccctg

SEQ ID NO: 379498 - DNA, 288 bp, Homo sapiens; identical to SEQ ID NO: 354629
  chr10:134790715-134791003
  hypo

SEQ ID NO: 379499 - DNA, 50 bp, Homo sapiens; identical to SEQ ID NO: 346011
  chr10:134793882-134793932
  hypo

SEQ ID NO: 379500 - DNA, 144 bp, Homo sapiens; identical to SEQ ID NO: 346012
  chr10:134793968-134794112
  hypo

SEQ ID NO: 379501 - DNA, 202 bp, Homo sapiens; identical to SEQ ID NO: 348453
  chr10:134794144-134794346
  hypo

SEQ ID NO: 379502 - DNA, 133 bp, Homo sapiens; identical to SEQ ID NO: 354633
  chr10:134796042-134796175
  hypo

SEQ ID NO: 379503 - DNA, 488 bp, Homo sapiens; identical to SEQ ID NO: 340850
  chr10:134829387-134829875
  hypo

SEQ ID NO: 379504 - DNA, 386 bp, Homo sapiens; identical to SEQ ID NO: 354634
  chr10:134830248-134830634
  hypo

SEQ ID NO: 379505 - DNA, 79 bp, Homo sapiens; identical to SEQ ID NO: 354635
  chr10:134830671-134830750
  hypo

SEQ ID NO: 379506 - DNA, 366 bp, Homo sapiens
  chr10:134836865-134837231
  hypo
cgtgaccacggcaagagcgagctggagcggagcctcgggtagccatgactaacagacatggttcgcaaacccacgcacaccttccaaaaacgccaggctggcctcacatgaccaggggcctcaccaagtgcagtgggtccctgcgtgtcagggaggctgcccagagctgtggctgctcctgtcttagcctcaacctgtgcccggggccctgtggatggatccgcgtggggcggtggtgttccaagtccacgtggggcggtggtgttccaggtccacgtggggcggtggtgttccaggtccacgtggggcggtggtgttccaggtccacgtggggtggtggtgttccaagtccacgtgggacggcgg

SEQ ID NO: 379507 - DNA, 120 bp, Homo sapiens; identical to SEQ ID NO: 354636
  chr10:134875690-134875810
  hypo

SEQ ID NO: 379508 - DNA, 66 bp, Homo sapiens; identical to SEQ ID NO: 340855
  chr10:134878532-134878598
  hypo

SEQ ID NO: 379509 - DNA, 557 bp, Homo sapiens; identical to SEQ ID NO: 213891
  chr10:134941895-134942452
  hypo

SEQ ID NO: 379510 - DNA, 44 bp, Homo sapiens
  chr10:134996909-134996953
  hypo
actggaacccaggctgagccaagacctcgaggcgctgctgagcc

SEQ ID NO: 379511 - DNA, 179 bp, Homo sapiens; identical to SEQ ID NO: 340859
  chr10:135001623-135001802
  hypo

SEQ ID NO: 379512 - DNA, 218 bp, Homo sapiens; identical to SEQ ID NO: 365514
  chr10:135002202-135002420
  hypo

SEQ ID NO: 379513 - DNA, 54 bp, Homo sapiens; identical to SEQ ID NO: 365515
  chr10:135016995-135017049
  hypo

SEQ ID NO: 379514 - DNA, 361 bp, Homo sapiens; identical to SEQ ID NO: 365516
  chr10:135017612-135017973
  hypo

SEQ ID NO: 379515 - DNA, 85 bp, Homo sapiens; identical to SEQ ID NO: 365517
  chr10:135022978-135023063
  hypo

SEQ ID NO: 379516 - DNA, 155 bp, Homo sapiens; identical to SEQ ID NO: 365518
  chr10:135025560-135025715
  hypo

SEQ ID NO: 379517 - DNA, 145 bp, Homo sapiens; identical to SEQ ID NO: 365519
  chr10:135025748-135025893
  hypo

SEQ ID NO: 379518 - DNA, 200 bp, Homo sapiens; identical to SEQ ID NO: 365520
  chr10:135030373-135030573
  hypo

SEQ ID NO: 379519 - DNA, 179 bp, Homo sapiens; identical to SEQ ID NO: 365521
  chr10:135087233-135087412
  hypo

SEQ ID NO: 379520 - DNA, 100 bp, Homo sapiens; identical to SEQ ID NO: 365522
  chr10:135087645-135087745
  hypo

SEQ ID NO: 379521 - DNA, 171 bp, Homo sapiens; identical to SEQ ID NO: 340869
  chr10:135107049-135107220
  hypo

SEQ ID NO: 379522 - DNA, 514 bp, Homo sapiens; identical to SEQ ID NO: 340870
  chr10:135120335-135120849
  hypo

SEQ ID NO: 379523 - DNA, 70 bp, Homo sapiens; identical to SEQ ID NO: 340872
  chr10:135125649-135125719
  hypo

SEQ ID NO: 379524 - DNA, 234 bp, Homo sapiens; identical to SEQ ID NO: 348456
  chr10:135153722-135153956
  hypo

SEQ ID NO: 379525 - DNA, 34 bp, Homo sapiens; identical to SEQ ID NO: 348457
  chr10:135154001-135154035
  hypo

SEQ ID NO: 379526 - DNA, 107 bp, Homo sapiens; identical to SEQ ID NO: 340874
  chr10:135229000-135229107
  hypo

SEQ ID NO: 379527 - DNA, 596 bp, Homo sapiens; identical to SEQ ID NO: 340875
  chr10:135269764-135270360
  hypo

SEQ ID NO: 379528 - DNA, 150 bp, Homo sapiens; identical to SEQ ID NO: 346014
  chr11:233062-233212
  hypo

SEQ ID NO: 379529 - DNA, 808 bp, Homo sapiens; identical to SEQ ID NO: 340878
  chr11:376596-377404
  hypo

SEQ ID NO: 379530 - DNA, 175 bp, Homo sapiens; identical to SEQ ID NO: 340879
  chr11:380592-380767
  hypo

SEQ ID NO: 379531 - DNA, 943 bp, Homo sapiens; identical to SEQ ID NO: 359736
  chr11:416597-417540
  hypo

SEQ ID NO: 379532 - DNA, 162 bp, Homo sapiens; identical to SEQ ID NO: 340884
  chr11:455954-456116
  hypo

SEQ ID NO: 379533 - DNA, 91 bp, Homo sapiens; identical to SEQ ID NO: 348459
  chr11:487212-487303
  hypo

SEQ ID NO: 379534 - DNA, 279 bp, Homo sapiens; identical to SEQ ID NO: 313597
  chr11:487548-487827
  hypo

SEQ ID NO: 379535 - DNA, 1000 bp, Homo sapiens
  chr11:487857-488857
  hypo
tgccttgtttgctgacagtcgtacatcgaggctgctggaggggcagccacccaccccacgctcaccctgagacctcactgggggccctgccagtgctgtcgactccaagaatgctgccagccggggtgggggctgcacgcacccgtgggcagggccgggcgtggcctgcgtcccatactctggctgccagccgggtgggggctgcacgcacccgtgggcagggccgggcgtggccggcgtcccatactctggctgccagccggggtgggggctgcacgcacccgtgggcagggccgggtgtggccggcgtcccatactctggctgaccctggcgcccacagaccctgatgatccgagactggtggatgtgcatgatcatcagcgtgatgttcgagttcctggagtacagcctggagcaccagctgcccaacttcagcgagtgctggtgggatcacgtaggtgccagcacagcccccggggcagtcggtgcaggctgaggggcattctcggaacccctgtgcccagcgcggcccctggaccccctcattctccccggggggcagtgggtgcaggctgaggggcattctcggttcccctgtgctcttccggggtcctcctcggggggctcgttacccctcacccctgcaacgagtgctggcccctccctgcagtggatcatggacgtgctcgtctgcaacgggctgggcatctactgcggcatgaagacccttgagtggctgtccctgaagacgtacaagtggcagggcctctggaacattccgacctacaagtacgtcgtgggggctgcgagggcagggccgggtgggggttacctggaggcagcctcagcgtccgtgctccagcagaccccgagcaccaggcccgtccagtgtgcggctcaggaggggtgaccgtggggctttgcctcctggaacctccctctgacctggtgtcactcaagcccggccgcccctcacagtggccatggcgtctgacccac

SEQ ID NO: 379536 - DNA, 574 bp, Homo sapiens; identical to SEQ ID NO: 365536
  chr11:492571-493145
  hypo

SEQ ID NO: 379537 - DNA, 60 bp, Homo sapiens; identical to SEQ ID NO: 365537
  chr11:493199-493259
  hypo

SEQ ID NO: 379538 - DNA, 343 bp, Homo sapiens; identical to SEQ ID NO: 354648
  chr11:561903-562246
  hypo

SEQ ID NO: 379539 - DNA, 627 bp, Homo sapiens; identical to SEQ ID NO: 354649
  chr11:562884-563511
  hypo

SEQ ID NO: 379540 - DNA, 37 bp, Homo sapiens; identical to SEQ ID NO: 354650
  chr11:567195-567232
  hypo

SEQ ID NO: 379541 - DNA, 48 bp, Homo sapiens; identical to SEQ ID NO: 354651
  chr11:567262-567310
  hypo

SEQ ID NO: 379542 - DNA, 171 bp, Homo sapiens; identical to SEQ ID NO: 340889
  chr11:591108-591279
  hypo

SEQ ID NO: 379543 - DNA, 137 bp, Homo sapiens; identical to SEQ ID NO: 340890
  chr11:688396-688533
  hypo

SEQ ID NO: 379544 - DNA, 672 bp, Homo sapiens; identical to SEQ ID NO: 334150
  chr11:705963-706635
  hypo

SEQ ID NO: 379545 - DNA, 110 bp, Homo sapiens; identical to SEQ ID NO: 354653
  chr11:763192-763302
  hypo

SEQ ID NO: 379546 - DNA, 62 bp, Homo sapiens; identical to SEQ ID NO: 354654
  chr11:764018-764080
  hypo

SEQ ID NO: 379547 - DNA, 364 bp, Homo sapiens; identical to SEQ ID NO: 340894
  chr11:799220-799584
  hypo

SEQ ID NO: 379548 - DNA, 305 bp, Homo sapiens; identical to SEQ ID NO: 365547
  chr11:799826-800131
  hypo

SEQ ID NO: 379549 - DNA, 38 bp, Homo sapiens; identical to SEQ ID NO: 354655
  chr11:823426-823464
  hypo

SEQ ID NO: 379550 - DNA, 409 bp, Homo sapiens; identical to SEQ ID NO: 313646
  chr11:823494-823903
  hypo

SEQ ID NO: 379551 - DNA, 102 bp, Homo sapiens; identical to SEQ ID NO: 354657
  chr11:850444-850546
  hypo

SEQ ID NO: 379552 - DNA, 258 bp, Homo sapiens; identical to SEQ ID NO: 354658
  chr11:859386-859644
  hypo

SEQ ID NO: 379553 - DNA, 100 bp, Homo sapiens
  chr11:980551-980651
  hypo
cggtgacaggctgcccggtgctttggggaggactgcttgtgccctgggatctgaatctgttctcactgagggccaggaggagcggggagggaggactcgc

SEQ ID NO: 379554 - DNA, 526 bp, Homo sapiens
  chr11:985466-985992
  hypo
ctggagaccatcctgaacaaagcccaagaaccgcccaagtcgaagaaggtccagcactccaacgcgaagaatgccgtgctcttcgaggccatcagcttaatcattcaccatgacaggtgtgtcggctgcctgtggagaggcttcgtctcgcgcacacacacacgttccttctcgttggcacgagactgggcggatcatgtctggtttgtccactccatgggcctccccttcgtcctgcctctgtgctccctgccggatgctttttttctttctgtgcagcccggcccctcctgctctgagctcaccgtggattgctttggtgactgtggtctcatcccacacgagggccttttcctccttcccctgagcatccccactcctgactggcttctcatgtagtggaacagagaggagacgggtggggtggggggtgtgcgcgcatgtcccgtggctttgctggatgtggagccgcacttggtgggtccagggtcgcagggcagtgctggaaacgtctgtgcccatccac

SEQ ID NO: 379555 - DNA, 513 bp, Homo sapiens; identical to SEQ ID NO: 340902
  chr11:993208-993721
  hypo

SEQ ID NO: 379556 - DNA, 42 bp, Homo sapiens
  chr11:1008033-1008075
  hypo
cgtggacccgaccgtggaggggggcgcgcaggtgcagcaggt

SEQ ID NO: 379557 - DNA, 292 bp, Homo sapiens; identical to SEQ ID NO: 313678
  chr11:1008125-1008417
  hypo

SEQ ID NO: 379558 - DNA, 186 bp, Homo sapiens; identical to SEQ ID NO: 365553
  chr11:1015850-1016036
  hypo

SEQ ID NO: 379559 - DNA, 150 bp, Homo sapiens
  chr11:1029028-1029178
  hypo
cgcaggaaaggccttacctgcctggagaggtagaccacagccaccagggaggtctcggagtgtgagacgccggacttgtcgtacacagccatgagggcaccgtcctcgggaagctgggggctctgcgagggggcggggctcagacacggg

SEQ ID NO: 379560 - DNA, 136 bp, Homo sapiens; identical to SEQ ID NO: 365554
  chr11:1082528-1082664
  hypo

SEQ ID NO: 379561 - DNA, 166 bp, Homo sapiens; identical to SEQ ID NO: 365555
  chr11:1082694-1082860
  hypo

SEQ ID NO: 379562 - DNA, 157 bp, Homo sapiens; identical to SEQ ID NO: 354659
  chr11:1095394-1095551
  hypo

SEQ ID NO: 379563 - DNA, 498 bp, Homo sapiens; identical to SEQ ID NO: 354660
  chr11:1103476-1103974
  hypo

SEQ ID NO: 379564 - DNA, 313 bp, Homo sapiens; identical to SEQ ID NO: 365558
  chr11:1104214-1104527
  hypo

SEQ ID NO: 379565 - DNA, 263 bp, Homo sapiens
  chr11:1215132-1215395
  hypo
cgctccagccttgtcaagcgcccgctggatggagctctgtgcggacgctggccacgtgtgttctgatgacgtgagggtcttgtgcgccctgtgagatgagacggtggggggtcagggacagatgtgacctgttgggaggaaagccccagggccatggtgccaccacccgagccacccgtaaggctgcccctggggcctggcaggtgtgtgcagcggctggggtgacccccactacatcaccttcgacggcacctactacacct

SEQ ID NO: 379566 - DNA, 304 bp, Homo sapiens; identical to SEQ ID NO: 213973
  chr11:1215429-1215733
  hypo

SEQ ID NO: 379567 - DNA, 39 bp, Homo sapiens
  chr11:1228791-1228830
  hypo
cgcagctcaggaagccaccggtagctccactgagaccag

SEQ ID NO: 379568 - DNA, 140 bp, Homo sapiens
  chr11:1228883-1229023
  hypo
tgggtctccacagcagcgccggccgagctggtttgcagactctgcctctggagaatcgtgggcggtggctcctgtttgcctacgtgtgtgctgcatggacagagctgcaaggccccgggcgaacatgcaggcagacggac

SEQ ID NO: 379569 - DNA, 65 bp, Homo sapiens; identical to SEQ ID NO: 354661
  chr11:1254274-1254339
  hypo

SEQ ID NO: 379570 - DNA, 70 bp, Homo sapiens; identical to SEQ ID NO: 354662
  chr11:1254423-1254493
  hypo

SEQ ID NO: 379571 - DNA, 682 bp, Homo sapiens
  chr11:1262498-1263180
  hypo
cgaaaagaccaccctatgggtgaccccgagcatccggtcgacggcggccctcacctcgcagactgggtccagctcaggccccgtgacggtcaccccctcggccccaggtaccaccacctgccagccccggtgtcagtggacagagtggtttgatgaggactaccccaagtctgaacaacttggaggggacgttgagtcctacgataagatcagggccgctggagggcacttatgccagcagcctaaggacatagagtgccaggccgagagcttccccaactggaccctggcacaggtggggcagaaggtgcactgtgacgtccacttcggcctggtgtgcaggaactgggagcaggagggcgtcttcaagatgtgctacaactacaggatccgggtcctctgctgcagtgacgaccactgcaggggacgtgccacaaccccgccaccgaccacagagctggagacggccaccaccaccaccacccaggccctgttctcaacgccgcagcctacgagtagcccggggctgaccagggctcccccggccagcaccacagcagtccccaccctctcagaaggactgacatcccccagatacacaagcacccttggtacagccaccacgggaggccccacgacgcctgcaggctccacagaacccactgtcccaggggtggccaca

SEQ ID NO: 379572 - DNA, 123 bp, Homo sapiens; identical to SEQ ID NO: 354664
  chr11:1263764-1263887
  hypo

SEQ ID NO: 379573 - DNA, 98 bp, Homo sapiens; identical to SEQ ID NO: 365563
  chr11:1275538-1275636
  hypo

SEQ ID NO: 379574 - DNA, 525 bp, Homo sapiens; identical to SEQ ID NO: 313718
  chr11:1275755-1276280
  hypo

SEQ ID NO: 379575 - DNA, 90 bp, Homo sapiens; identical to SEQ ID NO: 365565
  chr11:1301047-1301137
  hypo

SEQ ID NO: 379576 - DNA, 731 bp, Homo sapiens; identical to SEQ ID NO: 347133
  chr11:1410711-1411442
  hypo

SEQ ID NO: 379577 - DNA, 181 bp, Homo sapiens; identical to SEQ ID NO: 365567
  chr11:1446149-1446330
  hypo

SEQ ID NO: 379578 - DNA, 50 bp, Homo sapiens; identical to SEQ ID NO: 365568
  chr11:1446400-1446450
  hypo

SEQ ID NO: 379579 - DNA, 45 bp, Homo sapiens; identical to SEQ ID NO: 365569
  chr11:1464971-1465016
  hypo

SEQ ID NO: 379580 - DNA, 350 bp, Homo sapiens; identical to SEQ ID NO: 354666
  chr11:1466353-1466703
  hypo

SEQ ID NO: 379581 - DNA, 104 bp, Homo sapiens; identical to SEQ ID NO: 354667
  chr11:1471460-1471564
  hypo

SEQ ID NO: 379582 - DNA, 101 bp, Homo sapiens; identical to SEQ ID NO: 365572
  chr11:1477651-1477752
  hypo

SEQ ID NO: 379583 - DNA, 66 bp, Homo sapiens; identical to SEQ ID NO: 365573
  chr11:1478347-1478413
  hypo

SEQ ID NO: 379584 - DNA, 227 bp, Homo sapiens; identical to SEQ ID NO: 354668
  chr11:1521171-1521398
  hypo

SEQ ID NO: 379585 - DNA, 705 bp, Homo sapiens; identical to SEQ ID NO: 365575
  chr11:1535842-1536547
  hypo

SEQ ID NO: 379586 - DNA, 95 bp, Homo sapiens; identical to SEQ ID NO: 365576
  chr11:1536583-1536678
  hypo

SEQ ID NO: 379587 - DNA, 167 bp, Homo sapiens; identical to SEQ ID NO: 340924
  chr11:1552182-1552349
  hypo

SEQ ID NO: 379588 - DNA, 189 bp, Homo sapiens; identical to SEQ ID NO: 340925
  chr11:1795707-1795896
  hypo

SEQ ID NO: 379589 - DNA, 150 bp, Homo sapiens; identical to SEQ ID NO: 340926
  chr11:1800836-1800986
  hypo

SEQ ID NO: 379590 - DNA, 35 bp, Homo sapiens
  chr11:1824257-1824292
  hypo
atgacgttgatcttcatcgtgccaggcgccagggc

SEQ ID NO: 379591 - DNA, 400 bp, Homo sapiens; identical to SEQ ID NO: 340928
  chr11:1824649-1825049
  hypo

SEQ ID NO: 379592 - DNA, 128 bp, Homo sapiens; identical to SEQ ID NO: 340930
  chr11:1845553-1845681
  hypo

SEQ ID NO: 379593 - DNA, 47 bp, Homo sapiens; identical to SEQ ID NO: 340932
  chr11:1919487-1919534
  hypo

SEQ ID NO: 379594 - DNA, 34 bp, Homo sapiens; identical to SEQ ID NO: 365581
  chr11:1975930-1975964
  hypo

SEQ ID NO: 379595 - DNA, 282 bp, Homo sapiens; identical to SEQ ID NO: 340936
  chr11:2026733-2027015
  hypo

SEQ ID NO: 379596 - DNA, 38 bp, Homo sapiens
  chr11:2108016-2108054
  hypo
cgaggaatgcacgtcagaaccagtaggacagctgccat

SEQ ID NO: 379597 - DNA, 64 bp, Homo sapiens
  chr11:2108109-2108173
  hypo
tgctggggatgggccgtggtgccaacgctatggggccgtgggctcctcacacatgtaaacctac

SEQ ID NO: 379598 - DNA, 331 bp, Homo sapiens; identical to SEQ ID NO: 340938
  chr11:2117541-2117872
  hypo

SEQ ID NO: 379599 - DNA, 42 bp, Homo sapiens; identical to SEQ ID NO: 365584
  chr11:2122493-2122535
  hypo

SEQ ID NO: 379600 - DNA, 450 bp, Homo sapiens; identical to SEQ ID NO: 340940
  chr11:2124971-2125421
  hypo

SEQ ID NO: 379601 - DNA, 62 bp, Homo sapiens; identical to SEQ ID NO: 365586
  chr11:2225626-2225688
  hypo

SEQ ID NO: 379602 - DNA, 305 bp, Homo sapiens; identical to SEQ ID NO: 313846
  chr11:2278017-2278322
  hypo

SEQ ID NO: 379603 - DNA, 98 bp, Homo sapiens; identical to SEQ ID NO: 365588
  chr11:2278839-2278937
  hypo

SEQ ID NO: 379604 - DNA, 339 bp, Homo sapiens; identical to SEQ ID NO: 365589
  chr11:2334660-2334999
  hypo

SEQ ID NO: 379605 - DNA, 380 bp, Homo sapiens; identical to SEQ ID NO: 348466
  chr11:2337172-2337552
  hypo

SEQ ID NO: 379606 - DNA, 174 bp, Homo sapiens; identical to SEQ ID NO: 340948
  chr11:2362566-2362740
  hypo

SEQ ID NO: 379607 - DNA, 564 bp, Homo sapiens; identical to SEQ ID NO: 359743
  chr11:2398759-2399323
  hypo

SEQ ID NO: 379608 - DNA, 401 bp, Homo sapiens; identical to SEQ ID NO: 351145
  chr11:2399399-2399800
  hypo

SEQ ID NO: 379609 - DNA, 558 bp, Homo sapiens; identical to SEQ ID NO: 340950
  chr11:2412921-2413479
  hypo

SEQ ID NO: 379610 - DNA, 558 bp, Homo sapiens; identical to SEQ ID NO: 313867
  chr11:2435414-2435972
  hypo

SEQ ID NO: 379611 - DNA, 407 bp, Homo sapiens; identical to SEQ ID NO: 214016
  chr11:2436014-2436421
  hypo

SEQ ID NO: 379612 - DNA, 136 bp, Homo sapiens; identical to SEQ ID NO: 365595
  chr11:2436611-2436747
  hypo

SEQ ID NO: 379613 - DNA, 312 bp, Homo sapiens; identical to SEQ ID NO: 340952
  chr11:2569208-2569520
  hypo

SEQ ID NO: 379614 - DNA, 154 bp, Homo sapiens; identical to SEQ ID NO: 340954
  chr11:2782417-2782571
  hypo

SEQ ID NO: 379615 - DNA, 55 bp, Homo sapiens; identical to SEQ ID NO: 340955
  chr11:2987095-2987150
  hypo

SEQ ID NO: 379616 - DNA, 130 bp, Homo sapiens; identical to SEQ ID NO: 340956
  chr11:3035029-3035159
  hypo

SEQ ID NO: 379617 - DNA, 285 bp, Homo sapiens; identical to SEQ ID NO: 365597
  chr11:3110995-3111280
  hypo

SEQ ID NO: 379618 - DNA, 140 bp, Homo sapiens; identical to SEQ ID NO: 340958
  chr11:3128538-3128678
  hypo

SEQ ID NO: 379619 - DNA, 253 bp, Homo sapiens; identical to SEQ ID NO: 340959
  chr11:3145131-3145384
  hypo

SEQ ID NO: 379620 - DNA, 93 bp, Homo sapiens; identical to SEQ ID NO: 354678
  chr11:3164459-3164552
  hypo

SEQ ID NO: 379621 - DNA, 290 bp, Homo sapiens; identical to SEQ ID NO: 202417
  chr11:3186311-3186601
  hypo

SEQ ID NO: 379622 - DNA, 716 bp, Homo sapiens; identical to SEQ ID NO: 340964
  chr11:3243313-3244029
  hypo

SEQ ID NO: 379623 - DNA, 103 bp, Homo sapiens; identical to SEQ ID NO: 348470
  chr11:3697491-3697594
  hypo

SEQ ID NO: 379624 - DNA, 318 bp, Homo sapiens; identical to SEQ ID NO: 340968
  chr11:3845131-3845449
  hypo

SEQ ID NO: 379625 - DNA, 156 bp, Homo sapiens; identical to SEQ ID NO: 365604
  chr11:5950927-5951083
  hypo

SEQ ID NO: 379626 - DNA, 148 bp, Homo sapiens; identical to SEQ ID NO: 372624
  chr11:7694738-7694886
  hypo

SEQ ID NO: 379627 - DNA, 164 bp, Homo sapiens; identical to SEQ ID NO: 120256
  chr11:7695108-7695272
  hypo

SEQ ID NO: 379628 - DNA, 344 bp, Homo sapiens; identical to SEQ ID NO: 287800
  chr11:8041149-8041493
  hypo

SEQ ID NO: 379629 - DNA, 126 bp, Homo sapiens; identical to SEQ ID NO: 340974
  chr11:8255472-8255598
  hypo

SEQ ID NO: 379630 - DNA, 129 bp, Homo sapiens; identical to SEQ ID NO: 351149
  chr11:8615887-8616016
  hypo

SEQ ID NO: 379631 - DNA, 60 bp, Homo sapiens; identical to SEQ ID NO: 287811
  chr11:9112971-9113031
  hypo

SEQ ID NO: 379632 - DNA, 121 bp, Homo sapiens; identical to SEQ ID NO: 348471
  chr11:9405271-9405392
  hypo

SEQ ID NO: 379633 - DNA, 68 bp, Homo sapiens; identical to SEQ ID NO: 340978
  chr11:9548334-9548402
  hypo

SEQ ID NO: 379634 - DNA, 117 bp, Homo sapiens; identical to SEQ ID NO: 340979
  chr11:9552484-9552601
  hypo

SEQ ID NO: 379635 - DNA, 309 bp, Homo sapiens; identical to SEQ ID NO: 340980
  chr11:9554672-9554981
  hypo

SEQ ID NO: 379636 - DNA, 151 bp, Homo sapiens; identical to SEQ ID NO: 340982
  chr11:10519332-10519483
  hypo

SEQ ID NO: 379637 - DNA, 350 bp, Homo sapiens; identical to SEQ ID NO: 340983
  chr11:11833053-11833403
  hypo

SEQ ID NO: 379638 - DNA, 83 bp, Homo sapiens; identical to SEQ ID NO: 340984
  chr11:11960229-11960312
  hypo

SEQ ID NO: 379639 - DNA, 262 bp, Homo sapiens; identical to SEQ ID NO: 202440
  chr11:12030561-12030823
  hypo

SEQ ID NO: 379640 - DNA, 53 bp, Homo sapiens; identical to SEQ ID NO: 359760
  chr11:12031006-12031059
  hypo

SEQ ID NO: 379641 - DNA, 139 bp, Homo sapiens; identical to SEQ ID NO: 340986
  chr11:12073866-12074005
  hypo

SEQ ID NO: 379642 - DNA, 287 bp, Homo sapiens; identical to SEQ ID NO: 202443
  chr11:12132212-12132499
  hypo

SEQ ID NO: 379643 - DNA, 357 bp, Homo sapiens; identical to SEQ ID NO: 340988
  chr11:12182020-12182377
  hypo

SEQ ID NO: 379644 - DNA, 372 bp, Homo sapiens; identical to SEQ ID NO: 340989
  chr11:12183631-12184003
  hypo

SEQ ID NO: 379645 - DNA, 78 bp, Homo sapiens; identical to SEQ ID NO: 340990
  chr11:12225829-12225907
  hypo

SEQ ID NO: 379646 - DNA, 62 bp, Homo sapiens; identical to SEQ ID NO: 365621
  chr11:12230977-12231039
  hypo

SEQ ID NO: 379647 - DNA, 58 bp, Homo sapiens; identical to SEQ ID NO: 365622
  chr11:12231069-12231127
  hypo

SEQ ID NO: 379648 - DNA, 258 bp, Homo sapiens; identical to SEQ ID NO: 340992
  chr11:12240017-12240275
  hypo

SEQ ID NO: 379649 - DNA, 251 bp, Homo sapiens; identical to SEQ ID NO: 340993
  chr11:12247662-12247913
  hypo

SEQ ID NO: 379650 - DNA, 264 bp, Homo sapiens; identical to SEQ ID NO: 340994
  chr11:12248553-12248817
  hypo

SEQ ID NO: 379651 - DNA, 97 bp, Homo sapiens; identical to SEQ ID NO: 340995
  chr11:12262569-12262666
  hypo

SEQ ID NO: 379652 - DNA, 180 bp, Homo sapiens; identical to SEQ ID NO: 340996
  chr11:12267687-12267867
  hypo

SEQ ID NO: 379653 - DNA, 352 bp, Homo sapiens; identical to SEQ ID NO: 340997
  chr11:12278228-12278580
  hypo

SEQ ID NO: 379654 - DNA, 141 bp, Homo sapiens; identical to SEQ ID NO: 340998
  chr11:12279396-12279537
  hypo

SEQ ID NO: 379655 - DNA, 301 bp, Homo sapiens; identical to SEQ ID NO: 340999
  chr11:12281112-12281413
  hypo

SEQ ID NO: 379656 - DNA, 434 bp, Homo sapiens; identical to SEQ ID NO: 341000
  chr11:12283321-12283755
  hypo

SEQ ID NO: 379657 - DNA, 366 bp, Homo sapiens; identical to SEQ ID NO: 341001
  chr11:12284011-12284377
  hypo

SEQ ID NO: 379658 - DNA, 202 bp, Homo sapiens; identical to SEQ ID NO: 351154
  chr11:13300232-13300434
  hypo

SEQ ID NO: 379659 - DNA, 156 bp, Homo sapiens; identical to SEQ ID NO: 341004
  chr11:13334715-13334871
  hypo

SEQ ID NO: 379660 - DNA, 657 bp, Homo sapiens; identical to SEQ ID NO: 359771
  chr11:13689464-13690121
  hypo

SEQ ID NO: 379661 - DNA, 555 bp, Homo sapiens; identical to SEQ ID NO: 359772
  chr11:13690157-13690712
  hypo

SEQ ID NO: 379662 - DNA, 1596 bp, Homo sapiens; identical to SEQ ID NO: 334182
  chr11:17034991-17036587
  hypo

SEQ ID NO: 379663 - DNA, 402 bp, Homo sapiens; identical to SEQ ID NO: 287888
  chr11:17742811-17743213
  hypo

SEQ ID NO: 379664 - DNA, 37 bp, Homo sapiens; identical to SEQ ID NO: 351163
  chr11:17743245-17743282
  hypo

SEQ ID NO: 379665 - DNA, 70 bp, Homo sapiens; identical to SEQ ID NO: 365638
  chr11:18512439-18512509
  hypo

SEQ ID NO: 379666 - DNA, 65 bp, Homo sapiens; identical to SEQ ID NO: 341009
  chr11:19247033-19247098
  hypo

SEQ ID NO: 379667 - DNA, 200 bp, Homo sapiens; identical to SEQ ID NO: 341010
  chr11:19256446-19256646
  hypo

SEQ ID NO: 379668 - DNA, 1265 bp, Homo sapiens; identical to SEQ ID NO: 359793
  chr11:19733708-19734973
  hypo

SEQ ID NO: 379669 - DNA, 338 bp, Homo sapiens; identical to SEQ ID NO: 202485
  chr11:19735066-19735404
  hypo

SEQ ID NO: 379670 - DNA, 77 bp, Homo sapiens; identical to SEQ ID NO: 372675
  chr11:20179003-20179080
  hypo

SEQ ID NO: 379671 - DNA, 302 bp, Homo sapiens; identical to SEQ ID NO: 341016
  chr11:30445742-30446044
  hypo

SEQ ID NO: 379672 - DNA, 171 bp, Homo sapiens; identical to SEQ ID NO: 341017
  chr11:31808842-31809013
  hypo

SEQ ID NO: 379673 - DNA, 384 bp, Homo sapiens; identical to SEQ ID NO: 334231
  chr11:32851566-32851950
  hypo

SEQ ID NO: 379674 - DNA, 929 bp, Homo sapiens; identical to SEQ ID NO: 345384
  chr11:32915113-32916042
  hypo

SEQ ID NO: 379675 - DNA, 805 bp, Homo sapiens; identical to SEQ ID NO: 334233
  chr11:33397688-33398493
  hypo

SEQ ID NO: 379676 - DNA, 324 bp, Homo sapiens; identical to SEQ ID NO: 372695
  chr11:33890633-33890957
  hypo

SEQ ID NO: 379677 - DNA, 563 bp, Homo sapiens; identical to SEQ ID NO: 341027
  chr11:34516985-34517548
  hypo

SEQ ID NO: 379678 - DNA, 48 bp, Homo sapiens; identical to SEQ ID NO: 365647
  chr11:34535248-34535296
  hypo

SEQ ID NO: 379679 - DNA, 115 bp, Homo sapiens; identical to SEQ ID NO: 341029
  chr11:34897239-34897354
  hypo

SEQ ID NO: 379680 - DNA, 202 bp, Homo sapiens; identical to SEQ ID NO: 287979
  chr11:35439896-35440098
  hypo

SEQ ID NO: 379681 - DNA, 238 bp, Homo sapiens; identical to SEQ ID NO: 202513
  chr11:35440137-35440375
  hypo

SEQ ID NO: 379682 - DNA, 118 bp, Homo sapiens; identical to SEQ ID NO: 341032
  chr11:36245106-36245224
  hypo

SEQ ID NO: 379683 - DNA, 155 bp, Homo sapiens; identical to SEQ ID NO: 341033
  chr11:36476175-36476330
  hypo

SEQ ID NO: 379684 - DNA, 210 bp, Homo sapiens; identical to SEQ ID NO: 354712
  chr11:43543814-43544024
  hypo

SEQ ID NO: 379685 - DNA, 98 bp, Homo sapiens; identical to SEQ ID NO: 354713
  chr11:43544070-43544168
  hypo

SEQ ID NO: 379686 - DNA, 61 bp, Homo sapiens; identical to SEQ ID NO: 359822
  chr11:43965299-43965360
  hypo

SEQ ID NO: 379687 - DNA, 41 bp, Homo sapiens; identical to SEQ ID NO: 359823
  chr11:43965463-43965504
  hypo

SEQ ID NO: 379688 - DNA, 142 bp, Homo sapiens; identical to SEQ ID NO: 341039
  chr11:44608911-44609053
  hypo

SEQ ID NO: 379689 - DNA, 151 bp, Homo sapiens; identical to SEQ ID NO: 341040
  chr11:44621715-44621866
  hypo

SEQ ID NO: 379690 - DNA, 237 bp, Homo sapiens; identical to SEQ ID NO: 341041
  chr11:44625100-44625337
  hypo

SEQ ID NO: 379691 - DNA, 457 bp, Homo sapiens; identical to SEQ ID NO: 341042
  chr11:44639755-44640212
  hypo

SEQ ID NO: 379692 - DNA, 495 bp, Homo sapiens; identical to SEQ ID NO: 341043
  chr11:44640545-44641040
  hypo

SEQ ID NO: 379693 - DNA, 313 bp, Homo sapiens; identical to SEQ ID NO: 202533
  chr11:44748871-44749184
  hypo

SEQ ID NO: 379694 - DNA, 585 bp, Homo sapiens; identical to SEQ ID NO: 372722
  chr11:46299162-46299747
  hypo

SEQ ID NO: 379695 - DNA, 541 bp, Homo sapiens; identical to SEQ ID NO: 341047
  chr11:46337908-46338449
  hypo

SEQ ID NO: 379696 - DNA, 606 bp, Homo sapiens; identical to SEQ ID NO: 341048
  chr11:46391523-46392129
  hypo

SEQ ID NO: 379697 - DNA, 39 bp, Homo sapiens
  chr11:46777060-46777099
  hypo
ttaaatataaataactagtccttagggattcagtcattc

SEQ ID NO: 379698 - DNA, 151 bp, Homo sapiens; identical to SEQ ID NO: 341050
  chr11:46783074-46783225
  hypo

SEQ ID NO: 379699 - DNA, 117 bp, Homo sapiens; identical to SEQ ID NO: 348489
  chr11:46920042-46920159
  hypo

SEQ ID NO: 379700 - DNA, 106 bp, Homo sapiens; identical to SEQ ID NO: 348490
  chr11:47359237-47359343
  hypo

SEQ ID NO: 379701 - DNA, 199 bp, Homo sapiens
  chr11:48061635-48061834
  hypo
tggccgcttttgccttttcttgacattgccaatgcatcctgtccccgagcgtctctgagttttaagtctcagatttgttttctttggagacaaactgcaggtaggtgttacttctcaccgaagttcccagatagcacaggctttgctaaacaacacagcaccaggaactccatcatagagaccgcaggatgctgtgtgc

SEQ ID NO: 379702 - DNA, 116 bp, Homo sapiens; identical to SEQ ID NO: 365666
  chr11:57071417-57071533
  hypo

SEQ ID NO: 379703 - DNA, 365 bp, Homo sapiens; identical to SEQ ID NO: 341057
  chr11:57182515-57182880
  hypo

SEQ ID NO: 379704 - DNA, 233 bp, Homo sapiens; identical to SEQ ID NO: 341058
  chr11:57188507-57188740
  hypo

SEQ ID NO: 379705 - DNA, 46 bp, Homo sapiens; identical to SEQ ID NO: 354724
  chr11:57235458-57235504
  hypo

SEQ ID NO: 379706 - DNA, 431 bp, Homo sapiens; identical to SEQ ID NO: 202547
  chr11:57243735-57244166
  hypo

SEQ ID NO: 379707 - DNA, 93 bp, Homo sapiens; identical to SEQ ID NO: 341062
  chr11:57580261-57580354
  hypo

SEQ ID NO: 379708 - DNA, 137 bp, Homo sapiens
  chr11:60282711-60282848
  hypo
cgttcctagaggcaccaaaacgtagttaaccgggtgtctgaccacatggctgccaggagcctagtgagtctgcgcacacgcactacctccgccccggcagttcctgagtgggtgcgcaggcgcaagaggagcacacc

SEQ ID NO: 379709 - DNA, 166 bp, Homo sapiens
  chr11:60282878-60283044
  hypo
agcctgagagccggccgggtgctgggctcctggctatccctgtgatggtagctcagcgagatctggggacctggcgctgagcgcgttgccagccgggatcttcctcttcatctaggcctgggcgctggcgtgagaactcggactgggtcctggacgagcgcccccc

SEQ ID NO: 379710 - DNA, 172 bp, Homo sapiens; identical to SEQ ID NO: 341064
  chr11:60648561-60648733
  hypo

SEQ ID NO: 379711 - DNA, 198 bp, Homo sapiens; identical to SEQ ID NO: 341065
  chr11:60714083-60714281
  hypo

SEQ ID NO: 379712 - DNA, 101 bp, Homo sapiens; identical to SEQ ID NO: 348491
  chr11:61036547-61036648
  hypo

SEQ ID NO: 379713 - DNA, 230 bp, Homo sapiens; identical to SEQ ID NO: 351201
  chr11:61062458-61062688
  hypo

SEQ ID NO: 379714 - DNA, 315 bp, Homo sapiens; identical to SEQ ID NO: 202562
  chr11:61276101-61276416
  hypo

SEQ ID NO: 379715 - DNA, 604 bp, Homo sapiens; identical to SEQ ID NO: 347160
  chr11:61347974-61348578
  hypo

SEQ ID NO: 379716 - DNA, 169 bp, Homo sapiens; identical to SEQ ID NO: 341070
  chr11:61490202-61490371
  hypo

SEQ ID NO: 379717 - DNA, 173 bp, Homo sapiens; identical to SEQ ID NO: 365677
  chr11:61490870-61491043
  hypo

SEQ ID NO: 379718 - DNA, 591 bp, Homo sapiens; identical to SEQ ID NO: 341072
  chr11:61511518-61512109
  hypo

SEQ ID NO: 379719 - DNA, 259 bp, Homo sapiens; identical to SEQ ID NO: 202565
  chr11:61595492-61595751
  hypo

SEQ ID NO: 379720 - DNA, 34 bp, Homo sapiens; identical to SEQ ID NO: 359849
  chr11:61596695-61596729
  hypo

SEQ ID NO: 379721 - DNA, 309 bp, Homo sapiens; identical to SEQ ID NO: 341074
  chr11:61640585-61640894
  hypo

SEQ ID NO: 379722 - DNA, 176 bp, Homo sapiens; identical to SEQ ID NO: 334274
  chr11:61659371-61659547
  hypo

SEQ ID NO: 379723 - DNA, 139 bp, Homo sapiens; identical to SEQ ID NO: 341076
  chr11:61662946-61663085
  hypo

SEQ ID NO: 379724 - DNA, 200 bp, Homo sapiens; identical to SEQ ID NO: 341078
  chr11:61668820-61669020
  hypo

SEQ ID NO: 379725 - DNA, 214 bp, Homo sapiens; identical to SEQ ID NO: 341079
  chr11:61672924-61673138
  hypo

SEQ ID NO: 379726 - DNA, 371 bp, Homo sapiens; identical to SEQ ID NO: 341080
  chr11:61673908-61674279
  hypo

SEQ ID NO: 379727 - DNA, 96 bp, Homo sapiens; identical to SEQ ID NO: 348497
  chr11:61674760-61674856
  hypo

SEQ ID NO: 379728 - DNA, 85 bp, Homo sapiens; identical to SEQ ID NO: 348498
  chr11:61675100-61675185
  hypo

SEQ ID NO: 379729 - DNA, 213 bp, Homo sapiens; identical to SEQ ID NO: 351207
  chr11:62369471-62369684
  hypo

SEQ ID NO: 379730 - DNA, 137 bp, Homo sapiens; identical to SEQ ID NO: 341083
  chr11:63325873-63326010
  hypo

SEQ ID NO: 379731 - DNA, 119 bp, Homo sapiens; identical to SEQ ID NO: 341084
  chr11:63431997-63432116
  hypo

SEQ ID NO: 379732 - DNA, 180 bp, Homo sapiens; identical to SEQ ID NO: 263582
  chr11:63562759-63562939
  hypo

SEQ ID NO: 379733 - DNA, 197 bp, Homo sapiens; identical to SEQ ID NO: 341086
  chr11:63675233-63675430
  hypo

SEQ ID NO: 379734 - DNA, 95 bp, Homo sapiens; identical to SEQ ID NO: 341087
  chr11:63675675-63675770
  hypo

SEQ ID NO: 379735 - DNA, 329 bp, Homo sapiens; identical to SEQ ID NO: 341088
  chr11:63676319-63676648
  hypo

SEQ ID NO: 379736 - DNA, 88 bp, Homo sapiens; identical to SEQ ID NO: 365693
  chr11:63779256-63779344
  hypo

SEQ ID NO: 379737 - DNA, 210 bp, Homo sapiens; identical to SEQ ID NO: 365694
  chr11:63849170-63849380
  hypo

SEQ ID NO: 379738 - DNA, 61 bp, Homo sapiens; identical to SEQ ID NO: 365695
  chr11:63849634-63849695
  hypo

SEQ ID NO: 379739 - DNA, 63 bp, Homo sapiens; identical to SEQ ID NO: 341092
  chr11:63860763-63860826
  hypo

SEQ ID NO: 379740 - DNA, 80 bp, Homo sapiens; identical to SEQ ID NO: 341093
  chr11:63864329-63864409
  hypo

SEQ ID NO: 379741 - DNA, 305 bp, Homo sapiens; identical to SEQ ID NO: 341094
  chr11:63885581-63885886
  hypo

SEQ ID NO: 379742 - DNA, 374 bp, Homo sapiens; identical to SEQ ID NO: 341095
  chr11:63908860-63909234
  hypo

SEQ ID NO: 379743 - DNA, 203 bp, Homo sapiens; identical to SEQ ID NO: 334283
  chr11:64015094-64015297
  hypo

SEQ ID NO: 379744 - DNA, 47 bp, Homo sapiens; identical to SEQ ID NO: 365700
  chr11:64054239-64054286
  hypo

SEQ ID NO: 379745 - DNA, 300 bp, Homo sapiens; identical to SEQ ID NO: 341098
  chr11:64088230-64088530
  hypo

SEQ ID NO: 379746 - DNA, 342 bp, Homo sapiens
  chr11:64124362-64124704
  hypo
cgctgagggaacagcaggcgtggtgcagctggaagcggggggtattggcaggtcgggggtgggcagaaggtgctcgagcctgtgggcctcctgggactctgggagtcctcctgagggaagcagatctcagctgagcctttccctctaggccctgaggtacaggaaccggagaaacgtcccctcaccccatccctcagccagtgacaccgtgggaacagcaggcttgggagtgcagccttctcggcactggagtgtcagcggaggccccaggcagcccaagagctcagggagccagggaccccaaggggagtccttggacaaggaggcctgggccctgagatc

SEQ ID NO: 379747 - DNA, 305 bp, Homo sapiens; identical to SEQ ID NO: 354745
  chr11:64129097-64129402
  hypo

SEQ ID NO: 379748 - DNA, 634 bp, Homo sapiens; identical to SEQ ID NO: 354746
  chr11:64135647-64136281
  hypo

SEQ ID NO: 379749 - DNA, 99 bp, Homo sapiens
  chr11:64310467-64310566
  hypo
cgggcggacagcggaggccccgggcccggggaggcggcagcggccgctcaagtgaacccgggtctggaagctccttacagcacgatgatgcccaagccc

SEQ ID NO: 379750 - DNA, 179 bp, Homo sapiens; identical to SEQ ID NO: 365704
  chr11:64323500-64323679
  hypo

SEQ ID NO: 379751 - DNA, 322 bp, Homo sapiens; identical to SEQ ID NO: 365705
  chr11:64323741-64324063
  hypo

SEQ ID NO: 379752 - DNA, 549 bp, Homo sapiens; identical to SEQ ID NO: 345393
  chr11:64512349-64512898
  hypo

SEQ ID NO: 379753 - DNA, 381 bp, Homo sapiens
  chr11:64621795-64622176
  hypo
cgggcgccatcactcatgtctgcgcttggagggcggcaccaggtgcgggggcaggtcggcaggcagctcgtggccctccagcttgaccttgatgaggtggttggccagcgcgaactcctcgtcgtccagcagcccgtccttgtccacgtcggccagcttccagatcttccctagcacggtgttggggagcttggacttcaccatctccttcttggcgttggcgcccgtgatcttgccgttgacaggggacagcgtgtagaagatctcgtcgtaggtgggcttgtccttgcccaccacccactccacgtcgtcgatgccctcgccggccccctcgccgtagccgtgcccgaacggcccgttcatggtgccgtcaaaggcgcc

SEQ ID NO: 379754 - DNA, 142 bp, Homo sapiens; identical to SEQ ID NO: 341108
  chr11:64774064-64774206
  hypo

SEQ ID NO: 379755 - DNA, 395 bp, Homo sapiens; identical to SEQ ID NO: 314515
  chr11:64875426-64875821
  hypo

SEQ ID NO: 379756 - DNA, 189 bp, Homo sapiens; identical to SEQ ID NO: 354749
  chr11:64876158-64876347
  hypo

SEQ ID NO: 379757 - DNA, 160 bp, Homo sapiens; identical to SEQ ID NO: 341110
  chr11:64950885-64951045
  hypo

SEQ ID NO: 379758 - DNA, 389 bp, Homo sapiens; identical to SEQ ID NO: 354750
  chr11:64951346-64951735
  hypo

SEQ ID NO: 379759 - DNA, 190 bp, Homo sapiens; identical to SEQ ID NO: 354751
  chr11:64951894-64952084
  hypo

SEQ ID NO: 379760 - DNA, 297 bp, Homo sapiens; identical to SEQ ID NO: 348502
  chr11:64977165-64977462
  hypo

SEQ ID NO: 379761 - DNA, 52 bp, Homo sapiens; identical to SEQ ID NO: 348503
  chr11:64977534-64977586
  hypo

SEQ ID NO: 379762 - DNA, 443 bp, Homo sapiens; identical to SEQ ID NO: 341113
  chr11:65123957-65124400
  hypo

SEQ ID NO: 379763 - DNA, 33 bp, Homo sapiens; identical to SEQ ID NO: 359870
  chr11:65307510-65307543
  hypo

SEQ ID NO: 379764 - DNA, 559 bp, Homo sapiens; identical to SEQ ID NO: 341114
  chr11:65386927-65387486
  hypo

SEQ ID NO: 379765 - DNA, 893 bp, Homo sapiens; identical to SEQ ID NO: 354755
  chr11:65397153-65398046
  hypo

SEQ ID NO: 379766 - DNA, 32 bp, Homo sapiens; identical to SEQ ID NO: 365717
  chr11:65413830-65413862
  hypo

SEQ ID NO: 379767 - DNA, 188 bp, Homo sapiens; identical to SEQ ID NO: 314552
  chr11:65414113-65414301
  hypo

SEQ ID NO: 379768 - DNA, 58 bp, Homo sapiens; identical to SEQ ID NO: 365719
  chr11:65511334-65511392
  hypo

SEQ ID NO: 379769 - DNA, 35 bp, Homo sapiens; identical to SEQ ID NO: 347164
  chr11:65553778-65553813
  hypo

SEQ ID NO: 379770 - DNA, 227 bp, Homo sapiens; identical to SEQ ID NO: 202605
  chr11:65554410-65554637
  hypo

SEQ ID NO: 379771 - DNA, 1028 bp, Homo sapiens; identical to SEQ ID NO: 351221
  chr11:65554723-65555751
  hypo

SEQ ID NO: 379772 - DNA, 262 bp, Homo sapiens; identical to SEQ ID NO: 334296
  chr11:65582723-65582985
  hypo

SEQ ID NO: 379773 - DNA, 167 bp, Homo sapiens; identical to SEQ ID NO: 346030
  chr11:65685172-65685339
  hypo

SEQ ID NO: 379774 - DNA, 168 bp, Homo sapiens; identical to SEQ ID NO: 341121
  chr11:65761126-65761294
  hypo

SEQ ID NO: 379775 - DNA, 288 bp, Homo sapiens; identical to SEQ ID NO: 351223
  chr11:66045216-66045504
  hypo

SEQ ID NO: 379776 - DNA, 1101 bp, Homo sapiens; identical to SEQ ID NO: 347167
  chr11:66079395-66080496
  hypo

SEQ ID NO: 379777 - DNA, 383 bp, Homo sapiens; identical to SEQ ID NO: 334300
  chr11:66176338-66176721
  hypo

SEQ ID NO: 379778 - DNA, 78 bp, Homo sapiens; identical to SEQ ID NO: 354762
  chr11:66410904-66410982
  hypo

SEQ ID NO: 379779 - DNA, 356 bp, Homo sapiens; identical to SEQ ID NO: 214346
  chr11:66411012-66411368
  hypo

SEQ ID NO: 379780 - DNA, 227 bp, Homo sapiens
  chr11:66454454-66454681
  hypo
ctgttcctaccccagcttgaagacatgtttgcgctttcggtaatcaaaggcgacgctgccctgggccctggccaggctgacaggcacttctccgtggtatggcactcccgcgctggctgccttggcatccttgtaaaagccgaggctcccacgccgcaggacacagtacacgttctgccaggacctgcgagggacgcggtgctgactggccggcctcagtggcgccc

SEQ ID NO: 379781 - DNA, 61 bp, Homo sapiens; identical to SEQ ID NO: 341127
  chr11:66475619-66475680
  hypo

SEQ ID NO: 379782 - DNA, 141 bp, Homo sapiens; identical to SEQ ID NO: 348509
  chr11:66513646-66513787
  hypo

SEQ ID NO: 379783 - DNA, 338 bp, Homo sapiens; identical to SEQ ID NO: 314614
  chr11:66626187-66626525
  hypo

SEQ ID NO: 379784 - DNA, 94 bp, Homo sapiens
  chr11:66631185-66631279
  hypo
cggtcagggggccctccaagggccgggagcaaaggcaggcgggggctgcagcctctcaccttcacacctcggacgcggaactccgcaagggccc

SEQ ID NO: 379785 - DNA, 39 bp, Homo sapiens
  chr11:66631852-66631891
  hypo
ctcgccgtgggctcccagacagcgaggggacggcaggcc

SEQ ID NO: 379786 - DNA, 284 bp, Homo sapiens; identical to SEQ ID NO: 348511
  chr11:66633455-66633739
  hypo

SEQ ID NO: 379787 - DNA, 185 bp, Homo sapiens; identical to SEQ ID NO: 348512
  chr11:66633833-66634018
  hypo

SEQ ID NO: 379788 - DNA, 328 bp, Homo sapiens; identical to SEQ ID NO: 341134
  chr11:66655218-66655546
  hypo

SEQ ID NO: 379789 - DNA, 32 bp, Homo sapiens; identical to SEQ ID NO: 341135
  chr11:66658557-66658589
  hypo

SEQ ID NO: 379790 - DNA, 269 bp, Homo sapiens; identical to SEQ ID NO: 341136
  chr11:66677377-66677646
  hypo

SEQ ID NO: 379791 - DNA, 112 bp, Homo sapiens; identical to SEQ ID NO: 351230
  chr11:66886029-66886141
  hypo

SEQ ID NO: 379792 - DNA, 329 bp, Homo sapiens; identical to SEQ ID NO: 341138
  chr11:67078663-67078992
  hypo

SEQ ID NO: 379793 - DNA, 250 bp, Homo sapiens; identical to SEQ ID NO: 341139
  chr11:67432668-67432918
  hypo

SEQ ID NO: 379794 - DNA, 74 bp, Homo sapiens; identical to SEQ ID NO: 341140
  chr11:67450470-67450544
  hypo

SEQ ID NO: 379795 - DNA, 71 bp, Homo sapiens; identical to SEQ ID NO: 354770
  chr11:67462547-67462618
  hypo

SEQ ID NO: 379796 - DNA, 394 bp, Homo sapiens; identical to SEQ ID NO: 354771
  chr11:67462833-67463227
  hypo

SEQ ID NO: 379797 - DNA, 112 bp, Homo sapiens; identical to SEQ ID NO: 348513
  chr11:67781084-67781196
  hypo

SEQ ID NO: 379798 - DNA, 188 bp, Homo sapiens; identical to SEQ ID NO: 341144
  chr11:67850488-67850676
  hypo

SEQ ID NO: 379799 - DNA, 132 bp, Homo sapiens; identical to SEQ ID NO: 359886
  chr11:67895663-67895795
  hypo

SEQ ID NO: 379800 - DNA, 179 bp, Homo sapiens; identical to SEQ ID NO: 334308
  chr11:68080751-68080930
  hypo

SEQ ID NO: 379801 - DNA, 78 bp, Homo sapiens; identical to SEQ ID NO: 354774
  chr11:68133213-68133291
  hypo

SEQ ID NO: 379802 - DNA, 98 bp, Homo sapiens; identical to SEQ ID NO: 341148
  chr11:68216755-68216853
  hypo

SEQ ID NO: 379803 - DNA, 71 bp, Homo sapiens; identical to SEQ ID NO: 354775
  chr11:68564274-68564345
  hypo

SEQ ID NO: 379804 - DNA, 167 bp, Homo sapiens; identical to SEQ ID NO: 354776
  chr11:68564381-68564548
  hypo

SEQ ID NO: 379805 - DNA, 605 bp, Homo sapiens; identical to SEQ ID NO: 359888
  chr11:68606653-68607258
  hypo

SEQ ID NO: 379806 - DNA, 134 bp, Homo sapiens
  chr11:68772692-68772826
  hypo
cgaagggtcttggaggccgcttcctgcccctgcctcctccaggcgctggagtctcaggaggcgttccccgggggacactgcatctccatggtgactgtgttgggcgtgctgcccccggcctcccccagctcagc

SEQ ID NO: 379807 - DNA, 260 bp, Homo sapiens; identical to SEQ ID NO: 341153
  chr11:68822128-68822388
  hypo

SEQ ID NO: 379808 - DNA, 170 bp, Homo sapiens; identical to SEQ ID NO: 354778
  chr11:69206214-69206384
  hypo

SEQ ID NO: 379809 - DNA, 299 bp, Homo sapiens; identical to SEQ ID NO: 354779
  chr11:69206414-69206713
  hypo

SEQ ID NO: 379810 - DNA, 267 bp, Homo sapiens; identical to SEQ ID NO: 341156
  chr11:69931095-69931362
  hypo

SEQ ID NO: 379811 - DNA, 476 bp, Homo sapiens; identical to SEQ ID NO: 341157
  chr11:69946965-69947441
  hypo

SEQ ID NO: 379812 - DNA, 422 bp, Homo sapiens; identical to SEQ ID NO: 341158
  chr11:69962357-69962779
  hypo

SEQ ID NO: 379813 - DNA, 109 bp, Homo sapiens; identical to SEQ ID NO: 341160
  chr11:69972743-69972852
  hypo

SEQ ID NO: 379814 - DNA, 540 bp, Homo sapiens
  chr11:69982802-69983342
  hypo
cgctcagctccaccacacgagggtgtgggcagagcagtgtgagggacaggtcttgctttcccgggattccagtcacaggtggggacagacacgcacagaaatcagcatagcctcgagataaatgcagttgtttctcttcgtggacaaaggcgttcgattttccagaggaggccaagaatgggagccgtgggtccgtagcttggtgtagggcgtgagttccagtggtgagcagtgagacacgctgagctgggctggccagggagggggtgagcgccccgtgctgggaagcattcaagctgaggttggaggacttcttgctggggcaactgcagagcattgggaggtgatgtctatgtgtgatccaaggccacgtggcttattgggaagattcccaggcctacaacccagctctggtttttaatttggggatcaaaatgtatcgtaaatttagaattataaatgtagggtcagcagcagtctgtcaccgctgaagcacacgtgccagagctcccgttgtttatcacactgtatccgaacagc

SEQ ID NO: 379815 - DNA, 205 bp, Homo sapiens; identical to SEQ ID NO: 365754
  chr11:70016958-70017163
  hypo

SEQ ID NO: 379816 - DNA, 97 bp, Homo sapiens
  chr11:70022862-70022959
  hypo
cgagacgatgaaccccattcaaatggttcgggggacccttagaattttatttttggtttacagagatccttagagcagtgagtgtcaccctggaatg

SEQ ID NO: 379817 - DNA, 267 bp, Homo sapiens; identical to SEQ ID NO: 214446
  chr11:70022989-70023256
  hypo

SEQ ID NO: 379818 - DNA, 121 bp, Homo sapiens
  chr11:70023286-70023407
  hypo
caggagccacgtccctcgggagccccaaagacttcaacctccaccccaggcccaccgcacctcagcaccccacttcggaggtctcaaactcagcgccccaagggccaggtgggccacacgc

SEQ ID NO: 379819 - DNA, 196 bp, Homo sapiens; identical to SEQ ID NO: 341164
  chr11:70028548-70028744
  hypo

SEQ ID NO: 379820 - DNA, 297 bp, Homo sapiens; identical to SEQ ID NO: 341165
  chr11:70031529-70031826
  hypo

SEQ ID NO: 379821 - DNA, 255 bp, Homo sapiens; identical to SEQ ID NO: 341166
  chr11:70054500-70054755
  hypo

SEQ ID NO: 379822 - DNA, 141 bp, Homo sapiens; identical to SEQ ID NO: 341167
  chr11:70164164-70164305
  hypo

SEQ ID NO: 379823 - DNA, 130 bp, Homo sapiens; identical to SEQ ID NO: 365759
  chr11:70189848-70189978
  hypo

SEQ ID NO: 379824 - DNA, 302 bp, Homo sapiens; identical to SEQ ID NO: 341169
  chr11:71169280-71169582
  hypo

SEQ ID NO: 379825 - DNA, 189 bp, Homo sapiens; identical to SEQ ID NO: 341170
  chr11:71185648-71185837
  hypo

SEQ ID NO: 379826 - DNA, 197 bp, Homo sapiens; identical to SEQ ID NO: 365762
  chr11:71188519-71188716
  hypo

SEQ ID NO: 379827 - DNA, 521 bp, Homo sapiens; identical to SEQ ID NO: 348515
  chr11:71192127-71192648
  hypo

SEQ ID NO: 379828 - DNA, 169 bp, Homo sapiens; identical to SEQ ID NO: 348516
  chr11:71192889-71193058
  hypo

SEQ ID NO: 379829 - DNA, 835 bp, Homo sapiens; identical to SEQ ID NO: 341173
  chr11:71229615-71230450
  hypo

SEQ ID NO: 379830 - DNA, 191 bp, Homo sapiens; identical to SEQ ID NO: 365766
  chr11:71507748-71507939
  hypo

SEQ ID NO: 379831 - DNA, 751 bp, Homo sapiens; identical to SEQ ID NO: 341175
  chr11:71724337-71725088
  hypo

SEQ ID NO: 379832 - DNA, 731 bp, Homo sapiens; identical to SEQ ID NO: 341176
  chr11:71725587-71726318
  hypo

SEQ ID NO: 379833 - DNA, 120 bp, Homo sapiens; identical to SEQ ID NO: 365769
  chr11:72466088-72466208
  hypo

SEQ ID NO: 379834 - DNA, 138 bp, Homo sapiens; identical to SEQ ID NO: 365770
  chr11:72475539-72475677
  hypo

SEQ ID NO: 379835 - DNA, 317 bp, Homo sapiens; identical to SEQ ID NO: 365771
  chr11:72475723-72476040
  hypo

SEQ ID NO: 379836 - DNA, 235 bp, Homo sapiens; identical to SEQ ID NO: 314869
  chr11:72532378-72532613
  hypo

SEQ ID NO: 379837 - DNA, 202 bp, Homo sapiens; identical to SEQ ID NO: 341182
  chr11:73063854-73064056
  hypo

SEQ ID NO: 379838 - DNA, 63 bp, Homo sapiens; identical to SEQ ID NO: 354789
  chr11:73073669-73073732
  hypo

SEQ ID NO: 379839 - DNA, 87 bp, Homo sapiens; identical to SEQ ID NO: 341186
  chr11:73491527-73491614
  hypo

SEQ ID NO: 379840 - DNA, 56 bp, Homo sapiens; identical to SEQ ID NO: 341187
  chr11:73492566-73492622
  hypo

SEQ ID NO: 379841 - DNA, 284 bp, Homo sapiens; identical to SEQ ID NO: 348518
  chr11:73685845-73686129
  hypo

SEQ ID NO: 379842 - DNA, 211 bp, Homo sapiens; identical to SEQ ID NO: 359898
  chr11:74022468-74022679
  hypo

SEQ ID NO: 379843 - DNA, 137 bp, Homo sapiens; identical to SEQ ID NO: 359899
  chr11:74022716-74022853
  hypo

SEQ ID NO: 379844 - DNA, 233 bp, Homo sapiens; identical to SEQ ID NO: 341192
  chr11:74994376-74994609
  hypo

SEQ ID NO: 379845 - DNA, 220 bp, Homo sapiens; identical to SEQ ID NO: 202665
  chr11:75140982-75141202
  hypo

SEQ ID NO: 379846 - DNA, 217 bp, Homo sapiens; identical to SEQ ID NO: 365778
  chr11:75152263-75152480
  hypo

SEQ ID NO: 379847 - DNA, 359 bp, Homo sapiens; identical to SEQ ID NO: 365779
  chr11:75152536-75152895
  hypo

SEQ ID NO: 379848 - DNA, 211 bp, Homo sapiens; identical to SEQ ID NO: 365780
  chr11:75167782-75167993
  hypo

SEQ ID NO: 379849 - DNA, 103 bp, Homo sapiens; identical to SEQ ID NO: 359903
  chr11:75380110-75380213
  hypo

SEQ ID NO: 379850 - DNA, 133 bp, Homo sapiens; identical to SEQ ID NO: 348519
  chr11:75858240-75858373
  hypo

SEQ ID NO: 379851 - DNA, 40 bp, Homo sapiens; identical to SEQ ID NO: 341199
  chr11:76164370-76164410
  hypo

SEQ ID NO: 379852 - DNA, 135 bp, Homo sapiens; identical to SEQ ID NO: 354795
  chr11:76371492-76371627
  hypo

SEQ ID NO: 379853 - DNA, 71 bp, Homo sapiens; identical to SEQ ID NO: 354796
  chr11:76372236-76372307
  hypo

SEQ ID NO: 379854 - DNA, 509 bp, Homo sapiens; identical to SEQ ID NO: 345399
  chr11:76381512-76382021
  hypo

SEQ ID NO: 379855 - DNA, 1276 bp, Homo sapiens; identical to SEQ ID NO: 372804
  chr11:77184258-77185534
  hypo

SEQ ID NO: 379856 - DNA, 118 bp, Homo sapiens; identical to SEQ ID NO: 341203
  chr11:77383112-77383230
  hypo

SEQ ID NO: 379857 - DNA, 366 bp, Homo sapiens; identical to SEQ ID NO: 341204
  chr11:78534109-78534475
  hypo

SEQ ID NO: 379858 - DNA, 57 bp, Homo sapiens; identical to SEQ ID NO: 354800
  chr11:85906179-85906236
  hypo

SEQ ID NO: 379859 - DNA, 208 bp, Homo sapiens; identical to SEQ ID NO: 354801
  chr11:85906275-85906483
  hypo

SEQ ID NO: 379860 - DNA, 250 bp, Homo sapiens; identical to SEQ ID NO: 341208
  chr11:85989397-85989647
  hypo

SEQ ID NO: 379861 - DNA, 675 bp, Homo sapiens; identical to SEQ ID NO: 288384
  chr11:92930674-92931349
  hypo

SEQ ID NO: 379862 - DNA, 127 bp, Homo sapiens; identical to SEQ ID NO: 341211
  chr11:93212118-93212245
  hypo

SEQ ID NO: 379863 - DNA, 51 bp, Homo sapiens; identical to SEQ ID NO: 341212
  chr11:93425646-93425697
  hypo

SEQ ID NO: 379864 - DNA, 119 bp, Homo sapiens
  chr11:93476562-93476681
  hypo
cgtgggtcttgcggctgcggtgcctcacttacttagcccacggctctcaactcctcgcgggagggggggcgcgagtgaatgaggcgggaactggagtgctggaagccacgaactccagt

SEQ ID NO: 379865 - DNA, 179 bp, Homo sapiens
  chr11:93476769-93476948
  hypo
gtaggagcgaactccatgcaggccctgcggctgtgtctaggggatgcccgcgacccctgaagacccacagcctgtcttacaacctgtcatggttgtgaaaagttttgagagaacgtctgcacagtgtctaacggtgtctggtatatagtgtgcactcaaatggtaaccagtttagttgc

SEQ ID NO: 379866 - DNA, 89 bp, Homo sapiens; identical to SEQ ID NO: 354804
  chr11:93911562-93911651
  hypo

SEQ ID NO: 379867 - DNA, 81 bp, Homo sapiens; identical to SEQ ID NO: 354805
  chr11:93911800-93911881
  hypo

SEQ ID NO: 379868 - DNA, 80 bp, Homo sapiens; identical to SEQ ID NO: 365797
  chr11:94895741-94895821
  hypo

SEQ ID NO: 379869 - DNA, 886 bp, Homo sapiens; identical to SEQ ID NO: 334351
  chr11:96122370-96123256
  hypo

SEQ ID NO: 379870 - DNA, 174 bp, Homo sapiens; identical to SEQ ID NO: 341217
  chr11:97588960-97589134
  hypo

SEQ ID NO: 379871 - DNA, 226 bp, Homo sapiens; identical to SEQ ID NO: 288422
  chr11:106889091-106889317
  hypo

SEQ ID NO: 379872 - DNA, 67 bp, Homo sapiens; identical to SEQ ID NO: 341222
  chr11:107931221-107931288
  hypo

SEQ ID NO: 379873 - DNA, 158 bp, Homo sapiens; identical to SEQ ID NO: 341223
  chr11:108031546-108031704
  hypo

SEQ ID NO: 379874 - DNA, 171 bp, Homo sapiens; identical to SEQ ID NO: 341224
  chr11:110144196-110144367
  hypo

SEQ ID NO: 379875 - DNA, 45 bp, Homo sapiens; identical to SEQ ID NO: 341227
  chr11:112108650-112108695
  hypo

SEQ ID NO: 379876 - DNA, 238 bp, Homo sapiens; identical to SEQ ID NO: 365804
  chr11:112370546-112370784
  hypo

SEQ ID NO: 379877 - DNA, 340 bp, Homo sapiens; identical to SEQ ID NO: 214533
  chr11:114112625-114112965
  hypo

SEQ ID NO: 379878 - DNA, 199 bp, Homo sapiens; identical to SEQ ID NO: 365806
  chr11:114113052-114113251
  hypo

SEQ ID NO: 379879 - DNA, 81 bp, Homo sapiens; identical to SEQ ID NO: 365807
  chr11:114115648-114115729
  hypo

SEQ ID NO: 379880 - DNA, 238 bp, Homo sapiens; identical to SEQ ID NO: 202728
  chr11:115374753-115374991
  hypo

SEQ ID NO: 379881 - DNA, 398 bp, Homo sapiens; identical to SEQ ID NO: 202729
  chr11:115375434-115375832
  hypo

SEQ ID NO: 379882 - DNA, 317 bp, Homo sapiens; identical to SEQ ID NO: 341235
  chr11:116691767-116692084
  hypo

SEQ ID NO: 379883 - DNA, 121 bp, Homo sapiens; identical to SEQ ID NO: 341236
  chr11:116821500-116821621
  hypo

SEQ ID NO: 379884 - DNA, 320 bp, Homo sapiens; identical to SEQ ID NO: 341237
  chr11:117073762-117074082
  hypo

SEQ ID NO: 379885 - DNA, 126 bp, Homo sapiens; identical to SEQ ID NO: 365812
  chr11:117075032-117075158
  hypo

SEQ ID NO: 379886 - DNA, 206 bp, Homo sapiens; identical to SEQ ID NO: 341239
  chr11:117076092-117076298
  hypo

SEQ ID NO: 379887 - DNA, 59 bp, Homo sapiens; identical to SEQ ID NO: 341240
  chr11:117188555-117188614
  hypo

SEQ ID NO: 379888 - DNA, 159 bp, Homo sapiens; identical to SEQ ID NO: 359940
  chr11:118662849-118663008
  hypo

SEQ ID NO: 379889 - DNA, 66 bp, Homo sapiens; identical to SEQ ID NO: 334374
  chr11:119145611-119145677
  hypo

SEQ ID NO: 379890 - DNA, 257 bp, Homo sapiens; identical to SEQ ID NO: 341244
  chr11:119290824-119291081
  hypo

SEQ ID NO: 379891 - DNA, 199 bp, Homo sapiens; identical to SEQ ID NO: 341245
  chr11:119505179-119505378
  hypo

SEQ ID NO: 379892 - DNA, 261 bp, Homo sapiens; identical to SEQ ID NO: 341246
  chr11:119506104-119506365
  hypo

SEQ ID NO: 379893 - DNA, 130 bp, Homo sapiens; identical to SEQ ID NO: 341247
  chr11:119506981-119507111
  hypo

SEQ ID NO: 379894 - DNA, 750 bp, Homo sapiens; identical to SEQ ID NO: 341248
  chr11:119535401-119536151
  hypo

SEQ ID NO: 379895 - DNA, 286 bp, Homo sapiens; identical to SEQ ID NO: 341249
  chr11:119574555-119574841
  hypo

SEQ ID NO: 379896 - DNA, 471 bp, Homo sapiens; identical to SEQ ID NO: 341250
  chr11:119579320-119579791
  hypo

SEQ ID NO: 379897 - DNA, 283 bp, Homo sapiens; identical to SEQ ID NO: 334379
  chr11:119587853-119588136
  hypo

SEQ ID NO: 379898 - DNA, 123 bp, Homo sapiens
  chr11:119589823-119589946
  hypo
cggcctccaaaagcttcggattttggattagggatgttcaacctgcgccaagactctctgaagattcagcactaataactccccaaatgcatcaggcatggacaactacaacaccaggttatc

SEQ ID NO: 379899 - DNA, 128 bp, Homo sapiens; identical to SEQ ID NO: 341253
  chr11:119590586-119590714
  hypo

SEQ ID NO: 379900 - DNA, 301 bp, Homo sapiens; identical to SEQ ID NO: 359947
  chr11:119599011-119599312
  hypo

SEQ ID NO: 379901 - DNA, 83 bp, Homo sapiens; identical to SEQ ID NO: 341255
  chr11:119606553-119606636
  hypo

SEQ ID NO: 379902 - DNA, 291 bp, Homo sapiens; identical to SEQ ID NO: 341256
  chr11:119970240-119970531
  hypo

SEQ ID NO: 379903 - DNA, 79 bp, Homo sapiens; identical to SEQ ID NO: 341257
  chr11:119993701-119993780
  hypo

SEQ ID NO: 379904 - DNA, 47 bp, Homo sapiens; identical to SEQ ID NO: 365828
  chr11:120008024-120008071
  hypo

SEQ ID NO: 379905 - DNA, 223 bp, Homo sapiens; identical to SEQ ID NO: 351261
  chr11:120110626-120110849
  hypo

SEQ ID NO: 379906 - DNA, 155 bp, Homo sapiens; identical to SEQ ID NO: 351262
  chr11:120110967-120111122
  hypo

SEQ ID NO: 379907 - DNA, 151 bp, Homo sapiens; identical to SEQ ID NO: 341260
  chr11:120338518-120338669
  hypo

SEQ ID NO: 379908 - DNA, 53 bp, Homo sapiens; identical to SEQ ID NO: 365832
  chr11:120367550-120367603
  hypo

SEQ ID NO: 379909 - DNA, 65 bp, Homo sapiens; identical to SEQ ID NO: 214601
  chr11:120367696-120367761
  hypo

SEQ ID NO: 379910 - DNA, 150 bp, Homo sapiens; identical to SEQ ID NO: 354822
  chr11:120998452-120998602
  hypo

SEQ ID NO: 379911 - DNA, 210 bp, Homo sapiens; identical to SEQ ID NO: 354823
  chr11:120998833-120999043
  hypo

SEQ ID NO: 379912 - DNA, 151 bp, Homo sapiens; identical to SEQ ID NO: 354824
  chr11:121023460-121023611
  hypo

SEQ ID NO: 379913 - DNA, 326 bp, Homo sapiens; identical to SEQ ID NO: 341265
  chr11:121349234-121349560
  hypo

SEQ ID NO: 379914 - DNA, 171 bp, Homo sapiens; identical to SEQ ID NO: 341268
  chr11:124071504-124071675
  hypo

SEQ ID NO: 379915 - DNA, 67 bp, Homo sapiens; identical to SEQ ID NO: 341269
  chr11:124387399-124387466
  hypo

SEQ ID NO: 379916 - DNA, 268 bp, Homo sapiens; identical to SEQ ID NO: 341271
  chr11:124794665-124794933
  hypo

SEQ ID NO: 379917 - DNA, 400 bp, Homo sapiens; identical to SEQ ID NO: 341272
  chr11:125817639-125818039
  hypo

SEQ ID NO: 379918 - DNA, 168 bp, Homo sapiens; identical to SEQ ID NO: 341273
  chr11:125971144-125971312
  hypo

SEQ ID NO: 379919 - DNA, 439 bp, Homo sapiens; identical to SEQ ID NO: 341274
  chr11:126055123-126055562
  hypo

SEQ ID NO: 379920 - DNA, 48 bp, Homo sapiens
  chr11:126272994-126273042
  hypo
cggaagccctggaatgcctggggccactgagcaatcctcaccctcagc

SEQ ID NO: 379921 - DNA, 115 bp, Homo sapiens
  chr11:126273273-126273388
  hypo
cctggaaggcagccctggaggatacctgtgtatctgtctttcacaaaaggtgaaatgagctctttgtagtgtttcccgcccaggctgcattttagaatcacagaggaggtacggc

SEQ ID NO: 379922 - DNA, 135 bp, Homo sapiens; identical to SEQ ID NO: 345403
  chr11:128391758-128391893
  hypo

SEQ ID NO: 379923 - DNA, 623 bp, Homo sapiens; identical to SEQ ID NO: 345404
  chr11:128392116-128392739
  hypo

SEQ ID NO: 379924 - DNA, 543 bp, Homo sapiens; identical to SEQ ID NO: 345405
  chr11:129148497-129149040
  hypo

SEQ ID NO: 379925 - DNA, 820 bp, Homo sapiens; identical to SEQ ID NO: 345406
  chr11:129149096-129149916
  hypo

SEQ ID NO: 379926 - DNA, 125 bp, Homo sapiens; identical to SEQ ID NO: 341281
  chr11:129803851-129803976
  hypo

SEQ ID NO: 379927 - DNA, 181 bp, Homo sapiens; identical to SEQ ID NO: 354832
  chr11:129993371-129993552
  hypo

SEQ ID NO: 379928 - DNA, 176 bp, Homo sapiens; identical to SEQ ID NO: 354833
  chr11:129993759-129993935
  hypo

SEQ ID NO: 379929 - DNA, 75 bp, Homo sapiens
  chr11:130059543-130059618
  hypo
cgagccgcccatgtgtcctggagtcgctctgggcgcacgtgggggaaatggggcccagagctccgcctcaggctc

SEQ ID NO: 379930 - DNA, 61 bp, Homo sapiens
  chr11:130059738-130059799
  hypo
cccgcgggcgcgctccctgaagtcctttgtggtcacctcagtggtggctttccgtgagtcc

SEQ ID NO: 379931 - DNA, 453 bp, Homo sapiens; identical to SEQ ID NO: 365851
  chr11:130060407-130060860
  hypo

SEQ ID NO: 379932 - DNA, 129 bp, Homo sapiens; identical to SEQ ID NO: 354834
  chr11:130079199-130079328
  hypo

SEQ ID NO: 379933 - DNA, 430 bp, Homo sapiens; identical to SEQ ID NO: 354835
  chr11:130079388-130079818
  hypo

SEQ ID NO: 379934 - DNA, 39 bp, Homo sapiens; identical to SEQ ID NO: 334408
  chr11:130083134-130083173
  hypo

SEQ ID NO: 379935 - DNA, 37 bp, Homo sapiens; identical to SEQ ID NO: 354836
  chr11:130089793-130089830
  hypo

SEQ ID NO: 379936 - DNA, 112 bp, Homo sapiens; identical to SEQ ID NO: 354837
  chr11:130089881-130089993
  hypo

SEQ ID NO: 379937 - DNA, 123 bp, Homo sapiens; identical to SEQ ID NO: 346038
  chr11:130781427-130781550
  hypo

SEQ ID NO: 379938 - DNA, 66 bp, Homo sapiens; identical to SEQ ID NO: 354839
  chr11:130785392-130785458
  hypo

SEQ ID NO: 379939 - DNA, 184 bp, Homo sapiens; identical to SEQ ID NO: 365859
  chr11:133703500-133703684
  hypo

SEQ ID NO: 379940 - DNA, 139 bp, Homo sapiens; identical to SEQ ID NO: 365860
  chr11:133703714-133703853
  hypo

SEQ ID NO: 379941 - DNA, 902 bp, Homo sapiens; identical to SEQ ID NO: 354840
  chr11:133734500-133735402
  hypo

SEQ ID NO: 379942 - DNA, 720 bp, Homo sapiens; identical to SEQ ID NO: 341294
  chr11:133790547-133791267
  hypo

SEQ ID NO: 379943 - DNA, 161 bp, Homo sapiens; identical to SEQ ID NO: 345407
  chr11:133939437-133939598
  hypo

SEQ ID NO: 379944 - DNA, 138 bp, Homo sapiens; identical to SEQ ID NO: 341297
  chr11:134011321-134011459
  hypo

SEQ ID NO: 379945 - DNA, 149 bp, Homo sapiens; identical to SEQ ID NO: 341298
  chr11:134088886-134089035
  hypo

SEQ ID NO: 379946 - DNA, 73 bp, Homo sapiens; identical to SEQ ID NO: 351280
  chr11:134281810-134281883
  hypo

SEQ ID NO: 379947 - DNA, 175 bp, Homo sapiens; identical to SEQ ID NO: 341301
  chr11:134317588-134317763
  hypo

SEQ ID NO: 379948 - DNA, 258 bp, Homo sapiens; identical to SEQ ID NO: 354844
  chr11:134458219-134458477
  hypo

SEQ ID NO: 379949 - DNA, 176 bp, Homo sapiens
  chr11:134608740-134608916
  hypo
ctgtgtgtctctctgtgcgtgtctgtgtgagtccgtgtgtctctccgtgagtgtctgtgcgagcctgtgtgtctctccgtgcatgtctgtgtgagtctgtgtgtctctccgtgcgtgtctgtgtgagtctgtgtgtctctccctgcgtgtctgtgtgaatctatgtctttctgtgc

SEQ ID NO: 379950 - DNA, 157 bp, Homo sapiens; identical to SEQ ID NO: 341304
  chr11:134852683-134852840
  hypo

SEQ ID NO: 379951 - DNA, 151 bp, Homo sapiens; identical to SEQ ID NO: 341305
  chr12:287260-287411
  hypo

SEQ ID NO: 379952 - DNA, 235 bp, Homo sapiens; identical to SEQ ID NO: 341306
  chr12:417402-417637
  hypo

SEQ ID NO: 379953 - DNA, 133 bp, Homo sapiens; identical to SEQ ID NO: 351281
  chr12:708894-709027
  hypo

SEQ ID NO: 379954 - DNA, 182 bp, Homo sapiens; identical to SEQ ID NO: 351282
  chr12:709062-709244
  hypo

SEQ ID NO: 379955 - DNA, 209 bp, Homo sapiens; identical to SEQ ID NO: 341308
  chr12:939108-939317
  hypo

SEQ ID NO: 379956 - DNA, 235 bp, Homo sapiens; identical to SEQ ID NO: 351283
  chr12:1639655-1639890
  hypo

SEQ ID NO: 379957 - DNA, 344 bp, Homo sapiens; identical to SEQ ID NO: 288628
  chr12:1639977-1640321
  hypo

SEQ ID NO: 379958 - DNA, 273 bp, Homo sapiens; identical to SEQ ID NO: 351285
  chr12:1640476-1640749
  hypo

SEQ ID NO: 379959 - DNA, 454 bp, Homo sapiens; identical to SEQ ID NO: 341312
  chr12:1943616-1944070
  hypo

SEQ ID NO: 379960 - DNA, 155 bp, Homo sapiens; identical to SEQ ID NO: 341313
  chr12:1992067-1992222
  hypo

SEQ ID NO: 379961 - DNA, 94 bp, Homo sapiens; identical to SEQ ID NO: 346040
  chr12:2017667-2017761
  hypo

SEQ ID NO: 379962 - DNA, 213 bp, Homo sapiens; identical to SEQ ID NO: 214702
  chr12:2017874-2018087
  hypo

SEQ ID NO: 379963 - DNA, 75 bp, Homo sapiens; identical to SEQ ID NO: 354855
  chr12:2023599-2023674
  hypo

SEQ ID NO: 379964 - DNA, 226 bp, Homo sapiens; identical to SEQ ID NO: 359987
  chr12:2144066-2144292
  hypo

SEQ ID NO: 379965 - DNA, 50 bp, Homo sapiens; identical to SEQ ID NO: 359988
  chr12:2144442-2144492
  hypo

SEQ ID NO: 379966 - DNA, 90 bp, Homo sapiens; identical to SEQ ID NO: 359989
  chr12:2161370-2161460
  hypo

SEQ ID NO: 379967 - DNA, 209 bp, Homo sapiens; identical to SEQ ID NO: 341320
  chr12:2602388-2602597
  hypo

SEQ ID NO: 379968 - DNA, 116 bp, Homo sapiens; identical to SEQ ID NO: 341321
  chr12:2613903-2614019
  hypo

SEQ ID NO: 379969 - DNA, 248 bp, Homo sapiens; identical to SEQ ID NO: 341322
  chr12:2788614-2788862
  hypo

SEQ ID NO: 379970 - DNA, 194 bp, Homo sapiens; identical to SEQ ID NO: 341325
  chr12:2972300-2972494
  hypo

SEQ ID NO: 379971 - DNA, 72 bp, Homo sapiens; identical to SEQ ID NO: 341326
  chr12:2995019-2995091
  hypo

SEQ ID NO: 379972 - DNA, 120 bp, Homo sapiens; identical to SEQ ID NO: 341327
  chr12:3030601-3030721
  hypo

SEQ ID NO: 379973 - DNA, 482 bp, Homo sapiens; identical to SEQ ID NO: 341328
  chr12:3103789-3104271
  hypo

SEQ ID NO: 379974 - DNA, 1049 bp, Homo sapiens; identical to SEQ ID NO: 359994
  chr12:3186011-3187060
  hypo

SEQ ID NO: 379975 - DNA, 408 bp, Homo sapiens; identical to SEQ ID NO: 341330
  chr12:3392272-3392680
  hypo

SEQ ID NO: 379976 - DNA, 202 bp, Homo sapiens
  chr12:3414071-3414273
  hypo
cgagggcagggagtcacgcggcctcacacatccctgtgtctctgtctgtgtgtgctggcgccgcacgactgctgggccacttgcttgtaaaatggggccaacaaaaggacctgcgccctgggccatcgtgcggactgaaagaggtgattcatggaaagcaattagaagagagcctggcgcagcacccgcagttaatgagaga

SEQ ID NO: 379977 - DNA, 192 bp, Homo sapiens
  chr12:3414306-3414498
  hypo
gcgcgtgcccgtgtcatttacatccatggggtgctgctgggaggcctgacgctagccctggctctgcagccactgctttctgggggtcggtctcctgcctgagatgcaggttggggttctaactgttcccggcctgtgtgagggcctgcgttcgcgtgcactggtgccctgcaggtcttggtcggtgacacc

SEQ ID NO: 379978 - DNA, 234 bp, Homo sapiens; identical to SEQ ID NO: 202829
  chr12:3600534-3600768
  hypo

SEQ ID NO: 379979 - DNA, 396 bp, Homo sapiens; identical to SEQ ID NO: 288660
  chr12:3601625-3602021
  hypo

SEQ ID NO: 379980 - DNA, 74 bp, Homo sapiens; identical to SEQ ID NO: 341335
  chr12:3901132-3901206
  hypo

SEQ ID NO: 379981 - DNA, 85 bp, Homo sapiens; identical to SEQ ID NO: 345410
  chr12:4377809-4377894
  hypo

SEQ ID NO: 379982 - DNA, 244 bp, Homo sapiens; identical to SEQ ID NO: 202837
  chr12:4378558-4378802
  hypo

SEQ ID NO: 379983 - DNA, 284 bp, Homo sapiens; identical to SEQ ID NO: 202839
  chr12:4380196-4380480
  hypo

SEQ ID NO: 379984 - DNA, 440 bp, Homo sapiens; identical to SEQ ID NO: 365899
  chr12:4554361-4554801
  hypo

SEQ ID NO: 379985 - DNA, 89 bp, Homo sapiens; identical to SEQ ID NO: 365900
  chr12:4554937-4555026
  hypo

SEQ ID NO: 379986 - DNA, 182 bp, Homo sapiens; identical to SEQ ID NO: 341338
  chr12:4672181-4672363
  hypo

SEQ ID NO: 379987 - DNA, 113 bp, Homo sapiens; identical to SEQ ID NO: 354864
  chr12:4734902-4735015
  hypo

SEQ ID NO: 379988 - DNA, 557 bp, Homo sapiens; identical to SEQ ID NO: 334445
  chr12:4920230-4920787
  hypo

SEQ ID NO: 379989 - DNA, 53 bp, Homo sapiens; identical to SEQ ID NO: 315455
  chr12:5252233-5252286
  hypo

SEQ ID NO: 379990 - DNA, 265 bp, Homo sapiens
  chr12:5252323-5252588
  hypo
catccgtaatccgatcacctccacatcatccgtaatccgatcacctccacatcatccgtaatccgatcacctccacatcatcggtaatccgatcacctccgcatcatccgtaatccgatcacctccacatcatccgtaatccgatcacctccacatcatccgtaatccgatcacctccacatcatccgtaatccgatcacctccacatcatccgtaatccgatcacctccacatcatccgtaatccgatcacctccacatcatcc

SEQ ID NO: 379991 - DNA, 322 bp, Homo sapiens; identical to SEQ ID NO: 202852
  chr12:5541693-5542015
  hypo

SEQ ID NO: 379992 - DNA, 466 bp, Homo sapiens; identical to SEQ ID NO: 341346
  chr12:5603587-5604053
  hypo

SEQ ID NO: 379993 - DNA, 299 bp, Homo sapiens; identical to SEQ ID NO: 365906
  chr12:6334298-6334597
  hypo

SEQ ID NO: 379994 - DNA, 267 bp, Homo sapiens; identical to SEQ ID NO: 341348
  chr12:6344323-6344590
  hypo

SEQ ID NO: 379995 - DNA, 218 bp, Homo sapiens; identical to SEQ ID NO: 341349
  chr12:6391196-6391414
  hypo

SEQ ID NO: 379996 - DNA, 72 bp, Homo sapiens; identical to SEQ ID NO: 365908
  chr12:6483496-6483568
  hypo

SEQ ID NO: 379997 - DNA, 406 bp, Homo sapiens; identical to SEQ ID NO: 360017
  chr12:6492947-6493353
  hypo

SEQ ID NO: 379998 - DNA, 33 bp, Homo sapiens; identical to SEQ ID NO: 202862
  chr12:6493416-6493449
  hypo

SEQ ID NO: 379999 - DNA, 115 bp, Homo sapiens; identical to SEQ ID NO: 360019
  chr12:6493504-6493619
  hypo

SEQ ID NO: 380000 - DNA, 193 bp, Homo sapiens; identical to SEQ ID NO: 341352
  chr12:6638565-6638758
  hypo

SEQ ID NO: 380001 - DNA, 99 bp, Homo sapiens; identical to SEQ ID NO: 354866
  chr12:6686943-6687042
  hypo

SEQ ID NO: 380002 - DNA, 267 bp, Homo sapiens; identical to SEQ ID NO: 354867
  chr12:7858581-7858848
  hypo

SEQ ID NO: 380003 - DNA, 55 bp, Homo sapiens; identical to SEQ ID NO: 345416
  chr12:8123528-8123583
  hypo

SEQ ID NO: 380004 - DNA, 231 bp, Homo sapiens; identical to SEQ ID NO: 214776
  chr12:8757695-8757926
  hypo

SEQ ID NO: 380005 - DNA, 162 bp, Homo sapiens; identical to SEQ ID NO: 354870
  chr12:8757966-8758128
  hypo

SEQ ID NO: 380006 - DNA, 72 bp, Homo sapiens; identical to SEQ ID NO: 341358
  chr12:8906544-8906616
  hypo

SEQ ID NO: 380007 - DNA, 215 bp, Homo sapiens; identical to SEQ ID NO: 341359
  chr12:9108820-9109035
  hypo

SEQ ID NO: 380008 - DNA, 294 bp, Homo sapiens; identical to SEQ ID NO: 360027
  chr12:9216950-9217244
  hypo

SEQ ID NO: 380009 - DNA, 565 bp, Homo sapiens; identical to SEQ ID NO: 334461
  chr12:12502899-12503464
  hypo

SEQ ID NO: 380010 - DNA, 156 bp, Homo sapiens; identical to SEQ ID NO: 341362
  chr12:12605374-12605530
  hypo

SEQ ID NO: 380011 - DNA, 425 bp, Homo sapiens; identical to SEQ ID NO: 341363
  chr12:12618418-12618843
  hypo

SEQ ID NO: 380012 - DNA, 86 bp, Homo sapiens; identical to SEQ ID NO: 354873
  chr12:13215310-13215396
  hypo

SEQ ID NO: 380013 - DNA, 1110 bp, Homo sapiens; identical to SEQ ID NO: 360031
  chr12:15941612-15942722
  hypo

SEQ ID NO: 380014 - DNA, 73 bp, Homo sapiens; identical to SEQ ID NO: 345418
  chr12:19282260-19282333
  hypo

SEQ ID NO: 380015 - DNA, 840 bp, Homo sapiens; identical to SEQ ID NO: 202900
  chr12:19282363-19283203
  hypo

SEQ ID NO: 380016 - DNA, 249 bp, Homo sapiens; identical to SEQ ID NO: 202901
  chr12:19283425-19283674
  hypo

SEQ ID NO: 380017 - DNA, 117 bp, Homo sapiens; identical to SEQ ID NO: 347220
  chr12:21681020-21681137
  hypo

SEQ ID NO: 380018 - DNA, 118 bp, Homo sapiens; identical to SEQ ID NO: 347221
  chr12:22488705-22488823
  hypo

SEQ ID NO: 380019 - DNA, 252 bp, Homo sapiens; identical to SEQ ID NO: 202912
  chr12:24715505-24715757
  hypo

SEQ ID NO: 380020 - DNA, 45 bp, Homo sapiens; identical to SEQ ID NO: 354881
  chr12:25344059-25344104
  hypo

SEQ ID NO: 380021 - DNA, 138 bp, Homo sapiens; identical to SEQ ID NO: 341375
  chr12:26398950-26399088
  hypo

SEQ ID NO: 380022 - DNA, 59 bp, Homo sapiens; identical to SEQ ID NO: 341376
  chr12:27742262-27742321
  hypo

SEQ ID NO: 380023 - DNA, 343 bp, Homo sapiens; identical to SEQ ID NO: 288811
  chr12:28123205-28123548
  hypo

SEQ ID NO: 380024 - DNA, 668 bp, Homo sapiens; identical to SEQ ID NO: 360045
  chr12:29301988-29302656
  hypo

SEQ ID NO: 380025 - DNA, 85 bp, Homo sapiens; identical to SEQ ID NO: 288816
  chr12:29302688-29302773
  hypo

SEQ ID NO: 380026 - DNA, 83 bp, Homo sapiens; identical to SEQ ID NO: 346049
  chr12:29373882-29373965
  hypo

SEQ ID NO: 380027 - DNA, 161 bp, Homo sapiens; identical to SEQ ID NO: 341380
  chr12:30861053-30861214
  hypo

SEQ ID NO: 380028 - DNA, 263 bp, Homo sapiens; identical to SEQ ID NO: 341382
  chr12:31255691-31255954
  hypo

SEQ ID NO: 380029 - DNA, 48 bp, Homo sapiens; identical to SEQ ID NO: 341383
  chr12:32142934-32142982
  hypo

SEQ ID NO: 380030 - DNA, 34 bp, Homo sapiens; identical to SEQ ID NO: 214842
  chr12:32831540-32831574
  hypo

SEQ ID NO: 380031 - DNA, 164 bp, Homo sapiens; identical to SEQ ID NO: 341385
  chr12:32864298-32864462
  hypo

SEQ ID NO: 380032 - DNA, 349 bp, Homo sapiens; identical to SEQ ID NO: 202934
  chr12:33049652-33050001
  hypo

SEQ ID NO: 380033 - DNA, 115 bp, Homo sapiens; identical to SEQ ID NO: 202939
  chr12:33592401-33592516
  hypo

SEQ ID NO: 380034 - DNA, 185 bp, Homo sapiens
  chr12:34358307-34358492
  hypo
cgtcggaggaaagggggcctcccggaaagctcaaagtctgagcaggggatggaaaactctggcgtccccactcaacagcagggcggtgctgcggcgatccagtgcacgcccttgccgccggcgatggcgggaggctcttggaggccggaaagcgcagcgcagcggcccacagtgctccggcgtgg

SEQ ID NO: 380035 - DNA, 137 bp, Homo sapiens
  chr12:34358522-34358659
  hypo
ggctgaggggtccctgatccgagccccgcggcctccgagtggggatgaagcctggagtcaggcaggcgtggctgggccaggctcttgtgtcatccaggcatcactgccggtgtctatggccataccaccctgaaggc

SEQ ID NO: 380036 - DNA, 90 bp, Homo sapiens; identical to SEQ ID NO: 214858
  chr12:38595391-38595481
  hypo

SEQ ID NO: 380037 - DNA, 37 bp, Homo sapiens; identical to SEQ ID NO: 365943
  chr12:38595561-38595598
  hypo

SEQ ID NO: 380038 - DNA, 76 bp, Homo sapiens; identical to SEQ ID NO: 351335
  chr12:40618264-40618340
  hypo

SEQ ID NO: 380039 - DNA, 35 bp, Homo sapiens; identical to SEQ ID NO: 351336
  chr12:40619048-40619083
  hypo

SEQ ID NO: 380040 - DNA, 52 bp, Homo sapiens; identical to SEQ ID NO: 372985
  chr12:41582155-41582207
  hypo

SEQ ID NO: 380041 - DNA, 197 bp, Homo sapiens; identical to SEQ ID NO: 341393
  chr12:47497161-47497358
  hypo

SEQ ID NO: 380042 - DNA, 237 bp, Homo sapiens; identical to SEQ ID NO: 214866
  chr12:47628809-47629046
  hypo

SEQ ID NO: 380043 - DNA, 141 bp, Homo sapiens; identical to SEQ ID NO: 214867
  chr12:47629208-47629349
  hypo

SEQ ID NO: 380044 - DNA, 111 bp, Homo sapiens; identical to SEQ ID NO: 214868
  chr12:47629379-47629490
  hypo

SEQ ID NO: 380045 - DNA, 243 bp, Homo sapiens; identical to SEQ ID NO: 348555
  chr12:47629544-47629787
  hypo

SEQ ID NO: 380046 - DNA, 181 bp, Homo sapiens; identical to SEQ ID NO: 351339
  chr12:48299205-48299386
  hypo

SEQ ID NO: 380047 - DNA, 32 bp, Homo sapiens; identical to SEQ ID NO: 288870
  chr12:48299387-48299419
  hypo

SEQ ID NO: 380048 - DNA, 42 bp, Homo sapiens; identical to SEQ ID NO: 351341
  chr12:48299465-48299507
  hypo

SEQ ID NO: 380049 - DNA, 493 bp, Homo sapiens; identical to SEQ ID NO: 202958
  chr12:48576976-48577469
  hypo

SEQ ID NO: 380050 - DNA, 97 bp, Homo sapiens; identical to SEQ ID NO: 341398
  chr12:49065604-49065701
  hypo

SEQ ID NO: 380051 - DNA, 60 bp, Homo sapiens; identical to SEQ ID NO: 202964
  chr12:49364178-49364238
  hypo

SEQ ID NO: 380052 - DNA, 165 bp, Homo sapiens; identical to SEQ ID NO: 354898
  chr12:49416380-49416545
  hypo

SEQ ID NO: 380053 - DNA, 221 bp, Homo sapiens; identical to SEQ ID NO: 341401
  chr12:49422776-49422997
  hypo

SEQ ID NO: 380054 - DNA, 77 bp, Homo sapiens; identical to SEQ ID NO: 373003
  chr12:49487994-49488071
  hypo

SEQ ID NO: 380055 - DNA, 78 bp, Homo sapiens; identical to SEQ ID NO: 122207
  chr12:49488131-49488209
  hypo

SEQ ID NO: 380056 - DNA, 419 bp, Homo sapiens; identical to SEQ ID NO: 334517
  chr12:49931623-49932042
  hypo

SEQ ID NO: 380057 - DNA, 43 bp, Homo sapiens; identical to SEQ ID NO: 354900
  chr12:49989816-49989859
  hypo

SEQ ID NO: 380058 - DNA, 180 bp, Homo sapiens; identical to SEQ ID NO: 341405
  chr12:50037818-50037998
  hypo

SEQ ID NO: 380059 - DNA, 71 bp, Homo sapiens; identical to SEQ ID NO: 341406
  chr12:50322856-50322927
  hypo

SEQ ID NO: 380060 - DNA, 104 bp, Homo sapiens; identical to SEQ ID NO: 341407
  chr12:50484317-50484421
  hypo

SEQ ID NO: 380061 - DNA, 37 bp, Homo sapiens; identical to SEQ ID NO: 348557
  chr12:51421646-51421683
  hypo

SEQ ID NO: 380062 - DNA, 70 bp, Homo sapiens; identical to SEQ ID NO: 365963
  chr12:51844685-51844755
  hypo

SEQ ID NO: 380063 - DNA, 213 bp, Homo sapiens; identical to SEQ ID NO: 334523
  chr12:52294173-52294386
  hypo

SEQ ID NO: 380064 - DNA, 39 bp, Homo sapiens; identical to SEQ ID NO: 354902
  chr12:52387815-52387854
  hypo

SEQ ID NO: 380065 - DNA, 195 bp, Homo sapiens; identical to SEQ ID NO: 365966
  chr12:52467443-52467638
  hypo

SEQ ID NO: 380066 - DNA, 227 bp, Homo sapiens; identical to SEQ ID NO: 365967
  chr12:52913581-52913808
  hypo

SEQ ID NO: 380067 - DNA, 219 bp, Homo sapiens; identical to SEQ ID NO: 214902
  chr12:52913838-52914057
  hypo

SEQ ID NO: 380068 - DNA, 101 bp, Homo sapiens; identical to SEQ ID NO: 365969
  chr12:52914087-52914188
  hypo

SEQ ID NO: 380069 - DNA, 144 bp, Homo sapiens; identical to SEQ ID NO: 341417
  chr12:53007462-53007606
  hypo

SEQ ID NO: 380070 - DNA, 249 bp, Homo sapiens; identical to SEQ ID NO: 341418
  chr12:53045577-53045826
  hypo

SEQ ID NO: 380071 - DNA, 156 bp, Homo sapiens; identical to SEQ ID NO: 334530
  chr12:53272458-53272614
  hypo

SEQ ID NO: 380072 - DNA, 172 bp, Homo sapiens; identical to SEQ ID NO: 341421
  chr12:53474309-53474481
  hypo

SEQ ID NO: 380073 - DNA, 295 bp, Homo sapiens
  chr12:53685907-53686202
  hypo
cgactggggaagacgtcaacaaagaagggcagagaaacctgagaagataggagagggtcctaggaatggctcagacatggaaaggggctgagattgttagagcttgggcctcttggtgagacaagcatcctaatcgccagtgtctcctcctcagtatggggcctcgccagtgctgagtcaaggggtggatccacgaagtaccttctatgtcctgaaccctcacaataacctgtcaagcacagaggagcaatttcgagccaatttcagcaggtcaggggcgcgaagacaagaagac

SEQ ID NO: 380074 - DNA, 193 bp, Homo sapiens; identical to SEQ ID NO: 351361
  chr12:53719360-53719553
  hypo

SEQ ID NO: 380075 - DNA, 114 bp, Homo sapiens; identical to SEQ ID NO: 341425
  chr12:54122178-54122292
  hypo

SEQ ID NO: 380076 - DNA, 57 bp, Homo sapiens; identical to SEQ ID NO: 351363
  chr12:54144782-54144839
  hypo

SEQ ID NO: 380077 - DNA, 302 bp, Homo sapiens; identical to SEQ ID NO: 360097
  chr12:54332438-54332740
  hypo

SEQ ID NO: 380078 - DNA, 103 bp, Homo sapiens; identical to SEQ ID NO: 351368
  chr12:54393256-54393359
  hypo

SEQ ID NO: 380079 - DNA, 432 bp, Homo sapiens; identical to SEQ ID NO: 334559
  chr12:54400009-54400441
  hypo

SEQ ID NO: 380080 - DNA, 571 bp, Homo sapiens; identical to SEQ ID NO: 360119
  chr12:54426536-54427107
  hypo

SEQ ID NO: 380081 - DNA, 329 bp, Homo sapiens; identical to SEQ ID NO: 203022
  chr12:54427307-54427636
  hypo

SEQ ID NO: 380082 - DNA, 98 bp, Homo sapiens; identical to SEQ ID NO: 341433
  chr12:54651346-54651444
  hypo

SEQ ID NO: 380083 - DNA, 136 bp, Homo sapiens; identical to SEQ ID NO: 341435
  chr12:56183329-56183465
  hypo

SEQ ID NO: 380084 - DNA, 277 bp, Homo sapiens; identical to SEQ ID NO: 334568
  chr12:56472747-56473024
  hypo

SEQ ID NO: 380085 - DNA, 359 bp, Homo sapiens; identical to SEQ ID NO: 346055
  chr12:56558022-56558381
  hypo

SEQ ID NO: 380086 - DNA, 166 bp, Homo sapiens; identical to SEQ ID NO: 341438
  chr12:56604107-56604273
  hypo

SEQ ID NO: 380087 - DNA, 74 bp, Homo sapiens; identical to SEQ ID NO: 341439
  chr12:56610588-56610662
  hypo

SEQ ID NO: 380088 - DNA, 172 bp, Homo sapiens; identical to SEQ ID NO: 341440
  chr12:57625988-57626160
  hypo

SEQ ID NO: 380089 - DNA, 146 bp, Homo sapiens; identical to SEQ ID NO: 365986
  chr12:58262601-58262747
  hypo

SEQ ID NO: 380090 - DNA, 171 bp, Homo sapiens; identical to SEQ ID NO: 341443
  chr12:58263143-58263314
  hypo

SEQ ID NO: 380091 - DNA, 185 bp, Homo sapiens; identical to SEQ ID NO: 341444
  chr12:58284105-58284290
  hypo

SEQ ID NO: 380092 - DNA, 216 bp, Homo sapiens; identical to SEQ ID NO: 289119
  chr12:59313943-59314159
  hypo

SEQ ID NO: 380093 - DNA, 341 bp, Homo sapiens; identical to SEQ ID NO: 360136
  chr12:59314189-59314530
  hypo

SEQ ID NO: 380094 - DNA, 54 bp, Homo sapiens; identical to SEQ ID NO: 373078
  chr12:59989999-59990053
  hypo

SEQ ID NO: 380095 - DNA, 116 bp, Homo sapiens; identical to SEQ ID NO: 365991
  chr12:63195619-63195735
  hypo

SEQ ID NO: 380096 - DNA, 160 bp, Homo sapiens; identical to SEQ ID NO: 365992
  chr12:63195813-63195973
  hypo

SEQ ID NO: 380097 - DNA, 178 bp, Homo sapiens
  chr12:64797272-64797450
  hypo
cggagtggcagtcaagtcgaggcagcctaagcctacactgcctctatgttgcattaataaattaataaatctgtgaccaaataaatgaagtgacatttagtagcatcgaaagatcccgtgagtaggacttcctaagaatgctctccttcttttcatggacaaaattttagtctgttta

SEQ ID NO: 380098 - DNA, 111 bp, Homo sapiens; identical to SEQ ID NO: 354914
  chr12:69999239-69999350
  hypo

SEQ ID NO: 380099 - DNA, 55 bp, Homo sapiens; identical to SEQ ID NO: 365994
  chr12:72165436-72165491
  hypo

SEQ ID NO: 380100 - DNA, 91 bp, Homo sapiens; identical to SEQ ID NO: 341456
  chr12:76878986-76879077
  hypo

SEQ ID NO: 380101 - DNA, 259 bp, Homo sapiens; identical to SEQ ID NO: 341458
  chr12:77216021-77216280
  hypo

SEQ ID NO: 380102 - DNA, 255 bp, Homo sapiens; identical to SEQ ID NO: 365997
  chr12:79842637-79842892
  hypo

SEQ ID NO: 380103 - DNA, 385 bp, Homo sapiens; identical to SEQ ID NO: 203112
  chr12:81330352-81330737
  hypo

SEQ ID NO: 380104 - DNA, 437 bp, Homo sapiens; identical to SEQ ID NO: 360169
  chr12:89747140-89747577
  hypo

SEQ ID NO: 380105 - DNA, 122 bp, Homo sapiens; identical to SEQ ID NO: 341462
  chr12:90025699-90025821
  hypo

SEQ ID NO: 380106 - DNA, 39 bp, Homo sapiens; identical to SEQ ID NO: 354918
  chr12:90313473-90313512
  hypo

SEQ ID NO: 380107 - DNA, 122 bp, Homo sapiens; identical to SEQ ID NO: 366002
  chr12:93710959-93711081
  hypo

SEQ ID NO: 380108 - DNA, 264 bp, Homo sapiens; identical to SEQ ID NO: 347242
  chr12:93966037-93966301
  hypo

SEQ ID NO: 380109 - DNA, 117 bp, Homo sapiens; identical to SEQ ID NO: 341466
  chr12:94145777-94145894
  hypo

SEQ ID NO: 380110 - DNA, 104 bp, Homo sapiens; identical to SEQ ID NO: 351397
  chr12:94541793-94541897
  hypo

SEQ ID NO: 380111 - DNA, 1131 bp, Homo sapiens; identical to SEQ ID NO: 289236
  chr12:94541957-94543088
  hypo

SEQ ID NO: 380112 - DNA, 86 bp, Homo sapiens; identical to SEQ ID NO: 345430
  chr12:94544052-94544138
  hypo

SEQ ID NO: 380113 - DNA, 124 bp, Homo sapiens; identical to SEQ ID NO: 341468
  chr12:95602750-95602874
  hypo

SEQ ID NO: 380114 - DNA, 107 bp, Homo sapiens; identical to SEQ ID NO: 360176
  chr12:96183929-96184036
  hypo

SEQ ID NO: 380115 - DNA, 73 bp, Homo sapiens; identical to SEQ ID NO: 360177
  chr12:96184964-96185037
  hypo

SEQ ID NO: 380116 - DNA, 222 bp, Homo sapiens; identical to SEQ ID NO: 360178
  chr12:96185121-96185343
  hypo

SEQ ID NO: 380117 - DNA, 133 bp, Homo sapiens; identical to SEQ ID NO: 341471
  chr12:96566303-96566436
  hypo

SEQ ID NO: 380118 - DNA, 324 bp, Homo sapiens; identical to SEQ ID NO: 341473
  chr12:102301906-102302230
  hypo

SEQ ID NO: 380119 - DNA, 226 bp, Homo sapiens; identical to SEQ ID NO: 373141
  chr12:104323141-104323367
  hypo

SEQ ID NO: 380120 - DNA, 348 bp, Homo sapiens; identical to SEQ ID NO: 203159
  chr12:104851545-104851893
  hypo

SEQ ID NO: 380121 - DNA, 214 bp, Homo sapiens; identical to SEQ ID NO: 366015
  chr12:105392597-105392811
  hypo

SEQ ID NO: 380122 - DNA, 50 bp, Homo sapiens; identical to SEQ ID NO: 366016
  chr12:105392841-105392891
  hypo

SEQ ID NO: 380123 - DNA, 211 bp, Homo sapiens; identical to SEQ ID NO: 341478
  chr12:105472684-105472895
  hypo

SEQ ID NO: 380124 - DNA, 85 bp, Homo sapiens
  chr12:108926063-108926148
  hypo
cggcccggtgcagagccttccggcagtgctgggtgtcaccatgagctctaaggcagaaaacaaaaagttgctgccaccaggacac

SEQ ID NO: 380125 - DNA, 381 bp, Homo sapiens
  chr12:108926178-108926559
  hypo
tcttctcccaggtagaaactcactcttcagtaactctagcttctgagaagaccttagctttcagatctatccatgatgctttctccttccagagtctctacagtcacctacgaagtatttccctgaagcactctctccctcagccatgtaggggctactggaaagtgtacctgatattgtgatctgcaaccagcattctgcctttacagcattcacatgtgcggcacatggcgggggagtccaacagctctctgtaacctgatacagtccccagggaaattttactatggcgtcctactgacaggagagttatgaatccagggtagtgtcaaatttcatacccagagtcagatcttttttttttttttgaaagggagtctc

SEQ ID NO: 380126 - DNA, 178 bp, Homo sapiens; identical to SEQ ID NO: 341481
  chr12:109050967-109051145
  hypo

SEQ ID NO: 380127 - DNA, 32 bp, Homo sapiens; identical to SEQ ID NO: 366018
  chr12:109208584-109208616
  hypo

SEQ ID NO: 380128 - DNA, 137 bp, Homo sapiens; identical to SEQ ID NO: 366019
  chr12:109208674-109208811
  hypo

SEQ ID NO: 380129 - DNA, 152 bp, Homo sapiens; identical to SEQ ID NO: 366020
  chr12:109488367-109488519
  hypo

SEQ ID NO: 380130 - DNA, 226 bp, Homo sapiens; identical to SEQ ID NO: 341484
  chr12:109507780-109508006
  hypo

SEQ ID NO: 380131 - DNA, 367 bp, Homo sapiens; identical to SEQ ID NO: 366022
  chr12:109873137-109873504
  hypo

SEQ ID NO: 380132 - DNA, 143 bp, Homo sapiens; identical to SEQ ID NO: 341486
  chr12:109898449-109898592
  hypo

SEQ ID NO: 380133 - DNA, 159 bp, Homo sapiens; identical to SEQ ID NO: 354925
  chr12:109970799-109970958
  hypo

SEQ ID NO: 380134 - DNA, 149 bp, Homo sapiens; identical to SEQ ID NO: 341488
  chr12:110019861-110020010
  hypo

SEQ ID NO: 380135 - DNA, 113 bp, Homo sapiens; identical to SEQ ID NO: 366025
  chr12:110258862-110258975
  hypo

SEQ ID NO: 380136 - DNA, 634 bp, Homo sapiens; identical to SEQ ID NO: 316194
  chr12:110352780-110353414
  hypo

SEQ ID NO: 380137 - DNA, 72 bp, Homo sapiens; identical to SEQ ID NO: 341491
  chr12:110389844-110389916
  hypo

SEQ ID NO: 380138 - DNA, 85 bp, Homo sapiens; identical to SEQ ID NO: 341492
  chr12:110518057-110518142
  hypo

SEQ ID NO: 380139 - DNA, 423 bp, Homo sapiens; identical to SEQ ID NO: 341493
  chr12:110778337-110778760
  hypo

SEQ ID NO: 380140 - DNA, 113 bp, Homo sapiens; identical to SEQ ID NO: 354928
  chr12:110783979-110784092
  hypo

SEQ ID NO: 380141 - DNA, 113 bp, Homo sapiens; identical to SEQ ID NO: 341495
  chr12:110784858-110784971
  hypo

SEQ ID NO: 380142 - DNA, 114 bp, Homo sapiens; identical to SEQ ID NO: 341496
  chr12:110915439-110915553
  hypo

SEQ ID NO: 380143 - DNA, 60 bp, Homo sapiens; identical to SEQ ID NO: 354931
  chr12:110983646-110983706
  hypo

SEQ ID NO: 380144 - DNA, 136 bp, Homo sapiens; identical to SEQ ID NO: 354932
  chr12:110983736-110983872
  hypo

SEQ ID NO: 380145 - DNA, 96 bp, Homo sapiens; identical to SEQ ID NO: 351410
  chr12:111284508-111284604
  hypo

SEQ ID NO: 380146 - DNA, 380 bp, Homo sapiens; identical to SEQ ID NO: 341500
  chr12:111402659-111403039
  hypo

SEQ ID NO: 380147 - DNA, 366 bp, Homo sapiens; identical to SEQ ID NO: 373156
  chr12:111473017-111473383
  hypo

SEQ ID NO: 380148 - DNA, 51 bp, Homo sapiens; identical to SEQ ID NO: 354934
  chr12:111725459-111725510
  hypo

SEQ ID NO: 380149 - DNA, 63 bp, Homo sapiens; identical to SEQ ID NO: 215057
  chr12:111725564-111725627
  hypo

SEQ ID NO: 380150 - DNA, 390 bp, Homo sapiens; identical to SEQ ID NO: 354936
  chr12:111800610-111801000
  hypo

SEQ ID NO: 380151 - DNA, 320 bp, Homo sapiens; identical to SEQ ID NO: 351411
  chr12:111844290-111844610
  hypo

SEQ ID NO: 380152 - DNA, 145 bp, Homo sapiens; identical to SEQ ID NO: 341505
  chr12:112196497-112196642
  hypo

SEQ ID NO: 380153 - DNA, 86 bp, Homo sapiens; identical to SEQ ID NO: 366037
  chr12:112591890-112591976
  hypo

SEQ ID NO: 380154 - DNA, 182 bp, Homo sapiens; identical to SEQ ID NO: 366038
  chr12:112610173-112610355
  hypo

SEQ ID NO: 380155 - DNA, 215 bp, Homo sapiens; identical to SEQ ID NO: 366039
  chr12:112610446-112610661
  hypo

SEQ ID NO: 380156 - DNA, 175 bp, Homo sapiens; identical to SEQ ID NO: 354938
  chr12:112681200-112681375
  hypo

SEQ ID NO: 380157 - DNA, 73 bp, Homo sapiens; identical to SEQ ID NO: 341510
  chr12:112684738-112684811
  hypo

SEQ ID NO: 380158 - DNA, 235 bp, Homo sapiens; identical to SEQ ID NO: 366042
  chr12:112743068-112743303
  hypo

SEQ ID NO: 380159 - DNA, 83 bp, Homo sapiens; identical to SEQ ID NO: 345434
  chr12:113495127-113495210
  hypo

SEQ ID NO: 380160 - DNA, 788 bp, Homo sapiens; identical to SEQ ID NO: 341513
  chr12:113685206-113685994
  hypo

SEQ ID NO: 380161 - DNA, 58 bp, Homo sapiens; identical to SEQ ID NO: 341514
  chr12:113704033-113704091
  hypo

SEQ ID NO: 380162 - DNA, 291 bp, Homo sapiens; identical to SEQ ID NO: 354941
  chr12:113725566-113725857
  hypo

SEQ ID NO: 380163 - DNA, 615 bp, Homo sapiens; identical to SEQ ID NO: 334652
  chr12:113796265-113796880
  hypo

SEQ ID NO: 380164 - DNA, 554 bp, Homo sapiens; identical to SEQ ID NO: 366048
  chr12:114273212-114273766
  hypo

SEQ ID NO: 380165 - DNA, 134 bp, Homo sapiens; identical to SEQ ID NO: 366049
  chr12:114273850-114273984
  hypo

SEQ ID NO: 380166 - DNA, 94 bp, Homo sapiens
  chr12:114282487-114282581
  hypo
ccgtcttccgccgcagggcctgcagggtcacctcggagtcggcccactccagcaccagcctccgcccgtacaagtgggtgctgtgacacagggc

SEQ ID NO: 380167 - DNA, 72 bp, Homo sapiens; identical to SEQ ID NO: 354943
  chr12:114290596-114290668
  hypo

SEQ ID NO: 380168 - DNA, 146 bp, Homo sapiens; identical to SEQ ID NO: 341524
  chr12:114334084-114334230
  hypo

SEQ ID NO: 380169 - DNA, 284 bp, Homo sapiens; identical to SEQ ID NO: 354944
  chr12:114337479-114337763
  hypo

SEQ ID NO: 380170 - DNA, 146 bp, Homo sapiens; identical to SEQ ID NO: 215093
  chr12:114337793-114337939
  hypo

SEQ ID NO: 380171 - DNA, 169 bp, Homo sapiens; identical to SEQ ID NO: 341528
  chr12:116394813-116394982
  hypo

SEQ ID NO: 380172 - DNA, 230 bp, Homo sapiens; identical to SEQ ID NO: 341529
  chr12:116443638-116443868
  hypo

SEQ ID NO: 380173 - DNA, 154 bp, Homo sapiens; identical to SEQ ID NO: 341531
  chr12:116756230-116756384
  hypo

SEQ ID NO: 380174 - DNA, 237 bp, Homo sapiens; identical to SEQ ID NO: 354947
  chr12:117155351-117155588
  hypo

SEQ ID NO: 380175 - DNA, 187 bp, Homo sapiens; identical to SEQ ID NO: 354948
  chr12:117155627-117155814
  hypo

SEQ ID NO: 380176 - DNA, 71 bp, Homo sapiens; identical to SEQ ID NO: 334669
  chr12:117316909-117316980
  hypo

SEQ ID NO: 380177 - DNA, 31 bp, Homo sapiens; identical to SEQ ID NO: 289422
  chr12:117317225-117317256
  hypo

SEQ ID NO: 380178 - DNA, 482 bp, Homo sapiens; identical to SEQ ID NO: 351423
  chr12:117317288-117317770
  hypo

SEQ ID NO: 380179 - DNA, 140 bp, Homo sapiens; identical to SEQ ID NO: 341535
  chr12:117392984-117393124
  hypo

SEQ ID NO: 380180 - DNA, 272 bp, Homo sapiens; identical to SEQ ID NO: 366063
  chr12:117407834-117408106
  hypo

SEQ ID NO: 380181 - DNA, 50 bp, Homo sapiens; identical to SEQ ID NO: 366064
  chr12:117408136-117408186
  hypo

SEQ ID NO: 380182 - DNA, 129 bp, Homo sapiens; identical to SEQ ID NO: 341537
  chr12:117408233-117408362
  hypo

SEQ ID NO: 380183 - DNA, 218 bp, Homo sapiens; identical to SEQ ID NO: 341538
  chr12:117466159-117466377
  hypo

SEQ ID NO: 380184 - DNA, 99 bp, Homo sapiens; identical to SEQ ID NO: 354952
  chr12:117531122-117531221
  hypo

SEQ ID NO: 380185 - DNA, 293 bp, Homo sapiens; identical to SEQ ID NO: 341542
  chr12:117599154-117599447
  hypo

SEQ ID NO: 380186 - DNA, 328 bp, Homo sapiens; identical to SEQ ID NO: 341543
  chr12:117600052-117600380
  hypo

SEQ ID NO: 380187 - DNA, 413 bp, Homo sapiens; identical to SEQ ID NO: 366069
  chr12:118198873-118199286
  hypo

SEQ ID NO: 380188 - DNA, 79 bp, Homo sapiens; identical to SEQ ID NO: 341546
  chr12:118461377-118461456
  hypo

SEQ ID NO: 380189 - DNA, 396 bp, Homo sapiens; identical to SEQ ID NO: 348568
  chr12:120147746-120148142
  hypo

SEQ ID NO: 380190 - DNA, 335 bp, Homo sapiens; identical to SEQ ID NO: 215132
  chr12:120148396-120148731
  hypo

SEQ ID NO: 380191 - DNA, 70 bp, Homo sapiens; identical to SEQ ID NO: 341548
  chr12:120165264-120165334
  hypo

SEQ ID NO: 380192 - DNA, 64 bp, Homo sapiens; identical to SEQ ID NO: 346059
  chr12:120172992-120173056
  hypo

SEQ ID NO: 380193 - DNA, 136 bp, Homo sapiens; identical to SEQ ID NO: 346060
  chr12:120173137-120173273
  hypo

SEQ ID NO: 380194 - DNA, 276 bp, Homo sapiens; identical to SEQ ID NO: 341550
  chr12:120186357-120186633
  hypo

SEQ ID NO: 380195 - DNA, 65 bp, Homo sapiens; identical to SEQ ID NO: 341551
  chr12:120189911-120189976
  hypo

SEQ ID NO: 380196 - DNA, 96 bp, Homo sapiens; identical to SEQ ID NO: 341552
  chr12:120543024-120543120
  hypo

SEQ ID NO: 380197 - DNA, 46 bp, Homo sapiens; identical to SEQ ID NO: 354958
  chr12:120574393-120574439
  hypo

SEQ ID NO: 380198 - DNA, 136 bp, Homo sapiens
  chr12:120580310-120580446
  hypo
cgttctcttatctgcacacgtgctggccaggaaacccagcaggagcccaaagagagtgggtaggatctcacgcaaggtgcggggggtattggagacaacaatcttccagacatgcagggacgcctgccgcaccacc

SEQ ID NO: 380199 - DNA, 143 bp, Homo sapiens; identical to SEQ ID NO: 341555
  chr12:120613510-120613653
  hypo

SEQ ID NO: 380200 - DNA, 97 bp, Homo sapiens; identical to SEQ ID NO: 341556
  chr12:121200066-121200163
  hypo

SEQ ID NO: 380201 - DNA, 206 bp, Homo sapiens; identical to SEQ ID NO: 341557
  chr12:121203947-121204153
  hypo

SEQ ID NO: 380202 - DNA, 200 bp, Homo sapiens; identical to SEQ ID NO: 341558
  chr12:121205162-121205362
  hypo

SEQ ID NO: 380203 - DNA, 81 bp, Homo sapiens; identical to SEQ ID NO: 341559
  chr12:121328606-121328687
  hypo

SEQ ID NO: 380204 - DNA, 49 bp, Homo sapiens; identical to SEQ ID NO: 316435
  chr12:121622576-121622625
  hypo

SEQ ID NO: 380205 - DNA, 703 bp, Homo sapiens; identical to SEQ ID NO: 348573
  chr12:121687598-121688301
  hypo

SEQ ID NO: 380206 - DNA, 239 bp, Homo sapiens; identical to SEQ ID NO: 348574
  chr12:121688331-121688570
  hypo

SEQ ID NO: 380207 - DNA, 124 bp, Homo sapiens; identical to SEQ ID NO: 341563
  chr12:121756071-121756195
  hypo

SEQ ID NO: 380208 - DNA, 124 bp, Homo sapiens; identical to SEQ ID NO: 341564
  chr12:122179060-122179184
  hypo

SEQ ID NO: 380209 - DNA, 39 bp, Homo sapiens; identical to SEQ ID NO: 346061
  chr12:122192684-122192723
  hypo

SEQ ID NO: 380210 - DNA, 116 bp, Homo sapiens; identical to SEQ ID NO: 215161
  chr12:122192843-122192959
  hypo

SEQ ID NO: 380211 - DNA, 45 bp, Homo sapiens; identical to SEQ ID NO: 346063
  chr12:122192989-122193034
  hypo

SEQ ID NO: 380212 - DNA, 94 bp, Homo sapiens; identical to SEQ ID NO: 341566
  chr12:122206347-122206441
  hypo

SEQ ID NO: 380213 - DNA, 496 bp, Homo sapiens; identical to SEQ ID NO: 354971
  chr12:122208807-122209303
  hypo

SEQ ID NO: 380214 - DNA, 304 bp, Homo sapiens; identical to SEQ ID NO: 341568
  chr12:122212948-122213252
  hypo

SEQ ID NO: 380215 - DNA, 108 bp, Homo sapiens; identical to SEQ ID NO: 354972
  chr12:122213693-122213801
  hypo

SEQ ID NO: 380216 - DNA, 185 bp, Homo sapiens; identical to SEQ ID NO: 334680
  chr12:122214111-122214296
  hypo

SEQ ID NO: 380217 - DNA, 751 bp, Homo sapiens; identical to SEQ ID NO: 334681
  chr12:122231543-122232294
  hypo

SEQ ID NO: 380218 - DNA, 60 bp, Homo sapiens; identical to SEQ ID NO: 366095
  chr12:122285108-122285168
  hypo

SEQ ID NO: 380219 - DNA, 276 bp, Homo sapiens; identical to SEQ ID NO: 354973
  chr12:122439511-122439787
  hypo

SEQ ID NO: 380220 - DNA, 582 bp, Homo sapiens; identical to SEQ ID NO: 334683
  chr12:122460955-122461537
  hypo

SEQ ID NO: 380221 - DNA, 61 bp, Homo sapiens; identical to SEQ ID NO: 341575
  chr12:122463078-122463139
  hypo

SEQ ID NO: 380222 - DNA, 67 bp, Homo sapiens; identical to SEQ ID NO: 341576
  chr12:122474899-122474966
  hypo

SEQ ID NO: 380223 - DNA, 407 bp, Homo sapiens; identical to SEQ ID NO: 341577
  chr12:122480960-122481367
  hypo

SEQ ID NO: 380224 - DNA, 375 bp, Homo sapiens; identical to SEQ ID NO: 341578
  chr12:122481629-122482004
  hypo

SEQ ID NO: 380225 - DNA, 70 bp, Homo sapiens; identical to SEQ ID NO: 354976
  chr12:122602792-122602862
  hypo

SEQ ID NO: 380226 - DNA, 458 bp, Homo sapiens; identical to SEQ ID NO: 341580
  chr12:122614584-122615042
  hypo

SEQ ID NO: 380227 - DNA, 209 bp, Homo sapiens; identical to SEQ ID NO: 215185
  chr12:122622385-122622594
  hypo

SEQ ID NO: 380228 - DNA, 261 bp, Homo sapiens; identical to SEQ ID NO: 366105
  chr12:122622642-122622903
  hypo

SEQ ID NO: 380229 - DNA, 163 bp, Homo sapiens; identical to SEQ ID NO: 366106
  chr12:122623827-122623990
  hypo

SEQ ID NO: 380230 - DNA, 64 bp, Homo sapiens; identical to SEQ ID NO: 351427
  chr12:122688584-122688648
  hypo

SEQ ID NO: 380231 - DNA, 123 bp, Homo sapiens; identical to SEQ ID NO: 341584
  chr12:122970391-122970514
  hypo

SEQ ID NO: 380232 - DNA, 551 bp, Homo sapiens; identical to SEQ ID NO: 334686
  chr12:123258823-123259374
  hypo

SEQ ID NO: 380233 - DNA, 303 bp, Homo sapiens; identical to SEQ ID NO: 341587
  chr12:123325625-123325928
  hypo

SEQ ID NO: 380234 - DNA, 473 bp, Homo sapiens; identical to SEQ ID NO: 334688
  chr12:123380333-123380806
  hypo

SEQ ID NO: 380235 - DNA, 255 bp, Homo sapiens; identical to SEQ ID NO: 341589
  chr12:123434339-123434594
  hypo

SEQ ID NO: 380236 - DNA, 203 bp, Homo sapiens; identical to SEQ ID NO: 341590
  chr12:123434957-123435160
  hypo

SEQ ID NO: 380237 - DNA, 112 bp, Homo sapiens; identical to SEQ ID NO: 341591
  chr12:123986845-123986957
  hypo

SEQ ID NO: 380238 - DNA, 202 bp, Homo sapiens; identical to SEQ ID NO: 354982
  chr12:123997867-123998069
  hypo

SEQ ID NO: 380239 - DNA, 158 bp, Homo sapiens; identical to SEQ ID NO: 341593
  chr12:124171347-124171505
  hypo

SEQ ID NO: 380240 - DNA, 192 bp, Homo sapiens; identical to SEQ ID NO: 341594
  chr12:124335343-124335535
  hypo

SEQ ID NO: 380241 - DNA, 151 bp, Homo sapiens
  chr12:124788624-124788775
  hypo
cgcgagaggcacttcccttgcccactccccaggctggctggagtccacagggcgccacgaccgtttcgatgttcgaatagccctgcagccagaaagacgaagctgcgagcctcaggatgaactggtggctgccaccatcttcccttggtgt

SEQ ID NO: 380242 - DNA, 84 bp, Homo sapiens; identical to SEQ ID NO: 341596
  chr12:124832004-124832088
  hypo

SEQ ID NO: 380243 - DNA, 642 bp, Homo sapiens; identical to SEQ ID NO: 316598
  chr12:124832318-124832960
  hypo

SEQ ID NO: 380244 - DNA, 257 bp, Homo sapiens; identical to SEQ ID NO: 354986
  chr12:124832990-124833247
  hypo

SEQ ID NO: 380245 - DNA, 286 bp, Homo sapiens; identical to SEQ ID NO: 341598
  chr12:124843509-124843795
  hypo

SEQ ID NO: 380246 - DNA, 723 bp, Homo sapiens; identical to SEQ ID NO: 354988
  chr12:124850157-124850880
  hypo

SEQ ID NO: 380247 - DNA, 170 bp, Homo sapiens; identical to SEQ ID NO: 366122
  chr12:124869706-124869876
  hypo

SEQ ID NO: 380248 - DNA, 326 bp, Homo sapiens; identical to SEQ ID NO: 366123
  chr12:124870152-124870478
  hypo

SEQ ID NO: 380249 - DNA, 250 bp, Homo sapiens; identical to SEQ ID NO: 366124
  chr12:124879871-124880121
  hypo

SEQ ID NO: 380250 - DNA, 220 bp, Homo sapiens; identical to SEQ ID NO: 341602
  chr12:124886252-124886472
  hypo

SEQ ID NO: 380251 - DNA, 73 bp, Homo sapiens; identical to SEQ ID NO: 366126
  chr12:124893329-124893402
  hypo

SEQ ID NO: 380252 - DNA, 188 bp, Homo sapiens; identical to SEQ ID NO: 366127
  chr12:124893570-124893758
  hypo

SEQ ID NO: 380253 - DNA, 178 bp, Homo sapiens; identical to SEQ ID NO: 354989
  chr12:124970986-124971164
  hypo

SEQ ID NO: 380254 - DNA, 703 bp, Homo sapiens; identical to SEQ ID NO: 341605
  chr12:124979300-124980003
  hypo

SEQ ID NO: 380255 - DNA, 32 bp, Homo sapiens; identical to SEQ ID NO: 366130
  chr12:124989213-124989245
  hypo

SEQ ID NO: 380256 - DNA, 123 bp, Homo sapiens
  chr12:125062713-125062836
  hypo
cggggccgagacaagcctgggcagggagaagggaagggagcccgtctgtgcctgtagcctgggcagggagaagggaagggagcccgtctgtgcctggaaaccaatttgctctggcagcgctgt

SEQ ID NO: 380257 - DNA, 79 bp, Homo sapiens
  chr12:125062887-125062966
  hypo
aaaggcacacactgcagtcttggagtgcatcctgctcttagggcctctgggggccaagtcaagccgatgaagggtgtgc

SEQ ID NO: 380258 - DNA, 108 bp, Homo sapiens; identical to SEQ ID NO: 366131
  chr12:125092496-125092604
  hypo

SEQ ID NO: 380259 - DNA, 139 bp, Homo sapiens; identical to SEQ ID NO: 354991
  chr12:125102589-125102728
  hypo

SEQ ID NO: 380260 - DNA, 150 bp, Homo sapiens; identical to SEQ ID NO: 354992
  chr12:125500633-125500783
  hypo

SEQ ID NO: 380261 - DNA, 286 bp, Homo sapiens; identical to SEQ ID NO: 341611
  chr12:125605555-125605841
  hypo

SEQ ID NO: 380262 - DNA, 146 bp, Homo sapiens; identical to SEQ ID NO: 360236
  chr12:126018005-126018151
  hypo

SEQ ID NO: 380263 - DNA, 33 bp, Homo sapiens; identical to SEQ ID NO: 360237
  chr12:126018265-126018298
  hypo

SEQ ID NO: 380264 - DNA, 122 bp, Homo sapiens; identical to SEQ ID NO: 341613
  chr12:128247754-128247876
  hypo

SEQ ID NO: 380265 - DNA, 46 bp, Homo sapiens; identical to SEQ ID NO: 341614
  chr12:128489355-128489401
  hypo

SEQ ID NO: 380266 - DNA, 405 bp, Homo sapiens; identical to SEQ ID NO: 360239
  chr12:128750713-128751118
  hypo

SEQ ID NO: 380267 - DNA, 150 bp, Homo sapiens; identical to SEQ ID NO: 354993
  chr12:128899867-128900017
  hypo

SEQ ID NO: 380268 - DNA, 229 bp, Homo sapiens; identical to SEQ ID NO: 366140
  chr12:129189650-129189879
  hypo

SEQ ID NO: 380269 - DNA, 205 bp, Homo sapiens; identical to SEQ ID NO: 215265
  chr12:129189909-129190114
  hypo

SEQ ID NO: 380270 - DNA, 63 bp, Homo sapiens; identical to SEQ ID NO: 366142
  chr12:129190144-129190207
  hypo

SEQ ID NO: 380271 - DNA, 152 bp, Homo sapiens; identical to SEQ ID NO: 354994
  chr12:130037501-130037653
  hypo

SEQ ID NO: 380272 - DNA, 483 bp, Homo sapiens; identical to SEQ ID NO: 354995
  chr12:130184247-130184730
  hypo

SEQ ID NO: 380273 - DNA, 91 bp, Homo sapiens; identical to SEQ ID NO: 354996
  chr12:130184760-130184851
  hypo

SEQ ID NO: 380274 - DNA, 183 bp, Homo sapiens
  chr12:130493339-130493522
  hypo
cgctttttcttaaaaacgtcctaaaggaactaagctccggccagcaccaccacctggagctgcaccgtgtctcccgcggcaggacaggagtccagaactccccttgtccctttgcccagttcccatcacgagaggggctggggtgggcaagcagtgggtatagcagcaggtgcggctaccctc

SEQ ID NO: 380275 - DNA, 263 bp, Homo sapiens; identical to SEQ ID NO: 351435
  chr12:130645806-130646069
  hypo

SEQ ID NO: 380276 - DNA, 71 bp, Homo sapiens; identical to SEQ ID NO: 341624
  chr12:130663584-130663655
  hypo

SEQ ID NO: 380277 - DNA, 160 bp, Homo sapiens; identical to SEQ ID NO: 341626
  chr12:130892190-130892350
  hypo

SEQ ID NO: 380278 - DNA, 73 bp, Homo sapiens; identical to SEQ ID NO: 354998
  chr12:130909511-130909584
  hypo

SEQ ID NO: 380279 - DNA, 475 bp, Homo sapiens; identical to SEQ ID NO: 354999
  chr12:130909737-130910212
  hypo

SEQ ID NO: 380280 - DNA, 573 bp, Homo sapiens; identical to SEQ ID NO: 341628
  chr12:130933888-130934461
  hypo

SEQ ID NO: 380281 - DNA, 40 bp, Homo sapiens
  chr12:131077283-131077323
  hypo
cgggggaccttggccgtggcgggccaatcagcctgcattt

SEQ ID NO: 380282 - DNA, 95 bp, Homo sapiens
  chr12:131077362-131077457
  hypo
caggcagggaaatcgggagcgggagagatggacagcgagctggtgaggatccgggctgcgatgtcgggagcggtgagagcgagcgcggcttccac

SEQ ID NO: 380283 - DNA, 429 bp, Homo sapiens; identical to SEQ ID NO: 341630
  chr12:131095743-131096172
  hypo

SEQ ID NO: 380284 - DNA, 229 bp, Homo sapiens; identical to SEQ ID NO: 341631
  chr12:131110936-131111165
  hypo

SEQ ID NO: 380285 - DNA, 78 bp, Homo sapiens; identical to SEQ ID NO: 348582
  chr12:131159367-131159445
  hypo

SEQ ID NO: 380286 - DNA, 260 bp, Homo sapiens; identical to SEQ ID NO: 215290
  chr12:131159530-131159790
  hypo

SEQ ID NO: 380287 - DNA, 174 bp, Homo sapiens; identical to SEQ ID NO: 341633
  chr12:131193281-131193455
  hypo

SEQ ID NO: 380288 - DNA, 394 bp, Homo sapiens; identical to SEQ ID NO: 355005
  chr12:131265535-131265929
  hypo

SEQ ID NO: 380289 - DNA, 198 bp, Homo sapiens; identical to SEQ ID NO: 366157
  chr12:131268482-131268680
  hypo

SEQ ID NO: 380290 - DNA, 236 bp, Homo sapiens; identical to SEQ ID NO: 346066
  chr12:131271740-131271976
  hypo

SEQ ID NO: 380291 - DNA, 298 bp, Homo sapiens; identical to SEQ ID NO: 316760
  chr12:131272032-131272330
  hypo

SEQ ID NO: 380292 - DNA, 1060 bp, Homo sapiens; identical to SEQ ID NO: 366160
  chr12:131272367-131273427
  hypo

SEQ ID NO: 380293 - DNA, 322 bp, Homo sapiens; identical to SEQ ID NO: 341637
  chr12:131288908-131289230
  hypo

SEQ ID NO: 380294 - DNA, 221 bp, Homo sapiens; identical to SEQ ID NO: 341638
  chr12:131314814-131315035
  hypo

SEQ ID NO: 380295 - DNA, 185 bp, Homo sapiens; identical to SEQ ID NO: 355009
  chr12:131418203-131418388
  hypo

SEQ ID NO: 380296 - DNA, 62 bp, Homo sapiens; identical to SEQ ID NO: 355010
  chr12:131418430-131418492
  hypo

SEQ ID NO: 380297 - DNA, 504 bp, Homo sapiens
  chr12:131478681-131479185
  hypo
cgcttccgggctccgaagggaaggacccgcggggtgttgggtggaaagagcgggtatagacaagctggaaggtccttatgcatgtatgcacaggaccgggcgtgaggccccgagacagggcttggtatgcagtaagtgctttattaatacgaacactcttgtttttgttgagatgggctacaaggggtgactgtggcaggcggtgccttctatgcagttagcacttagtaaacactcacactccgggcactagtgccctgcctgtagctaaggtatgcagtcggggcttcatgcccacttggcactggcaccctcccctctagccgtggtacacagtcggcgctcaataaacacccactctgggcacgggcgccctcccgtctgactagccatgggtaccctgcagcatcctcaggaatgtgcagcagacacttagcaggctccctctgtgtttccgggtgtctagggaaggagggagtccgagtgaggataaattaattagac

SEQ ID NO: 380298 - DNA, 105 bp, Homo sapiens; identical to SEQ ID NO: 355011
  chr12:131623219-131623324
  hypo

SEQ ID NO: 380299 - DNA, 145 bp, Homo sapiens; identical to SEQ ID NO: 215298
  chr12:131623397-131623542
  hypo

SEQ ID NO: 380300 - DNA, 153 bp, Homo sapiens
  chr12:132076273-132076426
  hypo
cgcagcccagtcaccagggccatgcggctccacggcttctacgcttgggcactgaggaccgaggggttcaatcaggtcccagctccagtccaaccttggaagccaagtgttgggaagggagcatccgaggacagacagagccagggcccctga

SEQ ID NO: 380301 - DNA, 623 bp, Homo sapiens; identical to SEQ ID NO: 366167
  chr12:132218722-132219345
  hypo

SEQ ID NO: 380302 - DNA, 129 bp, Homo sapiens; identical to SEQ ID NO: 348587
  chr12:132222124-132222253
  hypo

SEQ ID NO: 380303 - DNA, 267 bp, Homo sapiens; identical to SEQ ID NO: 341645
  chr12:132241778-132242045
  hypo

SEQ ID NO: 380304 - DNA, 325 bp, Homo sapiens; identical to SEQ ID NO: 341646
  chr12:132247422-132247747
  hypo

SEQ ID NO: 380305 - DNA, 234 bp, Homo sapiens; identical to SEQ ID NO: 341647
  chr12:132249441-132249675
  hypo

SEQ ID NO: 380306 - DNA, 200 bp, Homo sapiens; identical to SEQ ID NO: 341648
  chr12:132250682-132250882
  hypo

SEQ ID NO: 380307 - DNA, 311 bp, Homo sapiens; identical to SEQ ID NO: 341649
  chr12:132270193-132270504
  hypo

SEQ ID NO: 380308 - DNA, 107 bp, Homo sapiens; identical to SEQ ID NO: 351437
  chr12:132312451-132312558
  hypo

SEQ ID NO: 380309 - DNA, 91 bp, Homo sapiens; identical to SEQ ID NO: 366174
  chr12:132329469-132329560
  hypo

SEQ ID NO: 380310 - DNA, 109 bp, Homo sapiens; identical to SEQ ID NO: 346069
  chr12:132378083-132378192
  hypo

SEQ ID NO: 380311 - DNA, 99 bp, Homo sapiens; identical to SEQ ID NO: 341656
  chr12:132411621-132411720
  hypo

SEQ ID NO: 380312 - DNA, 173 bp, Homo sapiens; identical to SEQ ID NO: 355019
  chr12:132423854-132424027
  hypo

SEQ ID NO: 380313 - DNA, 176 bp, Homo sapiens; identical to SEQ ID NO: 341658
  chr12:132504709-132504885
  hypo

SEQ ID NO: 380314 - DNA, 816 bp, Homo sapiens; identical to SEQ ID NO: 341659
  chr12:132536813-132537629
  hypo

SEQ ID NO: 380315 - DNA, 245 bp, Homo sapiens
  chr12:132592879-132593124
  hypo
cggccacagatcgaggtttcaactggacttcaaacaaagcttcagtgcctagggccagatttgttctttccagccctgtgaggcctgaaattgcatcagcgagccaagtgtccccgtgcccctctgttagtggctgaggccgccagctgcatgggatgtgcaggcggtgatcaactttgcaaagcttaaacattattttcccttcttcctcccttccctttgaatattccctctcaggtaaaggt

SEQ ID NO: 380316 - DNA, 280 bp, Homo sapiens; identical to SEQ ID NO: 341661
  chr12:132603391-132603671
  hypo

SEQ ID NO: 380317 - DNA, 65 bp, Homo sapiens; identical to SEQ ID NO: 366180
  chr12:132617118-132617183
  hypo

SEQ ID NO: 380318 - DNA, 159 bp, Homo sapiens; identical to SEQ ID NO: 366181
  chr12:132643296-132643455
  hypo

SEQ ID NO: 380319 - DNA, 320 bp, Homo sapiens; identical to SEQ ID NO: 215334
  chr12:132643525-132643845
  hypo

SEQ ID NO: 380320 - DNA, 92 bp, Homo sapiens; identical to SEQ ID NO: 366183
  chr12:132644008-132644100
  hypo

SEQ ID NO: 380321 - DNA, 424 bp, Homo sapiens; identical to SEQ ID NO: 366184
  chr12:132665953-132666377
  hypo

SEQ ID NO: 380322 - DNA, 86 bp, Homo sapiens; identical to SEQ ID NO: 366185
  chr12:132666502-132666588
  hypo

SEQ ID NO: 380323 - DNA, 126 bp, Homo sapiens; identical to SEQ ID NO: 341665
  chr12:132675105-132675231
  hypo

SEQ ID NO: 380324 - DNA, 209 bp, Homo sapiens; identical to SEQ ID NO: 366187
  chr12:132983184-132983393
  hypo

SEQ ID NO: 380325 - DNA, 224 bp, Homo sapiens; identical to SEQ ID NO: 366188
  chr12:132983766-132983990
  hypo

SEQ ID NO: 380326 - DNA, 177 bp, Homo sapiens; identical to SEQ ID NO: 366189
  chr12:132986274-132986451
  hypo

SEQ ID NO: 380327 - DNA, 268 bp, Homo sapiens; identical to SEQ ID NO: 366190
  chr12:132986701-132986969
  hypo

SEQ ID NO: 380328 - DNA, 136 bp, Homo sapiens; identical to SEQ ID NO: 341669
  chr12:133097814-133097950
  hypo

SEQ ID NO: 380329 - DNA, 477 bp, Homo sapiens; identical to SEQ ID NO: 215344
  chr12:133101020-133101497
  hypo

SEQ ID NO: 380330 - DNA, 497 bp, Homo sapiens; identical to SEQ ID NO: 366193
  chr12:133101527-133102024
  hypo

SEQ ID NO: 380331 - DNA, 413 bp, Homo sapiens; identical to SEQ ID NO: 341671
  chr12:133111693-133112106
  hypo

SEQ ID NO: 380332 - DNA, 500 bp, Homo sapiens; identical to SEQ ID NO: 366195
  chr12:133121644-133122144
  hypo

SEQ ID NO: 380333 - DNA, 915 bp, Homo sapiens; identical to SEQ ID NO: 341673
  chr12:133147764-133148679
  hypo

SEQ ID NO: 380334 - DNA, 179 bp, Homo sapiens; identical to SEQ ID NO: 355023
  chr12:133199822-133200001
  hypo

SEQ ID NO: 380335 - DNA, 226 bp, Homo sapiens; identical to SEQ ID NO: 355024
  chr12:133200090-133200316
  hypo

SEQ ID NO: 380336 - DNA, 135 bp, Homo sapiens; identical to SEQ ID NO: 355025
  chr12:133280443-133280578
  hypo

SEQ ID NO: 380337 - DNA, 479 bp, Homo sapiens; identical to SEQ ID NO: 334707
  chr12:133286733-133287212
  hypo

SEQ ID NO: 380338 - DNA, 1071 bp, Homo sapiens; identical to SEQ ID NO: 341677
  chr12:133353501-133354572
  hypo

SEQ ID NO: 380339 - DNA, 243 bp, Homo sapiens; identical to SEQ ID NO: 341678
  chr12:133393414-133393657
  hypo

SEQ ID NO: 380340 - DNA, 358 bp, Homo sapiens; identical to SEQ ID NO: 341680
  chr12:133435596-133435954
  hypo

SEQ ID NO: 380341 - DNA, 237 bp, Homo sapiens; identical to SEQ ID NO: 203265
  chr12:133464166-133464403
  hypo

SEQ ID NO: 380342 - DNA, 218 bp, Homo sapiens; identical to SEQ ID NO: 203266
  chr12:133464555-133464773
  hypo

SEQ ID NO: 380343 - DNA, 261 bp, Homo sapiens; identical to SEQ ID NO: 355030
  chr13:20392445-20392706
  hypo

SEQ ID NO: 380344 - DNA, 167 bp, Homo sapiens; identical to SEQ ID NO: 345438
  chr13:20735265-20735432
  hypo

SEQ ID NO: 380345 - DNA, 506 bp, Homo sapiens; identical to SEQ ID NO: 341686
  chr13:20979799-20980305
  hypo

SEQ ID NO: 380346 - DNA, 144 bp, Homo sapiens; identical to SEQ ID NO: 341687
  chr13:21407292-21407436
  hypo

SEQ ID NO: 380347 - DNA, 142 bp, Homo sapiens; identical to SEQ ID NO: 351449
  chr13:22243864-22244006
  hypo

SEQ ID NO: 380348 - DNA, 536 bp, Homo sapiens; identical to SEQ ID NO: 373227
  chr13:22244073-22244609
  hypo

SEQ ID NO: 380349 - DNA, 783 bp, Homo sapiens; identical to SEQ ID NO: 334723
  chr13:24734971-24735754
  hypo

SEQ ID NO: 380350 - DNA, 190 bp, Homo sapiens; identical to SEQ ID NO: 341693
  chr13:25026495-25026685
  hypo

SEQ ID NO: 380351 - DNA, 81 bp, Homo sapiens; identical to SEQ ID NO: 203288
  chr13:25746000-25746081
  hypo

SEQ ID NO: 380352 - DNA, 40 bp, Homo sapiens; identical to SEQ ID NO: 341698
  chr13:28152529-28152569
  hypo

SEQ ID NO: 380353 - DNA, 123 bp, Homo sapiens; identical to SEQ ID NO: 341702
  chr13:28745545-28745668
  hypo

SEQ ID NO: 380354 - DNA, 243 bp, Homo sapiens; identical to SEQ ID NO: 341703
  chr13:28745848-28746091
  hypo

SEQ ID NO: 380355 - DNA, 200 bp, Homo sapiens; identical to SEQ ID NO: 345441
  chr13:29292491-29292691
  hypo

SEQ ID NO: 380356 - DNA, 242 bp, Homo sapiens; identical to SEQ ID NO: 345442
  chr13:29293342-29293584
  hypo

SEQ ID NO: 380357 - DNA, 147 bp, Homo sapiens
  chr13:29913861-29914008
  hypo
cgggcatagtcccagttgggaggagcggtgaggaggggccgggtgcggacccagcgcttcccattgacgtagacgactttgcagccatccttgacctgggagcggagaaggggcctggaccgcaaggcccggtgtttctgggattgg

SEQ ID NO: 380358 - DNA, 199 bp, Homo sapiens; identical to SEQ ID NO: 341709
  chr13:30079657-30079856
  hypo

SEQ ID NO: 380359 - DNA, 282 bp, Homo sapiens; identical to SEQ ID NO: 366215
  chr13:30107122-30107404
  hypo

SEQ ID NO: 380360 - DNA, 100 bp, Homo sapiens; identical to SEQ ID NO: 346075
  chr13:30123381-30123481
  hypo

SEQ ID NO: 380361 - DNA, 309 bp, Homo sapiens; identical to SEQ ID NO: 355041
  chr13:30707770-30708079
  hypo

SEQ ID NO: 380362 - DNA, 52 bp, Homo sapiens; identical to SEQ ID NO: 341713
  chr13:30910073-30910125
  hypo

SEQ ID NO: 380363 - DNA, 242 bp, Homo sapiens; identical to SEQ ID NO: 341714
  chr13:31002082-31002324
  hypo

SEQ ID NO: 380364 - DNA, 165 bp, Homo sapiens; identical to SEQ ID NO: 355043
  chr13:32526656-32526821
  hypo

SEQ ID NO: 380365 - DNA, 237 bp, Homo sapiens; identical to SEQ ID NO: 341717
  chr13:32885424-32885661
  hypo

SEQ ID NO: 380366 - DNA, 116 bp, Homo sapiens; identical to SEQ ID NO: 341718
  chr13:32983242-32983358
  hypo

SEQ ID NO: 380367 - DNA, 177 bp, Homo sapiens; identical to SEQ ID NO: 351461
  chr13:33000891-33001068
  hypo

SEQ ID NO: 380368 - DNA, 204 bp, Homo sapiens; identical to SEQ ID NO: 351462
  chr13:33001228-33001432
  hypo

SEQ ID NO: 380369 - DNA, 257 bp, Homo sapiens
  chr13:36788459-36788716
  hypo
cgcgtcctggaaggggcccttcctgctattcgctccccacagttccccgacaatgagagctccccaggccgggctttgagggccgaggggaccaccgacctagggcccgcccgcgaggttataaacgcagctgcctccccttccacagcctcttacctggcccgagatctggcagtgctcctggcagataattgaggaagccatggccgctgcgcacgtgctgggtcctggggcagcctcccagcaggaggagctcc

SEQ ID NO: 380370 - DNA, 291 bp, Homo sapiens
  chr13:36788746-36789037
  hypo
cactaatggctcctggccgcagctgagggcgagcacgccccaggcgcccttaaagtggccctgtcgccagttctggcgcgtgggggagcagcaggccgctctgaggggtcaacgcggaacccgggtcgggggcctgcccgcgggggctactcaagctgtcctgggggcccttaggagaccgcgtcactagctgactgcgcactccaagtccccttcccagggcagctctcacgacactaagccccgcgtactcactcccactgcgccgcctggggaggcgggaggcaaggc

SEQ ID NO: 380371 - DNA, 85 bp, Homo sapiens; identical to SEQ ID NO: 348601
  chr13:37643604-37643689
  hypo

SEQ ID NO: 380372 - DNA, 347 bp, Homo sapiens; identical to SEQ ID NO: 341723
  chr13:37679456-37679803
  hypo

SEQ ID NO: 380373 - DNA, 199 bp, Homo sapiens; identical to SEQ ID NO: 334756
  chr13:41364049-41364248
  hypo

SEQ ID NO: 380374 - DNA, 91 bp, Homo sapiens; identical to SEQ ID NO: 341725
  chr13:41453098-41453189
  hypo

SEQ ID NO: 380375 - DNA, 479 bp, Homo sapiens; identical to SEQ ID NO: 347264
  chr13:42032017-42032496
  hypo

SEQ ID NO: 380376 - DNA, 109 bp, Homo sapiens; identical to SEQ ID NO: 347265
  chr13:42032649-42032758
  hypo

SEQ ID NO: 380377 - DNA, 112 bp, Homo sapiens; identical to SEQ ID NO: 366229
  chr13:43543227-43543339
  hypo

SEQ ID NO: 380378 - DNA, 86 bp, Homo sapiens; identical to SEQ ID NO: 341729
  chr13:43620991-43621077
  hypo

SEQ ID NO: 380379 - DNA, 284 bp, Homo sapiens; identical to SEQ ID NO: 334760
  chr13:44544261-44544545
  hypo

SEQ ID NO: 380380 - DNA, 64 bp, Homo sapiens; identical to SEQ ID NO: 341731
  chr13:44981967-44982031
  hypo

SEQ ID NO: 380381 - DNA, 146 bp, Homo sapiens
  chr13:45926346-45926492
  hypo
gggaaggtggagcagtcatgactcaggcttcgggagcctcaggctcgcagctacaggcttatacacactcacatcaaatgctaatggggcccgagtcagaaagaaattagccagactaagaaaaacaagactttggaaatataaac

SEQ ID NO: 380382 - DNA, 83 bp, Homo sapiens; identical to SEQ ID NO: 341733
  chr13:45953018-45953101
  hypo

SEQ ID NO: 380383 - DNA, 72 bp, Homo sapiens; identical to SEQ ID NO: 341735
  chr13:46948519-46948591
  hypo

SEQ ID NO: 380384 - DNA, 298 bp, Homo sapiens; identical to SEQ ID NO: 341736
  chr13:49879457-49879755
  hypo

SEQ ID NO: 380385 - DNA, 123 bp, Homo sapiens; identical to SEQ ID NO: 341737
  chr13:50027700-50027823
  hypo

SEQ ID NO: 380386 - DNA, 97 bp, Homo sapiens; identical to SEQ ID NO: 341738
  chr13:50050867-50050964
  hypo

SEQ ID NO: 380387 - DNA, 141 bp, Homo sapiens; identical to SEQ ID NO: 341739
  chr13:52335934-52336075
  hypo

SEQ ID NO: 380388 - DNA, 89 bp, Homo sapiens; identical to SEQ ID NO: 341740
  chr13:52343302-52343391
  hypo

SEQ ID NO: 380389 - DNA, 82 bp, Homo sapiens; identical to SEQ ID NO: 341741
  chr13:52493838-52493920
  hypo

SEQ ID NO: 380390 - DNA, 73 bp, Homo sapiens; identical to SEQ ID NO: 341743
  chr13:60267291-60267364
  hypo

SEQ ID NO: 380391 - DNA, 299 bp, Homo sapiens
  chr13:68343652-68343951
  hypo
cgctgaccgaccagggttgctctcctcgctcggccctgcaggctgcactcgactcgtgccaccaacccagatcctgtgcctgctgtggctctgcactcagcccacgggctggaccaggcgtgccgccagcggcttccaccttgggcacccgcatctagatgagcggaagttggtggtgcctgaaaacagggatgccagcaaccgtgaagcctggggagtcctgagagctgagcccctaagaaatgttatggctgctgtagttcagcgagcagcagggaatggcgcccagtggctttttc

SEQ ID NO: 380392 - DNA, 43 bp, Homo sapiens
  chr13:68344002-68344045
  hypo
gggcgcgtgttacagctttcctgctcccgctgccccacagctc

SEQ ID NO: 380393 - DNA, 54 bp, Homo sapiens; identical to SEQ ID NO: 341745
  chr13:73324122-73324176
  hypo

SEQ ID NO: 380394 - DNA, 61 bp, Homo sapiens; identical to SEQ ID NO: 366241
  chr13:73809567-73809628
  hypo

SEQ ID NO: 380395 - DNA, 216 bp, Homo sapiens; identical to SEQ ID NO: 341747
  chr13:74269514-74269730
  hypo

SEQ ID NO: 380396 - DNA, 915 bp, Homo sapiens; identical to SEQ ID NO: 351487
  chr13:74707668-74708583
  hypo

SEQ ID NO: 380397 - DNA, 130 bp, Homo sapiens; identical to SEQ ID NO: 341749
  chr13:76352659-76352789
  hypo

SEQ ID NO: 380398 - DNA, 111 bp, Homo sapiens; identical to SEQ ID NO: 360314
  chr13:77459256-77459367
  hypo

SEQ ID NO: 380399 - DNA, 718 bp, Homo sapiens; identical to SEQ ID NO: 347268
  chr13:77459628-77460346
  hypo

SEQ ID NO: 380400 - DNA, 425 bp, Homo sapiens; identical to SEQ ID NO: 360317
  chr13:78272232-78272657
  hypo

SEQ ID NO: 380401 - DNA, 287 bp, Homo sapiens; identical to SEQ ID NO: 203409
  chr13:95201339-95201626
  hypo

SEQ ID NO: 380402 - DNA, 229 bp, Homo sapiens; identical to SEQ ID NO: 203410
  chr13:95201662-95201891
  hypo

SEQ ID NO: 380403 - DNA, 387 bp, Homo sapiens; identical to SEQ ID NO: 373304
  chr13:95360413-95360800
  hypo

SEQ ID NO: 380404 - DNA, 438 bp, Homo sapiens; identical to SEQ ID NO: 341762
  chr13:96085837-96086275
  hypo

SEQ ID NO: 380405 - DNA, 73 bp, Homo sapiens; identical to SEQ ID NO: 355060
  chr13:96409644-96409717
  hypo

SEQ ID NO: 380406 - DNA, 601 bp, Homo sapiens; identical to SEQ ID NO: 334802
  chr13:96705328-96705929
  hypo

SEQ ID NO: 380407 - DNA, 152 bp, Homo sapiens; identical to SEQ ID NO: 366252
  chr13:98829232-98829384
  hypo

SEQ ID NO: 380408 - DNA, 351 bp, Homo sapiens; identical to SEQ ID NO: 348609
  chr13:98869699-98870050
  hypo

SEQ ID NO: 380409 - DNA, 220 bp, Homo sapiens; identical to SEQ ID NO: 348610
  chr13:98870098-98870318
  hypo

SEQ ID NO: 380410 - DNA, 234 bp, Homo sapiens; identical to SEQ ID NO: 355064
  chr13:99034903-99035137
  hypo

SEQ ID NO: 380411 - DNA, 355 bp, Homo sapiens; identical to SEQ ID NO: 355065
  chr13:99104223-99104578
  hypo

SEQ ID NO: 380412 - DNA, 82 bp, Homo sapiens; identical to SEQ ID NO: 341769
  chr13:99115936-99116018
  hypo

SEQ ID NO: 380413 - DNA, 97 bp, Homo sapiens; identical to SEQ ID NO: 355067
  chr13:99851706-99851803
  hypo

SEQ ID NO: 380414 - DNA, 105 bp, Homo sapiens; identical to SEQ ID NO: 341771
  chr13:100068654-100068759
  hypo

SEQ ID NO: 380415 - DNA, 55 bp, Homo sapiens; identical to SEQ ID NO: 360330
  chr13:100620289-100620344
  hypo

SEQ ID NO: 380416 - DNA, 111 bp, Homo sapiens; identical to SEQ ID NO: 289869
  chr13:100620374-100620485
  hypo

SEQ ID NO: 380417 - DNA, 105 bp, Homo sapiens; identical to SEQ ID NO: 203424
  chr13:100620515-100620620
  hypo

SEQ ID NO: 380418 - DNA, 575 bp, Homo sapiens; identical to SEQ ID NO: 289878
  chr13:100632514-100633089
  hypo

SEQ ID NO: 380419 - DNA, 36 bp, Homo sapiens; identical to SEQ ID NO: 289879
  chr13:100633184-100633220
  hypo

SEQ ID NO: 380420 - DNA, 146 bp, Homo sapiens; identical to SEQ ID NO: 360339
  chr13:100634131-100634277
  hypo

SEQ ID NO: 380421 - DNA, 219 bp, Homo sapiens; identical to SEQ ID NO: 341777
  chr13:101194483-101194702
  hypo

SEQ ID NO: 380422 - DNA, 126 bp, Homo sapiens; identical to SEQ ID NO: 351499
  chr13:103046539-103046665
  hypo

SEQ ID NO: 380423 - DNA, 617 bp, Homo sapiens; identical to SEQ ID NO: 341781
  chr13:106912373-106912990
  hypo

SEQ ID NO: 380424 - DNA, 240 bp, Homo sapiens; identical to SEQ ID NO: 203444
  chr13:107187426-107187666
  hypo

SEQ ID NO: 380425 - DNA, 546 bp, Homo sapiens; identical to SEQ ID NO: 203445
  chr13:107187695-107188241
  hypo

SEQ ID NO: 380426 - DNA, 308 bp, Homo sapiens; identical to SEQ ID NO: 203446
  chr13:107188430-107188738
  hypo

SEQ ID NO: 380427 - DNA, 279 bp, Homo sapiens; identical to SEQ ID NO: 203447
  chr13:107188808-107189087
  hypo

SEQ ID NO: 380428 - DNA, 58 bp, Homo sapiens; identical to SEQ ID NO: 203450
  chr13:108519564-108519622
  hypo

SEQ ID NO: 380429 - DNA, 165 bp, Homo sapiens; identical to SEQ ID NO: 203451
  chr13:108519932-108520097
  hypo

SEQ ID NO: 380430 - DNA, 67 bp, Homo sapiens; identical to SEQ ID NO: 203452
  chr13:108520309-108520376
  hypo

SEQ ID NO: 380431 - DNA, 33 bp, Homo sapiens; identical to SEQ ID NO: 203453
  chr13:108520946-108520979
  hypo

SEQ ID NO: 380432 - DNA, 181 bp, Homo sapiens; identical to SEQ ID NO: 341786
  chr13:110008382-110008563
  hypo

SEQ ID NO: 380433 - DNA, 95 bp, Homo sapiens; identical to SEQ ID NO: 355075
  chr13:110486576-110486671
  hypo

SEQ ID NO: 380434 - DNA, 199 bp, Homo sapiens; identical to SEQ ID NO: 341790
  chr13:111006048-111006247
  hypo

SEQ ID NO: 380435 - DNA, 400 bp, Homo sapiens; identical to SEQ ID NO: 355076
  chr13:111277855-111278255
  hypo

SEQ ID NO: 380436 - DNA, 278 bp, Homo sapiens; identical to SEQ ID NO: 355077
  chr13:111278426-111278704
  hypo

SEQ ID NO: 380437 - DNA, 139 bp, Homo sapiens; identical to SEQ ID NO: 366275
  chr13:111289028-111289167
  hypo

SEQ ID NO: 380438 - DNA, 269 bp, Homo sapiens; identical to SEQ ID NO: 355078
  chr13:111330283-111330552
  hypo

SEQ ID NO: 380439 - DNA, 37 bp, Homo sapiens; identical to SEQ ID NO: 215584
  chr13:111363843-111363880
  hypo

SEQ ID NO: 380440 - DNA, 687 bp, Homo sapiens; identical to SEQ ID NO: 341795
  chr13:111880810-111881497
  hypo

SEQ ID NO: 380441 - DNA, 77 bp, Homo sapiens; identical to SEQ ID NO: 341796
  chr13:111911450-111911527
  hypo

SEQ ID NO: 380442 - DNA, 95 bp, Homo sapiens; identical to SEQ ID NO: 366278
  chr13:111978023-111978118
  hypo

SEQ ID NO: 380443 - DNA, 195 bp, Homo sapiens; identical to SEQ ID NO: 341798
  chr13:112022971-112023166
  hypo

SEQ ID NO: 380444 - DNA, 53 bp, Homo sapiens; identical to SEQ ID NO: 355081
  chr13:112690683-112690736
  hypo

SEQ ID NO: 380445 - DNA, 204 bp, Homo sapiens; identical to SEQ ID NO: 341800
  chr13:112691506-112691710
  hypo

SEQ ID NO: 380446 - DNA, 141 bp, Homo sapiens; identical to SEQ ID NO: 341802
  chr13:112786406-112786547
  hypo

SEQ ID NO: 380447 - DNA, 441 bp, Homo sapiens
  chr13:113098840-113099281
  hypo
cgggggtctgggaccgtgcctcaccacgggatctgtgtacacagcgatgcacccagcgtacgcgggcccttccctctgagccctcggcccctcatctgcaggatgggtgagccctggagaagcgggcagaagcagaggaggcagcgaacgcagagcatgtggcctgtgactgagcctagaaagtccgctcggcaacagaggctgcaatccagaaagccccctcggtgacagaggctacaatctagaaagctcgctcagcgacagaggctaccacctagaaagcctgctcggcgacagacactacaatctagacagcccatttggcgacagtggctacaacccagacagcccgctcagcaacagtgtctatgatctagaaagctccctcggcaacagcagctgtcatctagaaagcccgctcagcgacagaggccacaatct

SEQ ID NO: 380448 - DNA, 110 bp, Homo sapiens
  chr13:113099323-113099433
  hypo
tctcagtgacagtggctatgatcgctcgcaactctggcccctggctctgttggtcaagcctgccacagcccggaagcctctgcagcctccctgttgctgctgaaaaggac

SEQ ID NO: 380449 - DNA, 193 bp, Homo sapiens; identical to SEQ ID NO: 341805
  chr13:113233687-113233880
  hypo

SEQ ID NO: 380450 - DNA, 123 bp, Homo sapiens; identical to SEQ ID NO: 341806
  chr13:113244578-113244701
  hypo

SEQ ID NO: 380451 - DNA, 191 bp, Homo sapiens; identical to SEQ ID NO: 341807
  chr13:113255726-113255917
  hypo

SEQ ID NO: 380452 - DNA, 134 bp, Homo sapiens; identical to SEQ ID NO: 341808
  chr13:113274734-113274868
  hypo

SEQ ID NO: 380453 - DNA, 282 bp, Homo sapiens; identical to SEQ ID NO: 341809
  chr13:113291506-113291788
  hypo

SEQ ID NO: 380454 - DNA, 34 bp, Homo sapiens; identical to SEQ ID NO: 366286
  chr13:113350364-113350398
  hypo

SEQ ID NO: 380455 - DNA, 647 bp, Homo sapiens; identical to SEQ ID NO: 366287
  chr13:113350643-113351290
  hypo

SEQ ID NO: 380456 - DNA, 137 bp, Homo sapiens; identical to SEQ ID NO: 341811
  chr13:113369414-113369551
  hypo

SEQ ID NO: 380457 - DNA, 251 bp, Homo sapiens; identical to SEQ ID NO: 341812
  chr13:113379254-113379505
  hypo

SEQ ID NO: 380458 - DNA, 318 bp, Homo sapiens; identical to SEQ ID NO: 366290
  chr13:113383516-113383834
  hypo

SEQ ID NO: 380459 - DNA, 233 bp, Homo sapiens; identical to SEQ ID NO: 366291
  chr13:113400167-113400400
  hypo

SEQ ID NO: 380460 - DNA, 101 bp, Homo sapiens; identical to SEQ ID NO: 366292
  chr13:113400733-113400834
  hypo

SEQ ID NO: 380461 - DNA, 91 bp, Homo sapiens; identical to SEQ ID NO: 341815
  chr13:113413685-113413776
  hypo

SEQ ID NO: 380462 - DNA, 133 bp, Homo sapiens; identical to SEQ ID NO: 355085
  chr13:113424750-113424883
  hypo

SEQ ID NO: 380463 - DNA, 68 bp, Homo sapiens; identical to SEQ ID NO: 355086
  chr13:113424935-113425003
  hypo

SEQ ID NO: 380464 - DNA, 183 bp, Homo sapiens; identical to SEQ ID NO: 341817
  chr13:113461159-113461342
  hypo

SEQ ID NO: 380465 - DNA, 306 bp, Homo sapiens; identical to SEQ ID NO: 341818
  chr13:113477621-113477927
  hypo

SEQ ID NO: 380466 - DNA, 535 bp, Homo sapiens; identical to SEQ ID NO: 341819
  chr13:113497181-113497716
  hypo

SEQ ID NO: 380467 - DNA, 162 bp, Homo sapiens; identical to SEQ ID NO: 341820
  chr13:113507123-113507285
  hypo

SEQ ID NO: 380468 - DNA, 146 bp, Homo sapiens; identical to SEQ ID NO: 355089
  chr13:113508784-113508930
  hypo

SEQ ID NO: 380469 - DNA, 258 bp, Homo sapiens; identical to SEQ ID NO: 341822
  chr13:113554079-113554337
  hypo

SEQ ID NO: 380470 - DNA, 319 bp, Homo sapiens; identical to SEQ ID NO: 341824
  chr13:113627865-113628184
  hypo

SEQ ID NO: 380471 - DNA, 288 bp, Homo sapiens; identical to SEQ ID NO: 366302
  chr13:113667314-113667602
  hypo

SEQ ID NO: 380472 - DNA, 241 bp, Homo sapiens; identical to SEQ ID NO: 341827
  chr13:113796043-113796284
  hypo

SEQ ID NO: 380473 - DNA, 177 bp, Homo sapiens; identical to SEQ ID NO: 348613
  chr13:113797753-113797930
  hypo

SEQ ID NO: 380474 - DNA, 112 bp, Homo sapiens; identical to SEQ ID NO: 348614
  chr13:113797960-113798072
  hypo

SEQ ID NO: 380475 - DNA, 120 bp, Homo sapiens; identical to SEQ ID NO: 366306
  chr13:113825842-113825962
  hypo

SEQ ID NO: 380476 - DNA, 173 bp, Homo sapiens; identical to SEQ ID NO: 366307
  chr13:113825992-113826165
  hypo

SEQ ID NO: 380477 - DNA, 93 bp, Homo sapiens; identical to SEQ ID NO: 341830
  chr13:113887577-113887670
  hypo

SEQ ID NO: 380478 - DNA, 51 bp, Homo sapiens; identical to SEQ ID NO: 366309
  chr13:113984308-113984359
  hypo

SEQ ID NO: 380479 - DNA, 86 bp, Homo sapiens; identical to SEQ ID NO: 366310
  chr13:113984409-113984495
  hypo

SEQ ID NO: 380480 - DNA, 44 bp, Homo sapiens; identical to SEQ ID NO: 366311
  chr13:113985425-113985469
  hypo

SEQ ID NO: 380481 - DNA, 228 bp, Homo sapiens; identical to SEQ ID NO: 203467
  chr13:114017991-114018219
  hypo

SEQ ID NO: 380482 - DNA, 279 bp, Homo sapiens; identical to SEQ ID NO: 366313
  chr13:114055661-114055940
  hypo

SEQ ID NO: 380483 - DNA, 357 bp, Homo sapiens; identical to SEQ ID NO: 317653
  chr13:114056151-114056508
  hypo

SEQ ID NO: 380484 - DNA, 32 bp, Homo sapiens; identical to SEQ ID NO: 366315
  chr13:114056544-114056576
  hypo

SEQ ID NO: 380485 - DNA, 130 bp, Homo sapiens
  chr13:114107410-114107540
  hypo
cggtatcaggtaacaccatccgctgaaggaccgcactgccttcaaagctctcggaggcttactgggagaactcgagcagccagtgttccctccagcccgcacaccggagcgcggtgggcccagcctacct

SEQ ID NO: 380486 - DNA, 69 bp, Homo sapiens; identical to SEQ ID NO: 215673
  chr13:114108040-114108109
  hypo

SEQ ID NO: 380487 - DNA, 163 bp, Homo sapiens; identical to SEQ ID NO: 355095
  chr13:114123291-114123454
  hypo

SEQ ID NO: 380488 - DNA, 38 bp, Homo sapiens; identical to SEQ ID NO: 346080
  chr13:114188365-114188403
  hypo

SEQ ID NO: 380489 - DNA, 46 bp, Homo sapiens; identical to SEQ ID NO: 348616
  chr13:114189691-114189737
  hypo

SEQ ID NO: 380490 - DNA, 303 bp, Homo sapiens; identical to SEQ ID NO: 215680
  chr13:114189809-114190112
  hypo

SEQ ID NO: 380491 - DNA, 278 bp, Homo sapiens; identical to SEQ ID NO: 348618
  chr13:114190142-114190420
  hypo

SEQ ID NO: 380492 - DNA, 189 bp, Homo sapiens; identical to SEQ ID NO: 366321
  chr13:114193080-114193269
  hypo

SEQ ID NO: 380493 - DNA, 161 bp, Homo sapiens; identical to SEQ ID NO: 346081
  chr13:114271763-114271924
  hypo

SEQ ID NO: 380494 - DNA, 932 bp, Homo sapiens; identical to SEQ ID NO: 366323
  chr13:114283923-114284855
  hypo

SEQ ID NO: 380495 - DNA, 677 bp, Homo sapiens; identical to SEQ ID NO: 341846
  chr13:114293940-114294617
  hypo

SEQ ID NO: 380496 - DNA, 39 bp, Homo sapiens; identical to SEQ ID NO: 341847
  chr13:114294965-114295004
  hypo

SEQ ID NO: 380497 - DNA, 131 bp, Homo sapiens; identical to SEQ ID NO: 341848
  chr13:114295766-114295897
  hypo

SEQ ID NO: 380498 - DNA, 221 bp, Homo sapiens; identical to SEQ ID NO: 341849
  chr13:114300515-114300736
  hypo

SEQ ID NO: 380499 - DNA, 206 bp, Homo sapiens; identical to SEQ ID NO: 348620
  chr13:114302352-114302558
  hypo

SEQ ID NO: 380500 - DNA, 115 bp, Homo sapiens; identical to SEQ ID NO: 341851
  chr13:114302660-114302775
  hypo

SEQ ID NO: 380501 - DNA, 284 bp, Homo sapiens; identical to SEQ ID NO: 366328
  chr13:114303512-114303796
  hypo

SEQ ID NO: 380502 - DNA, 169 bp, Homo sapiens
  chr13:114305760-114305929
  hypo
tctggaagccaaacaataagaaaaagccccattgtttcccttgctgggttttacccgccatggtggagctcgctgtggtgatggttcggtgtttacgtctggtttactgggccgacggctgacattcctggagagaaccaggtgggccgtgcccagcatgaaccagcac

SEQ ID NO: 380503 - DNA, 61 bp, Homo sapiens; identical to SEQ ID NO: 355103
  chr13:114502726-114502787
  hypo

SEQ ID NO: 380504 - DNA, 168 bp, Homo sapiens; identical to SEQ ID NO: 366330
  chr13:114504658-114504826
  hypo

SEQ ID NO: 380505 - DNA, 218 bp, Homo sapiens; identical to SEQ ID NO: 366331
  chr13:114537027-114537245
  hypo

SEQ ID NO: 380506 - DNA, 302 bp, Homo sapiens; identical to SEQ ID NO: 347277
  chr13:114565969-114566271
  hypo

SEQ ID NO: 380507 - DNA, 114 bp, Homo sapiens; identical to SEQ ID NO: 347278
  chr13:114566409-114566523
  hypo

SEQ ID NO: 380508 - DNA, 150 bp, Homo sapiens; identical to SEQ ID NO: 355106
  chr13:114616940-114617090
  hypo

SEQ ID NO: 380509 - DNA, 148 bp, Homo sapiens; identical to SEQ ID NO: 341862
  chr13:114617363-114617511
  hypo

SEQ ID NO: 380510 - DNA, 74 bp, Homo sapiens; identical to SEQ ID NO: 341863
  chr13:114747445-114747519
  hypo

SEQ ID NO: 380511 - DNA, 138 bp, Homo sapiens; identical to SEQ ID NO: 348623
  chr13:114748186-114748324
  hypo

SEQ ID NO: 380512 - DNA, 307 bp, Homo sapiens; identical to SEQ ID NO: 317732
  chr13:114751053-114751360
  hypo

SEQ ID NO: 380513 - DNA, 97 bp, Homo sapiens
  chr13:114766173-114766270
  hypo
cgcggccccgggctctgcccgcagcactgaatccttcctcccctcagctctccccctgaaaaagcagactcagtcccagggcccagcacgctccagc

SEQ ID NO: 380514 - DNA, 82 bp, Homo sapiens
  chr13:114766300-114766382
  hypo
cctttgcttttgtggtaggtaaattcatggttggtcaagcgaaaccatctcttcttaaaattcttcatcccaaagcgcttcc

SEQ ID NO: 380515 - DNA, 86 bp, Homo sapiens; identical to SEQ ID NO: 355108
  chr13:114769900-114769986
  hypo

SEQ ID NO: 380516 - DNA, 45 bp, Homo sapiens; identical to SEQ ID NO: 366340
  chr13:114776257-114776302
  hypo

SEQ ID NO: 380517 - DNA, 38 bp, Homo sapiens; identical to SEQ ID NO: 360361
  chr13:114776448-114776486
  hypo

SEQ ID NO: 380518 - DNA, 222 bp, Homo sapiens; identical to SEQ ID NO: 360362
  chr13:114776788-114777010
  hypo

SEQ ID NO: 380519 - DNA, 130 bp, Homo sapiens; identical to SEQ ID NO: 341870
  chr13:114777587-114777717
  hypo

SEQ ID NO: 380520 - DNA, 77 bp, Homo sapiens
  chr13:114778731-114778808
  hypo
agagagaagcagggtgaccgttttcctcgggcacaatggcctcgtggggacaccatgccccggccccctgagggtcc

SEQ ID NO: 380521 - DNA, 137 bp, Homo sapiens; identical to SEQ ID NO: 341873
  chr13:114799639-114799776
  hypo

SEQ ID NO: 380522 - DNA, 92 bp, Homo sapiens; identical to SEQ ID NO: 346082
  chr13:114807847-114807939
  hypo

SEQ ID NO: 380523 - DNA, 133 bp, Homo sapiens; identical to SEQ ID NO: 341876
  chr13:114887185-114887318
  hypo

SEQ ID NO: 380524 - DNA, 62 bp, Homo sapiens; identical to SEQ ID NO: 366346
  chr13:114917508-114917570
  hypo

SEQ ID NO: 380525 - DNA, 96 bp, Homo sapiens; identical to SEQ ID NO: 366347
  chr13:114917600-114917696
  hypo

SEQ ID NO: 380526 - DNA, 219 bp, Homo sapiens; identical to SEQ ID NO: 341880
  chr13:115052309-115052528
  hypo

SEQ ID NO: 380527 - DNA, 528 bp, Homo sapiens; identical to SEQ ID NO: 341881
  chr14:21560027-21560555
  hypo

SEQ ID NO: 380528 - DNA, 120 bp, Homo sapiens; identical to SEQ ID NO: 215731
  chr14:21689077-21689197
  hypo

SEQ ID NO: 380529 - DNA, 68 bp, Homo sapiens; identical to SEQ ID NO: 366351
  chr14:21943040-21943108
  hypo

SEQ ID NO: 380530 - DNA, 91 bp, Homo sapiens; identical to SEQ ID NO: 341885
  chr14:21969884-21969975
  hypo

SEQ ID NO: 380531 - DNA, 237 bp, Homo sapiens; identical to SEQ ID NO: 341886
  chr14:23315027-23315264
  hypo

SEQ ID NO: 380532 - DNA, 38 bp, Homo sapiens; identical to SEQ ID NO: 351521
  chr14:23355352-23355390
  hypo

SEQ ID NO: 380533 - DNA, 53 bp, Homo sapiens; identical to SEQ ID NO: 351522
  chr14:23355484-23355537
  hypo

SEQ ID NO: 380534 - DNA, 78 bp, Homo sapiens; identical to SEQ ID NO: 351523
  chr14:23835314-23835392
  hypo

SEQ ID NO: 380535 - DNA, 97 bp, Homo sapiens; identical to SEQ ID NO: 366357
  chr14:23884191-23884288
  hypo

SEQ ID NO: 380536 - DNA, 108 bp, Homo sapiens; identical to SEQ ID NO: 360374
  chr14:24550913-24551021
  hypo

SEQ ID NO: 380537 - DNA, 60 bp, Homo sapiens; identical to SEQ ID NO: 290053
  chr14:29236614-29236674
  hypo

SEQ ID NO: 380538 - DNA, 38 bp, Homo sapiens; identical to SEQ ID NO: 366360
  chr14:31027396-31027434
  hypo

SEQ ID NO: 380539 - DNA, 55 bp, Homo sapiens; identical to SEQ ID NO: 215754
  chr14:32597657-32597712
  hypo

SEQ ID NO: 380540 - DNA, 438 bp, Homo sapiens; identical to SEQ ID NO: 290092
  chr14:36003004-36003442
  hypo

SEQ ID NO: 380541 - DNA, 382 bp, Homo sapiens; identical to SEQ ID NO: 203556
  chr14:38677790-38678172
  hypo

SEQ ID NO: 380542 - DNA, 284 bp, Homo sapiens; identical to SEQ ID NO: 373410
  chr14:38678202-38678486
  hypo

SEQ ID NO: 380543 - DNA, 313 bp, Homo sapiens; identical to SEQ ID NO: 341900
  chr14:39648102-39648415
  hypo

SEQ ID NO: 380544 - DNA, 201 bp, Homo sapiens; identical to SEQ ID NO: 351548
  chr14:45431382-45431583
  hypo

SEQ ID NO: 380545 - DNA, 36 bp, Homo sapiens; identical to SEQ ID NO: 348627
  chr14:50287178-50287214
  hypo

SEQ ID NO: 380546 - DNA, 50 bp, Homo sapiens; identical to SEQ ID NO: 341904
  chr14:50574258-50574308
  hypo

SEQ ID NO: 380547 - DNA, 711 bp, Homo sapiens; identical to SEQ ID NO: 290161
  chr14:51027134-51027845
  hypo

SEQ ID NO: 380548 - DNA, 104 bp, Homo sapiens; identical to SEQ ID NO: 360427
  chr14:51027881-51027985
  hypo

SEQ ID NO: 380549 - DNA, 459 bp, Homo sapiens; identical to SEQ ID NO: 341906
  chr14:51171654-51172113
  hypo

SEQ ID NO: 380550 - DNA, 224 bp, Homo sapiens; identical to SEQ ID NO: 203569
  chr14:51410345-51410569
  hypo

SEQ ID NO: 380551 - DNA, 293 bp, Homo sapiens; identical to SEQ ID NO: 203570
  chr14:51410740-51411033
  hypo

SEQ ID NO: 380552 - DNA, 223 bp, Homo sapiens; identical to SEQ ID NO: 203572
  chr14:51562012-51562235
  hypo

SEQ ID NO: 380553 - DNA, 64 bp, Homo sapiens; identical to SEQ ID NO: 341909
  chr14:52216051-52216115
  hypo

SEQ ID NO: 380554 - DNA, 85 bp, Homo sapiens; identical to SEQ ID NO: 366374
  chr14:53259056-53259141
  hypo

SEQ ID NO: 380555 - DNA, 95 bp, Homo sapiens; identical to SEQ ID NO: 341911
  chr14:53564384-53564479
  hypo

SEQ ID NO: 380556 - DNA, 126 bp, Homo sapiens; identical to SEQ ID NO: 341912
  chr14:55522633-55522759
  hypo

SEQ ID NO: 380557 - DNA, 296 bp, Homo sapiens; identical to SEQ ID NO: 215787
  chr14:55765714-55766010
  hypo

SEQ ID NO: 380558 - DNA, 55 bp, Homo sapiens; identical to SEQ ID NO: 346085
  chr14:55766084-55766139
  hypo

SEQ ID NO: 380559 - DNA, 193 bp, Homo sapiens; identical to SEQ ID NO: 341914
  chr14:55817984-55818177
  hypo

SEQ ID NO: 380560 - DNA, 166 bp, Homo sapiens; identical to SEQ ID NO: 341915
  chr14:55982010-55982176
  hypo

SEQ ID NO: 380561 - DNA, 144 bp, Homo sapiens; identical to SEQ ID NO: 360441
  chr14:57265912-57266056
  hypo

SEQ ID NO: 380562 - DNA, 111 bp, Homo sapiens
  chr14:58599612-58599723
  hypo
cttttaaggctctgccacacctcttcaaacaggacagagctcacacccctttccaggtaaaggtgtgtgtgtgtgtgtacgtgcacgcacgcgcgcgctgatggcaatgtc

SEQ ID NO: 380563 - DNA, 214 bp, Homo sapiens; identical to SEQ ID NO: 334917
  chr14:58862962-58863176
  hypo

SEQ ID NO: 380564 - DNA, 98 bp, Homo sapiens
  chr14:59014477-59014575
  hypo
atgagcttctcctttgtgcaggtgggaaagcagtgccactctccgcttcacagatgccccctgccaagatgtcagtgatgctgccgtcagtgaacctc

SEQ ID NO: 380565 - DNA, 79 bp, Homo sapiens; identical to SEQ ID NO: 347299
  chr14:60097114-60097193
  hypo

SEQ ID NO: 380566 - DNA, 44 bp, Homo sapiens; identical to SEQ ID NO: 351564
  chr14:60385935-60385979
  hypo

SEQ ID NO: 380567 - DNA, 276 bp, Homo sapiens; identical to SEQ ID NO: 290237
  chr14:60974092-60974368
  hypo

SEQ ID NO: 380568 - DNA, 354 bp, Homo sapiens; identical to SEQ ID NO: 351574
  chr14:61123186-61123540
  hypo

SEQ ID NO: 380569 - DNA, 623 bp, Homo sapiens; identical to SEQ ID NO: 290253
  chr14:61123681-61124304
  hypo

SEQ ID NO: 380570 - DNA, 196 bp, Homo sapiens; identical to SEQ ID NO: 334941
  chr14:62105869-62106065
  hypo

SEQ ID NO: 380571 - DNA, 76 bp, Homo sapiens; identical to SEQ ID NO: 373462
  chr14:62161828-62161904
  hypo

SEQ ID NO: 380572 - DNA, 897 bp, Homo sapiens; identical to SEQ ID NO: 334943
  chr14:62162333-62163230
  hypo

SEQ ID NO: 380573 - DNA, 101 bp, Homo sapiens; identical to SEQ ID NO: 341932
  chr14:63857003-63857104
  hypo

SEQ ID NO: 380574 - DNA, 119 bp, Homo sapiens; identical to SEQ ID NO: 341933
  chr14:64385274-64385393
  hypo

SEQ ID NO: 380575 - DNA, 227 bp, Homo sapiens; identical to SEQ ID NO: 366389
  chr14:65207965-65208192
  hypo

SEQ ID NO: 380576 - DNA, 125 bp, Homo sapiens
  chr14:65209843-65209968
  hypo
cgcctgggggccggccctccgcccggagccccctcagccccacagagaccttcagctggcccgacgtccgtgagctctgctccaagtatgcctcccgcgatgaggcacgccgagcagggggcggc

SEQ ID NO: 380577 - DNA, 291 bp, Homo sapiens; identical to SEQ ID NO: 366390
  chr14:65233479-65233770
  hypo

SEQ ID NO: 380578 - DNA, 127 bp, Homo sapiens; identical to SEQ ID NO: 341937
  chr14:65236155-65236282
  hypo

SEQ ID NO: 380579 - DNA, 50 bp, Homo sapiens; identical to SEQ ID NO: 355132
  chr14:65239794-65239844
  hypo

SEQ ID NO: 380580 - DNA, 185 bp, Homo sapiens; identical to SEQ ID NO: 341939
  chr14:65271617-65271802
  hypo

SEQ ID NO: 380581 - DNA, 52 bp, Homo sapiens; identical to SEQ ID NO: 341942
  chr14:69070536-69070588
  hypo

SEQ ID NO: 380582 - DNA, 71 bp, Homo sapiens; identical to SEQ ID NO: 366395
  chr14:69245863-69245934
  hypo

SEQ ID NO: 380583 - DNA, 213 bp, Homo sapiens; identical to SEQ ID NO: 334953
  chr14:69259278-69259491
  hypo

SEQ ID NO: 380584 - DNA, 230 bp, Homo sapiens; identical to SEQ ID NO: 355135
  chr14:69278049-69278279
  hypo

SEQ ID NO: 380585 - DNA, 148 bp, Homo sapiens
  chr14:69345646-69345794
  hypo
cgcattatttcttgccccagacgccacccctgagcgtgctccatgcaggaggcgagtacctgggggtcgttgccaatatcataacccaagctgatgaggcaggctttgaactcctcgggacccagtgtgccggagtgatcctggggcc

SEQ ID NO: 380586 - DNA, 211 bp, Homo sapiens; identical to SEQ ID NO: 341947
  chr14:69354686-69354897
  hypo

SEQ ID NO: 380587 - DNA, 176 bp, Homo sapiens; identical to SEQ ID NO: 341948
  chr14:69470456-69470632
  hypo

SEQ ID NO: 380588 - DNA, 241 bp, Homo sapiens; identical to SEQ ID NO: 341949
  chr14:69666624-69666865
  hypo

SEQ ID NO: 380589 - DNA, 419 bp, Homo sapiens; identical to SEQ ID NO: 355138
  chr14:70236294-70236713
  hypo

SEQ ID NO: 380590 - DNA, 138 bp, Homo sapiens; identical to SEQ ID NO: 348632
  chr14:73146636-73146774
  hypo

SEQ ID NO: 380591 - DNA, 99 bp, Homo sapiens; identical to SEQ ID NO: 348633
  chr14:73147150-73147249
  hypo

SEQ ID NO: 380592 - DNA, 48 bp, Homo sapiens; identical to SEQ ID NO: 355141
  chr14:73167899-73167947
  hypo

SEQ ID NO: 380593 - DNA, 148 bp, Homo sapiens; identical to SEQ ID NO: 355142
  chr14:73238412-73238560
  hypo

SEQ ID NO: 380594 - DNA, 55 bp, Homo sapiens; identical to SEQ ID NO: 360480
  chr14:73358909-73358964
  hypo

SEQ ID NO: 380595 - DNA, 254 bp, Homo sapiens; identical to SEQ ID NO: 290336
  chr14:73359040-73359294
  hypo

SEQ ID NO: 380596 - DNA, 139 bp, Homo sapiens; identical to SEQ ID NO: 360482
  chr14:73359490-73359629
  hypo

SEQ ID NO: 380597 - DNA, 464 bp, Homo sapiens; identical to SEQ ID NO: 334962
  chr14:73359779-73360243
  hypo

SEQ ID NO: 380598 - DNA, 62 bp, Homo sapiens; identical to SEQ ID NO: 341964
  chr14:73390972-73391034
  hypo

SEQ ID NO: 380599 - DNA, 420 bp, Homo sapiens; identical to SEQ ID NO: 341965
  chr14:73391900-73392320
  hypo

SEQ ID NO: 380600 - DNA, 103 bp, Homo sapiens; identical to SEQ ID NO: 341966
  chr14:73967299-73967402
  hypo

SEQ ID NO: 380601 - DNA, 409 bp, Homo sapiens; identical to SEQ ID NO: 360487
  chr14:74100394-74100803
  hypo

SEQ ID NO: 380602 - DNA, 262 bp, Homo sapiens; identical to SEQ ID NO: 341969
  chr14:75567786-75568048
  hypo

SEQ ID NO: 380603 - DNA, 145 bp, Homo sapiens; identical to SEQ ID NO: 355145
  chr14:75749334-75749479
  hypo

SEQ ID NO: 380604 - DNA, 95 bp, Homo sapiens; identical to SEQ ID NO: 341972
  chr14:76446078-76446173
  hypo

SEQ ID NO: 380605 - DNA, 136 bp, Homo sapiens; identical to SEQ ID NO: 360498
  chr14:77591037-77591173
  hypo

SEQ ID NO: 380606 - DNA, 95 bp, Homo sapiens; identical to SEQ ID NO: 360499
  chr14:77591751-77591846
  hypo

SEQ ID NO: 380607 - DNA, 82 bp, Homo sapiens; identical to SEQ ID NO: 290405
  chr14:77965137-77965219
  hypo

SEQ ID NO: 380608 - DNA, 180 bp, Homo sapiens; identical to SEQ ID NO: 290406
  chr14:77965244-77965424
  hypo

SEQ ID NO: 380609 - DNA, 274 bp, Homo sapiens; identical to SEQ ID NO: 341975
  chr14:81879122-81879396
  hypo

SEQ ID NO: 380610 - DNA, 163 bp, Homo sapiens; identical to SEQ ID NO: 290421
  chr14:88458964-88459127
  hypo

SEQ ID NO: 380611 - DNA, 239 bp, Homo sapiens; identical to SEQ ID NO: 290422
  chr14:88459170-88459409
  hypo

SEQ ID NO: 380612 - DNA, 57 bp, Homo sapiens; identical to SEQ ID NO: 351598
  chr14:88459631-88459688
  hypo

SEQ ID NO: 380613 - DNA, 306 bp, Homo sapiens; identical to SEQ ID NO: 290424
  chr14:88789656-88789962
  hypo

SEQ ID NO: 380614 - DNA, 82 bp, Homo sapiens; identical to SEQ ID NO: 341978
  chr14:89291884-89291966
  hypo

SEQ ID NO: 380615 - DNA, 437 bp, Homo sapiens; identical to SEQ ID NO: 366425
  chr14:89627946-89628383
  hypo

SEQ ID NO: 380616 - DNA, 67 bp, Homo sapiens; identical to SEQ ID NO: 366426
  chr14:89657793-89657860
  hypo

SEQ ID NO: 380617 - DNA, 144 bp, Homo sapiens
  chr14:89786296-89786440
  hypo
cggaagctcaaggatgacgctttgcatttcattactaagacaggtaaacatcagatctgctgcagaatcaaacacaattaaaactttaattaactgaaacctaactagcccccaacttcaaataaaaaacatttgcgggcagcc

SEQ ID NO: 380618 - DNA, 111 bp, Homo sapiens; identical to SEQ ID NO: 341982
  chr14:89875711-89875822
  hypo

SEQ ID NO: 380619 - DNA, 165 bp, Homo sapiens; identical to SEQ ID NO: 355153
  chr14:89895069-89895234
  hypo

SEQ ID NO: 380620 - DNA, 485 bp, Homo sapiens; identical to SEQ ID NO: 351602
  chr14:90085312-90085797
  hypo

SEQ ID NO: 380621 - DNA, 144 bp, Homo sapiens; identical to SEQ ID NO: 360512
  chr14:90527180-90527324
  hypo

SEQ ID NO: 380622 - DNA, 226 bp, Homo sapiens; identical to SEQ ID NO: 203711
  chr14:90527931-90528157
  hypo

SEQ ID NO: 380623 - DNA, 153 bp, Homo sapiens; identical to SEQ ID NO: 366432
  chr14:90754255-90754408
  hypo

SEQ ID NO: 380624 - DNA, 382 bp, Homo sapiens; identical to SEQ ID NO: 203714
  chr14:90849476-90849858
  hypo

SEQ ID NO: 380625 - DNA, 53 bp, Homo sapiens; identical to SEQ ID NO: 203715
  chr14:90849897-90849950
  hypo

SEQ ID NO: 380626 - DNA, 136 bp, Homo sapiens; identical to SEQ ID NO: 341990
  chr14:90871545-90871681
  hypo

SEQ ID NO: 380627 - DNA, 97 bp, Homo sapiens; identical to SEQ ID NO: 366436
  chr14:91691066-91691163
  hypo

SEQ ID NO: 380628 - DNA, 40 bp, Homo sapiens; identical to SEQ ID NO: 366437
  chr14:91731774-91731814
  hypo

SEQ ID NO: 380629 - DNA, 145 bp, Homo sapiens; identical to SEQ ID NO: 341993
  chr14:91750824-91750969
  hypo

SEQ ID NO: 380630 - DNA, 267 bp, Homo sapiens; identical to SEQ ID NO: 334997
  chr14:91755357-91755624
  hypo

SEQ ID NO: 380631 - DNA, 259 bp, Homo sapiens; identical to SEQ ID NO: 341995
  chr14:91757493-91757752
  hypo

SEQ ID NO: 380632 - DNA, 1282 bp, Homo sapiens; identical to SEQ ID NO: 341997
  chr14:91805132-91806414
  hypo

SEQ ID NO: 380633 - DNA, 203 bp, Homo sapiens; identical to SEQ ID NO: 355161
  chr14:91808058-91808261
  hypo

SEQ ID NO: 380634 - DNA, 118 bp, Homo sapiens; identical to SEQ ID NO: 290458
  chr14:91883379-91883497
  hypo

SEQ ID NO: 380635 - DNA, 405 bp, Homo sapiens; identical to SEQ ID NO: 351609
  chr14:91883530-91883935
  hypo

SEQ ID NO: 380636 - DNA, 187 bp, Homo sapiens; identical to SEQ ID NO: 203723
  chr14:92980770-92980957
  hypo

SEQ ID NO: 380637 - DNA, 159 bp, Homo sapiens; identical to SEQ ID NO: 318289
  chr14:93154728-93154887
  hypo

SEQ ID NO: 380638 - DNA, 108 bp, Homo sapiens; identical to SEQ ID NO: 342003
  chr14:93415131-93415239
  hypo

SEQ ID NO: 380639 - DNA, 328 bp, Homo sapiens; identical to SEQ ID NO: 355166
  chr14:93425284-93425612
  hypo

SEQ ID NO: 380640 - DNA, 523 bp, Homo sapiens; identical to SEQ ID NO: 342005
  chr14:93454179-93454702
  hypo

SEQ ID NO: 380641 - DNA, 236 bp, Homo sapiens; identical to SEQ ID NO: 355167
  chr14:93706483-93706719
  hypo

SEQ ID NO: 380642 - DNA, 329 bp, Homo sapiens; identical to SEQ ID NO: 342007
  chr14:94209931-94210260
  hypo

SEQ ID NO: 380643 - DNA, 99 bp, Homo sapiens
  chr14:94404099-94404198
  hypo
cgcgagcagagctgcacgttgcccacgtagtccaggaggacatcgatgatgggccccgcccagcggctcacctctggggcagatacgaactcacagaac

SEQ ID NO: 380644 - DNA, 42 bp, Homo sapiens
  chr14:94404228-94404270
  hypo
agttcatcccacctgcaagagcctgcggccagggacggcagc

SEQ ID NO: 380645 - DNA, 206 bp, Homo sapiens; identical to SEQ ID NO: 342009
  chr14:94404864-94405070
  hypo

SEQ ID NO: 380646 - DNA, 182 bp, Homo sapiens; identical to SEQ ID NO: 345461
  chr14:94406037-94406219
  hypo

SEQ ID NO: 380647 - DNA, 70 bp, Homo sapiens; identical to SEQ ID NO: 355170
  chr14:94603670-94603740
  hypo

SEQ ID NO: 380648 - DNA, 81 bp, Homo sapiens; identical to SEQ ID NO: 342012
  chr14:96054940-96055021
  hypo

SEQ ID NO: 380649 - DNA, 60 bp, Homo sapiens; identical to SEQ ID NO: 203738
  chr14:96342530-96342590
  hypo

SEQ ID NO: 380650 - DNA, 209 bp, Homo sapiens; identical to SEQ ID NO: 290501
  chr14:96505691-96505900
  hypo

SEQ ID NO: 380651 - DNA, 290 bp, Homo sapiens; identical to SEQ ID NO: 290502
  chr14:96506053-96506343
  hypo

SEQ ID NO: 380652 - DNA, 123 bp, Homo sapiens; identical to SEQ ID NO: 355173
  chr14:99849764-99849887
  hypo

SEQ ID NO: 380653 - DNA, 286 bp, Homo sapiens; identical to SEQ ID NO: 355174
  chr14:99850063-99850349
  hypo

SEQ ID NO: 380654 - DNA, 189 bp, Homo sapiens; identical to SEQ ID NO: 342018
  chr14:99880392-99880581
  hypo

SEQ ID NO: 380655 - DNA, 132 bp, Homo sapiens; identical to SEQ ID NO: 342019
  chr14:99902515-99902647
  hypo

SEQ ID NO: 380656 - DNA, 63 bp, Homo sapiens; identical to SEQ ID NO: 360543
  chr14:100613205-100613268
  hypo

SEQ ID NO: 380657 - DNA, 128 bp, Homo sapiens; identical to SEQ ID NO: 366459
  chr14:100644271-100644399
  hypo

SEQ ID NO: 380658 - DNA, 243 bp, Homo sapiens; identical to SEQ ID NO: 342026
  chr14:100747027-100747270
  hypo

SEQ ID NO: 380659 - DNA, 208 bp, Homo sapiens; identical to SEQ ID NO: 342027
  chr14:100748335-100748543
  hypo

SEQ ID NO: 380660 - DNA, 205 bp, Homo sapiens; identical to SEQ ID NO: 215982
  chr14:100749240-100749445
  hypo

SEQ ID NO: 380661 - DNA, 137 bp, Homo sapiens; identical to SEQ ID NO: 355178
  chr14:100749475-100749612
  hypo

SEQ ID NO: 380662 - DNA, 206 bp, Homo sapiens; identical to SEQ ID NO: 373549
  chr14:100751380-100751586
  hypo

SEQ ID NO: 380663 - DNA, 192 bp, Homo sapiens
  chr14:101096264-101096456
  hypo
cgggagggatgcgctggccgtggggaccagtgcccgccgctgcagctgatcctgccctgtcccgtctccatgtgaataaagccttgttccagccagtgcctcactgcgtgtattccttggcgactcggagaccaagatccaggggtacccggacttctactcccgatagcaggcaacggatgcctcctgctc

SEQ ID NO: 380664 - DNA, 150 bp, Homo sapiens; identical to SEQ ID NO: 342032
  chr14:101134041-101134191
  hypo

SEQ ID NO: 380665 - DNA, 469 bp, Homo sapiens; identical to SEQ ID NO: 366465
  chr14:101200752-101201221
  hypo

SEQ ID NO: 380666 - DNA, 419 bp, Homo sapiens; identical to SEQ ID NO: 366466
  chr14:101349283-101349702
  hypo

SEQ ID NO: 380667 - DNA, 246 bp, Homo sapiens; identical to SEQ ID NO: 366467
  chr14:101349750-101349996
  hypo

SEQ ID NO: 380668 - DNA, 415 bp, Homo sapiens; identical to SEQ ID NO: 342036
  chr14:101489771-101490186
  hypo

SEQ ID NO: 380669 - DNA, 183 bp, Homo sapiens; identical to SEQ ID NO: 342037
  chr14:101492091-101492274
  hypo

SEQ ID NO: 380670 - DNA, 204 bp, Homo sapiens; identical to SEQ ID NO: 342038
  chr14:101970419-101970623
  hypo

SEQ ID NO: 380671 - DNA, 495 bp, Homo sapiens
  chr14:102068306-102068801
  hypo
cgcgaggagcctggcacgggactggcgcttgtcagcccctcatgtgggtgtgcctgcatctgcgtccccacgtcgcacaggatagggcttatgcatggcctagcttgtcgtgtgaggttgactggcatgtcacaggcactgtcacagattctcagagcccaggagcacatcccctgaaggactcctcagccggggctgggctggaagcagggcctggagaaggtcagagaggccccgccctcctggcactcccagggcaggggacgcagcacagagcgggtgccggtcagccagggaggccgggacgggacgcagcacgaggagaacactgcgcaaggcaggcccgcagtcagtcaggacagctgcccagagtaggtggcgtttgggccaggcttcgcaagctgtgtgggggttcgcccagcagaagacgggagagggcgttccaggcagaaggctcagcatggcccaaagcacagaggcacggcaatgtccggc

SEQ ID NO: 380672 - DNA, 247 bp, Homo sapiens; identical to SEQ ID NO: 342040
  chr14:102230139-102230386
  hypo

SEQ ID NO: 380673 - DNA, 72 bp, Homo sapiens; identical to SEQ ID NO: 342041
  chr14:102331847-102331919
  hypo

SEQ ID NO: 380674 - DNA, 56 bp, Homo sapiens
  chr14:102335792-102335848
  hypo
cgctaggtgaatggtaagtgtgtgttgagctttctaaggaactgccaaaccgtttt

SEQ ID NO: 380675 - DNA, 245 bp, Homo sapiens; identical to SEQ ID NO: 355181
  chr14:102355922-102356167
  hypo

SEQ ID NO: 380676 - DNA, 188 bp, Homo sapiens; identical to SEQ ID NO: 355182
  chr14:102356197-102356385
  hypo

SEQ ID NO: 380677 - DNA, 131 bp, Homo sapiens; identical to SEQ ID NO: 342044
  chr14:102375780-102375911
  hypo

SEQ ID NO: 380678 - DNA, 265 bp, Homo sapiens; identical to SEQ ID NO: 366474
  chr14:102467362-102467627
  hypo

SEQ ID NO: 380679 - DNA, 116 bp, Homo sapiens; identical to SEQ ID NO: 355183
  chr14:102493497-102493613
  hypo

SEQ ID NO: 380680 - DNA, 348 bp, Homo sapiens; identical to SEQ ID NO: 355184
  chr14:102493651-102493999
  hypo

SEQ ID NO: 380681 - DNA, 492 bp, Homo sapiens; identical to SEQ ID NO: 355185
  chr14:102500550-102501042
  hypo

SEQ ID NO: 380682 - DNA, 800 bp, Homo sapiens; identical to SEQ ID NO: 342049
  chr14:102516079-102516879
  hypo

SEQ ID NO: 380683 - DNA, 362 bp, Homo sapiens; identical to SEQ ID NO: 366478
  chr14:102523351-102523713
  hypo

SEQ ID NO: 380684 - DNA, 119 bp, Homo sapiens; identical to SEQ ID NO: 355186
  chr14:102691860-102691979
  hypo

SEQ ID NO: 380685 - DNA, 604 bp, Homo sapiens; identical to SEQ ID NO: 342054
  chr14:102939202-102939806
  hypo

SEQ ID NO: 380686 - DNA, 257 bp, Homo sapiens
  chr14:102968257-102968514
  hypo
cgccctactggggaagccggtccgtacgtaggccttgcatctcgccacctccacttctgtcctcaagaacaagtcctaggtcaagggaaacagcacagcctgtttataattaggaaacacttaaaacagcctggcatttgggaacagccatgttaacgtgagcaaattcctctcatgaaatagcctgcagctattaagaagcacgtgtgtgcaggaagcggaggcgcaggacctcaccgcgccagcgtgaagttccc

SEQ ID NO: 380687 - DNA, 466 bp, Homo sapiens; identical to SEQ ID NO: 355188
  chr14:102973268-102973734
  hypo

SEQ ID NO: 380688 - DNA, 377 bp, Homo sapiens; identical to SEQ ID NO: 351623
  chr14:102975682-102976059
  hypo

SEQ ID NO: 380689 - DNA, 367 bp, Homo sapiens; identical to SEQ ID NO: 342059
  chr14:103369461-103369828
  hypo

SEQ ID NO: 380690 - DNA, 62 bp, Homo sapiens; identical to SEQ ID NO: 373557
  chr14:103394621-103394683
  hypo

SEQ ID NO: 380691 - DNA, 365 bp, Homo sapiens; identical to SEQ ID NO: 342061
  chr14:103409913-103410278
  hypo

SEQ ID NO: 380692 - DNA, 129 bp, Homo sapiens; identical to SEQ ID NO: 342062
  chr14:103417432-103417561
  hypo

SEQ ID NO: 380693 - DNA, 279 bp, Homo sapiens; identical to SEQ ID NO: 342063
  chr14:103423623-103423902
  hypo

SEQ ID NO: 380694 - DNA, 142 bp, Homo sapiens; identical to SEQ ID NO: 335034
  chr14:103430237-103430379
  hypo

SEQ ID NO: 380695 - DNA, 241 bp, Homo sapiens; identical to SEQ ID NO: 342065
  chr14:103433137-103433378
  hypo

SEQ ID NO: 380696 - DNA, 239 bp, Homo sapiens; identical to SEQ ID NO: 342066
  chr14:103433869-103434108
  hypo

SEQ ID NO: 380697 - DNA, 344 bp, Homo sapiens
  chr14:103977202-103977546
  hypo
cgaggcgagaccctccgagcggagtccggctggttaaagggcctgcacgggtctctcacagaagaaggaaagctggtcctgagggtggagccaggggaatctgggggccacttcagcattctttgttgccattggctttggttcagtaagctttgttgatttattttgttgttgttattgttgttagagtgatggggctgattgcttataagttctgaggttcttatttgcgtttccagctccctgggtattcattcatacctggtttctggctgtggtgaaatgtcttctgaccaagtgggttgataaacagggggcttcgctggagcgggggcagggggcgc

SEQ ID NO: 380698 - DNA, 36 bp, Homo sapiens; identical to SEQ ID NO: 366489
  chr14:103977769-103977805
  hypo

SEQ ID NO: 380699 - DNA, 87 bp, Homo sapiens; identical to SEQ ID NO: 216051
  chr14:103977835-103977922
  hypo

SEQ ID NO: 380700 - DNA, 147 bp, Homo sapiens; identical to SEQ ID NO: 366491
  chr14:103986352-103986499
  hypo

SEQ ID NO: 380701 - DNA, 268 bp, Homo sapiens; identical to SEQ ID NO: 360553
  chr14:103988427-103988695
  hypo

SEQ ID NO: 380702 - DNA, 418 bp, Homo sapiens; identical to SEQ ID NO: 290585
  chr14:103988736-103989154
  hypo

SEQ ID NO: 380703 - DNA, 124 bp, Homo sapiens; identical to SEQ ID NO: 373565
  chr14:103989597-103989721
  hypo

SEQ ID NO: 380704 - DNA, 138 bp, Homo sapiens; identical to SEQ ID NO: 355194
  chr14:104000003-104000141
  hypo

SEQ ID NO: 380705 - DNA, 734 bp, Homo sapiens; identical to SEQ ID NO: 355195
  chr14:104000403-104001137
  hypo

SEQ ID NO: 380706 - DNA, 135 bp, Homo sapiens; identical to SEQ ID NO: 342073
  chr14:104047694-104047829
  hypo

SEQ ID NO: 380707 - DNA, 993 bp, Homo sapiens; identical to SEQ ID NO: 355196
  chr14:104047919-104048912
  hypo

SEQ ID NO: 380708 - DNA, 127 bp, Homo sapiens; identical to SEQ ID NO: 346089
  chr14:104048982-104049109
  hypo

SEQ ID NO: 380709 - DNA, 78 bp, Homo sapiens; identical to SEQ ID NO: 342075
  chr14:104158805-104158883
  hypo

SEQ ID NO: 380710 - DNA, 120 bp, Homo sapiens; identical to SEQ ID NO: 355198
  chr14:104159197-104159317
  hypo

SEQ ID NO: 380711 - DNA, 106 bp, Homo sapiens; identical to SEQ ID NO: 355199
  chr14:104159437-104159543
  hypo

SEQ ID NO: 380712 - DNA, 129 bp, Homo sapiens; identical to SEQ ID NO: 355200
  chr14:104159892-104160021
  hypo

SEQ ID NO: 380713 - DNA, 123 bp, Homo sapiens; identical to SEQ ID NO: 355201
  chr14:104160134-104160257
  hypo

SEQ ID NO: 380714 - DNA, 265 bp, Homo sapiens
  chr14:104164986-104165251
  hypo
cggatgagaaagtggagccgctgccctggaagagctgtgtctgaaccaggctcccagctgtgccacggcccaggcagacgcgttttaaaggcccgagccccgtgtgtcggggcttctcaggcagggctgttgtgcagccgccaccgtgtcagtgggactgggtcccaggtgtccctcgcaccccttcggcactgatcgtgtaggaacaggaggaggggggcaggtggggggcagagagcacccgcagggtccgggctgggcagcc

SEQ ID NO: 380715 - DNA, 280 bp, Homo sapiens; identical to SEQ ID NO: 355202
  chr14:104194172-104194452
  hypo

SEQ ID NO: 380716 - DNA, 204 bp, Homo sapiens; identical to SEQ ID NO: 216067
  chr14:104194491-104194695
  hypo

SEQ ID NO: 380717 - DNA, 90 bp, Homo sapiens; identical to SEQ ID NO: 355204
  chr14:104194750-104194840
  hypo

SEQ ID NO: 380718 - DNA, 335 bp, Homo sapiens; identical to SEQ ID NO: 348640
  chr14:104202370-104202705
  hypo

SEQ ID NO: 380719 - DNA, 351 bp, Homo sapiens; identical to SEQ ID NO: 342081
  chr14:104395215-104395566
  hypo

SEQ ID NO: 380720 - DNA, 236 bp, Homo sapiens; identical to SEQ ID NO: 216079
  chr14:104618440-104618676
  hypo

SEQ ID NO: 380721 - DNA, 100 bp, Homo sapiens; identical to SEQ ID NO: 348642
  chr14:104623761-104623861
  hypo

SEQ ID NO: 380722 - DNA, 226 bp, Homo sapiens; identical to SEQ ID NO: 342086
  chr14:104633637-104633863
  hypo

SEQ ID NO: 380723 - DNA, 137 bp, Homo sapiens; identical to SEQ ID NO: 355208
  chr14:104640046-104640183
  hypo

SEQ ID NO: 380724 - DNA, 101 bp, Homo sapiens; identical to SEQ ID NO: 355209
  chr14:104640582-104640683
  hypo

SEQ ID NO: 380725 - DNA, 139 bp, Homo sapiens; identical to SEQ ID NO: 346091
  chr14:104641166-104641305
  hypo

SEQ ID NO: 380726 - DNA, 211 bp, Homo sapiens; identical to SEQ ID NO: 318617
  chr14:104642243-104642454
  hypo

SEQ ID NO: 380727 - DNA, 119 bp, Homo sapiens; identical to SEQ ID NO: 366513
  chr14:104642742-104642861
  hypo

SEQ ID NO: 380728 - DNA, 79 bp, Homo sapiens; identical to SEQ ID NO: 355211
  chr14:104645047-104645126
  hypo

SEQ ID NO: 380729 - DNA, 163 bp, Homo sapiens; identical to SEQ ID NO: 346092
  chr14:104645553-104645716
  hypo

SEQ ID NO: 380730 - DNA, 563 bp, Homo sapiens; identical to SEQ ID NO: 342094
  chr14:104746303-104746866
  hypo

SEQ ID NO: 380731 - DNA, 244 bp, Homo sapiens
  chr14:105103508-105103752
  hypo
gcccgagacctgtgtcgccacccactgaggaacgggcaccacccgtcgcccgagacctgtgtcgccacccactgaggaacgggcaccacccgtcgcccgagacctgtgtcgccacccactgaggaacgggcaccacccgtcgtccgagacctgtgtcgccacccactgaggaacgggcaccacccgtcgtccgagacctgtgtcgccacccactgaggaacgggtacgacctgtcatccgagac

SEQ ID NO: 380732 - DNA, 198 bp, Homo sapiens; identical to SEQ ID NO: 345462
  chr14:105189960-105190158
  hypo

SEQ ID NO: 380733 - DNA, 151 bp, Homo sapiens; identical to SEQ ID NO: 351633
  chr14:105196121-105196272
  hypo

SEQ ID NO: 380734 - DNA, 35 bp, Homo sapiens; identical to SEQ ID NO: 342099
  chr14:105214103-105214138
  hypo

SEQ ID NO: 380735 - DNA, 167 bp, Homo sapiens; identical to SEQ ID NO: 348646
  chr14:105240770-105240937
  hypo

SEQ ID NO: 380736 - DNA, 132 bp, Homo sapiens; identical to SEQ ID NO: 318662
  chr14:105241177-105241309
  hypo

SEQ ID NO: 380737 - DNA, 227 bp, Homo sapiens; identical to SEQ ID NO: 348648
  chr14:105241428-105241655
  hypo

SEQ ID NO: 380738 - DNA, 127 bp, Homo sapiens; identical to SEQ ID NO: 342101
  chr14:105244222-105244349
  hypo

SEQ ID NO: 380739 - DNA, 163 bp, Homo sapiens; identical to SEQ ID NO: 342102
  chr14:105247313-105247476
  hypo

SEQ ID NO: 380740 - DNA, 64 bp, Homo sapiens; identical to SEQ ID NO: 355219
  chr14:105268589-105268653
  hypo

SEQ ID NO: 380741 - DNA, 727 bp, Homo sapiens; identical to SEQ ID NO: 203788
  chr14:105330980-105331707
  hypo

SEQ ID NO: 380742 - DNA, 156 bp, Homo sapiens; identical to SEQ ID NO: 373579
  chr14:105331744-105331900
  hypo

SEQ ID NO: 380743 - DNA, 85 bp, Homo sapiens; identical to SEQ ID NO: 355221
  chr14:105472075-105472160
  hypo

SEQ ID NO: 380744 - DNA, 786 bp, Homo sapiens; identical to SEQ ID NO: 342107
  chr14:105517526-105518312
  hypo

SEQ ID NO: 380745 - DNA, 318 bp, Homo sapiens; identical to SEQ ID NO: 342108
  chr14:105546630-105546948
  hypo

SEQ ID NO: 380746 - DNA, 333 bp, Homo sapiens
  chr14:105611103-105611436
  hypo
cgggtctgcggcatggacagcgaggggccgcagggagacaggcctgcccgcagtccttccgcaccaggactagcctcgccagagcctctgtccagcatagccaggacctgcatagtacgggacccagggcccacccaggtgctgctccccactgggcactcaccacggccacctccacagcactggcccccgaggacgcccggtcgcaaagcaacaccagcaggcggtcccgtgccacagcccttgtggctggcagggagcggatcccggagcaaatggcgcccaccgtggtgccctgggcagagacaggcagtgcgtgggcagggcagggcc

SEQ ID NO: 380747 - DNA, 640 bp, Homo sapiens; identical to SEQ ID NO: 342110
  chr14:105687735-105688375
  hypo

SEQ ID NO: 380748 - DNA, 421 bp, Homo sapiens; identical to SEQ ID NO: 342111
  chr14:105689523-105689944
  hypo

SEQ ID NO: 380749 - DNA, 37 bp, Homo sapiens; identical to SEQ ID NO: 366529
  chr14:105723707-105723744
  hypo

SEQ ID NO: 380750 - DNA, 250 bp, Homo sapiens; identical to SEQ ID NO: 366530
  chr14:105723873-105724123
  hypo

SEQ ID NO: 380751 - DNA, 396 bp, Homo sapiens; identical to SEQ ID NO: 342114
  chr14:105728110-105728506
  hypo

SEQ ID NO: 380752 - DNA, 173 bp, Homo sapiens
  chr14:105739056-105739229
  hypo
cgcggcgtgccctccgtacggcagaccaggtagaggcaggcagcaatcacgtgggccatcttccggccgcgggtcaggtgcctgctcacggccatcttgaagaagttgaaggcggtgtccaggcagtgctggttcagctgcagctggttccccaggtggtggatgtggcgcct

SEQ ID NO: 380753 - DNA, 193 bp, Homo sapiens; identical to SEQ ID NO: 366532
  chr15:22876766-22876959
  hypo

SEQ ID NO: 380754 - DNA, 130 bp, Homo sapiens; identical to SEQ ID NO: 366533
  chr15:22877052-22877182
  hypo

SEQ ID NO: 380755 - DNA, 418 bp, Homo sapiens; identical to SEQ ID NO: 342118
  chr15:22927774-22928192
  hypo

SEQ ID NO: 380756 - DNA, 203 bp, Homo sapiens; identical to SEQ ID NO: 342119
  chr15:26026151-26026354
  hypo

SEQ ID NO: 380757 - DNA, 144 bp, Homo sapiens; identical to SEQ ID NO: 355226
  chr15:26234718-26234862
  hypo

SEQ ID NO: 380758 - DNA, 363 bp, Homo sapiens; identical to SEQ ID NO: 342121
  chr15:27128193-27128556
  hypo

SEQ ID NO: 380759 - DNA, 162 bp, Homo sapiens; identical to SEQ ID NO: 342122
  chr15:28360064-28360226
  hypo

SEQ ID NO: 380760 - DNA, 115 bp, Homo sapiens; identical to SEQ ID NO: 346095
  chr15:28516961-28517076
  hypo

SEQ ID NO: 380761 - DNA, 177 bp, Homo sapiens; identical to SEQ ID NO: 346096
  chr15:28517198-28517375
  hypo

SEQ ID NO: 380762 - DNA, 53 bp, Homo sapiens; identical to SEQ ID NO: 347321
  chr15:29130654-29130707
  hypo

SEQ ID NO: 380763 - DNA, 273 bp, Homo sapiens; identical to SEQ ID NO: 342127
  chr15:29415573-29415846
  hypo

SEQ ID NO: 380764 - DNA, 245 bp, Homo sapiens; identical to SEQ ID NO: 342128
  chr15:29417894-29418139
  hypo

SEQ ID NO: 380765 - DNA, 67 bp, Homo sapiens; identical to SEQ ID NO: 342129
  chr15:29418595-29418662
  hypo

SEQ ID NO: 380766 - DNA, 329 bp, Homo sapiens; identical to SEQ ID NO: 351648
  chr15:30113537-30113866
  hypo

SEQ ID NO: 380767 - DNA, 319 bp, Homo sapiens; identical to SEQ ID NO: 203810
  chr15:30113984-30114303
  hypo

SEQ ID NO: 380768 - DNA, 431 bp, Homo sapiens; identical to SEQ ID NO: 203811
  chr15:30114349-30114780
  hypo

SEQ ID NO: 380769 - DNA, 375 bp, Homo sapiens; identical to SEQ ID NO: 290655
  chr15:30114810-30115185
  hypo

SEQ ID NO: 380770 - DNA, 100 bp, Homo sapiens; identical to SEQ ID NO: 342131
  chr15:31188921-31189021
  hypo

SEQ ID NO: 380771 - DNA, 285 bp, Homo sapiens
  chr15:31220905-31221190
  hypo
cgtggctcacgcccacctgggcaccgtgtgtccacagccagcagaaaccatctctgttacggtcctttgggtcatccacaggtcaagatgataacttattttaaaaatctgagtaatagaatttaagatgtaagtatgtgaagttttaaactttaatttagcctccaccttacatttagacctttcgtataaagtaccatcagcatcagccctcccgagcacctgccgtgtcgcaggcactgtgccaaggagctcacagacatgggcacatctgcctgttcagag

SEQ ID NO: 380772 - DNA, 94 bp, Homo sapiens
  chr15:31221220-31221314
  hypo
gcaaattattactctaaaaaacaagtttaataaattgcttttatatcaattaacttttacttatcttttgagagaaagaatgtatcggttggcc

SEQ ID NO: 380773 - DNA, 139 bp, Homo sapiens; identical to SEQ ID NO: 342133
  chr15:31453201-31453340
  hypo

SEQ ID NO: 380774 - DNA, 250 bp, Homo sapiens; identical to SEQ ID NO: 342134
  chr15:31561317-31561567
  hypo

SEQ ID NO: 380775 - DNA, 185 bp, Homo sapiens; identical to SEQ ID NO: 342135
  chr15:31564302-31564487
  hypo

SEQ ID NO: 380776 - DNA, 136 bp, Homo sapiens; identical to SEQ ID NO: 355237
  chr15:31571220-31571356
  hypo

SEQ ID NO: 380777 - DNA, 247 bp, Homo sapiens; identical to SEQ ID NO: 373600
  chr15:31620800-31621047
  hypo

SEQ ID NO: 380778 - DNA, 218 bp, Homo sapiens; identical to SEQ ID NO: 342138
  chr15:31668823-31669041
  hypo

SEQ ID NO: 380779 - DNA, 74 bp, Homo sapiens; identical to SEQ ID NO: 342139
  chr15:31731229-31731303
  hypo

SEQ ID NO: 380780 - DNA, 507 bp, Homo sapiens; identical to SEQ ID NO: 351653
  chr15:31774606-31775113
  hypo

SEQ ID NO: 380781 - DNA, 209 bp, Homo sapiens; identical to SEQ ID NO: 290663
  chr15:32162282-32162491
  hypo

SEQ ID NO: 380782 - DNA, 761 bp, Homo sapiens; identical to SEQ ID NO: 345467
  chr15:32162523-32163284
  hypo

SEQ ID NO: 380783 - DNA, 357 bp, Homo sapiens; identical to SEQ ID NO: 342143
  chr15:33445914-33446271
  hypo

SEQ ID NO: 380784 - DNA, 375 bp, Homo sapiens; identical to SEQ ID NO: 348660
  chr15:34635788-34636163
  hypo

SEQ ID NO: 380785 - DNA, 46 bp, Homo sapiens; identical to SEQ ID NO: 351657
  chr15:34729898-34729944
  hypo

SEQ ID NO: 380786 - DNA, 225 bp, Homo sapiens; identical to SEQ ID NO: 342149
  chr15:34873206-34873431
  hypo

SEQ ID NO: 380787 - DNA, 88 bp, Homo sapiens; identical to SEQ ID NO: 360591
  chr15:35046519-35046607
  hypo

SEQ ID NO: 380788 - DNA, 181 bp, Homo sapiens; identical to SEQ ID NO: 290677
  chr15:35046689-35046870
  hypo

SEQ ID NO: 380789 - DNA, 111 bp, Homo sapiens; identical to SEQ ID NO: 335080
  chr15:38857279-38857390
  hypo

SEQ ID NO: 380790 - DNA, 113 bp, Homo sapiens; identical to SEQ ID NO: 342153
  chr15:39971441-39971554
  hypo

SEQ ID NO: 380791 - DNA, 196 bp, Homo sapiens; identical to SEQ ID NO: 366562
  chr15:40423149-40423345
  hypo

SEQ ID NO: 380792 - DNA, 90 bp, Homo sapiens; identical to SEQ ID NO: 355244
  chr15:40532821-40532911
  hypo

SEQ ID NO: 380793 - DNA, 161 bp, Homo sapiens; identical to SEQ ID NO: 360600
  chr15:40575352-40575513
  hypo

SEQ ID NO: 380794 - DNA, 518 bp, Homo sapiens; identical to SEQ ID NO: 342157
  chr15:40631683-40632201
  hypo

SEQ ID NO: 380795 - DNA, 103 bp, Homo sapiens; identical to SEQ ID NO: 355245
  chr15:40676583-40676686
  hypo

SEQ ID NO: 380796 - DNA, 87 bp, Homo sapiens; identical to SEQ ID NO: 366566
  chr15:41091052-41091139
  hypo

SEQ ID NO: 380797 - DNA, 416 bp, Homo sapiens; identical to SEQ ID NO: 360602
  chr15:41136701-41137117
  hypo

SEQ ID NO: 380798 - DNA, 44 bp, Homo sapiens; identical to SEQ ID NO: 203840
  chr15:41137147-41137191
  hypo

SEQ ID NO: 380799 - DNA, 77 bp, Homo sapiens; identical to SEQ ID NO: 342161
  chr15:41769434-41769511
  hypo

SEQ ID NO: 380800 - DNA, 133 bp, Homo sapiens; identical to SEQ ID NO: 342162
  chr15:42162038-42162171
  hypo

SEQ ID NO: 380801 - DNA, 234 bp, Homo sapiens; identical to SEQ ID NO: 355246
  chr15:43020360-43020594
  hypo

SEQ ID NO: 380802 - DNA, 89 bp, Homo sapiens; identical to SEQ ID NO: 342165
  chr15:45440539-45440628
  hypo

SEQ ID NO: 380803 - DNA, 563 bp, Homo sapiens; identical to SEQ ID NO: 355247
  chr15:45444141-45444704
  hypo

SEQ ID NO: 380804 - DNA, 205 bp, Homo sapiens; identical to SEQ ID NO: 360624
  chr15:45479833-45480038
  hypo

SEQ ID NO: 380805 - DNA, 274 bp, Homo sapiens; identical to SEQ ID NO: 203861
  chr15:45670188-45670462
  hypo

SEQ ID NO: 380806 - DNA, 339 bp, Homo sapiens; identical to SEQ ID NO: 345471
  chr15:45722599-45722938
  hypo

SEQ ID NO: 380807 - DNA, 143 bp, Homo sapiens; identical to SEQ ID NO: 366577
  chr15:48666272-48666415
  hypo

SEQ ID NO: 380808 - DNA, 77 bp, Homo sapiens; identical to SEQ ID NO: 345475
  chr15:48936649-48936726
  hypo

SEQ ID NO: 380809 - DNA, 234 bp, Homo sapiens; identical to SEQ ID NO: 342173
  chr15:49268662-49268896
  hypo

SEQ ID NO: 380810 - DNA, 290 bp, Homo sapiens; identical to SEQ ID NO: 342174
  chr15:49698682-49698972
  hypo

SEQ ID NO: 380811 - DNA, 350 bp, Homo sapiens; identical to SEQ ID NO: 335110
  chr15:50474768-50475118
  hypo

SEQ ID NO: 380812 - DNA, 185 bp, Homo sapiens; identical to SEQ ID NO: 360641
  chr15:52404388-52404573
  hypo

SEQ ID NO: 380813 - DNA, 815 bp, Homo sapiens; identical to SEQ ID NO: 360642
  chr15:52587420-52588235
  hypo

SEQ ID NO: 380814 - DNA, 76 bp, Homo sapiens; identical to SEQ ID NO: 342179
  chr15:54191760-54191836
  hypo

SEQ ID NO: 380815 - DNA, 86 bp, Homo sapiens; identical to SEQ ID NO: 342183
  chr15:55965701-55965787
  hypo

SEQ ID NO: 380816 - DNA, 85 bp, Homo sapiens; identical to SEQ ID NO: 342184
  chr15:56363533-56363618
  hypo

SEQ ID NO: 380817 - DNA, 379 bp, Homo sapiens; identical to SEQ ID NO: 360648
  chr15:57598802-57599181
  hypo

SEQ ID NO: 380818 - DNA, 133 bp, Homo sapiens
  chr15:57618572-57618705
  hypo
aagtctgcgatgacagtgctggcatgtggcgcgggggcgcagggtacacatccttgtctcagctgtcccacatggcagcagtgagcgcggacttcgctcctggatgcgctgccctggcctccacctcggtccc

SEQ ID NO: 380819 - DNA, 94 bp, Homo sapiens; identical to SEQ ID NO: 342187
  chr15:58028020-58028114
  hypo

SEQ ID NO: 380820 - DNA, 113 bp, Homo sapiens; identical to SEQ ID NO: 342188
  chr15:58839542-58839655
  hypo

SEQ ID NO: 380821 - DNA, 34 bp, Homo sapiens; identical to SEQ ID NO: 360651
  chr15:60288752-60288786
  hypo

SEQ ID NO: 380822 - DNA, 75 bp, Homo sapiens; identical to SEQ ID NO: 351687
  chr15:60289235-60289310
  hypo

SEQ ID NO: 380823 - DNA, 1567 bp, Homo sapiens; identical to SEQ ID NO: 360654
  chr15:60883782-60885349
  hypo

SEQ ID NO: 380824 - DNA, 129 bp, Homo sapiens; identical to SEQ ID NO: 342192
  chr15:61931851-61931980
  hypo

SEQ ID NO: 380825 - DNA, 87 bp, Homo sapiens; identical to SEQ ID NO: 351693
  chr15:62456599-62456686
  hypo

SEQ ID NO: 380826 - DNA, 130 bp, Homo sapiens; identical to SEQ ID NO: 203914
  chr15:62457008-62457138
  hypo

SEQ ID NO: 380827 - DNA, 257 bp, Homo sapiens; identical to SEQ ID NO: 351695
  chr15:62457296-62457553
  hypo

SEQ ID NO: 380828 - DNA, 201 bp, Homo sapiens; identical to SEQ ID NO: 342194
  chr15:62747468-62747669
  hypo

SEQ ID NO: 380829 - DNA, 497 bp, Homo sapiens; identical to SEQ ID NO: 342195
  chr15:62753676-62754173
  hypo

SEQ ID NO: 380830 - DNA, 66 bp, Homo sapiens; identical to SEQ ID NO: 342196
  chr15:62832519-62832585
  hypo

SEQ ID NO: 380831 - DNA, 132 bp, Homo sapiens; identical to SEQ ID NO: 342197
  chr15:62978897-62979029
  hypo

SEQ ID NO: 380832 - DNA, 310 bp, Homo sapiens; identical to SEQ ID NO: 342198
  chr15:62993112-62993422
  hypo

SEQ ID NO: 380833 - DNA, 222 bp, Homo sapiens; identical to SEQ ID NO: 342199
  chr15:63000769-63000991
  hypo

SEQ ID NO: 380834 - DNA, 220 bp, Homo sapiens; identical to SEQ ID NO: 342200
  chr15:63029125-63029345
  hypo

SEQ ID NO: 380835 - DNA, 290 bp, Homo sapiens; identical to SEQ ID NO: 342201
  chr15:63030480-63030770
  hypo

SEQ ID NO: 380836 - DNA, 67 bp, Homo sapiens; identical to SEQ ID NO: 342202
  chr15:63059828-63059895
  hypo

SEQ ID NO: 380837 - DNA, 153 bp, Homo sapiens; identical to SEQ ID NO: 342203
  chr15:63066085-63066238
  hypo

SEQ ID NO: 380838 - DNA, 131 bp, Homo sapiens; identical to SEQ ID NO: 366604
  chr15:63072875-63073006
  hypo

SEQ ID NO: 380839 - DNA, 374 bp, Homo sapiens; identical to SEQ ID NO: 342205
  chr15:63075618-63075992
  hypo

SEQ ID NO: 380840 - DNA, 620 bp, Homo sapiens; identical to SEQ ID NO: 342206
  chr15:63086996-63087616
  hypo

SEQ ID NO: 380841 - DNA, 222 bp, Homo sapiens; identical to SEQ ID NO: 342207
  chr15:63088341-63088563
  hypo

SEQ ID NO: 380842 - DNA, 741 bp, Homo sapiens; identical to SEQ ID NO: 342208
  chr15:63089582-63090323
  hypo

SEQ ID NO: 380843 - DNA, 142 bp, Homo sapiens; identical to SEQ ID NO: 342209
  chr15:63115985-63116127
  hypo

SEQ ID NO: 380844 - DNA, 1024 bp, Homo sapiens; identical to SEQ ID NO: 342210
  chr15:63132478-63133502
  hypo

SEQ ID NO: 380845 - DNA, 206 bp, Homo sapiens; identical to SEQ ID NO: 342211
  chr15:63597968-63598174
  hypo

SEQ ID NO: 380846 - DNA, 76 bp, Homo sapiens; identical to SEQ ID NO: 342212
  chr15:63695768-63695844
  hypo

SEQ ID NO: 380847 - DNA, 350 bp, Homo sapiens; identical to SEQ ID NO: 203920
  chr15:63795501-63795851
  hypo

SEQ ID NO: 380848 - DNA, 338 bp, Homo sapiens; identical to SEQ ID NO: 347348
  chr15:63795894-63796232
  hypo

SEQ ID NO: 380849 - DNA, 218 bp, Homo sapiens; identical to SEQ ID NO: 342214
  chr15:63889834-63890052
  hypo

SEQ ID NO: 380850 - DNA, 390 bp, Homo sapiens
  chr15:64439389-64439779
  hypo
cgctgccgcccgcccagcccgggcccagaaaagaatccagcctctgtgccccgtggcgcccacaagctcgtggcccaggggctgtttgttttcttaacgaggttgaccaaacctcctgagcagcctttgtggcgcagcagaagccttgccggtgaaagggggctttgtgtgactgcaatggaagccagggcctgagctaaggcagggtctgtgggccagcctacccgtgcgcaggaatggggcgagtcggggtacatcttcactccccagcccttcctgccctctgctccttggttctatttccaagtggcaaactgccggctctatgcctgcatagaggagcgagtggagccaggcccccggcggggctgctgcggtaatcaggagacc

SEQ ID NO: 380851 - DNA, 202 bp, Homo sapiens; identical to SEQ ID NO: 373696
  chr15:64454743-64454945
  hypo

SEQ ID NO: 380852 - DNA, 179 bp, Homo sapiens; identical to SEQ ID NO: 342217
  chr15:64674712-64674891
  hypo

SEQ ID NO: 380853 - DNA, 64 bp, Homo sapiens; identical to SEQ ID NO: 342218
  chr15:64683091-64683155
  hypo

SEQ ID NO: 380854 - DNA, 82 bp, Homo sapiens; identical to SEQ ID NO: 342219
  chr15:65242083-65242165
  hypo

SEQ ID NO: 380855 - DNA, 421 bp, Homo sapiens; identical to SEQ ID NO: 342221
  chr15:66946036-66946457
  hypo

SEQ ID NO: 380856 - DNA, 115 bp, Homo sapiens; identical to SEQ ID NO: 342224
  chr15:68888212-68888327
  hypo

SEQ ID NO: 380857 - DNA, 99 bp, Homo sapiens; identical to SEQ ID NO: 342225
  chr15:68893753-68893852
  hypo

SEQ ID NO: 380858 - DNA, 102 bp, Homo sapiens; identical to SEQ ID NO: 366620
  chr15:68908928-68909030
  hypo

SEQ ID NO: 380859 - DNA, 174 bp, Homo sapiens; identical to SEQ ID NO: 342227
  chr15:68937507-68937681
  hypo

SEQ ID NO: 380860 - DNA, 410 bp, Homo sapiens; identical to SEQ ID NO: 342228
  chr15:70352928-70353338
  hypo

SEQ ID NO: 380861 - DNA, 242 bp, Homo sapiens
  chr15:70354323-70354565
  hypo
cgtggctcaggggcaagggccacttggagggaacggggctgggcagtattcggtgggaatagtgcggcaaccagcctcagaacttaatttcctttcctaagccgggttctgggcagccctacccggccaagtttctgcccgaagcaaattaaaatggcagagttatcaagccttgaagaaaaaatggaggttataatggaactgcagctcaaccttccccacagccgtgcaggagcggtggc

SEQ ID NO: 380862 - DNA, 57 bp, Homo sapiens; identical to SEQ ID NO: 342230
  chr15:70355607-70355664
  hypo

SEQ ID NO: 380863 - DNA, 214 bp, Homo sapiens; identical to SEQ ID NO: 366624
  chr15:70718600-70718814
  hypo

SEQ ID NO: 380864 - DNA, 37 bp, Homo sapiens; identical to SEQ ID NO: 366625
  chr15:71164699-71164736
  hypo

SEQ ID NO: 380865 - DNA, 193 bp, Homo sapiens; identical to SEQ ID NO: 351715
  chr15:71184276-71184469
  hypo

SEQ ID NO: 380866 - DNA, 766 bp, Homo sapiens; identical to SEQ ID NO: 290974
  chr15:71184499-71185265
  hypo

SEQ ID NO: 380867 - DNA, 587 bp, Homo sapiens; identical to SEQ ID NO: 345477
  chr15:71407569-71408156
  hypo

SEQ ID NO: 380868 - DNA, 203 bp, Homo sapiens; identical to SEQ ID NO: 366629
  chr15:72462436-72462639
  hypo

SEQ ID NO: 380869 - DNA, 114 bp, Homo sapiens; identical to SEQ ID NO: 366630
  chr15:72462669-72462783
  hypo

SEQ ID NO: 380870 - DNA, 181 bp, Homo sapiens; identical to SEQ ID NO: 342239
  chr15:72992573-72992754
  hypo

SEQ ID NO: 380871 - DNA, 209 bp, Homo sapiens; identical to SEQ ID NO: 366632
  chr15:73615717-73615926
  hypo

SEQ ID NO: 380872 - DNA, 375 bp, Homo sapiens; identical to SEQ ID NO: 373733
  chr15:74725128-74725503
  hypo

SEQ ID NO: 380873 - DNA, 675 bp, Homo sapiens; identical to SEQ ID NO: 373734
  chr15:74725548-74726223
  hypo

SEQ ID NO: 380874 - DNA, 247 bp, Homo sapiens; identical to SEQ ID NO: 291013
  chr15:75248843-75249090
  hypo

SEQ ID NO: 380875 - DNA, 191 bp, Homo sapiens; identical to SEQ ID NO: 335181
  chr15:75976190-75976381
  hypo

SEQ ID NO: 380876 - DNA, 48 bp, Homo sapiens; identical to SEQ ID NO: 366635
  chr15:76197521-76197569
  hypo

SEQ ID NO: 380877 - DNA, 96 bp, Homo sapiens; identical to SEQ ID NO: 342245
  chr15:76558876-76558972
  hypo

SEQ ID NO: 380878 - DNA, 31 bp, Homo sapiens; identical to SEQ ID NO: 355280
  chr15:77906720-77906751
  hypo

SEQ ID NO: 380879 - DNA, 106 bp, Homo sapiens; identical to SEQ ID NO: 355281
  chr15:77906998-77907104
  hypo

SEQ ID NO: 380880 - DNA, 58 bp, Homo sapiens
  chr15:77908027-77908085
  hypo
cgcgtctcggtggggatgccctcggggactgccacaaagcgcttgcggtggcacagca

SEQ ID NO: 380881 - DNA, 274 bp, Homo sapiens; identical to SEQ ID NO: 342248
  chr15:78010517-78010791
  hypo

SEQ ID NO: 380882 - DNA, 123 bp, Homo sapiens
  chr15:79081981-79082104
  hypo
cgagggtgaagctcggctctcagtgtagcaatgggggcaggcacagtacctgtgcccgagctcgtgggctacagtgaaggccagcggcaggcccgtgtcctcgttgatgctgcagctgcggtg

SEQ ID NO: 380883 - DNA, 238 bp, Homo sapiens; identical to SEQ ID NO: 342252
  chr15:79163927-79164165
  hypo

SEQ ID NO: 380884 - DNA, 58 bp, Homo sapiens; identical to SEQ ID NO: 342253
  chr15:79208280-79208338
  hypo

SEQ ID NO: 380885 - DNA, 1218 bp, Homo sapiens; identical to SEQ ID NO: 335194
  chr15:80215312-80216530
  hypo

SEQ ID NO: 380886 - DNA, 152 bp, Homo sapiens; identical to SEQ ID NO: 342257
  chr15:80295619-80295771
  hypo

SEQ ID NO: 380887 - DNA, 188 bp, Homo sapiens; identical to SEQ ID NO: 355284
  chr15:80471858-80472046
  hypo

SEQ ID NO: 380888 - DNA, 196 bp, Homo sapiens; identical to SEQ ID NO: 347353
  chr15:81294105-81294301
  hypo

SEQ ID NO: 380889 - DNA, 194 bp, Homo sapiens; identical to SEQ ID NO: 345478
  chr15:82339684-82339878
  hypo

SEQ ID NO: 380890 - DNA, 73 bp, Homo sapiens; identical to SEQ ID NO: 360721
  chr15:83377928-83378001
  hypo

SEQ ID NO: 380891 - DNA, 125 bp, Homo sapiens; identical to SEQ ID NO: 204007
  chr15:83378087-83378212
  hypo

SEQ ID NO: 380892 - DNA, 83 bp, Homo sapiens; identical to SEQ ID NO: 366648
  chr15:83523579-83523662
  hypo

SEQ ID NO: 380893 - DNA, 113 bp, Homo sapiens; identical to SEQ ID NO: 342264
  chr15:83572358-83572471
  hypo

SEQ ID NO: 380894 - DNA, 181 bp, Homo sapiens; identical to SEQ ID NO: 360728
  chr15:84323434-84323615
  hypo

SEQ ID NO: 380895 - DNA, 305 bp, Homo sapiens; identical to SEQ ID NO: 342268
  chr15:86306299-86306604
  hypo

SEQ ID NO: 380896 - DNA, 121 bp, Homo sapiens; identical to SEQ ID NO: 342271
  chr15:89386721-89386842
  hypo

SEQ ID NO: 380897 - DNA, 47 bp, Homo sapiens; identical to SEQ ID NO: 355289
  chr15:89876331-89876378
  hypo

SEQ ID NO: 380898 - DNA, 107 bp, Homo sapiens; identical to SEQ ID NO: 342273
  chr15:90378787-90378894
  hypo

SEQ ID NO: 380899 - DNA, 47 bp, Homo sapiens; identical to SEQ ID NO: 366654
  chr15:90501233-90501280
  hypo

SEQ ID NO: 380900 - DNA, 106 bp, Homo sapiens; identical to SEQ ID NO: 342275
  chr15:90501638-90501744
  hypo

SEQ ID NO: 380901 - DNA, 505 bp, Homo sapiens; identical to SEQ ID NO: 268065
  chr15:90611268-90611773
  hypo

SEQ ID NO: 380902 - DNA, 98 bp, Homo sapiens; identical to SEQ ID NO: 342277
  chr15:90746768-90746866
  hypo

SEQ ID NO: 380903 - DNA, 183 bp, Homo sapiens; identical to SEQ ID NO: 366657
  chr15:90755573-90755756
  hypo

SEQ ID NO: 380904 - DNA, 42 bp, Homo sapiens; identical to SEQ ID NO: 366658
  chr15:90756079-90756121
  hypo

SEQ ID NO: 380905 - DNA, 364 bp, Homo sapiens; identical to SEQ ID NO: 348675
  chr15:90903993-90904357
  hypo

SEQ ID NO: 380906 - DNA, 86 bp, Homo sapiens; identical to SEQ ID NO: 342281
  chr15:91423329-91423415
  hypo

SEQ ID NO: 380907 - DNA, 109 bp, Homo sapiens; identical to SEQ ID NO: 351743
  chr15:91427360-91427469
  hypo

SEQ ID NO: 380908 - DNA, 77 bp, Homo sapiens; identical to SEQ ID NO: 351744
  chr15:91427979-91428056
  hypo

SEQ ID NO: 380909 - DNA, 387 bp, Homo sapiens; identical to SEQ ID NO: 342283
  chr15:91503650-91504037
  hypo

SEQ ID NO: 380910 - DNA, 297 bp, Homo sapiens; identical to SEQ ID NO: 348676
  chr15:91840031-91840328
  hypo

SEQ ID NO: 380911 - DNA, 103 bp, Homo sapiens; identical to SEQ ID NO: 347360
  chr15:92459227-92459330
  hypo

SEQ ID NO: 380912 - DNA, 235 bp, Homo sapiens; identical to SEQ ID NO: 342287
  chr15:93179848-93180083
  hypo

SEQ ID NO: 380913 - DNA, 145 bp, Homo sapiens; identical to SEQ ID NO: 342288
  chr15:93433733-93433878
  hypo

SEQ ID NO: 380914 - DNA, 67 bp, Homo sapiens; identical to SEQ ID NO: 342289
  chr15:93504252-93504319
  hypo

SEQ ID NO: 380915 - DNA, 229 bp, Homo sapiens; identical to SEQ ID NO: 319557
  chr15:93595181-93595410
  hypo

SEQ ID NO: 380916 - DNA, 121 bp, Homo sapiens; identical to SEQ ID NO: 355299
  chr15:93595508-93595629
  hypo

SEQ ID NO: 380917 - DNA, 351 bp, Homo sapiens; identical to SEQ ID NO: 342291
  chr15:94048797-94049148
  hypo

SEQ ID NO: 380918 - DNA, 757 bp, Homo sapiens; identical to SEQ ID NO: 335233
  chr15:94774574-94775331
  hypo

SEQ ID NO: 380919 - DNA, 353 bp, Homo sapiens; identical to SEQ ID NO: 342293
  chr15:94881658-94882011
  hypo

SEQ ID NO: 380920 - DNA, 460 bp, Homo sapiens; identical to SEQ ID NO: 351747
  chr15:96873798-96874258
  hypo

SEQ ID NO: 380921 - DNA, 78 bp, Homo sapiens; identical to SEQ ID NO: 373797
  chr15:99192824-99192902
  hypo

SEQ ID NO: 380922 - DNA, 265 bp, Homo sapiens; identical to SEQ ID NO: 204065
  chr15:99192941-99193206
  hypo

SEQ ID NO: 380923 - DNA, 90 bp, Homo sapiens
  chr15:99254469-99254559
  hypo
cgaaaacattaagcacagaagaatcccattcaggtaatcttctgttggctggctgtagaactacggagaacatctggagaaacacgtcaa

SEQ ID NO: 380924 - DNA, 223 bp, Homo sapiens; identical to SEQ ID NO: 342298
  chr15:99256135-99256358
  hypo

SEQ ID NO: 380925 - DNA, 182 bp, Homo sapiens; identical to SEQ ID NO: 342299
  chr15:99276224-99276406
  hypo

SEQ ID NO: 380926 - DNA, 453 bp, Homo sapiens; identical to SEQ ID NO: 342300
  chr15:99434503-99434956
  hypo

SEQ ID NO: 380927 - DNA, 191 bp, Homo sapiens; identical to SEQ ID NO: 342301
  chr15:99451886-99452077
  hypo

SEQ ID NO: 380928 - DNA, 58 bp, Homo sapiens; identical to SEQ ID NO: 366676
  chr15:99454579-99454637
  hypo

SEQ ID NO: 380929 - DNA, 321 bp, Homo sapiens; identical to SEQ ID NO: 366677
  chr15:99459893-99460214
  hypo

SEQ ID NO: 380930 - DNA, 209 bp, Homo sapiens; identical to SEQ ID NO: 342305
  chr15:99465447-99465656
  hypo

SEQ ID NO: 380931 - DNA, 268 bp, Homo sapiens
  chr15:99482494-99482762
  hypo
cggcatggcatacctcaacgccaataagttcgtccacagagaccttgctgcccggaattgcatggtagccgaagatttcacagtcaaaatcggaggtgtgtccttagctttccaggtctgggcaagaactaaactcaggtgttttgaggactttgttggcattagtctgcccctggagaggttttctagtgtgtcccttgagtgcacggactccttcttgggaatgatgtgattgtctccagttgatggtcacaaacctggcacggtc

SEQ ID NO: 380932 - DNA, 226 bp, Homo sapiens; identical to SEQ ID NO: 355304
  chr15:99497132-99497358
  hypo

SEQ ID NO: 380933 - DNA, 254 bp, Homo sapiens; identical to SEQ ID NO: 366680
  chr15:99504104-99504358
  hypo

SEQ ID NO: 380934 - DNA, 130 bp, Homo sapiens; identical to SEQ ID NO: 342309
  chr15:99505061-99505191
  hypo

SEQ ID NO: 380935 - DNA, 85 bp, Homo sapiens; identical to SEQ ID NO: 346105
  chr15:99506062-99506147
  hypo

SEQ ID NO: 380936 - DNA, 468 bp, Homo sapiens; identical to SEQ ID NO: 345483
  chr15:100882092-100882560
  hypo

SEQ ID NO: 380937 - DNA, 497 bp, Homo sapiens; identical to SEQ ID NO: 335245
  chr15:101458286-101458783
  hypo

SEQ ID NO: 380938 - DNA, 693 bp, Homo sapiens; identical to SEQ ID NO: 291211
  chr15:101459313-101460006
  hypo

SEQ ID NO: 380939 - DNA, 148 bp, Homo sapiens; identical to SEQ ID NO: 342314
  chr15:101464778-101464926
  hypo

SEQ ID NO: 380940 - DNA, 157 bp, Homo sapiens; identical to SEQ ID NO: 342316
  chr15:101845367-101845524
  hypo

SEQ ID NO: 380941 - DNA, 409 bp, Homo sapiens; identical to SEQ ID NO: 342317
  chr15:101910626-101911035
  hypo

SEQ ID NO: 380942 - DNA, 247 bp, Homo sapiens; identical to SEQ ID NO: 342318
  chr15:101938625-101938872
  hypo

SEQ ID NO: 380943 - DNA, 216 bp, Homo sapiens; identical to SEQ ID NO: 342319
  chr15:102020345-102020561
  hypo

SEQ ID NO: 380944 - DNA, 152 bp, Homo sapiens; identical to SEQ ID NO: 355314
  chr15:102043329-102043481
  hypo

SEQ ID NO: 380945 - DNA, 544 bp, Homo sapiens; identical to SEQ ID NO: 342321
  chr15:102076822-102077366
  hypo

SEQ ID NO: 380946 - DNA, 124 bp, Homo sapiens; identical to SEQ ID NO: 342322
  chr15:102226045-102226169
  hypo

SEQ ID NO: 380947 - DNA, 295 bp, Homo sapiens; identical to SEQ ID NO: 342323
  chr16:94400-94695
  hypo

SEQ ID NO: 380948 - DNA, 84 bp, Homo sapiens
  chr16:114357-114441
  hypo
cgctgtgggaaggccctgcgggcagcccggggacccaagaggggcagagtgtggacacgcccgaagcgtacttgtcggctgcta

SEQ ID NO: 380949 - DNA, 179 bp, Homo sapiens; identical to SEQ ID NO: 348681
  chr16:142447-142626
  hypo

SEQ ID NO: 380950 - DNA, 117 bp, Homo sapiens; identical to SEQ ID NO: 342326
  chr16:189554-189671
  hypo

SEQ ID NO: 380951 - DNA, 358 bp, Homo sapiens; identical to SEQ ID NO: 355318
  chr16:311205-311563
  hypo

SEQ ID NO: 380952 - DNA, 391 bp, Homo sapiens; identical to SEQ ID NO: 373811
  chr16:325107-325498
  hypo

SEQ ID NO: 380953 - DNA, 55 bp, Homo sapiens; identical to SEQ ID NO: 373812
  chr16:325546-325601
  hypo

SEQ ID NO: 380954 - DNA, 367 bp, Homo sapiens; identical to SEQ ID NO: 342333
  chr16:350669-351036
  hypo

SEQ ID NO: 380955 - DNA, 195 bp, Homo sapiens; identical to SEQ ID NO: 355320
  chr16:410000-410195
  hypo

SEQ ID NO: 380956 - DNA, 281 bp, Homo sapiens; identical to SEQ ID NO: 319736
  chr16:410714-410995
  hypo

SEQ ID NO: 380957 - DNA, 111 bp, Homo sapiens; identical to SEQ ID NO: 346109
  chr16:411606-411717
  hypo

SEQ ID NO: 380958 - DNA, 72 bp, Homo sapiens; identical to SEQ ID NO: 342335
  chr16:440413-440485
  hypo

SEQ ID NO: 380959 - DNA, 48 bp, Homo sapiens
  chr16:468053-468101
  hypo
cgcactcttttttgtccggcttctctcactgaacctgattgctcccag

SEQ ID NO: 380960 - DNA, 36 bp, Homo sapiens
  chr16:468131-468167
  hypo
tgaaatcctcttcagggttgagccgggctccgcgcc

SEQ ID NO: 380961 - DNA, 214 bp, Homo sapiens; identical to SEQ ID NO: 355325
  chr16:521925-522139
  hypo

SEQ ID NO: 380962 - DNA, 309 bp, Homo sapiens; identical to SEQ ID NO: 366704
  chr16:524299-524608
  hypo

SEQ ID NO: 380963 - DNA, 128 bp, Homo sapiens; identical to SEQ ID NO: 355326
  chr16:533135-533263
  hypo

SEQ ID NO: 380964 - DNA, 142 bp, Homo sapiens; identical to SEQ ID NO: 342340
  chr16:537542-537684
  hypo

SEQ ID NO: 380965 - DNA, 124 bp, Homo sapiens; identical to SEQ ID NO: 366707
  chr16:571590-571714
  hypo

SEQ ID NO: 380966 - DNA, 133 bp, Homo sapiens; identical to SEQ ID NO: 366708
  chr16:571959-572092
  hypo

SEQ ID NO: 380967 - DNA, 576 bp, Homo sapiens; identical to SEQ ID NO: 342342
  chr16:594129-594705
  hypo

SEQ ID NO: 380968 - DNA, 150 bp, Homo sapiens; identical to SEQ ID NO: 355328
  chr16:611800-611950
  hypo

SEQ ID NO: 380969 - DNA, 83 bp, Homo sapiens; identical to SEQ ID NO: 355329
  chr16:612320-612403
  hypo

SEQ ID NO: 380970 - DNA, 77 bp, Homo sapiens; identical to SEQ ID NO: 216551
  chr16:667407-667484
  hypo

SEQ ID NO: 380971 - DNA, 200 bp, Homo sapiens; identical to SEQ ID NO: 346112
  chr16:668074-668274
  hypo

SEQ ID NO: 380972 - DNA, 80 bp, Homo sapiens; identical to SEQ ID NO: 342346
  chr16:672467-672547
  hypo

SEQ ID NO: 380973 - DNA, 70 bp, Homo sapiens; identical to SEQ ID NO: 348687
  chr16:677367-677437
  hypo

SEQ ID NO: 380974 - DNA, 34 bp, Homo sapiens; identical to SEQ ID NO: 348688
  chr16:677803-677837
  hypo

SEQ ID NO: 380975 - DNA, 63 bp, Homo sapiens; identical to SEQ ID NO: 216557
  chr16:677909-677972
  hypo

SEQ ID NO: 380976 - DNA, 106 bp, Homo sapiens; identical to SEQ ID NO: 348690
  chr16:678084-678190
  hypo

SEQ ID NO: 380977 - DNA, 512 bp, Homo sapiens; identical to SEQ ID NO: 342349
  chr16:717202-717714
  hypo

SEQ ID NO: 380978 - DNA, 255 bp, Homo sapiens; identical to SEQ ID NO: 319806
  chr16:740914-741169
  hypo

SEQ ID NO: 380979 - DNA, 62 bp, Homo sapiens; identical to SEQ ID NO: 351764
  chr16:745060-745122
  hypo

SEQ ID NO: 380980 - DNA, 97 bp, Homo sapiens; identical to SEQ ID NO: 291235
  chr16:745316-745413
  hypo

SEQ ID NO: 380981 - DNA, 341 bp, Homo sapiens; identical to SEQ ID NO: 355339
  chr16:810054-810395
  hypo

SEQ ID NO: 380982 - DNA, 142 bp, Homo sapiens
  chr16:834381-834523
  hypo
cgtctcggctgagggcacggtggcagctgcctccagtcgggccccggtggggactccgggtctggaacccgcgtctcggctgaggacacggtggcagctgcctccggtctgggccccggtggggactccgggtctggaaccc

SEQ ID NO: 380983 - DNA, 126 bp, Homo sapiens; identical to SEQ ID NO: 355340
  chr16:845724-845850
  hypo

SEQ ID NO: 380984 - DNA, 293 bp, Homo sapiens; identical to SEQ ID NO: 366725
  chr16:894572-894865
  hypo

SEQ ID NO: 380985 - DNA, 237 bp, Homo sapiens; identical to SEQ ID NO: 366726
  chr16:945437-945674
  hypo

SEQ ID NO: 380986 - DNA, 258 bp, Homo sapiens; identical to SEQ ID NO: 355341
  chr16:981471-981729
  hypo

SEQ ID NO: 380987 - DNA, 226 bp, Homo sapiens; identical to SEQ ID NO: 216583
  chr16:981843-982069
  hypo

SEQ ID NO: 380988 - DNA, 278 bp, Homo sapiens; identical to SEQ ID NO: 355343
  chr16:982099-982377
  hypo

SEQ ID NO: 380989 - DNA, 50 bp, Homo sapiens; identical to SEQ ID NO: 366730
  chr16:1019685-1019735
  hypo

SEQ ID NO: 380990 - DNA, 179 bp, Homo sapiens; identical to SEQ ID NO: 360766
  chr16:1035474-1035653
  hypo

SEQ ID NO: 380991 - DNA, 226 bp, Homo sapiens; identical to SEQ ID NO: 366732
  chr16:1036850-1037076
  hypo

SEQ ID NO: 380992 - DNA, 223 bp, Homo sapiens; identical to SEQ ID NO: 355344
  chr16:1061203-1061426
  hypo

SEQ ID NO: 380993 - DNA, 59 bp, Homo sapiens; identical to SEQ ID NO: 319869
  chr16:1113830-1113889
  hypo

SEQ ID NO: 380994 - DNA, 81 bp, Homo sapiens; identical to SEQ ID NO: 355345
  chr16:1154990-1155071
  hypo

SEQ ID NO: 380995 - DNA, 131 bp, Homo sapiens; identical to SEQ ID NO: 355346
  chr16:1248221-1248352
  hypo

SEQ ID NO: 380996 - DNA, 88 bp, Homo sapiens; identical to SEQ ID NO: 355347
  chr16:1248922-1249010
  hypo

SEQ ID NO: 380997 - DNA, 189 bp, Homo sapiens; identical to SEQ ID NO: 366737
  chr16:1250534-1250723
  hypo

SEQ ID NO: 380998 - DNA, 319 bp, Homo sapiens; identical to SEQ ID NO: 366738
  chr16:1251835-1252154
  hypo

SEQ ID NO: 380999 - DNA, 182 bp, Homo sapiens
  chr16:1253116-1253298
  hypo
tgccgggatgctgtgtgccctcatgcgctggtacccagggcgtgcagacgagtgtcgggcgcatgctcctagcccttgaattgtgggagtccagccgctgtgtgttataagaggcacacgggctccaaagacagcacgaaaacatcacaggacggctcgatggtcattttcatgtcagtttc

SEQ ID NO: 381000 - DNA, 89 bp, Homo sapiens; identical to SEQ ID NO: 366739
  chr16:1265061-1265150
  hypo

SEQ ID NO: 381001 - DNA, 224 bp, Homo sapiens; identical to SEQ ID NO: 366740
  chr16:1265333-1265557
  hypo

SEQ ID NO: 381002 - DNA, 132 bp, Homo sapiens
  chr16:1270065-1270197
  hypo
cggtgaggccggtgacccaggggggctccctgcagtccccaccacgctccccacggcccgccagcgtccgcactcgtaagcataccttcggacagcgctgcgtctccagccggccggcggccccaggcggag

SEQ ID NO: 381003 - DNA, 332 bp, Homo sapiens
  chr16:1270449-1270781
  hypo
ctgaggccgagcccgctctgggtgcgcgcagaaagaagaagatgagccccccctgcatctcggtggaaccccctgcggaggacgagggctctgcgcggccctccgcggcagagggcggcagcaccacactgaggcgcaggaccccgtcctgtgaggccacgcctcacagggactccctggagcccacagagggctcaggcgccgggggggaccctgcagccaagggggagcgctggggccaggcctcctgccgggctgagcacctgaccgtccccagctttgcctttgagccgctggacctcggggtccccagtggagaccctttcttggac

SEQ ID NO: 381004 - DNA, 61 bp, Homo sapiens; identical to SEQ ID NO: 366741
  chr16:1271094-1271155
  hypo

SEQ ID NO: 381005 - DNA, 385 bp, Homo sapiens; identical to SEQ ID NO: 355348
  chr16:1397859-1398244
  hypo

SEQ ID NO: 381006 - DNA, 74 bp, Homo sapiens
  chr16:1400771-1400845
  hypo
cgccgggtcacactgctgtggggcccctggactcacctacgatgcagaaggtggcagcaaacgcttccacgcag

SEQ ID NO: 381007 - DNA, 36 bp, Homo sapiens; identical to SEQ ID NO: 366743
  chr16:1407334-1407370
  hypo

SEQ ID NO: 381008 - DNA, 132 bp, Homo sapiens; identical to SEQ ID NO: 355349
  chr16:1424307-1424439
  hypo

SEQ ID NO: 381009 - DNA, 177 bp, Homo sapiens; identical to SEQ ID NO: 355350
  chr16:1424469-1424646
  hypo

SEQ ID NO: 381010 - DNA, 472 bp, Homo sapiens; identical to SEQ ID NO: 348691
  chr16:1424928-1425400
  hypo

SEQ ID NO: 381011 - DNA, 407 bp, Homo sapiens; identical to SEQ ID NO: 346114
  chr16:1425684-1426091
  hypo

SEQ ID NO: 381012 - DNA, 53 bp, Homo sapiens; identical to SEQ ID NO: 342385
  chr16:1472227-1472280
  hypo

SEQ ID NO: 381013 - DNA, 232 bp, Homo sapiens; identical to SEQ ID NO: 355354
  chr16:1493342-1493574
  hypo

SEQ ID NO: 381014 - DNA, 563 bp, Homo sapiens; identical to SEQ ID NO: 355355
  chr16:1493691-1494254
  hypo

SEQ ID NO: 381015 - DNA, 211 bp, Homo sapiens
  chr16:1580458-1580669
  hypo
cgattgtgcacaccctctcccgaggcccaggtgtggggctggacagggctgggacctgcctctacctgccccgcgtggctcctttcctctcccttgtcctgaaaacaactggttccttccgtccacatccaattgcggtggaaaatcacaaacaagcacaggaatgtggcagctgacttgggtcccagacgggctcccctgtgctctgaac

SEQ ID NO: 381016 - DNA, 124 bp, Homo sapiens
  chr16:1580699-1580823
  hypo
tggggagcgggagagagcccgcccgtggggagcgggagagagcccgcaggccggccctggttttgctctggttcctggggcccatgtgtgaccgaggacccagccagcacaccgtcagatgccc

SEQ ID NO: 381017 - DNA, 135 bp, Homo sapiens; identical to SEQ ID NO: 342388
  chr16:1651481-1651616
  hypo

SEQ ID NO: 381018 - DNA, 301 bp, Homo sapiens; identical to SEQ ID NO: 342389
  chr16:1652282-1652583
  hypo

SEQ ID NO: 381019 - DNA, 90 bp, Homo sapiens; identical to SEQ ID NO: 342390
  chr16:1677046-1677136
  hypo

SEQ ID NO: 381020 - DNA, 422 bp, Homo sapiens; identical to SEQ ID NO: 342391
  chr16:1682411-1682833
  hypo

SEQ ID NO: 381021 - DNA, 102 bp, Homo sapiens; identical to SEQ ID NO: 366754
  chr16:1704554-1704656
  hypo

SEQ ID NO: 381022 - DNA, 38 bp, Homo sapiens; identical to SEQ ID NO: 366755
  chr16:1704800-1704838
  hypo

SEQ ID NO: 381023 - DNA, 106 bp, Homo sapiens
  chr16:1724902-1725008
  hypo
cgctaatatgattacagcgaagactttcctgataagttctcaaactcgatgtgtgactgtttggcacttgagacaaacctgcctttgcagggaaagtgtctctcac

SEQ ID NO: 381024 - DNA, 366 bp, Homo sapiens
  chr16:1725038-1725404
  hypo
tgttcagtcccttgcatacctttgccttgagacttctgtgtctccttcccatttgggacacccaggtgagggcccagacatctggatgtggtcagacctcaccaaatatatgccttcgtggtggtctccctccttgcgccctcttgggtggccagcgttcctactgcagacggcccaacatccagtctttccccaggacagagctaacaagggcccctttgccttctcatcctcaggagttccaggcacatgagtcaccgtccatccacatccagtgtggcctggagctgctacagaggtgttgggcaggccatgcctgtgccgccatctctcccttcctgcctcatttcatcccccgcagcagcc

SEQ ID NO: 381025 - DNA, 194 bp, Homo sapiens; identical to SEQ ID NO: 346115
  chr16:1730112-1730306
  hypo

SEQ ID NO: 381026 - DNA, 105 bp, Homo sapiens; identical to SEQ ID NO: 346116
  chr16:1730761-1730866
  hypo

SEQ ID NO: 381027 - DNA, 727 bp, Homo sapiens; identical to SEQ ID NO: 366758
  chr16:1737575-1738302
  hypo

SEQ ID NO: 381028 - DNA, 131 bp, Homo sapiens; identical to SEQ ID NO: 355361
  chr16:1753650-1753781
  hypo

SEQ ID NO: 381029 - DNA, 1258 bp, Homo sapiens; identical to SEQ ID NO: 342398
  chr16:1796052-1797310
  hypo

SEQ ID NO: 381030 - DNA, 159 bp, Homo sapiens; identical to SEQ ID NO: 366761
  chr16:1807721-1807880
  hypo

SEQ ID NO: 381031 - DNA, 431 bp, Homo sapiens; identical to SEQ ID NO: 366762
  chr16:1807999-1808430
  hypo

SEQ ID NO: 381032 - DNA, 346 bp, Homo sapiens; identical to SEQ ID NO: 355362
  chr16:1812272-1812618
  hypo

SEQ ID NO: 381033 - DNA, 53 bp, Homo sapiens; identical to SEQ ID NO: 366764
  chr16:1812929-1812982
  hypo

SEQ ID NO: 381034 - DNA, 183 bp, Homo sapiens; identical to SEQ ID NO: 346117
  chr16:1813299-1813482
  hypo

SEQ ID NO: 381035 - DNA, 216 bp, Homo sapiens; identical to SEQ ID NO: 216640
  chr16:1814037-1814253
  hypo

SEQ ID NO: 381036 - DNA, 112 bp, Homo sapiens; identical to SEQ ID NO: 355365
  chr16:1814369-1814481
  hypo

SEQ ID NO: 381037 - DNA, 43 bp, Homo sapiens; identical to SEQ ID NO: 342404
  chr16:1994730-1994773
  hypo

SEQ ID NO: 381038 - DNA, 280 bp, Homo sapiens; identical to SEQ ID NO: 342406
  chr16:2035689-2035969
  hypo

SEQ ID NO: 381039 - DNA, 96 bp, Homo sapiens; identical to SEQ ID NO: 204085
  chr16:2042503-2042599
  hypo

SEQ ID NO: 381040 - DNA, 226 bp, Homo sapiens; identical to SEQ ID NO: 360772
  chr16:2042617-2042843
  hypo

SEQ ID NO: 381041 - DNA, 228 bp, Homo sapiens; identical to SEQ ID NO: 348700
  chr16:2042997-2043225
  hypo

SEQ ID NO: 381042 - DNA, 74 bp, Homo sapiens; identical to SEQ ID NO: 348701
  chr16:2104688-2104762
  hypo

SEQ ID NO: 381043 - DNA, 187 bp, Homo sapiens; identical to SEQ ID NO: 348702
  chr16:2105384-2105571
  hypo

SEQ ID NO: 381044 - DNA, 67 bp, Homo sapiens; identical to SEQ ID NO: 346120
  chr16:2106533-2106600
  hypo

SEQ ID NO: 381045 - DNA, 62 bp, Homo sapiens; identical to SEQ ID NO: 216652
  chr16:2106641-2106703
  hypo

SEQ ID NO: 381046 - DNA, 426 bp, Homo sapiens; identical to SEQ ID NO: 346122
  chr16:2107057-2107483
  hypo

SEQ ID NO: 381047 - DNA, 440 bp, Homo sapiens; identical to SEQ ID NO: 342413
  chr16:2108531-2108971
  hypo

SEQ ID NO: 381048 - DNA, 183 bp, Homo sapiens; identical to SEQ ID NO: 355374
  chr16:2129581-2129764
  hypo

SEQ ID NO: 381049 - DNA, 228 bp, Homo sapiens; identical to SEQ ID NO: 355375
  chr16:2131440-2131668
  hypo

SEQ ID NO: 381050 - DNA, 49 bp, Homo sapiens; identical to SEQ ID NO: 355376
  chr16:2141860-2141909
  hypo

SEQ ID NO: 381051 - DNA, 574 bp, Homo sapiens; identical to SEQ ID NO: 216662
  chr16:2141972-2142546
  hypo

SEQ ID NO: 381052 - DNA, 391 bp, Homo sapiens; identical to SEQ ID NO: 355378
  chr16:2142628-2143019
  hypo

SEQ ID NO: 381053 - DNA, 168 bp, Homo sapiens; identical to SEQ ID NO: 355379
  chr16:2146195-2146363
  hypo

SEQ ID NO: 381054 - DNA, 302 bp, Homo sapiens; identical to SEQ ID NO: 216667
  chr16:2213343-2213645
  hypo

SEQ ID NO: 381055 - DNA, 267 bp, Homo sapiens; identical to SEQ ID NO: 366786
  chr16:2213723-2213990
  hypo

SEQ ID NO: 381056 - DNA, 371 bp, Homo sapiens; identical to SEQ ID NO: 342419
  chr16:2226433-2226804
  hypo

SEQ ID NO: 381057 - DNA, 75 bp, Homo sapiens; identical to SEQ ID NO: 346123
  chr16:2229615-2229690
  hypo

SEQ ID NO: 381058 - DNA, 265 bp, Homo sapiens; identical to SEQ ID NO: 216670
  chr16:2230223-2230488
  hypo

SEQ ID NO: 381059 - DNA, 182 bp, Homo sapiens; identical to SEQ ID NO: 355382
  chr16:2231183-2231365
  hypo

SEQ ID NO: 381060 - DNA, 152 bp, Homo sapiens; identical to SEQ ID NO: 366791
  chr16:2235039-2235191
  hypo

SEQ ID NO: 381061 - DNA, 72 bp, Homo sapiens; identical to SEQ ID NO: 346125
  chr16:2278311-2278383
  hypo

SEQ ID NO: 381062 - DNA, 388 bp, Homo sapiens; identical to SEQ ID NO: 346126
  chr16:2280815-2281203
  hypo

SEQ ID NO: 381063 - DNA, 237 bp, Homo sapiens; identical to SEQ ID NO: 216674
  chr16:2281402-2281639
  hypo

SEQ ID NO: 381064 - DNA, 61 bp, Homo sapiens; identical to SEQ ID NO: 346128
  chr16:2281702-2281763
  hypo

SEQ ID NO: 381065 - DNA, 810 bp, Homo sapiens; identical to SEQ ID NO: 346129
  chr16:2282326-2283136
  hypo

SEQ ID NO: 381066 - DNA, 512 bp, Homo sapiens; identical to SEQ ID NO: 342425
  chr16:2358246-2358758
  hypo

SEQ ID NO: 381067 - DNA, 198 bp, Homo sapiens; identical to SEQ ID NO: 342426
  chr16:2477175-2477373
  hypo

SEQ ID NO: 381068 - DNA, 482 bp, Homo sapiens; identical to SEQ ID NO: 342427
  chr16:2485948-2486430
  hypo

SEQ ID NO: 381069 - DNA, 40 bp, Homo sapiens; identical to SEQ ID NO: 366799
  chr16:2497839-2497879
  hypo

SEQ ID NO: 381070 - DNA, 76 bp, Homo sapiens; identical to SEQ ID NO: 366800
  chr16:2498053-2498129
  hypo

SEQ ID NO: 381071 - DNA, 38 bp, Homo sapiens
  chr16:2531031-2531069
  hypo
cgctgtctctatcccttctgaggctaaggcttcctcac

SEQ ID NO: 381072 - DNA, 33 bp, Homo sapiens; identical to SEQ ID NO: 216682
  chr16:2531177-2531210
  hypo

SEQ ID NO: 381073 - DNA, 42 bp, Homo sapiens
  chr16:2531240-2531282
  hypo
gaatgcctattaaaatgattaggaccgggcgtggtggctcac

SEQ ID NO: 381074 - DNA, 394 bp, Homo sapiens; identical to SEQ ID NO: 346130
  chr16:2540434-2540828
  hypo

SEQ ID NO: 381075 - DNA, 60 bp, Homo sapiens; identical to SEQ ID NO: 346131
  chr16:2540933-2540993
  hypo

SEQ ID NO: 381076 - DNA, 135 bp, Homo sapiens; identical to SEQ ID NO: 342431
  chr16:2544830-2544965
  hypo

SEQ ID NO: 381077 - DNA, 272 bp, Homo sapiens; identical to SEQ ID NO: 366804
  chr16:2546133-2546405
  hypo

SEQ ID NO: 381078 - DNA, 532 bp, Homo sapiens; identical to SEQ ID NO: 366805
  chr16:2546506-2547038
  hypo

SEQ ID NO: 381079 - DNA, 383 bp, Homo sapiens; identical to SEQ ID NO: 355392
  chr16:2642765-2643148
  hypo

SEQ ID NO: 381080 - DNA, 49 bp, Homo sapiens; identical to SEQ ID NO: 346132
  chr16:2770043-2770092
  hypo

SEQ ID NO: 381081 - DNA, 173 bp, Homo sapiens; identical to SEQ ID NO: 346133
  chr16:2806405-2806578
  hypo

SEQ ID NO: 381082 - DNA, 47 bp, Homo sapiens; identical to SEQ ID NO: 366809
  chr16:2849309-2849356
  hypo

SEQ ID NO: 381083 - DNA, 173 bp, Homo sapiens; identical to SEQ ID NO: 348719
  chr16:2974650-2974823
  hypo

SEQ ID NO: 381084 - DNA, 326 bp, Homo sapiens; identical to SEQ ID NO: 346134
  chr16:3021581-3021907
  hypo

SEQ ID NO: 381085 - DNA, 52 bp, Homo sapiens; identical to SEQ ID NO: 348721
  chr16:3139033-3139085
  hypo

SEQ ID NO: 381086 - DNA, 608 bp, Homo sapiens; identical to SEQ ID NO: 348722
  chr16:3139367-3139975
  hypo

SEQ ID NO: 381087 - DNA, 31 bp, Homo sapiens; identical to SEQ ID NO: 373827
  chr16:3156725-3156756
  hypo

SEQ ID NO: 381088 - DNA, 314 bp, Homo sapiens
  chr16:3193333-3193647
  hypo
cgacccctccttccacccatgctggttccttctctttcacctgctagtggcctcagggcccctggctgaggggaggcgggggccggtggacaagacgctctggtcccttggtaacaggtgtgcatgtgccagccctctctgcccctaggcctttcttagccaaccttccatgcacacatcatcctgcggtcactgtcatggtctccgtttcccgtaagaagcaagcaaggtctcgctgtggacaaggctgattccagttggtgatttttacctctgggggcctggtgctgtgtgcatgcgtgtggcgggtggcc

SEQ ID NO: 381089 - DNA, 304 bp, Homo sapiens; identical to SEQ ID NO: 351771
  chr16:3208795-3209099
  hypo

SEQ ID NO: 381090 - DNA, 97 bp, Homo sapiens; identical to SEQ ID NO: 366815
  chr16:3537877-3537974
  hypo

SEQ ID NO: 381091 - DNA, 203 bp, Homo sapiens; identical to SEQ ID NO: 348723
  chr16:3696491-3696694
  hypo

SEQ ID NO: 381092 - DNA, 62 bp, Homo sapiens; identical to SEQ ID NO: 348724
  chr16:3696802-3696864
  hypo

SEQ ID NO: 381093 - DNA, 362 bp, Homo sapiens; identical to SEQ ID NO: 342448
  chr16:3741902-3742264
  hypo

SEQ ID NO: 381094 - DNA, 163 bp, Homo sapiens; identical to SEQ ID NO: 366819
  chr16:3772855-3773018
  hypo

SEQ ID NO: 381095 - DNA, 179 bp, Homo sapiens; identical to SEQ ID NO: 342450
  chr16:3811586-3811765
  hypo

SEQ ID NO: 381096 - DNA, 263 bp, Homo sapiens; identical to SEQ ID NO: 342451
  chr16:3821348-3821611
  hypo

SEQ ID NO: 381097 - DNA, 147 bp, Homo sapiens; identical to SEQ ID NO: 355403
  chr16:3900217-3900364
  hypo

SEQ ID NO: 381098 - DNA, 122 bp, Homo sapiens; identical to SEQ ID NO: 89770
  chr16:4092845-4092967
  hypo

SEQ ID NO: 381099 - DNA, 282 bp, Homo sapiens; identical to SEQ ID NO: 351774
  chr16:4165534-4165816
  hypo

SEQ ID NO: 381100 - DNA, 1114 bp, Homo sapiens; identical to SEQ ID NO: 351775
  chr16:4165852-4166966
  hypo

SEQ ID NO: 381101 - DNA, 193 bp, Homo sapiens; identical to SEQ ID NO: 348725
  chr16:4203995-4204188
  hypo

SEQ ID NO: 381102 - DNA, 543 bp, Homo sapiens; identical to SEQ ID NO: 345486
  chr16:4233245-4233788
  hypo

SEQ ID NO: 381103 - DNA, 187 bp, Homo sapiens; identical to SEQ ID NO: 335276
  chr16:4234090-4234277
  hypo

SEQ ID NO: 381104 - DNA, 367 bp, Homo sapiens
  chr16:4310368-4310735
  hypo
cgtggcctagggagaggcttccgccattcaagatcacctgtccccttcccggtccccagagcccactcccgggcgcctcctgctcacctgggtccgcagctgctgctgttcccgctccagcttctcctggtgcagcagcctcacctgttcctgctgctgctgcagctgcacctgctgcgcaatcaccttgagcttttccgggtacatgtgggcctccagcgagcgcacctggaggcaggacaacctgggctcagggccaaggccgggagcacaccctgccctgtcagtctcacagcagctcattcactcctgctgaaaaccctagcacagggcgggcccctctcaacagaggccagaagcctttcca

SEQ ID NO: 381105 - DNA, 68 bp, Homo sapiens; identical to SEQ ID NO: 355410
  chr16:4430998-4431066
  hypo

SEQ ID NO: 381106 - DNA, 298 bp, Homo sapiens; identical to SEQ ID NO: 216731
  chr16:4431189-4431487
  hypo

SEQ ID NO: 381107 - DNA, 313 bp, Homo sapiens; identical to SEQ ID NO: 355412
  chr16:4431516-4431829
  hypo

SEQ ID NO: 381108 - DNA, 847 bp, Homo sapiens; identical to SEQ ID NO: 342461
  chr16:4431854-4432701
  hypo

SEQ ID NO: 381109 - DNA, 77 bp, Homo sapiens; identical to SEQ ID NO: 342462
  chr16:4438405-4438482
  hypo

SEQ ID NO: 381110 - DNA, 176 bp, Homo sapiens; identical to SEQ ID NO: 342463
  chr16:4478626-4478802
  hypo

SEQ ID NO: 381111 - DNA, 226 bp, Homo sapiens; identical to SEQ ID NO: 342464
  chr16:4513533-4513759
  hypo

SEQ ID NO: 381112 - DNA, 116 bp, Homo sapiens; identical to SEQ ID NO: 342465
  chr16:4557910-4558026
  hypo

SEQ ID NO: 381113 - DNA, 103 bp, Homo sapiens; identical to SEQ ID NO: 366836
  chr16:4645033-4645136
  hypo

SEQ ID NO: 381114 - DNA, 59 bp, Homo sapiens; identical to SEQ ID NO: 342467
  chr16:4719497-4719556
  hypo

SEQ ID NO: 381115 - DNA, 104 bp, Homo sapiens
  chr16:4723492-4723596
  hypo
cggcagccctcggacgacgagaacagcgacaacagcaacgagtgtgtggtgtgcctgtccgacctgcgggacacgctgatcctgccctgccgccacctgtgcct

SEQ ID NO: 381116 - DNA, 308 bp, Homo sapiens; identical to SEQ ID NO: 342469
  chr16:4779967-4780275
  hypo

SEQ ID NO: 381117 - DNA, 256 bp, Homo sapiens; identical to SEQ ID NO: 342470
  chr16:4787730-4787986
  hypo

SEQ ID NO: 381118 - DNA, 568 bp, Homo sapiens; identical to SEQ ID NO: 342471
  chr16:4802468-4803036
  hypo

SEQ ID NO: 381119 - DNA, 160 bp, Homo sapiens; identical to SEQ ID NO: 366841
  chr16:4845976-4846136
  hypo

SEQ ID NO: 381120 - DNA, 118 bp, Homo sapiens; identical to SEQ ID NO: 348727
  chr16:4920116-4920234
  hypo

SEQ ID NO: 381121 - DNA, 200 bp, Homo sapiens; identical to SEQ ID NO: 216748
  chr16:4920289-4920489
  hypo

SEQ ID NO: 381122 - DNA, 314 bp, Homo sapiens; identical to SEQ ID NO: 348729
  chr16:4920526-4920840
  hypo

SEQ ID NO: 381123 - DNA, 166 bp, Homo sapiens; identical to SEQ ID NO: 366845
  chr16:4931957-4932123
  hypo

SEQ ID NO: 381124 - DNA, 126 bp, Homo sapiens; identical to SEQ ID NO: 366846
  chr16:4932153-4932279
  hypo

SEQ ID NO: 381125 - DNA, 664 bp, Homo sapiens; identical to SEQ ID NO: 335281
  chr16:5007944-5008608
  hypo

SEQ ID NO: 381126 - DNA, 367 bp, Homo sapiens; identical to SEQ ID NO: 366847
  chr16:5703287-5703654
  hypo

SEQ ID NO: 381127 - DNA, 814 bp, Homo sapiens; identical to SEQ ID NO: 335283
  chr16:8767901-8768715
  hypo

SEQ ID NO: 381128 - DNA, 414 bp, Homo sapiens; identical to SEQ ID NO: 342478
  chr16:8995963-8996377
  hypo

SEQ ID NO: 381129 - DNA, 64 bp, Homo sapiens; identical to SEQ ID NO: 355422
  chr16:9005277-9005341
  hypo

SEQ ID NO: 381130 - DNA, 298 bp, Homo sapiens; identical to SEQ ID NO: 335285
  chr16:9186882-9187180
  hypo

SEQ ID NO: 381131 - DNA, 85 bp, Homo sapiens; identical to SEQ ID NO: 342483
  chr16:10823594-10823679
  hypo

SEQ ID NO: 381132 - DNA, 42 bp, Homo sapiens; identical to SEQ ID NO: 342484
  chr16:11037121-11037163
  hypo

SEQ ID NO: 381133 - DNA, 321 bp, Homo sapiens; identical to SEQ ID NO: 342485
  chr16:11151051-11151372
  hypo

SEQ ID NO: 381134 - DNA, 129 bp, Homo sapiens; identical to SEQ ID NO: 366855
  chr16:11178526-11178655
  hypo

SEQ ID NO: 381135 - DNA, 620 bp, Homo sapiens; identical to SEQ ID NO: 366856
  chr16:11178685-11179305
  hypo

SEQ ID NO: 381136 - DNA, 310 bp, Homo sapiens; identical to SEQ ID NO: 342487
  chr16:11192863-11193173
  hypo

SEQ ID NO: 381137 - DNA, 587 bp, Homo sapiens; identical to SEQ ID NO: 342488
  chr16:11219568-11220155
  hypo

SEQ ID NO: 381138 - DNA, 145 bp, Homo sapiens; identical to SEQ ID NO: 342489
  chr16:11770890-11771035
  hypo

SEQ ID NO: 381139 - DNA, 74 bp, Homo sapiens; identical to SEQ ID NO: 342490
  chr16:11974709-11974783
  hypo

SEQ ID NO: 381140 - DNA, 199 bp, Homo sapiens; identical to SEQ ID NO: 342491
  chr16:12084484-12084683
  hypo

SEQ ID NO: 381141 - DNA, 146 bp, Homo sapiens; identical to SEQ ID NO: 355426
  chr16:12132253-12132399
  hypo

SEQ ID NO: 381142 - DNA, 376 bp, Homo sapiens; identical to SEQ ID NO: 355427
  chr16:12132450-12132826
  hypo

SEQ ID NO: 381143 - DNA, 150 bp, Homo sapiens; identical to SEQ ID NO: 348732
  chr16:12210622-12210772
  hypo

SEQ ID NO: 381144 - DNA, 91 bp, Homo sapiens; identical to SEQ ID NO: 348733
  chr16:12210896-12210987
  hypo

SEQ ID NO: 381145 - DNA, 90 bp, Homo sapiens; identical to SEQ ID NO: 360793
  chr16:12211189-12211279
  hypo

SEQ ID NO: 381146 - DNA, 96 bp, Homo sapiens; identical to SEQ ID NO: 342495
  chr16:12289463-12289559
  hypo

SEQ ID NO: 381147 - DNA, 243 bp, Homo sapiens; identical to SEQ ID NO: 342497
  chr16:12609457-12609700
  hypo

SEQ ID NO: 381148 - DNA, 429 bp, Homo sapiens; identical to SEQ ID NO: 345490
  chr16:12897365-12897794
  hypo

SEQ ID NO: 381149 - DNA, 349 bp, Homo sapiens; identical to SEQ ID NO: 335295
  chr16:14396725-14397074
  hypo

SEQ ID NO: 381150 - DNA, 108 bp, Homo sapiens; identical to SEQ ID NO: 342503
  chr16:15129362-15129470
  hypo

SEQ ID NO: 381151 - DNA, 75 bp, Homo sapiens; identical to SEQ ID NO: 366868
  chr16:15767635-15767710
  hypo

SEQ ID NO: 381152 - DNA, 262 bp, Homo sapiens; identical to SEQ ID NO: 366869
  chr16:15820563-15820825
  hypo

SEQ ID NO: 381153 - DNA, 160 bp, Homo sapiens; identical to SEQ ID NO: 342508
  chr16:16103307-16103467
  hypo

SEQ ID NO: 381154 - DNA, 63 bp, Homo sapiens; identical to SEQ ID NO: 342509
  chr16:16188327-16188390
  hypo

SEQ ID NO: 381155 - DNA, 183 bp, Homo sapiens; identical to SEQ ID NO: 342510
  chr16:16227979-16228162
  hypo

SEQ ID NO: 381156 - DNA, 94 bp, Homo sapiens; identical to SEQ ID NO: 366872
  chr16:18804320-18804414
  hypo

SEQ ID NO: 381157 - DNA, 226 bp, Homo sapiens; identical to SEQ ID NO: 342513
  chr16:19606532-19606758
  hypo

SEQ ID NO: 381158 - DNA, 117 bp, Homo sapiens; identical to SEQ ID NO: 355434
  chr16:19708387-19708504
  hypo

SEQ ID NO: 381159 - DNA, 47 bp, Homo sapiens; identical to SEQ ID NO: 216831
  chr16:19708561-19708608
  hypo

SEQ ID NO: 381160 - DNA, 41 bp, Homo sapiens; identical to SEQ ID NO: 342516
  chr16:21515452-21515493
  hypo

SEQ ID NO: 381161 - DNA, 64 bp, Homo sapiens; identical to SEQ ID NO: 342518
  chr16:21567027-21567091
  hypo

SEQ ID NO: 381162 - DNA, 169 bp, Homo sapiens; identical to SEQ ID NO: 366877
  chr16:21569179-21569348
  hypo

SEQ ID NO: 381163 - DNA, 370 bp, Homo sapiens; identical to SEQ ID NO: 366878
  chr16:21569399-21569769
  hypo

SEQ ID NO: 381164 - DNA, 394 bp, Homo sapiens; identical to SEQ ID NO: 366879
  chr16:22326003-22326397
  hypo

SEQ ID NO: 381165 - DNA, 304 bp, Homo sapiens; identical to SEQ ID NO: 366880
  chr16:22326427-22326731
  hypo

SEQ ID NO: 381166 - DNA, 184 bp, Homo sapiens; identical to SEQ ID NO: 360800
  chr16:23193716-23193900
  hypo

SEQ ID NO: 381167 - DNA, 156 bp, Homo sapiens; identical to SEQ ID NO: 342524
  chr16:23402123-23402279
  hypo

SEQ ID NO: 381168 - DNA, 106 bp, Homo sapiens; identical to SEQ ID NO: 342525
  chr16:23497832-23497938
  hypo

SEQ ID NO: 381169 - DNA, 239 bp, Homo sapiens; identical to SEQ ID NO: 342526
  chr16:23539152-23539391
  hypo

SEQ ID NO: 381170 - DNA, 148 bp, Homo sapiens; identical to SEQ ID NO: 342528
  chr16:24739345-24739493
  hypo

SEQ ID NO: 381171 - DNA, 713 bp, Homo sapiens; identical to SEQ ID NO: 342529
  chr16:24837143-24837856
  hypo

SEQ ID NO: 381172 - DNA, 219 bp, Homo sapiens; identical to SEQ ID NO: 342530
  chr16:24849506-24849725
  hypo

SEQ ID NO: 381173 - DNA, 43 bp, Homo sapiens; identical to SEQ ID NO: 355440
  chr16:27539990-27540033
  hypo

SEQ ID NO: 381174 - DNA, 168 bp, Homo sapiens; identical to SEQ ID NO: 366888
  chr16:27750033-27750201
  hypo

SEQ ID NO: 381175 - DNA, 594 bp, Homo sapiens; identical to SEQ ID NO: 342536
  chr16:27780854-27781448
  hypo

SEQ ID NO: 381176 - DNA, 211 bp, Homo sapiens; identical to SEQ ID NO: 342537
  chr16:27791003-27791214
  hypo

SEQ ID NO: 381177 - DNA, 64 bp, Homo sapiens; identical to SEQ ID NO: 342539
  chr16:28183893-28183957
  hypo

SEQ ID NO: 381178 - DNA, 43 bp, Homo sapiens; identical to SEQ ID NO: 216882
  chr16:28887802-28887845
  hypo

SEQ ID NO: 381179 - DNA, 100 bp, Homo sapiens; identical to SEQ ID NO: 342542
  chr16:28925777-28925877
  hypo

SEQ ID NO: 381180 - DNA, 54 bp, Homo sapiens; identical to SEQ ID NO: 216888
  chr16:29153320-29153374
  hypo

SEQ ID NO: 381181 - DNA, 276 bp, Homo sapiens; identical to SEQ ID NO: 355443
  chr16:29170096-29170372
  hypo

SEQ ID NO: 381182 - DNA, 163 bp, Homo sapiens; identical to SEQ ID NO: 342545
  chr16:29231876-29232039
  hypo

SEQ ID NO: 381183 - DNA, 533 bp, Homo sapiens; identical to SEQ ID NO: 347376
  chr16:29624651-29625184
  hypo

SEQ ID NO: 381184 - DNA, 173 bp, Homo sapiens; identical to SEQ ID NO: 342548
  chr16:29857096-29857269
  hypo

SEQ ID NO: 381185 - DNA, 76 bp, Homo sapiens; identical to SEQ ID NO: 335313
  chr16:29938107-29938183
  hypo

SEQ ID NO: 381186 - DNA, 60 bp, Homo sapiens; identical to SEQ ID NO: 366898
  chr16:30017168-30017228
  hypo

SEQ ID NO: 381187 - DNA, 42 bp, Homo sapiens; identical to SEQ ID NO: 366899
  chr16:30017858-30017900
  hypo

SEQ ID NO: 381188 - DNA, 189 bp, Homo sapiens; identical to SEQ ID NO: 342551
  chr16:30061428-30061617
  hypo

SEQ ID NO: 381189 - DNA, 135 bp, Homo sapiens; identical to SEQ ID NO: 342554
  chr16:30169940-30170075
  hypo

SEQ ID NO: 381190 - DNA, 75 bp, Homo sapiens; identical to SEQ ID NO: 355446
  chr16:30354637-30354712
  hypo

SEQ ID NO: 381191 - DNA, 70 bp, Homo sapiens; identical to SEQ ID NO: 355447
  chr16:30354742-30354812
  hypo

SEQ ID NO: 381192 - DNA, 670 bp, Homo sapiens; identical to SEQ ID NO: 366903
  chr16:30566776-30567446
  hypo

SEQ ID NO: 381193 - DNA, 105 bp, Homo sapiens; identical to SEQ ID NO: 366904
  chr16:30567509-30567614
  hypo

SEQ ID NO: 381194 - DNA, 54 bp, Homo sapiens
  chr16:30826509-30826563
  hypo
aaaacatctgctctccgaggtgtgggtgaaggtatggggggtccaaaaatgtcc

SEQ ID NO: 381195 - DNA, 33 bp, Homo sapiens
  chr16:30833291-30833324
  hypo
cgtggcctgccgcaaagcagatactcctccgga

SEQ ID NO: 381196 - DNA, 41 bp, Homo sapiens
  chr16:30833354-30833395
  hypo
ccatggatgccctccctgccacacagcgcctgctggacacc

SEQ ID NO: 381197 - DNA, 47 bp, Homo sapiens; identical to SEQ ID NO: 216915
  chr16:30907062-30907109
  hypo

SEQ ID NO: 381198 - DNA, 549 bp, Homo sapiens; identical to SEQ ID NO: 347378
  chr16:30959765-30960314
  hypo

SEQ ID NO: 381199 - DNA, 240 bp, Homo sapiens; identical to SEQ ID NO: 342561
  chr16:30991726-30991966
  hypo

SEQ ID NO: 381200 - DNA, 284 bp, Homo sapiens; identical to SEQ ID NO: 342562
  chr16:31131573-31131857
  hypo

SEQ ID NO: 381201 - DNA, 200 bp, Homo sapiens; identical to SEQ ID NO: 355451
  chr16:31138407-31138607
  hypo

SEQ ID NO: 381202 - DNA, 276 bp, Homo sapiens; identical to SEQ ID NO: 342564
  chr16:31142715-31142991
  hypo

SEQ ID NO: 381203 - DNA, 61 bp, Homo sapiens; identical to SEQ ID NO: 355452
  chr16:31447348-31447409
  hypo

SEQ ID NO: 381204 - DNA, 201 bp, Homo sapiens; identical to SEQ ID NO: 342566
  chr16:31487152-31487353
  hypo

SEQ ID NO: 381205 - DNA, 266 bp, Homo sapiens; identical to SEQ ID NO: 355453
  chr16:31500256-31500522
  hypo

SEQ ID NO: 381206 - DNA, 78 bp, Homo sapiens; identical to SEQ ID NO: 355454
  chr16:31500673-31500751
  hypo

SEQ ID NO: 381207 - DNA, 397 bp, Homo sapiens; identical to SEQ ID NO: 351796
  chr16:31712178-31712575
  hypo

SEQ ID NO: 381208 - DNA, 507 bp, Homo sapiens; identical to SEQ ID NO: 342569
  chr16:46683305-46683812
  hypo

SEQ ID NO: 381209 - DNA, 277 bp, Homo sapiens; identical to SEQ ID NO: 342570
  chr16:46934659-46934936
  hypo

SEQ ID NO: 381210 - DNA, 304 bp, Homo sapiens; identical to SEQ ID NO: 345492
  chr16:47176468-47176772
  hypo

SEQ ID NO: 381211 - DNA, 121 bp, Homo sapiens; identical to SEQ ID NO: 342574
  chr16:48663537-48663658
  hypo

SEQ ID NO: 381212 - DNA, 69 bp, Homo sapiens
  chr16:49767035-49767104
  hypo
agccttcgatattgtaagtcatcatacaaccatggttacacagtcaagtgcccgtctccgaaattcctc

SEQ ID NO: 381213 - DNA, 399 bp, Homo sapiens; identical to SEQ ID NO: 366917
  chr16:50335368-50335767
  hypo

SEQ ID NO: 381214 - DNA, 190 bp, Homo sapiens; identical to SEQ ID NO: 366918
  chr16:50335818-50336008
  hypo

SEQ ID NO: 381215 - DNA, 163 bp, Homo sapiens; identical to SEQ ID NO: 342579
  chr16:53337696-53337859
  hypo

SEQ ID NO: 381216 - DNA, 257 bp, Homo sapiens; identical to SEQ ID NO: 366919
  chr16:53563654-53563911
  hypo

SEQ ID NO: 381217 - DNA, 116 bp, Homo sapiens
  chr16:54128713-54128829
  hypo
ggtagagcatagaagtttagtctcatgagatgactccattcctaagggaatctagaggctttctgcggagcaccgtgacatagatcatatcatcctcctgcttaaaaccctccggc

SEQ ID NO: 381218 - DNA, 116 bp, Homo sapiens; identical to SEQ ID NO: 351806
  chr16:55513960-55514076
  hypo

SEQ ID NO: 381219 - DNA, 60 bp, Homo sapiens; identical to SEQ ID NO: 204213
  chr16:56225663-56225723
  hypo

SEQ ID NO: 381220 - DNA, 268 bp, Homo sapiens; identical to SEQ ID NO: 204214
  chr16:56225881-56226149
  hypo

SEQ ID NO: 381221 - DNA, 85 bp, Homo sapiens; identical to SEQ ID NO: 351807
  chr16:56228284-56228369
  hypo

SEQ ID NO: 381222 - DNA, 57 bp, Homo sapiens; identical to SEQ ID NO: 351808
  chr16:56228591-56228648
  hypo

SEQ ID NO: 381223 - DNA, 41 bp, Homo sapiens; identical to SEQ ID NO: 342587
  chr16:56368405-56368446
  hypo

SEQ ID NO: 381224 - DNA, 345 bp, Homo sapiens; identical to SEQ ID NO: 342588
  chr16:56398009-56398354
  hypo

SEQ ID NO: 381225 - DNA, 48 bp, Homo sapiens; identical to SEQ ID NO: 360839
  chr16:56666592-56666640
  hypo

SEQ ID NO: 381226 - DNA, 107 bp, Homo sapiens; identical to SEQ ID NO: 342590
  chr16:56782274-56782381
  hypo

SEQ ID NO: 381227 - DNA, 101 bp, Homo sapiens; identical to SEQ ID NO: 366928
  chr16:56857042-56857143
  hypo

SEQ ID NO: 381228 - DNA, 204 bp, Homo sapiens; identical to SEQ ID NO: 360846
  chr16:57318412-57318616
  hypo

SEQ ID NO: 381229 - DNA, 246 bp, Homo sapiens; identical to SEQ ID NO: 342593
  chr16:57559728-57559974
  hypo

SEQ ID NO: 381230 - DNA, 1300 bp, Homo sapiens; identical to SEQ ID NO: 342595
  chr16:58030214-58031514
  hypo

SEQ ID NO: 381231 - DNA, 157 bp, Homo sapiens; identical to SEQ ID NO: 342596
  chr16:58078950-58079107
  hypo

SEQ ID NO: 381232 - DNA, 112 bp, Homo sapiens
  chr16:58192178-58192290
  hypo
cgtgatctctctatacgcgttaagacgtttgatttggttcttgttctgcttatggaaaagtgggagaaccgcaacagacctggggaaagagacgggaggagggaaagacgtc

SEQ ID NO: 381233 - DNA, 72 bp, Homo sapiens; identical to SEQ ID NO: 342600
  chr16:58558309-58558381
  hypo

SEQ ID NO: 381234 - DNA, 57 bp, Homo sapiens; identical to SEQ ID NO: 342601
  chr16:58633220-58633277
  hypo

SEQ ID NO: 381235 - DNA, 205 bp, Homo sapiens; identical to SEQ ID NO: 291600
  chr16:65157317-65157522
  hypo

SEQ ID NO: 381236 - DNA, 566 bp, Homo sapiens; identical to SEQ ID NO: 351815
  chr16:66638452-66639018
  hypo

SEQ ID NO: 381237 - DNA, 161 bp, Homo sapiens; identical to SEQ ID NO: 342604
  chr16:67006210-67006371
  hypo

SEQ ID NO: 381238 - DNA, 109 bp, Homo sapiens; identical to SEQ ID NO: 342605
  chr16:67175573-67175682
  hypo

SEQ ID NO: 381239 - DNA, 132 bp, Homo sapiens; identical to SEQ ID NO: 360851
  chr16:67184509-67184641
  hypo

SEQ ID NO: 381240 - DNA, 130 bp, Homo sapiens; identical to SEQ ID NO: 345493
  chr16:67189038-67189168
  hypo

SEQ ID NO: 381241 - DNA, 377 bp, Homo sapiens; identical to SEQ ID NO: 345494
  chr16:67189259-67189636
  hypo

SEQ ID NO: 381242 - DNA, 177 bp, Homo sapiens; identical to SEQ ID NO: 342608
  chr16:67221106-67221283
  hypo

SEQ ID NO: 381243 - DNA, 64 bp, Homo sapiens
  chr16:67241539-67241603
  hypo
cgaagcgggactggacacaggacacctggggcagctgggcttggaagcgtctgacggcggccat

SEQ ID NO: 381244 - DNA, 93 bp, Homo sapiens; identical to SEQ ID NO: 348746
  chr16:67313759-67313852
  hypo

SEQ ID NO: 381245 - DNA, 115 bp, Homo sapiens; identical to SEQ ID NO: 348747
  chr16:67313958-67314073
  hypo

SEQ ID NO: 381246 - DNA, 62 bp, Homo sapiens; identical to SEQ ID NO: 342611
  chr16:67472428-67472490
  hypo

SEQ ID NO: 381247 - DNA, 93 bp, Homo sapiens
  chr16:67578540-67578633
  hypo
cgatcctcccgagccctaccctgaggcctgagctacttggccacccatgttctccagaaactgggcacatttgggcccctgcgctgccaggag

SEQ ID NO: 381248 - DNA, 255 bp, Homo sapiens; identical to SEQ ID NO: 291637
  chr16:67678786-67679041
  hypo

SEQ ID NO: 381249 - DNA, 189 bp, Homo sapiens; identical to SEQ ID NO: 366946
  chr16:67681423-67681612
  hypo

SEQ ID NO: 381250 - DNA, 260 bp, Homo sapiens; identical to SEQ ID NO: 342615
  chr16:67709104-67709364
  hypo

SEQ ID NO: 381251 - DNA, 134 bp, Homo sapiens; identical to SEQ ID NO: 345495
  chr16:68118915-68119049
  hypo

SEQ ID NO: 381252 - DNA, 65 bp, Homo sapiens; identical to SEQ ID NO: 347385
  chr16:68269820-68269885
  hypo

SEQ ID NO: 381253 - DNA, 112 bp, Homo sapiens; identical to SEQ ID NO: 204263
  chr16:68269896-68270008
  hypo

SEQ ID NO: 381254 - DNA, 105 bp, Homo sapiens; identical to SEQ ID NO: 204264
  chr16:68270022-68270127
  hypo

SEQ ID NO: 381255 - DNA, 125 bp, Homo sapiens; identical to SEQ ID NO: 347388
  chr16:68270157-68270282
  hypo

SEQ ID NO: 381256 - DNA, 637 bp, Homo sapiens; identical to SEQ ID NO: 347389
  chr16:68270868-68271505
  hypo

SEQ ID NO: 381257 - DNA, 167 bp, Homo sapiens; identical to SEQ ID NO: 355475
  chr16:68386187-68386354
  hypo

SEQ ID NO: 381258 - DNA, 782 bp, Homo sapiens; identical to SEQ ID NO: 342621
  chr16:69143292-69144074
  hypo

SEQ ID NO: 381259 - DNA, 37 bp, Homo sapiens; identical to SEQ ID NO: 342622
  chr16:69334756-69334793
  hypo

SEQ ID NO: 381260 - DNA, 217 bp, Homo sapiens; identical to SEQ ID NO: 217042
  chr16:69352349-69352566
  hypo

SEQ ID NO: 381261 - DNA, 378 bp, Homo sapiens; identical to SEQ ID NO: 366957
  chr16:69352596-69352974
  hypo

SEQ ID NO: 381262 - DNA, 574 bp, Homo sapiens; identical to SEQ ID NO: 366958
  chr16:69354730-69355304
  hypo

SEQ ID NO: 381263 - DNA, 144 bp, Homo sapiens; identical to SEQ ID NO: 342625
  chr16:69383506-69383650
  hypo

SEQ ID NO: 381264 - DNA, 411 bp, Homo sapiens; identical to SEQ ID NO: 342626
  chr16:69833676-69834087
  hypo

SEQ ID NO: 381265 - DNA, 96 bp, Homo sapiens; identical to SEQ ID NO: 342627
  chr16:69906932-69907028
  hypo

SEQ ID NO: 381266 - DNA, 166 bp, Homo sapiens; identical to SEQ ID NO: 342628
  chr16:69921972-69922138
  hypo

SEQ ID NO: 381267 - DNA, 111 bp, Homo sapiens; identical to SEQ ID NO: 342629
  chr16:69922460-69922571
  hypo

SEQ ID NO: 381268 - DNA, 395 bp, Homo sapiens; identical to SEQ ID NO: 342630
  chr16:70433888-70434283
  hypo

SEQ ID NO: 381269 - DNA, 364 bp, Homo sapiens; identical to SEQ ID NO: 342631
  chr16:70754664-70755028
  hypo

SEQ ID NO: 381270 - DNA, 352 bp, Homo sapiens; identical to SEQ ID NO: 342633
  chr16:70808012-70808364
  hypo

SEQ ID NO: 381271 - DNA, 310 bp, Homo sapiens; identical to SEQ ID NO: 355481
  chr16:70811523-70811833
  hypo

SEQ ID NO: 381272 - DNA, 78 bp, Homo sapiens; identical to SEQ ID NO: 348755
  chr16:71715666-71715744
  hypo

SEQ ID NO: 381273 - DNA, 116 bp, Homo sapiens; identical to SEQ ID NO: 342637
  chr16:71754757-71754873
  hypo

SEQ ID NO: 381274 - DNA, 48 bp, Homo sapiens; identical to SEQ ID NO: 366969
  chr16:72460075-72460123
  hypo

SEQ ID NO: 381275 - DNA, 477 bp, Homo sapiens; identical to SEQ ID NO: 366970
  chr16:72991953-72992430
  hypo

SEQ ID NO: 381276 - DNA, 174 bp, Homo sapiens; identical to SEQ ID NO: 335377
  chr16:74659437-74659611
  hypo

SEQ ID NO: 381277 - DNA, 419 bp, Homo sapiens; identical to SEQ ID NO: 342642
  chr16:74782393-74782812
  hypo

SEQ ID NO: 381278 - DNA, 234 bp, Homo sapiens; identical to SEQ ID NO: 342643
  chr16:74908874-74909108
  hypo

SEQ ID NO: 381279 - DNA, 86 bp, Homo sapiens; identical to SEQ ID NO: 342644
  chr16:74984568-74984654
  hypo

SEQ ID NO: 381280 - DNA, 351 bp, Homo sapiens; identical to SEQ ID NO: 373945
  chr16:75033797-75034148
  hypo

SEQ ID NO: 381281 - DNA, 166 bp, Homo sapiens; identical to SEQ ID NO: 342646
  chr16:75127929-75128095
  hypo

SEQ ID NO: 381282 - DNA, 350 bp, Homo sapiens; identical to SEQ ID NO: 342647
  chr16:75136341-75136691
  hypo

SEQ ID NO: 381283 - DNA, 60 bp, Homo sapiens; identical to SEQ ID NO: 348758
  chr16:75148493-75148553
  hypo

SEQ ID NO: 381284 - DNA, 136 bp, Homo sapiens; identical to SEQ ID NO: 348759
  chr16:75149151-75149287
  hypo

SEQ ID NO: 381285 - DNA, 222 bp, Homo sapiens; identical to SEQ ID NO: 366977
  chr16:75222813-75223035
  hypo

SEQ ID NO: 381286 - DNA, 120 bp, Homo sapiens; identical to SEQ ID NO: 366978
  chr16:75469119-75469239
  hypo

SEQ ID NO: 381287 - DNA, 284 bp, Homo sapiens; identical to SEQ ID NO: 342652
  chr16:77227386-77227670
  hypo

SEQ ID NO: 381288 - DNA, 82 bp, Homo sapiens; identical to SEQ ID NO: 204296
  chr16:77246930-77247012
  hypo

SEQ ID NO: 381289 - DNA, 204 bp, Homo sapiens; identical to SEQ ID NO: 204297
  chr16:77247511-77247715
  hypo

SEQ ID NO: 381290 - DNA, 81 bp, Homo sapiens; identical to SEQ ID NO: 360874
  chr16:77469120-77469201
  hypo

SEQ ID NO: 381291 - DNA, 262 bp, Homo sapiens; identical to SEQ ID NO: 342656
  chr16:77752668-77752930
  hypo

SEQ ID NO: 381292 - DNA, 553 bp, Homo sapiens; identical to SEQ ID NO: 355492
  chr16:77753318-77753871
  hypo

SEQ ID NO: 381293 - DNA, 48 bp, Homo sapiens; identical to SEQ ID NO: 351836
  chr16:77822069-77822117
  hypo

SEQ ID NO: 381294 - DNA, 315 bp, Homo sapiens; identical to SEQ ID NO: 335387
  chr16:78322882-78323197
  hypo

SEQ ID NO: 381295 - DNA, 133 bp, Homo sapiens; identical to SEQ ID NO: 342660
  chr16:78409056-78409189
  hypo

SEQ ID NO: 381296 - DNA, 101 bp, Homo sapiens; identical to SEQ ID NO: 291736
  chr16:79804457-79804558
  hypo

SEQ ID NO: 381297 - DNA, 97 bp, Homo sapiens; identical to SEQ ID NO: 351841
  chr16:79804596-79804693
  hypo

SEQ ID NO: 381298 - DNA, 368 bp, Homo sapiens; identical to SEQ ID NO: 342662
  chr16:80646305-80646673
  hypo

SEQ ID NO: 381299 - DNA, 538 bp, Homo sapiens; identical to SEQ ID NO: 291740
  chr16:80837424-80837962
  hypo

SEQ ID NO: 381300 - DNA, 107 bp, Homo sapiens; identical to SEQ ID NO: 342664
  chr16:81361640-81361747
  hypo

SEQ ID NO: 381301 - DNA, 213 bp, Homo sapiens; identical to SEQ ID NO: 342665
  chr16:81533335-81533548
  hypo

SEQ ID NO: 381302 - DNA, 260 bp, Homo sapiens; identical to SEQ ID NO: 355497
  chr16:81563939-81564199
  hypo

SEQ ID NO: 381303 - DNA, 162 bp, Homo sapiens; identical to SEQ ID NO: 217146
  chr16:81564229-81564391
  hypo

SEQ ID NO: 381304 - DNA, 240 bp, Homo sapiens; identical to SEQ ID NO: 355499
  chr16:81564541-81564781
  hypo

SEQ ID NO: 381305 - DNA, 606 bp, Homo sapiens; identical to SEQ ID NO: 342667
  chr16:81565589-81566195
  hypo

SEQ ID NO: 381306 - DNA, 140 bp, Homo sapiens; identical to SEQ ID NO: 342668
  chr16:81580491-81580631
  hypo

SEQ ID NO: 381307 - DNA, 271 bp, Homo sapiens
  chr16:81626951-81627222
  hypo
cgagaggtggtgttgtgcctagcctggggggttggagggcggggggagtttctgctctgcagccctgtgatgcgcaggtgccatcgggtctctgaccccaggccatcaagagctgtgcgacctgcttgccatccatcatgtggagctggtcggtcaccccatgcaccaggccgactccaagccggagctttcctctccgctcttttcggagtaatccgtggatgatggaggagcttggcaagcatttcagcaaagctcttttttcttgttg

SEQ ID NO: 381308 - DNA, 77 bp, Homo sapiens; identical to SEQ ID NO: 355502
  chr16:81632835-81632912
  hypo

SEQ ID NO: 381309 - DNA, 108 bp, Homo sapiens; identical to SEQ ID NO: 342671
  chr16:81688971-81689079
  hypo

SEQ ID NO: 381310 - DNA, 129 bp, Homo sapiens; identical to SEQ ID NO: 366995
  chr16:81694554-81694683
  hypo

SEQ ID NO: 381311 - DNA, 346 bp, Homo sapiens; identical to SEQ ID NO: 366996
  chr16:81694713-81695059
  hypo

SEQ ID NO: 381312 - DNA, 110 bp, Homo sapiens; identical to SEQ ID NO: 342673
  chr16:81700929-81701039
  hypo

SEQ ID NO: 381313 - DNA, 385 bp, Homo sapiens; identical to SEQ ID NO: 342674
  chr16:81703552-81703937
  hypo

SEQ ID NO: 381314 - DNA, 47 bp, Homo sapiens
  chr16:81765480-81765527
  hypo
cggtcagtgccgaagccgttgtgatgaagcctgcgttagtgagaccc

SEQ ID NO: 381315 - DNA, 189 bp, Homo sapiens; identical to SEQ ID NO: 342677
  chr16:83934496-83934685
  hypo

SEQ ID NO: 381316 - DNA, 543 bp, Homo sapiens; identical to SEQ ID NO: 342678
  chr16:84132267-84132810
  hypo

SEQ ID NO: 381317 - DNA, 109 bp, Homo sapiens; identical to SEQ ID NO: 342679
  chr16:84170884-84170993
  hypo

SEQ ID NO: 381318 - DNA, 96 bp, Homo sapiens; identical to SEQ ID NO: 367002
  chr16:84483346-84483442
  hypo

SEQ ID NO: 381319 - DNA, 251 bp, Homo sapiens; identical to SEQ ID NO: 367003
  chr16:84483472-84483723
  hypo

SEQ ID NO: 381320 - DNA, 811 bp, Homo sapiens; identical to SEQ ID NO: 347395
  chr16:84650982-84651793
  hypo

SEQ ID NO: 381321 - DNA, 69 bp, Homo sapiens; identical to SEQ ID NO: 355504
  chr16:84780671-84780740
  hypo

SEQ ID NO: 381322 - DNA, 45 bp, Homo sapiens; identical to SEQ ID NO: 342683
  chr16:84812709-84812754
  hypo

SEQ ID NO: 381323 - DNA, 346 bp, Homo sapiens; identical to SEQ ID NO: 342684
  chr16:84813536-84813882
  hypo

SEQ ID NO: 381324 - DNA, 591 bp, Homo sapiens; identical to SEQ ID NO: 342685
  chr16:84822987-84823578
  hypo

SEQ ID NO: 381325 - DNA, 280 bp, Homo sapiens; identical to SEQ ID NO: 342686
  chr16:84998400-84998680
  hypo

SEQ ID NO: 381326 - DNA, 133 bp, Homo sapiens
  chr16:85007919-85008052
  hypo
gtcacttgtcatgggcacaaaagcatttagagtttctggaaactgtttgggagtgaccttaacagcctggggctgggcccacgaagcacggaaaggcaccccctgaaaacaccaccatccaggaagaacgggc

SEQ ID NO: 381327 - DNA, 176 bp, Homo sapiens; identical to SEQ ID NO: 367008
  chr16:85009963-85010139
  hypo

SEQ ID NO: 381328 - DNA, 233 bp, Homo sapiens; identical to SEQ ID NO: 367009
  chr16:85010169-85010402
  hypo

SEQ ID NO: 381329 - DNA, 92 bp, Homo sapiens; identical to SEQ ID NO: 355506
  chr16:85033902-85033994
  hypo

SEQ ID NO: 381330 - DNA, 836 bp, Homo sapiens; identical to SEQ ID NO: 360894
  chr16:85202563-85203399
  hypo

SEQ ID NO: 381331 - DNA, 166 bp, Homo sapiens; identical to SEQ ID NO: 367012
  chr16:85328796-85328962
  hypo

SEQ ID NO: 381332 - DNA, 121 bp, Homo sapiens; identical to SEQ ID NO: 367013
  chr16:85328994-85329115
  hypo

SEQ ID NO: 381333 - DNA, 257 bp, Homo sapiens; identical to SEQ ID NO: 342694
  chr16:85407706-85407963
  hypo

SEQ ID NO: 381334 - DNA, 87 bp, Homo sapiens; identical to SEQ ID NO: 342695
  chr16:85453282-85453369
  hypo

SEQ ID NO: 381335 - DNA, 65 bp, Homo sapiens; identical to SEQ ID NO: 367016
  chr16:85464302-85464367
  hypo

SEQ ID NO: 381336 - DNA, 175 bp, Homo sapiens; identical to SEQ ID NO: 342697
  chr16:85465108-85465283
  hypo

SEQ ID NO: 381337 - DNA, 51 bp, Homo sapiens
  chr16:85485696-85485747
  hypo
cgccagagagacccgtgtccggcgcgaataattggattttaatgaaacgaa

SEQ ID NO: 381338 - DNA, 91 bp, Homo sapiens
  chr16:85485855-85485946
  hypo
gatgtttgatggccctgccagcgcggttatttatttatttacccaaccctcatgagctgggacgtgccagtgggccccggtaattaacagc

SEQ ID NO: 381339 - DNA, 49 bp, Homo sapiens; identical to SEQ ID NO: 355509
  chr16:85517169-85517218
  hypo

SEQ ID NO: 381340 - DNA, 137 bp, Homo sapiens; identical to SEQ ID NO: 355510
  chr16:85517620-85517757
  hypo

SEQ ID NO: 381341 - DNA, 772 bp, Homo sapiens; identical to SEQ ID NO: 335399
  chr16:85590112-85590884
  hypo

SEQ ID NO: 381342 - DNA, 66 bp, Homo sapiens; identical to SEQ ID NO: 355511
  chr16:85617682-85617748
  hypo

SEQ ID NO: 381343 - DNA, 143 bp, Homo sapiens; identical to SEQ ID NO: 342702
  chr16:85618063-85618206
  hypo

SEQ ID NO: 381344 - DNA, 259 bp, Homo sapiens; identical to SEQ ID NO: 217217
  chr16:85671775-85672034
  hypo

SEQ ID NO: 381345 - DNA, 97 bp, Homo sapiens; identical to SEQ ID NO: 355514
  chr16:85672078-85672175
  hypo

SEQ ID NO: 381346 - DNA, 356 bp, Homo sapiens; identical to SEQ ID NO: 355515
  chr16:85673482-85673838
  hypo

SEQ ID NO: 381347 - DNA, 237 bp, Homo sapiens; identical to SEQ ID NO: 217221
  chr16:85673886-85674123
  hypo

SEQ ID NO: 381348 - DNA, 140 bp, Homo sapiens; identical to SEQ ID NO: 355517
  chr16:85674334-85674474
  hypo

SEQ ID NO: 381349 - DNA, 114 bp, Homo sapiens; identical to SEQ ID NO: 367027
  chr16:85679455-85679569
  hypo

SEQ ID NO: 381350 - DNA, 44 bp, Homo sapiens; identical to SEQ ID NO: 367028
  chr16:85683926-85683970
  hypo

SEQ ID NO: 381351 - DNA, 208 bp, Homo sapiens; identical to SEQ ID NO: 348765
  chr16:85699437-85699645
  hypo

SEQ ID NO: 381352 - DNA, 42 bp, Homo sapiens; identical to SEQ ID NO: 367030
  chr16:85731408-85731450
  hypo

SEQ ID NO: 381353 - DNA, 177 bp, Homo sapiens; identical to SEQ ID NO: 345500
  chr16:85932121-85932298
  hypo

SEQ ID NO: 381354 - DNA, 270 bp, Homo sapiens; identical to SEQ ID NO: 360900
  chr16:86542673-86542943
  hypo

SEQ ID NO: 381355 - DNA, 245 bp, Homo sapiens; identical to SEQ ID NO: 373976
  chr16:86543378-86543623
  hypo

SEQ ID NO: 381356 - DNA, 352 bp, Homo sapiens; identical to SEQ ID NO: 291782
  chr16:86543822-86544174
  hypo

SEQ ID NO: 381357 - DNA, 389 bp, Homo sapiens; identical to SEQ ID NO: 335407
  chr16:86609636-86610025
  hypo

SEQ ID NO: 381358 - DNA, 303 bp, Homo sapiens; identical to SEQ ID NO: 342715
  chr16:86665890-86666193
  hypo

SEQ ID NO: 381359 - DNA, 38 bp, Homo sapiens; identical to SEQ ID NO: 367034
  chr16:86903437-86903475
  hypo

SEQ ID NO: 381360 - DNA, 378 bp, Homo sapiens; identical to SEQ ID NO: 342717
  chr16:87157402-87157780
  hypo

SEQ ID NO: 381361 - DNA, 169 bp, Homo sapiens; identical to SEQ ID NO: 367035
  chr16:87311888-87312057
  hypo

SEQ ID NO: 381362 - DNA, 231 bp, Homo sapiens
  chr16:87356538-87356769
  hypo
cggggcagccccaagagcacgtatcccgggacatgatgtgttgtggtctgtgtggggtcagagccgtcagtgttcactgccgcgtgcccagtgcttagcactgtttgccgcatgggagatgcaggtcacaacccggtagcgcctagtggcccgggggacacctggcttgtctgggcctgttggctgacaggtaggagggactgccatccattgttggggcaaaggatgctg

SEQ ID NO: 381363 - DNA, 464 bp, Homo sapiens; identical to SEQ ID NO: 351853
  chr16:87417704-87418168
  hypo

SEQ ID NO: 381364 - DNA, 50 bp, Homo sapiens; identical to SEQ ID NO: 351854
  chr16:87418200-87418250
  hypo

SEQ ID NO: 381365 - DNA, 274 bp, Homo sapiens; identical to SEQ ID NO: 342721
  chr16:87444932-87445206
  hypo

SEQ ID NO: 381366 - DNA, 105 bp, Homo sapiens; identical to SEQ ID NO: 342722
  chr16:87471750-87471855
  hypo

SEQ ID NO: 381367 - DNA, 802 bp, Homo sapiens; identical to SEQ ID NO: 345501
  chr16:87525701-87526503
  hypo

SEQ ID NO: 381368 - DNA, 505 bp, Homo sapiens; identical to SEQ ID NO: 335410
  chr16:87526565-87527070
  hypo

SEQ ID NO: 381369 - DNA, 66 bp, Homo sapiens; identical to SEQ ID NO: 355525
  chr16:87594891-87594957
  hypo

SEQ ID NO: 381370 - DNA, 59 bp, Homo sapiens; identical to SEQ ID NO: 351857
  chr16:87635912-87635971
  hypo

SEQ ID NO: 381371 - DNA, 189 bp, Homo sapiens; identical to SEQ ID NO: 291796
  chr16:87636008-87636197
  hypo

SEQ ID NO: 381372 - DNA, 496 bp, Homo sapiens; identical to SEQ ID NO: 342727
  chr16:87738520-87739016
  hypo

SEQ ID NO: 381373 - DNA, 728 bp, Homo sapiens; identical to SEQ ID NO: 342728
  chr16:87739334-87740062
  hypo

SEQ ID NO: 381374 - DNA, 426 bp, Homo sapiens; identical to SEQ ID NO: 342729
  chr16:87744572-87744998
  hypo

SEQ ID NO: 381375 - DNA, 199 bp, Homo sapiens; identical to SEQ ID NO: 342730
  chr16:87776441-87776640
  hypo

SEQ ID NO: 381376 - DNA, 150 bp, Homo sapiens
  chr16:87864425-87864575
  hypo
cgtgccgtcgagaggccgccggctccctgtatccttgaggcatgtccacgtcccagagcaggaggttggaacagaacggcatcccgaggacccctagccgaggcgggaaggtaagaggctgacgtcgtgcgtgggccccgccggccccag

SEQ ID NO: 381377 - DNA, 491 bp, Homo sapiens; identical to SEQ ID NO: 127736
  chr16:87902835-87903326
  hypo

SEQ ID NO: 381378 - DNA, 126 bp, Homo sapiens; identical to SEQ ID NO: 342733
  chr16:87934247-87934373
  hypo

SEQ ID NO: 381379 - DNA, 353 bp, Homo sapiens; identical to SEQ ID NO: 355530
  chr16:88037900-88038253
  hypo

SEQ ID NO: 381380 - DNA, 136 bp, Homo sapiens; identical to SEQ ID NO: 342735
  chr16:88048979-88049115
  hypo

SEQ ID NO: 381381 - DNA, 453 bp, Homo sapiens; identical to SEQ ID NO: 342736
  chr16:88091522-88091975
  hypo

SEQ ID NO: 381382 - DNA, 298 bp, Homo sapiens; identical to SEQ ID NO: 367052
  chr16:88096563-88096861
  hypo

SEQ ID NO: 381383 - DNA, 267 bp, Homo sapiens; identical to SEQ ID NO: 321389
  chr16:88101544-88101811
  hypo

SEQ ID NO: 381384 - DNA, 343 bp, Homo sapiens
  chr16:88101969-88102312
  hypo
agtcaagtccctgcaccgcgcagaccattgcctggtgttcaggagttttcaaggcctcggcctggtgggaatagttgagaaacgctggttcaggcagcttgctttattcacagccctgagacacctctgggacagcccctgaggatatttttcccggaactttctcggggccaggagtgtgcctgtgctgtgatgagtgggaaacgcagtttgtgcagggcctcacagaagagcccactggtgcgggtgctggctgcctcctccagtgggcgccagctcggggtctgtggcaggaacgtgggtggctgcggatccacccaggacagagtgactgcctgggcgc

SEQ ID NO: 381385 - DNA, 170 bp, Homo sapiens; identical to SEQ ID NO: 346150
  chr16:88106152-88106322
  hypo

SEQ ID NO: 381386 - DNA, 96 bp, Homo sapiens; identical to SEQ ID NO: 346151
  chr16:88106398-88106494
  hypo

SEQ ID NO: 381387 - DNA, 328 bp, Homo sapiens; identical to SEQ ID NO: 342740
  chr16:88111298-88111626
  hypo

SEQ ID NO: 381388 - DNA, 225 bp, Homo sapiens; identical to SEQ ID NO: 342741
  chr16:88368380-88368605
  hypo

SEQ ID NO: 381389 - DNA, 88 bp, Homo sapiens; identical to SEQ ID NO: 342742
  chr16:88458615-88458703
  hypo

SEQ ID NO: 381390 - DNA, 184 bp, Homo sapiens; identical to SEQ ID NO: 367056
  chr16:88512691-88512875
  hypo

SEQ ID NO: 381391 - DNA, 262 bp, Homo sapiens; identical to SEQ ID NO: 373988
  chr16:88519035-88519297
  hypo

SEQ ID NO: 381392 - DNA, 122 bp, Homo sapiens; identical to SEQ ID NO: 342747
  chr16:88699839-88699961
  hypo

SEQ ID NO: 381393 - DNA, 31 bp, Homo sapiens; identical to SEQ ID NO: 217301
  chr16:88757496-88757527
  hypo

SEQ ID NO: 381394 - DNA, 31 bp, Homo sapiens; identical to SEQ ID NO: 355535
  chr16:88757686-88757717
  hypo

SEQ ID NO: 381395 - DNA, 103 bp, Homo sapiens; identical to SEQ ID NO: 355536
  chr16:88791422-88791525
  hypo

SEQ ID NO: 381396 - DNA, 354 bp, Homo sapiens; identical to SEQ ID NO: 355537
  chr16:88791819-88792173
  hypo

SEQ ID NO: 381397 - DNA, 517 bp, Homo sapiens; identical to SEQ ID NO: 348771
  chr16:88792758-88793275
  hypo

SEQ ID NO: 381398 - DNA, 339 bp, Homo sapiens; identical to SEQ ID NO: 217306
  chr16:88793673-88794012
  hypo

SEQ ID NO: 381399 - DNA, 394 bp, Homo sapiens; identical to SEQ ID NO: 367063
  chr16:88797394-88797788
  hypo

SEQ ID NO: 381400 - DNA, 225 bp, Homo sapiens; identical to SEQ ID NO: 367064
  chr16:88800137-88800362
  hypo

SEQ ID NO: 381401 - DNA, 286 bp, Homo sapiens; identical to SEQ ID NO: 367065
  chr16:88802345-88802631
  hypo

SEQ ID NO: 381402 - DNA, 581 bp, Homo sapiens; identical to SEQ ID NO: 321473
  chr16:88802685-88803266
  hypo

SEQ ID NO: 381403 - DNA, 729 bp, Homo sapiens
  chr16:88805932-88806661
  hypo
ggctgtggggctggacgataggccccaccccagctctgacagtctccgtgctctgcaggccgaggcaagtcacagcctctcggagcctattccccttctgtcaaatgggatgggggcttgacgggacagatgaaccagaccagtcctgtcctcacaggcctccagggctgcaggggctgctgggaggctccgaggccagggtaacagggagatcagggcaggagaggcccaggccctgagcccacccctctcagagaccacacagcagctgggggcgaggctggatcagaacgcagggcgccatcgctcaccccacccacagcctggccctggccctggccctgggaaatcttctgagcagagccgtgaaaaatgagcatttctgggagtggaaagaacagaggcagctgctgtgagagaacaggtgtgaggccaccgaggggcaggcccggccctgacttggggtatgaggccaccgaggggcaggcccggccctgacttggggtgtgaggccaccgaggggcaggcccggccctgacttgggccccacgtgccgcagccatgctgcagacgcccctcaccctcctctagcggccagcacccctcgggctggctggcacactccgtcgcatgcctgcaaacacgtgtgtgtgttgcccatatgtgggagtgagggtcgcccgggggccctgccaggccgggtcatggggcttctagatctttcggaac

SEQ ID NO: 381404 - DNA, 46 bp, Homo sapiens; identical to SEQ ID NO: 321481
  chr16:88826974-88827020
  hypo

SEQ ID NO: 381405 - DNA, 251 bp, Homo sapiens; identical to SEQ ID NO: 321482
  chr16:88827070-88827321
  hypo

SEQ ID NO: 381406 - DNA, 219 bp, Homo sapiens; identical to SEQ ID NO: 342758
  chr16:88892602-88892821
  hypo

SEQ ID NO: 381407 - DNA, 662 bp, Homo sapiens; identical to SEQ ID NO: 342759
  chr16:88898125-88898787
  hypo

SEQ ID NO: 381408 - DNA, 235 bp, Homo sapiens; identical to SEQ ID NO: 342760
  chr16:88910584-88910819
  hypo

SEQ ID NO: 381409 - DNA, 210 bp, Homo sapiens; identical to SEQ ID NO: 217322
  chr16:88943232-88943442
  hypo

SEQ ID NO: 381410 - DNA, 279 bp, Homo sapiens; identical to SEQ ID NO: 348772
  chr16:88946079-88946358
  hypo

SEQ ID NO: 381411 - DNA, 366 bp, Homo sapiens; identical to SEQ ID NO: 355541
  chr16:88956712-88957078
  hypo

SEQ ID NO: 381412 - DNA, 274 bp, Homo sapiens; identical to SEQ ID NO: 342767
  chr16:88959987-88960261
  hypo

SEQ ID NO: 381413 - DNA, 64 bp, Homo sapiens
  chr16:88970534-88970598
  hypo
tgctcgtgacactctggatcccgaagctagagcagacagtgccctgccggcgccctgagcagtc

SEQ ID NO: 381414 - DNA, 164 bp, Homo sapiens
  chr16:88993230-88993394
  hypo
gctcacaaggccttccgtgcctgtcccttgtgccccacctcacagcgaggtccttgcagcagcagggcagccccgtccggcccccgctgcctccctgccctcatctcctttctctgagacaaggctcctcactggtcctggaggtggcggcacactcctgcctc

SEQ ID NO: 381415 - DNA, 187 bp, Homo sapiens
  chr16:88994153-88994340
  hypo
cgtccgcccgtgcggacacccgggagccaacactgacccgaagacaggtcagccagacttcccacctgctccctcaggaggtgggatccggtcccctcctgctgggctgcacgggccacgatggaaaggcgcctcgtgacacgctgcggtcagctcagaaaagccgcagatgctgacacgggcaacc

SEQ ID NO: 381416 - DNA, 399 bp, Homo sapiens; identical to SEQ ID NO: 291816
  chr16:89006909-89007308
  hypo

SEQ ID NO: 381417 - DNA, 91 bp, Homo sapiens; identical to SEQ ID NO: 204343
  chr16:89007789-89007880
  hypo

SEQ ID NO: 381418 - DNA, 373 bp, Homo sapiens; identical to SEQ ID NO: 204344
  chr16:89007995-89008368
  hypo

SEQ ID NO: 381419 - DNA, 152 bp, Homo sapiens; identical to SEQ ID NO: 342773
  chr16:89028925-89029077
  hypo

SEQ ID NO: 381420 - DNA, 33 bp, Homo sapiens; identical to SEQ ID NO: 321533
  chr16:89109415-89109448
  hypo

SEQ ID NO: 381421 - DNA, 121 bp, Homo sapiens; identical to SEQ ID NO: 367077
  chr16:89109659-89109780
  hypo

SEQ ID NO: 381422 - DNA, 213 bp, Homo sapiens; identical to SEQ ID NO: 367078
  chr16:89141710-89141923
  hypo

SEQ ID NO: 381423 - DNA, 148 bp, Homo sapiens; identical to SEQ ID NO: 367079
  chr16:89141953-89142101
  hypo

SEQ ID NO: 381424 - DNA, 315 bp, Homo sapiens; identical to SEQ ID NO: 342779
  chr16:89169100-89169415
  hypo

SEQ ID NO: 381425 - DNA, 542 bp, Homo sapiens; identical to SEQ ID NO: 342780
  chr16:89169538-89170080
  hypo

SEQ ID NO: 381426 - DNA, 259 bp, Homo sapiens; identical to SEQ ID NO: 347402
  chr16:89189500-89189759
  hypo

SEQ ID NO: 381427 - DNA, 48 bp, Homo sapiens; identical to SEQ ID NO: 355547
  chr16:89202519-89202567
  hypo

SEQ ID NO: 381428 - DNA, 112 bp, Homo sapiens; identical to SEQ ID NO: 355548
  chr16:89203215-89203327
  hypo

SEQ ID NO: 381429 - DNA, 75 bp, Homo sapiens; identical to SEQ ID NO: 367085
  chr16:89216581-89216656
  hypo

SEQ ID NO: 381430 - DNA, 354 bp, Homo sapiens; identical to SEQ ID NO: 367086
  chr16:89216686-89217040
  hypo

SEQ ID NO: 381431 - DNA, 225 bp, Homo sapiens; identical to SEQ ID NO: 217355
  chr16:89219372-89219597
  hypo

SEQ ID NO: 381432 - DNA, 90 bp, Homo sapiens; identical to SEQ ID NO: 355550
  chr16:89220237-89220327
  hypo

SEQ ID NO: 381433 - DNA, 78 bp, Homo sapiens; identical to SEQ ID NO: 355551
  chr16:89254530-89254608
  hypo

SEQ ID NO: 381434 - DNA, 144 bp, Homo sapiens; identical to SEQ ID NO: 355552
  chr16:89254764-89254908
  hypo

SEQ ID NO: 381435 - DNA, 336 bp, Homo sapiens; identical to SEQ ID NO: 342788
  chr16:89260413-89260749
  hypo

SEQ ID NO: 381436 - DNA, 210 bp, Homo sapiens; identical to SEQ ID NO: 342790
  chr16:89354795-89355005
  hypo

SEQ ID NO: 381437 - DNA, 265 bp, Homo sapiens; identical to SEQ ID NO: 342791
  chr16:89357476-89357741
  hypo

SEQ ID NO: 381438 - DNA, 400 bp, Homo sapiens; identical to SEQ ID NO: 367092
  chr16:89409913-89410313
  hypo

SEQ ID NO: 381439 - DNA, 107 bp, Homo sapiens; identical to SEQ ID NO: 342793
  chr16:89442354-89442461
  hypo

SEQ ID NO: 381440 - DNA, 254 bp, Homo sapiens; identical to SEQ ID NO: 342794
  chr16:89445385-89445639
  hypo

SEQ ID NO: 381441 - DNA, 58 bp, Homo sapiens; identical to SEQ ID NO: 342795
  chr16:89446081-89446139
  hypo

SEQ ID NO: 381442 - DNA, 494 bp, Homo sapiens; identical to SEQ ID NO: 342796
  chr16:89468462-89468956
  hypo

SEQ ID NO: 381443 - DNA, 70 bp, Homo sapiens; identical to SEQ ID NO: 367096
  chr16:89504482-89504552
  hypo

SEQ ID NO: 381444 - DNA, 64 bp, Homo sapiens; identical to SEQ ID NO: 342800
  chr16:89577046-89577110
  hypo

SEQ ID NO: 381445 - DNA, 98 bp, Homo sapiens; identical to SEQ ID NO: 355555
  chr16:89647563-89647661
  hypo

SEQ ID NO: 381446 - DNA, 374 bp, Homo sapiens; identical to SEQ ID NO: 367099
  chr16:89650291-89650665
  hypo

SEQ ID NO: 381447 - DNA, 141 bp, Homo sapiens; identical to SEQ ID NO: 367100
  chr16:89650710-89650851
  hypo

SEQ ID NO: 381448 - DNA, 213 bp, Homo sapiens
  chr16:89713336-89713549
  hypo
cgcgggtggacatctttccacacctctgcatgcttgtctgccatccgagcctccccacaaggagccaggtgcctgcaggaggcccccgccgccctgcccaccctacctgtcagggtcctggcagggacccagcacagaggatgcttggtgacgtcagggagcaaccacaggtatgcagagacagcacgtcagcctgtgagccacccctcccga

SEQ ID NO: 381449 - DNA, 45 bp, Homo sapiens; identical to SEQ ID NO: 367101
  chr16:89763790-89763835
  hypo

SEQ ID NO: 381450 - DNA, 823 bp, Homo sapiens; identical to SEQ ID NO: 367102
  chr16:89763872-89764695
  hypo

SEQ ID NO: 381451 - DNA, 170 bp, Homo sapiens; identical to SEQ ID NO: 342805
  chr16:89770184-89770354
  hypo

SEQ ID NO: 381452 - DNA, 311 bp, Homo sapiens; identical to SEQ ID NO: 342806
  chr16:89871398-89871709
  hypo

SEQ ID NO: 381453 - DNA, 737 bp, Homo sapiens; identical to SEQ ID NO: 321648
  chr16:89900815-89901552
  hypo

SEQ ID NO: 381454 - DNA, 81 bp, Homo sapiens; identical to SEQ ID NO: 348779
  chr16:89901590-89901671
  hypo

SEQ ID NO: 381455 - DNA, 179 bp, Homo sapiens; identical to SEQ ID NO: 342809
  chr16:89947451-89947630
  hypo

SEQ ID NO: 381456 - DNA, 393 bp, Homo sapiens; identical to SEQ ID NO: 367108
  chr16:89971731-89972124
  hypo

SEQ ID NO: 381457 - DNA, 440 bp, Homo sapiens; identical to SEQ ID NO: 217401
  chr16:89972235-89972675
  hypo

SEQ ID NO: 381458 - DNA, 482 bp, Homo sapiens; identical to SEQ ID NO: 355559
  chr16:89972802-89973284
  hypo

SEQ ID NO: 381459 - DNA, 64 bp, Homo sapiens
  chr16:90066554-90066618
  hypo
cgacttttcccgacacggcaagaccctggtggagaagctgtacggcgaggcaagcgcccagctc

SEQ ID NO: 381460 - DNA, 43 bp, Homo sapiens
  chr16:90066981-90067024
  hypo
ggaggacacatcccttcccgaggggctgaagggttggaaccgc

SEQ ID NO: 381461 - DNA, 307 bp, Homo sapiens; identical to SEQ ID NO: 335424
  chr17:523549-523856
  hypo

SEQ ID NO: 381462 - DNA, 483 bp, Homo sapiens; identical to SEQ ID NO: 335425
  chr17:576352-576835
  hypo

SEQ ID NO: 381463 - DNA, 139 bp, Homo sapiens; identical to SEQ ID NO: 367113
  chr17:597508-597647
  hypo

SEQ ID NO: 381464 - DNA, 64 bp, Homo sapiens; identical to SEQ ID NO: 355561
  chr17:692558-692622
  hypo

SEQ ID NO: 381465 - DNA, 306 bp, Homo sapiens; identical to SEQ ID NO: 355562
  chr17:692652-692958
  hypo

SEQ ID NO: 381466 - DNA, 145 bp, Homo sapiens; identical to SEQ ID NO: 335426
  chr17:850237-850382
  hypo

SEQ ID NO: 381467 - DNA, 539 bp, Homo sapiens; identical to SEQ ID NO: 342817
  chr17:951725-952264
  hypo

SEQ ID NO: 381468 - DNA, 310 bp, Homo sapiens; identical to SEQ ID NO: 342818
  chr17:1028640-1028950
  hypo

SEQ ID NO: 381469 - DNA, 155 bp, Homo sapiens; identical to SEQ ID NO: 342819
  chr17:1241096-1241251
  hypo

SEQ ID NO: 381470 - DNA, 65 bp, Homo sapiens; identical to SEQ ID NO: 342820
  chr17:1244981-1245046
  hypo

SEQ ID NO: 381471 - DNA, 270 bp, Homo sapiens; identical to SEQ ID NO: 342821
  chr17:1407895-1408165
  hypo

SEQ ID NO: 381472 - DNA, 141 bp, Homo sapiens; identical to SEQ ID NO: 346153
  chr17:1412249-1412390
  hypo

SEQ ID NO: 381473 - DNA, 84 bp, Homo sapiens; identical to SEQ ID NO: 346154
  chr17:1412463-1412547
  hypo

SEQ ID NO: 381474 - DNA, 53 bp, Homo sapiens
  chr17:1451516-1451569
  hypo
cggaacacgcaggtgggacccacagctctgctgcccgcccctgcctggccgac

SEQ ID NO: 381475 - DNA, 299 bp, Homo sapiens; identical to SEQ ID NO: 342824
  chr17:1454071-1454370
  hypo

SEQ ID NO: 381476 - DNA, 194 bp, Homo sapiens; identical to SEQ ID NO: 342825
  chr17:1462644-1462838
  hypo

SEQ ID NO: 381477 - DNA, 170 bp, Homo sapiens; identical to SEQ ID NO: 342827
  chr17:1756146-1756316
  hypo

SEQ ID NO: 381478 - DNA, 272 bp, Homo sapiens; identical to SEQ ID NO: 342828
  chr17:1775571-1775843
  hypo

SEQ ID NO: 381479 - DNA, 402 bp, Homo sapiens; identical to SEQ ID NO: 217450
  chr17:1783887-1784289
  hypo

SEQ ID NO: 381480 - DNA, 109 bp, Homo sapiens; identical to SEQ ID NO: 367125
  chr17:1784817-1784926
  hypo

SEQ ID NO: 381481 - DNA, 328 bp, Homo sapiens; identical to SEQ ID NO: 360927
  chr17:1954658-1954986
  hypo

SEQ ID NO: 381482 - DNA, 110 bp, Homo sapiens
  chr17:2289839-2289949
  hypo
cgaaggcggggcagggcgggggagaagtcagggagcgtgacgtccacatcgcactgatttccgagggtagggaggggaagcaggagcggcactggagctggcactgggcc

SEQ ID NO: 381483 - DNA, 366 bp, Homo sapiens; identical to SEQ ID NO: 342836
  chr17:2291792-2292158
  hypo

SEQ ID NO: 381484 - DNA, 115 bp, Homo sapiens; identical to SEQ ID NO: 342837
  chr17:2326357-2326472
  hypo

SEQ ID NO: 381485 - DNA, 440 bp, Homo sapiens; identical to SEQ ID NO: 360932
  chr17:2756601-2757041
  hypo

SEQ ID NO: 381486 - DNA, 170 bp, Homo sapiens; identical to SEQ ID NO: 342839
  chr17:2805383-2805553
  hypo

SEQ ID NO: 381487 - DNA, 121 bp, Homo sapiens; identical to SEQ ID NO: 360933
  chr17:3599052-3599173
  hypo

SEQ ID NO: 381488 - DNA, 391 bp, Homo sapiens; identical to SEQ ID NO: 291891
  chr17:3599244-3599635
  hypo

SEQ ID NO: 381489 - DNA, 593 bp, Homo sapiens; identical to SEQ ID NO: 342841
  chr17:3716199-3716792
  hypo

SEQ ID NO: 381490 - DNA, 138 bp, Homo sapiens; identical to SEQ ID NO: 342842
  chr17:3860438-3860576
  hypo

SEQ ID NO: 381491 - DNA, 459 bp, Homo sapiens; identical to SEQ ID NO: 351870
  chr17:3867210-3867669
  hypo

SEQ ID NO: 381492 - DNA, 201 bp, Homo sapiens; identical to SEQ ID NO: 335438
  chr17:3867893-3868094
  hypo

SEQ ID NO: 381493 - DNA, 87 bp, Homo sapiens; identical to SEQ ID NO: 342845
  chr17:3985702-3985789
  hypo

SEQ ID NO: 381494 - DNA, 322 bp, Homo sapiens; identical to SEQ ID NO: 342846
  chr17:4048756-4049078
  hypo

SEQ ID NO: 381495 - DNA, 123 bp, Homo sapiens; identical to SEQ ID NO: 342847
  chr17:4137086-4137209
  hypo

SEQ ID NO: 381496 - DNA, 134 bp, Homo sapiens; identical to SEQ ID NO: 342848
  chr17:4144975-4145109
  hypo

SEQ ID NO: 381497 - DNA, 60 bp, Homo sapiens; identical to SEQ ID NO: 355574
  chr17:4236565-4236625
  hypo

SEQ ID NO: 381498 - DNA, 336 bp, Homo sapiens; identical to SEQ ID NO: 342850
  chr17:4392128-4392464
  hypo

SEQ ID NO: 381499 - DNA, 73 bp, Homo sapiens; identical to SEQ ID NO: 355575
  chr17:4436345-4436418
  hypo

SEQ ID NO: 381500 - DNA, 164 bp, Homo sapiens; identical to SEQ ID NO: 355576
  chr17:4436450-4436614
  hypo

SEQ ID NO: 381501 - DNA, 36 bp, Homo sapiens; identical to SEQ ID NO: 355577
  chr17:4446272-4446308
  hypo

SEQ ID NO: 381502 - DNA, 138 bp, Homo sapiens; identical to SEQ ID NO: 355578
  chr17:4446376-4446514
  hypo

SEQ ID NO: 381503 - DNA, 520 bp, Homo sapiens; identical to SEQ ID NO: 342853
  chr17:4500096-4500616
  hypo

SEQ ID NO: 381504 - DNA, 238 bp, Homo sapiens; identical to SEQ ID NO: 342854
  chr17:4685696-4685934
  hypo

SEQ ID NO: 381505 - DNA, 507 bp, Homo sapiens; identical to SEQ ID NO: 342855
  chr17:4795549-4796056
  hypo

SEQ ID NO: 381506 - DNA, 515 bp, Homo sapiens; identical to SEQ ID NO: 360937
  chr17:4853391-4853906
  hypo

SEQ ID NO: 381507 - DNA, 341 bp, Homo sapiens; identical to SEQ ID NO: 335442
  chr17:4890368-4890709
  hypo

SEQ ID NO: 381508 - DNA, 34 bp, Homo sapiens; identical to SEQ ID NO: 345503
  chr17:4981985-4982019
  hypo

SEQ ID NO: 381509 - DNA, 213 bp, Homo sapiens; identical to SEQ ID NO: 342859
  chr17:5269074-5269287
  hypo

SEQ ID NO: 381510 - DNA, 707 bp, Homo sapiens
  chr17:6474321-6475028
  hypo
cgaggccccagcccggaatggggagcccactacgtgcccctccagaggctacaccacgatcaacatggagagaaagagcccaggcccccaggccctgcccagattgtcctcgcaaagacccagccaccctgttggccccgcgtctgtttcaaatcccatgcctgggatttctttttgacattaaagtaaatgttggccagagagccacctacaagggtgacgaaggctgccggcttctcattggagggctgggaggagactctgcaggtctctgaggactgccaagactccttcatcacactgagcagatataaaatccattaccaagggctaataaatgcggggaggccggcagaggacatgcccgccttgctgggagggcacacactcaggccaagaacagcaggctctccaggcacagccactcgccctccgatatttgcccctcctgcacgcacctctctcggagtcccattgttctccattcaatcatttgggcaccaattctgtttctctttgactataaaagcccatgcctgcagacctctctacacatttattgtgcggctggaatttatgacggattggatttcagaggagggattgattaaatacagatggagcacttgacaagggcctgggggtcccggtagactcccccatttagaaacagaataaagattagaaagcgtgagcaagggcaatcc

SEQ ID NO: 381511 - DNA, 61 bp, Homo sapiens; identical to SEQ ID NO: 355584
  chr17:7187868-7187929
  hypo

SEQ ID NO: 381512 - DNA, 93 bp, Homo sapiens; identical to SEQ ID NO: 342862
  chr17:7188345-7188438
  hypo

SEQ ID NO: 381513 - DNA, 569 bp, Homo sapiens; identical to SEQ ID NO: 355585
  chr17:7224752-7225321
  hypo

SEQ ID NO: 381514 - DNA, 1345 bp, Homo sapiens; identical to SEQ ID NO: 345504
  chr17:7254483-7255828
  hypo

SEQ ID NO: 381515 - DNA, 282 bp, Homo sapiens; identical to SEQ ID NO: 342865
  chr17:7320371-7320653
  hypo

SEQ ID NO: 381516 - DNA, 156 bp, Homo sapiens; identical to SEQ ID NO: 346157
  chr17:7369222-7369378
  hypo

SEQ ID NO: 381517 - DNA, 73 bp, Homo sapiens; identical to SEQ ID NO: 342868
  chr17:7493149-7493222
  hypo

SEQ ID NO: 381518 - DNA, 442 bp, Homo sapiens; identical to SEQ ID NO: 342869
  chr17:7493709-7494151
  hypo

SEQ ID NO: 381519 - DNA, 200 bp, Homo sapiens
  chr17:7690145-7690345
  hypo
cgaggagcgtgagcggagggtgcaaggtgagcggctccccggtttcctcatcacccaccatctactcagatgagaaacccgacgagaagtggatcctgttcgatggccccgtggacacactgtggatcgagaacatgaactccgtcatggacgataacaaggtgttgaccctcatcaacggcgagcgcatcgcgatgccc

SEQ ID NO: 381520 - DNA, 178 bp, Homo sapiens; identical to SEQ ID NO: 342871
  chr17:7806544-7806722
  hypo

SEQ ID NO: 381521 - DNA, 101 bp, Homo sapiens; identical to SEQ ID NO: 342872
  chr17:7807194-7807295
  hypo

SEQ ID NO: 381522 - DNA, 206 bp, Homo sapiens; identical to SEQ ID NO: 342873
  chr17:7951722-7951928
  hypo

SEQ ID NO: 381523 - DNA, 261 bp, Homo sapiens; identical to SEQ ID NO: 342874
  chr17:8012317-8012578
  hypo

SEQ ID NO: 381524 - DNA, 272 bp, Homo sapiens; identical to SEQ ID NO: 217545
  chr17:8104639-8104911
  hypo

SEQ ID NO: 381525 - DNA, 439 bp, Homo sapiens; identical to SEQ ID NO: 342876
  chr17:8197565-8198004
  hypo

SEQ ID NO: 381526 - DNA, 71 bp, Homo sapiens
  chr17:8380280-8380351
  hypo
cgagatgcgttggcacgcgtcgcttcttcttctgcttcctccagctggcgtttaagctgcttcatccgagc

SEQ ID NO: 381527 - DNA, 212 bp, Homo sapiens; identical to SEQ ID NO: 355592
  chr17:8383605-8383817
  hypo

SEQ ID NO: 381528 - DNA, 143 bp, Homo sapiens; identical to SEQ ID NO: 348789
  chr17:8384370-8384513
  hypo

SEQ ID NO: 381529 - DNA, 225 bp, Homo sapiens
  chr17:8731961-8732186
  hypo
cgggacacgccgggcagcatttccccatccccactgggccggcctgtcctccggtgcagccctgggggcccgtcccagctgccaggcatcaagaagtccaggggccatgcacgcttcttgatgccccctttgcgctgcagcccggctcgctccatctcagggctgccgggtgcaggcagctcatcagcccccgtgggaaggtcccgctcaatgccgctgtcagtg

SEQ ID NO: 381530 - DNA, 186 bp, Homo sapiens; identical to SEQ ID NO: 342883
  chr17:8977478-8977664
  hypo

SEQ ID NO: 381531 - DNA, 32 bp, Homo sapiens; identical to SEQ ID NO: 367165
  chr17:9154702-9154734
  hypo

SEQ ID NO: 381532 - DNA, 186 bp, Homo sapiens; identical to SEQ ID NO: 342884
  chr17:9233928-9234114
  hypo

SEQ ID NO: 381533 - DNA, 1219 bp, Homo sapiens; identical to SEQ ID NO: 335461
  chr17:9548277-9549496
  hypo

SEQ ID NO: 381534 - DNA, 196 bp, Homo sapiens; identical to SEQ ID NO: 342886
  chr17:9631380-9631576
  hypo

SEQ ID NO: 381535 - DNA, 33 bp, Homo sapiens; identical to SEQ ID NO: 342887
  chr17:9719665-9719698
  hypo

SEQ ID NO: 381536 - DNA, 173 bp, Homo sapiens; identical to SEQ ID NO: 351890
  chr17:10632714-10632887
  hypo

SEQ ID NO: 381537 - DNA, 245 bp, Homo sapiens; identical to SEQ ID NO: 351891
  chr17:10633350-10633595
  hypo

SEQ ID NO: 381538 - DNA, 119 bp, Homo sapiens; identical to SEQ ID NO: 342890
  chr17:12032523-12032642
  hypo

SEQ ID NO: 381539 - DNA, 239 bp, Homo sapiens; identical to SEQ ID NO: 342891
  chr17:12890262-12890501
  hypo

SEQ ID NO: 381540 - DNA, 260 bp, Homo sapiens; identical to SEQ ID NO: 204436
  chr17:14204242-14204502
  hypo

SEQ ID NO: 381541 - DNA, 168 bp, Homo sapiens; identical to SEQ ID NO: 204437
  chr17:14204834-14205002
  hypo

SEQ ID NO: 381542 - DNA, 75 bp, Homo sapiens; identical to SEQ ID NO: 351897
  chr17:14212398-14212473
  hypo

SEQ ID NO: 381543 - DNA, 109 bp, Homo sapiens; identical to SEQ ID NO: 360970
  chr17:16257038-16257147
  hypo

SEQ ID NO: 381544 - DNA, 104 bp, Homo sapiens; identical to SEQ ID NO: 355601
  chr17:16282523-16282627
  hypo

SEQ ID NO: 381545 - DNA, 674 bp, Homo sapiens; identical to SEQ ID NO: 204447
  chr17:16283956-16284630
  hypo

SEQ ID NO: 381546 - DNA, 39 bp, Homo sapiens; identical to SEQ ID NO: 347411
  chr17:16285065-16285104
  hypo

SEQ ID NO: 381547 - DNA, 209 bp, Homo sapiens; identical to SEQ ID NO: 342899
  chr17:16923475-16923684
  hypo

SEQ ID NO: 381548 - DNA, 203 bp, Homo sapiens; identical to SEQ ID NO: 342900
  chr17:17031200-17031403
  hypo

SEQ ID NO: 381549 - DNA, 430 bp, Homo sapiens; identical to SEQ ID NO: 342901
  chr17:17045715-17046145
  hypo

SEQ ID NO: 381550 - DNA, 300 bp, Homo sapiens; identical to SEQ ID NO: 217585
  chr17:17062274-17062574
  hypo

SEQ ID NO: 381551 - DNA, 282 bp, Homo sapiens; identical to SEQ ID NO: 355605
  chr17:17062763-17063045
  hypo

SEQ ID NO: 381552 - DNA, 210 bp, Homo sapiens; identical to SEQ ID NO: 342903
  chr17:17104713-17104923
  hypo

SEQ ID NO: 381553 - DNA, 226 bp, Homo sapiens; identical to SEQ ID NO: 367185
  chr17:17120248-17120474
  hypo

SEQ ID NO: 381554 - DNA, 208 bp, Homo sapiens; identical to SEQ ID NO: 342905
  chr17:17224346-17224554
  hypo

SEQ ID NO: 381555 - DNA, 55 bp, Homo sapiens; identical to SEQ ID NO: 374063
  chr17:17287170-17287225
  hypo

SEQ ID NO: 381556 - DNA, 472 bp, Homo sapiens; identical to SEQ ID NO: 374064
  chr17:17399572-17400044
  hypo

SEQ ID NO: 381557 - DNA, 121 bp, Homo sapiens; identical to SEQ ID NO: 342908
  chr17:17488209-17488330
  hypo

SEQ ID NO: 381558 - DNA, 199 bp, Homo sapiens; identical to SEQ ID NO: 342909
  chr17:17637969-17638168
  hypo

SEQ ID NO: 381559 - DNA, 76 bp, Homo sapiens
  chr17:17717893-17717969
  hypo
cgggaccaggcaggaggaacctgccgtgcactcactcagactcctgcagcacccggggcaggtgctccaccagcgg

SEQ ID NO: 381560 - DNA, 246 bp, Homo sapiens; identical to SEQ ID NO: 355609
  chr17:18024621-18024867
  hypo

SEQ ID NO: 381561 - DNA, 142 bp, Homo sapiens; identical to SEQ ID NO: 342912
  chr17:18083378-18083520
  hypo

SEQ ID NO: 381562 - DNA, 602 bp, Homo sapiens; identical to SEQ ID NO: 355611
  chr17:18854647-18855249
  hypo

SEQ ID NO: 381563 - DNA, 64 bp, Homo sapiens; identical to SEQ ID NO: 367191
  chr17:18855505-18855569
  hypo

SEQ ID NO: 381564 - DNA, 300 bp, Homo sapiens; identical to SEQ ID NO: 335481
  chr17:19140744-19141044
  hypo

SEQ ID NO: 381565 - DNA, 410 bp, Homo sapiens; identical to SEQ ID NO: 335482
  chr17:19282076-19282486
  hypo

SEQ ID NO: 381566 - DNA, 112 bp, Homo sapiens; identical to SEQ ID NO: 342918
  chr17:19513145-19513257
  hypo

SEQ ID NO: 381567 - DNA, 130 bp, Homo sapiens; identical to SEQ ID NO: 342919
  chr17:19623347-19623477
  hypo

SEQ ID NO: 381568 - DNA, 338 bp, Homo sapiens; identical to SEQ ID NO: 342920
  chr17:19646495-19646833
  hypo

SEQ ID NO: 381569 - DNA, 101 bp, Homo sapiens; identical to SEQ ID NO: 367195
  chr17:19771712-19771813
  hypo

SEQ ID NO: 381570 - DNA, 64 bp, Homo sapiens; identical to SEQ ID NO: 342922
  chr17:19842333-19842397
  hypo

SEQ ID NO: 381571 - DNA, 226 bp, Homo sapiens; identical to SEQ ID NO: 342923
  chr17:20903670-20903896
  hypo

SEQ ID NO: 381572 - DNA, 232 bp, Homo sapiens; identical to SEQ ID NO: 355615
  chr17:21104115-21104347
  hypo

SEQ ID NO: 381573 - DNA, 117 bp, Homo sapiens; identical to SEQ ID NO: 342925
  chr17:25619839-25619956
  hypo

SEQ ID NO: 381574 - DNA, 309 bp, Homo sapiens; identical to SEQ ID NO: 367200
  chr17:25620264-25620573
  hypo

SEQ ID NO: 381575 - DNA, 125 bp, Homo sapiens; identical to SEQ ID NO: 342928
  chr17:25842444-25842569
  hypo

SEQ ID NO: 381576 - DNA, 62 bp, Homo sapiens; identical to SEQ ID NO: 348797
  chr17:25931759-25931821
  hypo

SEQ ID NO: 381577 - DNA, 200 bp, Homo sapiens; identical to SEQ ID NO: 342930
  chr17:25934818-25935018
  hypo

SEQ ID NO: 381578 - DNA, 317 bp, Homo sapiens; identical to SEQ ID NO: 355619
  chr17:25936178-25936495
  hypo

SEQ ID NO: 381579 - DNA, 110 bp, Homo sapiens; identical to SEQ ID NO: 367205
  chr17:26594091-26594201
  hypo

SEQ ID NO: 381580 - DNA, 300 bp, Homo sapiens; identical to SEQ ID NO: 342933
  chr17:26851601-26851901
  hypo

SEQ ID NO: 381581 - DNA, 48 bp, Homo sapiens; identical to SEQ ID NO: 348798
  chr17:26961722-26961770
  hypo

SEQ ID NO: 381582 - DNA, 168 bp, Homo sapiens; identical to SEQ ID NO: 367208
  chr17:27085337-27085505
  hypo

SEQ ID NO: 381583 - DNA, 52 bp, Homo sapiens; identical to SEQ ID NO: 367209
  chr17:27085535-27085587
  hypo

SEQ ID NO: 381584 - DNA, 181 bp, Homo sapiens; identical to SEQ ID NO: 342936
  chr17:27207684-27207865
  hypo

SEQ ID NO: 381585 - DNA, 59 bp, Homo sapiens; identical to SEQ ID NO: 351908
  chr17:27332307-27332366
  hypo

SEQ ID NO: 381586 - DNA, 122 bp, Homo sapiens; identical to SEQ ID NO: 351909
  chr17:27332733-27332855
  hypo

SEQ ID NO: 381587 - DNA, 110 bp, Homo sapiens
  chr17:27411553-27411663
  hypo
cgtcaaatacaatttatgtccgggctcatgtgctattagttaacggggagccgaatcacgggggaacaaacaaacggagacagaacggcgggggatattaattgtgtgtg

SEQ ID NO: 381588 - DNA, 299 bp, Homo sapiens
  chr17:27411693-27411992
  hypo
gttacacactattacatttatcattagctctcactgagtcctgtgcgctgccaccagcccatcctggccaggggagggggtccatcaggcgagagagagtgggggaagaaacccaatgccatgctaaaaaaaaaagacctctaaaaaacaaccctgtcgaacttgatggaggatcagcccgctctgcctgaaggcctgcgcatctgcatccgctgtccagctcccacccagaaagcgggaaaagagagggctggatttcctgggcttcctgccacctgacagtaccagcacaagcgccc

SEQ ID NO: 381589 - DNA, 56 bp, Homo sapiens; identical to SEQ ID NO: 360989
  chr17:27893139-27893195
  hypo

SEQ ID NO: 381590 - DNA, 387 bp, Homo sapiens; identical to SEQ ID NO: 360990
  chr17:27893344-27893731
  hypo

SEQ ID NO: 381591 - DNA, 125 bp, Homo sapiens; identical to SEQ ID NO: 355623
  chr17:27909050-27909175
  hypo

SEQ ID NO: 381592 - DNA, 157 bp, Homo sapiens; identical to SEQ ID NO: 355624
  chr17:27909205-27909362
  hypo

SEQ ID NO: 381593 - DNA, 228 bp, Homo sapiens; identical to SEQ ID NO: 367217
  chr17:28299376-28299604
  hypo

SEQ ID NO: 381594 - DNA, 167 bp, Homo sapiens; identical to SEQ ID NO: 342944
  chr17:29232077-29232244
  hypo

SEQ ID NO: 381595 - DNA, 337 bp, Homo sapiens; identical to SEQ ID NO: 351912
  chr17:29248950-29249287
  hypo

SEQ ID NO: 381596 - DNA, 32 bp, Homo sapiens; identical to SEQ ID NO: 347419
  chr17:29718746-29718778
  hypo

SEQ ID NO: 381597 - DNA, 121 bp, Homo sapiens; identical to SEQ ID NO: 342948
  chr17:29773391-29773512
  hypo

SEQ ID NO: 381598 - DNA, 60 bp, Homo sapiens; identical to SEQ ID NO: 355627
  chr17:30333052-30333112
  hypo

SEQ ID NO: 381599 - DNA, 280 bp, Homo sapiens; identical to SEQ ID NO: 342951
  chr17:30347571-30347851
  hypo

SEQ ID NO: 381600 - DNA, 126 bp, Homo sapiens; identical to SEQ ID NO: 342952
  chr17:30804383-30804509
  hypo

SEQ ID NO: 381601 - DNA, 33 bp, Homo sapiens; identical to SEQ ID NO: 342953
  chr17:31099662-31099695
  hypo

SEQ ID NO: 381602 - DNA, 261 bp, Homo sapiens; identical to SEQ ID NO: 346160
  chr17:33344328-33344589
  hypo

SEQ ID NO: 381603 - DNA, 38 bp, Homo sapiens; identical to SEQ ID NO: 342957
  chr17:33351154-33351192
  hypo

SEQ ID NO: 381604 - DNA, 717 bp, Homo sapiens; identical to SEQ ID NO: 335510
  chr17:33814248-33814965
  hypo

SEQ ID NO: 381605 - DNA, 130 bp, Homo sapiens; identical to SEQ ID NO: 342960
  chr17:35545278-35545408
  hypo

SEQ ID NO: 381606 - DNA, 93 bp, Homo sapiens; identical to SEQ ID NO: 342962
  chr17:36864049-36864142
  hypo

SEQ ID NO: 381607 - DNA, 36 bp, Homo sapiens; identical to SEQ ID NO: 355631
  chr17:36875885-36875921
  hypo

SEQ ID NO: 381608 - DNA, 406 bp, Homo sapiens; identical to SEQ ID NO: 355632
  chr17:36876379-36876785
  hypo

SEQ ID NO: 381609 - DNA, 226 bp, Homo sapiens; identical to SEQ ID NO: 347425
  chr17:36886750-36886976
  hypo

SEQ ID NO: 381610 - DNA, 194 bp, Homo sapiens; identical to SEQ ID NO: 367231
  chr17:37074886-37075080
  hypo

SEQ ID NO: 381611 - DNA, 123 bp, Homo sapiens; identical to SEQ ID NO: 342967
  chr17:37583075-37583198
  hypo

SEQ ID NO: 381612 - DNA, 328 bp, Homo sapiens; identical to SEQ ID NO: 374122
  chr17:37782857-37783185
  hypo

SEQ ID NO: 381613 - DNA, 179 bp, Homo sapiens; identical to SEQ ID NO: 342970
  chr17:37819059-37819238
  hypo

SEQ ID NO: 381614 - DNA, 99 bp, Homo sapiens; identical to SEQ ID NO: 217757
  chr17:37881018-37881117
  hypo

SEQ ID NO: 381615 - DNA, 124 bp, Homo sapiens; identical to SEQ ID NO: 367235
  chr17:38179119-38179243
  hypo

SEQ ID NO: 381616 - DNA, 124 bp, Homo sapiens; identical to SEQ ID NO: 322397
  chr17:38179273-38179397
  hypo

SEQ ID NO: 381617 - DNA, 133 bp, Homo sapiens; identical to SEQ ID NO: 367237
  chr17:38179430-38179563
  hypo

SEQ ID NO: 381618 - DNA, 436 bp, Homo sapiens; identical to SEQ ID NO: 204598
  chr17:38498112-38498548
  hypo

SEQ ID NO: 381619 - DNA, 570 bp, Homo sapiens; identical to SEQ ID NO: 361027
  chr17:38498596-38499166
  hypo

SEQ ID NO: 381620 - DNA, 508 bp, Homo sapiens; identical to SEQ ID NO: 342975
  chr17:39658629-39659137
  hypo

SEQ ID NO: 381621 - DNA, 104 bp, Homo sapiens; identical to SEQ ID NO: 342976
  chr17:39659216-39659320
  hypo

SEQ ID NO: 381622 - DNA, 279 bp, Homo sapiens; identical to SEQ ID NO: 361028
  chr17:39683530-39683809
  hypo

SEQ ID NO: 381623 - DNA, 794 bp, Homo sapiens; identical to SEQ ID NO: 361029
  chr17:39683839-39684633
  hypo

SEQ ID NO: 381624 - DNA, 191 bp, Homo sapiens; identical to SEQ ID NO: 355636
  chr17:39788236-39788427
  hypo

SEQ ID NO: 381625 - DNA, 36 bp, Homo sapiens; identical to SEQ ID NO: 347428
  chr17:40332770-40332806
  hypo

SEQ ID NO: 381626 - DNA, 649 bp, Homo sapiens; identical to SEQ ID NO: 348804
  chr17:40371760-40372409
  hypo

SEQ ID NO: 381627 - DNA, 139 bp, Homo sapiens; identical to SEQ ID NO: 342982
  chr17:40372634-40372773
  hypo

SEQ ID NO: 381628 - DNA, 418 bp, Homo sapiens; identical to SEQ ID NO: 342983
  chr17:40375292-40375710
  hypo

SEQ ID NO: 381629 - DNA, 199 bp, Homo sapiens; identical to SEQ ID NO: 367249
  chr17:40436563-40436762
  hypo

SEQ ID NO: 381630 - DNA, 841 bp, Homo sapiens; identical to SEQ ID NO: 335546
  chr17:41245464-41246305
  hypo

SEQ ID NO: 381631 - DNA, 100 bp, Homo sapiens; identical to SEQ ID NO: 342988
  chr17:41672281-41672381
  hypo

SEQ ID NO: 381632 - DNA, 84 bp, Homo sapiens; identical to SEQ ID NO: 204621
  chr17:42030245-42030329
  hypo

SEQ ID NO: 381633 - DNA, 170 bp, Homo sapiens; identical to SEQ ID NO: 345520
  chr17:42092357-42092527
  hypo

SEQ ID NO: 381634 - DNA, 325 bp, Homo sapiens; identical to SEQ ID NO: 92817
  chr17:42097490-42097815
  hypo

SEQ ID NO: 381635 - DNA, 343 bp, Homo sapiens; identical to SEQ ID NO: 355641
  chr17:42254319-42254662
  hypo

SEQ ID NO: 381636 - DNA, 249 bp, Homo sapiens
  chr17:42334648-42334897
  hypo
cgcacccggccactgtctcagtcttatacacaacctcccgtgtgcattaacatccccataggcccccaccttgatcagcttggagaaagtctcatagatgaagatgagggaaatgaggaaggagaagatctcctgggtatagcgggagatgaagcggaccaggaagctaccctcgaaggccaccaccaacaccaccagcaggatgagccagaagccgatccacacgcggcccacgatgtactctagacc

SEQ ID NO: 381637 - DNA, 92 bp, Homo sapiens; identical to SEQ ID NO: 367254
  chr17:42335362-42335454
  hypo

SEQ ID NO: 381638 - DNA, 99 bp, Homo sapiens; identical to SEQ ID NO: 342995
  chr17:42338019-42338118
  hypo

SEQ ID NO: 381639 - DNA, 62 bp, Homo sapiens; identical to SEQ ID NO: 204629
  chr17:42402710-42402772
  hypo

SEQ ID NO: 381640 - DNA, 192 bp, Homo sapiens; identical to SEQ ID NO: 347435
  chr17:42402917-42403109
  hypo

SEQ ID NO: 381641 - DNA, 121 bp, Homo sapiens; identical to SEQ ID NO: 361049
  chr17:42906461-42906582
  hypo

SEQ ID NO: 381642 - DNA, 40 bp, Homo sapiens; identical to SEQ ID NO: 361052
  chr17:43045529-43045569
  hypo

SEQ ID NO: 381643 - DNA, 111 bp, Homo sapiens; identical to SEQ ID NO: 343000
  chr17:43121686-43121797
  hypo

SEQ ID NO: 381644 - DNA, 230 bp, Homo sapiens; identical to SEQ ID NO: 343001
  chr17:43180339-43180569
  hypo

SEQ ID NO: 381645 - DNA, 425 bp, Homo sapiens; identical to SEQ ID NO: 348809
  chr17:43246865-43247290
  hypo

SEQ ID NO: 381646 - DNA, 38 bp, Homo sapiens; identical to SEQ ID NO: 347438
  chr17:43298587-43298625
  hypo

SEQ ID NO: 381647 - DNA, 230 bp, Homo sapiens; identical to SEQ ID NO: 347439
  chr17:43298666-43298896
  hypo

SEQ ID NO: 381648 - DNA, 879 bp, Homo sapiens; identical to SEQ ID NO: 351953
  chr17:43324795-43325674
  hypo

SEQ ID NO: 381649 - DNA, 59 bp, Homo sapiens; identical to SEQ ID NO: 343005
  chr17:45689891-45689950
  hypo

SEQ ID NO: 381650 - DNA, 619 bp, Homo sapiens; identical to SEQ ID NO: 374170
  chr17:45928211-45928830
  hypo

SEQ ID NO: 381651 - DNA, 107 bp, Homo sapiens; identical to SEQ ID NO: 343008
  chr17:46006406-46006513
  hypo

SEQ ID NO: 381652 - DNA, 298 bp, Homo sapiens; identical to SEQ ID NO: 292442
  chr17:46089283-46089581
  hypo

SEQ ID NO: 381653 - DNA, 218 bp, Homo sapiens; identical to SEQ ID NO: 345528
  chr17:46124683-46124901
  hypo

SEQ ID NO: 381654 - DNA, 164 bp, Homo sapiens; identical to SEQ ID NO: 345529
  chr17:46125148-46125312
  hypo

SEQ ID NO: 381655 - DNA, 31 bp, Homo sapiens; identical to SEQ ID NO: 348815
  chr17:46152418-46152449
  hypo

SEQ ID NO: 381656 - DNA, 181 bp, Homo sapiens; identical to SEQ ID NO: 351966
  chr17:46659093-46659274
  hypo

SEQ ID NO: 381657 - DNA, 45 bp, Homo sapiens; identical to SEQ ID NO: 204661
  chr17:46659384-46659429
  hypo

SEQ ID NO: 381658 - DNA, 63 bp, Homo sapiens; identical to SEQ ID NO: 345531
  chr17:46687527-46687590
  hypo

SEQ ID NO: 381659 - DNA, 170 bp, Homo sapiens; identical to SEQ ID NO: 351973
  chr17:46724200-46724370
  hypo

SEQ ID NO: 381660 - DNA, 348 bp, Homo sapiens; identical to SEQ ID NO: 292486
  chr17:47073560-47073908
  hypo

SEQ ID NO: 381661 - DNA, 152 bp, Homo sapiens; identical to SEQ ID NO: 204688
  chr17:47074409-47074561
  hypo

SEQ ID NO: 381662 - DNA, 65 bp, Homo sapiens; identical to SEQ ID NO: 351981
  chr17:47653244-47653309
  hypo

SEQ ID NO: 381663 - DNA, 715 bp, Homo sapiens; identical to SEQ ID NO: 351982
  chr17:47653373-47654088
  hypo

SEQ ID NO: 381664 - DNA, 163 bp, Homo sapiens
  chr17:47657789-47657952
  hypo
cgcaggacatttgcttgagacccaagtggcagggatccaaccgcccttggcgctgatgtttgctgagggctcagggcttccctctccagccccggttccaagctgtctgatcccccacgaggaaacttgagcaaacaccctgggctcggtgctggaggagggc

SEQ ID NO: 381665 - DNA, 284 bp, Homo sapiens; identical to SEQ ID NO: 343021
  chr17:48565138-48565422
  hypo

SEQ ID NO: 381666 - DNA, 146 bp, Homo sapiens; identical to SEQ ID NO: 355663
  chr17:48687012-48687158
  hypo

SEQ ID NO: 381667 - DNA, 78 bp, Homo sapiens; identical to SEQ ID NO: 355664
  chr17:48687246-48687324
  hypo

SEQ ID NO: 381668 - DNA, 197 bp, Homo sapiens; identical to SEQ ID NO: 343024
  chr17:48776811-48777008
  hypo

SEQ ID NO: 381669 - DNA, 120 bp, Homo sapiens; identical to SEQ ID NO: 343025
  chr17:48845008-48845128
  hypo

SEQ ID NO: 381670 - DNA, 267 bp, Homo sapiens; identical to SEQ ID NO: 374206
  chr17:49008887-49009154
  hypo

SEQ ID NO: 381671 - DNA, 134 bp, Homo sapiens; identical to SEQ ID NO: 343028
  chr17:49281042-49281176
  hypo

SEQ ID NO: 381672 - DNA, 215 bp, Homo sapiens; identical to SEQ ID NO: 292543
  chr17:50235416-50235631
  hypo

SEQ ID NO: 381673 - DNA, 297 bp, Homo sapiens; identical to SEQ ID NO: 345533
  chr17:54911482-54911779
  hypo

SEQ ID NO: 381674 - DNA, 515 bp, Homo sapiens; identical to SEQ ID NO: 345534
  chr17:54911874-54912389
  hypo

SEQ ID NO: 381675 - DNA, 446 bp, Homo sapiens; identical to SEQ ID NO: 343032
  chr17:55644506-55644952
  hypo

SEQ ID NO: 381676 - DNA, 132 bp, Homo sapiens; identical to SEQ ID NO: 343033
  chr17:55664904-55665036
  hypo

SEQ ID NO: 381677 - DNA, 348 bp, Homo sapiens; identical to SEQ ID NO: 343034
  chr17:55753412-55753760
  hypo

SEQ ID NO: 381678 - DNA, 266 bp, Homo sapiens; identical to SEQ ID NO: 343035
  chr17:55917220-55917486
  hypo

SEQ ID NO: 381679 - DNA, 215 bp, Homo sapiens; identical to SEQ ID NO: 292571
  chr17:56327007-56327222
  hypo

SEQ ID NO: 381680 - DNA, 787 bp, Homo sapiens; identical to SEQ ID NO: 335625
  chr17:56429059-56429846
  hypo

SEQ ID NO: 381681 - DNA, 49 bp, Homo sapiens; identical to SEQ ID NO: 367291
  chr17:56435251-56435300
  hypo

SEQ ID NO: 381682 - DNA, 215 bp, Homo sapiens; identical to SEQ ID NO: 367292
  chr17:56435330-56435545
  hypo

SEQ ID NO: 381683 - DNA, 80 bp, Homo sapiens; identical to SEQ ID NO: 343039
  chr17:56439864-56439944
  hypo

SEQ ID NO: 381684 - DNA, 136 bp, Homo sapiens; identical to SEQ ID NO: 348819
  chr17:56743008-56743144
  hypo

SEQ ID NO: 381685 - DNA, 48 bp, Homo sapiens; identical to SEQ ID NO: 348820
  chr17:57297129-57297177
  hypo

SEQ ID NO: 381686 - DNA, 145 bp, Homo sapiens; identical to SEQ ID NO: 343043
  chr17:57787150-57787295
  hypo

SEQ ID NO: 381687 - DNA, 40 bp, Homo sapiens; identical to SEQ ID NO: 343044
  chr17:57948205-57948245
  hypo

SEQ ID NO: 381688 - DNA, 235 bp, Homo sapiens; identical to SEQ ID NO: 343046
  chr17:59239030-59239265
  hypo

SEQ ID NO: 381689 - DNA, 218 bp, Homo sapiens; identical to SEQ ID NO: 367298
  chr17:60744620-60744838
  hypo

SEQ ID NO: 381690 - DNA, 214 bp, Homo sapiens; identical to SEQ ID NO: 348821
  chr17:60754652-60754866
  hypo

SEQ ID NO: 381691 - DNA, 207 bp, Homo sapiens; identical to SEQ ID NO: 343051
  chr17:60766578-60766785
  hypo

SEQ ID NO: 381692 - DNA, 102 bp, Homo sapiens; identical to SEQ ID NO: 348822
  chr17:60766832-60766934
  hypo

SEQ ID NO: 381693 - DNA, 224 bp, Homo sapiens; identical to SEQ ID NO: 348823
  chr17:60767107-60767331
  hypo

SEQ ID NO: 381694 - DNA, 40 bp, Homo sapiens; identical to SEQ ID NO: 347459
  chr17:60885408-60885448
  hypo

SEQ ID NO: 381695 - DNA, 308 bp, Homo sapiens; identical to SEQ ID NO: 347460
  chr17:60885548-60885856
  hypo

SEQ ID NO: 381696 - DNA, 104 bp, Homo sapiens; identical to SEQ ID NO: 361115
  chr17:61553834-61553938
  hypo

SEQ ID NO: 381697 - DNA, 48 bp, Homo sapiens; identical to SEQ ID NO: 204746
  chr17:61553939-61553987
  hypo

SEQ ID NO: 381698 - DNA, 322 bp, Homo sapiens; identical to SEQ ID NO: 361117
  chr17:61554094-61554416
  hypo

SEQ ID NO: 381699 - DNA, 111 bp, Homo sapiens; identical to SEQ ID NO: 345536
  chr17:61777761-61777872
  hypo

SEQ ID NO: 381700 - DNA, 76 bp, Homo sapiens; identical to SEQ ID NO: 345537
  chr17:61778423-61778499
  hypo

SEQ ID NO: 381701 - DNA, 128 bp, Homo sapiens; identical to SEQ ID NO: 343057
  chr17:61817226-61817354
  hypo

SEQ ID NO: 381702 - DNA, 235 bp, Homo sapiens
  chr17:62782519-62782754
  hypo
cgtgggctgccctgaacaactgcaccgccccttggcacggcacaaagcagatgttcaatacattcctgcccatagagcgaagcctgctgccctgcgtgcttgggccaggctgtgggtgtggcgaagggtagggctgggaggcagctggctgggtgtcccgcatacctgattgtggtgtcaaactcagaggggaagatgatgtcgtggtgctggcagatctggcagatgaagctgc

SEQ ID NO: 381703 - DNA, 276 bp, Homo sapiens
  chr17:62782784-62783060
  hypo
gctgggaggcaaattcaatcagggccttgaggaatccttcatatacctcatctgcgatctgcggagggtaagtaggaatccttcatacaccccgtctgcgatctgcggagggctggtaaactgaggccccaggcctttcaagcagctgcactgagtcgccatggcaccctgcctagagaacttctacccccagtttccatgcgggcaagaaaagaaaacctccctgaatcaggctgagtagtggcagcatccagcccgtgggtactgaggtcactc

SEQ ID NO: 381704 - DNA, 243 bp, Homo sapiens; identical to SEQ ID NO: 343059
  chr17:62783342-62783585
  hypo

SEQ ID NO: 381705 - DNA, 220 bp, Homo sapiens; identical to SEQ ID NO: 343060
  chr17:63152527-63152747
  hypo

SEQ ID NO: 381706 - DNA, 848 bp, Homo sapiens; identical to SEQ ID NO: 335648
  chr17:63555681-63556529
  hypo

SEQ ID NO: 381707 - DNA, 669 bp, Homo sapiens; identical to SEQ ID NO: 335649
  chr17:64187889-64188558
  hypo

SEQ ID NO: 381708 - DNA, 675 bp, Homo sapiens; identical to SEQ ID NO: 352002
  chr17:64298985-64299660
  hypo

SEQ ID NO: 381709 - DNA, 347 bp, Homo sapiens; identical to SEQ ID NO: 322848
  chr17:64671978-64672325
  hypo

SEQ ID NO: 381710 - DNA, 59 bp, Homo sapiens
  chr17:64672597-64672656
  hypo
cttgtggcccagcgctactgcgcacatgttcctttaagatccctatttccgaggcagcc

SEQ ID NO: 381711 - DNA, 367 bp, Homo sapiens; identical to SEQ ID NO: 343065
  chr17:64716166-64716533
  hypo

SEQ ID NO: 381712 - DNA, 416 bp, Homo sapiens; identical to SEQ ID NO: 367315
  chr17:64751203-64751619
  hypo

SEQ ID NO: 381713 - DNA, 272 bp, Homo sapiens; identical to SEQ ID NO: 367316
  chr17:65040729-65041001
  hypo

SEQ ID NO: 381714 - DNA, 206 bp, Homo sapiens
  chr17:66416586-66416792
  hypo
cgctgtcaagccgcataacagaccaatttttattccacgaggaggagtacctggaaattaggcaagtttgcttccaaatttcatttttaccctctttacaaacacacgctttagtttagtcttggagtttagttttggagttagccttgcatatcccttctgtatcctgtccctcctccacgccgacccgagagcagctgagctgc

SEQ ID NO: 381715 - DNA, 293 bp, Homo sapiens; identical to SEQ ID NO: 355684
  chr17:66420425-66420718
  hypo

SEQ ID NO: 381716 - DNA, 95 bp, Homo sapiens
  chr17:66426282-66426377
  hypo
cgaaggctcttctggtcgactagggagtaatgcacaggcaacgatgggactgggctgcaggccccacacgcacccaggaatctccacacccaagc

SEQ ID NO: 381717 - DNA, 425 bp, Homo sapiens; identical to SEQ ID NO: 343072
  chr17:66440125-66440550
  hypo

SEQ ID NO: 381718 - DNA, 57 bp, Homo sapiens; identical to SEQ ID NO: 343073
  chr17:66913081-66913138
  hypo

SEQ ID NO: 381719 - DNA, 204 bp, Homo sapiens; identical to SEQ ID NO: 204763
  chr17:68164928-68165132
  hypo

SEQ ID NO: 381720 - DNA, 133 bp, Homo sapiens; identical to SEQ ID NO: 343075
  chr17:70220156-70220289
  hypo

SEQ ID NO: 381721 - DNA, 126 bp, Homo sapiens
  chr17:70657377-70657503
  hypo
cgccccctggagttgtgcagtgggacactcctgcttgagcgcagattgctgctcagcctggggtgtagttctggggttcgaggtgcacgctctcaggagaggtagtggagagagtcatgggtttct

SEQ ID NO: 381722 - DNA, 382 bp, Homo sapiens
  chr17:70657541-70657923
  hypo
ttgctctccaggctatattccctggccggttgattatgaaaggagaatggcatatccctgacaagccctgcttcaccccggctttcagatcctcccatgtgcgatgagcgtgtgtgttcttgtgtggcaggcccttacatactgttttgattgttatcatcttgccgtgaaaggcctgattgttcaggcctggagatgacatcaccggcttcccactagggcagcctgtcgaggtgtttgatgagcctgcaggtgggaaggggctgggtactccccgcagggctgcccggccctacctgctcagaggagctggcttagcacgcaagggatcttcccccaccctcttggtgcagttctcggaaacttcttggtgcaggctggc

SEQ ID NO: 381723 - DNA, 335 bp, Homo sapiens; identical to SEQ ID NO: 367322
  chr17:70713689-70714024
  hypo

SEQ ID NO: 381724 - DNA, 240 bp, Homo sapiens; identical to SEQ ID NO: 292660
  chr17:71160878-71161118
  hypo

SEQ ID NO: 381725 - DNA, 201 bp, Homo sapiens; identical to SEQ ID NO: 355689
  chr17:71201650-71201851
  hypo

SEQ ID NO: 381726 - DNA, 31 bp, Homo sapiens
  chr17:71202346-71202377
  hypo
cgttttcacgccacacctcaacagcaacctt

SEQ ID NO: 381727 - DNA, 120 bp, Homo sapiens
  chr17:71202407-71202527
  hypo
caaatcaaaaacatgcttagtgcgaacgaagcgatacaggctcaaataacaaaattaacctgctcaagcacgtaatactccaggatgcagcatagggaggggaataagacacaaatagcc

SEQ ID NO: 381728 - DNA, 509 bp, Homo sapiens; identical to SEQ ID NO: 343082
  chr17:71281749-71282258
  hypo

SEQ ID NO: 381729 - DNA, 256 bp, Homo sapiens; identical to SEQ ID NO: 343083
  chr17:71431621-71431877
  hypo

SEQ ID NO: 381730 - DNA, 308 bp, Homo sapiens; identical to SEQ ID NO: 343084
  chr17:71548553-71548861
  hypo

SEQ ID NO: 381731 - DNA, 398 bp, Homo sapiens; identical to SEQ ID NO: 343085
  chr17:71744668-71745066
  hypo

SEQ ID NO: 381732 - DNA, 197 bp, Homo sapiens; identical to SEQ ID NO: 355692
  chr17:72220057-72220254
  hypo

SEQ ID NO: 381733 - DNA, 252 bp, Homo sapiens
  chr17:72277763-72278015
  hypo
cggcactcaggatttttttttaatgcggatgcagcttctggacaaattcctaggatctccccaccaccccttgcttcctgccccaaccagattgagaacctggagctgtcctggcaggacctgtggagatagggaaggggccggtggggtccctcaccccacaccctccctctgccccccagcagccggcaccatggagattgtgtacgtgtacgtcaagaagcgcagcgagttcgggaagcagtgcaattt

SEQ ID NO: 381734 - DNA, 61 bp, Homo sapiens; identical to SEQ ID NO: 217992
  chr17:72278143-72278204
  hypo

SEQ ID NO: 381735 - DNA, 183 bp, Homo sapiens; identical to SEQ ID NO: 355693
  chr17:72367880-72368063
  hypo

SEQ ID NO: 381736 - DNA, 345 bp, Homo sapiens; identical to SEQ ID NO: 355694
  chr17:72368130-72368475
  hypo

SEQ ID NO: 381737 - DNA, 359 bp, Homo sapiens; identical to SEQ ID NO: 347466
  chr17:72449954-72450313
  hypo

SEQ ID NO: 381738 - DNA, 336 bp, Homo sapiens; identical to SEQ ID NO: 347467
  chr17:72450330-72450666
  hypo

SEQ ID NO: 381739 - DNA, 207 bp, Homo sapiens; identical to SEQ ID NO: 343092
  chr17:72811689-72811896
  hypo

SEQ ID NO: 381740 - DNA, 79 bp, Homo sapiens; identical to SEQ ID NO: 343093
  chr17:72823386-72823465
  hypo

SEQ ID NO: 381741 - DNA, 508 bp, Homo sapiens; identical to SEQ ID NO: 355697
  chr17:72824032-72824540
  hypo

SEQ ID NO: 381742 - DNA, 230 bp, Homo sapiens; identical to SEQ ID NO: 367336
  chr17:72875508-72875738
  hypo

SEQ ID NO: 381743 - DNA, 65 bp, Homo sapiens; identical to SEQ ID NO: 347468
  chr17:73073967-73074032
  hypo

SEQ ID NO: 381744 - DNA, 84 bp, Homo sapiens; identical to SEQ ID NO: 355699
  chr17:73090991-73091075
  hypo

SEQ ID NO: 381745 - DNA, 257 bp, Homo sapiens; identical to SEQ ID NO: 322977
  chr17:73091180-73091437
  hypo

SEQ ID NO: 381746 - DNA, 127 bp, Homo sapiens; identical to SEQ ID NO: 343099
  chr17:73100161-73100288
  hypo

SEQ ID NO: 381747 - DNA, 59 bp, Homo sapiens; identical to SEQ ID NO: 367341
  chr17:73124823-73124882
  hypo

SEQ ID NO: 381748 - DNA, 166 bp, Homo sapiens; identical to SEQ ID NO: 367342
  chr17:73124912-73125078
  hypo

SEQ ID NO: 381749 - DNA, 48 bp, Homo sapiens; identical to SEQ ID NO: 346169
  chr17:73215386-73215434
  hypo

SEQ ID NO: 381750 - DNA, 104 bp, Homo sapiens; identical to SEQ ID NO: 367344
  chr17:73236302-73236406
  hypo

SEQ ID NO: 381751 - DNA, 141 bp, Homo sapiens; identical to SEQ ID NO: 343103
  chr17:73242514-73242655
  hypo

SEQ ID NO: 381752 - DNA, 80 bp, Homo sapiens; identical to SEQ ID NO: 292709
  chr17:73584287-73584367
  hypo

SEQ ID NO: 381753 - DNA, 170 bp, Homo sapiens; identical to SEQ ID NO: 352021
  chr17:73584951-73585121
  hypo

SEQ ID NO: 381754 - DNA, 270 bp, Homo sapiens; identical to SEQ ID NO: 367348
  chr17:73607997-73608267
  hypo

SEQ ID NO: 381755 - DNA, 535 bp, Homo sapiens; identical to SEQ ID NO: 367349
  chr17:73612827-73613362
  hypo

SEQ ID NO: 381756 - DNA, 527 bp, Homo sapiens; identical to SEQ ID NO: 367350
  chr17:73613424-73613951
  hypo

SEQ ID NO: 381757 - DNA, 192 bp, Homo sapiens; identical to SEQ ID NO: 348834
  chr17:73615737-73615929
  hypo

SEQ ID NO: 381758 - DNA, 109 bp, Homo sapiens; identical to SEQ ID NO: 348835
  chr17:73616587-73616696
  hypo

SEQ ID NO: 381759 - DNA, 149 bp, Homo sapiens; identical to SEQ ID NO: 343110
  chr17:73635145-73635294
  hypo

SEQ ID NO: 381760 - DNA, 153 bp, Homo sapiens; identical to SEQ ID NO: 355708
  chr17:73808671-73808824
  hypo

SEQ ID NO: 381761 - DNA, 194 bp, Homo sapiens; identical to SEQ ID NO: 355709
  chr17:73811214-73811408
  hypo

SEQ ID NO: 381762 - DNA, 220 bp, Homo sapiens; identical to SEQ ID NO: 343114
  chr17:73821496-73821716
  hypo

SEQ ID NO: 381763 - DNA, 88 bp, Homo sapiens; identical to SEQ ID NO: 343115
  chr17:73910336-73910424
  hypo

SEQ ID NO: 381764 - DNA, 349 bp, Homo sapiens; identical to SEQ ID NO: 343116
  chr17:74003316-74003665
  hypo

SEQ ID NO: 381765 - DNA, 506 bp, Homo sapiens; identical to SEQ ID NO: 343117
  chr17:74003908-74004414
  hypo

SEQ ID NO: 381766 - DNA, 269 bp, Homo sapiens; identical to SEQ ID NO: 355711
  chr17:74005186-74005455
  hypo

SEQ ID NO: 381767 - DNA, 154 bp, Homo sapiens; identical to SEQ ID NO: 355712
  chr17:74005497-74005651
  hypo

SEQ ID NO: 381768 - DNA, 194 bp, Homo sapiens; identical to SEQ ID NO: 343119
  chr17:74013689-74013883
  hypo

SEQ ID NO: 381769 - DNA, 127 bp, Homo sapiens; identical to SEQ ID NO: 343120
  chr17:74019389-74019516
  hypo

SEQ ID NO: 381770 - DNA, 185 bp, Homo sapiens; identical to SEQ ID NO: 343121
  chr17:74042063-74042248
  hypo

SEQ ID NO: 381771 - DNA, 104 bp, Homo sapiens; identical to SEQ ID NO: 335678
  chr17:74072105-74072209
  hypo

SEQ ID NO: 381772 - DNA, 386 bp, Homo sapiens; identical to SEQ ID NO: 343124
  chr17:74086716-74087102
  hypo

SEQ ID NO: 381773 - DNA, 813 bp, Homo sapiens; identical to SEQ ID NO: 361147
  chr17:74236139-74236952
  hypo

SEQ ID NO: 381774 - DNA, 306 bp, Homo sapiens; identical to SEQ ID NO: 367364
  chr17:74269555-74269861
  hypo

SEQ ID NO: 381775 - DNA, 264 bp, Homo sapiens; identical to SEQ ID NO: 343127
  chr17:74387398-74387662
  hypo

SEQ ID NO: 381776 - DNA, 81 bp, Homo sapiens; identical to SEQ ID NO: 343128
  chr17:74388687-74388768
  hypo

SEQ ID NO: 381777 - DNA, 118 bp, Homo sapiens; identical to SEQ ID NO: 348836
  chr17:74390245-74390363
  hypo

SEQ ID NO: 381778 - DNA, 182 bp, Homo sapiens; identical to SEQ ID NO: 348837
  chr17:74390459-74390641
  hypo

SEQ ID NO: 381779 - DNA, 149 bp, Homo sapiens; identical to SEQ ID NO: 343130
  chr17:74391568-74391717
  hypo

SEQ ID NO: 381780 - DNA, 346 bp, Homo sapiens; identical to SEQ ID NO: 343131
  chr17:74392164-74392510
  hypo

SEQ ID NO: 381781 - DNA, 127 bp, Homo sapiens; identical to SEQ ID NO: 343132
  chr17:74435202-74435329
  hypo

SEQ ID NO: 381782 - DNA, 48 bp, Homo sapiens; identical to SEQ ID NO: 343133
  chr17:74475354-74475402
  hypo

SEQ ID NO: 381783 - DNA, 162 bp, Homo sapiens; identical to SEQ ID NO: 343135
  chr17:74571597-74571759
  hypo

SEQ ID NO: 381784 - DNA, 269 bp, Homo sapiens; identical to SEQ ID NO: 343136
  chr17:74621445-74621714
  hypo

SEQ ID NO: 381785 - DNA, 119 bp, Homo sapiens; identical to SEQ ID NO: 343137
  chr17:74625074-74625193
  hypo

SEQ ID NO: 381786 - DNA, 176 bp, Homo sapiens
  chr17:74858667-74858843
  hypo
cgtggcctctgcactcgaggtggctagtgtgtgagggccagttgtccccgcgcagtgccactgttgctgatttgtacgcggtgtcagtaaatgctgttatgacattattaatgctgcacactacggcaaaggacaatggcctattgcctcgtaatgtgctgtgtgctgctgcagtc

SEQ ID NO: 381787 - DNA, 43 bp, Homo sapiens; identical to SEQ ID NO: 374268
  chr17:74864600-74864643
  hypo

SEQ ID NO: 381788 - DNA, 103 bp, Homo sapiens; identical to SEQ ID NO: 355721
  chr17:74908627-74908730
  hypo

SEQ ID NO: 381789 - DNA, 132 bp, Homo sapiens; identical to SEQ ID NO: 355722
  chr17:74908814-74908946
  hypo

SEQ ID NO: 381790 - DNA, 122 bp, Homo sapiens; identical to SEQ ID NO: 343141
  chr17:75132773-75132895
  hypo

SEQ ID NO: 381791 - DNA, 657 bp, Homo sapiens; identical to SEQ ID NO: 346170
  chr17:75206857-75207514
  hypo

SEQ ID NO: 381792 - DNA, 209 bp, Homo sapiens; identical to SEQ ID NO: 323128
  chr17:75207630-75207839
  hypo

SEQ ID NO: 381793 - DNA, 328 bp, Homo sapiens; identical to SEQ ID NO: 346172
  chr17:75207987-75208315
  hypo

SEQ ID NO: 381794 - DNA, 689 bp, Homo sapiens; identical to SEQ ID NO: 343143
  chr17:75213347-75214036
  hypo

SEQ ID NO: 381795 - DNA, 55 bp, Homo sapiens
  chr17:75411761-75411816
  hypo
cggcaccgaagccgagggaaggcagcattagtatgagctcccagcccaccgggct

SEQ ID NO: 381796 - DNA, 96 bp, Homo sapiens
  chr17:75411846-75411942
  hypo
cacgagggaagcatggcgaggtggacggtgcggaggcataaggagcaaaataaggcagatgcagtggctcagtggctcctggtggctgcgaggagc

SEQ ID NO: 381797 - DNA, 281 bp, Homo sapiens; identical to SEQ ID NO: 343147
  chr17:75848787-75849068
  hypo

SEQ ID NO: 381798 - DNA, 148 bp, Homo sapiens; identical to SEQ ID NO: 343148
  chr17:76034983-76035131
  hypo

SEQ ID NO: 381799 - DNA, 83 bp, Homo sapiens; identical to SEQ ID NO: 367382
  chr17:76100954-76101037
  hypo

SEQ ID NO: 381800 - DNA, 282 bp, Homo sapiens; identical to SEQ ID NO: 343151
  chr17:76167747-76168029
  hypo

SEQ ID NO: 381801 - DNA, 330 bp, Homo sapiens; identical to SEQ ID NO: 348843
  chr17:76187077-76187407
  hypo

SEQ ID NO: 381802 - DNA, 478 bp, Homo sapiens; identical to SEQ ID NO: 343153
  chr17:76215753-76216231
  hypo

SEQ ID NO: 381803 - DNA, 170 bp, Homo sapiens; identical to SEQ ID NO: 352027
  chr17:76337740-76337910
  hypo

SEQ ID NO: 381804 - DNA, 488 bp, Homo sapiens; identical to SEQ ID NO: 355732
  chr17:76395100-76395588
  hypo

SEQ ID NO: 381805 - DNA, 50 bp, Homo sapiens; identical to SEQ ID NO: 355733
  chr17:76395713-76395763
  hypo

SEQ ID NO: 381806 - DNA, 514 bp, Homo sapiens; identical to SEQ ID NO: 343157
  chr17:76425233-76425747
  hypo

SEQ ID NO: 381807 - DNA, 187 bp, Homo sapiens; identical to SEQ ID NO: 343158
  chr17:76482434-76482621
  hypo

SEQ ID NO: 381808 - DNA, 443 bp, Homo sapiens; identical to SEQ ID NO: 343159
  chr17:76818622-76819065
  hypo

SEQ ID NO: 381809 - DNA, 244 bp, Homo sapiens; identical to SEQ ID NO: 343160
  chr17:76851787-76852031
  hypo

SEQ ID NO: 381810 - DNA, 511 bp, Homo sapiens; identical to SEQ ID NO: 367392
  chr17:76991011-76991522
  hypo

SEQ ID NO: 381811 - DNA, 631 bp, Homo sapiens; identical to SEQ ID NO: 348845
  chr17:76992727-76993358
  hypo

SEQ ID NO: 381812 - DNA, 478 bp, Homo sapiens; identical to SEQ ID NO: 218133
  chr17:76993419-76993897
  hypo

SEQ ID NO: 381813 - DNA, 285 bp, Homo sapiens; identical to SEQ ID NO: 355737
  chr17:76996197-76996482
  hypo

SEQ ID NO: 381814 - DNA, 412 bp, Homo sapiens; identical to SEQ ID NO: 218135
  chr17:76996567-76996979
  hypo

SEQ ID NO: 381815 - DNA, 530 bp, Homo sapiens; identical to SEQ ID NO: 218136
  chr17:76997041-76997571
  hypo

SEQ ID NO: 381816 - DNA, 261 bp, Homo sapiens; identical to SEQ ID NO: 343164
  chr17:76998502-76998763
  hypo

SEQ ID NO: 381817 - DNA, 116 bp, Homo sapiens; identical to SEQ ID NO: 343166
  chr17:77070114-77070230
  hypo

SEQ ID NO: 381818 - DNA, 256 bp, Homo sapiens; identical to SEQ ID NO: 335696
  chr17:77071245-77071501
  hypo

SEQ ID NO: 381819 - DNA, 377 bp, Homo sapiens; identical to SEQ ID NO: 343168
  chr17:77073688-77074065
  hypo

SEQ ID NO: 381820 - DNA, 375 bp, Homo sapiens; identical to SEQ ID NO: 343169
  chr17:77074650-77075025
  hypo

SEQ ID NO: 381821 - DNA, 287 bp, Homo sapiens; identical to SEQ ID NO: 355741
  chr17:77113248-77113535
  hypo

SEQ ID NO: 381822 - DNA, 46 bp, Homo sapiens; identical to SEQ ID NO: 367403
  chr17:77126804-77126850
  hypo

SEQ ID NO: 381823 - DNA, 244 bp, Homo sapiens; identical to SEQ ID NO: 323275
  chr17:77126880-77127124
  hypo

SEQ ID NO: 381824 - DNA, 295 bp, Homo sapiens; identical to SEQ ID NO: 367405
  chr17:77127177-77127472
  hypo

SEQ ID NO: 381825 - DNA, 184 bp, Homo sapiens; identical to SEQ ID NO: 348849
  chr17:77769064-77769248
  hypo

SEQ ID NO: 381826 - DNA, 403 bp, Homo sapiens; identical to SEQ ID NO: 292779
  chr17:77778031-77778434
  hypo

SEQ ID NO: 381827 - DNA, 41 bp, Homo sapiens; identical to SEQ ID NO: 361162
  chr17:77788305-77788346
  hypo

SEQ ID NO: 381828 - DNA, 233 bp, Homo sapiens; identical to SEQ ID NO: 204826
  chr17:77788400-77788633
  hypo

SEQ ID NO: 381829 - DNA, 50 bp, Homo sapiens; identical to SEQ ID NO: 355744
  chr17:77808028-77808078
  hypo

SEQ ID NO: 381830 - DNA, 188 bp, Homo sapiens; identical to SEQ ID NO: 367411
  chr17:77825812-77826000
  hypo

SEQ ID NO: 381831 - DNA, 105 bp, Homo sapiens; identical to SEQ ID NO: 346174
  chr17:77899559-77899664
  hypo

SEQ ID NO: 381832 - DNA, 741 bp, Homo sapiens; identical to SEQ ID NO: 343182
  chr17:77914408-77915149
  hypo

SEQ ID NO: 381833 - DNA, 190 bp, Homo sapiens
  chr17:77917679-77917869
  hypo
cgattttttttaattcgggagtggtgggaatgaagcctctcagaccgtccatgccgtgcttcccttcgttaatgcagatcgtccaccctgcacgtccacgtccagcaggctgagccaggagggaaacctagacccgggccaggggcgagccgatgaccgcatgcaaaggcggcgtgtggtaccggcactc

SEQ ID NO: 381834 - DNA, 556 bp, Homo sapiens; identical to SEQ ID NO: 367413
  chr17:77918873-77919429
  hypo

SEQ ID NO: 381835 - DNA, 207 bp, Homo sapiens; identical to SEQ ID NO: 367414
  chr17:77919477-77919684
  hypo

SEQ ID NO: 381836 - DNA, 580 bp, Homo sapiens; identical to SEQ ID NO: 343185
  chr17:77921147-77921727
  hypo

SEQ ID NO: 381837 - DNA, 369 bp, Homo sapiens; identical to SEQ ID NO: 343186
  chr17:77923306-77923675
  hypo

SEQ ID NO: 381838 - DNA, 151 bp, Homo sapiens; identical to SEQ ID NO: 367416
  chr17:77923970-77924121
  hypo

SEQ ID NO: 381839 - DNA, 445 bp, Homo sapiens; identical to SEQ ID NO: 343188
  chr17:77928738-77929183
  hypo

SEQ ID NO: 381840 - DNA, 75 bp, Homo sapiens; identical to SEQ ID NO: 367418
  chr17:77930343-77930418
  hypo

SEQ ID NO: 381841 - DNA, 140 bp, Homo sapiens; identical to SEQ ID NO: 343190
  chr17:77976585-77976725
  hypo

SEQ ID NO: 381842 - DNA, 352 bp, Homo sapiens; identical to SEQ ID NO: 367419
  chr17:78041114-78041466
  hypo

SEQ ID NO: 381843 - DNA, 200 bp, Homo sapiens; identical to SEQ ID NO: 367420
  chr17:78041496-78041696
  hypo

SEQ ID NO: 381844 - DNA, 116 bp, Homo sapiens; identical to SEQ ID NO: 355746
  chr17:78143796-78143912
  hypo

SEQ ID NO: 381845 - DNA, 399 bp, Homo sapiens; identical to SEQ ID NO: 355747
  chr17:78163400-78163799
  hypo

SEQ ID NO: 381846 - DNA, 561 bp, Homo sapiens; identical to SEQ ID NO: 218184
  chr17:78271717-78272278
  hypo

SEQ ID NO: 381847 - DNA, 77 bp, Homo sapiens; identical to SEQ ID NO: 348852
  chr17:78272313-78272390
  hypo

SEQ ID NO: 381848 - DNA, 138 bp, Homo sapiens; identical to SEQ ID NO: 343196
  chr17:78338197-78338335
  hypo

SEQ ID NO: 381849 - DNA, 162 bp, Homo sapiens; identical to SEQ ID NO: 343198
  chr17:78590602-78590764
  hypo

SEQ ID NO: 381850 - DNA, 310 bp, Homo sapiens; identical to SEQ ID NO: 343199
  chr17:78598720-78599030
  hypo

SEQ ID NO: 381851 - DNA, 557 bp, Homo sapiens; identical to SEQ ID NO: 343201
  chr17:78611023-78611580
  hypo

SEQ ID NO: 381852 - DNA, 194 bp, Homo sapiens; identical to SEQ ID NO: 343202
  chr17:78649377-78649571
  hypo

SEQ ID NO: 381853 - DNA, 273 bp, Homo sapiens; identical to SEQ ID NO: 367428
  chr17:78668243-78668516
  hypo

SEQ ID NO: 381854 - DNA, 522 bp, Homo sapiens; identical to SEQ ID NO: 343205
  chr17:78775515-78776037
  hypo

SEQ ID NO: 381855 - DNA, 212 bp, Homo sapiens; identical to SEQ ID NO: 343206
  chr17:78791780-78791992
  hypo

SEQ ID NO: 381856 - DNA, 157 bp, Homo sapiens
  chr17:78872481-78872638
  hypo
cgccgccccgactccccccgccccggctccccccgcacctgctcacccaacccctgctcaccccgcccctgctcaccccgccgtctccgtctagtgagttttgatgatgggcttttcacttgtgttcagcttcaagctttctttctacttccattgt

SEQ ID NO: 381857 - DNA, 268 bp, Homo sapiens
  chr17:78872734-78873002
  hypo
caccgggcaaccctgtgggtgtgctcccagccttggccagctgctgccttgagcacctctggatagaacgagtccagagcttgcaccatgccctccagggtatggagaactgaaaggttcactacacaacaacccagacacgccagcttagcccagacacgccaacttgttaattttcattgagaaataacgttgcagctttgtgcatttggctgtccactaaaatatgccaagtgcccagaaagcgcagagttgactccgtatattc

SEQ ID NO: 381858 - DNA, 446 bp, Homo sapiens; identical to SEQ ID NO: 355752
  chr17:78935167-78935613
  hypo

SEQ ID NO: 381859 - DNA, 1019 bp, Homo sapiens; identical to SEQ ID NO: 335709
  chr17:79007528-79008547
  hypo

SEQ ID NO: 381860 - DNA, 753 bp, Homo sapiens; identical to SEQ ID NO: 352038
  chr17:79008842-79009595
  hypo

SEQ ID NO: 381861 - DNA, 195 bp, Homo sapiens; identical to SEQ ID NO: 343212
  chr17:79045500-79045695
  hypo

SEQ ID NO: 381862 - DNA, 472 bp, Homo sapiens; identical to SEQ ID NO: 343213
  chr17:79046033-79046505
  hypo

SEQ ID NO: 381863 - DNA, 431 bp, Homo sapiens; identical to SEQ ID NO: 343214
  chr17:79048174-79048605
  hypo

SEQ ID NO: 381864 - DNA, 403 bp, Homo sapiens; identical to SEQ ID NO: 343215
  chr17:79053502-79053905
  hypo

SEQ ID NO: 381865 - DNA, 60 bp, Homo sapiens; identical to SEQ ID NO: 343216
  chr17:79060187-79060247
  hypo

SEQ ID NO: 381866 - DNA, 196 bp, Homo sapiens; identical to SEQ ID NO: 343217
  chr17:79060680-79060876
  hypo

SEQ ID NO: 381867 - DNA, 264 bp, Homo sapiens; identical to SEQ ID NO: 343218
  chr17:79072884-79073148
  hypo

SEQ ID NO: 381868 - DNA, 257 bp, Homo sapiens; identical to SEQ ID NO: 343219
  chr17:79074754-79075011
  hypo

SEQ ID NO: 381869 - DNA, 659 bp, Homo sapiens; identical to SEQ ID NO: 343220
  chr17:79077368-79078027
  hypo

SEQ ID NO: 381870 - DNA, 508 bp, Homo sapiens; identical to SEQ ID NO: 343221
  chr17:79082625-79083133
  hypo

SEQ ID NO: 381871 - DNA, 241 bp, Homo sapiens; identical to SEQ ID NO: 367439
  chr17:79084476-79084717
  hypo

SEQ ID NO: 381872 - DNA, 168 bp, Homo sapiens; identical to SEQ ID NO: 367440
  chr17:79086354-79086522
  hypo

SEQ ID NO: 381873 - DNA, 158 bp, Homo sapiens; identical to SEQ ID NO: 343224
  chr17:79086890-79087048
  hypo

SEQ ID NO: 381874 - DNA, 44 bp, Homo sapiens; identical to SEQ ID NO: 367442
  chr17:79093912-79093956
  hypo

SEQ ID NO: 381875 - DNA, 255 bp, Homo sapiens; identical to SEQ ID NO: 218236
  chr17:79099929-79100184
  hypo

SEQ ID NO: 381876 - DNA, 79 bp, Homo sapiens; identical to SEQ ID NO: 367444
  chr17:79100259-79100338
  hypo

SEQ ID NO: 381877 - DNA, 516 bp, Homo sapiens; identical to SEQ ID NO: 355756
  chr17:79166571-79167087
  hypo

SEQ ID NO: 381878 - DNA, 415 bp, Homo sapiens; identical to SEQ ID NO: 343228
  chr17:79175952-79176367
  hypo

SEQ ID NO: 381879 - DNA, 169 bp, Homo sapiens; identical to SEQ ID NO: 343229
  chr17:79253772-79253941
  hypo

SEQ ID NO: 381880 - DNA, 421 bp, Homo sapiens; identical to SEQ ID NO: 343230
  chr17:79542407-79542828
  hypo

SEQ ID NO: 381881 - DNA, 388 bp, Homo sapiens; identical to SEQ ID NO: 355758
  chr17:79612376-79612764
  hypo

SEQ ID NO: 381882 - DNA, 253 bp, Homo sapiens; identical to SEQ ID NO: 343233
  chr17:79648960-79649213
  hypo

SEQ ID NO: 381883 - DNA, 1194 bp, Homo sapiens; identical to SEQ ID NO: 343234
  chr17:79655135-79656329
  hypo

SEQ ID NO: 381884 - DNA, 73 bp, Homo sapiens; identical to SEQ ID NO: 343236
  chr17:79803018-79803091
  hypo

SEQ ID NO: 381885 - DNA, 95 bp, Homo sapiens; identical to SEQ ID NO: 355760
  chr17:79826882-79826977
  hypo

SEQ ID NO: 381886 - DNA, 140 bp, Homo sapiens; identical to SEQ ID NO: 355761
  chr17:79827029-79827169
  hypo

SEQ ID NO: 381887 - DNA, 309 bp, Homo sapiens; identical to SEQ ID NO: 367454
  chr17:79870549-79870858
  hypo

SEQ ID NO: 381888 - DNA, 398 bp, Homo sapiens; identical to SEQ ID NO: 343239
  chr17:79873436-79873834
  hypo

SEQ ID NO: 381889 - DNA, 168 bp, Homo sapiens; identical to SEQ ID NO: 348854
  chr17:79887422-79887590
  hypo

SEQ ID NO: 381890 - DNA, 56 bp, Homo sapiens; identical to SEQ ID NO: 348855
  chr17:79887849-79887905
  hypo

SEQ ID NO: 381891 - DNA, 274 bp, Homo sapiens; identical to SEQ ID NO: 218273
  chr17:79913170-79913444
  hypo

SEQ ID NO: 381892 - DNA, 522 bp, Homo sapiens; identical to SEQ ID NO: 352041
  chr17:79989097-79989619
  hypo

SEQ ID NO: 381893 - DNA, 764 bp, Homo sapiens; identical to SEQ ID NO: 343243
  chr17:80019114-80019878
  hypo

SEQ ID NO: 381894 - DNA, 863 bp, Homo sapiens; identical to SEQ ID NO: 367461
  chr17:80045799-80046662
  hypo

SEQ ID NO: 381895 - DNA, 161 bp, Homo sapiens
  chr17:80049199-80049360
  hypo
cggtggcggggacagccgcgatgtcgttcagcatgctcaggaaagccaggtcctggctgtgccggaggccctgctccagcagcttctgcacggcctcaggggtgcgtccgctggcccgcagcagacggggcagggtggcatgtggggcgggtgcggggggc

SEQ ID NO: 381896 - DNA, 940 bp, Homo sapiens; identical to SEQ ID NO: 343246
  chr17:80050751-80051691
  hypo

SEQ ID NO: 381897 - DNA, 220 bp, Homo sapiens; identical to SEQ ID NO: 347472
  chr17:80186335-80186555
  hypo

SEQ ID NO: 381898 - DNA, 818 bp, Homo sapiens; identical to SEQ ID NO: 292829
  chr17:80186618-80187436
  hypo

SEQ ID NO: 381899 - DNA, 514 bp, Homo sapiens; identical to SEQ ID NO: 355770
  chr17:80201427-80201941
  hypo

SEQ ID NO: 381900 - DNA, 91 bp, Homo sapiens; identical to SEQ ID NO: 355771
  chr17:80201971-80202062
  hypo

SEQ ID NO: 381901 - DNA, 66 bp, Homo sapiens; identical to SEQ ID NO: 361175
  chr17:80277699-80277765
  hypo

SEQ ID NO: 381902 - DNA, 520 bp, Homo sapiens; identical to SEQ ID NO: 367468
  chr17:80294473-80294993
  hypo

SEQ ID NO: 381903 - DNA, 67 bp, Homo sapiens; identical to SEQ ID NO: 367469
  chr17:80332182-80332249
  hypo

SEQ ID NO: 381904 - DNA, 404 bp, Homo sapiens; identical to SEQ ID NO: 361176
  chr17:80332292-80332696
  hypo

SEQ ID NO: 381905 - DNA, 229 bp, Homo sapiens; identical to SEQ ID NO: 355772
  chr17:80394871-80395100
  hypo

SEQ ID NO: 381906 - DNA, 82 bp, Homo sapiens; identical to SEQ ID NO: 355773
  chr17:80395146-80395228
  hypo

SEQ ID NO: 381907 - DNA, 522 bp, Homo sapiens; identical to SEQ ID NO: 343253
  chr17:80445750-80446272
  hypo

SEQ ID NO: 381908 - DNA, 105 bp, Homo sapiens
  chr17:80491467-80491572
  hypo
cggctgttcgcgtagtaggttcgttgacaccagcatcaccccagactcatgagtaattcattgcactatgacatcacaatggctaggaataggaatttttcagct

SEQ ID NO: 381909 - DNA, 86 bp, Homo sapiens
  chr17:80491602-80491688
  hypo
tgcggcccatcattgacttgaaacgacgtgaattttgttagccgggcatggtggtgcccagctgtaggttagccgggcgtggtgac

SEQ ID NO: 381910 - DNA, 223 bp, Homo sapiens; identical to SEQ ID NO: 343256
  chr17:80517124-80517347
  hypo

SEQ ID NO: 381911 - DNA, 175 bp, Homo sapiens; identical to SEQ ID NO: 343257
  chr17:80519712-80519887
  hypo

SEQ ID NO: 381912 - DNA, 478 bp, Homo sapiens; identical to SEQ ID NO: 343259
  chr17:80554494-80554972
  hypo

SEQ ID NO: 381913 - DNA, 295 bp, Homo sapiens; identical to SEQ ID NO: 343260
  chr17:80563218-80563513
  hypo

SEQ ID NO: 381914 - DNA, 243 bp, Homo sapiens; identical to SEQ ID NO: 355777
  chr17:80571137-80571380
  hypo

SEQ ID NO: 381915 - DNA, 271 bp, Homo sapiens; identical to SEQ ID NO: 355778
  chr17:80571776-80572047
  hypo

SEQ ID NO: 381916 - DNA, 82 bp, Homo sapiens; identical to SEQ ID NO: 343262
  chr17:80600131-80600213
  hypo

SEQ ID NO: 381917 - DNA, 112 bp, Homo sapiens; identical to SEQ ID NO: 355779
  chr17:80654614-80654726
  hypo

SEQ ID NO: 381918 - DNA, 1118 bp, Homo sapiens; identical to SEQ ID NO: 361177
  chr17:80655727-80656845
  hypo

SEQ ID NO: 381919 - DNA, 339 bp, Homo sapiens; identical to SEQ ID NO: 374308
  chr17:80692978-80693317
  hypo

SEQ ID NO: 381920 - DNA, 285 bp, Homo sapiens; identical to SEQ ID NO: 374309
  chr17:80693554-80693839
  hypo

SEQ ID NO: 381921 - DNA, 329 bp, Homo sapiens; identical to SEQ ID NO: 343267
  chr17:80712025-80712354
  hypo

SEQ ID NO: 381922 - DNA, 223 bp, Homo sapiens; identical to SEQ ID NO: 343268
  chr17:80744615-80744838
  hypo

SEQ ID NO: 381923 - DNA, 58 bp, Homo sapiens; identical to SEQ ID NO: 355781
  chr17:80747254-80747312
  hypo

SEQ ID NO: 381924 - DNA, 62 bp, Homo sapiens; identical to SEQ ID NO: 355782
  chr17:80747754-80747816
  hypo

SEQ ID NO: 381925 - DNA, 95 bp, Homo sapiens; identical to SEQ ID NO: 355783
  chr17:80747890-80747985
  hypo

SEQ ID NO: 381926 - DNA, 121 bp, Homo sapiens; identical to SEQ ID NO: 343271
  chr17:80749629-80749750
  hypo

SEQ ID NO: 381927 - DNA, 96 bp, Homo sapiens; identical to SEQ ID NO: 367487
  chr17:80762951-80763047
  hypo

SEQ ID NO: 381928 - DNA, 139 bp, Homo sapiens; identical to SEQ ID NO: 343273
  chr17:80763321-80763460
  hypo

SEQ ID NO: 381929 - DNA, 137 bp, Homo sapiens; identical to SEQ ID NO: 355785
  chr17:80772735-80772872
  hypo

SEQ ID NO: 381930 - DNA, 513 bp, Homo sapiens; identical to SEQ ID NO: 355786
  chr17:80772941-80773454
  hypo

SEQ ID NO: 381931 - DNA, 52 bp, Homo sapiens; identical to SEQ ID NO: 343275
  chr17:80794418-80794470
  hypo

SEQ ID NO: 381932 - DNA, 32 bp, Homo sapiens; identical to SEQ ID NO: 348859
  chr17:80797632-80797664
  hypo

SEQ ID NO: 381933 - DNA, 69 bp, Homo sapiens; identical to SEQ ID NO: 367493
  chr17:80832134-80832203
  hypo

SEQ ID NO: 381934 - DNA, 86 bp, Homo sapiens; identical to SEQ ID NO: 367494
  chr17:80832796-80832882
  hypo

SEQ ID NO: 381935 - DNA, 177 bp, Homo sapiens; identical to SEQ ID NO: 343278
  chr17:80859381-80859558
  hypo

SEQ ID NO: 381936 - DNA, 178 bp, Homo sapiens; identical to SEQ ID NO: 343279
  chr17:80860241-80860419
  hypo

SEQ ID NO: 381937 - DNA, 99 bp, Homo sapiens; identical to SEQ ID NO: 343280
  chr17:80867234-80867333
  hypo

SEQ ID NO: 381938 - DNA, 308 bp, Homo sapiens; identical to SEQ ID NO: 343281
  chr17:80879354-80879662
  hypo

SEQ ID NO: 381939 - DNA, 269 bp, Homo sapiens; identical to SEQ ID NO: 348861
  chr17:80965953-80966222
  hypo

SEQ ID NO: 381940 - DNA, 169 bp, Homo sapiens; identical to SEQ ID NO: 343283
  chr17:80968060-80968229
  hypo

SEQ ID NO: 381941 - DNA, 328 bp, Homo sapiens
  chr17:80995234-80995562
  hypo
cgttctccaacccggagcagtgcccctcttcataccaggtagcagtttaatttctagcattaatccctaaagtttagccagctcaacccagttagccagaggatcccagatgtcaaaaagccaggggcataaacaggcgcagggaggaaatgcacccggggaggcgagcgcctgttctgccctgggatggatggtgggccgtgtctccagggccgctgcagccaagcctccatcatcgctgcagggccaggtgagtgccctgaagctcctcacgagaaacacaggcggaggcacctgtgaggacgaagggccggaaggggccttccac

SEQ ID NO: 381942 - DNA, 443 bp, Homo sapiens; identical to SEQ ID NO: 361178
  chr17:81036717-81037160
  hypo

SEQ ID NO: 381943 - DNA, 277 bp, Homo sapiens; identical to SEQ ID NO: 352044
  chr17:81038567-81038844
  hypo

SEQ ID NO: 381944 - DNA, 508 bp, Homo sapiens; identical to SEQ ID NO: 352045
  chr17:81038865-81039373
  hypo

SEQ ID NO: 381945 - DNA, 310 bp, Homo sapiens; identical to SEQ ID NO: 323747
  chr17:81048473-81048783
  hypo

SEQ ID NO: 381946 - DNA, 224 bp, Homo sapiens
  chr17:81049034-81049258
  hypo
gctggaccgggcctcgaggcgctcagcaggctgtgcagtttctttttcctgataccttaatggaagcaaatgcaggaggaggtgggtgggccggtgagtcaggcactgagcccggctgggaggcgccctcacccctgcctggcggaaagtgctggccttgtctctgggtccctcctacctccaccctgcggggtccacaaagacctgcgcttgcccagtgcacc

SEQ ID NO: 381947 - DNA, 63 bp, Homo sapiens; identical to SEQ ID NO: 367504
  chr17:81049931-81049994
  hypo

SEQ ID NO: 381948 - DNA, 78 bp, Homo sapiens; identical to SEQ ID NO: 367505
  chr17:81050575-81050653
  hypo

SEQ ID NO: 381949 - DNA, 205 bp, Homo sapiens; identical to SEQ ID NO: 323751
  chr17:81050716-81050921
  hypo

SEQ ID NO: 381950 - DNA, 188 bp, Homo sapiens; identical to SEQ ID NO: 323753
  chr17:81062393-81062581
  hypo

SEQ ID NO: 381951 - DNA, 134 bp, Homo sapiens; identical to SEQ ID NO: 343292
  chr17:81080737-81080871
  hypo

SEQ ID NO: 381952 - DNA, 216 bp, Homo sapiens; identical to SEQ ID NO: 343293
  chr18:196827-197043
  hypo

SEQ ID NO: 381953 - DNA, 74 bp, Homo sapiens; identical to SEQ ID NO: 343295
  chr18:635725-635799
  hypo

SEQ ID NO: 381954 - DNA, 1315 bp, Homo sapiens; identical to SEQ ID NO: 347474
  chr18:811501-812816
  hypo

SEQ ID NO: 381955 - DNA, 190 bp, Homo sapiens; identical to SEQ ID NO: 347475
  chr18:812869-813059
  hypo

SEQ ID NO: 381956 - DNA, 238 bp, Homo sapiens; identical to SEQ ID NO: 345538
  chr18:2848166-2848404
  hypo

SEQ ID NO: 381957 - DNA, 369 bp, Homo sapiens; identical to SEQ ID NO: 361185
  chr18:2906430-2906799
  hypo

SEQ ID NO: 381958 - DNA, 120 bp, Homo sapiens; identical to SEQ ID NO: 343299
  chr18:3051295-3051415
  hypo

SEQ ID NO: 381959 - DNA, 94 bp, Homo sapiens; identical to SEQ ID NO: 343300
  chr18:3119830-3119924
  hypo

SEQ ID NO: 381960 - DNA, 205 bp, Homo sapiens; identical to SEQ ID NO: 346176
  chr18:3214837-3215042
  hypo

SEQ ID NO: 381961 - DNA, 137 bp, Homo sapiens; identical to SEQ ID NO: 346177
  chr18:3215256-3215393
  hypo

SEQ ID NO: 381962 - DNA, 125 bp, Homo sapiens; identical to SEQ ID NO: 367518
  chr18:3330588-3330713
  hypo

SEQ ID NO: 381963 - DNA, 310 bp, Homo sapiens; identical to SEQ ID NO: 367519
  chr18:3360395-3360705
  hypo

SEQ ID NO: 381964 - DNA, 2276 bp, Homo sapiens; identical to SEQ ID NO: 335731
  chr18:3449180-3451456
  hypo

SEQ ID NO: 381965 - DNA, 69 bp, Homo sapiens; identical to SEQ ID NO: 343305
  chr18:3580264-3580333
  hypo

SEQ ID NO: 381966 - DNA, 185 bp, Homo sapiens; identical to SEQ ID NO: 343306
  chr18:3580794-3580979
  hypo

SEQ ID NO: 381967 - DNA, 241 bp, Homo sapiens; identical to SEQ ID NO: 343307
  chr18:3581880-3582121
  hypo

SEQ ID NO: 381968 - DNA, 995 bp, Homo sapiens; identical to SEQ ID NO: 335733
  chr18:3879130-3880125
  hypo

SEQ ID NO: 381969 - DNA, 166 bp, Homo sapiens; identical to SEQ ID NO: 343309
  chr18:3986877-3987043
  hypo

SEQ ID NO: 381970 - DNA, 254 bp, Homo sapiens; identical to SEQ ID NO: 292874
  chr18:4454777-4455031
  hypo

SEQ ID NO: 381971 - DNA, 102 bp, Homo sapiens
  chr18:5133043-5133145
  hypo
cgcctcgggttttggtaagctggtttggtgtccatgggggcctggctcttgagctgctccaggctgagagcagcgagctgcgggttcccgggaggcagcgag

SEQ ID NO: 381972 - DNA, 216 bp, Homo sapiens; identical to SEQ ID NO: 292892
  chr18:7566793-7567009
  hypo

SEQ ID NO: 381973 - DNA, 415 bp, Homo sapiens; identical to SEQ ID NO: 204882
  chr18:7567335-7567750
  hypo

SEQ ID NO: 381974 - DNA, 153 bp, Homo sapiens; identical to SEQ ID NO: 355807
  chr18:8612051-8612204
  hypo

SEQ ID NO: 381975 - DNA, 489 bp, Homo sapiens; identical to SEQ ID NO: 343317
  chr18:8625474-8625963
  hypo

SEQ ID NO: 381976 - DNA, 789 bp, Homo sapiens; identical to SEQ ID NO: 355808
  chr18:8659297-8660086
  hypo

SEQ ID NO: 381977 - DNA, 533 bp, Homo sapiens; identical to SEQ ID NO: 343319
  chr18:8799980-8800513
  hypo

SEQ ID NO: 381978 - DNA, 118 bp, Homo sapiens; identical to SEQ ID NO: 343320
  chr18:8800570-8800688
  hypo

SEQ ID NO: 381979 - DNA, 113 bp, Homo sapiens; identical to SEQ ID NO: 343321
  chr18:9196896-9197009
  hypo

SEQ ID NO: 381980 - DNA, 391 bp, Homo sapiens; identical to SEQ ID NO: 367532
  chr18:9417386-9417777
  hypo

SEQ ID NO: 381981 - DNA, 467 bp, Homo sapiens; identical to SEQ ID NO: 343324
  chr18:9478452-9478919
  hypo

SEQ ID NO: 381982 - DNA, 81 bp, Homo sapiens; identical to SEQ ID NO: 343325
  chr18:9514129-9514210
  hypo

SEQ ID NO: 381983 - DNA, 225 bp, Homo sapiens; identical to SEQ ID NO: 343326
  chr18:9539475-9539700
  hypo

SEQ ID NO: 381984 - DNA, 65 bp, Homo sapiens; identical to SEQ ID NO: 348873
  chr18:9547721-9547786
  hypo

SEQ ID NO: 381985 - DNA, 176 bp, Homo sapiens; identical to SEQ ID NO: 348874
  chr18:9547816-9547992
  hypo

SEQ ID NO: 381986 - DNA, 196 bp, Homo sapiens; identical to SEQ ID NO: 343328
  chr18:9569216-9569412
  hypo

SEQ ID NO: 381987 - DNA, 131 bp, Homo sapiens; identical to SEQ ID NO: 343329
  chr18:9688396-9688527
  hypo

SEQ ID NO: 381988 - DNA, 275 bp, Homo sapiens; identical to SEQ ID NO: 292905
  chr18:9708063-9708338
  hypo

SEQ ID NO: 381989 - DNA, 477 bp, Homo sapiens; identical to SEQ ID NO: 343333
  chr18:10165791-10166268
  hypo

SEQ ID NO: 381990 - DNA, 257 bp, Homo sapiens; identical to SEQ ID NO: 343334
  chr18:10485485-10485742
  hypo

SEQ ID NO: 381991 - DNA, 498 bp, Homo sapiens; identical to SEQ ID NO: 343336
  chr18:10725385-10725883
  hypo

SEQ ID NO: 381992 - DNA, 192 bp, Homo sapiens; identical to SEQ ID NO: 343337
  chr18:11992166-11992358
  hypo

SEQ ID NO: 381993 - DNA, 160 bp, Homo sapiens; identical to SEQ ID NO: 343338
  chr18:11992771-11992931
  hypo

SEQ ID NO: 381994 - DNA, 212 bp, Homo sapiens; identical to SEQ ID NO: 292919
  chr18:12253892-12254104
  hypo

SEQ ID NO: 381995 - DNA, 46 bp, Homo sapiens; identical to SEQ ID NO: 348877
  chr18:12277197-12277243
  hypo

SEQ ID NO: 381996 - DNA, 111 bp, Homo sapiens; identical to SEQ ID NO: 348878
  chr18:12277273-12277384
  hypo

SEQ ID NO: 381997 - DNA, 140 bp, Homo sapiens; identical to SEQ ID NO: 355820
  chr18:12375127-12375267
  hypo

SEQ ID NO: 381998 - DNA, 60 bp, Homo sapiens; identical to SEQ ID NO: 218438
  chr18:12375294-12375354
  hypo

SEQ ID NO: 381999 - DNA, 115 bp, Homo sapiens; identical to SEQ ID NO: 343343
  chr18:12375778-12375893
  hypo

SEQ ID NO: 382000 - DNA, 306 bp, Homo sapiens; identical to SEQ ID NO: 361205
  chr18:12407715-12408021
  hypo

SEQ ID NO: 382001 - DNA, 206 bp, Homo sapiens; identical to SEQ ID NO: 204898
  chr18:12408117-12408323
  hypo

SEQ ID NO: 382002 - DNA, 423 bp, Homo sapiens; identical to SEQ ID NO: 343345
  chr18:12433995-12434418
  hypo

SEQ ID NO: 382003 - DNA, 165 bp, Homo sapiens; identical to SEQ ID NO: 343346
  chr18:13033480-13033645
  hypo

SEQ ID NO: 382004 - DNA, 32 bp, Homo sapiens; identical to SEQ ID NO: 348880
  chr18:13036746-13036778
  hypo

SEQ ID NO: 382005 - DNA, 333 bp, Homo sapiens; identical to SEQ ID NO: 367554
  chr18:13131747-13132080
  hypo

SEQ ID NO: 382006 - DNA, 110 bp, Homo sapiens; identical to SEQ ID NO: 355824
  chr18:13135194-13135304
  hypo

SEQ ID NO: 382007 - DNA, 130 bp, Homo sapiens; identical to SEQ ID NO: 367556
  chr18:13195846-13195976
  hypo

SEQ ID NO: 382008 - DNA, 928 bp, Homo sapiens; identical to SEQ ID NO: 335756
  chr18:13217150-13218078
  hypo

SEQ ID NO: 382009 - DNA, 82 bp, Homo sapiens; identical to SEQ ID NO: 367558
  chr18:13233060-13233142
  hypo

SEQ ID NO: 382010 - DNA, 58 bp, Homo sapiens; identical to SEQ ID NO: 367559
  chr18:13233182-13233240
  hypo

SEQ ID NO: 382011 - DNA, 35 bp, Homo sapiens; identical to SEQ ID NO: 367560
  chr18:13425955-13425990
  hypo

SEQ ID NO: 382012 - DNA, 340 bp, Homo sapiens; identical to SEQ ID NO: 343354
  chr18:13442504-13442844
  hypo

SEQ ID NO: 382013 - DNA, 199 bp, Homo sapiens; identical to SEQ ID NO: 343355
  chr18:13491241-13491440
  hypo

SEQ ID NO: 382014 - DNA, 56 bp, Homo sapiens; identical to SEQ ID NO: 343356
  chr18:13499663-13499719
  hypo

SEQ ID NO: 382015 - DNA, 93 bp, Homo sapiens; identical to SEQ ID NO: 361209
  chr18:13823932-13824025
  hypo

SEQ ID NO: 382016 - DNA, 112 bp, Homo sapiens; identical to SEQ ID NO: 292934
  chr18:13824102-13824214
  hypo

SEQ ID NO: 382017 - DNA, 51 bp, Homo sapiens; identical to SEQ ID NO: 355827
  chr18:13826252-13826303
  hypo

SEQ ID NO: 382018 - DNA, 79 bp, Homo sapiens; identical to SEQ ID NO: 355828
  chr18:13826592-13826671
  hypo

SEQ ID NO: 382019 - DNA, 195 bp, Homo sapiens; identical to SEQ ID NO: 345545
  chr18:20512643-20512838
  hypo

SEQ ID NO: 382020 - DNA, 1232 bp, Homo sapiens; identical to SEQ ID NO: 345546
  chr18:20512902-20514134
  hypo

SEQ ID NO: 382021 - DNA, 724 bp, Homo sapiens; identical to SEQ ID NO: 374366
  chr18:20715848-20716572
  hypo

SEQ ID NO: 382022 - DNA, 186 bp, Homo sapiens; identical to SEQ ID NO: 361221
  chr18:20716690-20716876
  hypo

SEQ ID NO: 382023 - DNA, 310 bp, Homo sapiens; identical to SEQ ID NO: 355831
  chr18:20911034-20911344
  hypo

SEQ ID NO: 382024 - DNA, 157 bp, Homo sapiens; identical to SEQ ID NO: 355832
  chr18:22804909-22805066
  hypo

SEQ ID NO: 382025 - DNA, 1113 bp, Homo sapiens; identical to SEQ ID NO: 352075
  chr18:23806188-23807301
  hypo

SEQ ID NO: 382026 - DNA, 201 bp, Homo sapiens; identical to SEQ ID NO: 292989
  chr18:25756986-25757187
  hypo

SEQ ID NO: 382027 - DNA, 142 bp, Homo sapiens; identical to SEQ ID NO: 335782
  chr18:29598295-29598437
  hypo

SEQ ID NO: 382028 - DNA, 281 bp, Homo sapiens; identical to SEQ ID NO: 293004
  chr18:30349781-30350062
  hypo

SEQ ID NO: 382029 - DNA, 200 bp, Homo sapiens; identical to SEQ ID NO: 204951
  chr18:31803102-31803302
  hypo

SEQ ID NO: 382030 - DNA, 1207 bp, Homo sapiens; identical to SEQ ID NO: 345548
  chr18:32556625-32557832
  hypo

SEQ ID NO: 382031 - DNA, 45 bp, Homo sapiens; identical to SEQ ID NO: 204955
  chr18:32557883-32557928
  hypo

SEQ ID NO: 382032 - DNA, 411 bp, Homo sapiens; identical to SEQ ID NO: 204961
  chr18:35146241-35146652
  hypo

SEQ ID NO: 382033 - DNA, 414 bp, Homo sapiens; identical to SEQ ID NO: 343373
  chr18:35249615-35250029
  hypo

SEQ ID NO: 382034 - DNA, 84 bp, Homo sapiens; identical to SEQ ID NO: 343374
  chr18:37198447-37198531
  hypo

SEQ ID NO: 382035 - DNA, 755 bp, Homo sapiens; identical to SEQ ID NO: 345552
  chr18:42258983-42259738
  hypo

SEQ ID NO: 382036 - DNA, 120 bp, Homo sapiens; identical to SEQ ID NO: 204967
  chr18:42259821-42259941
  hypo

SEQ ID NO: 382037 - DNA, 1164 bp, Homo sapiens; identical to SEQ ID NO: 352089
  chr18:42260083-42261247
  hypo

SEQ ID NO: 382038 - DNA, 274 bp, Homo sapiens; identical to SEQ ID NO: 293054
  chr18:43914608-43914882
  hypo

SEQ ID NO: 382039 - DNA, 105 bp, Homo sapiens; identical to SEQ ID NO: 343377
  chr18:44260345-44260450
  hypo

SEQ ID NO: 382040 - DNA, 83 bp, Homo sapiens; identical to SEQ ID NO: 343379
  chr18:44701015-44701098
  hypo

SEQ ID NO: 382041 - DNA, 58 bp, Homo sapiens; identical to SEQ ID NO: 343381
  chr18:45353804-45353862
  hypo

SEQ ID NO: 382042 - DNA, 796 bp, Homo sapiens; identical to SEQ ID NO: 335809
  chr18:45687770-45688566
  hypo

SEQ ID NO: 382043 - DNA, 164 bp, Homo sapiens; identical to SEQ ID NO: 204977
  chr18:45934609-45934773
  hypo

SEQ ID NO: 382044 - DNA, 221 bp, Homo sapiens; identical to SEQ ID NO: 204978
  chr18:45934810-45935031
  hypo

SEQ ID NO: 382045 - DNA, 1885 bp, Homo sapiens; identical to SEQ ID NO: 204979
  chr18:45935196-45937081
  hypo

SEQ ID NO: 382046 - DNA, 51 bp, Homo sapiens; identical to SEQ ID NO: 324178
  chr18:46142611-46142662
  hypo

SEQ ID NO: 382047 - DNA, 323 bp, Homo sapiens; identical to SEQ ID NO: 343385
  chr18:46287816-46288139
  hypo

SEQ ID NO: 382048 - DNA, 284 bp, Homo sapiens; identical to SEQ ID NO: 343386
  chr18:46418923-46419207
  hypo

SEQ ID NO: 382049 - DNA, 556 bp, Homo sapiens; identical to SEQ ID NO: 335811
  chr18:46502500-46503056
  hypo

SEQ ID NO: 382050 - DNA, 137 bp, Homo sapiens; identical to SEQ ID NO: 343388
  chr18:47285297-47285434
  hypo

SEQ ID NO: 382051 - DNA, 831 bp, Homo sapiens; identical to SEQ ID NO: 374432
  chr18:47720908-47721739
  hypo

SEQ ID NO: 382052 - DNA, 204 bp, Homo sapiens; identical to SEQ ID NO: 335816
  chr18:47813485-47813689
  hypo

SEQ ID NO: 382053 - DNA, 53 bp, Homo sapiens; identical to SEQ ID NO: 352104
  chr18:53257322-53257375
  hypo

SEQ ID NO: 382054 - DNA, 84 bp, Homo sapiens; identical to SEQ ID NO: 367600
  chr18:54483312-54483396
  hypo

SEQ ID NO: 382055 - DNA, 249 bp, Homo sapiens; identical to SEQ ID NO: 343395
  chr18:54694241-54694490
  hypo

SEQ ID NO: 382056 - DNA, 115 bp, Homo sapiens; identical to SEQ ID NO: 346183
  chr18:55850987-55851102
  hypo

SEQ ID NO: 382057 - DNA, 172 bp, Homo sapiens; identical to SEQ ID NO: 355853
  chr18:56008826-56008998
  hypo

SEQ ID NO: 382058 - DNA, 486 bp, Homo sapiens; identical to SEQ ID NO: 355854
  chr18:59483218-59483704
  hypo

SEQ ID NO: 382059 - DNA, 142 bp, Homo sapiens; identical to SEQ ID NO: 343402
  chr18:59728812-59728954
  hypo

SEQ ID NO: 382060 - DNA, 98 bp, Homo sapiens; identical to SEQ ID NO: 343403
  chr18:60110139-60110237
  hypo

SEQ ID NO: 382061 - DNA, 164 bp, Homo sapiens; identical to SEQ ID NO: 343404
  chr18:60120657-60120821
  hypo

SEQ ID NO: 382062 - DNA, 66 bp, Homo sapiens; identical to SEQ ID NO: 343405
  chr18:60229150-60229216
  hypo

SEQ ID NO: 382063 - DNA, 68 bp, Homo sapiens
  chr18:60430701-60430769
  hypo
cgtgcagcaagtcatgcgaacacctcattcagccttttgcagcctgtactgaactgctgtcgctcatc

SEQ ID NO: 382064 - DNA, 128 bp, Homo sapiens; identical to SEQ ID NO: 343407
  chr18:60609821-60609949
  hypo

SEQ ID NO: 382065 - DNA, 43 bp, Homo sapiens; identical to SEQ ID NO: 374469
  chr18:63417693-63417736
  hypo

SEQ ID NO: 382066 - DNA, 211 bp, Homo sapiens; identical to SEQ ID NO: 343412
  chr18:72226558-72226769
  hypo

SEQ ID NO: 382067 - DNA, 127 bp, Homo sapiens; identical to SEQ ID NO: 355855
  chr18:72347372-72347499
  hypo

SEQ ID NO: 382068 - DNA, 74 bp, Homo sapiens; identical to SEQ ID NO: 355856
  chr18:72347576-72347650
  hypo

SEQ ID NO: 382069 - DNA, 73 bp, Homo sapiens; identical to SEQ ID NO: 343414
  chr18:72632559-72632632
  hypo

SEQ ID NO: 382070 - DNA, 183 bp, Homo sapiens; identical to SEQ ID NO: 343415
  chr18:72670022-72670205
  hypo

SEQ ID NO: 382071 - DNA, 227 bp, Homo sapiens; identical to SEQ ID NO: 343416
  chr18:72764607-72764834
  hypo

SEQ ID NO: 382072 - DNA, 115 bp, Homo sapiens; identical to SEQ ID NO: 343417
  chr18:74068664-74068779
  hypo

SEQ ID NO: 382073 - DNA, 153 bp, Homo sapiens; identical to SEQ ID NO: 343418
  chr18:74069268-74069421
  hypo

SEQ ID NO: 382074 - DNA, 163 bp, Homo sapiens; identical to SEQ ID NO: 343419
  chr18:74073695-74073858
  hypo

SEQ ID NO: 382075 - DNA, 684 bp, Homo sapiens; identical to SEQ ID NO: 343420
  chr18:74083302-74083986
  hypo

SEQ ID NO: 382076 - DNA, 1404 bp, Homo sapiens; identical to SEQ ID NO: 343421
  chr18:74090923-74092327
  hypo

SEQ ID NO: 382077 - DNA, 874 bp, Homo sapiens; identical to SEQ ID NO: 343422
  chr18:74096607-74097481
  hypo

SEQ ID NO: 382078 - DNA, 132 bp, Homo sapiens; identical to SEQ ID NO: 355863
  chr18:74113780-74113912
  hypo

SEQ ID NO: 382079 - DNA, 60 bp, Homo sapiens; identical to SEQ ID NO: 218599
  chr18:74113942-74114002
  hypo

SEQ ID NO: 382080 - DNA, 451 bp, Homo sapiens; identical to SEQ ID NO: 343424
  chr18:74120305-74120756
  hypo

SEQ ID NO: 382081 - DNA, 168 bp, Homo sapiens; identical to SEQ ID NO: 343425
  chr18:74134219-74134387
  hypo

SEQ ID NO: 382082 - DNA, 158 bp, Homo sapiens; identical to SEQ ID NO: 343426
  chr18:74134955-74135113
  hypo

SEQ ID NO: 382083 - DNA, 1161 bp, Homo sapiens; identical to SEQ ID NO: 343427
  chr18:74144952-74146113
  hypo

SEQ ID NO: 382084 - DNA, 266 bp, Homo sapiens; identical to SEQ ID NO: 343428
  chr18:74148373-74148639
  hypo

SEQ ID NO: 382085 - DNA, 1787 bp, Homo sapiens
  chr18:74153251-74155038
  hypo
cggccaggccagagcccggggagtcagcagcggcacaggcggagccagggctgctgggctgggaggccgagtcaccctcactgagtgatccgcagcgggcccgcgccgccctgtccccgtcactgtccctctcgcggcgcgcgcggcgatgcacgcgtgagtgcagcaccatctgatgataggtgcggaagatcttgccgcactcgaagcactcggaggacttgccctggccggtggtggctgcggccctgcggttggggcgcgcggccgagcggggatcgaggtggccggcgggcgcggggtccccaggcccgctcgcgcgcttccgcgggggcccctgcgcggctggtgcatcctgctcacgcttgcgcttctcctggctcaccaggacgtactcgcgcctgtccttgtcgaaggccacgtccccggccagcgcctcgtcccaggccccgtacttgaggtactcggccggctcggccaccttaccccgcgtggccagctgccaggcctggtagctgttgaccgggtccagctcagccacccgccgtccggcctgcgtgccagggcacgagtcgccggccgccgacggcctcaggttcaggcactggaggaagaactgcttggtgtccgagggcccctccgccccctcctcggccggggcgcgcgtgcggctggcctcgactctgcggtggatggcattgtgggcgttcaagctgtccaggtttgtaaacaggttcccgcacttggcgcagacctcgtagaggctcaggccggcgacgatcacctcctcctggaccacgttgttgatggtggcgatggggtccagctcactcttgggcctgttcttgctgcccgtcttggggccgtgcgccttcatgtggttcttgaggaaccagggctccttgaacctacggccgcagatgtggcagccgtggtcgaaggagccccggtgcttcttcatgtgcgccttcaggaaccaggtctggctgaaggcctggccacacacctcgcacgggaactccccggggctcagctcgggcttgccgttctccacgcaggcctcgccgctgccgggcccctgcgcggtgatgtggtccctctcgatgtggctcagcagcgactcctcccgcagcgtcgcgtagctgcacagcctgcacttgaacggcttgtgcgcctggtgcacgtgcagctccaggtccttcttacgctcgaactggctcttgcagaaggagcactggaccgctgccttggcctcccccggggcgcatgcggacccctctgcccccttcttgctgctccgcagcaggactctgccgctgtcggcctgcgaggccccgttcaggaccctggcgccgtcggcctgcgaggccccgttcagcagccggttgcaggccgaggcgctcttggtggggctggcgcaggcgtccaggccctcggaggcgcgcatctcacccagcggcgcctcgcccgcctccggctcgtgtccctgaatcagagtccccgtgcggtggctccggatgtgaatcttcaggttgcccttctgggaagcccggtggtcgcagtagggacacttgtagggcttctcgcccgtgtgcttgcgcatgtgctgcgaaagcgagctctggaaggggaagctcttgccgcagatgcagcaggtgtggcaggtagccttgtccccatccacctcgtggccccggccggccctggtggggctggggcctcgcctcagctccatctcggcctctctgttgcgatccatccgaaggacgggcgcggccggtggtggc

SEQ ID NO: 382086 - DNA, 460 bp, Homo sapiens; identical to SEQ ID NO: 343430
  chr18:74159178-74159638
  hypo

SEQ ID NO: 382087 - DNA, 308 bp, Homo sapiens
  chr18:74170482-74170790
  hypo
cgaagggaatcccgtccctgagaggaccaagggcacaggagtagtgctcgggaccctcaggacggggcatgcactgtgggcaacgccaggcctcaccgtcgtgcgtgtgcatgcctcaccgtcgtgcgtgtgcgtgcctcaccgtcgtgtgtgcgtgcctcaccgtcgtgtgtgcgtgcctcaccgtcgtgcgtgtgcatgcctgtaggcaatgccaggcctcaccgtcgtgcgtgtgtgtgcctcgtgtgcgtgcctcaccgtcgtgcgtgtgcgtgcctcaccgtcgtgcgtgtgcgtgcctcacc

SEQ ID NO: 382088 - DNA, 366 bp, Homo sapiens; identical to SEQ ID NO: 324379
  chr18:74171117-74171483
  hypo

SEQ ID NO: 382089 - DNA, 122 bp, Homo sapiens; identical to SEQ ID NO: 355868
  chr18:74171505-74171627
  hypo

SEQ ID NO: 382090 - DNA, 177 bp, Homo sapiens; identical to SEQ ID NO: 343433
  chr18:74175495-74175672
  hypo

SEQ ID NO: 382091 - DNA, 124 bp, Homo sapiens; identical to SEQ ID NO: 367627
  chr18:74176907-74177031
  hypo

SEQ ID NO: 382092 - DNA, 147 bp, Homo sapiens; identical to SEQ ID NO: 343435
  chr18:74183568-74183715
  hypo

SEQ ID NO: 382093 - DNA, 427 bp, Homo sapiens; identical to SEQ ID NO: 343436
  chr18:74194245-74194672
  hypo

SEQ ID NO: 382094 - DNA, 182 bp, Homo sapiens; identical to SEQ ID NO: 355869
  chr18:74195379-74195561
  hypo

SEQ ID NO: 382095 - DNA, 641 bp, Homo sapiens
  chr18:74323522-74324163
  hypo
cggtggagggggcgatgtgcctgcgtgtgtgcctgcgtgtgtgtgtgtgcctgcgtgtgtacctgcgtgtctgcctgcgtgtgtgcttgcggtggcgggggcggtgtgcctgcgtgtgtgtgtgtgtgcctgcgtgtgtacctgcgtgtctgcctgcgtgtgtgcctgcggtggcgggggcggtgtgcctgcgtgtgtgcctgcgtgtgtgtgtgcgtgcgtgtctgcctgcgtgtgtgcctgcggtggagggggcgatgtgcctgcgtgtgtgcgtgtgtgcgtgtctgcctgcgtgtgtgcctgcggtggagggggcgatgtgcctgcgtgtgtacctgcgtgtctgcctgcgtgtgtgcctgcggtggagggggcgatgtgcctgcgtgtgtacctgcgtgtgtgtgtgtgcctgcgtgtgtgcctgcggtggagggggcgatgtgcctgcgtgtgtacctgcgtgtctgcctgcgtgtgtgcctgcggtggcgggggcggtgtgcctgcgtggtgggctccctggagtgatgggcattagccttctcatgactgccgcctgggagactggttattccaaaggacctggcgcccaacgccagcacgaccgaagccttgaaggcgagcaggcaccctcc

SEQ ID NO: 382096 - DNA, 245 bp, Homo sapiens; identical to SEQ ID NO: 355870
  chr18:74325503-74325748
  hypo

SEQ ID NO: 382097 - DNA, 173 bp, Homo sapiens; identical to SEQ ID NO: 355871
  chr18:74325938-74326111
  hypo

SEQ ID NO: 382098 - DNA, 250 bp, Homo sapiens; identical to SEQ ID NO: 355872
  chr18:74396249-74396499
  hypo

SEQ ID NO: 382099 - DNA, 101 bp, Homo sapiens
  chr18:74419743-74419844
  hypo
cgtcttgcagaaatctcggtctcccttttaaggcattgttttcaatgtaagatggcaaaggcaaatccagtaaaaggttgtggctaataccggacatttac

SEQ ID NO: 382100 - DNA, 176 bp, Homo sapiens; identical to SEQ ID NO: 343442
  chr18:74426512-74426688
  hypo

SEQ ID NO: 382101 - DNA, 79 bp, Homo sapiens; identical to SEQ ID NO: 343444
  chr18:74518710-74518789
  hypo

SEQ ID NO: 382102 - DNA, 297 bp, Homo sapiens; identical to SEQ ID NO: 343445
  chr18:74569886-74570183
  hypo

SEQ ID NO: 382103 - DNA, 430 bp, Homo sapiens; identical to SEQ ID NO: 343446
  chr18:74696524-74696954
  hypo

SEQ ID NO: 382104 - DNA, 140 bp, Homo sapiens; identical to SEQ ID NO: 355873
  chr18:74721790-74721930
  hypo

SEQ ID NO: 382105 - DNA, 704 bp, Homo sapiens; identical to SEQ ID NO: 343448
  chr18:74728317-74729021
  hypo

SEQ ID NO: 382106 - DNA, 1775 bp, Homo sapiens; identical to SEQ ID NO: 343449
  chr18:74736601-74738376
  hypo

SEQ ID NO: 382107 - DNA, 47 bp, Homo sapiens; identical to SEQ ID NO: 367639
  chr18:74755425-74755472
  hypo

SEQ ID NO: 382108 - DNA, 368 bp, Homo sapiens; identical to SEQ ID NO: 367640
  chr18:74755590-74755958
  hypo

SEQ ID NO: 382109 - DNA, 337 bp, Homo sapiens; identical to SEQ ID NO: 343451
  chr18:74759077-74759414
  hypo

SEQ ID NO: 382110 - DNA, 636 bp, Homo sapiens; identical to SEQ ID NO: 355876
  chr18:74763734-74764370
  hypo

SEQ ID NO: 382111 - DNA, 428 bp, Homo sapiens; identical to SEQ ID NO: 343453
  chr18:74770092-74770520
  hypo

SEQ ID NO: 382112 - DNA, 75 bp, Homo sapiens; identical to SEQ ID NO: 367643
  chr18:74806376-74806451
  hypo

SEQ ID NO: 382113 - DNA, 817 bp, Homo sapiens; identical to SEQ ID NO: 347518
  chr18:74844285-74845102
  hypo

SEQ ID NO: 382114 - DNA, 135 bp, Homo sapiens; identical to SEQ ID NO: 367645
  chr18:75339359-75339494
  hypo

SEQ ID NO: 382115 - DNA, 241 bp, Homo sapiens; identical to SEQ ID NO: 343461
  chr18:75873544-75873785
  hypo

SEQ ID NO: 382116 - DNA, 236 bp, Homo sapiens; identical to SEQ ID NO: 348899
  chr18:75999434-75999670
  hypo

SEQ ID NO: 382117 - DNA, 106 bp, Homo sapiens; identical to SEQ ID NO: 367648
  chr18:76123588-76123694
  hypo

SEQ ID NO: 382118 - DNA, 31 bp, Homo sapiens; identical to SEQ ID NO: 367649
  chr18:76123894-76123925
  hypo

SEQ ID NO: 382119 - DNA, 143 bp, Homo sapiens; identical to SEQ ID NO: 355880
  chr18:76129277-76129420
  hypo

SEQ ID NO: 382120 - DNA, 180 bp, Homo sapiens; identical to SEQ ID NO: 355881
  chr18:76129450-76129630
  hypo

SEQ ID NO: 382121 - DNA, 441 bp, Homo sapiens; identical to SEQ ID NO: 343466
  chr18:76151089-76151530
  hypo

SEQ ID NO: 382122 - DNA, 114 bp, Homo sapiens; identical to SEQ ID NO: 355882
  chr18:76189679-76189793
  hypo

SEQ ID NO: 382123 - DNA, 273 bp, Homo sapiens; identical to SEQ ID NO: 355883
  chr18:76189872-76190145
  hypo

SEQ ID NO: 382124 - DNA, 463 bp, Homo sapiens; identical to SEQ ID NO: 355884
  chr18:76435960-76436423
  hypo

SEQ ID NO: 382125 - DNA, 148 bp, Homo sapiens; identical to SEQ ID NO: 343469
  chr18:76480528-76480676
  hypo

SEQ ID NO: 382126 - DNA, 486 bp, Homo sapiens; identical to SEQ ID NO: 367657
  chr18:76486313-76486799
  hypo

SEQ ID NO: 382127 - DNA, 432 bp, Homo sapiens; identical to SEQ ID NO: 343471
  chr18:76495838-76496270
  hypo

SEQ ID NO: 382128 - DNA, 284 bp, Homo sapiens; identical to SEQ ID NO: 343472
  chr18:76534718-76535002
  hypo

SEQ ID NO: 382129 - DNA, 178 bp, Homo sapiens; identical to SEQ ID NO: 343473
  chr18:76552775-76552953
  hypo

SEQ ID NO: 382130 - DNA, 63 bp, Homo sapiens
  chr18:76626405-76626468
  hypo
ggctagagggagggtgacagccgcagccgaacctcagagctggctagagggagggtgacagcc

SEQ ID NO: 382131 - DNA, 55 bp, Homo sapiens; identical to SEQ ID NO: 348901
  chr18:76653387-76653442
  hypo

SEQ ID NO: 382132 - DNA, 137 bp, Homo sapiens; identical to SEQ ID NO: 355888
  chr18:76685353-76685490
  hypo

SEQ ID NO: 382133 - DNA, 298 bp, Homo sapiens; identical to SEQ ID NO: 218657
  chr18:76685836-76686134
  hypo

SEQ ID NO: 382134 - DNA, 102 bp, Homo sapiens; identical to SEQ ID NO: 355890
  chr18:76686279-76686381
  hypo

SEQ ID NO: 382135 - DNA, 271 bp, Homo sapiens; identical to SEQ ID NO: 343477
  chr18:76999776-77000047
  hypo

SEQ ID NO: 382136 - DNA, 162 bp, Homo sapiens; identical to SEQ ID NO: 343478
  chr18:77076178-77076340
  hypo

SEQ ID NO: 382137 - DNA, 232 bp, Homo sapiens; identical to SEQ ID NO: 343479
  chr18:77083049-77083281
  hypo

SEQ ID NO: 382138 - DNA, 284 bp, Homo sapiens; identical to SEQ ID NO: 343480
  chr18:77126115-77126399
  hypo

SEQ ID NO: 382139 - DNA, 583 bp, Homo sapiens; identical to SEQ ID NO: 293194
  chr18:77160022-77160605
  hypo

SEQ ID NO: 382140 - DNA, 143 bp, Homo sapiens; identical to SEQ ID NO: 343482
  chr18:77198679-77198822
  hypo

SEQ ID NO: 382141 - DNA, 149 bp, Homo sapiens; identical to SEQ ID NO: 367669
  chr18:77270851-77271000
  hypo

SEQ ID NO: 382142 - DNA, 338 bp, Homo sapiens; identical to SEQ ID NO: 367670
  chr18:77271089-77271427
  hypo

SEQ ID NO: 382143 - DNA, 384 bp, Homo sapiens
  chr18:77307943-77308327
  hypo
cgaaggcctccagggccctctgttggctgctgacccagggccttctctagagcacctgactcgggcacacggaggctgctggaggagtgagagagtgagtggggggaggaattgcaaccaaattcagaatccgcccggccctgaggccgccccttgcctgccacccacccgggtgggggctttatttcgactcaggcacaggcgcacctgccggacccccggtgtctctgcgactccttctccgcactggcctgggcccgggctcccagccctccgctctgtctcgctggggcaaggcgtccctcactggccagttctgacattggtcccgggggagccgccttccacctgctggccctgctggccctgagtgtgactcagccg

SEQ ID NO: 382144 - DNA, 174 bp, Homo sapiens
  chr18:77308568-77308742
  hypo
cctcaacgcaacaaaaaggtgatttcagaattgtaattactaaagaaaacattaccaagaacgactctgcagcacccctcgttcacgtccccactcagcatctccacgcgggggccacgcgtccgtgtttgctgccggcagccatcagcatccgcaggggtcccccgtctccgc

SEQ ID NO: 382145 - DNA, 46 bp, Homo sapiens
  chr18:77313826-77313872
  hypo
cgggacttcagcagcacgcggagcctgaggctaaatgctgcaaaac

SEQ ID NO: 382146 - DNA, 78 bp, Homo sapiens
  chr18:77314021-77314099
  hypo
tgacgttttggcgatgttggtgctggaacttcaaacctcggtgtggaaggaagggacgccgaggcccctggcctgccc

SEQ ID NO: 382147 - DNA, 122 bp, Homo sapiens; identical to SEQ ID NO: 343487
  chr18:77334284-77334406
  hypo

SEQ ID NO: 382148 - DNA, 203 bp, Homo sapiens
  chr18:77336028-77336231
  hypo
cgggggaagcgctttcagatgaactgcagggaacaggtgaagagtgtggacaccggagcatggggcggtgagaagacacaatacgaggcctgccgtccgaacgcggaccctgcagcccctgcggcgggaagccgtgaacacaaggctgagtttgcgcctctgatttgcgccacgtgatgggacttgccggggcctccctgccc

SEQ ID NO: 382149 - DNA, 114 bp, Homo sapiens; identical to SEQ ID NO: 367672
  chr18:77338977-77339091
  hypo

SEQ ID NO: 382150 - DNA, 259 bp, Homo sapiens; identical to SEQ ID NO: 367673
  chr18:77339121-77339380
  hypo

SEQ ID NO: 382151 - DNA, 770 bp, Homo sapiens; identical to SEQ ID NO: 343490
  chr18:77358223-77358993
  hypo

SEQ ID NO: 382152 - DNA, 51 bp, Homo sapiens
  chr18:77456042-77456093
  hypo
cgtgccggagttgatggtgagctccgaggtgagccgggcatcagtggcggc

SEQ ID NO: 382153 - DNA, 710 bp, Homo sapiens; identical to SEQ ID NO: 343492
  chr18:77474501-77475211
  hypo

SEQ ID NO: 382154 - DNA, 31 bp, Homo sapiens; identical to SEQ ID NO: 367676
  chr18:77482822-77482853
  hypo

SEQ ID NO: 382155 - DNA, 411 bp, Homo sapiens; identical to SEQ ID NO: 343493
  chr18:77497998-77498409
  hypo

SEQ ID NO: 382156 - DNA, 160 bp, Homo sapiens; identical to SEQ ID NO: 346187
  chr18:77508739-77508899
  hypo

SEQ ID NO: 382157 - DNA, 398 bp, Homo sapiens; identical to SEQ ID NO: 324585
  chr18:77508946-77509344
  hypo

SEQ ID NO: 382158 - DNA, 116 bp, Homo sapiens; identical to SEQ ID NO: 346189
  chr18:77509679-77509795
  hypo

SEQ ID NO: 382159 - DNA, 42 bp, Homo sapiens; identical to SEQ ID NO: 343495
  chr18:77510442-77510484
  hypo

SEQ ID NO: 382160 - DNA, 187 bp, Homo sapiens; identical to SEQ ID NO: 343496
  chr18:77512029-77512216
  hypo

SEQ ID NO: 382161 - DNA, 268 bp, Homo sapiens; identical to SEQ ID NO: 343497
  chr18:77535504-77535772
  hypo

SEQ ID NO: 382162 - DNA, 265 bp, Homo sapiens; identical to SEQ ID NO: 355896
  chr18:77542640-77542905
  hypo

SEQ ID NO: 382163 - DNA, 270 bp, Homo sapiens; identical to SEQ ID NO: 218705
  chr18:77542951-77543221
  hypo

SEQ ID NO: 382164 - DNA, 576 bp, Homo sapiens; identical to SEQ ID NO: 343503
  chr18:77608097-77608673
  hypo

SEQ ID NO: 382165 - DNA, 135 bp, Homo sapiens; identical to SEQ ID NO: 348905
  chr18:77609451-77609586
  hypo

SEQ ID NO: 382166 - DNA, 474 bp, Homo sapiens; identical to SEQ ID NO: 348906
  chr18:77609678-77610152
  hypo

SEQ ID NO: 382167 - DNA, 113 bp, Homo sapiens; identical to SEQ ID NO: 343505
  chr18:77616298-77616411
  hypo

SEQ ID NO: 382168 - DNA, 362 bp, Homo sapiens; identical to SEQ ID NO: 355902
  chr18:77627972-77628334
  hypo

SEQ ID NO: 382169 - DNA, 122 bp, Homo sapiens; identical to SEQ ID NO: 355903
  chr18:77628470-77628592
  hypo

SEQ ID NO: 382170 - DNA, 189 bp, Homo sapiens; identical to SEQ ID NO: 355904
  chr18:77635961-77636150
  hypo

SEQ ID NO: 382171 - DNA, 344 bp, Homo sapiens; identical to SEQ ID NO: 324607
  chr18:77636190-77636534
  hypo

SEQ ID NO: 382172 - DNA, 235 bp, Homo sapiens; identical to SEQ ID NO: 343508
  chr18:77642685-77642920
  hypo

SEQ ID NO: 382173 - DNA, 144 bp, Homo sapiens; identical to SEQ ID NO: 367694
  chr18:77644520-77644664
  hypo

SEQ ID NO: 382174 - DNA, 39 bp, Homo sapiens; identical to SEQ ID NO: 367695
  chr18:77644881-77644920
  hypo

SEQ ID NO: 382175 - DNA, 277 bp, Homo sapiens; identical to SEQ ID NO: 355906
  chr18:77808879-77809156
  hypo

SEQ ID NO: 382176 - DNA, 368 bp, Homo sapiens; identical to SEQ ID NO: 355907
  chr18:77809186-77809554
  hypo

SEQ ID NO: 382177 - DNA, 912 bp, Homo sapiens; identical to SEQ ID NO: 343511
  chr18:77943609-77944521
  hypo

SEQ ID NO: 382178 - DNA, 154 bp, Homo sapiens; identical to SEQ ID NO: 367699
  chr19:379979-380133
  hypo

SEQ ID NO: 382179 - DNA, 54 bp, Homo sapiens; identical to SEQ ID NO: 355909
  chr19:403809-403863
  hypo

SEQ ID NO: 382180 - DNA, 311 bp, Homo sapiens; identical to SEQ ID NO: 367701
  chr19:407832-408143
  hypo

SEQ ID NO: 382181 - DNA, 805 bp, Homo sapiens; identical to SEQ ID NO: 367702
  chr19:418255-419060
  hypo

SEQ ID NO: 382182 - DNA, 66 bp, Homo sapiens; identical to SEQ ID NO: 355911
  chr19:491540-491606
  hypo

SEQ ID NO: 382183 - DNA, 70 bp, Homo sapiens; identical to SEQ ID NO: 367704
  chr19:530480-530550
  hypo

SEQ ID NO: 382184 - DNA, 98 bp, Homo sapiens; identical to SEQ ID NO: 367705
  chr19:549193-549291
  hypo

SEQ ID NO: 382185 - DNA, 95 bp, Homo sapiens
  chr19:557942-558037
  hypo
cgtgagccaccacgcctggccccttattgaacttgatggtttctccttcgtatctcagaagtcacaagctggaggatttaggtttgaagaatcac

SEQ ID NO: 382186 - DNA, 834 bp, Homo sapiens; identical to SEQ ID NO: 343521
  chr19:581325-582159
  hypo

SEQ ID NO: 382187 - DNA, 200 bp, Homo sapiens; identical to SEQ ID NO: 343522
  chr19:601344-601544
  hypo

SEQ ID NO: 382188 - DNA, 405 bp, Homo sapiens; identical to SEQ ID NO: 352128
  chr19:603411-603816
  hypo

SEQ ID NO: 382189 - DNA, 159 bp, Homo sapiens; identical to SEQ ID NO: 352129
  chr19:603846-604005
  hypo

SEQ ID NO: 382190 - DNA, 56 bp, Homo sapiens; identical to SEQ ID NO: 355915
  chr19:617561-617617
  hypo

SEQ ID NO: 382191 - DNA, 808 bp, Homo sapiens; identical to SEQ ID NO: 355916
  chr19:617647-618455
  hypo

SEQ ID NO: 382192 - DNA, 216 bp, Homo sapiens; identical to SEQ ID NO: 367712
  chr19:629609-629825
  hypo

SEQ ID NO: 382193 - DNA, 34 bp, Homo sapiens; identical to SEQ ID NO: 355917
  chr19:638348-638382
  hypo

SEQ ID NO: 382194 - DNA, 112 bp, Homo sapiens; identical to SEQ ID NO: 355918
  chr19:638476-638588
  hypo

SEQ ID NO: 382195 - DNA, 124 bp, Homo sapiens; identical to SEQ ID NO: 367715
  chr19:640789-640913
  hypo

SEQ ID NO: 382196 - DNA, 79 bp, Homo sapiens; identical to SEQ ID NO: 367716
  chr19:641007-641086
  hypo

SEQ ID NO: 382197 - DNA, 739 bp, Homo sapiens; identical to SEQ ID NO: 343528
  chr19:736036-736775
  hypo

SEQ ID NO: 382198 - DNA, 182 bp, Homo sapiens; identical to SEQ ID NO: 343529
  chr19:739235-739417
  hypo

SEQ ID NO: 382199 - DNA, 348 bp, Homo sapiens
  chr19:804907-805255
  hypo
cggaccccgtgagcgcccagcacgccaagctggtgagtggggctcccgggacggcgcccgccctggccctggcccggcgacgtctcacggtccctctcccctcagtcgctggacgggcagaacatctacaacgcctgctgcacgctgcgcatcgacttttccaagctcaccagcctcaacgtcaagtacaacaatgacaagagccgtgactacacacgcccagacctgccttccggggacagccagccctcgctggaccagaccatggccgcggccttcggtaagaggctgcccgacgcggcgccagtgtgcagagtggtctattagggccgctcagtccggagcccc

SEQ ID NO: 382200 - DNA, 287 bp, Homo sapiens; identical to SEQ ID NO: 293229
  chr19:813409-813696
  hypo

SEQ ID NO: 382201 - DNA, 322 bp, Homo sapiens; identical to SEQ ID NO: 352133
  chr19:813830-814152
  hypo

SEQ ID NO: 382202 - DNA, 102 bp, Homo sapiens; identical to SEQ ID NO: 355922
  chr19:814741-814843
  hypo

SEQ ID NO: 382203 - DNA, 413 bp, Homo sapiens
  chr19:871003-871416
  hypo
tgtgtttggggaccaatgcagggacacacgcacctggcgaggccgtcgagctgcagggtggcagcactgccaggcagcgtgggcgcccggccaaactgcagacgaaggggctgcttgggctgcaggcggctaaccaggccgtcgctggctggcagccagtccaggctggggataagcagctggctgggcagcaggcagcattcatccaccagcgcctcgtccggctcgctcgctgggccctcatcgcgacctgcggagagaggtggcggaagtctcagcacccctgactggggcaccgcccggccacccgggacgtgctgggagcccctccagttcaggagcaccaggtcagggccccagctctgtctgcctggctgggtgaccccggggttctctcaccaggtcggggcccc

SEQ ID NO: 382204 - DNA, 119 bp, Homo sapiens; identical to SEQ ID NO: 343535
  chr19:874809-874928
  hypo

SEQ ID NO: 382205 - DNA, 158 bp, Homo sapiens; identical to SEQ ID NO: 346190
  chr19:883424-883582
  hypo

SEQ ID NO: 382206 - DNA, 544 bp, Homo sapiens; identical to SEQ ID NO: 346191
  chr19:884311-884855
  hypo

SEQ ID NO: 382207 - DNA, 916 bp, Homo sapiens; identical to SEQ ID NO: 343537
  chr19:885374-886290
  hypo

SEQ ID NO: 382208 - DNA, 61 bp, Homo sapiens; identical to SEQ ID NO: 367725
  chr19:891455-891516
  hypo

SEQ ID NO: 382209 - DNA, 513 bp, Homo sapiens; identical to SEQ ID NO: 367726
  chr19:899625-900138
  hypo

SEQ ID NO: 382210 - DNA, 167 bp, Homo sapiens; identical to SEQ ID NO: 348910
  chr19:901066-901233
  hypo

SEQ ID NO: 382211 - DNA, 241 bp, Homo sapiens; identical to SEQ ID NO: 367728
  chr19:939434-939675
  hypo

SEQ ID NO: 382212 - DNA, 743 bp, Homo sapiens; identical to SEQ ID NO: 335871
  chr19:941824-942567
  hypo

SEQ ID NO: 382213 - DNA, 254 bp, Homo sapiens
  chr19:945745-945999
  hypo
cggcgtcgacatggccggggcaggcgtgttctggccccttgcactgcccggctcctgctgctggtgctgggctgcgtttctgttcagagaacctgggctgggagtgatgggaccgcagtctcccaccaggtgcctctttccaaatggacactcctgctgggcatgacacttctgaggctttctgggaccgtccaggtcccgtctgcagggaaccccaggacggagttaattgctgagtgcccagctctgggcaa

SEQ ID NO: 382214 - DNA, 63 bp, Homo sapiens
  chr19:946112-946175
  hypo
ctggccggtctggggggcggggaccctgtacagaacgccccggccgcgtggagtggcaggttc

SEQ ID NO: 382215 - DNA, 68 bp, Homo sapiens; identical to SEQ ID NO: 348912
  chr19:956638-956706
  hypo

SEQ ID NO: 382216 - DNA, 50 bp, Homo sapiens; identical to SEQ ID NO: 355928
  chr19:957401-957451
  hypo

SEQ ID NO: 382217 - DNA, 228 bp, Homo sapiens; identical to SEQ ID NO: 348913
  chr19:1004547-1004775
  hypo

SEQ ID NO: 382218 - DNA, 279 bp, Homo sapiens; identical to SEQ ID NO: 218770
  chr19:1005441-1005720
  hypo

SEQ ID NO: 382219 - DNA, 128 bp, Homo sapiens; identical to SEQ ID NO: 367734
  chr19:1030225-1030353
  hypo

SEQ ID NO: 382220 - DNA, 140 bp, Homo sapiens; identical to SEQ ID NO: 343550
  chr19:1048876-1049016
  hypo

SEQ ID NO: 382221 - DNA, 985 bp, Homo sapiens; identical to SEQ ID NO: 367736
  chr19:1079725-1080710
  hypo

SEQ ID NO: 382222 - DNA, 985 bp, Homo sapiens; identical to SEQ ID NO: 343552
  chr19:1108654-1109639
  hypo

SEQ ID NO: 382223 - DNA, 319 bp, Homo sapiens; identical to SEQ ID NO: 343553
  chr19:1128115-1128434
  hypo

SEQ ID NO: 382224 - DNA, 71 bp, Homo sapiens; identical to SEQ ID NO: 367738
  chr19:1156143-1156214
  hypo

SEQ ID NO: 382225 - DNA, 241 bp, Homo sapiens; identical to SEQ ID NO: 324801
  chr19:1156283-1156524
  hypo

SEQ ID NO: 382226 - DNA, 110 bp, Homo sapiens; identical to SEQ ID NO: 367740
  chr19:1156628-1156738
  hypo

SEQ ID NO: 382227 - DNA, 338 bp, Homo sapiens; identical to SEQ ID NO: 348916
  chr19:1166870-1167208
  hypo

SEQ ID NO: 382228 - DNA, 83 bp, Homo sapiens; identical to SEQ ID NO: 367742
  chr19:1170985-1171068
  hypo

SEQ ID NO: 382229 - DNA, 428 bp, Homo sapiens; identical to SEQ ID NO: 367743
  chr19:1171422-1171850
  hypo

SEQ ID NO: 382230 - DNA, 68 bp, Homo sapiens; identical to SEQ ID NO: 343557
  chr19:1179335-1179403
  hypo

SEQ ID NO: 382231 - DNA, 268 bp, Homo sapiens; identical to SEQ ID NO: 343558
  chr19:1223581-1223849
  hypo

SEQ ID NO: 382232 - DNA, 197 bp, Homo sapiens; identical to SEQ ID NO: 355934
  chr19:1226490-1226687
  hypo

SEQ ID NO: 382233 - DNA, 317 bp, Homo sapiens; identical to SEQ ID NO: 355935
  chr19:1226828-1227145
  hypo

SEQ ID NO: 382234 - DNA, 790 bp, Homo sapiens; identical to SEQ ID NO: 343560
  chr19:1254919-1255709
  hypo

SEQ ID NO: 382235 - DNA, 287 bp, Homo sapiens; identical to SEQ ID NO: 343561
  chr19:1288529-1288816
  hypo

SEQ ID NO: 382236 - DNA, 197 bp, Homo sapiens; identical to SEQ ID NO: 343562
  chr19:1297611-1297808
  hypo

SEQ ID NO: 382237 - DNA, 64 bp, Homo sapiens; identical to SEQ ID NO: 218807
  chr19:1308081-1308145
  hypo

SEQ ID NO: 382238 - DNA, 397 bp, Homo sapiens; identical to SEQ ID NO: 355936
  chr19:1312697-1313094
  hypo

SEQ ID NO: 382239 - DNA, 576 bp, Homo sapiens; identical to SEQ ID NO: 343565
  chr19:1333769-1334345
  hypo

SEQ ID NO: 382240 - DNA, 717 bp, Homo sapiens; identical to SEQ ID NO: 367752
  chr19:1370777-1371494
  hypo

SEQ ID NO: 382241 - DNA, 303 bp, Homo sapiens; identical to SEQ ID NO: 343568
  chr19:1393952-1394255
  hypo

SEQ ID NO: 382242 - DNA, 255 bp, Homo sapiens; identical to SEQ ID NO: 355938
  chr19:1423978-1424233
  hypo

SEQ ID NO: 382243 - DNA, 120 bp, Homo sapiens; identical to SEQ ID NO: 361344
  chr19:1449921-1450041
  hypo

SEQ ID NO: 382244 - DNA, 55 bp, Homo sapiens
  chr19:1482826-1482881
  hypo
gctccagagcccctggggggaggttggagagccaagccccgcccaccacagcccc

SEQ ID NO: 382245 - DNA, 249 bp, Homo sapiens; identical to SEQ ID NO: 361346
  chr19:1491131-1491380
  hypo

SEQ ID NO: 382246 - DNA, 164 bp, Homo sapiens; identical to SEQ ID NO: 367757
  chr19:1495400-1495564
  hypo

SEQ ID NO: 382247 - DNA, 58 bp, Homo sapiens; identical to SEQ ID NO: 218817
  chr19:1496674-1496732
  hypo

SEQ ID NO: 382248 - DNA, 241 bp, Homo sapiens; identical to SEQ ID NO: 355940
  chr19:1506026-1506267
  hypo

SEQ ID NO: 382249 - DNA, 121 bp, Homo sapiens; identical to SEQ ID NO: 355941
  chr19:1565953-1566074
  hypo

SEQ ID NO: 382250 - DNA, 227 bp, Homo sapiens; identical to SEQ ID NO: 324873
  chr19:1577427-1577654
  hypo

SEQ ID NO: 382251 - DNA, 547 bp, Homo sapiens; identical to SEQ ID NO: 324874
  chr19:1577687-1578234
  hypo

SEQ ID NO: 382252 - DNA, 280 bp, Homo sapiens; identical to SEQ ID NO: 205085
  chr19:1748599-1748879
  hypo

SEQ ID NO: 382253 - DNA, 349 bp, Homo sapiens; identical to SEQ ID NO: 293279
  chr19:1748939-1749288
  hypo

SEQ ID NO: 382254 - DNA, 200 bp, Homo sapiens; identical to SEQ ID NO: 293280
  chr19:1749318-1749518
  hypo

SEQ ID NO: 382255 - DNA, 220 bp, Homo sapiens; identical to SEQ ID NO: 293281
  chr19:1749556-1749776
  hypo

SEQ ID NO: 382256 - DNA, 227 bp, Homo sapiens; identical to SEQ ID NO: 205087
  chr19:1754950-1755177
  hypo

SEQ ID NO: 382257 - DNA, 378 bp, Homo sapiens; identical to SEQ ID NO: 293287
  chr19:1755227-1755605
  hypo

SEQ ID NO: 382258 - DNA, 367 bp, Homo sapiens; identical to SEQ ID NO: 343582
  chr19:1785308-1785675
  hypo

SEQ ID NO: 382259 - DNA, 87 bp, Homo sapiens; identical to SEQ ID NO: 355948
  chr19:1807818-1807905
  hypo

SEQ ID NO: 382260 - DNA, 242 bp, Homo sapiens; identical to SEQ ID NO: 348917
  chr19:1911845-1912087
  hypo

SEQ ID NO: 382261 - DNA, 659 bp, Homo sapiens; identical to SEQ ID NO: 355950
  chr19:1912446-1913105
  hypo

SEQ ID NO: 382262 - DNA, 713 bp, Homo sapiens; identical to SEQ ID NO: 343586
  chr19:1960909-1961622
  hypo

SEQ ID NO: 382263 - DNA, 261 bp, Homo sapiens; identical to SEQ ID NO: 355951
  chr19:1969650-1969911
  hypo

SEQ ID NO: 382264 - DNA, 319 bp, Homo sapiens; identical to SEQ ID NO: 324918
  chr19:1970106-1970425
  hypo

SEQ ID NO: 382265 - DNA, 304 bp, Homo sapiens; identical to SEQ ID NO: 343588
  chr19:1977028-1977332
  hypo

SEQ ID NO: 382266 - DNA, 232 bp, Homo sapiens; identical to SEQ ID NO: 346192
  chr19:1978023-1978255
  hypo

SEQ ID NO: 382267 - DNA, 116 bp, Homo sapiens; identical to SEQ ID NO: 345560
  chr19:1979018-1979134
  hypo

SEQ ID NO: 382268 - DNA, 181 bp, Homo sapiens; identical to SEQ ID NO: 367778
  chr19:1993286-1993467
  hypo

SEQ ID NO: 382269 - DNA, 343 bp, Homo sapiens; identical to SEQ ID NO: 343592
  chr19:2000558-2000901
  hypo

SEQ ID NO: 382270 - DNA, 151 bp, Homo sapiens; identical to SEQ ID NO: 343593
  chr19:2041016-2041167
  hypo

SEQ ID NO: 382271 - DNA, 728 bp, Homo sapiens; identical to SEQ ID NO: 335895
  chr19:2164931-2165659
  hypo

SEQ ID NO: 382272 - DNA, 337 bp, Homo sapiens; identical to SEQ ID NO: 343595
  chr19:2182571-2182908
  hypo

SEQ ID NO: 382273 - DNA, 89 bp, Homo sapiens; identical to SEQ ID NO: 343596
  chr19:2204172-2204261
  hypo

SEQ ID NO: 382274 - DNA, 95 bp, Homo sapiens; identical to SEQ ID NO: 343597
  chr19:2224728-2224823
  hypo

SEQ ID NO: 382275 - DNA, 125 bp, Homo sapiens; identical to SEQ ID NO: 355958
  chr19:2244081-2244206
  hypo

SEQ ID NO: 382276 - DNA, 612 bp, Homo sapiens; identical to SEQ ID NO: 355959
  chr19:2244236-2244848
  hypo

SEQ ID NO: 382277 - DNA, 218 bp, Homo sapiens; identical to SEQ ID NO: 361373
  chr19:2273763-2273981
  hypo

SEQ ID NO: 382278 - DNA, 155 bp, Homo sapiens; identical to SEQ ID NO: 367787
  chr19:2339592-2339747
  hypo

SEQ ID NO: 382279 - DNA, 63 bp, Homo sapiens; identical to SEQ ID NO: 367788
  chr19:2360648-2360711
  hypo

SEQ ID NO: 382280 - DNA, 301 bp, Homo sapiens; identical to SEQ ID NO: 343604
  chr19:2413723-2414024
  hypo

SEQ ID NO: 382281 - DNA, 435 bp, Homo sapiens; identical to SEQ ID NO: 361375
  chr19:2488689-2489124
  hypo

SEQ ID NO: 382282 - DNA, 221 bp, Homo sapiens; identical to SEQ ID NO: 343606
  chr19:2511254-2511475
  hypo

SEQ ID NO: 382283 - DNA, 91 bp, Homo sapiens; identical to SEQ ID NO: 355961
  chr19:2524648-2524739
  hypo

SEQ ID NO: 382284 - DNA, 112 bp, Homo sapiens; identical to SEQ ID NO: 367792
  chr19:2573883-2573995
  hypo

SEQ ID NO: 382285 - DNA, 153 bp, Homo sapiens; identical to SEQ ID NO: 367793
  chr19:2574044-2574197
  hypo

SEQ ID NO: 382286 - DNA, 72 bp, Homo sapiens; identical to SEQ ID NO: 347528
  chr19:2702445-2702517
  hypo

SEQ ID NO: 382287 - DNA, 453 bp, Homo sapiens; identical to SEQ ID NO: 347529
  chr19:2702553-2703006
  hypo

SEQ ID NO: 382288 - DNA, 324 bp, Homo sapiens; identical to SEQ ID NO: 367796
  chr19:2795325-2795649
  hypo

SEQ ID NO: 382289 - DNA, 577 bp, Homo sapiens; identical to SEQ ID NO: 343611
  chr19:2796376-2796953
  hypo

SEQ ID NO: 382290 - DNA, 183 bp, Homo sapiens; identical to SEQ ID NO: 343612
  chr19:2997586-2997769
  hypo

SEQ ID NO: 382291 - DNA, 783 bp, Homo sapiens; identical to SEQ ID NO: 343613
  chr19:3105574-3106357
  hypo

SEQ ID NO: 382292 - DNA, 246 bp, Homo sapiens; identical to SEQ ID NO: 367798
  chr19:3114752-3114998
  hypo

SEQ ID NO: 382293 - DNA, 66 bp, Homo sapiens; identical to SEQ ID NO: 325036
  chr19:3115027-3115093
  hypo

SEQ ID NO: 382294 - DNA, 72 bp, Homo sapiens; identical to SEQ ID NO: 355964
  chr19:3219654-3219726
  hypo

SEQ ID NO: 382295 - DNA, 1016 bp, Homo sapiens; identical to SEQ ID NO: 343617
  chr19:3490855-3491871
  hypo

SEQ ID NO: 382296 - DNA, 84 bp, Homo sapiens; identical to SEQ ID NO: 355965
  chr19:3494540-3494624
  hypo

SEQ ID NO: 382297 - DNA, 193 bp, Homo sapiens; identical to SEQ ID NO: 367803
  chr19:3548059-3548252
  hypo

SEQ ID NO: 382298 - DNA, 214 bp, Homo sapiens; identical to SEQ ID NO: 325072
  chr19:3565326-3565540
  hypo

SEQ ID NO: 382299 - DNA, 133 bp, Homo sapiens; identical to SEQ ID NO: 367805
  chr19:3571360-3571493
  hypo

SEQ ID NO: 382300 - DNA, 381 bp, Homo sapiens; identical to SEQ ID NO: 367806
  chr19:3576162-3576543
  hypo

SEQ ID NO: 382301 - DNA, 313 bp, Homo sapiens; identical to SEQ ID NO: 325078
  chr19:3577811-3578124
  hypo

SEQ ID NO: 382302 - DNA, 276 bp, Homo sapiens
  chr19:3578223-3578499
  hypo
atcacctcccggaggggcctacctgcggtcgcccctgatgcaccagtgctaggatggccatggagaaccccgggccggcgggacccactcgggggcaccagaacttccctaaagcttctcagggtggatcccagcgcccgggttagataggttcaacgcctgtcccccaaccctggcatctgttggagcagctgatgggccatggtctctggggttccccagggccggggtgggggccagagatgatgagggcctcatcccgggccctcctctctc

SEQ ID NO: 382303 - DNA, 205 bp, Homo sapiens; identical to SEQ ID NO: 343624
  chr19:3669713-3669918
  hypo

SEQ ID NO: 382304 - DNA, 32 bp, Homo sapiens
  chr19:3691238-3691270
  hypo
cgcgtcctccgctgccggaacacggagcgccc

SEQ ID NO: 382305 - DNA, 60 bp, Homo sapiens; identical to SEQ ID NO: 367808
  chr19:3747832-3747892
  hypo

SEQ ID NO: 382306 - DNA, 98 bp, Homo sapiens; identical to SEQ ID NO: 367809
  chr19:3748020-3748118
  hypo

SEQ ID NO: 382307 - DNA, 407 bp, Homo sapiens
  chr19:3770610-3771017
  hypo
cggcaggctcaggctggcggccaggccctgtccagagcctgtgcatgttccttggccagcagccgcagggacgcctcctccagggcgaagccatctgcgaaggtgggagcaaaggcatgaggcccgaaggacgcttgcagccccgggcccgggcccaggaggcgggggaggcctggcacggccggcggtccggggcccaaccagggctccaggggcagcgacatggccggggggcgggcgaacggcagcgctggggcctcggggagtctcggagctgccacggcacccgagcctgactccagccgctcctggcggcgccacttggcccggcggttctggaaccacacctggagggtgcgagagggaaggggggttgctgtgagctcagccgctccccgccaatcctc

SEQ ID NO: 382308 - DNA, 92 bp, Homo sapiens
  chr19:3777982-3778074
  hypo
cgtctttatcgggcgatcatccttcgcaggtctggggtgtccacgggccgcccagagccccctacgtgggccagcccctgctgtgggcacca

SEQ ID NO: 382309 - DNA, 109 bp, Homo sapiens
  chr19:3778417-3778526
  hypo
tgactgcggacagcaggcgtgggcaggggtcagggccacagcctctggacctgcccggaacccagtgcctccctgggacccccgctcaccattttagggtacggagccc

SEQ ID NO: 382310 - DNA, 46 bp, Homo sapiens; identical to SEQ ID NO: 347530
  chr19:3785511-3785557
  hypo

SEQ ID NO: 382311 - DNA, 326 bp, Homo sapiens
  chr19:3907947-3908273
  hypo
gctccagcccggcccactgggcaacagggggttcgtcagtgcccctctctgatgcacggggatgttaagccgtcaactcgcttcgggtggacggactgtgggcaaggcgtgcatggtcagggaggcgcactgggggcccctgatggtcgctgtcactcctcagcgaaggcagagactggctaaggggtcgccggctgctgtggctcggagccatgccctcccgagcgtgtgggcaccgggacgtggtgggtggtgcgcgggaggcagctcagggctgggagaggactctgacgttgccgatcggctgcctctcctcagggtactac

SEQ ID NO: 382312 - DNA, 418 bp, Homo sapiens
  chr19:3966086-3966504
  hypo
cgcattttaaagaaaccaaggctgagaaaaggaaagcaactagcccaaggtcatgcagtcagtcagtggcgggaggattcaaaccttcaaaccaggtgctgcaggctccagagcccaggtgctctaacaggaagcagacagctgctgctgggtaccgggttcctgcgtgcctacctcccggctccacgctgtctcctgctaacagacccagctgtcccagggcagcctttgccgctcactctcagtctgtgggactcagtggcccaggaaaggggtggaaggggacacgactggacctgggcaagcagaaaaccacgccttccagcccaaagagaccggtccagtccacagggctctgaacgcctgctgggaagagaggatctctctctccctctgctgggcttggatccaggctcgc

SEQ ID NO: 382313 - DNA, 99 bp, Homo sapiens; identical to SEQ ID NO: 367811
  chr19:3966587-3966686
  hypo

SEQ ID NO: 382314 - DNA, 183 bp, Homo sapiens; identical to SEQ ID NO: 367812
  chr19:3966755-3966938
  hypo

SEQ ID NO: 382315 - DNA, 137 bp, Homo sapiens
  chr19:3978022-3978159
  hypo
cgcctttatcgatgtcctcggccaggccgtcggggaagggccgcgccttcatgtacagccggttgtgcttgttgggggacttggagaggcagagcacgttcgactcttcactgaccgtctcgcggtacgagacgacc

SEQ ID NO: 382316 - DNA, 313 bp, Homo sapiens
  chr19:4042909-4043222
  hypo
cgcgccaggggctatgggtcaccttccccgcaagaggggcctctggacctgggtactcctcggacactcacccccaccccggtgctctgggtcaccatccacacccagcctctctgccacgcgacagacggaccccagagagatgggcctggcttccaaggccgggcaggaagagcaggaagggtcggggacctggggcttctctccttgggacccaggatccggtcaccctgggcccaaaggtgtggtgtggacgaggtgctcaacccacccagtctcttcagggccaaaaggggaaaagggggaccccccc

SEQ ID NO: 382317 - DNA, 344 bp, Homo sapiens
  chr19:4043330-4043674
  hypo
tttttttttttatgtacaagaaaaatgaatttttttgttttttcatcttttgtgtttttgtttgttttttattacttttaaagcttctccctccccactcccaaaaagtgcatttttatcagttttttttttttttaaatctcccacactttataaagactctcaatacagtctctggaatgtctatctgtctgtgctctgtaccctgagggcgccgccccgccccccattcaccaggcctggcccctccaaagtccaaggcacctcgattctgggcctggggtggggtggggggcgggacctgggcatcggatcctggtccacagcctccaggcagccccggc

SEQ ID NO: 382318 - DNA, 265 bp, Homo sapiens; identical to SEQ ID NO: 205120
  chr19:4054040-4054305
  hypo

SEQ ID NO: 382319 - DNA, 55 bp, Homo sapiens; identical to SEQ ID NO: 205121
  chr19:4054380-4054435
  hypo

SEQ ID NO: 382320 - DNA, 170 bp, Homo sapiens; identical to SEQ ID NO: 205122
  chr19:4054471-4054641
  hypo

SEQ ID NO: 382321 - DNA, 520 bp, Homo sapiens; identical to SEQ ID NO: 352163
  chr19:4054917-4055437
  hypo

SEQ ID NO: 382322 - DNA, 97 bp, Homo sapiens; identical to SEQ ID NO: 205124
  chr19:4064872-4064969
  hypo

SEQ ID NO: 382323 - DNA, 571 bp, Homo sapiens; identical to SEQ ID NO: 343638
  chr19:4094519-4095090
  hypo

SEQ ID NO: 382324 - DNA, 351 bp, Homo sapiens; identical to SEQ ID NO: 325155
  chr19:4096065-4096416
  hypo

SEQ ID NO: 382325 - DNA, 165 bp, Homo sapiens; identical to SEQ ID NO: 355975
  chr19:4096525-4096690
  hypo

SEQ ID NO: 382326 - DNA, 73 bp, Homo sapiens; identical to SEQ ID NO: 367821
  chr19:4290473-4290546
  hypo

SEQ ID NO: 382327 - DNA, 33 bp, Homo sapiens; identical to SEQ ID NO: 361387
  chr19:4304684-4304717
  hypo

SEQ ID NO: 382328 - DNA, 289 bp, Homo sapiens; identical to SEQ ID NO: 218965
  chr19:4361250-4361539
  hypo

SEQ ID NO: 382329 - DNA, 179 bp, Homo sapiens; identical to SEQ ID NO: 367824
  chr19:4361700-4361879
  hypo

SEQ ID NO: 382330 - DNA, 107 bp, Homo sapiens; identical to SEQ ID NO: 335912
  chr19:4432865-4432972
  hypo

SEQ ID NO: 382331 - DNA, 242 bp, Homo sapiens; identical to SEQ ID NO: 352167
  chr19:4523777-4524019
  hypo

SEQ ID NO: 382332 - DNA, 43 bp, Homo sapiens; identical to SEQ ID NO: 367827
  chr19:4550330-4550373
  hypo

SEQ ID NO: 382333 - DNA, 129 bp, Homo sapiens; identical to SEQ ID NO: 355978
  chr19:4550735-4550864
  hypo

SEQ ID NO: 382334 - DNA, 130 bp, Homo sapiens; identical to SEQ ID NO: 343650
  chr19:4675518-4675648
  hypo

SEQ ID NO: 382335 - DNA, 638 bp, Homo sapiens; identical to SEQ ID NO: 343651
  chr19:4676079-4676717
  hypo

SEQ ID NO: 382336 - DNA, 108 bp, Homo sapiens
  chr19:4679454-4679562
  hypo
cgccttaggaaggagcctgctagggccttcagcactcagcggtttcttctacgcaatttctcagtttcaaataaagcccgtctgcggggcaatttcggtaagggttcc

SEQ ID NO: 382337 - DNA, 80 bp, Homo sapiens; identical to SEQ ID NO: 343653
  chr19:4697654-4697734
  hypo

SEQ ID NO: 382338 - DNA, 233 bp, Homo sapiens; identical to SEQ ID NO: 367832
  chr19:4714229-4714462
  hypo

SEQ ID NO: 382339 - DNA, 61 bp, Homo sapiens; identical to SEQ ID NO: 367833
  chr19:4795062-4795123
  hypo

SEQ ID NO: 382340 - DNA, 199 bp, Homo sapiens; identical to SEQ ID NO: 367834
  chr19:4795324-4795523
  hypo

SEQ ID NO: 382341 - DNA, 615 bp, Homo sapiens; identical to SEQ ID NO: 355982
  chr19:4816550-4817165
  hypo

SEQ ID NO: 382342 - DNA, 586 bp, Homo sapiens; identical to SEQ ID NO: 343657
  chr19:4817473-4818059
  hypo

SEQ ID NO: 382343 - DNA, 122 bp, Homo sapiens; identical to SEQ ID NO: 343658
  chr19:4934661-4934783
  hypo

SEQ ID NO: 382344 - DNA, 150 bp, Homo sapiens; identical to SEQ ID NO: 367837
  chr19:4986363-4986513
  hypo

SEQ ID NO: 382345 - DNA, 191 bp, Homo sapiens; identical to SEQ ID NO: 367838
  chr19:4986633-4986824
  hypo

SEQ ID NO: 382346 - DNA, 168 bp, Homo sapiens; identical to SEQ ID NO: 348926
  chr19:5023047-5023215
  hypo

SEQ ID NO: 382347 - DNA, 450 bp, Homo sapiens; identical to SEQ ID NO: 348927
  chr19:5023245-5023695
  hypo

SEQ ID NO: 382348 - DNA, 371 bp, Homo sapiens; identical to SEQ ID NO: 367841
  chr19:5037624-5037995
  hypo

SEQ ID NO: 382349 - DNA, 153 bp, Homo sapiens; identical to SEQ ID NO: 367842
  chr19:5038238-5038391
  hypo

SEQ ID NO: 382350 - DNA, 122 bp, Homo sapiens; identical to SEQ ID NO: 367843
  chr19:5038421-5038543
  hypo

SEQ ID NO: 382351 - DNA, 284 bp, Homo sapiens; identical to SEQ ID NO: 355986
  chr19:5064018-5064302
  hypo

SEQ ID NO: 382352 - DNA, 203 bp, Homo sapiens; identical to SEQ ID NO: 355987
  chr19:5064332-5064535
  hypo

SEQ ID NO: 382353 - DNA, 158 bp, Homo sapiens; identical to SEQ ID NO: 367846
  chr19:5102582-5102740
  hypo

SEQ ID NO: 382354 - DNA, 110 bp, Homo sapiens; identical to SEQ ID NO: 367847
  chr19:5102770-5102880
  hypo

SEQ ID NO: 382355 - DNA, 303 bp, Homo sapiens; identical to SEQ ID NO: 343665
  chr19:5132575-5132878
  hypo

SEQ ID NO: 382356 - DNA, 415 bp, Homo sapiens; identical to SEQ ID NO: 355988
  chr19:5269156-5269571
  hypo

SEQ ID NO: 382357 - DNA, 438 bp, Homo sapiens; identical to SEQ ID NO: 347531
  chr19:5608081-5608519
  hypo

SEQ ID NO: 382358 - DNA, 229 bp, Homo sapiens; identical to SEQ ID NO: 348929
  chr19:5608569-5608798
  hypo

SEQ ID NO: 382359 - DNA, 84 bp, Homo sapiens; identical to SEQ ID NO: 343669
  chr19:5630448-5630532
  hypo

SEQ ID NO: 382360 - DNA, 441 bp, Homo sapiens; identical to SEQ ID NO: 355992
  chr19:5789249-5789690
  hypo

SEQ ID NO: 382361 - DNA, 241 bp, Homo sapiens; identical to SEQ ID NO: 219015
  chr19:5789927-5790168
  hypo

SEQ ID NO: 382362 - DNA, 138 bp, Homo sapiens; identical to SEQ ID NO: 355994
  chr19:5790213-5790351
  hypo

SEQ ID NO: 382363 - DNA, 124 bp, Homo sapiens; identical to SEQ ID NO: 343672
  chr19:5797848-5797972
  hypo

SEQ ID NO: 382364 - DNA, 36 bp, Homo sapiens
  chr19:5825278-5825314
  hypo
cgcaggtgctgtggggtgagggtggtgcgtgggccc

SEQ ID NO: 382365 - DNA, 521 bp, Homo sapiens
  chr19:5825362-5825883
  hypo
ctgaggcgtggatgccggcagggtgcgtgtgcagcgcctttgggtgtgggccacgagtacgcccatgtgcgcgtctgcgcccgcccctgccagcccacacaatcctcttttcttgtccttacaatgcacaagggtggcctccagcacgagctccacttctgtcctcccaccacttccctctctgcaagcggcgtgaagtccttcctaggactctgggacagagacccgggcgggacccccaaaatccagtgctccaggacttggggtgcggggggcaaagcacgaatggaggaatttcaggcactgcggagggtcagggcccatgggcgggtgcctgtctgccctactgcaaaaagcgagtggccactgactccccaagtccccatgttctaggctcctggtggaatttcaggctggggaccttgtgttctagcccctgtgcaagcagccagccccgctgcagggaggcagggacagacatcctaaaagatgattcattgttgccaggtgcggtggctcac

SEQ ID NO: 382366 - DNA, 336 bp, Homo sapiens; identical to SEQ ID NO: 355995
  chr19:5896616-5896952
  hypo

SEQ ID NO: 382367 - DNA, 258 bp, Homo sapiens; identical to SEQ ID NO: 367856
  chr19:5897319-5897577
  hypo

SEQ ID NO: 382368 - DNA, 291 bp, Homo sapiens; identical to SEQ ID NO: 219027
  chr19:5915130-5915421
  hypo

SEQ ID NO: 382369 - DNA, 405 bp, Homo sapiens; identical to SEQ ID NO: 325311
  chr19:5915520-5915925
  hypo

SEQ ID NO: 382370 - DNA, 324 bp, Homo sapiens; identical to SEQ ID NO: 367859
  chr19:5915969-5916293
  hypo

SEQ ID NO: 382371 - DNA, 311 bp, Homo sapiens; identical to SEQ ID NO: 343677
  chr19:5938115-5938426
  hypo

SEQ ID NO: 382372 - DNA, 922 bp, Homo sapiens; identical to SEQ ID NO: 343679
  chr19:5994773-5995695
  hypo

SEQ ID NO: 382373 - DNA, 514 bp, Homo sapiens; identical to SEQ ID NO: 343680
  chr19:5995930-5996444
  hypo

SEQ ID NO: 382374 - DNA, 487 bp, Homo sapiens; identical to SEQ ID NO: 343681
  chr19:6001747-6002234
  hypo

SEQ ID NO: 382375 - DNA, 449 bp, Homo sapiens; identical to SEQ ID NO: 343682
  chr19:6004120-6004569
  hypo

SEQ ID NO: 382376 - DNA, 328 bp, Homo sapiens; identical to SEQ ID NO: 343683
  chr19:6005196-6005524
  hypo

SEQ ID NO: 382377 - DNA, 462 bp, Homo sapiens; identical to SEQ ID NO: 343684
  chr19:6006891-6007353
  hypo

SEQ ID NO: 382378 - DNA, 393 bp, Homo sapiens; identical to SEQ ID NO: 367865
  chr19:6007912-6008305
  hypo

SEQ ID NO: 382379 - DNA, 384 bp, Homo sapiens; identical to SEQ ID NO: 343686
  chr19:6017220-6017604
  hypo

SEQ ID NO: 382380 - DNA, 126 bp, Homo sapiens; identical to SEQ ID NO: 343687
  chr19:6020529-6020655
  hypo

SEQ ID NO: 382381 - DNA, 111 bp, Homo sapiens; identical to SEQ ID NO: 343688
  chr19:6024069-6024180
  hypo

SEQ ID NO: 382382 - DNA, 510 bp, Homo sapiens; identical to SEQ ID NO: 348931
  chr19:6024679-6025189
  hypo

SEQ ID NO: 382383 - DNA, 127 bp, Homo sapiens; identical to SEQ ID NO: 343690
  chr19:6033089-6033216
  hypo

SEQ ID NO: 382384 - DNA, 313 bp, Homo sapiens; identical to SEQ ID NO: 343691
  chr19:6044422-6044735
  hypo

SEQ ID NO: 382385 - DNA, 653 bp, Homo sapiens; identical to SEQ ID NO: 343692
  chr19:6045007-6045660
  hypo

SEQ ID NO: 382386 - DNA, 124 bp, Homo sapiens; identical to SEQ ID NO: 343693
  chr19:6064123-6064247
  hypo

SEQ ID NO: 382387 - DNA, 257 bp, Homo sapiens; identical to SEQ ID NO: 343694
  chr19:6105459-6105716
  hypo

SEQ ID NO: 382388 - DNA, 202 bp, Homo sapiens; identical to SEQ ID NO: 367873
  chr19:6226077-6226279
  hypo

SEQ ID NO: 382389 - DNA, 125 bp, Homo sapiens; identical to SEQ ID NO: 343696
  chr19:6425753-6425878
  hypo

SEQ ID NO: 382390 - DNA, 323 bp, Homo sapiens; identical to SEQ ID NO: 361399
  chr19:6590881-6591204
  hypo

SEQ ID NO: 382391 - DNA, 97 bp, Homo sapiens; identical to SEQ ID NO: 367876
  chr19:6664841-6664938
  hypo

SEQ ID NO: 382392 - DNA, 186 bp, Homo sapiens; identical to SEQ ID NO: 367877
  chr19:6664968-6665154
  hypo

SEQ ID NO: 382393 - DNA, 352 bp, Homo sapiens; identical to SEQ ID NO: 343699
  chr19:6744359-6744711
  hypo

SEQ ID NO: 382394 - DNA, 384 bp, Homo sapiens; identical to SEQ ID NO: 367878
  chr19:7267319-7267703
  hypo

SEQ ID NO: 382395 - DNA, 206 bp, Homo sapiens; identical to SEQ ID NO: 367879
  chr19:7267747-7267953
  hypo

SEQ ID NO: 382396 - DNA, 1037 bp, Homo sapiens; identical to SEQ ID NO: 335924
  chr19:7459644-7460681
  hypo

SEQ ID NO: 382397 - DNA, 250 bp, Homo sapiens; identical to SEQ ID NO: 343702
  chr19:7493749-7493999
  hypo

SEQ ID NO: 382398 - DNA, 155 bp, Homo sapiens
  chr19:7543311-7543466
  hypo
ttagctccacaacgctggccccggacatacagtctgggacaggtgctgcatctcggataaacggcctgccctctccctgcccccacagtcccacaccctcctggctgtgcctcatgctcccggggactcatctctaacacggccccgtcccaccc

SEQ ID NO: 382399 - DNA, 92 bp, Homo sapiens; identical to SEQ ID NO: 343704
  chr19:7682222-7682314
  hypo

SEQ ID NO: 382400 - DNA, 271 bp, Homo sapiens; identical to SEQ ID NO: 367883
  chr19:7685308-7685579
  hypo

SEQ ID NO: 382401 - DNA, 86 bp, Homo sapiens; identical to SEQ ID NO: 343706
  chr19:7838387-7838473
  hypo

SEQ ID NO: 382402 - DNA, 337 bp, Homo sapiens; identical to SEQ ID NO: 343707
  chr19:7972050-7972387
  hypo

SEQ ID NO: 382403 - DNA, 354 bp, Homo sapiens; identical to SEQ ID NO: 343708
  chr19:7991824-7992178
  hypo

SEQ ID NO: 382404 - DNA, 117 bp, Homo sapiens; identical to SEQ ID NO: 343709
  chr19:7992986-7993103
  hypo

SEQ ID NO: 382405 - DNA, 122 bp, Homo sapiens
  chr19:7997652-7997774
  hypo
cgggagttcggggggaaggccggggaccccgccccaccaccagcctgcgaggtccagggatgactcactcacccagcaagtcggtgaccttgtccgtaagggcccgggatgcccggatgaac

SEQ ID NO: 382406 - DNA, 83 bp, Homo sapiens; identical to SEQ ID NO: 343711
  chr19:8004778-8004861
  hypo

SEQ ID NO: 382407 - DNA, 72 bp, Homo sapiens; identical to SEQ ID NO: 361404
  chr19:8115163-8115235
  hypo

SEQ ID NO: 382408 - DNA, 685 bp, Homo sapiens; identical to SEQ ID NO: 335930
  chr19:8274278-8274963
  hypo

SEQ ID NO: 382409 - DNA, 71 bp, Homo sapiens; identical to SEQ ID NO: 356005
  chr19:8463144-8463215
  hypo

SEQ ID NO: 382410 - DNA, 131 bp, Homo sapiens; identical to SEQ ID NO: 343715
  chr19:8526882-8527013
  hypo

SEQ ID NO: 382411 - DNA, 62 bp, Homo sapiens; identical to SEQ ID NO: 343716
  chr19:8535026-8535088
  hypo

SEQ ID NO: 382412 - DNA, 77 bp, Homo sapiens; identical to SEQ ID NO: 343717
  chr19:8546631-8546708
  hypo

SEQ ID NO: 382413 - DNA, 252 bp, Homo sapiens; identical to SEQ ID NO: 343718
  chr19:8554998-8555250
  hypo

SEQ ID NO: 382414 - DNA, 763 bp, Homo sapiens; identical to SEQ ID NO: 356008
  chr19:8576026-8576789
  hypo

SEQ ID NO: 382415 - DNA, 185 bp, Homo sapiens
  chr19:8606663-8606848
  hypo
cgcacagccactcccctcgagtttgtggcgagatggcagttctgggtaagatggagtggggcccggtcctccctccatccccttggggggttgtagccggaggtccccatgcctgggaccactcactgctcactggtctgcatcagctctatgaggtcggagaagagaacgtctcggttcctctc

SEQ ID NO: 382416 - DNA, 106 bp, Homo sapiens; identical to SEQ ID NO: 356009
  chr19:9129007-9129113
  hypo

SEQ ID NO: 382417 - DNA, 92 bp, Homo sapiens; identical to SEQ ID NO: 356010
  chr19:9129229-9129321
  hypo

SEQ ID NO: 382418 - DNA, 215 bp, Homo sapiens; identical to SEQ ID NO: 343723
  chr19:9960959-9961174
  hypo

SEQ ID NO: 382419 - DNA, 211 bp, Homo sapiens; identical to SEQ ID NO: 347533
  chr19:10197461-10197672
  hypo

SEQ ID NO: 382420 - DNA, 60 bp, Homo sapiens; identical to SEQ ID NO: 348938
  chr19:10370250-10370310
  hypo

SEQ ID NO: 382421 - DNA, 88 bp, Homo sapiens; identical to SEQ ID NO: 348939
  chr19:10370575-10370663
  hypo

SEQ ID NO: 382422 - DNA, 992 bp, Homo sapiens; identical to SEQ ID NO: 335937
  chr19:10381056-10382048
  hypo

SEQ ID NO: 382423 - DNA, 479 bp, Homo sapiens; identical to SEQ ID NO: 343727
  chr19:10395600-10396079
  hypo

SEQ ID NO: 382424 - DNA, 214 bp, Homo sapiens; identical to SEQ ID NO: 205174
  chr19:10400761-10400975
  hypo

SEQ ID NO: 382425 - DNA, 97 bp, Homo sapiens; identical to SEQ ID NO: 367905
  chr19:10464756-10464853
  hypo

SEQ ID NO: 382426 - DNA, 484 bp, Homo sapiens; identical to SEQ ID NO: 352183
  chr19:10529649-10530133
  hypo

SEQ ID NO: 382427 - DNA, 111 bp, Homo sapiens; identical to SEQ ID NO: 352184
  chr19:10530526-10530637
  hypo

SEQ ID NO: 382428 - DNA, 630 bp, Homo sapiens; identical to SEQ ID NO: 352185
  chr19:10530654-10531284
  hypo

SEQ ID NO: 382429 - DNA, 38 bp, Homo sapiens; identical to SEQ ID NO: 361421
  chr19:10616220-10616258
  hypo

SEQ ID NO: 382430 - DNA, 143 bp, Homo sapiens; identical to SEQ ID NO: 356019
  chr19:10665634-10665777
  hypo

SEQ ID NO: 382431 - DNA, 143 bp, Homo sapiens; identical to SEQ ID NO: 356020
  chr19:10665807-10665950
  hypo

SEQ ID NO: 382432 - DNA, 56 bp, Homo sapiens; identical to SEQ ID NO: 343735
  chr19:10687570-10687626
  hypo

SEQ ID NO: 382433 - DNA, 74 bp, Homo sapiens; identical to SEQ ID NO: 343736
  chr19:10687853-10687927
  hypo

SEQ ID NO: 382434 - DNA, 115 bp, Homo sapiens; identical to SEQ ID NO: 352186
  chr19:10691764-10691879
  hypo

SEQ ID NO: 382435 - DNA, 69 bp, Homo sapiens; identical to SEQ ID NO: 356023
  chr19:10817637-10817706
  hypo

SEQ ID NO: 382436 - DNA, 327 bp, Homo sapiens; identical to SEQ ID NO: 367916
  chr19:10823276-10823603
  hypo

SEQ ID NO: 382437 - DNA, 45 bp, Homo sapiens; identical to SEQ ID NO: 219134
  chr19:10823633-10823678
  hypo

SEQ ID NO: 382438 - DNA, 192 bp, Homo sapiens; identical to SEQ ID NO: 367918
  chr19:10823721-10823913
  hypo

SEQ ID NO: 382439 - DNA, 122 bp, Homo sapiens; identical to SEQ ID NO: 356024
  chr19:10872413-10872535
  hypo

SEQ ID NO: 382440 - DNA, 372 bp, Homo sapiens; identical to SEQ ID NO: 343742
  chr19:10874575-10874947
  hypo

SEQ ID NO: 382441 - DNA, 83 bp, Homo sapiens; identical to SEQ ID NO: 343743
  chr19:10875524-10875607
  hypo

SEQ ID NO: 382442 - DNA, 52 bp, Homo sapiens; identical to SEQ ID NO: 343745
  chr19:10941853-10941905
  hypo

SEQ ID NO: 382443 - DNA, 109 bp, Homo sapiens; identical to SEQ ID NO: 343746
  chr19:10949233-10949342
  hypo

SEQ ID NO: 382444 - DNA, 522 bp, Homo sapiens; identical to SEQ ID NO: 343747
  chr19:11001603-11002125
  hypo

SEQ ID NO: 382445 - DNA, 177 bp, Homo sapiens; identical to SEQ ID NO: 356025
  chr19:11003087-11003264
  hypo

SEQ ID NO: 382446 - DNA, 444 bp, Homo sapiens; identical to SEQ ID NO: 367923
  chr19:11004773-11005217
  hypo

SEQ ID NO: 382447 - DNA, 153 bp, Homo sapiens; identical to SEQ ID NO: 356026
  chr19:11008216-11008369
  hypo

SEQ ID NO: 382448 - DNA, 385 bp, Homo sapiens; identical to SEQ ID NO: 356027
  chr19:11030249-11030634
  hypo

SEQ ID NO: 382449 - DNA, 347 bp, Homo sapiens; identical to SEQ ID NO: 356028
  chr19:11128636-11128983
  hypo

SEQ ID NO: 382450 - DNA, 266 bp, Homo sapiens; identical to SEQ ID NO: 356029
  chr19:11129453-11129719
  hypo

SEQ ID NO: 382451 - DNA, 31 bp, Homo sapiens; identical to SEQ ID NO: 356030
  chr19:11129826-11129857
  hypo

SEQ ID NO: 382452 - DNA, 508 bp, Homo sapiens; identical to SEQ ID NO: 335951
  chr19:11144009-11144517
  hypo

SEQ ID NO: 382453 - DNA, 143 bp, Homo sapiens; identical to SEQ ID NO: 343755
  chr19:11152817-11152960
  hypo

SEQ ID NO: 382454 - DNA, 98 bp, Homo sapiens; identical to SEQ ID NO: 343756
  chr19:11172428-11172526
  hypo

SEQ ID NO: 382455 - DNA, 125 bp, Homo sapiens; identical to SEQ ID NO: 343757
  chr19:11172767-11172892
  hypo

SEQ ID NO: 382456 - DNA, 177 bp, Homo sapiens; identical to SEQ ID NO: 335952
  chr19:11199850-11200027
  hypo

SEQ ID NO: 382457 - DNA, 59 bp, Homo sapiens; identical to SEQ ID NO: 367932
  chr19:11285272-11285331
  hypo

SEQ ID NO: 382458 - DNA, 1111 bp, Homo sapiens; identical to SEQ ID NO: 343760
  chr19:11303560-11304671
  hypo

SEQ ID NO: 382459 - DNA, 146 bp, Homo sapiens; identical to SEQ ID NO: 335953
  chr19:11466008-11466154
  hypo

SEQ ID NO: 382460 - DNA, 300 bp, Homo sapiens; identical to SEQ ID NO: 374605
  chr19:11590392-11590692
  hypo

SEQ ID NO: 382461 - DNA, 69 bp, Homo sapiens; identical to SEQ ID NO: 361431
  chr19:11591231-11591300
  hypo

SEQ ID NO: 382462 - DNA, 184 bp, Homo sapiens; identical to SEQ ID NO: 293539
  chr19:11591353-11591537
  hypo

SEQ ID NO: 382463 - DNA, 67 bp, Homo sapiens; identical to SEQ ID NO: 352195
  chr19:11592604-11592671
  hypo

SEQ ID NO: 382464 - DNA, 189 bp, Homo sapiens; identical to SEQ ID NO: 347537
  chr19:11593453-11593642
  hypo

SEQ ID NO: 382465 - DNA, 433 bp, Homo sapiens; identical to SEQ ID NO: 356037
  chr19:11662248-11662681
  hypo

SEQ ID NO: 382466 - DNA, 514 bp, Homo sapiens; identical to SEQ ID NO: 352205
  chr19:12146030-12146544
  hypo

SEQ ID NO: 382467 - DNA, 538 bp, Homo sapiens; identical to SEQ ID NO: 205207
  chr19:12595307-12595845
  hypo

SEQ ID NO: 382468 - DNA, 198 bp, Homo sapiens; identical to SEQ ID NO: 352212
  chr19:12595896-12596094
  hypo

SEQ ID NO: 382469 - DNA, 55 bp, Homo sapiens; identical to SEQ ID NO: 343772
  chr19:12749512-12749567
  hypo

SEQ ID NO: 382470 - DNA, 261 bp, Homo sapiens; identical to SEQ ID NO: 335980
  chr19:12807005-12807266
  hypo

SEQ ID NO: 382471 - DNA, 610 bp, Homo sapiens; identical to SEQ ID NO: 335981
  chr19:12900128-12900738
  hypo

SEQ ID NO: 382472 - DNA, 206 bp, Homo sapiens; identical to SEQ ID NO: 356041
  chr19:12977267-12977473
  hypo

SEQ ID NO: 382473 - DNA, 220 bp, Homo sapiens; identical to SEQ ID NO: 293597
  chr19:12995851-12996071
  hypo

SEQ ID NO: 382474 - DNA, 645 bp, Homo sapiens; identical to SEQ ID NO: 343777
  chr19:13108022-13108667
  hypo

SEQ ID NO: 382475 - DNA, 749 bp, Homo sapiens; identical to SEQ ID NO: 343778
  chr19:13109260-13110009
  hypo

SEQ ID NO: 382476 - DNA, 154 bp, Homo sapiens; identical to SEQ ID NO: 343779
  chr19:13110344-13110498
  hypo

SEQ ID NO: 382477 - DNA, 171 bp, Homo sapiens; identical to SEQ ID NO: 343780
  chr19:13110794-13110965
  hypo

SEQ ID NO: 382478 - DNA, 31 bp, Homo sapiens
  chr19:13112089-13112120
  hypo
cgtgtgtctgcccgggtccctctccatgcct

SEQ ID NO: 382479 - DNA, 156 bp, Homo sapiens; identical to SEQ ID NO: 219196
  chr19:13112293-13112449
  hypo

SEQ ID NO: 382480 - DNA, 182 bp, Homo sapiens; identical to SEQ ID NO: 343782
  chr19:13114040-13114222
  hypo

SEQ ID NO: 382481 - DNA, 153 bp, Homo sapiens
  chr19:13119777-13119930
  hypo
cgctgtagccaggtcctcaccgaggtagatttgcgggggtctcccagtcccagtcccacacactgcctcatccccactcacagtcaacgcccgcaacaccccgccacccgcagtctgtcgcgcagtgacagcctgtcacaagcaccgccgcac

SEQ ID NO: 382482 - DNA, 229 bp, Homo sapiens; identical to SEQ ID NO: 343784
  chr19:13156427-13156656
  hypo

SEQ ID NO: 382483 - DNA, 73 bp, Homo sapiens; identical to SEQ ID NO: 346198
  chr19:13181444-13181517
  hypo

SEQ ID NO: 382484 - DNA, 420 bp, Homo sapiens; identical to SEQ ID NO: 343786
  chr19:13186075-13186495
  hypo

SEQ ID NO: 382485 - DNA, 119 bp, Homo sapiens; identical to SEQ ID NO: 343787
  chr19:13194593-13194712
  hypo

SEQ ID NO: 382486 - DNA, 34 bp, Homo sapiens; identical to SEQ ID NO: 348945
  chr19:13201116-13201150
  hypo

SEQ ID NO: 382487 - DNA, 189 bp, Homo sapiens; identical to SEQ ID NO: 345572
  chr19:13213427-13213616
  hypo

SEQ ID NO: 382488 - DNA, 112 bp, Homo sapiens; identical to SEQ ID NO: 345573
  chr19:13213834-13213946
  hypo

SEQ ID NO: 382489 - DNA, 1257 bp, Homo sapiens; identical to SEQ ID NO: 345574
  chr19:13265772-13267029
  hypo

SEQ ID NO: 382490 - DNA, 203 bp, Homo sapiens; identical to SEQ ID NO: 343791
  chr19:13879644-13879847
  hypo

SEQ ID NO: 382491 - DNA, 263 bp, Homo sapiens; identical to SEQ ID NO: 343792
  chr19:14000130-14000393
  hypo

SEQ ID NO: 382492 - DNA, 150 bp, Homo sapiens; identical to SEQ ID NO: 367960
  chr19:14073146-14073296
  hypo

SEQ ID NO: 382493 - DNA, 1302 bp, Homo sapiens; identical to SEQ ID NO: 335994
  chr19:14073521-14074823
  hypo

SEQ ID NO: 382494 - DNA, 151 bp, Homo sapiens; identical to SEQ ID NO: 356050
  chr19:14181154-14181305
  hypo

SEQ ID NO: 382495 - DNA, 179 bp, Homo sapiens; identical to SEQ ID NO: 356051
  chr19:14181846-14182025
  hypo

SEQ ID NO: 382496 - DNA, 461 bp, Homo sapiens; identical to SEQ ID NO: 343796
  chr19:14263414-14263875
  hypo

SEQ ID NO: 382497 - DNA, 155 bp, Homo sapiens; identical to SEQ ID NO: 343797
  chr19:14522737-14522892
  hypo

SEQ ID NO: 382498 - DNA, 178 bp, Homo sapiens; identical to SEQ ID NO: 348950
  chr19:14663747-14663925
  hypo

SEQ ID NO: 382499 - DNA, 267 bp, Homo sapiens; identical to SEQ ID NO: 346202
  chr19:14664561-14664828
  hypo

SEQ ID NO: 382500 - DNA, 112 bp, Homo sapiens; identical to SEQ ID NO: 343801
  chr19:14815869-14815981
  hypo

SEQ ID NO: 382501 - DNA, 345 bp, Homo sapiens; identical to SEQ ID NO: 343802
  chr19:15073023-15073368
  hypo

SEQ ID NO: 382502 - DNA, 324 bp, Homo sapiens; identical to SEQ ID NO: 335997
  chr19:15235629-15235953
  hypo

SEQ ID NO: 382503 - DNA, 438 bp, Homo sapiens
  chr19:15271811-15272249
  hypo
cgggggccgctcctgcggggagacgggggtccctgggttgagcagctggggtcccggcgccagtggcagcaggaacgaggggcctggaggggcaggtgggggcagccgggcccaatcgaggggcacagccacagggttcagcaggcccaggctgagtacacatcctccagggggctggcgccctagacccgcccggcctgggccaccaagctgtgccagagacactgcagtggcagtggcagctgcatagggcccctcaagggggaagccaccaggggaagcagggggcccaccgaaaggccgcggggagtccagcgagtccacgggcgacagcgtgaccgagctgtcagccagggggcccgggcaggccagcgtcagcttcttgccccgcccccggggcccctgcggccccagccccgccttcccggggggcctcct

SEQ ID NO: 382504 - DNA, 366 bp, Homo sapiens; identical to SEQ ID NO: 343807
  chr19:15302345-15302711
  hypo

SEQ ID NO: 382505 - DNA, 131 bp, Homo sapiens; identical to SEQ ID NO: 356057
  chr19:15364865-15364996
  hypo

SEQ ID NO: 382506 - DNA, 97 bp, Homo sapiens; identical to SEQ ID NO: 343810
  chr19:15382528-15382625
  hypo

SEQ ID NO: 382507 - DNA, 127 bp, Homo sapiens; identical to SEQ ID NO: 343811
  chr19:15421598-15421725
  hypo

SEQ ID NO: 382508 - DNA, 247 bp, Homo sapiens; identical to SEQ ID NO: 356058
  chr19:15512036-15512283
  hypo

SEQ ID NO: 382509 - DNA, 99 bp, Homo sapiens; identical to SEQ ID NO: 343813
  chr19:15531296-15531395
  hypo

SEQ ID NO: 382510 - DNA, 106 bp, Homo sapiens; identical to SEQ ID NO: 352228
  chr19:15695669-15695775
  hypo

SEQ ID NO: 382511 - DNA, 102 bp, Homo sapiens; identical to SEQ ID NO: 205249
  chr19:16187000-16187102
  hypo

SEQ ID NO: 382512 - DNA, 517 bp, Homo sapiens; identical to SEQ ID NO: 205250
  chr19:16187103-16187620
  hypo

SEQ ID NO: 382513 - DNA, 634 bp, Homo sapiens; identical to SEQ ID NO: 345579
  chr19:16187640-16188274
  hypo

SEQ ID NO: 382514 - DNA, 846 bp, Homo sapiens; identical to SEQ ID NO: 367979
  chr19:16232495-16233341
  hypo

SEQ ID NO: 382515 - DNA, 577 bp, Homo sapiens; identical to SEQ ID NO: 343817
  chr19:16238432-16239009
  hypo

SEQ ID NO: 382516 - DNA, 112 bp, Homo sapiens
  chr19:16472546-16472658
  hypo
cggaagggagtggggtggcccggaggcggaggactcaacttacagaggtgaagtctgcaaagcccgaggcagaggccttagaaggtttagctgcagaggaggggacaaatgg

SEQ ID NO: 382517 - DNA, 112 bp, Homo sapiens
  chr19:16472777-16472889
  hypo
ttacaggtgtacttttacctggaaagtttaggagaaaaaaaaaaggagaaagaaagaaatatgagttactcacccggacagagcagaatgctggtgggcacaagcccggggc

SEQ ID NO: 382518 - DNA, 66 bp, Homo sapiens; identical to SEQ ID NO: 356064
  chr19:16638602-16638668
  hypo

SEQ ID NO: 382519 - DNA, 168 bp, Homo sapiens; identical to SEQ ID NO: 343820
  chr19:16661967-16662135
  hypo

SEQ ID NO: 382520 - DNA, 268 bp, Homo sapiens; identical to SEQ ID NO: 367983
  chr19:16681297-16681565
  hypo

SEQ ID NO: 382521 - DNA, 118 bp, Homo sapiens; identical to SEQ ID NO: 356065
  chr19:16756119-16756237
  hypo

SEQ ID NO: 382522 - DNA, 172 bp, Homo sapiens; identical to SEQ ID NO: 343823
  chr19:16763531-16763703
  hypo

SEQ ID NO: 382523 - DNA, 180 bp, Homo sapiens; identical to SEQ ID NO: 367986
  chr19:16766722-16766902
  hypo

SEQ ID NO: 382524 - DNA, 376 bp, Homo sapiens; identical to SEQ ID NO: 343826
  chr19:17172577-17172953
  hypo

SEQ ID NO: 382525 - DNA, 246 bp, Homo sapiens; identical to SEQ ID NO: 356067
  chr19:17264714-17264960
  hypo

SEQ ID NO: 382526 - DNA, 163 bp, Homo sapiens; identical to SEQ ID NO: 367989
  chr19:17362459-17362622
  hypo

SEQ ID NO: 382527 - DNA, 105 bp, Homo sapiens; identical to SEQ ID NO: 361481
  chr19:17392397-17392502
  hypo

SEQ ID NO: 382528 - DNA, 67 bp, Homo sapiens; identical to SEQ ID NO: 343830
  chr19:17397256-17397323
  hypo

SEQ ID NO: 382529 - DNA, 239 bp, Homo sapiens; identical to SEQ ID NO: 205266
  chr19:17716539-17716778
  hypo

SEQ ID NO: 382530 - DNA, 148 bp, Homo sapiens; identical to SEQ ID NO: 367993
  chr19:17757928-17758076
  hypo

SEQ ID NO: 382531 - DNA, 96 bp, Homo sapiens; identical to SEQ ID NO: 367994
  chr19:17758133-17758229
  hypo

SEQ ID NO: 382532 - DNA, 1191 bp, Homo sapiens; identical to SEQ ID NO: 343835
  chr19:17837853-17839044
  hypo

SEQ ID NO: 382533 - DNA, 744 bp, Homo sapiens; identical to SEQ ID NO: 343836
  chr19:18052925-18053669
  hypo

SEQ ID NO: 382534 - DNA, 85 bp, Homo sapiens; identical to SEQ ID NO: 219293
  chr19:18092405-18092490
  hypo

SEQ ID NO: 382535 - DNA, 62 bp, Homo sapiens; identical to SEQ ID NO: 367998
  chr19:18092885-18092947
  hypo

SEQ ID NO: 382536 - DNA, 94 bp, Homo sapiens
  chr19:18103606-18103700
  hypo
cggcatagttttctgaatgaaacaccgcctccggtggtggtgagaggacaggtgtgcccctgaggggctggcacagaaccctcagaggctgggc

SEQ ID NO: 382537 - DNA, 50 bp, Homo sapiens
  chr19:18103924-18103974
  hypo
gtcacagacagggggtacacccggggcatgccaaccccagcctcagaggc

SEQ ID NO: 382538 - DNA, 353 bp, Homo sapiens; identical to SEQ ID NO: 347564
  chr19:18117804-18118157
  hypo

SEQ ID NO: 382539 - DNA, 36 bp, Homo sapiens; identical to SEQ ID NO: 374664
  chr19:18118537-18118573
  hypo

SEQ ID NO: 382540 - DNA, 99 bp, Homo sapiens; identical to SEQ ID NO: 205275
  chr19:18119043-18119142
  hypo

SEQ ID NO: 382541 - DNA, 287 bp, Homo sapiens; identical to SEQ ID NO: 343842
  chr19:18123660-18123947
  hypo

SEQ ID NO: 382542 - DNA, 47 bp, Homo sapiens; identical to SEQ ID NO: 368000
  chr19:18126529-18126576
  hypo

SEQ ID NO: 382543 - DNA, 41 bp, Homo sapiens; identical to SEQ ID NO: 368001
  chr19:18126606-18126647
  hypo

SEQ ID NO: 382544 - DNA, 40 bp, Homo sapiens; identical to SEQ ID NO: 356072
  chr19:18241264-18241304
  hypo

SEQ ID NO: 382545 - DNA, 124 bp, Homo sapiens; identical to SEQ ID NO: 356073
  chr19:18241355-18241479
  hypo

SEQ ID NO: 382546 - DNA, 101 bp, Homo sapiens; identical to SEQ ID NO: 343845
  chr19:18255890-18255991
  hypo

SEQ ID NO: 382547 - DNA, 612 bp, Homo sapiens; identical to SEQ ID NO: 343847
  chr19:18368482-18369094
  hypo

SEQ ID NO: 382548 - DNA, 554 bp, Homo sapiens; identical to SEQ ID NO: 336020
  chr19:18548582-18549136
  hypo

SEQ ID NO: 382549 - DNA, 263 bp, Homo sapiens; identical to SEQ ID NO: 374674
  chr19:18722000-18722263
  hypo

SEQ ID NO: 382550 - DNA, 64 bp, Homo sapiens; identical to SEQ ID NO: 293731
  chr19:18722425-18722489
  hypo

SEQ ID NO: 382551 - DNA, 154 bp, Homo sapiens; identical to SEQ ID NO: 293732
  chr19:18722521-18722675
  hypo

SEQ ID NO: 382552 - DNA, 188 bp, Homo sapiens; identical to SEQ ID NO: 374677
  chr19:18722768-18722956
  hypo

SEQ ID NO: 382553 - DNA, 207 bp, Homo sapiens; identical to SEQ ID NO: 343850
  chr19:18757941-18758148
  hypo

SEQ ID NO: 382554 - DNA, 67 bp, Homo sapiens; identical to SEQ ID NO: 325964
  chr19:18783006-18783073
  hypo

SEQ ID NO: 382555 - DNA, 34 bp, Homo sapiens; identical to SEQ ID NO: 325965
  chr19:18783151-18783185
  hypo

SEQ ID NO: 382556 - DNA, 126 bp, Homo sapiens; identical to SEQ ID NO: 356078
  chr19:18783216-18783342
  hypo

SEQ ID NO: 382557 - DNA, 160 bp, Homo sapiens; identical to SEQ ID NO: 356079
  chr19:18808024-18808184
  hypo

SEQ ID NO: 382558 - DNA, 301 bp, Homo sapiens; identical to SEQ ID NO: 343853
  chr19:18836823-18837124
  hypo

SEQ ID NO: 382559 - DNA, 368 bp, Homo sapiens; identical to SEQ ID NO: 356081
  chr19:18856011-18856379
  hypo

SEQ ID NO: 382560 - DNA, 329 bp, Homo sapiens; identical to SEQ ID NO: 356082
  chr19:18856409-18856738
  hypo

SEQ ID NO: 382561 - DNA, 276 bp, Homo sapiens; identical to SEQ ID NO: 343855
  chr19:18867553-18867829
  hypo

SEQ ID NO: 382562 - DNA, 145 bp, Homo sapiens; identical to SEQ ID NO: 356083
  chr19:18872680-18872825
  hypo

SEQ ID NO: 382563 - DNA, 137 bp, Homo sapiens; identical to SEQ ID NO: 356084
  chr19:18872900-18873037
  hypo

SEQ ID NO: 382564 - DNA, 312 bp, Homo sapiens; identical to SEQ ID NO: 368015
  chr19:18879409-18879721
  hypo

SEQ ID NO: 382565 - DNA, 165 bp, Homo sapiens; identical to SEQ ID NO: 343859
  chr19:18963604-18963769
  hypo

SEQ ID NO: 382566 - DNA, 196 bp, Homo sapiens; identical to SEQ ID NO: 356086
  chr19:18988706-18988902
  hypo

SEQ ID NO: 382567 - DNA, 233 bp, Homo sapiens; identical to SEQ ID NO: 343864
  chr19:19156742-19156975
  hypo

SEQ ID NO: 382568 - DNA, 36 bp, Homo sapiens; identical to SEQ ID NO: 374679
  chr19:19383975-19384011
  hypo

SEQ ID NO: 382569 - DNA, 321 bp, Homo sapiens; identical to SEQ ID NO: 326001
  chr19:19391586-19391907
  hypo

SEQ ID NO: 382570 - DNA, 76 bp, Homo sapiens; identical to SEQ ID NO: 368020
  chr19:19448030-19448106
  hypo

SEQ ID NO: 382571 - DNA, 270 bp, Homo sapiens; identical to SEQ ID NO: 343867
  chr19:19576172-19576442
  hypo

SEQ ID NO: 382572 - DNA, 118 bp, Homo sapiens; identical to SEQ ID NO: 343868
  chr19:19612766-19612884
  hypo

SEQ ID NO: 382573 - DNA, 714 bp, Homo sapiens; identical to SEQ ID NO: 343869
  chr19:19616896-19617610
  hypo

SEQ ID NO: 382574 - DNA, 259 bp, Homo sapiens; identical to SEQ ID NO: 368022
  chr19:19636907-19637166
  hypo

SEQ ID NO: 382575 - DNA, 106 bp, Homo sapiens; identical to SEQ ID NO: 343871
  chr19:19680307-19680413
  hypo

SEQ ID NO: 382576 - DNA, 149 bp, Homo sapiens; identical to SEQ ID NO: 343872
  chr19:19719325-19719474
  hypo

SEQ ID NO: 382577 - DNA, 90 bp, Homo sapiens; identical to SEQ ID NO: 352243
  chr19:19729161-19729251
  hypo

SEQ ID NO: 382578 - DNA, 135 bp, Homo sapiens; identical to SEQ ID NO: 205291
  chr19:19729395-19729530
  hypo

SEQ ID NO: 382579 - DNA, 147 bp, Homo sapiens; identical to SEQ ID NO: 352245
  chr19:19729585-19729732
  hypo

SEQ ID NO: 382580 - DNA, 172 bp, Homo sapiens; identical to SEQ ID NO: 368026
  chr19:19737446-19737618
  hypo

SEQ ID NO: 382581 - DNA, 178 bp, Homo sapiens; identical to SEQ ID NO: 219336
  chr19:19737702-19737880
  hypo

SEQ ID NO: 382582 - DNA, 50 bp, Homo sapiens; identical to SEQ ID NO: 205293
  chr19:19738572-19738622
  hypo

SEQ ID NO: 382583 - DNA, 504 bp, Homo sapiens; identical to SEQ ID NO: 293751
  chr19:19738668-19739172
  hypo

SEQ ID NO: 382584 - DNA, 247 bp, Homo sapiens; identical to SEQ ID NO: 205295
  chr19:19739428-19739675
  hypo

SEQ ID NO: 382585 - DNA, 150 bp, Homo sapiens; identical to SEQ ID NO: 343876
  chr19:19769454-19769604
  hypo

SEQ ID NO: 382586 - DNA, 261 bp, Homo sapiens; identical to SEQ ID NO: 205296
  chr19:19843330-19843591
  hypo

SEQ ID NO: 382587 - DNA, 47 bp, Homo sapiens; identical to SEQ ID NO: 352250
  chr19:19844044-19844091
  hypo

SEQ ID NO: 382588 - DNA, 116 bp, Homo sapiens; identical to SEQ ID NO: 343878
  chr19:19974498-19974614
  hypo

SEQ ID NO: 382589 - DNA, 53 bp, Homo sapiens; identical to SEQ ID NO: 347571
  chr19:20162601-20162654
  hypo

SEQ ID NO: 382590 - DNA, 196 bp, Homo sapiens; identical to SEQ ID NO: 343880
  chr19:22799568-22799764
  hypo

SEQ ID NO: 382591 - DNA, 101 bp, Homo sapiens; identical to SEQ ID NO: 343882
  chr19:28296843-28296944
  hypo

SEQ ID NO: 382592 - DNA, 388 bp, Homo sapiens; identical to SEQ ID NO: 368036
  chr19:28341898-28342286
  hypo

SEQ ID NO: 382593 - DNA, 196 bp, Homo sapiens; identical to SEQ ID NO: 343884
  chr19:29993099-29993295
  hypo

SEQ ID NO: 382594 - DNA, 187 bp, Homo sapiens; identical to SEQ ID NO: 343887
  chr19:30155060-30155247
  hypo

SEQ ID NO: 382595 - DNA, 259 bp, Homo sapiens; identical to SEQ ID NO: 336066
  chr19:30165123-30165382
  hypo

SEQ ID NO: 382596 - DNA, 131 bp, Homo sapiens; identical to SEQ ID NO: 368039
  chr19:30186010-30186141
  hypo

SEQ ID NO: 382597 - DNA, 75 bp, Homo sapiens; identical to SEQ ID NO: 368040
  chr19:30186240-30186315
  hypo

SEQ ID NO: 382598 - DNA, 62 bp, Homo sapiens; identical to SEQ ID NO: 343891
  chr19:30502063-30502125
  hypo

SEQ ID NO: 382599 - DNA, 60 bp, Homo sapiens; identical to SEQ ID NO: 205342
  chr19:30718934-30718994
  hypo

SEQ ID NO: 382600 - DNA, 296 bp, Homo sapiens; identical to SEQ ID NO: 343893
  chr19:30936361-30936657
  hypo

SEQ ID NO: 382601 - DNA, 65 bp, Homo sapiens
  chr19:31217770-31217835
  hypo
cgctgctgagcgcttaacgacaaccagccttctccccagaaccggctgtgagcacagctaagaat

SEQ ID NO: 382602 - DNA, 75 bp, Homo sapiens
  chr19:31217914-31217989
  hypo
tctgcctcagccttgccgagcagggggccaagcgtgtctgagtcagttcagctgctgtaacaaagcaccgtgatc

SEQ ID NO: 382603 - DNA, 184 bp, Homo sapiens; identical to SEQ ID NO: 343895
  chr19:31640397-31640581
  hypo

SEQ ID NO: 382604 - DNA, 411 bp, Homo sapiens; identical to SEQ ID NO: 356102
  chr19:31767664-31768075
  hypo

SEQ ID NO: 382605 - DNA, 701 bp, Homo sapiens; identical to SEQ ID NO: 356103
  chr19:31768105-31768806
  hypo

SEQ ID NO: 382606 - DNA, 573 bp, Homo sapiens; identical to SEQ ID NO: 348963
  chr19:31769887-31770460
  hypo

SEQ ID NO: 382607 - DNA, 157 bp, Homo sapiens; identical to SEQ ID NO: 348964
  chr19:31770490-31770647
  hypo

SEQ ID NO: 382608 - DNA, 58 bp, Homo sapiens; identical to SEQ ID NO: 352276
  chr19:31839508-31839566
  hypo

SEQ ID NO: 382609 - DNA, 233 bp, Homo sapiens; identical to SEQ ID NO: 293818
  chr19:31841177-31841410
  hypo

SEQ ID NO: 382610 - DNA, 325 bp, Homo sapiens; identical to SEQ ID NO: 293819
  chr19:31841583-31841908
  hypo

SEQ ID NO: 382611 - DNA, 136 bp, Homo sapiens; identical to SEQ ID NO: 368052
  chr19:32083463-32083599
  hypo

SEQ ID NO: 382612 - DNA, 32 bp, Homo sapiens; identical to SEQ ID NO: 368053
  chr19:32083759-32083791
  hypo

SEQ ID NO: 382613 - DNA, 93 bp, Homo sapiens; identical to SEQ ID NO: 343900
  chr19:32198266-32198359
  hypo

SEQ ID NO: 382614 - DNA, 164 bp, Homo sapiens; identical to SEQ ID NO: 343901
  chr19:32374316-32374480
  hypo

SEQ ID NO: 382615 - DNA, 267 bp, Homo sapiens; identical to SEQ ID NO: 343903
  chr19:32845502-32845769
  hypo

SEQ ID NO: 382616 - DNA, 38 bp, Homo sapiens; identical to SEQ ID NO: 343904
  chr19:32849484-32849522
  hypo

SEQ ID NO: 382617 - DNA, 158 bp, Homo sapiens; identical to SEQ ID NO: 343905
  chr19:32850587-32850745
  hypo

SEQ ID NO: 382618 - DNA, 143 bp, Homo sapiens; identical to SEQ ID NO: 348968
  chr19:32898192-32898335
  hypo

SEQ ID NO: 382619 - DNA, 219 bp, Homo sapiens; identical to SEQ ID NO: 348969
  chr19:32898490-32898709
  hypo

SEQ ID NO: 382620 - DNA, 75 bp, Homo sapiens; identical to SEQ ID NO: 343907
  chr19:33209600-33209675
  hypo

SEQ ID NO: 382621 - DNA, 84 bp, Homo sapiens; identical to SEQ ID NO: 343908
  chr19:33557659-33557743
  hypo

SEQ ID NO: 382622 - DNA, 74 bp, Homo sapiens; identical to SEQ ID NO: 343909
  chr19:33585141-33585215
  hypo

SEQ ID NO: 382623 - DNA, 298 bp, Homo sapiens; identical to SEQ ID NO: 361536
  chr19:33791861-33792159
  hypo

SEQ ID NO: 382624 - DNA, 1246 bp, Homo sapiens; identical to SEQ ID NO: 205356
  chr19:33792630-33793876
  hypo

SEQ ID NO: 382625 - DNA, 248 bp, Homo sapiens; identical to SEQ ID NO: 356116
  chr19:33996157-33996405
  hypo

SEQ ID NO: 382626 - DNA, 49 bp, Homo sapiens; identical to SEQ ID NO: 352281
  chr19:34114303-34114352
  hypo

SEQ ID NO: 382627 - DNA, 247 bp, Homo sapiens; identical to SEQ ID NO: 343913
  chr19:34177611-34177858
  hypo

SEQ ID NO: 382628 - DNA, 476 bp, Homo sapiens; identical to SEQ ID NO: 343914
  chr19:34303771-34304247
  hypo

SEQ ID NO: 382629 - DNA, 78 bp, Homo sapiens; identical to SEQ ID NO: 346209
  chr19:34949560-34949638
  hypo

SEQ ID NO: 382630 - DNA, 52 bp, Homo sapiens; identical to SEQ ID NO: 343916
  chr19:34963061-34963113
  hypo

SEQ ID NO: 382631 - DNA, 38 bp, Homo sapiens; identical to SEQ ID NO: 361543
  chr19:35168869-35168907
  hypo

SEQ ID NO: 382632 - DNA, 94 bp, Homo sapiens; identical to SEQ ID NO: 205366
  chr19:35168992-35169086
  hypo

SEQ ID NO: 382633 - DNA, 68 bp, Homo sapiens; identical to SEQ ID NO: 336081
  chr19:35169531-35169599
  hypo

SEQ ID NO: 382634 - DNA, 478 bp, Homo sapiens; identical to SEQ ID NO: 352284
  chr19:35454533-35455011
  hypo

SEQ ID NO: 382635 - DNA, 450 bp, Homo sapiens; identical to SEQ ID NO: 356121
  chr19:35551123-35551573
  hypo

SEQ ID NO: 382636 - DNA, 74 bp, Homo sapiens; identical to SEQ ID NO: 368073
  chr19:35589864-35589938
  hypo

SEQ ID NO: 382637 - DNA, 74 bp, Homo sapiens
  chr19:35613702-35613776
  hypo
cgctggggttctgtgcgccatgggcatcatcatcgtcatgagtgagtggaggagctcgggggagcaggcgggcc

SEQ ID NO: 382638 - DNA, 403 bp, Homo sapiens; identical to SEQ ID NO: 368074
  chr19:35617152-35617555
  hypo

SEQ ID NO: 382639 - DNA, 234 bp, Homo sapiens; identical to SEQ ID NO: 336085
  chr19:35738737-35738971
  hypo

SEQ ID NO: 382640 - DNA, 478 bp, Homo sapiens; identical to SEQ ID NO: 343927
  chr19:36042055-36042533
  hypo

SEQ ID NO: 382641 - DNA, 58 bp, Homo sapiens; identical to SEQ ID NO: 356122
  chr19:36222534-36222592
  hypo

SEQ ID NO: 382642 - DNA, 129 bp, Homo sapiens; identical to SEQ ID NO: 361550
  chr19:36347680-36347809
  hypo

SEQ ID NO: 382643 - DNA, 35 bp, Homo sapiens; identical to SEQ ID NO: 361551
  chr19:36348065-36348100
  hypo

SEQ ID NO: 382644 - DNA, 63 bp, Homo sapiens; identical to SEQ ID NO: 352285
  chr19:36478303-36478366
  hypo

SEQ ID NO: 382645 - DNA, 566 bp, Homo sapiens; identical to SEQ ID NO: 343932
  chr19:36592549-36593115
  hypo

SEQ ID NO: 382646 - DNA, 295 bp, Homo sapiens; identical to SEQ ID NO: 345590
  chr19:37568994-37569289
  hypo

SEQ ID NO: 382647 - DNA, 182 bp, Homo sapiens; identical to SEQ ID NO: 345591
  chr19:37569554-37569736
  hypo

SEQ ID NO: 382648 - DNA, 134 bp, Homo sapiens; identical to SEQ ID NO: 368084
  chr19:38481217-38481351
  hypo

SEQ ID NO: 382649 - DNA, 263 bp, Homo sapiens; identical to SEQ ID NO: 293927
  chr19:38719956-38720219
  hypo

SEQ ID NO: 382650 - DNA, 187 bp, Homo sapiens; identical to SEQ ID NO: 352306
  chr19:38720439-38720626
  hypo

SEQ ID NO: 382651 - DNA, 389 bp, Homo sapiens; identical to SEQ ID NO: 347597
  chr19:38754883-38755272
  hypo

SEQ ID NO: 382652 - DNA, 175 bp, Homo sapiens; identical to SEQ ID NO: 347598
  chr19:38755344-38755519
  hypo

SEQ ID NO: 382653 - DNA, 324 bp, Homo sapiens; identical to SEQ ID NO: 348975
  chr19:38781936-38782260
  hypo

SEQ ID NO: 382654 - DNA, 72 bp, Homo sapiens; identical to SEQ ID NO: 356132
  chr19:38828044-38828116
  hypo

SEQ ID NO: 382655 - DNA, 181 bp, Homo sapiens; identical to SEQ ID NO: 361583
  chr19:38852786-38852967
  hypo

SEQ ID NO: 382656 - DNA, 291 bp, Homo sapiens; identical to SEQ ID NO: 361584
  chr19:38853193-38853484
  hypo

SEQ ID NO: 382657 - DNA, 168 bp, Homo sapiens; identical to SEQ ID NO: 368093
  chr19:38873767-38873935
  hypo

SEQ ID NO: 382658 - DNA, 132 bp, Homo sapiens; identical to SEQ ID NO: 356133
  chr19:38901796-38901928
  hypo

SEQ ID NO: 382659 - DNA, 321 bp, Homo sapiens
  chr19:38964045-38964366
  hypo
gcccccctgcctgcgcctgacccaccgcacctggggctcccagaacagcctggtggagatgcttttcctgcggctgagcctcccagtccagttccaccagcacttccgctgcactgcaggggccaccccgctggcacctcctggcctgcagccccccgccgaggacgaggcccgggcggcggaacccgaccctgactacgaaaacctgcgccgctcagctgggggctggagcgaggcagagaacggcaaagaagggactgcgaaggagggcgcccccgggggcaccccgcaggcggggggagaggcgcagcccgccagggc

SEQ ID NO: 382660 - DNA, 62 bp, Homo sapiens; identical to SEQ ID NO: 361585
  chr19:38976252-38976314
  hypo

SEQ ID NO: 382661 - DNA, 37 bp, Homo sapiens; identical to SEQ ID NO: 361586
  chr19:38976790-38976827
  hypo

SEQ ID NO: 382662 - DNA, 257 bp, Homo sapiens; identical to SEQ ID NO: 343952
  chr19:39015907-39016164
  hypo

SEQ ID NO: 382663 - DNA, 101 bp, Homo sapiens
  chr19:39027005-39027106
  hypo
acgccctggttgctgttctcttattaatgtccctaatccgggttaatcgcgtctcctctttgccgtgttgtgacgtgtctaacctttctacccggatcctc

SEQ ID NO: 382664 - DNA, 72 bp, Homo sapiens; identical to SEQ ID NO: 343954
  chr19:39094650-39094722
  hypo

SEQ ID NO: 382665 - DNA, 192 bp, Homo sapiens; identical to SEQ ID NO: 368098
  chr19:39151314-39151506
  hypo

SEQ ID NO: 382666 - DNA, 243 bp, Homo sapiens; identical to SEQ ID NO: 326409
  chr19:39151540-39151783
  hypo

SEQ ID NO: 382667 - DNA, 87 bp, Homo sapiens; identical to SEQ ID NO: 343956
  chr19:39210557-39210644
  hypo

SEQ ID NO: 382668 - DNA, 203 bp, Homo sapiens; identical to SEQ ID NO: 343957
  chr19:39212200-39212403
  hypo

SEQ ID NO: 382669 - DNA, 90 bp, Homo sapiens; identical to SEQ ID NO: 368102
  chr19:39221989-39222079
  hypo

SEQ ID NO: 382670 - DNA, 138 bp, Homo sapiens; identical to SEQ ID NO: 368103
  chr19:39222121-39222259
  hypo

SEQ ID NO: 382671 - DNA, 246 bp, Homo sapiens; identical to SEQ ID NO: 343959
  chr19:39277459-39277705
  hypo

SEQ ID NO: 382672 - DNA, 84 bp, Homo sapiens; identical to SEQ ID NO: 343960
  chr19:39289891-39289975
  hypo

SEQ ID NO: 382673 - DNA, 73 bp, Homo sapiens; identical to SEQ ID NO: 356136
  chr19:39305794-39305867
  hypo

SEQ ID NO: 382674 - DNA, 192 bp, Homo sapiens; identical to SEQ ID NO: 356137
  chr19:39306241-39306433
  hypo

SEQ ID NO: 382675 - DNA, 100 bp, Homo sapiens; identical to SEQ ID NO: 356138
  chr19:39306545-39306645
  hypo

SEQ ID NO: 382676 - DNA, 56 bp, Homo sapiens; identical to SEQ ID NO: 348977
  chr19:39329516-39329572
  hypo

SEQ ID NO: 382677 - DNA, 369 bp, Homo sapiens; identical to SEQ ID NO: 343965
  chr19:39435437-39435806
  hypo

SEQ ID NO: 382678 - DNA, 668 bp, Homo sapiens; identical to SEQ ID NO: 361587
  chr19:39574122-39574790
  hypo

SEQ ID NO: 382679 - DNA, 45 bp, Homo sapiens; identical to SEQ ID NO: 361588
  chr19:39575044-39575089
  hypo

SEQ ID NO: 382680 - DNA, 136 bp, Homo sapiens; identical to SEQ ID NO: 343967
  chr19:39642874-39643010
  hypo

SEQ ID NO: 382681 - DNA, 485 bp, Homo sapiens; identical to SEQ ID NO: 356142
  chr19:39646243-39646728
  hypo

SEQ ID NO: 382682 - DNA, 272 bp, Homo sapiens; identical to SEQ ID NO: 368115
  chr19:39663613-39663885
  hypo

SEQ ID NO: 382683 - DNA, 67 bp, Homo sapiens; identical to SEQ ID NO: 352310
  chr19:39997621-39997688
  hypo

SEQ ID NO: 382684 - DNA, 473 bp, Homo sapiens; identical to SEQ ID NO: 356144
  chr19:40362772-40363245
  hypo

SEQ ID NO: 382685 - DNA, 109 bp, Homo sapiens; identical to SEQ ID NO: 343976
  chr19:40474764-40474873
  hypo

SEQ ID NO: 382686 - DNA, 301 bp, Homo sapiens; identical to SEQ ID NO: 343977
  chr19:40753417-40753718
  hypo

SEQ ID NO: 382687 - DNA, 294 bp, Homo sapiens; identical to SEQ ID NO: 348979
  chr19:40829211-40829505
  hypo

SEQ ID NO: 382688 - DNA, 106 bp, Homo sapiens; identical to SEQ ID NO: 361596
  chr19:40972636-40972742
  hypo

SEQ ID NO: 382689 - DNA, 359 bp, Homo sapiens; identical to SEQ ID NO: 336145
  chr19:41190162-41190521
  hypo

SEQ ID NO: 382690 - DNA, 162 bp, Homo sapiens; identical to SEQ ID NO: 368123
  chr19:41643155-41643317
  hypo

SEQ ID NO: 382691 - DNA, 207 bp, Homo sapiens; identical to SEQ ID NO: 343985
  chr19:41921100-41921307
  hypo

SEQ ID NO: 382692 - DNA, 259 bp, Homo sapiens; identical to SEQ ID NO: 326547
  chr19:42349033-42349292
  hypo

SEQ ID NO: 382693 - DNA, 157 bp, Homo sapiens; identical to SEQ ID NO: 356149
  chr19:42408960-42409117
  hypo

SEQ ID NO: 382694 - DNA, 575 bp, Homo sapiens; identical to SEQ ID NO: 343990
  chr19:42424093-42424668
  hypo

SEQ ID NO: 382695 - DNA, 88 bp, Homo sapiens; identical to SEQ ID NO: 368128
  chr19:42460873-42460961
  hypo

SEQ ID NO: 382696 - DNA, 264 bp, Homo sapiens; identical to SEQ ID NO: 368129
  chr19:42461113-42461377
  hypo

SEQ ID NO: 382697 - DNA, 166 bp, Homo sapiens; identical to SEQ ID NO: 343992
  chr19:42813649-42813815
  hypo

SEQ ID NO: 382698 - DNA, 71 bp, Homo sapiens; identical to SEQ ID NO: 348981
  chr19:42906796-42906867
  hypo

SEQ ID NO: 382699 - DNA, 157 bp, Homo sapiens; identical to SEQ ID NO: 348982
  chr19:42906913-42907070
  hypo

SEQ ID NO: 382700 - DNA, 75 bp, Homo sapiens; identical to SEQ ID NO: 374802
  chr19:42927302-42927377
  hypo

SEQ ID NO: 382701 - DNA, 247 bp, Homo sapiens; identical to SEQ ID NO: 294038
  chr19:42927478-42927725
  hypo

SEQ ID NO: 382702 - DNA, 246 bp, Homo sapiens; identical to SEQ ID NO: 352320
  chr19:43967263-43967509
  hypo

SEQ ID NO: 382703 - DNA, 423 bp, Homo sapiens; identical to SEQ ID NO: 361610
  chr19:43967731-43968154
  hypo

SEQ ID NO: 382704 - DNA, 330 bp, Homo sapiens; identical to SEQ ID NO: 348983
  chr19:44222791-44223121
  hypo

SEQ ID NO: 382705 - DNA, 344 bp, Homo sapiens; identical to SEQ ID NO: 219534
  chr19:44223175-44223519
  hypo

SEQ ID NO: 382706 - DNA, 225 bp, Homo sapiens; identical to SEQ ID NO: 343998
  chr19:44273529-44273754
  hypo

SEQ ID NO: 382707 - DNA, 782 bp, Homo sapiens; identical to SEQ ID NO: 336161
  chr19:45004129-45004911
  hypo

SEQ ID NO: 382708 - DNA, 373 bp, Homo sapiens
  chr19:45314498-45314871
  hypo
cgcttgtctgtacccccgctggtggaggtgatgcgaggaaagtctgtcattctggactgcacccctacgggaacccacgaccattatatgctggaatggttccttgtgagtgcttggggctggggggcctggagtcagggcacagcagggcagcaaaggttcattctctcatcagtgcctaaggcctgtagagatccaccaagccacactccttgttacagatggggtcactgagtcccactgaggggaagggatctgcaaggtgccccgtgtctaggcacagccaagtctagaatgacattgacctgctctggactgcgggctcttgagagagagaacagagacagacatcaagaaagcagaagccaggcac

SEQ ID NO: 382709 - DNA, 300 bp, Homo sapiens; identical to SEQ ID NO: 344001
  chr19:45315421-45315721
  hypo

SEQ ID NO: 382710 - DNA, 292 bp, Homo sapiens; identical to SEQ ID NO: 356156
  chr19:45322448-45322740
  hypo

SEQ ID NO: 382711 - DNA, 1002 bp, Homo sapiens; identical to SEQ ID NO: 352329
  chr19:45349502-45350504
  hypo

SEQ ID NO: 382712 - DNA, 362 bp, Homo sapiens; identical to SEQ ID NO: 344004
  chr19:45377472-45377834
  hypo

SEQ ID NO: 382713 - DNA, 237 bp, Homo sapiens; identical to SEQ ID NO: 356159
  chr19:45567162-45567399
  hypo

SEQ ID NO: 382714 - DNA, 83 bp, Homo sapiens; identical to SEQ ID NO: 356160
  chr19:45570303-45570386
  hypo

SEQ ID NO: 382715 - DNA, 220 bp, Homo sapiens; identical to SEQ ID NO: 356161
  chr19:45570493-45570713
  hypo

SEQ ID NO: 382716 - DNA, 73 bp, Homo sapiens; identical to SEQ ID NO: 219560
  chr19:45574700-45574773
  hypo

SEQ ID NO: 382717 - DNA, 47 bp, Homo sapiens; identical to SEQ ID NO: 219561
  chr19:45574888-45574935
  hypo

SEQ ID NO: 382718 - DNA, 472 bp, Homo sapiens; identical to SEQ ID NO: 219562
  chr19:45575156-45575628
  hypo

SEQ ID NO: 382719 - DNA, 132 bp, Homo sapiens; identical to SEQ ID NO: 346212
  chr19:45603745-45603877
  hypo

SEQ ID NO: 382720 - DNA, 334 bp, Homo sapiens; identical to SEQ ID NO: 346213
  chr19:45603910-45604244
  hypo

SEQ ID NO: 382721 - DNA, 80 bp, Homo sapiens
  chr19:45627047-45627127
  hypo
gagtagcttcttgcagctttgaggccctggcatccctctcccctgcctgcaggcttccttgttcactgggccaagtcccc

SEQ ID NO: 382722 - DNA, 1117 bp, Homo sapiens; identical to SEQ ID NO: 336166
  chr19:45647694-45648811
  hypo

SEQ ID NO: 382723 - DNA, 75 bp, Homo sapiens; identical to SEQ ID NO: 356167
  chr19:45810267-45810342
  hypo

SEQ ID NO: 382724 - DNA, 84 bp, Homo sapiens; identical to SEQ ID NO: 344013
  chr19:45903713-45903797
  hypo

SEQ ID NO: 382725 - DNA, 211 bp, Homo sapiens; identical to SEQ ID NO: 344015
  chr19:46236693-46236904
  hypo

SEQ ID NO: 382726 - DNA, 40 bp, Homo sapiens; identical to SEQ ID NO: 356168
  chr19:46307556-46307596
  hypo

SEQ ID NO: 382727 - DNA, 39 bp, Homo sapiens; identical to SEQ ID NO: 356169
  chr19:46308096-46308135
  hypo

SEQ ID NO: 382728 - DNA, 58 bp, Homo sapiens; identical to SEQ ID NO: 356170
  chr19:46321120-46321178
  hypo

SEQ ID NO: 382729 - DNA, 110 bp, Homo sapiens; identical to SEQ ID NO: 356171
  chr19:46321422-46321532
  hypo

SEQ ID NO: 382730 - DNA, 510 bp, Homo sapiens; identical to SEQ ID NO: 344018
  chr19:46330394-46330904
  hypo

SEQ ID NO: 382731 - DNA, 88 bp, Homo sapiens; identical to SEQ ID NO: 352339
  chr19:46519167-46519255
  hypo

SEQ ID NO: 382732 - DNA, 421 bp, Homo sapiens; identical to SEQ ID NO: 352340
  chr19:46519582-46520003
  hypo

SEQ ID NO: 382733 - DNA, 369 bp, Homo sapiens; identical to SEQ ID NO: 344021
  chr19:46885301-46885670
  hypo

SEQ ID NO: 382734 - DNA, 139 bp, Homo sapiens; identical to SEQ ID NO: 345597
  chr19:46931914-46932053
  hypo

SEQ ID NO: 382735 - DNA, 31 bp, Homo sapiens; identical to SEQ ID NO: 326702
  chr19:47116867-47116898
  hypo

SEQ ID NO: 382736 - DNA, 453 bp, Homo sapiens; identical to SEQ ID NO: 344024
  chr19:47223627-47224080
  hypo

SEQ ID NO: 382737 - DNA, 126 bp, Homo sapiens; identical to SEQ ID NO: 344025
  chr19:47335926-47336052
  hypo

SEQ ID NO: 382738 - DNA, 168 bp, Homo sapiens; identical to SEQ ID NO: 344026
  chr19:47482472-47482640
  hypo

SEQ ID NO: 382739 - DNA, 363 bp, Homo sapiens; identical to SEQ ID NO: 344027
  chr19:47501985-47502348
  hypo

SEQ ID NO: 382740 - DNA, 259 bp, Homo sapiens; identical to SEQ ID NO: 352348
  chr19:47523724-47523983
  hypo

SEQ ID NO: 382741 - DNA, 41 bp, Homo sapiens; identical to SEQ ID NO: 344029
  chr19:47592724-47592765
  hypo

SEQ ID NO: 382742 - DNA, 117 bp, Homo sapiens; identical to SEQ ID NO: 368167
  chr19:47593053-47593170
  hypo

SEQ ID NO: 382743 - DNA, 113 bp, Homo sapiens; identical to SEQ ID NO: 368168
  chr19:47593246-47593359
  hypo

SEQ ID NO: 382744 - DNA, 112 bp, Homo sapiens; identical to SEQ ID NO: 344031
  chr19:47646754-47646866
  hypo

SEQ ID NO: 382745 - DNA, 83 bp, Homo sapiens; identical to SEQ ID NO: 336190
  chr19:47676020-47676103
  hypo

SEQ ID NO: 382746 - DNA, 681 bp, Homo sapiens; identical to SEQ ID NO: 361653
  chr19:47729850-47730531
  hypo

SEQ ID NO: 382747 - DNA, 287 bp, Homo sapiens; identical to SEQ ID NO: 336192
  chr19:47731303-47731590
  hypo

SEQ ID NO: 382748 - DNA, 205 bp, Homo sapiens; identical to SEQ ID NO: 344036
  chr19:47881084-47881289
  hypo

SEQ ID NO: 382749 - DNA, 64 bp, Homo sapiens; identical to SEQ ID NO: 348989
  chr19:47881711-47881775
  hypo

SEQ ID NO: 382750 - DNA, 214 bp, Homo sapiens; identical to SEQ ID NO: 219597
  chr19:48003714-48003928
  hypo

SEQ ID NO: 382751 - DNA, 202 bp, Homo sapiens; identical to SEQ ID NO: 344039
  chr19:48012665-48012867
  hypo

SEQ ID NO: 382752 - DNA, 344 bp, Homo sapiens; identical to SEQ ID NO: 368177
  chr19:48150921-48151265
  hypo

SEQ ID NO: 382753 - DNA, 242 bp, Homo sapiens; identical to SEQ ID NO: 336199
  chr19:48229040-48229282
  hypo

SEQ ID NO: 382754 - DNA, 319 bp, Homo sapiens; identical to SEQ ID NO: 368179
  chr19:48857831-48858150
  hypo

SEQ ID NO: 382755 - DNA, 311 bp, Homo sapiens; identical to SEQ ID NO: 347612
  chr19:48901504-48901815
  hypo

SEQ ID NO: 382756 - DNA, 94 bp, Homo sapiens; identical to SEQ ID NO: 368181
  chr19:49012390-49012484
  hypo

SEQ ID NO: 382757 - DNA, 196 bp, Homo sapiens; identical to SEQ ID NO: 352353
  chr19:49014625-49014821
  hypo

SEQ ID NO: 382758 - DNA, 312 bp, Homo sapiens; identical to SEQ ID NO: 344046
  chr19:49179997-49180309
  hypo

SEQ ID NO: 382759 - DNA, 141 bp, Homo sapiens; identical to SEQ ID NO: 294203
  chr19:49242393-49242534
  hypo

SEQ ID NO: 382760 - DNA, 35 bp, Homo sapiens; identical to SEQ ID NO: 294204
  chr19:49242773-49242808
  hypo

SEQ ID NO: 382761 - DNA, 550 bp, Homo sapiens; identical to SEQ ID NO: 336209
  chr19:49467064-49467614
  hypo

SEQ ID NO: 382762 - DNA, 224 bp, Homo sapiens; identical to SEQ ID NO: 344049
  chr19:49600463-49600687
  hypo

SEQ ID NO: 382763 - DNA, 435 bp, Homo sapiens; identical to SEQ ID NO: 336213
  chr19:49660929-49661364
  hypo

SEQ ID NO: 382764 - DNA, 60 bp, Homo sapiens
  chr19:49703657-49703717
  hypo
tggggcccaagatcgtcatcgtgagcaagatggtgaggcaggggcggggccaaagtgggc

SEQ ID NO: 382765 - DNA, 133 bp, Homo sapiens; identical to SEQ ID NO: 356189
  chr19:49703923-49704056
  hypo

SEQ ID NO: 382766 - DNA, 456 bp, Homo sapiens; identical to SEQ ID NO: 356190
  chr19:49971410-49971866
  hypo

SEQ ID NO: 382767 - DNA, 144 bp, Homo sapiens
  chr19:49997398-49997542
  hypo
ttttttttattaagatgttctatagctgcactaactgatacacaatacacaagccactaaccccacttgtggctcctgagcacttaaatatgaatagagtgaggctgggtgcagtctcacctgttcccggaactttgggaggcc

SEQ ID NO: 382768 - DNA, 121 bp, Homo sapiens; identical to SEQ ID NO: 356191
  chr19:50129561-50129682
  hypo

SEQ ID NO: 382769 - DNA, 57 bp, Homo sapiens; identical to SEQ ID NO: 344057
  chr19:50130742-50130799
  hypo

SEQ ID NO: 382770 - DNA, 81 bp, Homo sapiens; identical to SEQ ID NO: 368192
  chr19:50297054-50297135
  hypo

SEQ ID NO: 382771 - DNA, 253 bp, Homo sapiens; identical to SEQ ID NO: 344060
  chr19:50306223-50306476
  hypo

SEQ ID NO: 382772 - DNA, 78 bp, Homo sapiens; identical to SEQ ID NO: 356193
  chr19:50320125-50320203
  hypo

SEQ ID NO: 382773 - DNA, 158 bp, Homo sapiens; identical to SEQ ID NO: 368195
  chr19:50352994-50353152
  hypo

SEQ ID NO: 382774 - DNA, 180 bp, Homo sapiens; identical to SEQ ID NO: 374877
  chr19:50353790-50353970
  hypo

SEQ ID NO: 382775 - DNA, 67 bp, Homo sapiens; identical to SEQ ID NO: 348994
  chr19:50365162-50365229
  hypo

SEQ ID NO: 382776 - DNA, 218 bp, Homo sapiens; identical to SEQ ID NO: 347617
  chr19:50553779-50553997
  hypo

SEQ ID NO: 382777 - DNA, 112 bp, Homo sapiens
  chr19:50774482-50774594
  hypo
cgctaatgaatgaaatgggaaagccaataagagtttgatccttcccggcctcacccagggcatggacatctctgaaccacaagccgcggggatccgtgggccagccatcccc

SEQ ID NO: 382778 - DNA, 230 bp, Homo sapiens; identical to SEQ ID NO: 344068
  chr19:50784855-50785085
  hypo

SEQ ID NO: 382779 - DNA, 39 bp, Homo sapiens; identical to SEQ ID NO: 356197
  chr19:50789768-50789807
  hypo

SEQ ID NO: 382780 - DNA, 330 bp, Homo sapiens; identical to SEQ ID NO: 336223
  chr19:50828897-50829227
  hypo

SEQ ID NO: 382781 - DNA, 60 bp, Homo sapiens; identical to SEQ ID NO: 294253
  chr19:50832039-50832099
  hypo

SEQ ID NO: 382782 - DNA, 446 bp, Homo sapiens; identical to SEQ ID NO: 352368
  chr19:50833970-50834416
  hypo

SEQ ID NO: 382783 - DNA, 176 bp, Homo sapiens; identical to SEQ ID NO: 346217
  chr19:50919593-50919769
  hypo

SEQ ID NO: 382784 - DNA, 153 bp, Homo sapiens; identical to SEQ ID NO: 352372
  chr19:50979533-50979686
  hypo

SEQ ID NO: 382785 - DNA, 1262 bp, Homo sapiens; identical to SEQ ID NO: 344075
  chr19:51020756-51022018
  hypo

SEQ ID NO: 382786 - DNA, 77 bp, Homo sapiens; identical to SEQ ID NO: 336229
  chr19:51111319-51111396
  hypo

SEQ ID NO: 382787 - DNA, 73 bp, Homo sapiens; identical to SEQ ID NO: 345605
  chr19:51228809-51228882
  hypo

SEQ ID NO: 382788 - DNA, 676 bp, Homo sapiens; identical to SEQ ID NO: 344078
  chr19:51303021-51303697
  hypo

SEQ ID NO: 382789 - DNA, 87 bp, Homo sapiens; identical to SEQ ID NO: 356205
  chr19:51535218-51535305
  hypo

SEQ ID NO: 382790 - DNA, 286 bp, Homo sapiens; identical to SEQ ID NO: 344080
  chr19:51597236-51597522
  hypo

SEQ ID NO: 382791 - DNA, 36 bp, Homo sapiens; identical to SEQ ID NO: 348998
  chr19:52058332-52058368
  hypo

SEQ ID NO: 382792 - DNA, 566 bp, Homo sapiens; identical to SEQ ID NO: 344086
  chr19:52342906-52343472
  hypo

SEQ ID NO: 382793 - DNA, 136 bp, Homo sapiens; identical to SEQ ID NO: 344087
  chr19:52406169-52406305
  hypo

SEQ ID NO: 382794 - DNA, 98 bp, Homo sapiens; identical to SEQ ID NO: 344088
  chr19:52479250-52479348
  hypo

SEQ ID NO: 382795 - DNA, 74 bp, Homo sapiens; identical to SEQ ID NO: 205557
  chr19:52531285-52531359
  hypo

SEQ ID NO: 382796 - DNA, 208 bp, Homo sapiens; identical to SEQ ID NO: 345609
  chr19:52531884-52532092
  hypo

SEQ ID NO: 382797 - DNA, 119 bp, Homo sapiens; identical to SEQ ID NO: 336251
  chr19:52715152-52715271
  hypo

SEQ ID NO: 382798 - DNA, 31 bp, Homo sapiens; identical to SEQ ID NO: 361712
  chr19:53030704-53030735
  hypo

SEQ ID NO: 382799 - DNA, 395 bp, Homo sapiens; identical to SEQ ID NO: 294319
  chr19:53030790-53031185
  hypo

SEQ ID NO: 382800 - DNA, 818 bp, Homo sapiens; identical to SEQ ID NO: 352396
  chr19:53237625-53238443
  hypo

SEQ ID NO: 382801 - DNA, 351 bp, Homo sapiens; identical to SEQ ID NO: 352398
  chr19:53445359-53445710
  hypo

SEQ ID NO: 382802 - DNA, 231 bp, Homo sapiens; identical to SEQ ID NO: 352399
  chr19:53445822-53446053
  hypo

SEQ ID NO: 382803 - DNA, 74 bp, Homo sapiens; identical to SEQ ID NO: 344094
  chr19:53463668-53463742
  hypo

SEQ ID NO: 382804 - DNA, 233 bp, Homo sapiens; identical to SEQ ID NO: 368219
  chr19:53507269-53507502
  hypo

SEQ ID NO: 382805 - DNA, 139 bp, Homo sapiens; identical to SEQ ID NO: 347631
  chr19:53606073-53606212
  hypo

SEQ ID NO: 382806 - DNA, 221 bp, Homo sapiens; identical to SEQ ID NO: 205580
  chr19:53606354-53606575
  hypo

SEQ ID NO: 382807 - DNA, 143 bp, Homo sapiens; identical to SEQ ID NO: 344098
  chr19:53806012-53806155
  hypo

SEQ ID NO: 382808 - DNA, 79 bp, Homo sapiens; identical to SEQ ID NO: 368223
  chr19:54109766-54109845
  hypo

SEQ ID NO: 382809 - DNA, 285 bp, Homo sapiens; identical to SEQ ID NO: 368224
  chr19:54109903-54110188
  hypo

SEQ ID NO: 382810 - DNA, 339 bp, Homo sapiens; identical to SEQ ID NO: 368225
  chr19:54313999-54314338
  hypo

SEQ ID NO: 382811 - DNA, 578 bp, Homo sapiens; identical to SEQ ID NO: 336278
  chr19:54385484-54386062
  hypo

SEQ ID NO: 382812 - DNA, 84 bp, Homo sapiens; identical to SEQ ID NO: 347635
  chr19:54412564-54412648
  hypo

SEQ ID NO: 382813 - DNA, 412 bp, Homo sapiens; identical to SEQ ID NO: 361743
  chr19:55866046-55866458
  hypo

SEQ ID NO: 382814 - DNA, 108 bp, Homo sapiens; identical to SEQ ID NO: 344106
  chr19:55976235-55976343
  hypo

SEQ ID NO: 382815 - DNA, 486 bp, Homo sapiens; identical to SEQ ID NO: 344107
  chr19:55986223-55986709
  hypo

SEQ ID NO: 382816 - DNA, 386 bp, Homo sapiens; identical to SEQ ID NO: 356217
  chr19:55990556-55990942
  hypo

SEQ ID NO: 382817 - DNA, 70 bp, Homo sapiens; identical to SEQ ID NO: 344109
  chr19:56104277-56104347
  hypo

SEQ ID NO: 382818 - DNA, 77 bp, Homo sapiens; identical to SEQ ID NO: 356218
  chr19:56104962-56105039
  hypo

SEQ ID NO: 382819 - DNA, 134 bp, Homo sapiens; identical to SEQ ID NO: 336290
  chr19:56112791-56112925
  hypo

SEQ ID NO: 382820 - DNA, 245 bp, Homo sapiens; identical to SEQ ID NO: 294401
  chr19:56159669-56159914
  hypo

SEQ ID NO: 382821 - DNA, 68 bp, Homo sapiens; identical to SEQ ID NO: 352417
  chr19:56159950-56160018
  hypo

SEQ ID NO: 382822 - DNA, 411 bp, Homo sapiens; identical to SEQ ID NO: 356222
  chr19:56199006-56199417
  hypo

SEQ ID NO: 382823 - DNA, 133 bp, Homo sapiens; identical to SEQ ID NO: 356223
  chr19:56199619-56199752
  hypo

SEQ ID NO: 382824 - DNA, 213 bp, Homo sapiens; identical to SEQ ID NO: 368236
  chr19:56200283-56200496
  hypo

SEQ ID NO: 382825 - DNA, 93 bp, Homo sapiens; identical to SEQ ID NO: 368237
  chr19:56200596-56200689
  hypo

SEQ ID NO: 382826 - DNA, 149 bp, Homo sapiens; identical to SEQ ID NO: 346221
  chr19:56201494-56201643
  hypo

SEQ ID NO: 382827 - DNA, 495 bp, Homo sapiens; identical to SEQ ID NO: 349005
  chr19:56538418-56538913
  hypo

SEQ ID NO: 382828 - DNA, 74 bp, Homo sapiens; identical to SEQ ID NO: 349006
  chr19:56539122-56539196
  hypo

SEQ ID NO: 382829 - DNA, 119 bp, Homo sapiens; identical to SEQ ID NO: 368241
  chr19:56602205-56602324
  hypo

SEQ ID NO: 382830 - DNA, 145 bp, Homo sapiens; identical to SEQ ID NO: 356227
  chr19:56688223-56688368
  hypo

SEQ ID NO: 382831 - DNA, 171 bp, Homo sapiens; identical to SEQ ID NO: 344121
  chr19:56807013-56807184
  hypo

SEQ ID NO: 382832 - DNA, 193 bp, Homo sapiens; identical to SEQ ID NO: 344125
  chr19:56981677-56981870
  hypo

SEQ ID NO: 382833 - DNA, 152 bp, Homo sapiens; identical to SEQ ID NO: 361749
  chr19:56988132-56988284
  hypo

SEQ ID NO: 382834 - DNA, 461 bp, Homo sapiens; identical to SEQ ID NO: 344127
  chr19:57181884-57182345
  hypo

SEQ ID NO: 382835 - DNA, 309 bp, Homo sapiens; identical to SEQ ID NO: 344133
  chr19:58556364-58556673
  hypo

SEQ ID NO: 382836 - DNA, 121 bp, Homo sapiens; identical to SEQ ID NO: 344134
  chr19:58556965-58557086
  hypo

SEQ ID NO: 382837 - DNA, 168 bp, Homo sapiens; identical to SEQ ID NO: 361778
  chr19:58665973-58666141
  hypo

SEQ ID NO: 382838 - DNA, 224 bp, Homo sapiens; identical to SEQ ID NO: 205646
  chr19:58666733-58666957
  hypo

SEQ ID NO: 382839 - DNA, 343 bp, Homo sapiens; identical to SEQ ID NO: 352436
  chr19:58694209-58694552
  hypo

SEQ ID NO: 382840 - DNA, 788 bp, Homo sapiens; identical to SEQ ID NO: 344139
  chr19:58830548-58831336
  hypo

SEQ ID NO: 382841 - DNA, 91 bp, Homo sapiens; identical to SEQ ID NO: 344141
  chr19:58878569-58878660
  hypo

SEQ ID NO: 382842 - DNA, 53 bp, Homo sapiens; identical to SEQ ID NO: 349008
  chr19:58964127-58964180
  hypo

SEQ ID NO: 382843 - DNA, 162 bp, Homo sapiens
  chr19:59003731-59003893
  hypo
cgtcaccatctgagccatcgctacagcatctgcctgtatttctcacatgcttacatgaaaggcattatttattcacttggacaacaaaggctgcttttcgtgagagtcactggtcctcccatgagggcatccaccgatacttcaagaatccttcctggggcc

SEQ ID NO: 382844 - DNA, 404 bp, Homo sapiens; identical to SEQ ID NO: 361782
  chr19:59010484-59010888
  hypo

SEQ ID NO: 382845 - DNA, 48 bp, Homo sapiens; identical to SEQ ID NO: 361783
  chr19:59010962-59011010
  hypo

SEQ ID NO: 382846 - DNA, 236 bp, Homo sapiens; identical to SEQ ID NO: 344146
  chr20:371973-372209
  hypo

SEQ ID NO: 382847 - DNA, 93 bp, Homo sapiens; identical to SEQ ID NO: 356232
  chr20:400189-400282
  hypo

SEQ ID NO: 382848 - DNA, 101 bp, Homo sapiens; identical to SEQ ID NO: 356233
  chr20:400915-401016
  hypo

SEQ ID NO: 382849 - DNA, 56 bp, Homo sapiens
  chr20:688354-688410
  hypo
ctgggcattgccgaacacgcgtcctttttttcttttcttctttcattattatgatc

SEQ ID NO: 382850 - DNA, 46 bp, Homo sapiens; identical to SEQ ID NO: 375003
  chr20:708554-708600
  hypo

SEQ ID NO: 382851 - DNA, 51 bp, Homo sapiens; identical to SEQ ID NO: 205657
  chr20:708851-708902
  hypo

SEQ ID NO: 382852 - DNA, 460 bp, Homo sapiens; identical to SEQ ID NO: 375005
  chr20:708944-709404
  hypo

SEQ ID NO: 382853 - DNA, 172 bp, Homo sapiens; identical to SEQ ID NO: 344154
  chr20:926459-926631
  hypo

SEQ ID NO: 382854 - DNA, 139 bp, Homo sapiens; identical to SEQ ID NO: 219814
  chr20:2820587-2820726
  hypo

SEQ ID NO: 382855 - DNA, 143 bp, Homo sapiens; identical to SEQ ID NO: 294514
  chr20:2820861-2821004
  hypo

SEQ ID NO: 382856 - DNA, 265 bp, Homo sapiens; identical to SEQ ID NO: 219817
  chr20:3202153-3202418
  hypo

SEQ ID NO: 382857 - DNA, 283 bp, Homo sapiens; identical to SEQ ID NO: 352445
  chr20:3220266-3220549
  hypo

SEQ ID NO: 382858 - DNA, 125 bp, Homo sapiens; identical to SEQ ID NO: 352446
  chr20:3229128-3229253
  hypo

SEQ ID NO: 382859 - DNA, 154 bp, Homo sapiens; identical to SEQ ID NO: 205676
  chr20:3229326-3229480
  hypo

SEQ ID NO: 382860 - DNA, 31 bp, Homo sapiens; identical to SEQ ID NO: 205677
  chr20:3229526-3229557
  hypo

SEQ ID NO: 382861 - DNA, 144 bp, Homo sapiens; identical to SEQ ID NO: 352449
  chr20:3229659-3229803
  hypo

SEQ ID NO: 382862 - DNA, 414 bp, Homo sapiens; identical to SEQ ID NO: 347652
  chr20:4804008-4804422
  hypo

SEQ ID NO: 382863 - DNA, 63 bp, Homo sapiens; identical to SEQ ID NO: 361804
  chr20:5297756-5297819
  hypo

SEQ ID NO: 382864 - DNA, 330 bp, Homo sapiens; identical to SEQ ID NO: 361806
  chr20:5892269-5892599
  hypo

SEQ ID NO: 382865 - DNA, 93 bp, Homo sapiens; identical to SEQ ID NO: 356243
  chr20:6022704-6022797
  hypo

SEQ ID NO: 382866 - DNA, 427 bp, Homo sapiens; identical to SEQ ID NO: 352453
  chr20:6747996-6748423
  hypo

SEQ ID NO: 382867 - DNA, 293 bp, Homo sapiens; identical to SEQ ID NO: 294559
  chr20:6748470-6748763
  hypo

SEQ ID NO: 382868 - DNA, 587 bp, Homo sapiens; identical to SEQ ID NO: 361809
  chr20:6749063-6749650
  hypo

SEQ ID NO: 382869 - DNA, 126 bp, Homo sapiens; identical to SEQ ID NO: 361810
  chr20:9048369-9048495
  hypo

SEQ ID NO: 382870 - DNA, 631 bp, Homo sapiens; identical to SEQ ID NO: 294562
  chr20:9048532-9049163
  hypo

SEQ ID NO: 382871 - DNA, 229 bp, Homo sapiens; identical to SEQ ID NO: 294563
  chr20:9049238-9049467
  hypo

SEQ ID NO: 382872 - DNA, 164 bp, Homo sapiens; identical to SEQ ID NO: 344170
  chr20:10687213-10687377
  hypo

SEQ ID NO: 382873 - DNA, 127 bp, Homo sapiens; identical to SEQ ID NO: 344171
  chr20:13417399-13417526
  hypo

SEQ ID NO: 382874 - DNA, 79 bp, Homo sapiens; identical to SEQ ID NO: 361823
  chr20:18039568-18039647
  hypo

SEQ ID NO: 382875 - DNA, 94 bp, Homo sapiens; identical to SEQ ID NO: 361824
  chr20:18039936-18040030
  hypo

SEQ ID NO: 382876 - DNA, 267 bp, Homo sapiens; identical to SEQ ID NO: 294620
  chr20:19193616-19193883
  hypo

SEQ ID NO: 382877 - DNA, 143 bp, Homo sapiens; identical to SEQ ID NO: 344175
  chr20:19497049-19497192
  hypo

SEQ ID NO: 382878 - DNA, 225 bp, Homo sapiens; identical to SEQ ID NO: 349013
  chr20:20376606-20376831
  hypo

SEQ ID NO: 382879 - DNA, 218 bp, Homo sapiens; identical to SEQ ID NO: 219867
  chr20:20376973-20377191
  hypo

SEQ ID NO: 382880 - DNA, 221 bp, Homo sapiens; identical to SEQ ID NO: 205736
  chr20:21686742-21686963
  hypo

SEQ ID NO: 382881 - DNA, 200 bp, Homo sapiens; identical to SEQ ID NO: 375065
  chr20:22563363-22563563
  hypo

SEQ ID NO: 382882 - DNA, 34 bp, Homo sapiens; identical to SEQ ID NO: 205743
  chr20:22563602-22563636
  hypo

SEQ ID NO: 382883 - DNA, 101 bp, Homo sapiens; identical to SEQ ID NO: 205744
  chr20:22563663-22563764
  hypo

SEQ ID NO: 382884 - DNA, 360 bp, Homo sapiens; identical to SEQ ID NO: 205745
  chr20:22563794-22564154
  hypo

SEQ ID NO: 382885 - DNA, 982 bp, Homo sapiens; identical to SEQ ID NO: 361843
  chr20:22564265-22565247
  hypo

SEQ ID NO: 382886 - DNA, 264 bp, Homo sapiens; identical to SEQ ID NO: 344182
  chr20:23015064-23015328
  hypo

SEQ ID NO: 382887 - DNA, 70 bp, Homo sapiens
  chr20:23092311-23092381
  hypo
cggggcgaaccaaagatgggagaggagcatcagtgcccccctccccatcaccacattagaatcctgcggg

SEQ ID NO: 382888 - DNA, 118 bp, Homo sapiens
  chr20:23092426-23092544
  hypo
cataaggaccctgagacccagggccactagggtgaggcgacagggcagggcctgatgcacctgtcgaaatccacttctagctcccaccctgcccccagagacatgcgccccatgggcc

SEQ ID NO: 382889 - DNA, 264 bp, Homo sapiens; identical to SEQ ID NO: 352468
  chr20:23617984-23618248
  hypo

SEQ ID NO: 382890 - DNA, 68 bp, Homo sapiens; identical to SEQ ID NO: 352469
  chr20:23618645-23618713
  hypo

SEQ ID NO: 382891 - DNA, 112 bp, Homo sapiens; identical to SEQ ID NO: 219885
  chr20:23969320-23969432
  hypo

SEQ ID NO: 382892 - DNA, 439 bp, Homo sapiens; identical to SEQ ID NO: 344188
  chr20:25012790-25013229
  hypo

SEQ ID NO: 382893 - DNA, 67 bp, Homo sapiens; identical to SEQ ID NO: 368291
  chr20:25223074-25223141
  hypo

SEQ ID NO: 382894 - DNA, 297 bp, Homo sapiens; identical to SEQ ID NO: 344190
  chr20:25231684-25231981
  hypo

SEQ ID NO: 382895 - DNA, 237 bp, Homo sapiens; identical to SEQ ID NO: 356253
  chr20:25320332-25320569
  hypo

SEQ ID NO: 382896 - DNA, 116 bp, Homo sapiens; identical to SEQ ID NO: 368294
  chr20:29873935-29874051
  hypo

SEQ ID NO: 382897 - DNA, 113 bp, Homo sapiens; identical to SEQ ID NO: 344193
  chr20:30139516-30139629
  hypo

SEQ ID NO: 382898 - DNA, 78 bp, Homo sapiens; identical to SEQ ID NO: 368296
  chr20:30153987-30154065
  hypo

SEQ ID NO: 382899 - DNA, 1002 bp, Homo sapiens; identical to SEQ ID NO: 345628
  chr20:30192854-30193856
  hypo

SEQ ID NO: 382900 - DNA, 189 bp, Homo sapiens; identical to SEQ ID NO: 345629
  chr20:30193992-30194181
  hypo

SEQ ID NO: 382901 - DNA, 482 bp, Homo sapiens; identical to SEQ ID NO: 352476
  chr20:30555404-30555886
  hypo

SEQ ID NO: 382902 - DNA, 248 bp, Homo sapiens; identical to SEQ ID NO: 352477
  chr20:30556403-30556651
  hypo

SEQ ID NO: 382903 - DNA, 553 bp, Homo sapiens; identical to SEQ ID NO: 327513
  chr20:30584500-30585053
  hypo

SEQ ID NO: 382904 - DNA, 106 bp, Homo sapiens
  chr20:30585104-30585210
  hypo
cgcaagaagtacccggcctgggatgctcattttattgaccgccggctccggaagaccatcctggcactggagtactcctcacctgccacgccccggttgcagtacc

SEQ ID NO: 382905 - DNA, 73 bp, Homo sapiens; identical to SEQ ID NO: 368301
  chr20:30770391-30770464
  hypo

SEQ ID NO: 382906 - DNA, 199 bp, Homo sapiens; identical to SEQ ID NO: 368302
  chr20:30770494-30770693
  hypo

SEQ ID NO: 382907 - DNA, 270 bp, Homo sapiens; identical to SEQ ID NO: 356259
  chr20:30772699-30772969
  hypo

SEQ ID NO: 382908 - DNA, 31 bp, Homo sapiens; identical to SEQ ID NO: 327522
  chr20:30864850-30864881
  hypo

SEQ ID NO: 382909 - DNA, 94 bp, Homo sapiens; identical to SEQ ID NO: 361861
  chr20:30946060-30946154
  hypo

SEQ ID NO: 382910 - DNA, 112 bp, Homo sapiens; identical to SEQ ID NO: 205764
  chr20:30946218-30946330
  hypo

SEQ ID NO: 382911 - DNA, 285 bp, Homo sapiens; identical to SEQ ID NO: 361863
  chr20:30946345-30946630
  hypo

SEQ ID NO: 382912 - DNA, 35 bp, Homo sapiens; identical to SEQ ID NO: 344204
  chr20:30996055-30996090
  hypo

SEQ ID NO: 382913 - DNA, 155 bp, Homo sapiens; identical to SEQ ID NO: 344206
  chr20:31334709-31334864
  hypo

SEQ ID NO: 382914 - DNA, 145 bp, Homo sapiens; identical to SEQ ID NO: 344207
  chr20:32250068-32250213
  hypo

SEQ ID NO: 382915 - DNA, 145 bp, Homo sapiens; identical to SEQ ID NO: 356261
  chr20:32301652-32301797
  hypo

SEQ ID NO: 382916 - DNA, 207 bp, Homo sapiens; identical to SEQ ID NO: 344209
  chr20:32332893-32333100
  hypo

SEQ ID NO: 382917 - DNA, 412 bp, Homo sapiens; identical to SEQ ID NO: 368312
  chr20:32378478-32378890
  hypo

SEQ ID NO: 382918 - DNA, 342 bp, Homo sapiens; identical to SEQ ID NO: 327571
  chr20:32378966-32379308
  hypo

SEQ ID NO: 382919 - DNA, 87 bp, Homo sapiens; identical to SEQ ID NO: 368314
  chr20:32379338-32379425
  hypo

SEQ ID NO: 382920 - DNA, 237 bp, Homo sapiens; identical to SEQ ID NO: 344211
  chr20:32436267-32436504
  hypo

SEQ ID NO: 382921 - DNA, 71 bp, Homo sapiens; identical to SEQ ID NO: 344213
  chr20:32669113-32669184
  hypo

SEQ ID NO: 382922 - DNA, 31 bp, Homo sapiens; identical to SEQ ID NO: 368317
  chr20:32677630-32677661
  hypo

SEQ ID NO: 382923 - DNA, 205 bp, Homo sapiens; identical to SEQ ID NO: 368318
  chr20:32677691-32677896
  hypo

SEQ ID NO: 382924 - DNA, 215 bp, Homo sapiens
  chr20:33131642-33131857
  hypo
cgtttcagggaagtggcagcttctcgggaggtgccgcagctgccatctcccgtcagcactcatgcctccgcctcagccctggccacggctccctggaattctgatcctcctctgtgagctggtattgctgtttctccaaaaattaaaaatgctcaaaggattataggttttctcctctttcgtatgtttggctctgagacactgcatgttggcac

SEQ ID NO: 382925 - DNA, 134 bp, Homo sapiens; identical to SEQ ID NO: 344217
  chr20:33183817-33183951
  hypo

SEQ ID NO: 382926 - DNA, 86 bp, Homo sapiens; identical to SEQ ID NO: 344218
  chr20:33876250-33876336
  hypo

SEQ ID NO: 382927 - DNA, 164 bp, Homo sapiens; identical to SEQ ID NO: 368321
  chr20:33879796-33879960
  hypo

SEQ ID NO: 382928 - DNA, 131 bp, Homo sapiens; identical to SEQ ID NO: 368322
  chr20:33880280-33880411
  hypo

SEQ ID NO: 382929 - DNA, 72 bp, Homo sapiens; identical to SEQ ID NO: 356267
  chr20:34147099-34147171
  hypo

SEQ ID NO: 382930 - DNA, 131 bp, Homo sapiens; identical to SEQ ID NO: 356268
  chr20:34147230-34147361
  hypo

SEQ ID NO: 382931 - DNA, 534 bp, Homo sapiens; identical to SEQ ID NO: 336423
  chr20:34652354-34652888
  hypo

SEQ ID NO: 382932 - DNA, 431 bp, Homo sapiens; identical to SEQ ID NO: 356270
  chr20:35155295-35155726
  hypo

SEQ ID NO: 382933 - DNA, 87 bp, Homo sapiens; identical to SEQ ID NO: 344224
  chr20:35441137-35441224
  hypo

SEQ ID NO: 382934 - DNA, 435 bp, Homo sapiens; identical to SEQ ID NO: 346229
  chr20:35443740-35444175
  hypo

SEQ ID NO: 382935 - DNA, 381 bp, Homo sapiens; identical to SEQ ID NO: 346230
  chr20:35444205-35444586
  hypo

SEQ ID NO: 382936 - DNA, 64 bp, Homo sapiens; identical to SEQ ID NO: 344226
  chr20:35929641-35929705
  hypo

SEQ ID NO: 382937 - DNA, 538 bp, Homo sapiens; identical to SEQ ID NO: 356273
  chr20:36760841-36761379
  hypo

SEQ ID NO: 382938 - DNA, 116 bp, Homo sapiens; identical to SEQ ID NO: 349021
  chr20:36764040-36764156
  hypo

SEQ ID NO: 382939 - DNA, 124 bp, Homo sapiens; identical to SEQ ID NO: 349022
  chr20:36764186-36764310
  hypo

SEQ ID NO: 382940 - DNA, 186 bp, Homo sapiens; identical to SEQ ID NO: 344229
  chr20:36765901-36766087
  hypo

SEQ ID NO: 382941 - DNA, 278 bp, Homo sapiens; identical to SEQ ID NO: 344230
  chr20:36766589-36766867
  hypo

SEQ ID NO: 382942 - DNA, 186 bp, Homo sapiens; identical to SEQ ID NO: 368335
  chr20:36767690-36767876
  hypo

SEQ ID NO: 382943 - DNA, 109 bp, Homo sapiens; identical to SEQ ID NO: 368336
  chr20:36767917-36768026
  hypo

SEQ ID NO: 382944 - DNA, 161 bp, Homo sapiens; identical to SEQ ID NO: 344232
  chr20:36802873-36803034
  hypo

SEQ ID NO: 382945 - DNA, 148 bp, Homo sapiens; identical to SEQ ID NO: 344233
  chr20:37145099-37145247
  hypo

SEQ ID NO: 382946 - DNA, 62 bp, Homo sapiens; identical to SEQ ID NO: 345634
  chr20:37274639-37274701
  hypo

SEQ ID NO: 382947 - DNA, 546 bp, Homo sapiens; identical to SEQ ID NO: 205802
  chr20:37274731-37275277
  hypo

SEQ ID NO: 382948 - DNA, 100 bp, Homo sapiens; identical to SEQ ID NO: 352489
  chr20:37303401-37303501
  hypo

SEQ ID NO: 382949 - DNA, 389 bp, Homo sapiens; identical to SEQ ID NO: 345636
  chr20:37433723-37434112
  hypo

SEQ ID NO: 382950 - DNA, 106 bp, Homo sapiens; identical to SEQ ID NO: 344238
  chr20:37596775-37596881
  hypo

SEQ ID NO: 382951 - DNA, 110 bp, Homo sapiens; identical to SEQ ID NO: 344239
  chr20:37657005-37657115
  hypo

SEQ ID NO: 382952 - DNA, 138 bp, Homo sapiens; identical to SEQ ID NO: 344240
  chr20:37673303-37673441
  hypo

SEQ ID NO: 382953 - DNA, 523 bp, Homo sapiens; identical to SEQ ID NO: 344242
  chr20:39990769-39991292
  hypo

SEQ ID NO: 382954 - DNA, 233 bp, Homo sapiens; identical to SEQ ID NO: 356284
  chr20:40020340-40020573
  hypo

SEQ ID NO: 382955 - DNA, 202 bp, Homo sapiens; identical to SEQ ID NO: 375108
  chr20:40321525-40321727
  hypo

SEQ ID NO: 382956 - DNA, 172 bp, Homo sapiens; identical to SEQ ID NO: 346234
  chr20:42088459-42088631
  hypo

SEQ ID NO: 382957 - DNA, 184 bp, Homo sapiens; identical to SEQ ID NO: 368348
  chr20:42804035-42804219
  hypo

SEQ ID NO: 382958 - DNA, 55 bp, Homo sapiens; identical to SEQ ID NO: 368349
  chr20:42833281-42833336
  hypo

SEQ ID NO: 382959 - DNA, 95 bp, Homo sapiens; identical to SEQ ID NO: 356286
  chr20:42931339-42931434
  hypo

SEQ ID NO: 382960 - DNA, 51 bp, Homo sapiens
  chr20:43926539-43926590
  hypo
cgagagagatgcgctcacctggacagatgctgcctctgaggttctccagca

SEQ ID NO: 382961 - DNA, 215 bp, Homo sapiens; identical to SEQ ID NO: 347677
  chr20:43976984-43977199
  hypo

SEQ ID NO: 382962 - DNA, 63 bp, Homo sapiens; identical to SEQ ID NO: 368352
  chr20:44602364-44602427
  hypo

SEQ ID NO: 382963 - DNA, 578 bp, Homo sapiens; identical to SEQ ID NO: 352497
  chr20:44642532-44643110
  hypo

SEQ ID NO: 382964 - DNA, 66 bp, Homo sapiens; identical to SEQ ID NO: 352499
  chr20:44937643-44937709
  hypo

SEQ ID NO: 382965 - DNA, 191 bp, Homo sapiens; identical to SEQ ID NO: 368355
  chr20:45833348-45833539
  hypo

SEQ ID NO: 382966 - DNA, 455 bp, Homo sapiens; identical to SEQ ID NO: 344262
  chr20:46234984-46235439
  hypo

SEQ ID NO: 382967 - DNA, 166 bp, Homo sapiens; identical to SEQ ID NO: 368357
  chr20:46365433-46365599
  hypo

SEQ ID NO: 382968 - DNA, 125 bp, Homo sapiens; identical to SEQ ID NO: 368358
  chr20:46365635-46365760
  hypo

SEQ ID NO: 382969 - DNA, 93 bp, Homo sapiens; identical to SEQ ID NO: 356291
  chr20:46823583-46823676
  hypo

SEQ ID NO: 382970 - DNA, 129 bp, Homo sapiens; identical to SEQ ID NO: 344268
  chr20:47688836-47688965
  hypo

SEQ ID NO: 382971 - DNA, 51 bp, Homo sapiens; identical to SEQ ID NO: 344269
  chr20:47713222-47713273
  hypo

SEQ ID NO: 382972 - DNA, 67 bp, Homo sapiens; identical to SEQ ID NO: 344270
  chr20:47765244-47765311
  hypo

SEQ ID NO: 382973 - DNA, 50 bp, Homo sapiens; identical to SEQ ID NO: 356294
  chr20:47766299-47766349
  hypo

SEQ ID NO: 382974 - DNA, 36 bp, Homo sapiens; identical to SEQ ID NO: 349028
  chr20:47837206-47837242
  hypo

SEQ ID NO: 382975 - DNA, 50 bp, Homo sapiens; identical to SEQ ID NO: 352500
  chr20:47934774-47934824
  hypo

SEQ ID NO: 382976 - DNA, 540 bp, Homo sapiens; identical to SEQ ID NO: 375128
  chr20:48100505-48101045
  hypo

SEQ ID NO: 382977 - DNA, 72 bp, Homo sapiens; identical to SEQ ID NO: 344276
  chr20:48350345-48350417
  hypo

SEQ ID NO: 382978 - DNA, 522 bp, Homo sapiens; identical to SEQ ID NO: 346235
  chr20:48498752-48499274
  hypo

SEQ ID NO: 382979 - DNA, 343 bp, Homo sapiens; identical to SEQ ID NO: 356298
  chr20:48504339-48504682
  hypo

SEQ ID NO: 382980 - DNA, 245 bp, Homo sapiens; identical to SEQ ID NO: 356299
  chr20:48524519-48524764
  hypo

SEQ ID NO: 382981 - DNA, 373 bp, Homo sapiens; identical to SEQ ID NO: 356300
  chr20:48524818-48525191
  hypo

SEQ ID NO: 382982 - DNA, 982 bp, Homo sapiens; identical to SEQ ID NO: 336464
  chr20:48598700-48599682
  hypo

SEQ ID NO: 382983 - DNA, 164 bp, Homo sapiens; identical to SEQ ID NO: 345639
  chr20:48771177-48771341
  hypo

SEQ ID NO: 382984 - DNA, 158 bp, Homo sapiens; identical to SEQ ID NO: 344282
  chr20:49178954-49179112
  hypo

SEQ ID NO: 382985 - DNA, 175 bp, Homo sapiens; identical to SEQ ID NO: 344283
  chr20:49197887-49198062
  hypo

SEQ ID NO: 382986 - DNA, 242 bp, Homo sapiens; identical to SEQ ID NO: 356304
  chr20:49206898-49207140
  hypo

SEQ ID NO: 382987 - DNA, 62 bp, Homo sapiens; identical to SEQ ID NO: 349032
  chr20:49218808-49218870
  hypo

SEQ ID NO: 382988 - DNA, 477 bp, Homo sapiens; identical to SEQ ID NO: 368376
  chr20:49223746-49224223
  hypo

SEQ ID NO: 382989 - DNA, 581 bp, Homo sapiens; identical to SEQ ID NO: 347682
  chr20:49224897-49225478
  hypo

SEQ ID NO: 382990 - DNA, 305 bp, Homo sapiens; identical to SEQ ID NO: 336468
  chr20:49225991-49226296
  hypo

SEQ ID NO: 382991 - DNA, 159 bp, Homo sapiens; identical to SEQ ID NO: 356308
  chr20:49236444-49236603
  hypo

SEQ ID NO: 382992 - DNA, 146 bp, Homo sapiens; identical to SEQ ID NO: 344290
  chr20:49240816-49240962
  hypo

SEQ ID NO: 382993 - DNA, 141 bp, Homo sapiens; identical to SEQ ID NO: 344291
  chr20:49247308-49247449
  hypo

SEQ ID NO: 382994 - DNA, 70 bp, Homo sapiens; identical to SEQ ID NO: 344293
  chr20:49284107-49284177
  hypo

SEQ ID NO: 382995 - DNA, 295 bp, Homo sapiens; identical to SEQ ID NO: 344297
  chr20:50208595-50208890
  hypo

SEQ ID NO: 382996 - DNA, 570 bp, Homo sapiens; identical to SEQ ID NO: 345641
  chr20:50383675-50384245
  hypo

SEQ ID NO: 382997 - DNA, 243 bp, Homo sapiens; identical to SEQ ID NO: 205849
  chr20:50384928-50385171
  hypo

SEQ ID NO: 382998 - DNA, 162 bp, Homo sapiens; identical to SEQ ID NO: 344300
  chr20:52214819-52214981
  hypo

SEQ ID NO: 382999 - DNA, 209 bp, Homo sapiens; identical to SEQ ID NO: 344301
  chr20:52234410-52234619
  hypo

SEQ ID NO: 383000 - DNA, 174 bp, Homo sapiens; identical to SEQ ID NO: 344302
  chr20:52374073-52374247
  hypo

SEQ ID NO: 383001 - DNA, 31 bp, Homo sapiens; identical to SEQ ID NO: 368387
  chr20:52484682-52484713
  hypo

SEQ ID NO: 383002 - DNA, 62 bp, Homo sapiens; identical to SEQ ID NO: 344303
  chr20:55026786-55026848
  hypo

SEQ ID NO: 383003 - DNA, 135 bp, Homo sapiens; identical to SEQ ID NO: 205864
  chr20:55206463-55206598
  hypo

SEQ ID NO: 383004 - DNA, 95 bp, Homo sapiens; identical to SEQ ID NO: 352515
  chr20:55206774-55206869
  hypo

SEQ ID NO: 383005 - DNA, 46 bp, Homo sapiens; identical to SEQ ID NO: 344305
  chr20:55936567-55936613
  hypo

SEQ ID NO: 383006 - DNA, 226 bp, Homo sapiens; identical to SEQ ID NO: 344308
  chr20:56001391-56001617
  hypo

SEQ ID NO: 383007 - DNA, 363 bp, Homo sapiens; identical to SEQ ID NO: 344309
  chr20:56126192-56126555
  hypo

SEQ ID NO: 383008 - DNA, 91 bp, Homo sapiens; identical to SEQ ID NO: 356315
  chr20:56772299-56772390
  hypo

SEQ ID NO: 383009 - DNA, 213 bp, Homo sapiens; identical to SEQ ID NO: 220091
  chr20:56780225-56780438
  hypo

SEQ ID NO: 383010 - DNA, 60 bp, Homo sapiens; identical to SEQ ID NO: 220092
  chr20:56780951-56781011
  hypo

SEQ ID NO: 383011 - DNA, 96 bp, Homo sapiens; identical to SEQ ID NO: 356318
  chr20:56781104-56781200
  hypo

SEQ ID NO: 383012 - DNA, 431 bp, Homo sapiens; identical to SEQ ID NO: 336494
  chr20:56784811-56785242
  hypo

SEQ ID NO: 383013 - DNA, 307 bp, Homo sapiens; identical to SEQ ID NO: 344313
  chr20:56941603-56941910
  hypo

SEQ ID NO: 383014 - DNA, 64 bp, Homo sapiens; identical to SEQ ID NO: 344314
  chr20:56999390-56999454
  hypo

SEQ ID NO: 383015 - DNA, 167 bp, Homo sapiens; identical to SEQ ID NO: 356320
  chr20:57009378-57009545
  hypo

SEQ ID NO: 383016 - DNA, 200 bp, Homo sapiens
  chr20:57154974-57155174
  hypo
cgtgagaattcagaggcgccaagccccctgcccgtccccatggagccttctgagggctgcaacgtggatattttccaggcaggaattaatcacggcttcgttggcgctccaagccagaccctacataataccttctataaagagccttattacaccggaaggttgtatattatattcttcactgcacaccagctacgtgc

SEQ ID NO: 383017 - DNA, 113 bp, Homo sapiens; identical to SEQ ID NO: 345643
  chr20:57225466-57225579
  hypo

SEQ ID NO: 383018 - DNA, 119 bp, Homo sapiens; identical to SEQ ID NO: 344318
  chr20:57240808-57240927
  hypo

SEQ ID NO: 383019 - DNA, 164 bp, Homo sapiens; identical to SEQ ID NO: 346239
  chr20:57268976-57269140
  hypo

SEQ ID NO: 383020 - DNA, 305 bp, Homo sapiens; identical to SEQ ID NO: 375164
  chr20:57415535-57415840
  hypo

SEQ ID NO: 383021 - DNA, 430 bp, Homo sapiens; identical to SEQ ID NO: 344321
  chr20:57571504-57571934
  hypo

SEQ ID NO: 383022 - DNA, 63 bp, Homo sapiens; identical to SEQ ID NO: 368404
  chr20:57767480-57767543
  hypo

SEQ ID NO: 383023 - DNA, 327 bp, Homo sapiens; identical to SEQ ID NO: 336499
  chr20:57797949-57798276
  hypo

SEQ ID NO: 383024 - DNA, 176 bp, Homo sapiens; identical to SEQ ID NO: 205885
  chr20:57875365-57875541
  hypo

SEQ ID NO: 383025 - DNA, 220 bp, Homo sapiens; identical to SEQ ID NO: 352521
  chr20:57875889-57876109
  hypo

SEQ ID NO: 383026 - DNA, 233 bp, Homo sapiens; identical to SEQ ID NO: 347690
  chr20:57978841-57979074
  hypo

SEQ ID NO: 383027 - DNA, 74 bp, Homo sapiens; identical to SEQ ID NO: 361931
  chr20:58180712-58180786
  hypo

SEQ ID NO: 383028 - DNA, 354 bp, Homo sapiens; identical to SEQ ID NO: 344328
  chr20:58507061-58507415
  hypo

SEQ ID NO: 383029 - DNA, 260 bp, Homo sapiens; identical to SEQ ID NO: 356329
  chr20:58508063-58508323
  hypo

SEQ ID NO: 383030 - DNA, 56 bp, Homo sapiens; identical to SEQ ID NO: 346240
  chr20:58514041-58514097
  hypo

SEQ ID NO: 383031 - DNA, 115 bp, Homo sapiens; identical to SEQ ID NO: 345644
  chr20:58514400-58514515
  hypo

SEQ ID NO: 383032 - DNA, 109 bp, Homo sapiens; identical to SEQ ID NO: 361933
  chr20:58515463-58515572
  hypo

SEQ ID NO: 383033 - DNA, 433 bp, Homo sapiens; identical to SEQ ID NO: 344333
  chr20:59872770-59873203
  hypo

SEQ ID NO: 383034 - DNA, 211 bp, Homo sapiens; identical to SEQ ID NO: 344334
  chr20:60094644-60094855
  hypo

SEQ ID NO: 383035 - DNA, 146 bp, Homo sapiens; identical to SEQ ID NO: 344335
  chr20:60173821-60173967
  hypo

SEQ ID NO: 383036 - DNA, 428 bp, Homo sapiens; identical to SEQ ID NO: 368418
  chr20:60226081-60226509
  hypo

SEQ ID NO: 383037 - DNA, 352 bp, Homo sapiens; identical to SEQ ID NO: 220128
  chr20:60238496-60238848
  hypo

SEQ ID NO: 383038 - DNA, 331 bp, Homo sapiens; identical to SEQ ID NO: 356333
  chr20:60273150-60273481
  hypo

SEQ ID NO: 383039 - DNA, 546 bp, Homo sapiens; identical to SEQ ID NO: 344339
  chr20:60275663-60276209
  hypo

SEQ ID NO: 383040 - DNA, 249 bp, Homo sapiens; identical to SEQ ID NO: 368422
  chr20:60313847-60314096
  hypo

SEQ ID NO: 383041 - DNA, 178 bp, Homo sapiens; identical to SEQ ID NO: 344342
  chr20:60316318-60316496
  hypo

SEQ ID NO: 383042 - DNA, 347 bp, Homo sapiens; identical to SEQ ID NO: 349042
  chr20:60352702-60353049
  hypo

SEQ ID NO: 383043 - DNA, 350 bp, Homo sapiens; identical to SEQ ID NO: 368425
  chr20:60373188-60373538
  hypo

SEQ ID NO: 383044 - DNA, 111 bp, Homo sapiens; identical to SEQ ID NO: 368426
  chr20:60448951-60449062
  hypo

SEQ ID NO: 383045 - DNA, 57 bp, Homo sapiens
  chr20:60470129-60470186
  hypo
cgcatggcccgtgcagggcaggaatgcactggcgtgcggcacagcctcctctctctc

SEQ ID NO: 383046 - DNA, 77 bp, Homo sapiens
  chr20:60470257-60470334
  hypo
ggagtggctcgattcctgatgtgcgcagtaggagagaggccggggctcagtcagggaggggaccggcggcggaggtc

SEQ ID NO: 383047 - DNA, 242 bp, Homo sapiens; identical to SEQ ID NO: 368427
  chr20:60485425-60485667
  hypo

SEQ ID NO: 383048 - DNA, 193 bp, Homo sapiens; identical to SEQ ID NO: 368428
  chr20:60494919-60495112
  hypo

SEQ ID NO: 383049 - DNA, 105 bp, Homo sapiens; identical to SEQ ID NO: 368429
  chr20:60495161-60495266
  hypo

SEQ ID NO: 383050 - DNA, 105 bp, Homo sapiens; identical to SEQ ID NO: 368430
  chr20:60495300-60495405
  hypo

SEQ ID NO: 383051 - DNA, 266 bp, Homo sapiens; identical to SEQ ID NO: 328091
  chr20:60495440-60495706
  hypo

SEQ ID NO: 383052 - DNA, 36 bp, Homo sapiens; identical to SEQ ID NO: 368432
  chr20:60502550-60502586
  hypo

SEQ ID NO: 383053 - DNA, 352 bp, Homo sapiens
  chr20:60511742-60512094
  hypo
cggggctgagacaacgcgtcctgcaccctaactctgtgtctgtgacccccagggactccgcgctgctgacaacgaccccacggcacccccctatgactccctgctggtcttcgactacgaggggagcggctccaccgcaggctccgtcagctccctgaactcatccagttccggggaccaagactacgattacctcaacgactgggggcccagattcaagaagctggcggacatgtatggaggtggtgaagaggattgactgacctcgcatcttcggaccgaagtgagagccgtgctcggacgccggaggagcaggactgagcagaggcggccggtcttcccgactccctgc

SEQ ID NO: 383054 - DNA, 83 bp, Homo sapiens; identical to SEQ ID NO: 346242
  chr20:60544922-60545005
  hypo

SEQ ID NO: 383055 - DNA, 208 bp, Homo sapiens; identical to SEQ ID NO: 220146
  chr20:60545058-60545266
  hypo

SEQ ID NO: 383056 - DNA, 265 bp, Homo sapiens; identical to SEQ ID NO: 220147
  chr20:60545296-60545561
  hypo

SEQ ID NO: 383057 - DNA, 331 bp, Homo sapiens; identical to SEQ ID NO: 344356
  chr20:60563069-60563400
  hypo

SEQ ID NO: 383058 - DNA, 266 bp, Homo sapiens; identical to SEQ ID NO: 368437
  chr20:60662808-60663074
  hypo

SEQ ID NO: 383059 - DNA, 409 bp, Homo sapiens; identical to SEQ ID NO: 344359
  chr20:60725146-60725555
  hypo

SEQ ID NO: 383060 - DNA, 128 bp, Homo sapiens; identical to SEQ ID NO: 368439
  chr20:60756218-60756346
  hypo

SEQ ID NO: 383061 - DNA, 373 bp, Homo sapiens; identical to SEQ ID NO: 349046
  chr20:60773878-60774251
  hypo

SEQ ID NO: 383062 - DNA, 175 bp, Homo sapiens; identical to SEQ ID NO: 356340
  chr20:60781114-60781289
  hypo

SEQ ID NO: 383063 - DNA, 256 bp, Homo sapiens; identical to SEQ ID NO: 356341
  chr20:60781567-60781823
  hypo

SEQ ID NO: 383064 - DNA, 64 bp, Homo sapiens; identical to SEQ ID NO: 344363
  chr20:60842033-60842097
  hypo

SEQ ID NO: 383065 - DNA, 368 bp, Homo sapiens; identical to SEQ ID NO: 344364
  chr20:60842477-60842845
  hypo

SEQ ID NO: 383066 - DNA, 578 bp, Homo sapiens; identical to SEQ ID NO: 368444
  chr20:60855793-60856371
  hypo

SEQ ID NO: 383067 - DNA, 461 bp, Homo sapiens; identical to SEQ ID NO: 328132
  chr20:60856401-60856862
  hypo

SEQ ID NO: 383068 - DNA, 148 bp, Homo sapiens; identical to SEQ ID NO: 368446
  chr20:60856892-60857040
  hypo

SEQ ID NO: 383069 - DNA, 187 bp, Homo sapiens; identical to SEQ ID NO: 344366
  chr20:60868207-60868394
  hypo

SEQ ID NO: 383070 - DNA, 252 bp, Homo sapiens; identical to SEQ ID NO: 344367
  chr20:60912922-60913174
  hypo

SEQ ID NO: 383071 - DNA, 284 bp, Homo sapiens; identical to SEQ ID NO: 328147
  chr20:60925541-60925825
  hypo

SEQ ID NO: 383072 - DNA, 111 bp, Homo sapiens; identical to SEQ ID NO: 368448
  chr20:60926049-60926160
  hypo

SEQ ID NO: 383073 - DNA, 271 bp, Homo sapiens
  chr20:60952110-60952381
  hypo
cgtcctaggctgcgagctccctgggcacagggctgtctgttccacgcaccaaggagcgcctgtacccagcacggggcttggaaatggcgggtggacatgacgggtgttctgtgctctacggttcccggcttctgatttgcaattgttcggtagaaaccgtacttccagtgcccacacaaccaatctgtttttctccttcttatagcattggacaaattacgtgaggcatttgatgcattattataaaggaggcttcgtgggggatgacttc

SEQ ID NO: 383074 - DNA, 82 bp, Homo sapiens; identical to SEQ ID NO: 368449
  chr20:60953036-60953118
  hypo

SEQ ID NO: 383075 - DNA, 71 bp, Homo sapiens; identical to SEQ ID NO: 368450
  chr20:60953645-60953716
  hypo

SEQ ID NO: 383076 - DNA, 104 bp, Homo sapiens
  chr20:60976568-60976672
  hypo
cgccccgggccccacagagaggtgtcggtgtgtccggcagacatggagaggatcacgcatgtgcagatgtaccaccttacgcctagctggaagcagcacacacg

SEQ ID NO: 383077 - DNA, 121 bp, Homo sapiens
  chr20:60976778-60976899
  hypo
caggtcccctcagtgtgggggaggggctgaggaggggcaccagggagctgggggattggcctgtgtctccgcaggggagtggctccgtggggtgtgcccaggcaaatgcactgagctgcac

SEQ ID NO: 383078 - DNA, 211 bp, Homo sapiens; identical to SEQ ID NO: 328158
  chr20:60984130-60984341
  hypo

SEQ ID NO: 383079 - DNA, 196 bp, Homo sapiens; identical to SEQ ID NO: 368452
  chr20:60992542-60992738
  hypo

SEQ ID NO: 383080 - DNA, 203 bp, Homo sapiens; identical to SEQ ID NO: 368453
  chr20:60992781-60992984
  hypo

SEQ ID NO: 383081 - DNA, 597 bp, Homo sapiens; identical to SEQ ID NO: 344374
  chr20:61000254-61000851
  hypo

SEQ ID NO: 383082 - DNA, 67 bp, Homo sapiens; identical to SEQ ID NO: 368455
  chr20:61013047-61013114
  hypo

SEQ ID NO: 383083 - DNA, 55 bp, Homo sapiens; identical to SEQ ID NO: 328168
  chr20:61013193-61013248
  hypo

SEQ ID NO: 383084 - DNA, 120 bp, Homo sapiens; identical to SEQ ID NO: 368457
  chr20:61013278-61013398
  hypo

SEQ ID NO: 383085 - DNA, 236 bp, Homo sapiens; identical to SEQ ID NO: 356343
  chr20:61287746-61287982
  hypo

SEQ ID NO: 383086 - DNA, 60 bp, Homo sapiens; identical to SEQ ID NO: 356344
  chr20:61288557-61288617
  hypo

SEQ ID NO: 383087 - DNA, 150 bp, Homo sapiens; identical to SEQ ID NO: 368460
  chr20:61314706-61314856
  hypo

SEQ ID NO: 383088 - DNA, 241 bp, Homo sapiens; identical to SEQ ID NO: 328183
  chr20:61318783-61319024
  hypo

SEQ ID NO: 383089 - DNA, 115 bp, Homo sapiens; identical to SEQ ID NO: 356345
  chr20:61330805-61330920
  hypo

SEQ ID NO: 383090 - DNA, 158 bp, Homo sapiens; identical to SEQ ID NO: 368463
  chr20:61472199-61472357
  hypo

SEQ ID NO: 383091 - DNA, 566 bp, Homo sapiens; identical to SEQ ID NO: 344381
  chr20:61488430-61488996
  hypo

SEQ ID NO: 383092 - DNA, 61 bp, Homo sapiens
  chr20:61527423-61527484
  hypo
cgccagtgcaacaatacgtgggcggcagaaggatcacagaggagaaagaaacgtcttagct

SEQ ID NO: 383093 - DNA, 54 bp, Homo sapiens
  chr20:61527514-61527568
  hypo
attggttgatccctttagcacccagcgaacagaacaggaatactccaatgcacc

SEQ ID NO: 383094 - DNA, 55 bp, Homo sapiens; identical to SEQ ID NO: 220198
  chr20:61527972-61528027
  hypo

SEQ ID NO: 383095 - DNA, 124 bp, Homo sapiens; identical to SEQ ID NO: 368465
  chr20:61528147-61528271
  hypo

SEQ ID NO: 383096 - DNA, 166 bp, Homo sapiens; identical to SEQ ID NO: 344386
  chr20:61591490-61591656
  hypo

SEQ ID NO: 383097 - DNA, 69 bp, Homo sapiens; identical to SEQ ID NO: 368467
  chr20:61665975-61666044
  hypo

SEQ ID NO: 383098 - DNA, 440 bp, Homo sapiens
  chr20:61674884-61675324
  hypo
cgatgcgcatcatggtcggggctgttttggggccgtttccaacaccagcagcgtcgtggctccacagcagcaaggcttcctgaaggaagaagggggcttcgcagtatagttcgagtcgggctctgtttctttccatcccaaacacatagagacgaccaaggccctgatcccaaaagaagaacccaggctgccggcgatcctggggacaacgatgttaactcagggacaggcgcagtctctggaccaggccaggtcgtggtgcacacactcgatctctgcagcgtttcccacatgggcactgcggaccgggaatgtcaggggaacgcgggcaccgtggaccgggaatgccaggggatcgtgggcaccgccgaccgggaatgtcaggggaacacgggcactgccgaccgggaatgtcaggggaacgggggcactgcagaccg

SEQ ID NO: 383099 - DNA, 78 bp, Homo sapiens
  chr20:61675700-61675778
  hypo
aacgcaggcacggctgaccgggaatgtcaggggatcgcgggcactgccgaccgggaatgtcgggaacgcaggcactgc

SEQ ID NO: 383100 - DNA, 96 bp, Homo sapiens; identical to SEQ ID NO: 368468
  chr20:61749643-61749739
  hypo

SEQ ID NO: 383101 - DNA, 65 bp, Homo sapiens; identical to SEQ ID NO: 368469
  chr20:61749920-61749985
  hypo

SEQ ID NO: 383102 - DNA, 192 bp, Homo sapiens; identical to SEQ ID NO: 352526
  chr20:61806216-61806408
  hypo

SEQ ID NO: 383103 - DNA, 247 bp, Homo sapiens; identical to SEQ ID NO: 205902
  chr20:61810310-61810557
  hypo

SEQ ID NO: 383104 - DNA, 270 bp, Homo sapiens; identical to SEQ ID NO: 361940
  chr20:61810632-61810902
  hypo

SEQ ID NO: 383105 - DNA, 123 bp, Homo sapiens; identical to SEQ ID NO: 346245
  chr20:61838301-61838424
  hypo

SEQ ID NO: 383106 - DNA, 46 bp, Homo sapiens; identical to SEQ ID NO: 356349
  chr20:61974409-61974455
  hypo

SEQ ID NO: 383107 - DNA, 78 bp, Homo sapiens; identical to SEQ ID NO: 368475
  chr20:61974565-61974643
  hypo

SEQ ID NO: 383108 - DNA, 31 bp, Homo sapiens; identical to SEQ ID NO: 356350
  chr20:61991069-61991100
  hypo

SEQ ID NO: 383109 - DNA, 233 bp, Homo sapiens; identical to SEQ ID NO: 220227
  chr20:62031374-62031607
  hypo

SEQ ID NO: 383110 - DNA, 79 bp, Homo sapiens; identical to SEQ ID NO: 375179
  chr20:62103897-62103976
  hypo

SEQ ID NO: 383111 - DNA, 154 bp, Homo sapiens; identical to SEQ ID NO: 344404
  chr20:62137323-62137477
  hypo

SEQ ID NO: 383112 - DNA, 114 bp, Homo sapiens; identical to SEQ ID NO: 368478
  chr20:62153095-62153209
  hypo

SEQ ID NO: 383113 - DNA, 128 bp, Homo sapiens; identical to SEQ ID NO: 368479
  chr20:62153462-62153590
  hypo

SEQ ID NO: 383114 - DNA, 179 bp, Homo sapiens; identical to SEQ ID NO: 356352
  chr20:62197207-62197386
  hypo

SEQ ID NO: 383115 - DNA, 336 bp, Homo sapiens; identical to SEQ ID NO: 356353
  chr20:62197416-62197752
  hypo

SEQ ID NO: 383116 - DNA, 89 bp, Homo sapiens; identical to SEQ ID NO: 368482
  chr20:62204139-62204228
  hypo

SEQ ID NO: 383117 - DNA, 95 bp, Homo sapiens; identical to SEQ ID NO: 368483
  chr20:62204387-62204482
  hypo

SEQ ID NO: 383118 - DNA, 613 bp, Homo sapiens; identical to SEQ ID NO: 368484
  chr20:62221442-62222055
  hypo

SEQ ID NO: 383119 - DNA, 227 bp, Homo sapiens; identical to SEQ ID NO: 344409
  chr20:62242319-62242546
  hypo

SEQ ID NO: 383120 - DNA, 492 bp, Homo sapiens; identical to SEQ ID NO: 344410
  chr20:62248630-62249122
  hypo

SEQ ID NO: 383121 - DNA, 357 bp, Homo sapiens; identical to SEQ ID NO: 344411
  chr20:62252093-62252450
  hypo

SEQ ID NO: 383122 - DNA, 390 bp, Homo sapiens; identical to SEQ ID NO: 347694
  chr20:62273399-62273789
  hypo

SEQ ID NO: 383123 - DNA, 130 bp, Homo sapiens; identical to SEQ ID NO: 344413
  chr20:62309958-62310088
  hypo

SEQ ID NO: 383124 - DNA, 103 bp, Homo sapiens; identical to SEQ ID NO: 344414
  chr20:62310122-62310225
  hypo

SEQ ID NO: 383125 - DNA, 161 bp, Homo sapiens; identical to SEQ ID NO: 356358
  chr20:62314955-62315116
  hypo

SEQ ID NO: 383126 - DNA, 269 bp, Homo sapiens; identical to SEQ ID NO: 356359
  chr20:62322022-62322291
  hypo

SEQ ID NO: 383127 - DNA, 716 bp, Homo sapiens; identical to SEQ ID NO: 368493
  chr20:62326157-62326873
  hypo

SEQ ID NO: 383128 - DNA, 379 bp, Homo sapiens; identical to SEQ ID NO: 375185
  chr20:62384600-62384979
  hypo

SEQ ID NO: 383129 - DNA, 264 bp, Homo sapiens; identical to SEQ ID NO: 352532
  chr20:62461639-62461903
  hypo

SEQ ID NO: 383130 - DNA, 345 bp, Homo sapiens; identical to SEQ ID NO: 345646
  chr20:62495236-62495581
  hypo

SEQ ID NO: 383131 - DNA, 305 bp, Homo sapiens; identical to SEQ ID NO: 368496
  chr20:62513518-62513823
  hypo

SEQ ID NO: 383132 - DNA, 45 bp, Homo sapiens; identical to SEQ ID NO: 368497
  chr20:62513897-62513942
  hypo

SEQ ID NO: 383133 - DNA, 507 bp, Homo sapiens; identical to SEQ ID NO: 344425
  chr20:62550652-62551159
  hypo

SEQ ID NO: 383134 - DNA, 585 bp, Homo sapiens
  chr20:62551409-62551994
  hypo
cgggacagcgccacggaagaggacgcacccggctgtgtggacatgtgcccagggcccgggacagcgccacggaagaggacgcacaggacagcgccacggaagaggacgcacccggctgtgtggcaggggaggttcccaagagcaggctcagggctctggggtctgagtgagggctctccagccagcagggagcagggcagggtgttgaagagacggcaggtgcgtcaggggctgacgtgggacccggcactctgtgctctgtgtctgcccgggaacaggtagtcctgcgtcggaccgggaagtgtggtgggtgtggtgggggaaggggctggcgtcagcagggctctcgtccgccaacgtctggtggggatgcccgccatgcgggggcctcaggctacagccagggctgtgaaggagccgaggtcatagagtggctgccctggcgtagggagggaggacacgggtccccgccatttcagaagctcagcgtccctgcacgtgtgcggtcttgtctgcctaggcatgtgtgcgggccctggggctgctgccagcagaacggactgggatacgctggatttgtaaaac

SEQ ID NO: 383135 - DNA, 1158 bp, Homo sapiens; identical to SEQ ID NO: 344427
  chr20:62562220-62563378
  hypo

SEQ ID NO: 383136 - DNA, 284 bp, Homo sapiens; identical to SEQ ID NO: 344428
  chr20:62578699-62578983
  hypo

SEQ ID NO: 383137 - DNA, 98 bp, Homo sapiens; identical to SEQ ID NO: 344429
  chr20:62581888-62581986
  hypo

SEQ ID NO: 383138 - DNA, 759 bp, Homo sapiens; identical to SEQ ID NO: 205913
  chr20:62600809-62601568
  hypo

SEQ ID NO: 383139 - DNA, 65 bp, Homo sapiens; identical to SEQ ID NO: 361949
  chr20:62601569-62601634
  hypo

SEQ ID NO: 383140 - DNA, 142 bp, Homo sapiens; identical to SEQ ID NO: 344431
  chr20:62630932-62631074
  hypo

SEQ ID NO: 383141 - DNA, 73 bp, Homo sapiens; identical to SEQ ID NO: 344433
  chr20:62639433-62639506
  hypo

SEQ ID NO: 383142 - DNA, 48 bp, Homo sapiens; identical to SEQ ID NO: 368506
  chr20:62662125-62662173
  hypo

SEQ ID NO: 383143 - DNA, 195 bp, Homo sapiens; identical to SEQ ID NO: 368507
  chr20:62662271-62662466
  hypo

SEQ ID NO: 383144 - DNA, 214 bp, Homo sapiens; identical to SEQ ID NO: 295001
  chr20:62680443-62680657
  hypo

SEQ ID NO: 383145 - DNA, 251 bp, Homo sapiens; identical to SEQ ID NO: 205918
  chr20:62694767-62695018
  hypo

SEQ ID NO: 383146 - DNA, 197 bp, Homo sapiens; identical to SEQ ID NO: 352536
  chr20:62695048-62695245
  hypo

SEQ ID NO: 383147 - DNA, 100 bp, Homo sapiens; identical to SEQ ID NO: 368511
  chr20:62839658-62839758
  hypo

SEQ ID NO: 383148 - DNA, 57 bp, Homo sapiens; identical to SEQ ID NO: 368512
  chr20:62863342-62863399
  hypo

SEQ ID NO: 383149 - DNA, 242 bp, Homo sapiens; identical to SEQ ID NO: 328411
  chr20:62863429-62863671
  hypo

SEQ ID NO: 383150 - DNA, 204 bp, Homo sapiens; identical to SEQ ID NO: 356368
  chr20:62868769-62868973
  hypo

SEQ ID NO: 383151 - DNA, 47 bp, Homo sapiens; identical to SEQ ID NO: 375196
  chr21:15588309-15588356
  hypo

SEQ ID NO: 383152 - DNA, 66 bp, Homo sapiens; identical to SEQ ID NO: 375197
  chr21:15588911-15588977
  hypo

SEQ ID NO: 383153 - DNA, 56 bp, Homo sapiens; identical to SEQ ID NO: 220292
  chr21:19274772-19274828
  hypo

SEQ ID NO: 383154 - DNA, 122 bp, Homo sapiens; identical to SEQ ID NO: 205931
  chr21:27011487-27011609
  hypo

SEQ ID NO: 383155 - DNA, 133 bp, Homo sapiens; identical to SEQ ID NO: 205932
  chr21:27011639-27011772
  hypo

SEQ ID NO: 383156 - DNA, 55 bp, Homo sapiens; identical to SEQ ID NO: 344444
  chr21:30294975-30295030
  hypo

SEQ ID NO: 383157 - DNA, 161 bp, Homo sapiens; identical to SEQ ID NO: 344445
  chr21:30357072-30357233
  hypo

SEQ ID NO: 383158 - DNA, 235 bp, Homo sapiens; identical to SEQ ID NO: 375207
  chr21:30670777-30671012
  hypo

SEQ ID NO: 383159 - DNA, 191 bp, Homo sapiens; identical to SEQ ID NO: 361962
  chr21:32716044-32716235
  hypo

SEQ ID NO: 383160 - DNA, 419 bp, Homo sapiens
  chr21:33370937-33371356
  hypo
cgaggattgtgaagaaaccggagccccatcagccagggcccggaagcactggcatcccccacaaggaagaccccctgatgctggacatggtgcgctccttcgagtctgtggatcgcgacgaccacgtagaagtgctgtctccctctcatcactacaggattctgaactccccggtcagcttggctcgcagaaattccagcgagaggacgctgtccccgggtctgccatccggaagcatgtcgcctctccatactcctttgcatccaactctggtctcttttgctcacgaagataagaacagccccccaaaagaggagggcctgtgttgcccacctccggttcccagcaatggccccatgcagcctctggggagccccaattgtgtgaaaagccgaggccggttccctatgatgggcatc

SEQ ID NO: 383161 - DNA, 154 bp, Homo sapiens; identical to SEQ ID NO: 344449
  chr21:33711064-33711218
  hypo

SEQ ID NO: 383162 - DNA, 270 bp, Homo sapiens; identical to SEQ ID NO: 344450
  chr21:33781936-33782206
  hypo

SEQ ID NO: 383163 - DNA, 108 bp, Homo sapiens; identical to SEQ ID NO: 356373
  chr21:33954435-33954543
  hypo

SEQ ID NO: 383164 - DNA, 53 bp, Homo sapiens; identical to SEQ ID NO: 344452
  chr21:34033597-34033650
  hypo

SEQ ID NO: 383165 - DNA, 157 bp, Homo sapiens
  chr21:34350777-34350934
  hypo
cgctgttccccggcccgggcttgtgttttacaacaggggaggggcgggcgtgaatggtctgatgattggaacaatccccccgattcaggcctacaaacgcatcttctgttccacaccgaggggacagaaaggagaaaagtgacaaagaacgcggggc

SEQ ID NO: 383166 - DNA, 255 bp, Homo sapiens; identical to SEQ ID NO: 344458
  chr21:35258647-35258902
  hypo

SEQ ID NO: 383167 - DNA, 42 bp, Homo sapiens; identical to SEQ ID NO: 344459
  chr21:35286360-35286402
  hypo

SEQ ID NO: 383168 - DNA, 881 bp, Homo sapiens; identical to SEQ ID NO: 336551
  chr21:36163875-36164756
  hypo

SEQ ID NO: 383169 - DNA, 130 bp, Homo sapiens; identical to SEQ ID NO: 336552
  chr21:36206762-36206892
  hypo

SEQ ID NO: 383170 - DNA, 176 bp, Homo sapiens; identical to SEQ ID NO: 344463
  chr21:36437239-36437415
  hypo

SEQ ID NO: 383171 - DNA, 316 bp, Homo sapiens; identical to SEQ ID NO: 344464
  chr21:37405019-37405335
  hypo

SEQ ID NO: 383172 - DNA, 353 bp, Homo sapiens; identical to SEQ ID NO: 336553
  chr21:37528267-37528620
  hypo

SEQ ID NO: 383173 - DNA, 246 bp, Homo sapiens; identical to SEQ ID NO: 344466
  chr21:37582287-37582533
  hypo

SEQ ID NO: 383174 - DNA, 299 bp, Homo sapiens; identical to SEQ ID NO: 344467
  chr21:37617467-37617766
  hypo

SEQ ID NO: 383175 - DNA, 48 bp, Homo sapiens; identical to SEQ ID NO: 344468
  chr21:37718564-37718612
  hypo

SEQ ID NO: 383176 - DNA, 42 bp, Homo sapiens; identical to SEQ ID NO: 349055
  chr21:37775172-37775214
  hypo

SEQ ID NO: 383177 - DNA, 130 bp, Homo sapiens; identical to SEQ ID NO: 344470
  chr21:38175745-38175875
  hypo

SEQ ID NO: 383178 - DNA, 174 bp, Homo sapiens; identical to SEQ ID NO: 344471
  chr21:38176483-38176657
  hypo

SEQ ID NO: 383179 - DNA, 121 bp, Homo sapiens; identical to SEQ ID NO: 328577
  chr21:38362977-38363098
  hypo

SEQ ID NO: 383180 - DNA, 246 bp, Homo sapiens; identical to SEQ ID NO: 344473
  chr21:38603108-38603354
  hypo

SEQ ID NO: 383181 - DNA, 78 bp, Homo sapiens; identical to SEQ ID NO: 356381
  chr21:38918381-38918459
  hypo

SEQ ID NO: 383182 - DNA, 169 bp, Homo sapiens; identical to SEQ ID NO: 356382
  chr21:38918561-38918730
  hypo

SEQ ID NO: 383183 - DNA, 310 bp, Homo sapiens; identical to SEQ ID NO: 206000
  chr21:39288394-39288704
  hypo

SEQ ID NO: 383184 - DNA, 279 bp, Homo sapiens; identical to SEQ ID NO: 206001
  chr21:39288901-39289180
  hypo

SEQ ID NO: 383185 - DNA, 38 bp, Homo sapiens; identical to SEQ ID NO: 361988
  chr21:40032283-40032321
  hypo

SEQ ID NO: 383186 - DNA, 158 bp, Homo sapiens; identical to SEQ ID NO: 206003
  chr21:40032367-40032525
  hypo

SEQ ID NO: 383187 - DNA, 65 bp, Homo sapiens; identical to SEQ ID NO: 361990
  chr21:40032848-40032913
  hypo

SEQ ID NO: 383188 - DNA, 132 bp, Homo sapiens; identical to SEQ ID NO: 206005
  chr21:40032974-40033106
  hypo

SEQ ID NO: 383189 - DNA, 749 bp, Homo sapiens; identical to SEQ ID NO: 344480
  chr21:40316188-40316937
  hypo

SEQ ID NO: 383190 - DNA, 91 bp, Homo sapiens; identical to SEQ ID NO: 344481
  chr21:40331586-40331677
  hypo

SEQ ID NO: 383191 - DNA, 168 bp, Homo sapiens; identical to SEQ ID NO: 344482
  chr21:40348667-40348835
  hypo

SEQ ID NO: 383192 - DNA, 338 bp, Homo sapiens
  chr21:40506192-40506530
  hypo
cgtgacagcgcccacctccgctaagggggctccgctttcctgcctagctccttcagtttcttgccgcgaaaatggtctttgtattgcactttgtggctgacagacaccgtccgttacctctcagcattgtttcaatacacacacattaacacacactcgcgcacacacacacgtacacactcgcacacactcccacatgtacacatatacacgcacacccacacatgtacacagtcacacacaaactcactaacacaaacatgtatacattcactaacacacacaaactcacgaacacgtgctaacatgtacacactaatacactcatacatacacac

SEQ ID NO: 383193 - DNA, 51 bp, Homo sapiens; identical to SEQ ID NO: 344484
  chr21:40580603-40580654
  hypo

SEQ ID NO: 383194 - DNA, 497 bp, Homo sapiens; identical to SEQ ID NO: 344485
  chr21:40762272-40762769
  hypo

SEQ ID NO: 383195 - DNA, 212 bp, Homo sapiens; identical to SEQ ID NO: 344486
  chr21:40891441-40891653
  hypo

SEQ ID NO: 383196 - DNA, 238 bp, Homo sapiens; identical to SEQ ID NO: 344487
  chr21:42572234-42572472
  hypo

SEQ ID NO: 383197 - DNA, 151 bp, Homo sapiens; identical to SEQ ID NO: 344488
  chr21:42593821-42593972
  hypo

SEQ ID NO: 383198 - DNA, 90 bp, Homo sapiens; identical to SEQ ID NO: 356389
  chr21:42613666-42613756
  hypo

SEQ ID NO: 383199 - DNA, 82 bp, Homo sapiens; identical to SEQ ID NO: 356390
  chr21:42613819-42613901
  hypo

SEQ ID NO: 383200 - DNA, 146 bp, Homo sapiens; identical to SEQ ID NO: 346249
  chr21:42617817-42617963
  hypo

SEQ ID NO: 383201 - DNA, 92 bp, Homo sapiens; identical to SEQ ID NO: 346250
  chr21:42617995-42618087
  hypo

SEQ ID NO: 383202 - DNA, 211 bp, Homo sapiens; identical to SEQ ID NO: 344491
  chr21:42629074-42629285
  hypo

SEQ ID NO: 383203 - DNA, 114 bp, Homo sapiens
  chr21:42649202-42649316
  hypo
ggcttgtcatggtgtcctggaagactctccagcagccagaagaaccttctgtgctgttttcactagagaagatttgagttgcagcctcttggaaagaacatgacggcacggaac

SEQ ID NO: 383204 - DNA, 165 bp, Homo sapiens; identical to SEQ ID NO: 344493
  chr21:42780066-42780231
  hypo

SEQ ID NO: 383205 - DNA, 824 bp, Homo sapiens; identical to SEQ ID NO: 356394
  chr21:43160967-43161791
  hypo

SEQ ID NO: 383206 - DNA, 283 bp, Homo sapiens; identical to SEQ ID NO: 344495
  chr21:43161857-43162140
  hypo

SEQ ID NO: 383207 - DNA, 317 bp, Homo sapiens; identical to SEQ ID NO: 344496
  chr21:43162557-43162874
  hypo

SEQ ID NO: 383208 - DNA, 364 bp, Homo sapiens; identical to SEQ ID NO: 344497
  chr21:43165727-43166091
  hypo

SEQ ID NO: 383209 - DNA, 297 bp, Homo sapiens; identical to SEQ ID NO: 344498
  chr21:43166652-43166949
  hypo

SEQ ID NO: 383210 - DNA, 157 bp, Homo sapiens; identical to SEQ ID NO: 344499
  chr21:43168170-43168327
  hypo

SEQ ID NO: 383211 - DNA, 375 bp, Homo sapiens; identical to SEQ ID NO: 346251
  chr21:43239707-43240082
  hypo

SEQ ID NO: 383212 - DNA, 243 bp, Homo sapiens; identical to SEQ ID NO: 346252
  chr21:43240112-43240355
  hypo

SEQ ID NO: 383213 - DNA, 78 bp, Homo sapiens
  chr21:43248413-43248491
  hypo
cggcaccgaactgctccccaaaggccctgctgactgctccatgccgccctgccccaccccgcaggagctgcctctccc

SEQ ID NO: 383214 - DNA, 219 bp, Homo sapiens; identical to SEQ ID NO: 344502
  chr21:43273205-43273424
  hypo

SEQ ID NO: 383215 - DNA, 220 bp, Homo sapiens
  chr21:43290534-43290754
  hypo
cgctgggcacacggcctcgtgacaatattaaaagcactcagggaaaacccactaacggaaaaagcaaacgtattttcaaaaatatgcgccgcagaaccatcctgaaaaatgctgtgggtgggcttcagggggctagcgggtgggtggagacggactctgactaagtcagtttgtgacaccctgcagattcccactctggagtcacgacacacacaggcac

SEQ ID NO: 383216 - DNA, 214 bp, Homo sapiens
  chr21:43546440-43546654
  hypo
cgctttgtgctcagaacatgacgaacaccgtggtgaggaccacgctgaggaacgacctgtcccaggagggcatcatccaccacctgaagatcctgagccccatctactgcgccttccagaatgacctgctgacatcctccggcttcaccctggagtgggggtaagggagaaatgccccggctgccccacagccacgtgcctccagaccacctgc

SEQ ID NO: 383217 - DNA, 396 bp, Homo sapiens; identical to SEQ ID NO: 356399
  chr21:43547667-43548063
  hypo

SEQ ID NO: 383218 - DNA, 333 bp, Homo sapiens
  chr21:43725921-43726254
  hypo
tcctgcttatcggccgcgcggcatccccttgtcgcagcactccagcatccatgcagccgcgcggcaccccgtcttcggagcactccagaatccatgcagagcgcagcaccccacatccagagcgctccagaatccatgaagcacgcggcaccccctcgtcagagtgctccagaatccatgaagtgcgcagcaccccttaatcggagcgctctagaacccgtgcagcgagcagcaccccacacccggagcgctccagaatccatgaagccagcagcaccccacacccggagtgctccagaatccacgcagcacgtggcatctcctcgtcatagc

SEQ ID NO: 383219 - DNA, 516 bp, Homo sapiens; identical to SEQ ID NO: 344507
  chr21:43791392-43791908
  hypo

SEQ ID NO: 383220 - DNA, 239 bp, Homo sapiens; identical to SEQ ID NO: 356401
  chr21:43991061-43991300
  hypo

SEQ ID NO: 383221 - DNA, 205 bp, Homo sapiens; identical to SEQ ID NO: 356402
  chr21:43991493-43991698
  hypo

SEQ ID NO: 383222 - DNA, 114 bp, Homo sapiens; identical to SEQ ID NO: 356403
  chr21:44110034-44110148
  hypo

SEQ ID NO: 383223 - DNA, 562 bp, Homo sapiens; identical to SEQ ID NO: 368567
  chr21:44112757-44113319
  hypo

SEQ ID NO: 383224 - DNA, 467 bp, Homo sapiens; identical to SEQ ID NO: 356404
  chr21:44180227-44180694
  hypo

SEQ ID NO: 383225 - DNA, 401 bp, Homo sapiens; identical to SEQ ID NO: 344512
  chr21:44190679-44191080
  hypo

SEQ ID NO: 383226 - DNA, 321 bp, Homo sapiens; identical to SEQ ID NO: 344513
  chr21:44205103-44205424
  hypo

SEQ ID NO: 383227 - DNA, 119 bp, Homo sapiens; identical to SEQ ID NO: 346254
  chr21:44338552-44338671
  hypo

SEQ ID NO: 383228 - DNA, 265 bp, Homo sapiens; identical to SEQ ID NO: 344515
  chr21:44441284-44441549
  hypo

SEQ ID NO: 383229 - DNA, 209 bp, Homo sapiens; identical to SEQ ID NO: 344516
  chr21:44444714-44444923
  hypo

SEQ ID NO: 383230 - DNA, 330 bp, Homo sapiens; identical to SEQ ID NO: 344517
  chr21:44448081-44448411
  hypo

SEQ ID NO: 383231 - DNA, 128 bp, Homo sapiens; identical to SEQ ID NO: 344518
  chr21:44451419-44451547
  hypo

SEQ ID NO: 383232 - DNA, 38 bp, Homo sapiens; identical to SEQ ID NO: 368573
  chr21:44482534-44482572
  hypo

SEQ ID NO: 383233 - DNA, 205 bp, Homo sapiens; identical to SEQ ID NO: 328801
  chr21:44482687-44482892
  hypo

SEQ ID NO: 383234 - DNA, 159 bp, Homo sapiens; identical to SEQ ID NO: 368575
  chr21:44482954-44483113
  hypo

SEQ ID NO: 383235 - DNA, 307 bp, Homo sapiens
  chr21:44830965-44831272
  hypo
cggaataagcaggcggtcaggtcgccaacaatccggtcaaccacggtgcttcttccctggtgggtgtctggccccgttcttgctggggatggcgctcggggatgccaccgtgtttccccagggcccactgtgcaccctgcatgtcgcgcccttgtcacgggagcggcctgctgacccggagcacgcgtggccgtcacaaagggctgcaaagctgcagcaccagaacgcaaactcaggcgtgcggcaacggaggccacgttctcagccaccgtgccactctgcatgtcagctggctgggcgtgcctcc

SEQ ID NO: 383236 - DNA, 165 bp, Homo sapiens; identical to SEQ ID NO: 328822
  chr21:44837213-44837378
  hypo

SEQ ID NO: 383237 - DNA, 320 bp, Homo sapiens; identical to SEQ ID NO: 344523
  chr21:44840079-44840399
  hypo

SEQ ID NO: 383238 - DNA, 179 bp, Homo sapiens; identical to SEQ ID NO: 368578
  chr21:44840677-44840856
  hypo

SEQ ID NO: 383239 - DNA, 81 bp, Homo sapiens; identical to SEQ ID NO: 368579
  chr21:44841527-44841608
  hypo

SEQ ID NO: 383240 - DNA, 33 bp, Homo sapiens; identical to SEQ ID NO: 352569
  chr21:44847478-44847511
  hypo

SEQ ID NO: 383241 - DNA, 445 bp, Homo sapiens
  chr21:45114158-45114603
  hypo
cgcatctggagcctgcgctccggctcagcgacctttcctctcaaatgcggaagcgtgcacttacagttcagaccgttctcctgtaagttcattacaaacacgggcggaaggcactcaggctttcgttggagaaacagaaataaggccttcttttgagcagcgattgctggatcattgatctgtttgaggaagtgtctgacctgggcctgagagctggagaaggtgcagattcaaagtgagcggctcctgaggagagccgccaaggctgctcgccttctccgtggcttccgcagctaccgtctgcacggtgagagggcacgggcacacggttcgggctggcgtgcagctctcccagccagccacgctctgctcaggcctggaagtgaaagccgcctccttcccgttatgccccccatacaggagcctcggtttttcagcaaaacgc

SEQ ID NO: 383242 - DNA, 132 bp, Homo sapiens; identical to SEQ ID NO: 368581
  chr21:45140928-45141060
  hypo

SEQ ID NO: 383243 - DNA, 402 bp, Homo sapiens; identical to SEQ ID NO: 344529
  chr21:45167210-45167612
  hypo

SEQ ID NO: 383244 - DNA, 932 bp, Homo sapiens; identical to SEQ ID NO: 344530
  chr21:45175388-45176320
  hypo

SEQ ID NO: 383245 - DNA, 147 bp, Homo sapiens; identical to SEQ ID NO: 328856
  chr21:45233002-45233149
  hypo

SEQ ID NO: 383246 - DNA, 56 bp, Homo sapiens; identical to SEQ ID NO: 368584
  chr21:45289958-45290014
  hypo

SEQ ID NO: 383247 - DNA, 69 bp, Homo sapiens; identical to SEQ ID NO: 368585
  chr21:45290044-45290113
  hypo

SEQ ID NO: 383248 - DNA, 703 bp, Homo sapiens; identical to SEQ ID NO: 344535
  chr21:45345807-45346510
  hypo

SEQ ID NO: 383249 - DNA, 51 bp, Homo sapiens; identical to SEQ ID NO: 368587
  chr21:45352895-45352946
  hypo

SEQ ID NO: 383250 - DNA, 500 bp, Homo sapiens; identical to SEQ ID NO: 220455
  chr21:45353002-45353502
  hypo

SEQ ID NO: 383251 - DNA, 85 bp, Homo sapiens; identical to SEQ ID NO: 368589
  chr21:45353564-45353649
  hypo

SEQ ID NO: 383252 - DNA, 100 bp, Homo sapiens; identical to SEQ ID NO: 356411
  chr21:45374905-45375005
  hypo

SEQ ID NO: 383253 - DNA, 642 bp, Homo sapiens; identical to SEQ ID NO: 349066
  chr21:45400182-45400824
  hypo

SEQ ID NO: 383254 - DNA, 278 bp, Homo sapiens; identical to SEQ ID NO: 349067
  chr21:45400854-45401132
  hypo

SEQ ID NO: 383255 - DNA, 105 bp, Homo sapiens; identical to SEQ ID NO: 344539
  chr21:45499846-45499951
  hypo

SEQ ID NO: 383256 - DNA, 40 bp, Homo sapiens; identical to SEQ ID NO: 368594
  chr21:45508577-45508617
  hypo

SEQ ID NO: 383257 - DNA, 224 bp, Homo sapiens; identical to SEQ ID NO: 368595
  chr21:45508695-45508919
  hypo

SEQ ID NO: 383258 - DNA, 162 bp, Homo sapiens; identical to SEQ ID NO: 344541
  chr21:45513811-45513973
  hypo

SEQ ID NO: 383259 - DNA, 326 bp, Homo sapiens; identical to SEQ ID NO: 344543
  chr21:45518831-45519157
  hypo

SEQ ID NO: 383260 - DNA, 58 bp, Homo sapiens
  chr21:45583689-45583747
  hypo
cgcgttcccgagcgtgcactgaaggtgttagcgcgtggcaccggagacaccaggctgg

SEQ ID NO: 383261 - DNA, 98 bp, Homo sapiens; identical to SEQ ID NO: 344545
  chr21:45617247-45617345
  hypo

SEQ ID NO: 383262 - DNA, 53 bp, Homo sapiens; identical to SEQ ID NO: 344546
  chr21:45621745-45621798
  hypo

SEQ ID NO: 383263 - DNA, 236 bp, Homo sapiens; identical to SEQ ID NO: 344547
  chr21:45628864-45629100
  hypo

SEQ ID NO: 383264 - DNA, 156 bp, Homo sapiens; identical to SEQ ID NO: 368601
  chr21:45656872-45657028
  hypo

SEQ ID NO: 383265 - DNA, 66 bp, Homo sapiens; identical to SEQ ID NO: 344549
  chr21:45736431-45736497
  hypo

SEQ ID NO: 383266 - DNA, 269 bp, Homo sapiens; identical to SEQ ID NO: 328925
  chr21:45750126-45750395
  hypo

SEQ ID NO: 383267 - DNA, 245 bp, Homo sapiens; identical to SEQ ID NO: 368603
  chr21:45790621-45790866
  hypo

SEQ ID NO: 383268 - DNA, 58 bp, Homo sapiens; identical to SEQ ID NO: 368604
  chr21:45791167-45791225
  hypo

SEQ ID NO: 383269 - DNA, 226 bp, Homo sapiens; identical to SEQ ID NO: 344552
  chr21:45834132-45834358
  hypo

SEQ ID NO: 383270 - DNA, 468 bp, Homo sapiens; identical to SEQ ID NO: 344553
  chr21:45941802-45942270
  hypo

SEQ ID NO: 383271 - DNA, 90 bp, Homo sapiens
  chr21:46035068-46035158
  hypo
cggcgcatgtacgtaagcggcactgtttgttaccatgaaaaattagaaacaacctaaatatccatccacgagggaatggaggcgaatgga

SEQ ID NO: 383272 - DNA, 285 bp, Homo sapiens; identical to SEQ ID NO: 368607
  chr21:46155048-46155333
  hypo

SEQ ID NO: 383273 - DNA, 97 bp, Homo sapiens; identical to SEQ ID NO: 368608
  chr21:46206226-46206323
  hypo

SEQ ID NO: 383274 - DNA, 173 bp, Homo sapiens; identical to SEQ ID NO: 344560
  chr21:46270497-46270670
  hypo

SEQ ID NO: 383275 - DNA, 106 bp, Homo sapiens; identical to SEQ ID NO: 356418
  chr21:46277475-46277581
  hypo

SEQ ID NO: 383276 - DNA, 45 bp, Homo sapiens; identical to SEQ ID NO: 356419
  chr21:46277614-46277659
  hypo

SEQ ID NO: 383277 - DNA, 42 bp, Homo sapiens; identical to SEQ ID NO: 356420
  chr21:46311711-46311753
  hypo

SEQ ID NO: 383278 - DNA, 54 bp, Homo sapiens
  chr21:46315941-46315995
  hypo
cgcctgcggtgtgagtgctcccgcctgcggtgtgagtgatcccgcctgcagtgt

SEQ ID NO: 383279 - DNA, 160 bp, Homo sapiens; identical to SEQ ID NO: 356421
  chr21:46316870-46317030
  hypo

SEQ ID NO: 383280 - DNA, 175 bp, Homo sapiens; identical to SEQ ID NO: 356422
  chr21:46317252-46317427
  hypo

SEQ ID NO: 383281 - DNA, 60 bp, Homo sapiens; identical to SEQ ID NO: 356423
  chr21:46319505-46319565
  hypo

SEQ ID NO: 383282 - DNA, 643 bp, Homo sapiens; identical to SEQ ID NO: 368616
  chr21:46320233-46320876
  hypo

SEQ ID NO: 383283 - DNA, 663 bp, Homo sapiens; identical to SEQ ID NO: 368617
  chr21:46323288-46323951
  hypo

SEQ ID NO: 383284 - DNA, 218 bp, Homo sapiens; identical to SEQ ID NO: 344569
  chr21:46324938-46325156
  hypo

SEQ ID NO: 383285 - DNA, 422 bp, Homo sapiens; identical to SEQ ID NO: 344570
  chr21:46326574-46326996
  hypo

SEQ ID NO: 383286 - DNA, 216 bp, Homo sapiens; identical to SEQ ID NO: 295181
  chr21:46351437-46351653
  hypo

SEQ ID NO: 383287 - DNA, 394 bp, Homo sapiens; identical to SEQ ID NO: 295182
  chr21:46352279-46352673
  hypo

SEQ ID NO: 383288 - DNA, 278 bp, Homo sapiens; identical to SEQ ID NO: 356427
  chr21:46397986-46398264
  hypo

SEQ ID NO: 383289 - DNA, 59 bp, Homo sapiens
  chr21:46424401-46424460
  hypo
cggtccacccccactgcggtgcagtgccagggtgagccagccacccccggcgggagaaa

SEQ ID NO: 383290 - DNA, 360 bp, Homo sapiens
  chr21:46424520-46424880
  hypo
tctgtgcgtttcccatggatgaggtcatagagcgcgtggccttccgtgcctgcctcttccgggcagcagcatggtgggtgtttctgaggctcctccgtgtcgctccacccgtcagcacttcatgcctctcggggctgggccacatttcgttgcagggatgggccacgtttttaacctgtccatcagcggacggacgtttgggctgattttatcttttggctatgatgaataacgcggtgatcaacattgattcacaagttttgtgcggacccgttttcagttgtcctgagtatcagcccgggcctagacttcccgggttatatggtgatacagtttaaacgcatgtccttgccaagcctc

SEQ ID NO: 383291 - DNA, 771 bp, Homo sapiens; identical to SEQ ID NO: 368623
  chr21:46492439-46493210
  hypo

SEQ ID NO: 383292 - DNA, 153 bp, Homo sapiens
  chr21:46645775-46645928
  hypo
cgtctctgccccctagcgtgttttgtgacaatctccctgggtgaggagtgggtgcacccagccccgaggccagtggttgctcggggccttccgtgtgagttctagtgttcacttgatgccggggaatagaattagagaaaactctgacctgcc

SEQ ID NO: 383293 - DNA, 98 bp, Homo sapiens; identical to SEQ ID NO: 336586
  chr21:46686353-46686451
  hypo

SEQ ID NO: 383294 - DNA, 262 bp, Homo sapiens; identical to SEQ ID NO: 344578
  chr21:46748053-46748315
  hypo

SEQ ID NO: 383295 - DNA, 634 bp, Homo sapiens; identical to SEQ ID NO: 344579
  chr21:46779388-46780022
  hypo

SEQ ID NO: 383296 - DNA, 184 bp, Homo sapiens; identical to SEQ ID NO: 344580
  chr21:46799934-46800118
  hypo

SEQ ID NO: 383297 - DNA, 347 bp, Homo sapiens; identical to SEQ ID NO: 362009
  chr21:46800403-46800750
  hypo

SEQ ID NO: 383298 - DNA, 304 bp, Homo sapiens; identical to SEQ ID NO: 362010
  chr21:46800780-46801084
  hypo

SEQ ID NO: 383299 - DNA, 214 bp, Homo sapiens; identical to SEQ ID NO: 336588
  chr21:46801338-46801552
  hypo

SEQ ID NO: 383300 - DNA, 571 bp, Homo sapiens; identical to SEQ ID NO: 356429
  chr21:46801817-46802388
  hypo

SEQ ID NO: 383301 - DNA, 177 bp, Homo sapiens; identical to SEQ ID NO: 344584
  chr21:46802668-46802845
  hypo

SEQ ID NO: 383302 - DNA, 140 bp, Homo sapiens; identical to SEQ ID NO: 356431
  chr21:46808694-46808834
  hypo

SEQ ID NO: 383303 - DNA, 339 bp, Homo sapiens; identical to SEQ ID NO: 344587
  chr21:46811012-46811351
  hypo

SEQ ID NO: 383304 - DNA, 333 bp, Homo sapiens; identical to SEQ ID NO: 346256
  chr21:46811998-46812331
  hypo

SEQ ID NO: 383305 - DNA, 81 bp, Homo sapiens; identical to SEQ ID NO: 346257
  chr21:46812995-46813076
  hypo

SEQ ID NO: 383306 - DNA, 192 bp, Homo sapiens; identical to SEQ ID NO: 346258
  chr21:46813106-46813298
  hypo

SEQ ID NO: 383307 - DNA, 265 bp, Homo sapiens; identical to SEQ ID NO: 344590
  chr21:46813682-46813947
  hypo

SEQ ID NO: 383308 - DNA, 391 bp, Homo sapiens; identical to SEQ ID NO: 344591
  chr21:46834432-46834823
  hypo

SEQ ID NO: 383309 - DNA, 499 bp, Homo sapiens; identical to SEQ ID NO: 344592
  chr21:46835379-46835878
  hypo

SEQ ID NO: 383310 - DNA, 192 bp, Homo sapiens; identical to SEQ ID NO: 344593
  chr21:46837296-46837488
  hypo

SEQ ID NO: 383311 - DNA, 168 bp, Homo sapiens; identical to SEQ ID NO: 368640
  chr21:46838491-46838659
  hypo

SEQ ID NO: 383312 - DNA, 261 bp, Homo sapiens; identical to SEQ ID NO: 346259
  chr21:46839249-46839510
  hypo

SEQ ID NO: 383313 - DNA, 410 bp, Homo sapiens; identical to SEQ ID NO: 344596
  chr21:46841015-46841425
  hypo

SEQ ID NO: 383314 - DNA, 139 bp, Homo sapiens; identical to SEQ ID NO: 356439
  chr21:46842404-46842543
  hypo

SEQ ID NO: 383315 - DNA, 324 bp, Homo sapiens; identical to SEQ ID NO: 349077
  chr21:46844304-46844628
  hypo

SEQ ID NO: 383316 - DNA, 448 bp, Homo sapiens; identical to SEQ ID NO: 220526
  chr21:46844763-46845211
  hypo

SEQ ID NO: 383317 - DNA, 67 bp, Homo sapiens; identical to SEQ ID NO: 368645
  chr21:46848505-46848572
  hypo

SEQ ID NO: 383318 - DNA, 670 bp, Homo sapiens; identical to SEQ ID NO: 344602
  chr21:46849594-46850264
  hypo

SEQ ID NO: 383319 - DNA, 786 bp, Homo sapiens; identical to SEQ ID NO: 344603
  chr21:46861383-46862169
  hypo

SEQ ID NO: 383320 - DNA, 107 bp, Homo sapiens; identical to SEQ ID NO: 356444
  chr21:46862420-46862527
  hypo

SEQ ID NO: 383321 - DNA, 294 bp, Homo sapiens; identical to SEQ ID NO: 368649
  chr21:46863364-46863658
  hypo

SEQ ID NO: 383322 - DNA, 44 bp, Homo sapiens; identical to SEQ ID NO: 220533
  chr21:46863708-46863752
  hypo

SEQ ID NO: 383323 - DNA, 54 bp, Homo sapiens; identical to SEQ ID NO: 346261
  chr21:46864076-46864130
  hypo

SEQ ID NO: 383324 - DNA, 297 bp, Homo sapiens; identical to SEQ ID NO: 344607
  chr21:46870768-46871065
  hypo

SEQ ID NO: 383325 - DNA, 307 bp, Homo sapiens; identical to SEQ ID NO: 344608
  chr21:46885721-46886028
  hypo

SEQ ID NO: 383326 - DNA, 274 bp, Homo sapiens; identical to SEQ ID NO: 344609
  chr21:46886377-46886651
  hypo

SEQ ID NO: 383327 - DNA, 222 bp, Homo sapiens; identical to SEQ ID NO: 344610
  chr21:46893658-46893880
  hypo

SEQ ID NO: 383328 - DNA, 277 bp, Homo sapiens; identical to SEQ ID NO: 346263
  chr21:46894494-46894771
  hypo

SEQ ID NO: 383329 - DNA, 257 bp, Homo sapiens; identical to SEQ ID NO: 220538
  chr21:46894910-46895167
  hypo

SEQ ID NO: 383330 - DNA, 215 bp, Homo sapiens; identical to SEQ ID NO: 220539
  chr21:46895491-46895706
  hypo

SEQ ID NO: 383331 - DNA, 575 bp, Homo sapiens; identical to SEQ ID NO: 346266
  chr21:46895736-46896311
  hypo

SEQ ID NO: 383332 - DNA, 866 bp, Homo sapiens; identical to SEQ ID NO: 344612
  chr21:46900291-46901157
  hypo

SEQ ID NO: 383333 - DNA, 251 bp, Homo sapiens; identical to SEQ ID NO: 356454
  chr21:46901458-46901709
  hypo

SEQ ID NO: 383334 - DNA, 1234 bp, Homo sapiens; identical to SEQ ID NO: 344614
  chr21:46906455-46907689
  hypo

SEQ ID NO: 383335 - DNA, 310 bp, Homo sapiens; identical to SEQ ID NO: 368663
  chr21:46910337-46910647
  hypo

SEQ ID NO: 383336 - DNA, 616 bp, Homo sapiens; identical to SEQ ID NO: 344616
  chr21:46911022-46911638
  hypo

SEQ ID NO: 383337 - DNA, 755 bp, Homo sapiens; identical to SEQ ID NO: 220545
  chr21:46912528-46913283
  hypo

SEQ ID NO: 383338 - DNA, 319 bp, Homo sapiens; identical to SEQ ID NO: 346270
  chr21:46913360-46913679
  hypo

SEQ ID NO: 383339 - DNA, 469 bp, Homo sapiens; identical to SEQ ID NO: 356459
  chr21:46914465-46914934
  hypo

SEQ ID NO: 383340 - DNA, 395 bp, Homo sapiens; identical to SEQ ID NO: 344619
  chr21:46918218-46918613
  hypo

SEQ ID NO: 383341 - DNA, 222 bp, Homo sapiens; identical to SEQ ID NO: 368669
  chr21:46918891-46919113
  hypo

SEQ ID NO: 383342 - DNA, 229 bp, Homo sapiens; identical to SEQ ID NO: 329091
  chr21:46919143-46919372
  hypo

SEQ ID NO: 383343 - DNA, 300 bp, Homo sapiens; identical to SEQ ID NO: 344621
  chr21:46924382-46924682
  hypo

SEQ ID NO: 383344 - DNA, 42 bp, Homo sapiens; identical to SEQ ID NO: 368672
  chr21:46925925-46925967
  hypo

SEQ ID NO: 383345 - DNA, 59 bp, Homo sapiens; identical to SEQ ID NO: 368673
  chr21:46934012-46934071
  hypo

SEQ ID NO: 383346 - DNA, 390 bp, Homo sapiens; identical to SEQ ID NO: 346272
  chr21:46935349-46935739
  hypo

SEQ ID NO: 383347 - DNA, 132 bp, Homo sapiens; identical to SEQ ID NO: 344625
  chr21:46958789-46958921
  hypo

SEQ ID NO: 383348 - DNA, 55 bp, Homo sapiens; identical to SEQ ID NO: 352575
  chr21:47062898-47062953
  hypo

SEQ ID NO: 383349 - DNA, 142 bp, Homo sapiens; identical to SEQ ID NO: 345651
  chr21:47063290-47063432
  hypo

SEQ ID NO: 383350 - DNA, 387 bp, Homo sapiens; identical to SEQ ID NO: 344629
  chr21:47285233-47285620
  hypo

SEQ ID NO: 383351 - DNA, 539 bp, Homo sapiens; identical to SEQ ID NO: 344631
  chr21:47369859-47370398
  hypo

SEQ ID NO: 383352 - DNA, 504 bp, Homo sapiens; identical to SEQ ID NO: 356465
  chr21:47413791-47414295
  hypo

SEQ ID NO: 383353 - DNA, 44 bp, Homo sapiens; identical to SEQ ID NO: 356466
  chr21:47414327-47414371
  hypo

SEQ ID NO: 383354 - DNA, 209 bp, Homo sapiens; identical to SEQ ID NO: 368682
  chr21:47414718-47414927
  hypo

SEQ ID NO: 383355 - DNA, 307 bp, Homo sapiens; identical to SEQ ID NO: 368683
  chr21:47475683-47475990
  hypo

SEQ ID NO: 383356 - DNA, 195 bp, Homo sapiens
  chr21:47484109-47484304
  hypo
cgctgatttcatcggactcgagagaaaggggggccacagcagcgttttcacaatagctaaaaggtggaagcaatccacgtgtccccagtggatgaatggataaagaaaacgtgtctatccatgcaacggagtatcattcagacgtgaaaaaggacgaagtcctgacgcgtgctacaacgtggatgagcccgagac

SEQ ID NO: 383357 - DNA, 115 bp, Homo sapiens; identical to SEQ ID NO: 368684
  chr21:47489821-47489936
  hypo

SEQ ID NO: 383358 - DNA, 172 bp, Homo sapiens
  chr21:47497763-47497935
  hypo
cggtctggatgcccccgtgaagtcgtaaaggcccccaggtggacccaaggaaagcggggaggagagggcttcctcgtggggctccagaaaccaggcactcgggcccctgcctctgcgagacgtgttcactcattttgcggggtccccagtctctgcaaagcacagcaccgac

SEQ ID NO: 383359 - DNA, 51 bp, Homo sapiens; identical to SEQ ID NO: 368685
  chr21:47532134-47532185
  hypo

SEQ ID NO: 383360 - DNA, 95 bp, Homo sapiens
  chr21:47565081-47565176
  hypo
cggctgccatggcctgtgaatgtggggtcaccctggccgaaccctcaaaccctgctgggcccaagcacttgccggggtgagggcggtgctggtgg

SEQ ID NO: 383361 - DNA, 337 bp, Homo sapiens
  chr21:47565270-47565607
  hypo
ccccagctgggggttcgctgttggtggggcccggggagccctgctgtggccgccactcaccaggtaggcggtgaaggcctcggcgtcggcatccaccagcgtggttagcttggccgaagcctcgcggaagggcgggatcaggcgccgcatcgtcgtgtccagggactggaattggcgccgcccgtaggtcatgaggcccaccatggagcccagcgccgcaccctgcgagaggggtggatgtgggggtcgcagggaccccagacggcccgggaccgaccccaggaagagccaggggcccgggtgatccctgcgggggtcccacccgtgtggcccccac

SEQ ID NO: 383362 - DNA, 384 bp, Homo sapiens; identical to SEQ ID NO: 349095
  chr21:47602705-47603089
  hypo

SEQ ID NO: 383363 - DNA, 276 bp, Homo sapiens; identical to SEQ ID NO: 344643
  chr21:47640150-47640426
  hypo

SEQ ID NO: 383364 - DNA, 273 bp, Homo sapiens; identical to SEQ ID NO: 362015
  chr21:47649460-47649733
  hypo

SEQ ID NO: 383365 - DNA, 67 bp, Homo sapiens; identical to SEQ ID NO: 346274
  chr21:47689571-47689638
  hypo

SEQ ID NO: 383366 - DNA, 129 bp, Homo sapiens; identical to SEQ ID NO: 346275
  chr21:47689700-47689829
  hypo

SEQ ID NO: 383367 - DNA, 100 bp, Homo sapiens; identical to SEQ ID NO: 344647
  chr21:47797837-47797937
  hypo

SEQ ID NO: 383368 - DNA, 188 bp, Homo sapiens; identical to SEQ ID NO: 356471
  chr21:47799620-47799808
  hypo

SEQ ID NO: 383369 - DNA, 731 bp, Homo sapiens; identical to SEQ ID NO: 344649
  chr21:47832850-47833581
  hypo

SEQ ID NO: 383370 - DNA, 210 bp, Homo sapiens
  chr21:47856005-47856215
  hypo
cggctgctctctgccgcccggcttctcaccagcttcaccagccaggccgtggacaggtgtgcacccacgccacctggcgctcactggtcccttgcagccacccctctgtcccagacccggcccgagggctggggcgcgtctggtgtgaggcccctgctcctttgcacttaacgctctagtcctctttctgagactttgctgagggattcc

SEQ ID NO: 383371 - DNA, 221 bp, Homo sapiens; identical to SEQ ID NO: 344651
  chr21:47872870-47873091
  hypo

SEQ ID NO: 383372 - DNA, 67 bp, Homo sapiens; identical to SEQ ID NO: 356473
  chr21:47918529-47918596
  hypo

SEQ ID NO: 383373 - DNA, 90 bp, Homo sapiens; identical to SEQ ID NO: 375268
  chr21:48087109-48087199
  hypo

SEQ ID NO: 383374 - DNA, 106 bp, Homo sapiens; identical to SEQ ID NO: 344655
  chr22:18084157-18084263
  hypo

SEQ ID NO: 383375 - DNA, 118 bp, Homo sapiens; identical to SEQ ID NO: 356475
  chr22:18265358-18265476
  hypo

SEQ ID NO: 383376 - DNA, 196 bp, Homo sapiens; identical to SEQ ID NO: 356476
  chr22:18265523-18265719
  hypo

SEQ ID NO: 383377 - DNA, 145 bp, Homo sapiens; identical to SEQ ID NO: 368698
  chr22:18287371-18287516
  hypo

SEQ ID NO: 383378 - DNA, 44 bp, Homo sapiens; identical to SEQ ID NO: 356477
  chr22:18328049-18328093
  hypo

SEQ ID NO: 383379 - DNA, 537 bp, Homo sapiens; identical to SEQ ID NO: 356478
  chr22:18340868-18341405
  hypo

SEQ ID NO: 383380 - DNA, 289 bp, Homo sapiens; identical to SEQ ID NO: 356479
  chr22:18348544-18348833
  hypo

SEQ ID NO: 383381 - DNA, 542 bp, Homo sapiens; identical to SEQ ID NO: 344661
  chr22:18443260-18443802
  hypo

SEQ ID NO: 383382 - DNA, 426 bp, Homo sapiens; identical to SEQ ID NO: 368703
  chr22:18619428-18619854
  hypo

SEQ ID NO: 383383 - DNA, 129 bp, Homo sapiens; identical to SEQ ID NO: 352578
  chr22:19706042-19706171
  hypo

SEQ ID NO: 383384 - DNA, 175 bp, Homo sapiens; identical to SEQ ID NO: 356482
  chr22:19771495-19771670
  hypo

SEQ ID NO: 383385 - DNA, 218 bp, Homo sapiens; identical to SEQ ID NO: 356483
  chr22:19771889-19772107
  hypo

SEQ ID NO: 383386 - DNA, 206 bp, Homo sapiens
  chr22:19799727-19799933
  hypo
cgcaggcgcctcctaatcaaatgcagaggatgagcacaactgtttggagaacatggggcctcaggcaggctggctctcacctcgtcgctgcccctccctggcacggcaagcgtccagcgtggctggcccccggccaggatgctgctccggcagaagcccacactctccaagcacacggagtccacgacagcgctcctgccctccgc

SEQ ID NO: 383387 - DNA, 406 bp, Homo sapiens; identical to SEQ ID NO: 344666
  chr22:19830509-19830915
  hypo

SEQ ID NO: 383388 - DNA, 381 bp, Homo sapiens; identical to SEQ ID NO: 329264
  chr22:19839604-19839985
  hypo

SEQ ID NO: 383389 - DNA, 353 bp, Homo sapiens; identical to SEQ ID NO: 344668
  chr22:19899693-19900046
  hypo

SEQ ID NO: 383390 - DNA, 88 bp, Homo sapiens; identical to SEQ ID NO: 344669
  chr22:19924393-19924481
  hypo

SEQ ID NO: 383391 - DNA, 388 bp, Homo sapiens; identical to SEQ ID NO: 344671
  chr22:19968748-19969136
  hypo

SEQ ID NO: 383392 - DNA, 232 bp, Homo sapiens; identical to SEQ ID NO: 344672
  chr22:20050754-20050986
  hypo

SEQ ID NO: 383393 - DNA, 118 bp, Homo sapiens; identical to SEQ ID NO: 356486
  chr22:20228961-20229079
  hypo

SEQ ID NO: 383394 - DNA, 155 bp, Homo sapiens; identical to SEQ ID NO: 356487
  chr22:20229239-20229394
  hypo

SEQ ID NO: 383395 - DNA, 210 bp, Homo sapiens; identical to SEQ ID NO: 356488
  chr22:20929364-20929574
  hypo

SEQ ID NO: 383396 - DNA, 187 bp, Homo sapiens; identical to SEQ ID NO: 344676
  chr22:21011052-21011239
  hypo

SEQ ID NO: 383397 - DNA, 69 bp, Homo sapiens; identical to SEQ ID NO: 362021
  chr22:21386510-21386579
  hypo

SEQ ID NO: 383398 - DNA, 201 bp, Homo sapiens; identical to SEQ ID NO: 344679
  chr22:21977477-21977678
  hypo

SEQ ID NO: 383399 - DNA, 46 bp, Homo sapiens; identical to SEQ ID NO: 356490
  chr22:21983041-21983087
  hypo

SEQ ID NO: 383400 - DNA, 66 bp, Homo sapiens; identical to SEQ ID NO: 344682
  chr22:22029114-22029180
  hypo

SEQ ID NO: 383401 - DNA, 212 bp, Homo sapiens; identical to SEQ ID NO: 356492
  chr22:22036173-22036385
  hypo

SEQ ID NO: 383402 - DNA, 170 bp, Homo sapiens; identical to SEQ ID NO: 344684
  chr22:22037104-22037274
  hypo

SEQ ID NO: 383403 - DNA, 97 bp, Homo sapiens; identical to SEQ ID NO: 356493
  chr22:22057979-22058076
  hypo

SEQ ID NO: 383404 - DNA, 279 bp, Homo sapiens; identical to SEQ ID NO: 344686
  chr22:22068426-22068705
  hypo

SEQ ID NO: 383405 - DNA, 354 bp, Homo sapiens; identical to SEQ ID NO: 336607
  chr22:22292773-22293127
  hypo

SEQ ID NO: 383406 - DNA, 192 bp, Homo sapiens; identical to SEQ ID NO: 344688
  chr22:22324565-22324757
  hypo

SEQ ID NO: 383407 - DNA, 136 bp, Homo sapiens; identical to SEQ ID NO: 345653
  chr22:22862472-22862608
  hypo

SEQ ID NO: 383408 - DNA, 134 bp, Homo sapiens; identical to SEQ ID NO: 349101
  chr22:22899978-22900112
  hypo

SEQ ID NO: 383409 - DNA, 116 bp, Homo sapiens; identical to SEQ ID NO: 356497
  chr22:23437460-23437576
  hypo

SEQ ID NO: 383410 - DNA, 74 bp, Homo sapiens; identical to SEQ ID NO: 356498
  chr22:23437631-23437705
  hypo

SEQ ID NO: 383411 - DNA, 90 bp, Homo sapiens; identical to SEQ ID NO: 368727
  chr22:23453477-23453567
  hypo

SEQ ID NO: 383412 - DNA, 499 bp, Homo sapiens; identical to SEQ ID NO: 368728
  chr22:23800960-23801459
  hypo

SEQ ID NO: 383413 - DNA, 151 bp, Homo sapiens; identical to SEQ ID NO: 356499
  chr22:24179789-24179940
  hypo

SEQ ID NO: 383414 - DNA, 226 bp, Homo sapiens; identical to SEQ ID NO: 356500
  chr22:24179982-24180208
  hypo

SEQ ID NO: 383415 - DNA, 179 bp, Homo sapiens; identical to SEQ ID NO: 344695
  chr22:24205105-24205284
  hypo

SEQ ID NO: 383416 - DNA, 187 bp, Homo sapiens; identical to SEQ ID NO: 295268
  chr22:24552924-24553111
  hypo

SEQ ID NO: 383417 - DNA, 31 bp, Homo sapiens; identical to SEQ ID NO: 362028
  chr22:24819665-24819696
  hypo

SEQ ID NO: 383418 - DNA, 173 bp, Homo sapiens; identical to SEQ ID NO: 295271
  chr22:24819901-24820074
  hypo

SEQ ID NO: 383419 - DNA, 61 bp, Homo sapiens; identical to SEQ ID NO: 295272
  chr22:24820486-24820547
  hypo

SEQ ID NO: 383420 - DNA, 240 bp, Homo sapiens; identical to SEQ ID NO: 345654
  chr22:25348202-25348442
  hypo

SEQ ID NO: 383421 - DNA, 787 bp, Homo sapiens; identical to SEQ ID NO: 206075
  chr22:25348485-25349272
  hypo

SEQ ID NO: 383422 - DNA, 395 bp, Homo sapiens; identical to SEQ ID NO: 352589
  chr22:25349348-25349743
  hypo

SEQ ID NO: 383423 - DNA, 305 bp, Homo sapiens; identical to SEQ ID NO: 344700
  chr22:25561932-25562237
  hypo

SEQ ID NO: 383424 - DNA, 122 bp, Homo sapiens; identical to SEQ ID NO: 344701
  chr22:25570292-25570414
  hypo

SEQ ID NO: 383425 - DNA, 352 bp, Homo sapiens; identical to SEQ ID NO: 344702
  chr22:25602982-25603334
  hypo

SEQ ID NO: 383426 - DNA, 60 bp, Homo sapiens; identical to SEQ ID NO: 295278
  chr22:25678186-25678246
  hypo

SEQ ID NO: 383427 - DNA, 45 bp, Homo sapiens; identical to SEQ ID NO: 375292
  chr22:26565120-26565165
  hypo

SEQ ID NO: 383428 - DNA, 284 bp, Homo sapiens; identical to SEQ ID NO: 362037
  chr22:26565999-26566283
  hypo

SEQ ID NO: 383429 - DNA, 62 bp, Homo sapiens; identical to SEQ ID NO: 344706
  chr22:26999530-26999592
  hypo

SEQ ID NO: 383430 - DNA, 251 bp, Homo sapiens; identical to SEQ ID NO: 349106
  chr22:27007869-27008120
  hypo

SEQ ID NO: 383431 - DNA, 88 bp, Homo sapiens; identical to SEQ ID NO: 356511
  chr22:27019127-27019215
  hypo

SEQ ID NO: 383432 - DNA, 299 bp, Homo sapiens; identical to SEQ ID NO: 352596
  chr22:27068622-27068921
  hypo

SEQ ID NO: 383433 - DNA, 63 bp, Homo sapiens; identical to SEQ ID NO: 295312
  chr22:29075343-29075406
  hypo

SEQ ID NO: 383434 - DNA, 67 bp, Homo sapiens; identical to SEQ ID NO: 344712
  chr22:29076607-29076674
  hypo

SEQ ID NO: 383435 - DNA, 86 bp, Homo sapiens; identical to SEQ ID NO: 344714
  chr22:29587127-29587213
  hypo

SEQ ID NO: 383436 - DNA, 139 bp, Homo sapiens; identical to SEQ ID NO: 344715
  chr22:29686357-29686496
  hypo

SEQ ID NO: 383437 - DNA, 177 bp, Homo sapiens; identical to SEQ ID NO: 344716
  chr22:29733772-29733949
  hypo

SEQ ID NO: 383438 - DNA, 120 bp, Homo sapiens; identical to SEQ ID NO: 344717
  chr22:29758124-29758244
  hypo

SEQ ID NO: 383439 - DNA, 199 bp, Homo sapiens; identical to SEQ ID NO: 362054
  chr22:29876679-29876878
  hypo

SEQ ID NO: 383440 - DNA, 79 bp, Homo sapiens; identical to SEQ ID NO: 356518
  chr22:30084279-30084358
  hypo

SEQ ID NO: 383441 - DNA, 120 bp, Homo sapiens; identical to SEQ ID NO: 356519
  chr22:30084388-30084508
  hypo

SEQ ID NO: 383442 - DNA, 457 bp, Homo sapiens; identical to SEQ ID NO: 356520
  chr22:30090282-30090739
  hypo

SEQ ID NO: 383443 - DNA, 74 bp, Homo sapiens; identical to SEQ ID NO: 356521
  chr22:30090769-30090843
  hypo

SEQ ID NO: 383444 - DNA, 36 bp, Homo sapiens; identical to SEQ ID NO: 368757
  chr22:30091074-30091110
  hypo

SEQ ID NO: 383445 - DNA, 447 bp, Homo sapiens; identical to SEQ ID NO: 368758
  chr22:30091301-30091748
  hypo

SEQ ID NO: 383446 - DNA, 51 bp, Homo sapiens; identical to SEQ ID NO: 344723
  chr22:30141139-30141190
  hypo

SEQ ID NO: 383447 - DNA, 254 bp, Homo sapiens; identical to SEQ ID NO: 344724
  chr22:30190745-30190999
  hypo

SEQ ID NO: 383448 - DNA, 496 bp, Homo sapiens; identical to SEQ ID NO: 344726
  chr22:30939634-30940130
  hypo

SEQ ID NO: 383449 - DNA, 132 bp, Homo sapiens
  chr22:30940932-30941064
  hypo
gtccactccagcgcccggtcgccacccttctttgccccgggaaccccatcccggcacctcccaccccgcatacaccacctaccccatgcaaaaccctatgatggcaggaatcgagacctccaaggacccgtc

SEQ ID NO: 383450 - DNA, 821 bp, Homo sapiens; identical to SEQ ID NO: 344728
  chr22:30950922-30951743
  hypo

SEQ ID NO: 383451 - DNA, 395 bp, Homo sapiens; identical to SEQ ID NO: 362057
  chr22:31198752-31199147
  hypo

SEQ ID NO: 383452 - DNA, 99 bp, Homo sapiens; identical to SEQ ID NO: 344730
  chr22:31260817-31260916
  hypo

SEQ ID NO: 383453 - DNA, 688 bp, Homo sapiens; identical to SEQ ID NO: 344731
  chr22:31266269-31266957
  hypo

SEQ ID NO: 383454 - DNA, 163 bp, Homo sapiens; identical to SEQ ID NO: 344732
  chr22:31475566-31475729
  hypo

SEQ ID NO: 383455 - DNA, 410 bp, Homo sapiens; identical to SEQ ID NO: 344733
  chr22:31483882-31484292
  hypo

SEQ ID NO: 383456 - DNA, 212 bp, Homo sapiens; identical to SEQ ID NO: 344734
  chr22:31486794-31487006
  hypo

SEQ ID NO: 383457 - DNA, 425 bp, Homo sapiens; identical to SEQ ID NO: 344735
  chr22:31487263-31487688
  hypo

SEQ ID NO: 383458 - DNA, 345 bp, Homo sapiens; identical to SEQ ID NO: 356525
  chr22:31489493-31489838
  hypo

SEQ ID NO: 383459 - DNA, 68 bp, Homo sapiens
  chr22:31494664-31494732
  hypo
cgaggaccaggccagcccacgggccggcagcctggcggcgctcgagaaacggcaggccgagaagaaga

SEQ ID NO: 383460 - DNA, 68 bp, Homo sapiens
  chr22:31494797-31494865
  hypo
gagaagctggagaaggagggcgcggccgggtgagctgcagaagtgggctgggcagtggggggcggggc

SEQ ID NO: 383461 - DNA, 96 bp, Homo sapiens; identical to SEQ ID NO: 356526
  chr22:31495078-31495174
  hypo

SEQ ID NO: 383462 - DNA, 567 bp, Homo sapiens; identical to SEQ ID NO: 368769
  chr22:31522433-31523000
  hypo

SEQ ID NO: 383463 - DNA, 365 bp, Homo sapiens; identical to SEQ ID NO: 356527
  chr22:32078028-32078393
  hypo

SEQ ID NO: 383464 - DNA, 81 bp, Homo sapiens; identical to SEQ ID NO: 362058
  chr22:32571858-32571939
  hypo

SEQ ID NO: 383465 - DNA, 389 bp, Homo sapiens; identical to SEQ ID NO: 344743
  chr22:32665378-32665767
  hypo

SEQ ID NO: 383466 - DNA, 132 bp, Homo sapiens; identical to SEQ ID NO: 344744
  chr22:32804860-32804992
  hypo

SEQ ID NO: 383467 - DNA, 791 bp, Homo sapiens; identical to SEQ ID NO: 362059
  chr22:34316250-34317041
  hypo

SEQ ID NO: 383468 - DNA, 102 bp, Homo sapiens; identical to SEQ ID NO: 344747
  chr22:35821646-35821748
  hypo

SEQ ID NO: 383469 - DNA, 269 bp, Homo sapiens; identical to SEQ ID NO: 356530
  chr22:35848670-35848939
  hypo

SEQ ID NO: 383470 - DNA, 127 bp, Homo sapiens; identical to SEQ ID NO: 344749
  chr22:36519474-36519601
  hypo

SEQ ID NO: 383471 - DNA, 96 bp, Homo sapiens; identical to SEQ ID NO: 346280
  chr22:36902565-36902661
  hypo

SEQ ID NO: 383472 - DNA, 112 bp, Homo sapiens; identical to SEQ ID NO: 368779
  chr22:36907702-36907814
  hypo

SEQ ID NO: 383473 - DNA, 290 bp, Homo sapiens; identical to SEQ ID NO: 344753
  chr22:38061005-38061295
  hypo

SEQ ID NO: 383474 - DNA, 208 bp, Homo sapiens; identical to SEQ ID NO: 344754
  chr22:38146528-38146736
  hypo

SEQ ID NO: 383475 - DNA, 237 bp, Homo sapiens; identical to SEQ ID NO: 344756
  chr22:38363635-38363872
  hypo

SEQ ID NO: 383476 - DNA, 54 bp, Homo sapiens
  chr22:38365003-38365057
  hypo
cgcctttgtgctggcatccaggcagccgccccagagtgcgggggtcactttctc

SEQ ID NO: 383477 - DNA, 316 bp, Homo sapiens; identical to SEQ ID NO: 344758
  chr22:38369819-38370135
  hypo

SEQ ID NO: 383478 - DNA, 271 bp, Homo sapiens; identical to SEQ ID NO: 344759
  chr22:38378835-38379106
  hypo

SEQ ID NO: 383479 - DNA, 800 bp, Homo sapiens; identical to SEQ ID NO: 356533
  chr22:38379141-38379941
  hypo

SEQ ID NO: 383480 - DNA, 53 bp, Homo sapiens; identical to SEQ ID NO: 368783
  chr22:38380268-38380321
  hypo

SEQ ID NO: 383481 - DNA, 136 bp, Homo sapiens; identical to SEQ ID NO: 368784
  chr22:38380437-38380573
  hypo

SEQ ID NO: 383482 - DNA, 230 bp, Homo sapiens; identical to SEQ ID NO: 344762
  chr22:38381994-38382224
  hypo

SEQ ID NO: 383483 - DNA, 591 bp, Homo sapiens; identical to SEQ ID NO: 356534
  chr22:38434385-38434976
  hypo

SEQ ID NO: 383484 - DNA, 146 bp, Homo sapiens; identical to SEQ ID NO: 356535
  chr22:38435006-38435152
  hypo

SEQ ID NO: 383485 - DNA, 292 bp, Homo sapiens; identical to SEQ ID NO: 344764
  chr22:38506297-38506589
  hypo

SEQ ID NO: 383486 - DNA, 55 bp, Homo sapiens; identical to SEQ ID NO: 368789
  chr22:38516974-38517029
  hypo

SEQ ID NO: 383487 - DNA, 228 bp, Homo sapiens; identical to SEQ ID NO: 344767
  chr22:38528855-38529083
  hypo

SEQ ID NO: 383488 - DNA, 84 bp, Homo sapiens; identical to SEQ ID NO: 368790
  chr22:38687297-38687381
  hypo

SEQ ID NO: 383489 - DNA, 391 bp, Homo sapiens; identical to SEQ ID NO: 368791
  chr22:38694593-38694984
  hypo

SEQ ID NO: 383490 - DNA, 59 bp, Homo sapiens; identical to SEQ ID NO: 368792
  chr22:38874156-38874215
  hypo

SEQ ID NO: 383491 - DNA, 123 bp, Homo sapiens; identical to SEQ ID NO: 362064
  chr22:38966046-38966169
  hypo

SEQ ID NO: 383492 - DNA, 55 bp, Homo sapiens; identical to SEQ ID NO: 344772
  chr22:39144766-39144821
  hypo

SEQ ID NO: 383493 - DNA, 320 bp, Homo sapiens; identical to SEQ ID NO: 352609
  chr22:39549067-39549387
  hypo

SEQ ID NO: 383494 - DNA, 137 bp, Homo sapiens; identical to SEQ ID NO: 352610
  chr22:39549472-39549609
  hypo

SEQ ID NO: 383495 - DNA, 219 bp, Homo sapiens; identical to SEQ ID NO: 344774
  chr22:39756401-39756620
  hypo

SEQ ID NO: 383496 - DNA, 31 bp, Homo sapiens; identical to SEQ ID NO: 295456
  chr22:39853626-39853657
  hypo

SEQ ID NO: 383497 - DNA, 209 bp, Homo sapiens; identical to SEQ ID NO: 295457
  chr22:39853690-39853899
  hypo

SEQ ID NO: 383498 - DNA, 130 bp, Homo sapiens; identical to SEQ ID NO: 345661
  chr22:39853934-39854064
  hypo

SEQ ID NO: 383499 - DNA, 121 bp, Homo sapiens; identical to SEQ ID NO: 368801
  chr22:40024720-40024841
  hypo

SEQ ID NO: 383500 - DNA, 423 bp, Homo sapiens; identical to SEQ ID NO: 356541
  chr22:40045208-40045631
  hypo

SEQ ID NO: 383501 - DNA, 220 bp, Homo sapiens; identical to SEQ ID NO: 356542
  chr22:40045721-40045941
  hypo

SEQ ID NO: 383502 - DNA, 53 bp, Homo sapiens; identical to SEQ ID NO: 344779
  chr22:40061917-40061970
  hypo

SEQ ID NO: 383503 - DNA, 171 bp, Homo sapiens; identical to SEQ ID NO: 356543
  chr22:40074986-40075157
  hypo

SEQ ID NO: 383504 - DNA, 195 bp, Homo sapiens; identical to SEQ ID NO: 356544
  chr22:40075302-40075497
  hypo

SEQ ID NO: 383505 - DNA, 317 bp, Homo sapiens; identical to SEQ ID NO: 344781
  chr22:40804031-40804348
  hypo

SEQ ID NO: 383506 - DNA, 192 bp, Homo sapiens; identical to SEQ ID NO: 344782
  chr22:40812801-40812993
  hypo

SEQ ID NO: 383507 - DNA, 190 bp, Homo sapiens; identical to SEQ ID NO: 344783
  chr22:41536192-41536382
  hypo

SEQ ID NO: 383508 - DNA, 106 bp, Homo sapiens; identical to SEQ ID NO: 349116
  chr22:41634855-41634961
  hypo

SEQ ID NO: 383509 - DNA, 366 bp, Homo sapiens; identical to SEQ ID NO: 344785
  chr22:41639303-41639669
  hypo

SEQ ID NO: 383510 - DNA, 302 bp, Homo sapiens; identical to SEQ ID NO: 368811
  chr22:41656931-41657233
  hypo

SEQ ID NO: 383511 - DNA, 288 bp, Homo sapiens; identical to SEQ ID NO: 368812
  chr22:41657416-41657704
  hypo

SEQ ID NO: 383512 - DNA, 69 bp, Homo sapiens; identical to SEQ ID NO: 344787
  chr22:41658279-41658348
  hypo

SEQ ID NO: 383513 - DNA, 315 bp, Homo sapiens
  chr22:41667782-41668097
  hypo
cgcccgtcaagacctcactcctcacttgcacactgctgcagcagcagagagaacccctctggcatcagcactacgcccggaacactgggccatcaagggcagatcccaccctgcccctgccctgggctgcttcctgcacagaggagggcctaggaggtggtgtgcagtgattcactcgagccactgcatctgtagcaggcgggaaggtgcatgcagcactcctaccggccaggctctcccaggacaacctctgaggaagaaggaagggctctatctcctatttcatataagagcccagcctcagagctgcacgca

SEQ ID NO: 383514 - DNA, 63 bp, Homo sapiens
  chr22:41668168-41668231
  hypo
ctcctgctgagtcctgtagccttcaggcccatggctccttcattcctgttcttcacaggtctc

SEQ ID NO: 383515 - DNA, 143 bp, Homo sapiens; identical to SEQ ID NO: 344789
  chr22:41669366-41669509
  hypo

SEQ ID NO: 383516 - DNA, 550 bp, Homo sapiens
  chr22:41970751-41971301
  hypo
cgtgccagtggagggcgacgaggtgacctacaagatgtgccctatccctcccaagaaccagaagttccaggccgtggaggtggtgctcactcagctggccccccacactccccacgagacgtggtctggccaggtcgtgggctcctaggctgagtggttcacaggccagctggccgggggttggggagccacacagggtgaacgggcagcagccggctccatgccccactgccctggctgatgagtccttcggtggcctcagtgtgcacgtctgtctgtccgtctgtgcttgtggctatgagcgtgtgcctccacccaccccacgacccgtgactactgtgcaagctggccaggaggtaggtggagggcaaggccaccagacctggcttcgcgctgtccactgcctctctcctcccctccctgccgcagacacgcaggacccgctcgccctcctgcttacccgtccccacggtgactgagctgcgagagcctgcgctgggctcactccctggcctccgcccctgagctgtcccgtgtcagtccctggccc

SEQ ID NO: 383517 - DNA, 137 bp, Homo sapiens; identical to SEQ ID NO: 344792
  chr22:41973298-41973435
  hypo

SEQ ID NO: 383518 - DNA, 59 bp, Homo sapiens; identical to SEQ ID NO: 344793
  chr22:42033751-42033810
  hypo

SEQ ID NO: 383519 - DNA, 207 bp, Homo sapiens; identical to SEQ ID NO: 368817
  chr22:42095795-42096002
  hypo

SEQ ID NO: 383520 - DNA, 70 bp, Homo sapiens; identical to SEQ ID NO: 368818
  chr22:42096253-42096323
  hypo

SEQ ID NO: 383521 - DNA, 50 bp, Homo sapiens; identical to SEQ ID NO: 368819
  chr22:42395290-42395340
  hypo

SEQ ID NO: 383522 - DNA, 32 bp, Homo sapiens; identical to SEQ ID NO: 356550
  chr22:42667137-42667169
  hypo

SEQ ID NO: 383523 - DNA, 77 bp, Homo sapiens; identical to SEQ ID NO: 356551
  chr22:42995235-42995312
  hypo

SEQ ID NO: 383524 - DNA, 106 bp, Homo sapiens; identical to SEQ ID NO: 220854
  chr22:42995599-42995705
  hypo

SEQ ID NO: 383525 - DNA, 151 bp, Homo sapiens; identical to SEQ ID NO: 344799
  chr22:43000061-43000212
  hypo

SEQ ID NO: 383526 - DNA, 141 bp, Homo sapiens; identical to SEQ ID NO: 344800
  chr22:43351254-43351395
  hypo

SEQ ID NO: 383527 - DNA, 39 bp, Homo sapiens; identical to SEQ ID NO: 368825
  chr22:43434578-43434617
  hypo

SEQ ID NO: 383528 - DNA, 173 bp, Homo sapiens; identical to SEQ ID NO: 344802
  chr22:43529312-43529485
  hypo

SEQ ID NO: 383529 - DNA, 186 bp, Homo sapiens; identical to SEQ ID NO: 368827
  chr22:43570061-43570247
  hypo

SEQ ID NO: 383530 - DNA, 298 bp, Homo sapiens; identical to SEQ ID NO: 368828
  chr22:43570314-43570612
  hypo

SEQ ID NO: 383531 - DNA, 559 bp, Homo sapiens; identical to SEQ ID NO: 295522
  chr22:44419919-44420478
  hypo

SEQ ID NO: 383532 - DNA, 73 bp, Homo sapiens; identical to SEQ ID NO: 368830
  chr22:44500148-44500221
  hypo

SEQ ID NO: 383533 - DNA, 34 bp, Homo sapiens; identical to SEQ ID NO: 295527
  chr22:45064203-45064237
  hypo

SEQ ID NO: 383534 - DNA, 389 bp, Homo sapiens; identical to SEQ ID NO: 295528
  chr22:45064286-45064675
  hypo

SEQ ID NO: 383535 - DNA, 147 bp, Homo sapiens; identical to SEQ ID NO: 352628
  chr22:45064918-45065065
  hypo

SEQ ID NO: 383536 - DNA, 324 bp, Homo sapiens; identical to SEQ ID NO: 344808
  chr22:45074487-45074811
  hypo

SEQ ID NO: 383537 - DNA, 98 bp, Homo sapiens; identical to SEQ ID NO: 356559
  chr22:45075627-45075725
  hypo

SEQ ID NO: 383538 - DNA, 553 bp, Homo sapiens; identical to SEQ ID NO: 345662
  chr22:45097777-45098330
  hypo

SEQ ID NO: 383539 - DNA, 470 bp, Homo sapiens; identical to SEQ ID NO: 206166
  chr22:45098381-45098851
  hypo

SEQ ID NO: 383540 - DNA, 78 bp, Homo sapiens; identical to SEQ ID NO: 356562
  chr22:45120758-45120836
  hypo

SEQ ID NO: 383541 - DNA, 116 bp, Homo sapiens
  chr22:45123856-45123972
  hypo
cgcccctcgcttgatgcggcacattctggcggtgcctgtacctcccaccagatctggcctaggggagccggggctctcggagaagggagttttgtgtggcttgaaaggagctctgc

SEQ ID NO: 383542 - DNA, 261 bp, Homo sapiens
  chr22:45277521-45277782
  hypo
tcctcgctctgcacctctgcgtgtgtgcatgcgtgtctgtggtcgtggccgcgtgcgatgcacacacgcgtgttcagtgcaattcggcaccatgtgatatgctcggggtgggagcccgtggctcctggacgcttatcctgttgtgctgagtccctcaggactgggatgtgggaatcgggcaagggtgacaagctgccactgcccaccctggatgcagaagcccttggcagcaagtctggtccccgaaggccggaacctccc

SEQ ID NO: 383543 - DNA, 176 bp, Homo sapiens; identical to SEQ ID NO: 295538
  chr22:45405768-45405944
  hypo

SEQ ID NO: 383544 - DNA, 178 bp, Homo sapiens; identical to SEQ ID NO: 362097
  chr22:45406385-45406563
  hypo

SEQ ID NO: 383545 - DNA, 123 bp, Homo sapiens; identical to SEQ ID NO: 344816
  chr22:45581821-45581944
  hypo

SEQ ID NO: 383546 - DNA, 733 bp, Homo sapiens; identical to SEQ ID NO: 356563
  chr22:45592910-45593643
  hypo

SEQ ID NO: 383547 - DNA, 258 bp, Homo sapiens; identical to SEQ ID NO: 346288
  chr22:45593715-45593973
  hypo

SEQ ID NO: 383548 - DNA, 238 bp, Homo sapiens; identical to SEQ ID NO: 329970
  chr22:45603946-45604184
  hypo

SEQ ID NO: 383549 - DNA, 55 bp, Homo sapiens; identical to SEQ ID NO: 356566
  chr22:45604387-45604442
  hypo

SEQ ID NO: 383550 - DNA, 342 bp, Homo sapiens; identical to SEQ ID NO: 368846
  chr22:45607771-45608113
  hypo

SEQ ID NO: 383551 - DNA, 176 bp, Homo sapiens; identical to SEQ ID NO: 344820
  chr22:45613836-45614012
  hypo

SEQ ID NO: 383552 - DNA, 567 bp, Homo sapiens; identical to SEQ ID NO: 344821
  chr22:45808579-45809146
  hypo

SEQ ID NO: 383553 - DNA, 392 bp, Homo sapiens; identical to SEQ ID NO: 344822
  chr22:45959040-45959432
  hypo

SEQ ID NO: 383554 - DNA, 154 bp, Homo sapiens; identical to SEQ ID NO: 344823
  chr22:45975280-45975434
  hypo

SEQ ID NO: 383555 - DNA, 463 bp, Homo sapiens; identical to SEQ ID NO: 344824
  chr22:46255154-46255617
  hypo

SEQ ID NO: 383556 - DNA, 447 bp, Homo sapiens; identical to SEQ ID NO: 344825
  chr22:46261704-46262151
  hypo

SEQ ID NO: 383557 - DNA, 127 bp, Homo sapiens; identical to SEQ ID NO: 344826
  chr22:46339131-46339258
  hypo

SEQ ID NO: 383558 - DNA, 351 bp, Homo sapiens; identical to SEQ ID NO: 344827
  chr22:46597084-46597435
  hypo

SEQ ID NO: 383559 - DNA, 102 bp, Homo sapiens
  chr22:46599521-46599623
  hypo
cgaaaaggaaaaaagaaaaaaactctcagcaaagctagaggggatcctgccaatgagttcccagctcacagactgattagcaggccaccacacatgagctgg

SEQ ID NO: 383560 - DNA, 633 bp, Homo sapiens
  chr22:46704062-46704695
  hypo
cgatgaaaaatttgacttcgatctttcattgtcttcttcgaggtaaacaaatgagttttcttcccttgccttgggcataaccacattcagtaaagtctttcctttaaatgccagtgttatgagttattaatcattctttttttaaacaaatagtgcaaatgaagatgatgaagtcttcttcggaccctttggacataaagaaagatgtattgctgccagcttggaattaaataatccggttcccgaacagcctccgttgcccacatctgagagtccctttgcctggagccctctggccggggagaagttcgtggaggtgtacaaagaagctcacttactggctttacacattgagagcagcagccggaaccaggcagcccaagctgccaagcctgaagaccctcggagccagggcgtggaaagattcatacaggagtcaaaattaaaaataaacctctttgagaaagaaaaggaaatgaagaaaagccccacgtctcttaaaagggagacatactacctgtcagacagccccttgctggggccccctgtgggtgagcctcggctcttggcctcctccccggccctgcccagctctggtgcccaggcccgcctcacccgggcgccggggcctcc

SEQ ID NO: 383561 - DNA, 710 bp, Homo sapiens; identical to SEQ ID NO: 344831
  chr22:46815686-46816396
  hypo

SEQ ID NO: 383562 - DNA, 224 bp, Homo sapiens; identical to SEQ ID NO: 330068
  chr22:46929401-46929625
  hypo

SEQ ID NO: 383563 - DNA, 203 bp, Homo sapiens; identical to SEQ ID NO: 330069
  chr22:46929718-46929921
  hypo

SEQ ID NO: 383564 - DNA, 228 bp, Homo sapiens
  chr22:46930034-46930262
  hypo
gttctcctcaacaaacagctccagttcgtccttctcaaacatgggggcattgtcattaatgtccaagatggtcacctggatttctaccgaggcgctaaggggagtgggactgccccgatccacagccagagcccaaaggttgtacacggccacattctcccggtccagccggcgctgggtgcgaatcacaccggacgtgggctcgatgtagaagtccccatcgccgtc

SEQ ID NO: 383565 - DNA, 281 bp, Homo sapiens; identical to SEQ ID NO: 349123
  chr22:46931438-46931719
  hypo

SEQ ID NO: 383566 - DNA, 68 bp, Homo sapiens; identical to SEQ ID NO: 349124
  chr22:46932128-46932196
  hypo

SEQ ID NO: 383567 - DNA, 359 bp, Homo sapiens; identical to SEQ ID NO: 356572
  chr22:46979972-46980331
  hypo

SEQ ID NO: 383568 - DNA, 134 bp, Homo sapiens; identical to SEQ ID NO: 356573
  chr22:47022417-47022551
  hypo

SEQ ID NO: 383569 - DNA, 412 bp, Homo sapiens; identical to SEQ ID NO: 220934
  chr22:47022632-47023044
  hypo

SEQ ID NO: 383570 - DNA, 58 bp, Homo sapiens; identical to SEQ ID NO: 356575
  chr22:47023191-47023249
  hypo

SEQ ID NO: 383571 - DNA, 263 bp, Homo sapiens; identical to SEQ ID NO: 344836
  chr22:47054031-47054294
  hypo

SEQ ID NO: 383572 - DNA, 209 bp, Homo sapiens; identical to SEQ ID NO: 344837
  chr22:47075172-47075381
  hypo

SEQ ID NO: 383573 - DNA, 850 bp, Homo sapiens; identical to SEQ ID NO: 344838
  chr22:47197347-47198197
  hypo

SEQ ID NO: 383574 - DNA, 961 bp, Homo sapiens; identical to SEQ ID NO: 368864
  chr22:47298524-47299485
  hypo

SEQ ID NO: 383575 - DNA, 236 bp, Homo sapiens
  chr22:47327916-47328152
  hypo
cgaggaatgccttattctgatgttacgcggtttctttcctggctcatgcatgcccccatttgtgcgtttatagaaagtgtaagtcctgtgctagtcagagcaagactctgtcagtgaagacgatggtgactagtggcgggttcaccgtgtcagacactgcgctaagcaggtcattacatgatcacctggaattcttaaatgccctctggcgacaccaccatacatgactgttgtga

SEQ ID NO: 383576 - DNA, 350 bp, Homo sapiens; identical to SEQ ID NO: 344841
  chr22:47436589-47436939
  hypo

SEQ ID NO: 383577 - DNA, 61 bp, Homo sapiens
  chr22:47441113-47441174
  hypo
cgtggcacctggctgcacacgcggctgtgtgttcactgtccctcggactctgcgggaaaac

SEQ ID NO: 383578 - DNA, 99 bp, Homo sapiens; identical to SEQ ID NO: 356579
  chr22:47441200-47441299
  hypo

SEQ ID NO: 383579 - DNA, 72 bp, Homo sapiens; identical to SEQ ID NO: 344844
  chr22:47465521-47465593
  hypo

SEQ ID NO: 383580 - DNA, 117 bp, Homo sapiens; identical to SEQ ID NO: 344845
  chr22:47465782-47465899
  hypo

SEQ ID NO: 383581 - DNA, 89 bp, Homo sapiens; identical to SEQ ID NO: 344846
  chr22:47465973-47466062
  hypo

SEQ ID NO: 383582 - DNA, 183 bp, Homo sapiens; identical to SEQ ID NO: 368869
  chr22:47525924-47526107
  hypo

SEQ ID NO: 383583 - DNA, 398 bp, Homo sapiens; identical to SEQ ID NO: 368870
  chr22:47534595-47534993
  hypo

SEQ ID NO: 383584 - DNA, 234 bp, Homo sapiens; identical to SEQ ID NO: 368871
  chr22:48027392-48027626
  hypo

SEQ ID NO: 383585 - DNA, 41 bp, Homo sapiens; identical to SEQ ID NO: 368872
  chr22:48027786-48027827
  hypo

SEQ ID NO: 383586 - DNA, 110 bp, Homo sapiens; identical to SEQ ID NO: 344850
  chr22:48280063-48280173
  hypo

SEQ ID NO: 383587 - DNA, 236 bp, Homo sapiens; identical to SEQ ID NO: 344853
  chr22:48996174-48996410
  hypo

SEQ ID NO: 383588 - DNA, 302 bp, Homo sapiens; identical to SEQ ID NO: 344854
  chr22:49042371-49042673
  hypo

SEQ ID NO: 383589 - DNA, 220 bp, Homo sapiens; identical to SEQ ID NO: 356582
  chr22:49138251-49138471
  hypo

SEQ ID NO: 383590 - DNA, 574 bp, Homo sapiens; identical to SEQ ID NO: 356583
  chr22:49138501-49139075
  hypo

SEQ ID NO: 383591 - DNA, 45 bp, Homo sapiens; identical to SEQ ID NO: 368878
  chr22:49146962-49147007
  hypo

SEQ ID NO: 383592 - DNA, 105 bp, Homo sapiens; identical to SEQ ID NO: 368879
  chr22:49637423-49637528
  hypo

SEQ ID NO: 383593 - DNA, 107 bp, Homo sapiens; identical to SEQ ID NO: 368880
  chr22:49637781-49637888
  hypo

SEQ ID NO: 383594 - DNA, 279 bp, Homo sapiens; identical to SEQ ID NO: 368881
  chr22:49693555-49693834
  hypo

SEQ ID NO: 383595 - DNA, 178 bp, Homo sapiens; identical to SEQ ID NO: 344859
  chr22:49698417-49698595
  hypo

SEQ ID NO: 383596 - DNA, 171 bp, Homo sapiens; identical to SEQ ID NO: 344860
  chr22:49698626-49698797
  hypo

SEQ ID NO: 383597 - DNA, 298 bp, Homo sapiens; identical to SEQ ID NO: 344861
  chr22:49729101-49729399
  hypo

SEQ ID NO: 383598 - DNA, 108 bp, Homo sapiens; identical to SEQ ID NO: 344862
  chr22:49857262-49857370
  hypo

SEQ ID NO: 383599 - DNA, 468 bp, Homo sapiens; identical to SEQ ID NO: 368886
  chr22:49911038-49911506
  hypo

SEQ ID NO: 383600 - DNA, 193 bp, Homo sapiens; identical to SEQ ID NO: 368887
  chr22:49911586-49911779
  hypo

SEQ ID NO: 383601 - DNA, 46 bp, Homo sapiens
  chr22:49943122-49943168
  hypo
cgcataggcagaggtggcttcacagcagcgggcaagtgggggaccc

SEQ ID NO: 383602 - DNA, 72 bp, Homo sapiens
  chr22:49943364-49943436
  hypo
tctgtcaccagccagcatgtctgaaatcactgcagagatgctgctgagggaacacggacagcgttctgagcc

SEQ ID NO: 383603 - DNA, 107 bp, Homo sapiens; identical to SEQ ID NO: 330245
  chr22:49967872-49967979
  hypo

SEQ ID NO: 383604 - DNA, 59 bp, Homo sapiens
  chr22:49980101-49980160
  hypo
cgcaggctctcgtgtcagggcgcacagccatgtgatgactccacattcactcagtgctc

SEQ ID NO: 383605 - DNA, 238 bp, Homo sapiens; identical to SEQ ID NO: 330251
  chr22:50002819-50003057
  hypo

SEQ ID NO: 383606 - DNA, 210 bp, Homo sapiens; identical to SEQ ID NO: 220970
  chr22:50008973-50009183
  hypo

SEQ ID NO: 383607 - DNA, 289 bp, Homo sapiens; identical to SEQ ID NO: 220971
  chr22:50009330-50009619
  hypo

SEQ ID NO: 383608 - DNA, 48 bp, Homo sapiens; identical to SEQ ID NO: 346291
  chr22:50009663-50009711
  hypo

SEQ ID NO: 383609 - DNA, 58 bp, Homo sapiens; identical to SEQ ID NO: 352639
  chr22:50170525-50170583
  hypo

SEQ ID NO: 383610 - DNA, 160 bp, Homo sapiens; identical to SEQ ID NO: 356591
  chr22:50170790-50170950
  hypo

SEQ ID NO: 383611 - DNA, 109 bp, Homo sapiens; identical to SEQ ID NO: 368895
  chr22:50177139-50177248
  hypo

SEQ ID NO: 383612 - DNA, 50 bp, Homo sapiens; identical to SEQ ID NO: 368896
  chr22:50177299-50177349
  hypo

SEQ ID NO: 383613 - DNA, 225 bp, Homo sapiens; identical to SEQ ID NO: 346292
  chr22:50191356-50191581
  hypo

SEQ ID NO: 383614 - DNA, 81 bp, Homo sapiens; identical to SEQ ID NO: 346293
  chr22:50191626-50191707
  hypo

SEQ ID NO: 383615 - DNA, 114 bp, Homo sapiens
  chr22:50192076-50192190
  hypo
cgttaaataaaaacgagaattaagaacacaagggatgtactctagccaatcacacgtttcccggtcaaacggcagcacaaatccacagtcacacatgcggcaggacagacgagc

SEQ ID NO: 383616 - DNA, 248 bp, Homo sapiens; identical to SEQ ID NO: 356594
  chr22:50316625-50316873
  hypo

SEQ ID NO: 383617 - DNA, 72 bp, Homo sapiens; identical to SEQ ID NO: 356595
  chr22:50316938-50317010
  hypo

SEQ ID NO: 383618 - DNA, 217 bp, Homo sapiens; identical to SEQ ID NO: 352640
  chr22:50453240-50453457
  hypo

SEQ ID NO: 383619 - DNA, 98 bp, Homo sapiens; identical to SEQ ID NO: 352641
  chr22:50453539-50453637
  hypo

SEQ ID NO: 383620 - DNA, 267 bp, Homo sapiens; identical to SEQ ID NO: 330313
  chr22:50529625-50529892
  hypo

SEQ ID NO: 383621 - DNA, 74 bp, Homo sapiens; identical to SEQ ID NO: 368904
  chr22:50529922-50529996
  hypo

SEQ ID NO: 383622 - DNA, 1272 bp, Homo sapiens; identical to SEQ ID NO: 344881
  chr22:50718718-50719990
  hypo

SEQ ID NO: 383623 - DNA, 109 bp, Homo sapiens; identical to SEQ ID NO: 344882
  chr22:50864117-50864226
  hypo

SEQ ID NO: 383624 - DNA, 148 bp, Homo sapiens; identical to SEQ ID NO: 344883
  chr22:50873266-50873414
  hypo

SEQ ID NO: 383625 - DNA, 517 bp, Homo sapiens; identical to SEQ ID NO: 344884
  chr22:50885403-50885920
  hypo

SEQ ID NO: 383626 - DNA, 778 bp, Homo sapiens; identical to SEQ ID NO: 344885
  chr22:50894573-50895351
  hypo

SEQ ID NO: 383627 - DNA, 494 bp, Homo sapiens; identical to SEQ ID NO: 330341
  chr22:50899708-50900202
  hypo

SEQ ID NO: 383628 - DNA, 46 bp, Homo sapiens
  chr22:50900232-50900278
  hypo
tgggcggcagcctccggctctcccgctgcacggcctccagggtctc

SEQ ID NO: 383629 - DNA, 378 bp, Homo sapiens; identical to SEQ ID NO: 356601
  chr22:50942715-50943093
  hypo

SEQ ID NO: 383630 - DNA, 308 bp, Homo sapiens; identical to SEQ ID NO: 356602
  chr22:50943412-50943720
  hypo

SEQ ID NO: 383631 - DNA, 209 bp, Homo sapiens; identical to SEQ ID NO: 356603
  chr22:50944156-50944365
  hypo

SEQ ID NO: 383632 - DNA, 103 bp, Homo sapiens; identical to SEQ ID NO: 356604
  chr22:50944716-50944819
  hypo

SEQ ID NO: 383633 - DNA, 154 bp, Homo sapiens; identical to SEQ ID NO: 346294
  chr22:50954823-50954977
  hypo

SEQ ID NO: 383634 - DNA, 237 bp, Homo sapiens; identical to SEQ ID NO: 375373
  chr22:51112317-51112554
  hypo

SEQ ID NO: 383635 - DNA, 128 bp, Homo sapiens; identical to SEQ ID NO: 362108
  chrX:2846679-2846807
  hypo

SEQ ID NO: 383636 - DNA, 219 bp, Homo sapiens; identical to SEQ ID NO: 295607
  chrX:2846856-2847075
  hypo

SEQ ID NO: 383637 - DNA, 314 bp, Homo sapiens; identical to SEQ ID NO: 362110
  chrX:2847196-2847510
  hypo

SEQ ID NO: 383638 - DNA, 596 bp, Homo sapiens; identical to SEQ ID NO: 352644
  chrX:9432830-9433426
  hypo

SEQ ID NO: 383639 - DNA, 241 bp, Homo sapiens; identical to SEQ ID NO: 206206
  chrX:9433471-9433712
  hypo

SEQ ID NO: 383640 - DNA, 224 bp, Homo sapiens; identical to SEQ ID NO: 206224
  chrX:16730628-16730852
  hypo

SEQ ID NO: 383641 - DNA, 35 bp, Homo sapiens; identical to SEQ ID NO: 345669
  chrX:16730902-16730937
  hypo

SEQ ID NO: 383642 - DNA, 187 bp, Homo sapiens; identical to SEQ ID NO: 336699
  chrX:23801086-23801273
  hypo

SEQ ID NO: 383643 - DNA, 257 bp, Homo sapiens; identical to SEQ ID NO: 344897
  chrX:34149228-34149485
  hypo

SEQ ID NO: 383644 - DNA, 223 bp, Homo sapiens; identical to SEQ ID NO: 336704
  chrX:39921413-39921636
  hypo

SEQ ID NO: 383645 - DNA, 301 bp, Homo sapiens; identical to SEQ ID NO: 336705
  chrX:39922006-39922307
  hypo

SEQ ID NO: 383646 - DNA, 863 bp, Homo sapiens; identical to SEQ ID NO: 336706
  chrX:39931611-39932474
  hypo

SEQ ID NO: 383647 - DNA, 892 bp, Homo sapiens; identical to SEQ ID NO: 336707
  chrX:39933533-39934425
  hypo

SEQ ID NO: 383648 - DNA, 1938 bp, Homo sapiens; identical to SEQ ID NO: 352661
  chrX:39954918-39956856
  hypo

SEQ ID NO: 383649 - DNA, 621 bp, Homo sapiens; identical to SEQ ID NO: 352672
  chrX:40014669-40015290
  hypo

SEQ ID NO: 383650 - DNA, 667 bp, Homo sapiens; identical to SEQ ID NO: 295697
  chrX:40035057-40035724
  hypo

SEQ ID NO: 383651 - DNA, 721 bp, Homo sapiens; identical to SEQ ID NO: 347751
  chrX:40035852-40036573
  hypo

SEQ ID NO: 383652 - DNA, 264 bp, Homo sapiens; identical to SEQ ID NO: 336722
  chrX:41112874-41113138
  hypo

SEQ ID NO: 383653 - DNA, 77 bp, Homo sapiens; identical to SEQ ID NO: 368933
  chrX:41331620-41331697
  hypo

SEQ ID NO: 383654 - DNA, 286 bp, Homo sapiens; identical to SEQ ID NO: 368934
  chrX:41331751-41332037
  hypo

SEQ ID NO: 383655 - DNA, 73 bp, Homo sapiens; identical to SEQ ID NO: 368935
  chrX:44922889-44922962
  hypo

SEQ ID NO: 383656 - DNA, 84 bp, Homo sapiens; identical to SEQ ID NO: 362174
  chrX:123094093-123094177
  hypo

SEQ ID NO: 383657 - DNA, 87 bp, Homo sapiens; identical to SEQ ID NO: 362175
  chrX:123094335-123094422
  hypo

SEQ ID NO: 383658 - DNA, 198 bp, Homo sapiens; identical to SEQ ID NO: 336730
  chrX:123094505-123094703
  hypo

SEQ ID NO: 383659 - DNA, 856 bp, Homo sapiens; identical to SEQ ID NO: 336731
  chrX:129146935-129147791
  hypo

SEQ ID NO: 383660 - DNA, 116 bp, Homo sapiens; identical to SEQ ID NO: 336732
  chrX:129171389-129171505
  hypo

SEQ ID NO: 383661 - DNA, 158 bp, Homo sapiens; identical to SEQ ID NO: 375448
  chrX:133507338-133507496
  hypo

SEQ ID NO: 383662 - DNA, 85 bp, Homo sapiens; identical to SEQ ID NO: 368940
  chrY:14532154-14532239
  hypo

SEQ ID NO: 383663 - DNA, 431 bp, Homo sapiens; identical to SEQ ID NO: 344915
  chrY:14776368-14776799
  hypo

SEQ ID NO: 383664 - DNA, 1082 bp, Homo sapiens; identical to SEQ ID NO: 345679
  chrY:16636060-16637142
  hypo

SEQ ID NO: 383665 - DNA, 208 bp, Homo sapiens; identical to SEQ ID NO: 356619
  chrY:21205113-21205321
  hypo

SEQ ID NO: 383666 - DNA, 323 bp, Homo sapiens; identical to SEQ ID NO: 344918
  chrY:21208492-21208815
  hypo

SEQ ID NO: 383667 - DNA, 122 bp, Homo sapiens; identical to SEQ ID NO: 346299
  chrY:22918582-22918704
  hypo

SEQ ID NO: 383668 - DNA, 205 bp, Homo sapiens; identical to SEQ ID NO: 344920
  AEKP01149809.1_1-6354:1345-1550
  hypo

SEQ ID NO: 383669 - DNA, 122 bp, Homo sapiens; identical to SEQ ID NO: 344922
  AEKP01184864.1_3582-5885:491-613
  hypo

SEQ ID NO: 383670 - DNA, 96 bp, Homo sapiens; identical to SEQ ID NO: 356622
  NW_001838014.1_249000-295694:3973-4069
  hypo

SEQ ID NO: 383671 - DNA, 191 bp, Homo sapiens; identical to SEQ ID NO: 344924
  NW_001838286.2_1380778-1470498:80846-81037
  hypo

SEQ ID NO: 383672 - DNA, 1229 bp, Homo sapiens
  NW_001838286.2_1380778-1470498:81101-82330
  hypo
cggggcaaaaagccacggcggcaagggcaaaaagttgtggcttcgggggcaaaaaaccatagcagcggggcaaaaagcagtggtggcggcggggccagaaaaaccacaaaatcccgcggcgatggggggaaaagctgcaggggcaaaaagccgcagcagcagggggaaaaaagccgtaaaaagcagcagcggcgggggggcaaaaaccgtggcggcaaaaagcctcagcggcaggagcaaaaagccatggcggcaggggcaaaaaccgcagtggaaagaagactcagtggcaggagcaaaaacgatggctgtggggggcaaaaagccatgactgcaaaaactgcggagtgtgagcccaaaaagccatggcggtggggataaaaagccacagctgcaaaaagcagcggtggtggggataaaaagccgtggcggcaaaaacccgcagcagcacaggcaaaaagccgtggcagcaggggcaaaaagccacggtggcaggggcaaaaagccgcggcggtgagggcagaaagctgtggcttcgggggcaaataaacacggcggccaaaagccgtagtggcagggcaaaaagctgcagcagtgggggcaaaaagcagcgggagcgggtgcaaaaacccacaaaaacccatggcaacgggaggaaaaagccatggtggcaaaaagccacagtggcggggggtaaaaagccatggcggtgagggggcaaaaagccacaaaaagcagcgtcggcggggacaaaaaccacggcggcaaaaagcctcagtggcaggagcaaaaagccatggcggcggaggcaaaaagccgtggcagcaaaaacccgtggtggcaaaaacccgtggtggcaggggcaaaaagccgtggctttggaggcaaagagccgtggctgtaaaaagccatagtggcgggagcaaaaagccacaaaaagccacggtggcgggggcaaaagccacggcgccgagggcaaaaagccgtggcttcgggggcaaagagccgcagtggcaaaaagctgcaaaaagccaaggtgacggggcaaaatgccacggcggcggggttaagaagccacggcggcggggcaaaaagccgtggcgggagaaacccgcagcagcgagggcaaaaatccatggcagcagtgacgaaaagccacagcagcggtggcagaaagccgtgaggcgggggaaaaatccgcagcagcggggtcaaaatggcactgcagc

SEQ ID NO: 383673 - DNA, 62 bp, Homo sapiens; identical to SEQ ID NO: 344926
  NW_001839407.1_18933-24809:4240-4302
  hypo

SEQ ID NO: 383674 - DNA, 123 bp, Homo sapiens; identical to SEQ ID NO: 344927
  NW_001839646.1_1-5206:1404-1527
  hypo

SEQ ID NO: 383675 - DNA, 132 bp, Homo sapiens; identical to SEQ ID NO: 368950
  NW_001840306.1_6328-82586:33382-33514
  hypo

SEQ ID NO: 383676 - DNA, 123 bp, Homo sapiens; identical to SEQ ID NO: 368951
  NW_001842432.1_1-179261:102996-103119
  hypo

SEQ ID NO: 383677 - DNA, 62 bp, Homo sapiens; identical to SEQ ID NO: 368952
  NW_001842432.1_1-179261:103214-103276
  hypo

SEQ ID NO: 383678 - DNA, 187 bp, Homo sapiens; identical to SEQ ID NO: 197232
  chr1:877475-877662
  hyper

SEQ ID NO: 383679 - DNA, 392 bp, Homo sapiens; identical to SEQ ID NO: 197235
  chr1:955508-955900
  hyper

SEQ ID NO: 383680 - DNA, 256 bp, Homo sapiens; identical to SEQ ID NO: 277801
  chr1:975561-975817
  hyper

SEQ ID NO: 383681 - DNA, 130 bp, Homo sapiens; identical to SEQ ID NO: 221177
  chr1:1052182-1052312
  hyper

SEQ ID NO: 383682 - DNA, 66 bp, Homo sapiens; identical to SEQ ID NO: 226583
  chr1:2078513-2078579
  hyper

SEQ ID NO: 383683 - DNA, 373 bp, Homo sapiens; identical to SEQ ID NO: 197252
  chr1:2457940-2458313
  hyper

SEQ ID NO: 383684 - DNA, 179 bp, Homo sapiens; identical to SEQ ID NO: 277881
  chr1:6208937-6209116
  hyper

SEQ ID NO: 383685 - DNA, 110 bp, Homo sapiens; identical to SEQ ID NO: 226648
  chr1:6483912-6484022
  hyper

SEQ ID NO: 383686 - DNA, 87 bp, Homo sapiens
  chr1:6526181-6526268
  hyper
cgcccaggggcttcccggctccgtgctctctgcccgtcgtggttccgccttcagccccgcgcccgcagggcccgccccgcgccgtcg

SEQ ID NO: 383687 - DNA, 217 bp, Homo sapiens; identical to SEQ ID NO: 226658
  chr1:6614573-6614790
  hyper

SEQ ID NO: 383688 - DNA, 390 bp, Homo sapiens; identical to SEQ ID NO: 226667
  chr1:8021446-8021836
  hyper

SEQ ID NO: 383689 - DNA, 268 bp, Homo sapiens; identical to SEQ ID NO: 221223
  chr1:9188954-9189222
  hyper

SEQ ID NO: 383690 - DNA, 348 bp, Homo sapiens; identical to SEQ ID NO: 226687
  chr1:10532553-10532901
  hyper

SEQ ID NO: 383691 - DNA, 502 bp, Homo sapiens; identical to SEQ ID NO: 197309
  chr1:10853673-10854175
  hyper

SEQ ID NO: 383692 - DNA, 231 bp, Homo sapiens; identical to SEQ ID NO: 226709
  chr1:11994683-11994914
  hyper

SEQ ID NO: 383693 - DNA, 304 bp, Homo sapiens; identical to SEQ ID NO: 226740
  chr1:16563566-16563870
  hyper

SEQ ID NO: 383694 - DNA, 502 bp, Homo sapiens; identical to SEQ ID NO: 226748
  chr1:17866199-17866701
  hyper

SEQ ID NO: 383695 - DNA, 408 bp, Homo sapiens; identical to SEQ ID NO: 197377
  chr1:20987844-20988252
  hyper

SEQ ID NO: 383696 - DNA, 257 bp, Homo sapiens; identical to SEQ ID NO: 226816
  chr1:23694766-23695023
  hyper

SEQ ID NO: 383697 - DNA, 62 bp, Homo sapiens; identical to SEQ ID NO: 226820
  chr1:23857274-23857336
  hyper

SEQ ID NO: 383698 - DNA, 247 bp, Homo sapiens; identical to SEQ ID NO: 226842
  chr1:25757172-25757419
  hyper

SEQ ID NO: 383699 - DNA, 151 bp, Homo sapiens; identical to SEQ ID NO: 221270
  chr1:25870618-25870769
  hyper

SEQ ID NO: 383700 - DNA, 288 bp, Homo sapiens; identical to SEQ ID NO: 226845
  chr1:26185983-26186271
  hyper

SEQ ID NO: 383701 - DNA, 79 bp, Homo sapiens; identical to SEQ ID NO: 278132
  chr1:26737102-26737181
  hyper

SEQ ID NO: 383702 - DNA, 120 bp, Homo sapiens; identical to SEQ ID NO: 226866
  chr1:27321040-27321160
  hyper

SEQ ID NO: 383703 - DNA, 218 bp, Homo sapiens; identical to SEQ ID NO: 226869
  chr1:27718844-27719062
  hyper

SEQ ID NO: 383704 - DNA, 49 bp, Homo sapiens; identical to SEQ ID NO: 226875
  chr1:28099536-28099585
  hyper

SEQ ID NO: 383705 - DNA, 156 bp, Homo sapiens; identical to SEQ ID NO: 226883
  chr1:28586719-28586875
  hyper

SEQ ID NO: 383706 - DNA, 48 bp, Homo sapiens
  chr1:29448910-29448958
  hyper
cctctccctgcccgccccctccttccagacctcctccgcccgcagcga

SEQ ID NO: 383707 - DNA, 143 bp, Homo sapiens; identical to SEQ ID NO: 278185
  chr1:29564623-29564766
  hyper

SEQ ID NO: 383708 - DNA, 335 bp, Homo sapiens; identical to SEQ ID NO: 278186
  chr1:29564802-29565137
  hyper

SEQ ID NO: 383709 - DNA, 140 bp, Homo sapiens; identical to SEQ ID NO: 197428
  chr1:31192212-31192352
  hyper

SEQ ID NO: 383710 - DNA, 229 bp, Homo sapiens; identical to SEQ ID NO: 226912
  chr1:32083723-32083952
  hyper

SEQ ID NO: 383711 - DNA, 121 bp, Homo sapiens; identical to SEQ ID NO: 221290
  chr1:32666272-32666393
  hyper

SEQ ID NO: 383712 - DNA, 254 bp, Homo sapiens; identical to SEQ ID NO: 226931
  chr1:33282729-33282983
  hyper

SEQ ID NO: 383713 - DNA, 498 bp, Homo sapiens; identical to SEQ ID NO: 197450
  chr1:33721208-33721706
  hyper

SEQ ID NO: 383714 - DNA, 173 bp, Homo sapiens; identical to SEQ ID NO: 197460
  chr1:36615012-36615185
  hyper

SEQ ID NO: 383715 - DNA, 218 bp, Homo sapiens; identical to SEQ ID NO: 197463
  chr1:36933230-36933448
  hyper

SEQ ID NO: 383716 - DNA, 98 bp, Homo sapiens; identical to SEQ ID NO: 221316
  chr1:38580185-38580283
  hyper

SEQ ID NO: 383717 - DNA, 77 bp, Homo sapiens; identical to SEQ ID NO: 226995
  chr1:40367951-40368028
  hyper

SEQ ID NO: 383718 - DNA, 31 bp, Homo sapiens; identical to SEQ ID NO: 221329
  chr1:40420568-40420599
  hyper

SEQ ID NO: 383719 - DNA, 217 bp, Homo sapiens; identical to SEQ ID NO: 227025
  chr1:43997371-43997588
  hyper

SEQ ID NO: 383720 - DNA, 35 bp, Homo sapiens; identical to SEQ ID NO: 227047
  chr1:45671645-45671680
  hyper

SEQ ID NO: 383721 - DNA, 977 bp, Homo sapiens; identical to SEQ ID NO: 227052
  chr1:45986970-45987947
  hyper

SEQ ID NO: 383722 - DNA, 81 bp, Homo sapiens; identical to SEQ ID NO: 227107
  chr1:50896802-50896883
  hyper

SEQ ID NO: 383723 - DNA, 261 bp, Homo sapiens; identical to SEQ ID NO: 227113
  chr1:52082578-52082839
  hyper

SEQ ID NO: 383724 - DNA, 161 bp, Homo sapiens; identical to SEQ ID NO: 227118
  chr1:52832014-52832175
  hyper

SEQ ID NO: 383725 - DNA, 55 bp, Homo sapiens; identical to SEQ ID NO: 197539
  chr1:53686483-53686538
  hyper

SEQ ID NO: 383726 - DNA, 193 bp, Homo sapiens; identical to SEQ ID NO: 197544
  chr1:55353149-55353342
  hyper

SEQ ID NO: 383727 - DNA, 171 bp, Homo sapiens; identical to SEQ ID NO: 221369
  chr1:59369797-59369968
  hyper

SEQ ID NO: 383728 - DNA, 327 bp, Homo sapiens; identical to SEQ ID NO: 227178
  chr1:65211031-65211358
  hyper

SEQ ID NO: 383729 - DNA, 81 bp, Homo sapiens; identical to SEQ ID NO: 197581
  chr1:66258064-66258145
  hyper

SEQ ID NO: 383730 - DNA, 74 bp, Homo sapiens
  chr1:66259003-66259077
  hyper
tggagagtgtagggtgctgtggggctgatgtggggcaaagagggaatggggccgccgggcctggatggtcgtct

SEQ ID NO: 383731 - DNA, 325 bp, Homo sapiens; identical to SEQ ID NO: 227205
  chr1:70820330-70820655
  hyper

SEQ ID NO: 383732 - DNA, 67 bp, Homo sapiens; identical to SEQ ID NO: 278535
  chr1:75598806-75598873
  hyper

SEQ ID NO: 383733 - DNA, 179 bp, Homo sapiens; identical to SEQ ID NO: 278567
  chr1:84464234-84464413
  hyper

SEQ ID NO: 383734 - DNA, 503 bp, Homo sapiens; identical to SEQ ID NO: 278568
  chr1:84464878-84465381
  hyper

SEQ ID NO: 383735 - DNA, 45 bp, Homo sapiens; identical to SEQ ID NO: 197627
  chr1:90287493-90287538
  hyper

SEQ ID NO: 383736 - DNA, 58 bp, Homo sapiens; identical to SEQ ID NO: 227274
  chr1:91179581-91179639
  hyper

SEQ ID NO: 383737 - DNA, 114 bp, Homo sapiens; identical to SEQ ID NO: 227288
  chr1:91486937-91487051
  hyper

SEQ ID NO: 383738 - DNA, 170 bp, Homo sapiens; identical to SEQ ID NO: 197636
  chr1:92350554-92350724
  hyper

SEQ ID NO: 383739 - DNA, 35 bp, Homo sapiens; identical to SEQ ID NO: 221405
  chr1:92946278-92946313
  hyper

SEQ ID NO: 383740 - DNA, 300 bp, Homo sapiens; identical to SEQ ID NO: 221412
  chr1:93914141-93914441
  hyper

SEQ ID NO: 383741 - DNA, 178 bp, Homo sapiens; identical to SEQ ID NO: 227323
  chr1:95583390-95583568
  hyper

SEQ ID NO: 383742 - DNA, 65 bp, Homo sapiens; identical to SEQ ID NO: 227341
  chr1:100817825-100817890
  hyper

SEQ ID NO: 383743 - DNA, 46 bp, Homo sapiens; identical to SEQ ID NO: 278744
  chr1:111813500-111813546
  hyper

SEQ ID NO: 383744 - DNA, 63 bp, Homo sapiens; identical to SEQ ID NO: 278745
  chr1:111813604-111813667
  hyper

SEQ ID NO: 383745 - DNA, 145 bp, Homo sapiens; identical to SEQ ID NO: 227408
  chr1:112532138-112532283
  hyper

SEQ ID NO: 383746 - DNA, 426 bp, Homo sapiens; identical to SEQ ID NO: 278753
  chr1:113051157-113051583
  hyper

SEQ ID NO: 383747 - DNA, 140 bp, Homo sapiens; identical to SEQ ID NO: 197710
  chr1:113258352-113258492
  hyper

SEQ ID NO: 383748 - DNA, 105 bp, Homo sapiens; identical to SEQ ID NO: 221451
  chr1:114697920-114698025
  hyper

SEQ ID NO: 383749 - DNA, 195 bp, Homo sapiens; identical to SEQ ID NO: 227433
  chr1:115323253-115323448
  hyper

SEQ ID NO: 383750 - DNA, 191 bp, Homo sapiens; identical to SEQ ID NO: 227446
  chr1:117209809-117210000
  hyper

SEQ ID NO: 383751 - DNA, 80 bp, Homo sapiens; identical to SEQ ID NO: 197733
  chr1:119544707-119544787
  hyper

SEQ ID NO: 383752 - DNA, 256 bp, Homo sapiens; identical to SEQ ID NO: 221464
  chr1:151763859-151764115
  hyper

SEQ ID NO: 383753 - DNA, 86 bp, Homo sapiens; identical to SEQ ID NO: 278840
  chr1:151811028-151811114
  hyper

SEQ ID NO: 383754 - DNA, 90 bp, Homo sapiens; identical to SEQ ID NO: 278845
  chr1:152084599-152084689
  hyper

SEQ ID NO: 383755 - DNA, 278 bp, Homo sapiens; identical to SEQ ID NO: 227524
  chr1:153963330-153963608
  hyper

SEQ ID NO: 383756 - DNA, 180 bp, Homo sapiens; identical to SEQ ID NO: 221475
  chr1:155099753-155099933
  hyper

SEQ ID NO: 383757 - DNA, 222 bp, Homo sapiens; identical to SEQ ID NO: 227581
  chr1:156710901-156711123
  hyper

SEQ ID NO: 383758 - DNA, 32 bp, Homo sapiens; identical to SEQ ID NO: 278940
  chr1:159750347-159750379
  hyper

SEQ ID NO: 383759 - DNA, 145 bp, Homo sapiens
  chr1:159750772-159750917
  hyper
gccgaggccaggtaggtggtgagttacttggctcggagcgggcgaggggacgcgtgggcggagcggggctggccagcctcggcccccatgacccgctgtcctgtgccctttcccagcgatgggcgtgcagccccccaacttctcc

SEQ ID NO: 383760 - DNA, 106 bp, Homo sapiens; identical to SEQ ID NO: 227617
  chr1:161102589-161102695
  hyper

SEQ ID NO: 383761 - DNA, 131 bp, Homo sapiens; identical to SEQ ID NO: 227620
  chr1:161136046-161136177
  hyper

SEQ ID NO: 383762 - DNA, 42 bp, Homo sapiens; identical to SEQ ID NO: 197830
  chr1:165323109-165323151
  hyper

SEQ ID NO: 383763 - DNA, 66 bp, Homo sapiens; identical to SEQ ID NO: 197831
  chr1:165323181-165323247
  hyper

SEQ ID NO: 383764 - DNA, 189 bp, Homo sapiens; identical to SEQ ID NO: 279005
  chr1:165345284-165345473
  hyper

SEQ ID NO: 383765 - DNA, 55 bp, Homo sapiens; identical to SEQ ID NO: 197834
  chr1:165599887-165599942
  hyper

SEQ ID NO: 383766 - DNA, 208 bp, Homo sapiens; identical to SEQ ID NO: 197837
  chr1:166944964-166945172
  hyper

SEQ ID NO: 383767 - DNA, 150 bp, Homo sapiens; identical to SEQ ID NO: 221513
  chr1:167423964-167424114
  hyper

SEQ ID NO: 383768 - DNA, 37 bp, Homo sapiens; identical to SEQ ID NO: 197847
  chr1:170043654-170043691
  hyper

SEQ ID NO: 383769 - DNA, 32 bp, Homo sapiens
  chr1:171220888-171220920
  hyper
gcaactgtttacagggctcagcagggagcctg

SEQ ID NO: 383770 - DNA, 42 bp, Homo sapiens; identical to SEQ ID NO: 197863
  chr1:179711890-179711932
  hyper

SEQ ID NO: 383771 - DNA, 82 bp, Homo sapiens; identical to SEQ ID NO: 279095
  chr1:182026347-182026429
  hyper

SEQ ID NO: 383772 - DNA, 71 bp, Homo sapiens; identical to SEQ ID NO: 197873
  chr1:182360888-182360959
  hyper

SEQ ID NO: 383773 - DNA, 60 bp, Homo sapiens
  chr1:184722970-184723030
  hyper
gtgtatgtattactctgaattaaatggtgtaaatagaattgataattttaacacacttcc

SEQ ID NO: 383774 - DNA, 254 bp, Homo sapiens; identical to SEQ ID NO: 227759
  chr1:185125952-185126206
  hyper

SEQ ID NO: 383775 - DNA, 493 bp, Homo sapiens; identical to SEQ ID NO: 227765
  chr1:186798092-186798585
  hyper

SEQ ID NO: 383776 - DNA, 43 bp, Homo sapiens; identical to SEQ ID NO: 197887
  chr1:190444812-190444855
  hyper

SEQ ID NO: 383777 - DNA, 139 bp, Homo sapiens; identical to SEQ ID NO: 227771
  chr1:193028795-193028934
  hyper

SEQ ID NO: 383778 - DNA, 297 bp, Homo sapiens; identical to SEQ ID NO: 221543
  chr1:202830569-202830866
  hyper

SEQ ID NO: 383779 - DNA, 64 bp, Homo sapiens; identical to SEQ ID NO: 197911
  chr1:202858344-202858408
  hyper

SEQ ID NO: 383780 - DNA, 104 bp, Homo sapiens; identical to SEQ ID NO: 221548
  chr1:204518752-204518856
  hyper

SEQ ID NO: 383781 - DNA, 65 bp, Homo sapiens; identical to SEQ ID NO: 227831
  chr1:205290855-205290920
  hyper

SEQ ID NO: 383782 - DNA, 105 bp, Homo sapiens; identical to SEQ ID NO: 197930
  chr1:207995292-207995397
  hyper

SEQ ID NO: 383783 - DNA, 257 bp, Homo sapiens; identical to SEQ ID NO: 221561
  chr1:208416772-208417029
  hyper

SEQ ID NO: 383784 - DNA, 218 bp, Homo sapiens; identical to SEQ ID NO: 227854
  chr1:209364148-209364366
  hyper

SEQ ID NO: 383785 - DNA, 42 bp, Homo sapiens; identical to SEQ ID NO: 227862
  chr1:210405541-210405583
  hyper

SEQ ID NO: 383786 - DNA, 117 bp, Homo sapiens; identical to SEQ ID NO: 227870
  chr1:211434031-211434148
  hyper

SEQ ID NO: 383787 - DNA, 118 bp, Homo sapiens; identical to SEQ ID NO: 227872
  chr1:211499931-211500049
  hyper

SEQ ID NO: 383788 - DNA, 41 bp, Homo sapiens; identical to SEQ ID NO: 227889
  chr1:214160834-214160875
  hyper

SEQ ID NO: 383789 - DNA, 146 bp, Homo sapiens; identical to SEQ ID NO: 227896
  chr1:215740687-215740833
  hyper

SEQ ID NO: 383790 - DNA, 334 bp, Homo sapiens; identical to SEQ ID NO: 227910
  chr1:220267776-220268110
  hyper

SEQ ID NO: 383791 - DNA, 85 bp, Homo sapiens; identical to SEQ ID NO: 197966
  chr1:220959916-220960001
  hyper

SEQ ID NO: 383792 - DNA, 74 bp, Homo sapiens; identical to SEQ ID NO: 227923
  chr1:223297159-223297233
  hyper

SEQ ID NO: 383793 - DNA, 220 bp, Homo sapiens; identical to SEQ ID NO: 279300
  chr1:223537693-223537913
  hyper

SEQ ID NO: 383794 - DNA, 36 bp, Homo sapiens
  chr1:223537946-223537982
  hyper
cctgccccggctgcgcgccagctcaggtgcccgccc

SEQ ID NO: 383795 - DNA, 150 bp, Homo sapiens; identical to SEQ ID NO: 197972
  chr1:224302336-224302486
  hyper

SEQ ID NO: 383796 - DNA, 56 bp, Homo sapiens; identical to SEQ ID NO: 221594
  chr1:226497394-226497450
  hyper

SEQ ID NO: 383797 - DNA, 31 bp, Homo sapiens; identical to SEQ ID NO: 227959
  chr1:228193571-228193602
  hyper

SEQ ID NO: 383798 - DNA, 178 bp, Homo sapiens; identical to SEQ ID NO: 227980
  chr1:228674803-228674981
  hyper

SEQ ID NO: 383799 - DNA, 219 bp, Homo sapiens; identical to SEQ ID NO: 198009
  chr1:230223230-230223449
  hyper

SEQ ID NO: 383800 - DNA, 34 bp, Homo sapiens; identical to SEQ ID NO: 227998
  chr1:231473772-231473806
  hyper

SEQ ID NO: 383801 - DNA, 110 bp, Homo sapiens; identical to SEQ ID NO: 228020
  chr1:235491613-235491723
  hyper

SEQ ID NO: 383802 - DNA, 85 bp, Homo sapiens; identical to SEQ ID NO: 228028
  chr1:236305805-236305890
  hyper

SEQ ID NO: 383803 - DNA, 35 bp, Homo sapiens; identical to SEQ ID NO: 198055
  chr2:5832394-5832429
  hyper

SEQ ID NO: 383804 - DNA, 60 bp, Homo sapiens; identical to SEQ ID NO: 198056
  chr2:5832655-5832715
  hyper

SEQ ID NO: 383805 - DNA, 665 bp, Homo sapiens; identical to SEQ ID NO: 221657
  chr2:8818829-8819494
  hyper

SEQ ID NO: 383806 - DNA, 67 bp, Homo sapiens; identical to SEQ ID NO: 228097
  chr2:8825635-8825702
  hyper

SEQ ID NO: 383807 - DNA, 180 bp, Homo sapiens; identical to SEQ ID NO: 221667
  chr2:10443826-10444006
  hyper

SEQ ID NO: 383808 - DNA, 87 bp, Homo sapiens; identical to SEQ ID NO: 105506
  chr2:16080304-16080391
  hyper

SEQ ID NO: 383809 - DNA, 80 bp, Homo sapiens; identical to SEQ ID NO: 228150
  chr2:20251798-20251878
  hyper

SEQ ID NO: 383810 - DNA, 32 bp, Homo sapiens; identical to SEQ ID NO: 228161
  chr2:23886284-23886316
  hyper

SEQ ID NO: 383811 - DNA, 181 bp, Homo sapiens; identical to SEQ ID NO: 228169
  chr2:24583444-24583625
  hyper

SEQ ID NO: 383812 - DNA, 139 bp, Homo sapiens; identical to SEQ ID NO: 198123
  chr2:25458563-25458702
  hyper

SEQ ID NO: 383813 - DNA, 162 bp, Homo sapiens; identical to SEQ ID NO: 198133
  chr2:25470449-25470611
  hyper

SEQ ID NO: 383814 - DNA, 217 bp, Homo sapiens; identical to SEQ ID NO: 228176
  chr2:26101334-26101551
  hyper

SEQ ID NO: 383815 - DNA, 224 bp, Homo sapiens; identical to SEQ ID NO: 228197
  chr2:27440128-27440352
  hyper

SEQ ID NO: 383816 - DNA, 429 bp, Homo sapiens; identical to SEQ ID NO: 228226
  chr2:32264569-32264998
  hyper

SEQ ID NO: 383817 - DNA, 318 bp, Homo sapiens; identical to SEQ ID NO: 228227
  chr2:32288258-32288576
  hyper

SEQ ID NO: 383818 - DNA, 139 bp, Homo sapiens; identical to SEQ ID NO: 198160
  chr2:33171660-33171799
  hyper

SEQ ID NO: 383819 - DNA, 163 bp, Homo sapiens; identical to SEQ ID NO: 228239
  chr2:37572275-37572438
  hyper

SEQ ID NO: 383820 - DNA, 193 bp, Homo sapiens; identical to SEQ ID NO: 228245
  chr2:39005144-39005337
  hyper

SEQ ID NO: 383821 - DNA, 245 bp, Homo sapiens; identical to SEQ ID NO: 228259
  chr2:42795911-42796156
  hyper

SEQ ID NO: 383822 - DNA, 531 bp, Homo sapiens; identical to SEQ ID NO: 279720
  chr2:45180203-45180734
  hyper

SEQ ID NO: 383823 - DNA, 608 bp, Homo sapiens; identical to SEQ ID NO: 228302
  chr2:46727082-46727690
  hyper

SEQ ID NO: 383824 - DNA, 56 bp, Homo sapiens; identical to SEQ ID NO: 228303
  chr2:46926176-46926232
  hyper

SEQ ID NO: 383825 - DNA, 438 bp, Homo sapiens; identical to SEQ ID NO: 221743
  chr2:47630103-47630541
  hyper

SEQ ID NO: 383826 - DNA, 2545 bp, Homo sapiens; identical to SEQ ID NO: 221764
  chr2:48025749-48028294
  hyper

SEQ ID NO: 383827 - DNA, 266 bp, Homo sapiens; identical to SEQ ID NO: 221765
  chr2:48030558-48030824
  hyper

SEQ ID NO: 383828 - DNA, 133 bp, Homo sapiens; identical to SEQ ID NO: 198202
  chr2:50573244-50573377
  hyper

SEQ ID NO: 383829 - DNA, 251 bp, Homo sapiens; identical to SEQ ID NO: 198204
  chr2:50629607-50629858
  hyper

SEQ ID NO: 383830 - DNA, 41 bp, Homo sapiens; identical to SEQ ID NO: 198206
  chr2:54682463-54682504
  hyper

SEQ ID NO: 383831 - DNA, 342 bp, Homo sapiens; identical to SEQ ID NO: 221777
  chr2:61990960-61991302
  hyper

SEQ ID NO: 383832 - DNA, 78 bp, Homo sapiens; identical to SEQ ID NO: 228363
  chr2:61991708-61991786
  hyper

SEQ ID NO: 383833 - DNA, 178 bp, Homo sapiens; identical to SEQ ID NO: 228366
  chr2:62132600-62132778
  hyper

SEQ ID NO: 383834 - DNA, 423 bp, Homo sapiens; identical to SEQ ID NO: 228367
  chr2:62422576-62422999
  hyper

SEQ ID NO: 383835 - DNA, 850 bp, Homo sapiens; identical to SEQ ID NO: 279842
  chr2:63276492-63277342
  hyper

SEQ ID NO: 383836 - DNA, 41 bp, Homo sapiens; identical to SEQ ID NO: 228395
  chr2:68384727-68384768
  hyper

SEQ ID NO: 383837 - DNA, 409 bp, Homo sapiens; identical to SEQ ID NO: 228413
  chr2:70520657-70521066
  hyper

SEQ ID NO: 383838 - DNA, 53 bp, Homo sapiens; identical to SEQ ID NO: 221793
  chr2:71502836-71502889
  hyper

SEQ ID NO: 383839 - DNA, 104 bp, Homo sapiens; identical to SEQ ID NO: 228461
  chr2:74756283-74756387
  hyper

SEQ ID NO: 383840 - DNA, 198 bp, Homo sapiens; identical to SEQ ID NO: 228479
  chr2:85553952-85554150
  hyper

SEQ ID NO: 383841 - DNA, 158 bp, Homo sapiens; identical to SEQ ID NO: 228487
  chr2:85830122-85830280
  hyper

SEQ ID NO: 383842 - DNA, 168 bp, Homo sapiens; identical to SEQ ID NO: 228488
  chr2:85982463-85982631
  hyper

SEQ ID NO: 383843 - DNA, 761 bp, Homo sapiens; identical to SEQ ID NO: 228489
  chr2:86114869-86115630
  hyper

SEQ ID NO: 383844 - DNA, 345 bp, Homo sapiens; identical to SEQ ID NO: 280001
  chr2:95825283-95825628
  hyper

SEQ ID NO: 383845 - DNA, 156 bp, Homo sapiens; identical to SEQ ID NO: 221833
  chr2:97482863-97483019
  hyper

SEQ ID NO: 383846 - DNA, 78 bp, Homo sapiens; identical to SEQ ID NO: 228532
  chr2:97523294-97523372
  hyper

SEQ ID NO: 383847 - DNA, 137 bp, Homo sapiens; identical to SEQ ID NO: 228533
  chr2:97523809-97523946
  hyper

SEQ ID NO: 383848 - DNA, 98 bp, Homo sapiens; identical to SEQ ID NO: 228534
  chr2:97534367-97534465
  hyper

SEQ ID NO: 383849 - DNA, 69 bp, Homo sapiens; identical to SEQ ID NO: 198332
  chr2:98261938-98262007
  hyper

SEQ ID NO: 383850 - DNA, 60 bp, Homo sapiens; identical to SEQ ID NO: 280079
  chr2:105471748-105471808
  hyper

SEQ ID NO: 383851 - DNA, 60 bp, Homo sapiens; identical to SEQ ID NO: 198364
  chr2:105472048-105472108
  hyper

SEQ ID NO: 383852 - DNA, 162 bp, Homo sapiens; identical to SEQ ID NO: 221851
  chr2:106362018-106362180
  hyper

SEQ ID NO: 383853 - DNA, 67 bp, Homo sapiens; identical to SEQ ID NO: 228611
  chr2:113239297-113239364
  hyper

SEQ ID NO: 383854 - DNA, 36 bp, Homo sapiens; identical to SEQ ID NO: 228628
  chr2:119599150-119599186
  hyper

SEQ ID NO: 383855 - DNA, 162 bp, Homo sapiens; identical to SEQ ID NO: 198410
  chr2:120189853-120190015
  hyper

SEQ ID NO: 383856 - DNA, 138 bp, Homo sapiens; identical to SEQ ID NO: 228649
  chr2:120516995-120517133
  hyper

SEQ ID NO: 383857 - DNA, 33 bp, Homo sapiens; identical to SEQ ID NO: 280176
  chr2:121105241-121105274
  hyper

SEQ ID NO: 383858 - DNA, 99 bp, Homo sapiens; identical to SEQ ID NO: 198434
  chr2:132767530-132767629
  hyper

SEQ ID NO: 383859 - DNA, 304 bp, Homo sapiens; identical to SEQ ID NO: 198451
  chr2:137522037-137522341
  hyper

SEQ ID NO: 383860 - DNA, 76 bp, Homo sapiens; identical to SEQ ID NO: 280253
  chr2:148601211-148601287
  hyper

SEQ ID NO: 383861 - DNA, 252 bp, Homo sapiens
  chr2:148601349-148601601
  hyper
tcctccgtgagttttttctttttcttttctagtcaccaagacagcacgcgtgtgcagaagctgcagcggtgggacgcagtgctaagtctgggggcgcacacaccagctcgcgcgtcgcgagctcgcctgggcagctcggcgggcgcggcgaaacagctcccacgtccgccttccaccgactcctcggtatcagagcggacgaggcgtccccccagaggaaagactgggcgccgcagacgccccttggagaag

SEQ ID NO: 383862 - DNA, 266 bp, Homo sapiens; identical to SEQ ID NO: 228726
  chr2:149267061-149267327
  hyper

SEQ ID NO: 383863 - DNA, 173 bp, Homo sapiens; identical to SEQ ID NO: 198465
  chr2:149894865-149895038
  hyper

SEQ ID NO: 383864 - DNA, 237 bp, Homo sapiens
  chr2:150186614-150186851
  hyper
cagggtcatttcacactgccgggcctgcagccacgcacgcagctgctggcccggctgaggctggcggctagggagaggcgccagggggtcgcgcacaggaaggtatcggtgcaccctgagcaaacactgctcgcttccaacgctcactgggaacaggcttcccgggaaggtcccaaatctctccagttccgctcaccctgcgggcgggagcgcggcgcccgggtgccccacctgcgc

SEQ ID NO: 383865 - DNA, 39 bp, Homo sapiens
  chr2:151342533-151342572
  hyper
gtgatcactgggatggagtgggggaaaaagggaaaagct

SEQ ID NO: 383866 - DNA, 148 bp, Homo sapiens; identical to SEQ ID NO: 221906
  chr2:157189365-157189513
  hyper

SEQ ID NO: 383867 - DNA, 71 bp, Homo sapiens; identical to SEQ ID NO: 228763
  chr2:160654718-160654789
  hyper

SEQ ID NO: 383868 - DNA, 340 bp, Homo sapiens; identical to SEQ ID NO: 198496
  chr2:160919062-160919402
  hyper

SEQ ID NO: 383869 - DNA, 38 bp, Homo sapiens; identical to SEQ ID NO: 228848
  chr2:173292254-173292292
  hyper

SEQ ID NO: 383870 - DNA, 318 bp, Homo sapiens; identical to SEQ ID NO: 198563
  chr2:175260398-175260716
  hyper

SEQ ID NO: 383871 - DNA, 94 bp, Homo sapiens; identical to SEQ ID NO: 280416
  chr2:176943767-176943861
  hyper

SEQ ID NO: 383872 - DNA, 170 bp, Homo sapiens; identical to SEQ ID NO: 280417
  chr2:176943902-176944072
  hyper

SEQ ID NO: 383873 - DNA, 280 bp, Homo sapiens; identical to SEQ ID NO: 280418
  chr2:176950481-176950761
  hyper

SEQ ID NO: 383874 - DNA, 250 bp, Homo sapiens; identical to SEQ ID NO: 228905
  chr2:178076955-178077205
  hyper

SEQ ID NO: 383875 - DNA, 111 bp, Homo sapiens; identical to SEQ ID NO: 198608
  chr2:190306062-190306173
  hyper

SEQ ID NO: 383876 - DNA, 54 bp, Homo sapiens; identical to SEQ ID NO: 228953
  chr2:192542863-192542917
  hyper

SEQ ID NO: 383877 - DNA, 178 bp, Homo sapiens; identical to SEQ ID NO: 198634
  chr2:198265429-198265607
  hyper

SEQ ID NO: 383878 - DNA, 70 bp, Homo sapiens; identical to SEQ ID NO: 198637
  chr2:198268366-198268436
  hyper

SEQ ID NO: 383879 - DNA, 250 bp, Homo sapiens; identical to SEQ ID NO: 228984
  chr2:201729265-201729515
  hyper

SEQ ID NO: 383880 - DNA, 74 bp, Homo sapiens; identical to SEQ ID NO: 228996
  chr2:204192792-204192866
  hyper

SEQ ID NO: 383881 - DNA, 118 bp, Homo sapiens; identical to SEQ ID NO: 229017
  chr2:209130875-209130993
  hyper

SEQ ID NO: 383882 - DNA, 208 bp, Homo sapiens; identical to SEQ ID NO: 280612
  chr2:214148842-214149050
  hyper

SEQ ID NO: 383883 - DNA, 311 bp, Homo sapiens; identical to SEQ ID NO: 280613
  chr2:214149129-214149440
  hyper

SEQ ID NO: 383884 - DNA, 53 bp, Homo sapiens; identical to SEQ ID NO: 229025
  chr2:216176512-216176565
  hyper

SEQ ID NO: 383885 - DNA, 63 bp, Homo sapiens; identical to SEQ ID NO: 229041
  chr2:219157359-219157422
  hyper

SEQ ID NO: 383886 - DNA, 255 bp, Homo sapiens; identical to SEQ ID NO: 229056
  chr2:219761613-219761868
  hyper

SEQ ID NO: 383887 - DNA, 112 bp, Homo sapiens; identical to SEQ ID NO: 229078
  chr2:220093844-220093956
  hyper

SEQ ID NO: 383888 - DNA, 96 bp, Homo sapiens; identical to SEQ ID NO: 229097
  chr2:220492611-220492707
  hyper

SEQ ID NO: 383889 - DNA, 91 bp, Homo sapiens; identical to SEQ ID NO: 229142
  chr2:230786754-230786845
  hyper

SEQ ID NO: 383890 - DNA, 82 bp, Homo sapiens; identical to SEQ ID NO: 222033
  chr2:233284387-233284469
  hyper

SEQ ID NO: 383891 - DNA, 168 bp, Homo sapiens; identical to SEQ ID NO: 198792
  chr2:241499837-241500005
  hyper

SEQ ID NO: 383892 - DNA, 162 bp, Homo sapiens; identical to SEQ ID NO: 198795
  chr2:242088871-242089033
  hyper

SEQ ID NO: 383893 - DNA, 71 bp, Homo sapiens; identical to SEQ ID NO: 280855
  chr3:3842608-3842679
  hyper

SEQ ID NO: 383894 - DNA, 47 bp, Homo sapiens; identical to SEQ ID NO: 280856
  chr3:3842731-3842778
  hyper

SEQ ID NO: 383895 - DNA, 293 bp, Homo sapiens; identical to SEQ ID NO: 229257
  chr3:5028396-5028689
  hyper

SEQ ID NO: 383896 - DNA, 67 bp, Homo sapiens; identical to SEQ ID NO: 229267
  chr3:9291320-9291387
  hyper

SEQ ID NO: 383897 - DNA, 275 bp, Homo sapiens; identical to SEQ ID NO: 229279
  chr3:9932166-9932441
  hyper

SEQ ID NO: 383898 - DNA, 66 bp, Homo sapiens
  chr3:10206277-10206343
  hyper
caggtattaccaacacctagggagttgcctggcatacagtaggtaattaatggagtatttgatgag

SEQ ID NO: 383899 - DNA, 440 bp, Homo sapiens
  chr3:13922041-13922481
  hyper
gggctgactggctcagtgtatttcttccctactcccacctattcgagagtggcggcagggggtgcccaggttgggcagcctcctctgggatcctgctgttagccgacagactgagtcgggctgaggcccagttgccccgcgcggaacagcagtggggcgcctgagccgcgggagcgtgaggggcgcagctggccgctcagagcgcgctcgcggcgtcaccaggcggacgcggcgggtggtgcacctcggcctcgctcccgggaacagaatgctttgagtgccctggccgacccgagggggctaacacccttctttggtgtacacctcatccagtgagctagggggagtctaaccgtccctggaaattgggtggtgccaagactccgagcggcagtttatgtttttgccagcgaatgtccatcctccgggtacctgttccc

SEQ ID NO: 383900 - DNA, 137 bp, Homo sapiens; identical to SEQ ID NO: 198869
  chr3:32442878-32443015
  hyper

SEQ ID NO: 383901 - DNA, 55 bp, Homo sapiens; identical to SEQ ID NO: 198870
  chr3:32443510-32443565
  hyper

SEQ ID NO: 383902 - DNA, 154 bp, Homo sapiens; identical to SEQ ID NO: 222110
  chr3:37061800-37061954
  hyper

SEQ ID NO: 383903 - DNA, 165 bp, Homo sapiens; identical to SEQ ID NO: 222115
  chr3:37089009-37089174
  hyper

SEQ ID NO: 383904 - DNA, 83 bp, Homo sapiens; identical to SEQ ID NO: 281039
  chr3:38179801-38179884
  hyper

SEQ ID NO: 383905 - DNA, 147 bp, Homo sapiens; identical to SEQ ID NO: 39092
  chr3:38179984-38180131
  hyper

SEQ ID NO: 383906 - DNA, 278 bp, Homo sapiens; identical to SEQ ID NO: 281049
  chr3:38690811-38691089
  hyper

SEQ ID NO: 383907 - DNA, 69 bp, Homo sapiens; identical to SEQ ID NO: 281050
  chr3:38691144-38691213
  hyper

SEQ ID NO: 383908 - DNA, 161 bp, Homo sapiens; identical to SEQ ID NO: 198894
  chr3:42056668-42056829
  hyper

SEQ ID NO: 383909 - DNA, 214 bp, Homo sapiens; identical to SEQ ID NO: 198903
  chr3:43663334-43663548
  hyper

SEQ ID NO: 383910 - DNA, 162 bp, Homo sapiens; identical to SEQ ID NO: 198912
  chr3:44626179-44626341
  hyper

SEQ ID NO: 383911 - DNA, 188 bp, Homo sapiens; identical to SEQ ID NO: 229446
  chr3:45017826-45018014
  hyper

SEQ ID NO: 383912 - DNA, 237 bp, Homo sapiens; identical to SEQ ID NO: 229457
  chr3:47018180-47018417
  hyper

SEQ ID NO: 383913 - DNA, 78 bp, Homo sapiens; identical to SEQ ID NO: 222142
  chr3:47050739-47050817
  hyper

SEQ ID NO: 383914 - DNA, 47 bp, Homo sapiens; identical to SEQ ID NO: 198929
  chr3:48885300-48885347
  hyper

SEQ ID NO: 383915 - DNA, 293 bp, Homo sapiens; identical to SEQ ID NO: 229483
  chr3:49044449-49044742
  hyper

SEQ ID NO: 383916 - DNA, 137 bp, Homo sapiens; identical to SEQ ID NO: 229484
  chr3:49057921-49058058
  hyper

SEQ ID NO: 383917 - DNA, 239 bp, Homo sapiens; identical to SEQ ID NO: 229495
  chr3:49395700-49395939
  hyper

SEQ ID NO: 383918 - DNA, 67 bp, Homo sapiens; identical to SEQ ID NO: 229506
  chr3:49977376-49977443
  hyper

SEQ ID NO: 383919 - DNA, 39 bp, Homo sapiens; identical to SEQ ID NO: 198940
  chr3:50126252-50126291
  hyper

SEQ ID NO: 383920 - DNA, 188 bp, Homo sapiens; identical to SEQ ID NO: 229530
  chr3:52029759-52029947
  hyper

SEQ ID NO: 383921 - DNA, 322 bp, Homo sapiens; identical to SEQ ID NO: 229537
  chr3:52804893-52805215
  hyper

SEQ ID NO: 383922 - DNA, 147 bp, Homo sapiens; identical to SEQ ID NO: 222158
  chr3:53190592-53190739
  hyper

SEQ ID NO: 383923 - DNA, 302 bp, Homo sapiens; identical to SEQ ID NO: 229542
  chr3:53381571-53381873
  hyper

SEQ ID NO: 383924 - DNA, 73 bp, Homo sapiens; identical to SEQ ID NO: 229628
  chr3:79068799-79068872
  hyper

SEQ ID NO: 383925 - DNA, 243 bp, Homo sapiens
  chr3:85008991-85009234
  hyper
gaatttctaacactggctcagccctgccttcccagcagtcagccccttacgcggcaccttttgccttctcattcacctgagcttccttcatctcactccattcccgccagcatccccctcccacgccttttggctggcaacttgtgcctctctgaacattccaccctcccgacaacccccaccagccacctcccacatcacgctcttgagcgaccctctccatctcttgtcatctctttaacc

SEQ ID NO: 383926 - DNA, 60 bp, Homo sapiens; identical to SEQ ID NO: 199012
  chr3:87039596-87039656
  hyper

SEQ ID NO: 383927 - DNA, 206 bp, Homo sapiens; identical to SEQ ID NO: 199013
  chr3:87040548-87040754
  hyper

SEQ ID NO: 383928 - DNA, 37 bp, Homo sapiens; identical to SEQ ID NO: 229650
  chr3:97691378-97691415
  hyper

SEQ ID NO: 383929 - DNA, 323 bp, Homo sapiens; identical to SEQ ID NO: 281329
  chr3:98451047-98451370
  hyper

SEQ ID NO: 383930 - DNA, 206 bp, Homo sapiens; identical to SEQ ID NO: 281330
  chr3:98451479-98451685
  hyper

SEQ ID NO: 383931 - DNA, 160 bp, Homo sapiens; identical to SEQ ID NO: 281331
  chr3:98452371-98452531
  hyper

SEQ ID NO: 383932 - DNA, 56 bp, Homo sapiens; identical to SEQ ID NO: 229657
  chr3:99787818-99787874
  hyper

SEQ ID NO: 383933 - DNA, 76 bp, Homo sapiens
  chr3:110791244-110791320
  hyper
ggccgcgcgggtcgccgtgcggatggccgagggttggcgatggtgcttcgtgcgccgaactccgggtttgctccgg

SEQ ID NO: 383934 - DNA, 229 bp, Homo sapiens; identical to SEQ ID NO: 229690
  chr3:113557578-113557807
  hyper

SEQ ID NO: 383935 - DNA, 52 bp, Homo sapiens; identical to SEQ ID NO: 199053
  chr3:117715651-117715703
  hyper

SEQ ID NO: 383936 - DNA, 285 bp, Homo sapiens; identical to SEQ ID NO: 229717
  chr3:122101937-122102222
  hyper

SEQ ID NO: 383937 - DNA, 585 bp, Homo sapiens; identical to SEQ ID NO: 281411
  chr3:122746969-122747554
  hyper

SEQ ID NO: 383938 - DNA, 191 bp, Homo sapiens; identical to SEQ ID NO: 281427
  chr3:125931775-125931966
  hyper

SEQ ID NO: 383939 - DNA, 232 bp, Homo sapiens; identical to SEQ ID NO: 199072
  chr3:125932020-125932252
  hyper

SEQ ID NO: 383940 - DNA, 306 bp, Homo sapiens; identical to SEQ ID NO: 281431
  chr3:126075653-126075959
  hyper

SEQ ID NO: 383941 - DNA, 179 bp, Homo sapiens; identical to SEQ ID NO: 281432
  chr3:126076063-126076242
  hyper

SEQ ID NO: 383942 - DNA, 113 bp, Homo sapiens; identical to SEQ ID NO: 281441
  chr3:126854312-126854425
  hyper

SEQ ID NO: 383943 - DNA, 207 bp, Homo sapiens; identical to SEQ ID NO: 199079
  chr3:127348123-127348330
  hyper

SEQ ID NO: 383944 - DNA, 46 bp, Homo sapiens; identical to SEQ ID NO: 281462
  chr3:128564768-128564814
  hyper

SEQ ID NO: 383945 - DNA, 120 bp, Homo sapiens; identical to SEQ ID NO: 229769
  chr3:128598081-128598201
  hyper

SEQ ID NO: 383946 - DNA, 188 bp, Homo sapiens; identical to SEQ ID NO: 199087
  chr3:128840084-128840272
  hyper

SEQ ID NO: 383947 - DNA, 120 bp, Homo sapiens; identical to SEQ ID NO: 229775
  chr3:128968529-128968649
  hyper

SEQ ID NO: 383948 - DNA, 35 bp, Homo sapiens; identical to SEQ ID NO: 281501
  chr3:133748105-133748140
  hyper

SEQ ID NO: 383949 - DNA, 52 bp, Homo sapiens; identical to SEQ ID NO: 199100
  chr3:133969907-133969959
  hyper

SEQ ID NO: 383950 - DNA, 750 bp, Homo sapiens; identical to SEQ ID NO: 281525
  chr3:137482464-137483214
  hyper

SEQ ID NO: 383951 - DNA, 69 bp, Homo sapiens; identical to SEQ ID NO: 281526
  chr3:137483244-137483313
  hyper

SEQ ID NO: 383952 - DNA, 33 bp, Homo sapiens; identical to SEQ ID NO: 281536
  chr3:138066747-138066780
  hyper

SEQ ID NO: 383953 - DNA, 560 bp, Homo sapiens; identical to SEQ ID NO: 199116
  chr3:138153256-138153816
  hyper

SEQ ID NO: 383954 - DNA, 43 bp, Homo sapiens; identical to SEQ ID NO: 229832
  chr3:138553746-138553789
  hyper

SEQ ID NO: 383955 - DNA, 268 bp, Homo sapiens; identical to SEQ ID NO: 281549
  chr3:138668328-138668596
  hyper

SEQ ID NO: 383956 - DNA, 356 bp, Homo sapiens; identical to SEQ ID NO: 281574
  chr3:147074101-147074457
  hyper

SEQ ID NO: 383957 - DNA, 131 bp, Homo sapiens; identical to SEQ ID NO: 281575
  chr3:147074487-147074618
  hyper

SEQ ID NO: 383958 - DNA, 431 bp, Homo sapiens; identical to SEQ ID NO: 229873
  chr3:147095403-147095834
  hyper

SEQ ID NO: 383959 - DNA, 129 bp, Homo sapiens; identical to SEQ ID NO: 229878
  chr3:147107635-147107764
  hyper

SEQ ID NO: 383960 - DNA, 292 bp, Homo sapiens; identical to SEQ ID NO: 281590
  chr3:147112343-147112635
  hyper

SEQ ID NO: 383961 - DNA, 40 bp, Homo sapiens; identical to SEQ ID NO: 199132
  chr3:147112665-147112705
  hyper

SEQ ID NO: 383962 - DNA, 211 bp, Homo sapiens; identical to SEQ ID NO: 222257
  chr3:159706814-159707025
  hyper

SEQ ID NO: 383963 - DNA, 157 bp, Homo sapiens; identical to SEQ ID NO: 199177
  chr3:164924661-164924818
  hyper

SEQ ID NO: 383964 - DNA, 351 bp, Homo sapiens; identical to SEQ ID NO: 229946
  chr3:167453720-167454071
  hyper

SEQ ID NO: 383965 - DNA, 87 bp, Homo sapiens; identical to SEQ ID NO: 222261
  chr3:169380983-169381070
  hyper

SEQ ID NO: 383966 - DNA, 172 bp, Homo sapiens; identical to SEQ ID NO: 281697
  chr3:170136455-170136627
  hyper

SEQ ID NO: 383967 - DNA, 243 bp, Homo sapiens; identical to SEQ ID NO: 281714
  chr3:173113694-173113937
  hyper

SEQ ID NO: 383968 - DNA, 190 bp, Homo sapiens; identical to SEQ ID NO: 230008
  chr3:180630143-180630333
  hyper

SEQ ID NO: 383969 - DNA, 64 bp, Homo sapiens; identical to SEQ ID NO: 199216
  chr3:181428196-181428260
  hyper

SEQ ID NO: 383970 - DNA, 145 bp, Homo sapiens; identical to SEQ ID NO: 199227
  chr3:182698591-182698736
  hyper

SEQ ID NO: 383971 - DNA, 86 bp, Homo sapiens; identical to SEQ ID NO: 199238
  chr3:183851915-183852001
  hyper

SEQ ID NO: 383972 - DNA, 117 bp, Homo sapiens; identical to SEQ ID NO: 230048
  chr3:183967307-183967424
  hyper

SEQ ID NO: 383973 - DNA, 105 bp, Homo sapiens; identical to SEQ ID NO: 222283
  chr3:184097688-184097793
  hyper

SEQ ID NO: 383974 - DNA, 69 bp, Homo sapiens; identical to SEQ ID NO: 230057
  chr3:184280320-184280389
  hyper

SEQ ID NO: 383975 - DNA, 236 bp, Homo sapiens; identical to SEQ ID NO: 199248
  chr3:185542334-185542570
  hyper

SEQ ID NO: 383976 - DNA, 172 bp, Homo sapiens; identical to SEQ ID NO: 230072
  chr3:185826001-185826173
  hyper

SEQ ID NO: 383977 - DNA, 72 bp, Homo sapiens; identical to SEQ ID NO: 230094
  chr3:187463255-187463327
  hyper

SEQ ID NO: 383978 - DNA, 117 bp, Homo sapiens; identical to SEQ ID NO: 281855
  chr3:194406436-194406553
  hyper

SEQ ID NO: 383979 - DNA, 477 bp, Homo sapiens; identical to SEQ ID NO: 40105
  chr3:194406589-194407066
  hyper

SEQ ID NO: 383980 - DNA, 194 bp, Homo sapiens; identical to SEQ ID NO: 230125
  chr3:194992081-194992275
  hyper

SEQ ID NO: 383981 - DNA, 183 bp, Homo sapiens; identical to SEQ ID NO: 230129
  chr3:195809187-195809370
  hyper

SEQ ID NO: 383982 - DNA, 190 bp, Homo sapiens; identical to SEQ ID NO: 230141
  chr3:197517983-197518173
  hyper

SEQ ID NO: 383983 - DNA, 40 bp, Homo sapiens; identical to SEQ ID NO: 109581
  chr3:197808380-197808420
  hyper

SEQ ID NO: 383984 - DNA, 147 bp, Homo sapiens; identical to SEQ ID NO: 222329
  chr4:667619-667766
  hyper

SEQ ID NO: 383985 - DNA, 318 bp, Homo sapiens; identical to SEQ ID NO: 281906
  chr4:1049472-1049790
  hyper

SEQ ID NO: 383986 - DNA, 140 bp, Homo sapiens; identical to SEQ ID NO: 199293
  chr4:1243421-1243561
  hyper

SEQ ID NO: 383987 - DNA, 358 bp, Homo sapiens
  chr4:1397889-1398247
  hyper
gtttttgcctgagcggggctggacgggtgctgcgggccgggcccggctgcggagatcacagcggagtggaagctctgatcgatccgcagggctgatacacacttaattaaactcattttgtgtagtgtacaaactagttaaggccatttaatttatttcggcgtatattaccccccaattaccgccggcgcagggccagccaattgccgggcatttaataacaggcccggcggtggggccggagccggccgagagaatggggcttgggggacccaaatcctatgccctggccccgaccctacctcaagcctccaggccctgagcttcggtcgcgagggtcagccccggctcccctgcc

SEQ ID NO: 383988 - DNA, 298 bp, Homo sapiens; identical to SEQ ID NO: 281914
  chr4:1398378-1398676
  hyper

SEQ ID NO: 383989 - DNA, 174 bp, Homo sapiens
  chr4:1794972-1795146
  hyper
cgcggaccgtcccccactggctgcggcgcgcggggcagcccaggctcagtgcgcggtggcggcggcgtcgcgggcagctggcgccgcgcggtcctgctctgccggtcgcacggacgcaccggcgggccgccggccggagggacggggcgggagctgggcccgcggacagcgagc

SEQ ID NO: 383990 - DNA, 221 bp, Homo sapiens; identical to SEQ ID NO: 281961
  chr4:4859825-4860046
  hyper

SEQ ID NO: 383991 - DNA, 61 bp, Homo sapiens; identical to SEQ ID NO: 281962
  chr4:4860075-4860136
  hyper

SEQ ID NO: 383992 - DNA, 123 bp, Homo sapiens
  chr4:4861657-4861780
  hyper
cactcggtgtcaaagtggaggactccgccttcggcaagccggcggggggaggcgcgggccaggcccccagcgccgccgcggccacggcagccgccatgggcgcggacgaggagggggccaagc

SEQ ID NO: 383993 - DNA, 155 bp, Homo sapiens; identical to SEQ ID NO: 230232
  chr4:7070680-7070835
  hyper

SEQ ID NO: 383994 - DNA, 153 bp, Homo sapiens; identical to SEQ ID NO: 282009
  chr4:8874787-8874940
  hyper

SEQ ID NO: 383995 - DNA, 58 bp, Homo sapiens; identical to SEQ ID NO: 199347
  chr4:10089890-10089948
  hyper

SEQ ID NO: 383996 - DNA, 223 bp, Homo sapiens; identical to SEQ ID NO: 230263
  chr4:13486089-13486312
  hyper

SEQ ID NO: 383997 - DNA, 44 bp, Homo sapiens; identical to SEQ ID NO: 199354
  chr4:13550560-13550604
  hyper

SEQ ID NO: 383998 - DNA, 68 bp, Homo sapiens; identical to SEQ ID NO: 230303
  chr4:26585707-26585775
  hyper

SEQ ID NO: 383999 - DNA, 182 bp, Homo sapiens; identical to SEQ ID NO: 230304
  chr4:26862030-26862212
  hyper

SEQ ID NO: 384000 - DNA, 177 bp, Homo sapiens; identical to SEQ ID NO: 199398
  chr4:41991961-41992138
  hyper

SEQ ID NO: 384001 - DNA, 207 bp, Homo sapiens; identical to SEQ ID NO: 230359
  chr4:44680670-44680877
  hyper

SEQ ID NO: 384002 - DNA, 400 bp, Homo sapiens; identical to SEQ ID NO: 230369
  chr4:47916484-47916884
  hyper

SEQ ID NO: 384003 - DNA, 207 bp, Homo sapiens; identical to SEQ ID NO: 110080
  chr4:52904505-52904712
  hyper

SEQ ID NO: 384004 - DNA, 75 bp, Homo sapiens; identical to SEQ ID NO: 199422
  chr4:55569950-55570025
  hyper

SEQ ID NO: 384005 - DNA, 91 bp, Homo sapiens; identical to SEQ ID NO: 230406
  chr4:56501808-56501899
  hyper

SEQ ID NO: 384006 - DNA, 301 bp, Homo sapiens; identical to SEQ ID NO: 230408
  chr4:56502563-56502864
  hyper

SEQ ID NO: 384007 - DNA, 177 bp, Homo sapiens; identical to SEQ ID NO: 230412
  chr4:57253559-57253736
  hyper

SEQ ID NO: 384008 - DNA, 217 bp, Homo sapiens; identical to SEQ ID NO: 282231
  chr4:74734859-74735076
  hyper

SEQ ID NO: 384009 - DNA, 177 bp, Homo sapiens; identical to SEQ ID NO: 110211
  chr4:74735193-74735370
  hyper

SEQ ID NO: 384010 - DNA, 472 bp, Homo sapiens; identical to SEQ ID NO: 199460
  chr4:77818185-77818657
  hyper

SEQ ID NO: 384011 - DNA, 131 bp, Homo sapiens
  chr4:77818754-77818885
  hyper
tcccccaaaaggtccctgtatctcctcttgagcaccacgtacttggtgccgtcggggtcctggcgcactgcggcgaccgagttgacgaagcccttgaagagctcgcggcggtgctggtgctggctggggga

SEQ ID NO: 384012 - DNA, 111 bp, Homo sapiens; identical to SEQ ID NO: 230468
  chr4:78079532-78079643
  hyper

SEQ ID NO: 384013 - DNA, 578 bp, Homo sapiens; identical to SEQ ID NO: 230471
  chr4:78979792-78980370
  hyper

SEQ ID NO: 384014 - DNA, 100 bp, Homo sapiens; identical to SEQ ID NO: 282265
  chr4:79472691-79472791
  hyper

SEQ ID NO: 384015 - DNA, 86 bp, Homo sapiens; identical to SEQ ID NO: 282266
  chr4:79473111-79473197
  hyper

SEQ ID NO: 384016 - DNA, 283 bp, Homo sapiens; identical to SEQ ID NO: 230493
  chr4:83812351-83812634
  hyper

SEQ ID NO: 384017 - DNA, 234 bp, Homo sapiens; identical to SEQ ID NO: 230494
  chr4:83821698-83821932
  hyper

SEQ ID NO: 384018 - DNA, 267 bp, Homo sapiens; identical to SEQ ID NO: 230497
  chr4:84205947-84206214
  hyper

SEQ ID NO: 384019 - DNA, 441 bp, Homo sapiens; identical to SEQ ID NO: 230524
  chr4:89299895-89300336
  hyper

SEQ ID NO: 384020 - DNA, 119 bp, Homo sapiens; identical to SEQ ID NO: 199510
  chr4:101111126-101111245
  hyper

SEQ ID NO: 384021 - DNA, 216 bp, Homo sapiens; identical to SEQ ID NO: 199511
  chr4:101111971-101112187
  hyper

SEQ ID NO: 384022 - DNA, 105 bp, Homo sapiens; identical to SEQ ID NO: 222450
  chr4:106068588-106068693
  hyper

SEQ ID NO: 384023 - DNA, 107 bp, Homo sapiens; identical to SEQ ID NO: 199528
  chr4:106182911-106183018
  hyper

SEQ ID NO: 384024 - DNA, 416 bp, Homo sapiens; identical to SEQ ID NO: 199541
  chr4:109092685-109093101
  hyper

SEQ ID NO: 384025 - DNA, 56 bp, Homo sapiens
  chr4:110343800-110343856
  hyper
gggttggggctttctggtctggtttttttgttttgggtttttgtttgtttgttttt

SEQ ID NO: 384026 - DNA, 304 bp, Homo sapiens; identical to SEQ ID NO: 199569
  chr4:119200550-119200854
  hyper

SEQ ID NO: 384027 - DNA, 50 bp, Homo sapiens; identical to SEQ ID NO: 230634
  chr4:119757206-119757256
  hyper

SEQ ID NO: 384028 - DNA, 50 bp, Homo sapiens; identical to SEQ ID NO: 199576
  chr4:120221611-120221661
  hyper

SEQ ID NO: 384029 - DNA, 242 bp, Homo sapiens; identical to SEQ ID NO: 282496
  chr4:126236000-126236242
  hyper

SEQ ID NO: 384030 - DNA, 250 bp, Homo sapiens; identical to SEQ ID NO: 282497
  chr4:126237060-126237310
  hyper

SEQ ID NO: 384031 - DNA, 43 bp, Homo sapiens; identical to SEQ ID NO: 199592
  chr4:126237611-126237654
  hyper

SEQ ID NO: 384032 - DNA, 92 bp, Homo sapiens; identical to SEQ ID NO: 230680
  chr4:140005146-140005238
  hyper

SEQ ID NO: 384033 - DNA, 102 bp, Homo sapiens; identical to SEQ ID NO: 199600
  chr4:140097254-140097356
  hyper

SEQ ID NO: 384034 - DNA, 180 bp, Homo sapiens; identical to SEQ ID NO: 222492
  chr4:140587058-140587238
  hyper

SEQ ID NO: 384035 - DNA, 469 bp, Homo sapiens; identical to SEQ ID NO: 222495
  chr4:141074043-141074512
  hyper

SEQ ID NO: 384036 - DNA, 383 bp, Homo sapiens; identical to SEQ ID NO: 230706
  chr4:144256959-144257342
  hyper

SEQ ID NO: 384037 - DNA, 270 bp, Homo sapiens; identical to SEQ ID NO: 230708
  chr4:144434324-144434594
  hyper

SEQ ID NO: 384038 - DNA, 33 bp, Homo sapiens; identical to SEQ ID NO: 199629
  chr4:148538935-148538968
  hyper

SEQ ID NO: 384039 - DNA, 178 bp, Homo sapiens; identical to SEQ ID NO: 199659
  chr4:157891924-157892102
  hyper

SEQ ID NO: 384040 - DNA, 129 bp, Homo sapiens; identical to SEQ ID NO: 230768
  chr4:159593505-159593634
  hyper

SEQ ID NO: 384041 - DNA, 79 bp, Homo sapiens; identical to SEQ ID NO: 230777
  chr4:166248060-166248139
  hyper

SEQ ID NO: 384042 - DNA, 178 bp, Homo sapiens; identical to SEQ ID NO: 230787
  chr4:169931434-169931612
  hyper

SEQ ID NO: 384043 - DNA, 42 bp, Homo sapiens; identical to SEQ ID NO: 230795
  chr4:174254798-174254840
  hyper

SEQ ID NO: 384044 - DNA, 514 bp, Homo sapiens; identical to SEQ ID NO: 230797
  chr4:174415375-174415889
  hyper

SEQ ID NO: 384045 - DNA, 398 bp, Homo sapiens; identical to SEQ ID NO: 110869
  chr4:174439053-174439451
  hyper

SEQ ID NO: 384046 - DNA, 126 bp, Homo sapiens; identical to SEQ ID NO: 230827
  chr4:178363969-178364095
  hyper

SEQ ID NO: 384047 - DNA, 211 bp, Homo sapiens; identical to SEQ ID NO: 282679
  chr4:183063455-183063666
  hyper

SEQ ID NO: 384048 - DNA, 429 bp, Homo sapiens; identical to SEQ ID NO: 282680
  chr4:183065517-183065946
  hyper

SEQ ID NO: 384049 - DNA, 318 bp, Homo sapiens; identical to SEQ ID NO: 282681
  chr4:183066306-183066624
  hyper

SEQ ID NO: 384050 - DNA, 203 bp, Homo sapiens; identical to SEQ ID NO: 222536
  chr4:184328290-184328493
  hyper

SEQ ID NO: 384051 - DNA, 36 bp, Homo sapiens; identical to SEQ ID NO: 230836
  chr4:184365599-184365635
  hyper

SEQ ID NO: 384052 - DNA, 254 bp, Homo sapiens
  chr4:186456473-186456727
  hyper
aagcaagaatgccgacacctaccctggtgatgaccaaaggctggttgaagtctatgccccctgagagcctgaagccccagggcgcagggcccgggaggatcaccgtctggggcatgccgccttcctcccgcccaccgggctctaagtgtccccgcgcagggcagccactccgcgccgggcggcgtcctggccccgacccgggcgggggcgctttatccccgctgggggtgacgtcaccgccccgccgtcctccc

SEQ ID NO: 384053 - DNA, 285 bp, Homo sapiens; identical to SEQ ID NO: 199726
  chr5:374579-374864
  hyper

SEQ ID NO: 384054 - DNA, 105 bp, Homo sapiens; identical to SEQ ID NO: 222563
  chr5:1294071-1294176
  hyper

SEQ ID NO: 384055 - DNA, 89 bp, Homo sapiens; identical to SEQ ID NO: 282760
  chr5:1882047-1882136
  hyper

SEQ ID NO: 384056 - DNA, 124 bp, Homo sapiens
  chr5:3590987-3591111
  hyper
atggtgcctctgcccccgagcaaccgtctggtgacatcaaataagaagccctgagaactctcacaccgctgctgttgttcatattggaggcataatggaaatgatctggttaattaaggggagg

SEQ ID NO: 384057 - DNA, 85 bp, Homo sapiens; identical to SEQ ID NO: 282786
  chr5:7851299-7851384
  hyper

SEQ ID NO: 384058 - DNA, 58 bp, Homo sapiens; identical to SEQ ID NO: 199761
  chr5:14108555-14108613
  hyper

SEQ ID NO: 384059 - DNA, 53 bp, Homo sapiens; identical to SEQ ID NO: 199762
  chr5:14108840-14108893
  hyper

SEQ ID NO: 384060 - DNA, 94 bp, Homo sapiens; identical to SEQ ID NO: 230950
  chr5:14810079-14810173
  hyper

SEQ ID NO: 384061 - DNA, 31 bp, Homo sapiens
  chr5:17217142-17217173
  hyper
ggttccaaataaatgagggggagagagagag

SEQ ID NO: 384062 - DNA, 88 bp, Homo sapiens; identical to SEQ ID NO: 230981
  chr5:34929946-34930034
  hyper

SEQ ID NO: 384063 - DNA, 175 bp, Homo sapiens; identical to SEQ ID NO: 282853
  chr5:36066734-36066909
  hyper

SEQ ID NO: 384064 - DNA, 343 bp, Homo sapiens; identical to SEQ ID NO: 231012
  chr5:41904222-41904565
  hyper

SEQ ID NO: 384065 - DNA, 316 bp, Homo sapiens; identical to SEQ ID NO: 231013
  chr5:41925471-41925787
  hyper

SEQ ID NO: 384066 - DNA, 349 bp, Homo sapiens; identical to SEQ ID NO: 231028
  chr5:43041474-43041823
  hyper

SEQ ID NO: 384067 - DNA, 36 bp, Homo sapiens; identical to SEQ ID NO: 231031
  chr5:43120913-43120949
  hyper

SEQ ID NO: 384068 - DNA, 32 bp, Homo sapiens; identical to SEQ ID NO: 231032
  chr5:43121558-43121590
  hyper

SEQ ID NO: 384069 - DNA, 274 bp, Homo sapiens; identical to SEQ ID NO: 199829
  chr5:44389052-44389326
  hyper

SEQ ID NO: 384070 - DNA, 232 bp, Homo sapiens; identical to SEQ ID NO: 199843
  chr5:53813366-53813598
  hyper

SEQ ID NO: 384071 - DNA, 74 bp, Homo sapiens; identical to SEQ ID NO: 231094
  chr5:61708381-61708455
  hyper

SEQ ID NO: 384072 - DNA, 133 bp, Homo sapiens; identical to SEQ ID NO: 222618
  chr5:63255569-63255702
  hyper

SEQ ID NO: 384073 - DNA, 63 bp, Homo sapiens; identical to SEQ ID NO: 231098
  chr5:63462188-63462251
  hyper

SEQ ID NO: 384074 - DNA, 162 bp, Homo sapiens; identical to SEQ ID NO: 231105
  chr5:64920140-64920302
  hyper

SEQ ID NO: 384075 - DNA, 47 bp, Homo sapiens; identical to SEQ ID NO: 231110
  chr5:65891728-65891775
  hyper

SEQ ID NO: 384076 - DNA, 41 bp, Homo sapiens; identical to SEQ ID NO: 199880
  chr5:68179341-68179382
  hyper

SEQ ID NO: 384077 - DNA, 123 bp, Homo sapiens; identical to SEQ ID NO: 222625
  chr5:73936774-73936897
  hyper

SEQ ID NO: 384078 - DNA, 103 bp, Homo sapiens; identical to SEQ ID NO: 199897
  chr5:74162616-74162719
  hyper

SEQ ID NO: 384079 - DNA, 68 bp, Homo sapiens; identical to SEQ ID NO: 231186
  chr5:77656465-77656533
  hyper

SEQ ID NO: 384080 - DNA, 122 bp, Homo sapiens; identical to SEQ ID NO: 199917
  chr5:78281720-78281842
  hyper

SEQ ID NO: 384081 - DNA, 365 bp, Homo sapiens; identical to SEQ ID NO: 283131
  chr5:87987787-87988152
  hyper

SEQ ID NO: 384082 - DNA, 67 bp, Homo sapiens; identical to SEQ ID NO: 283132
  chr5:87988651-87988718
  hyper

SEQ ID NO: 384083 - DNA, 62 bp, Homo sapiens; identical to SEQ ID NO: 231254
  chr5:92943194-92943256
  hyper

SEQ ID NO: 384084 - DNA, 382 bp, Homo sapiens; identical to SEQ ID NO: 231259
  chr5:93954161-93954543
  hyper

SEQ ID NO: 384085 - DNA, 236 bp, Homo sapiens; identical to SEQ ID NO: 283168
  chr5:95768384-95768620
  hyper

SEQ ID NO: 384086 - DNA, 263 bp, Homo sapiens; identical to SEQ ID NO: 222648
  chr5:98109927-98110190
  hyper

SEQ ID NO: 384087 - DNA, 224 bp, Homo sapiens; identical to SEQ ID NO: 199963
  chr5:100240289-100240513
  hyper

SEQ ID NO: 384088 - DNA, 125 bp, Homo sapiens; identical to SEQ ID NO: 199968
  chr5:107005046-107005171
  hyper

SEQ ID NO: 384089 - DNA, 214 bp, Homo sapiens; identical to SEQ ID NO: 231295
  chr5:110428255-110428469
  hyper

SEQ ID NO: 384090 - DNA, 99 bp, Homo sapiens; identical to SEQ ID NO: 111818
  chr5:111496549-111496648
  hyper

SEQ ID NO: 384091 - DNA, 163 bp, Homo sapiens; identical to SEQ ID NO: 222664
  chr5:114938164-114938327
  hyper

SEQ ID NO: 384092 - DNA, 146 bp, Homo sapiens; identical to SEQ ID NO: 199994
  chr5:115421021-115421167
  hyper

SEQ ID NO: 384093 - DNA, 77 bp, Homo sapiens; identical to SEQ ID NO: 231345
  chr5:122621428-122621505
  hyper

SEQ ID NO: 384094 - DNA, 66 bp, Homo sapiens; identical to SEQ ID NO: 283283
  chr5:131131878-131131944
  hyper

SEQ ID NO: 384095 - DNA, 154 bp, Homo sapiens; identical to SEQ ID NO: 231391
  chr5:133968282-133968436
  hyper

SEQ ID NO: 384096 - DNA, 49 bp, Homo sapiens; identical to SEQ ID NO: 283317
  chr5:134376163-134376212
  hyper

SEQ ID NO: 384097 - DNA, 182 bp, Homo sapiens; identical to SEQ ID NO: 283318
  chr5:134376375-134376557
  hyper

SEQ ID NO: 384098 - DNA, 60 bp, Homo sapiens; identical to SEQ ID NO: 231431
  chr5:137910697-137910757
  hyper

SEQ ID NO: 384099 - DNA, 63 bp, Homo sapiens; identical to SEQ ID NO: 222706
  chr5:139725675-139725738
  hyper

SEQ ID NO: 384100 - DNA, 136 bp, Homo sapiens; identical to SEQ ID NO: 222711
  chr5:141257894-141258030
  hyper

SEQ ID NO: 384101 - DNA, 87 bp, Homo sapiens; identical to SEQ ID NO: 283438
  chr5:149109659-149109746
  hyper

SEQ ID NO: 384102 - DNA, 192 bp, Homo sapiens; identical to SEQ ID NO: 112268
  chr5:149109802-149109994
  hyper

SEQ ID NO: 384103 - DNA, 36 bp, Homo sapiens; identical to SEQ ID NO: 283464
  chr5:153853519-153853555
  hyper

SEQ ID NO: 384104 - DNA, 118 bp, Homo sapiens; identical to SEQ ID NO: 200138
  chr5:162930156-162930274
  hyper

SEQ ID NO: 384105 - DNA, 63 bp, Homo sapiens; identical to SEQ ID NO: 200139
  chr5:162930320-162930383
  hyper

SEQ ID NO: 384106 - DNA, 236 bp, Homo sapiens; identical to SEQ ID NO: 222740
  chr5:167718952-167719188
  hyper

SEQ ID NO: 384107 - DNA, 274 bp, Homo sapiens; identical to SEQ ID NO: 231621
  chr5:172483102-172483376
  hyper

SEQ ID NO: 384108 - DNA, 259 bp, Homo sapiens; identical to SEQ ID NO: 283558
  chr5:172663579-172663838
  hyper

SEQ ID NO: 384109 - DNA, 32 bp, Homo sapiens; identical to SEQ ID NO: 231643
  chr5:174147150-174147182
  hyper

SEQ ID NO: 384110 - DNA, 208 bp, Homo sapiens; identical to SEQ ID NO: 283581
  chr5:174159593-174159801
  hyper

SEQ ID NO: 384111 - DNA, 294 bp, Homo sapiens; identical to SEQ ID NO: 200189
  chr5:176738658-176738952
  hyper

SEQ ID NO: 384112 - DNA, 50 bp, Homo sapiens; identical to SEQ ID NO: 200191
  chr5:177019030-177019080
  hyper

SEQ ID NO: 384113 - DNA, 64 bp, Homo sapiens; identical to SEQ ID NO: 283627
  chr5:178054094-178054158
  hyper

SEQ ID NO: 384114 - DNA, 149 bp, Homo sapiens; identical to SEQ ID NO: 112631
  chr5:178054178-178054327
  hyper

SEQ ID NO: 384115 - DNA, 512 bp, Homo sapiens; identical to SEQ ID NO: 231734
  chr5:180670801-180671313
  hyper

SEQ ID NO: 384116 - DNA, 152 bp, Homo sapiens
  chr6:1610664-1610816
  hyper
gcggcgagcgggggccatgcaggcgcgctactccgtgtccagccccaactccctgggagtggtgccctacctcggcggcgagcagagctactaccgcgcggcggccgcggcggccgggggcggctacaccgccatgccggcccccatgagcg

SEQ ID NO: 384117 - DNA, 334 bp, Homo sapiens; identical to SEQ ID NO: 200232
  chr6:1610864-1611198
  hyper

SEQ ID NO: 384118 - DNA, 183 bp, Homo sapiens; identical to SEQ ID NO: 231756
  chr6:1612303-1612486
  hyper

SEQ ID NO: 384119 - DNA, 168 bp, Homo sapiens; identical to SEQ ID NO: 231761
  chr6:2764960-2765128
  hyper

SEQ ID NO: 384120 - DNA, 205 bp, Homo sapiens; identical to SEQ ID NO: 231764
  chr6:3118559-3118764
  hyper

SEQ ID NO: 384121 - DNA, 31 bp, Homo sapiens; identical to SEQ ID NO: 200270
  chr6:10414549-10414580
  hyper

SEQ ID NO: 384122 - DNA, 180 bp, Homo sapiens; identical to SEQ ID NO: 231809
  chr6:10529013-10529193
  hyper

SEQ ID NO: 384123 - DNA, 227 bp, Homo sapiens; identical to SEQ ID NO: 231827
  chr6:16129890-16130117
  hyper

SEQ ID NO: 384124 - DNA, 324 bp, Homo sapiens; identical to SEQ ID NO: 200307
  chr6:20401055-20401379
  hyper

SEQ ID NO: 384125 - DNA, 262 bp, Homo sapiens; identical to SEQ ID NO: 231854
  chr6:24403465-24403727
  hyper

SEQ ID NO: 384126 - DNA, 213 bp, Homo sapiens; identical to SEQ ID NO: 231859
  chr6:25278942-25279155
  hyper

SEQ ID NO: 384127 - DNA, 178 bp, Homo sapiens; identical to SEQ ID NO: 283832
  chr6:26021528-26021706
  hyper

SEQ ID NO: 384128 - DNA, 110 bp, Homo sapiens; identical to SEQ ID NO: 283833
  chr6:26022178-26022288
  hyper

SEQ ID NO: 384129 - DNA, 35 bp, Homo sapiens; identical to SEQ ID NO: 200319
  chr6:26032843-26032878
  hyper

SEQ ID NO: 384130 - DNA, 231 bp, Homo sapiens; identical to SEQ ID NO: 231869
  chr6:26056526-26056757
  hyper

SEQ ID NO: 384131 - DNA, 43 bp, Homo sapiens; identical to SEQ ID NO: 200362
  chr6:27100142-27100185
  hyper

SEQ ID NO: 384132 - DNA, 118 bp, Homo sapiens; identical to SEQ ID NO: 231927
  chr6:27101539-27101657
  hyper

SEQ ID NO: 384133 - DNA, 31 bp, Homo sapiens; identical to SEQ ID NO: 231958
  chr6:27561177-27561208
  hyper

SEQ ID NO: 384134 - DNA, 113 bp, Homo sapiens; identical to SEQ ID NO: 232022
  chr6:36354418-36354531
  hyper

SEQ ID NO: 384135 - DNA, 343 bp, Homo sapiens; identical to SEQ ID NO: 232028
  chr6:36646212-36646555
  hyper

SEQ ID NO: 384136 - DNA, 129 bp, Homo sapiens; identical to SEQ ID NO: 232029
  chr6:36703003-36703132
  hyper

SEQ ID NO: 384137 - DNA, 123 bp, Homo sapiens; identical to SEQ ID NO: 232066
  chr6:41754978-41755101
  hyper

SEQ ID NO: 384138 - DNA, 50 bp, Homo sapiens; identical to SEQ ID NO: 113330
  chr6:42072647-42072697
  hyper

SEQ ID NO: 384139 - DNA, 125 bp, Homo sapiens; identical to SEQ ID NO: 222857
  chr6:43081636-43081761
  hyper

SEQ ID NO: 384140 - DNA, 75 bp, Homo sapiens; identical to SEQ ID NO: 232092
  chr6:43337694-43337769
  hyper

SEQ ID NO: 384141 - DNA, 405 bp, Homo sapiens; identical to SEQ ID NO: 232149
  chr6:52284759-52285164
  hyper

SEQ ID NO: 384142 - DNA, 282 bp, Homo sapiens; identical to SEQ ID NO: 222871
  chr6:53409809-53410091
  hyper

SEQ ID NO: 384143 - DNA, 78 bp, Homo sapiens; identical to SEQ ID NO: 232183
  chr6:71377331-71377409
  hyper

SEQ ID NO: 384144 - DNA, 91 bp, Homo sapiens; identical to SEQ ID NO: 232216
  chr6:83902912-83903003
  hyper

SEQ ID NO: 384145 - DNA, 196 bp, Homo sapiens; identical to SEQ ID NO: 232217
  chr6:83903545-83903741
  hyper

SEQ ID NO: 384146 - DNA, 251 bp, Homo sapiens; identical to SEQ ID NO: 232241
  chr6:88117490-88117741
  hyper

SEQ ID NO: 384147 - DNA, 332 bp, Homo sapiens; identical to SEQ ID NO: 284237
  chr6:89827121-89827453
  hyper

SEQ ID NO: 384148 - DNA, 241 bp, Homo sapiens
  chr6:99273607-99273848
  hyper
gtattgtgagatttctaaatgtcagggcactgttaaggaaatgtctgacaaacctgtagtaaacctcttcacgaaggaaaggagggctgttgtcttggcttttggttgtgtgtccctcatggcccccaagaaaacaatttttctgttccaaacactctttggatcaagtttcgtccttgcatttctagtttaggcgtttctactagaaacgaatgtgtggtgcgttttggttgggcattac

SEQ ID NO: 384149 - DNA, 126 bp, Homo sapiens; identical to SEQ ID NO: 200572
  chr6:99273901-99274027
  hyper

SEQ ID NO: 384150 - DNA, 349 bp, Homo sapiens; identical to SEQ ID NO: 284341
  chr6:108436829-108437178
  hyper

SEQ ID NO: 384151 - DNA, 216 bp, Homo sapiens; identical to SEQ ID NO: 284348
  chr6:108491987-108492203
  hyper

SEQ ID NO: 384152 - DNA, 48 bp, Homo sapiens; identical to SEQ ID NO: 232370
  chr6:111580350-111580398
  hyper

SEQ ID NO: 384153 - DNA, 31 bp, Homo sapiens; identical to SEQ ID NO: 232377
  chr6:114178491-114178522
  hyper

SEQ ID NO: 384154 - DNA, 351 bp, Homo sapiens; identical to SEQ ID NO: 284391
  chr6:117197786-117198137
  hyper

SEQ ID NO: 384155 - DNA, 205 bp, Homo sapiens; identical to SEQ ID NO: 284392
  chr6:117198339-117198544
  hyper

SEQ ID NO: 384156 - DNA, 184 bp, Homo sapiens; identical to SEQ ID NO: 200630
  chr6:117198574-117198758
  hyper

SEQ ID NO: 384157 - DNA, 40 bp, Homo sapiens; identical to SEQ ID NO: 222921
  chr6:119762016-119762056
  hyper

SEQ ID NO: 384158 - DNA, 105 bp, Homo sapiens; identical to SEQ ID NO: 222922
  chr6:123110275-123110380
  hyper

SEQ ID NO: 384159 - DNA, 209 bp, Homo sapiens; identical to SEQ ID NO: 200655
  chr6:132271777-132271986
  hyper

SEQ ID NO: 384160 - DNA, 194 bp, Homo sapiens; identical to SEQ ID NO: 284458
  chr6:132721835-132722029
  hyper

SEQ ID NO: 384161 - DNA, 536 bp, Homo sapiens; identical to SEQ ID NO: 232451
  chr6:134212582-134213118
  hyper

SEQ ID NO: 384162 - DNA, 142 bp, Homo sapiens; identical to SEQ ID NO: 200657
  chr6:134216762-134216904
  hyper

SEQ ID NO: 384163 - DNA, 369 bp, Homo sapiens; identical to SEQ ID NO: 200658
  chr6:134217001-134217370
  hyper

SEQ ID NO: 384164 - DNA, 77 bp, Homo sapiens; identical to SEQ ID NO: 200659
  chr6:134217461-134217538
  hyper

SEQ ID NO: 384165 - DNA, 44 bp, Homo sapiens; identical to SEQ ID NO: 232471
  chr6:137365286-137365330
  hyper

SEQ ID NO: 384166 - DNA, 236 bp, Homo sapiens; identical to SEQ ID NO: 232491
  chr6:139349617-139349853
  hyper

SEQ ID NO: 384167 - DNA, 447 bp, Homo sapiens; identical to SEQ ID NO: 232496
  chr6:139695584-139696031
  hyper

SEQ ID NO: 384168 - DNA, 358 bp, Homo sapiens; identical to SEQ ID NO: 200685
  chr6:144384552-144384910
  hyper

SEQ ID NO: 384169 - DNA, 189 bp, Homo sapiens; identical to SEQ ID NO: 232522
  chr6:149637867-149638056
  hyper

SEQ ID NO: 384170 - DNA, 48 bp, Homo sapiens; identical to SEQ ID NO: 232523
  chr6:149867345-149867393
  hyper

SEQ ID NO: 384171 - DNA, 135 bp, Homo sapiens; identical to SEQ ID NO: 200701
  chr6:150072001-150072136
  hyper

SEQ ID NO: 384172 - DNA, 82 bp, Homo sapiens; identical to SEQ ID NO: 200706
  chr6:150920982-150921064
  hyper

SEQ ID NO: 384173 - DNA, 244 bp, Homo sapiens; identical to SEQ ID NO: 200716
  chr6:154360330-154360574
  hyper

SEQ ID NO: 384174 - DNA, 59 bp, Homo sapiens; identical to SEQ ID NO: 200718
  chr6:157802884-157802943
  hyper

SEQ ID NO: 384175 - DNA, 33 bp, Homo sapiens; identical to SEQ ID NO: 200752
  chr6:168227910-168227943
  hyper

SEQ ID NO: 384176 - DNA, 274 bp, Homo sapiens; identical to SEQ ID NO: 222996
  chr7:1069695-1069969
  hyper

SEQ ID NO: 384177 - DNA, 119 bp, Homo sapiens; identical to SEQ ID NO: 200783
  chr7:1283941-1284060
  hyper

SEQ ID NO: 384178 - DNA, 46 bp, Homo sapiens; identical to SEQ ID NO: 232667
  chr7:2018721-2018767
  hyper

SEQ ID NO: 384179 - DNA, 77 bp, Homo sapiens; identical to SEQ ID NO: 223010
  chr7:2555344-2555421
  hyper

SEQ ID NO: 384180 - DNA, 203 bp, Homo sapiens; identical to SEQ ID NO: 200798
  chr7:5085238-5085441
  hyper

SEQ ID NO: 384181 - DNA, 83 bp, Homo sapiens; identical to SEQ ID NO: 232684
  chr7:5125291-5125374
  hyper

SEQ ID NO: 384182 - DNA, 120 bp, Homo sapiens; identical to SEQ ID NO: 232693
  chr7:5595699-5595819
  hyper

SEQ ID NO: 384183 - DNA, 233 bp, Homo sapiens; identical to SEQ ID NO: 232724
  chr7:12250503-12250736
  hyper

SEQ ID NO: 384184 - DNA, 40 bp, Homo sapiens; identical to SEQ ID NO: 284839
  chr7:20828444-20828484
  hyper

SEQ ID NO: 384185 - DNA, 96 bp, Homo sapiens; identical to SEQ ID NO: 232782
  chr7:25165221-25165317
  hyper

SEQ ID NO: 384186 - DNA, 181 bp, Homo sapiens; identical to SEQ ID NO: 232792
  chr7:25935087-25935268
  hyper

SEQ ID NO: 384187 - DNA, 191 bp, Homo sapiens; identical to SEQ ID NO: 232911
  chr7:44645927-44646118
  hyper

SEQ ID NO: 384188 - DNA, 31 bp, Homo sapiens; identical to SEQ ID NO: 201028
  chr7:87104710-87104741
  hyper

SEQ ID NO: 384189 - DNA, 247 bp, Homo sapiens; identical to SEQ ID NO: 201045
  chr7:92463701-92463948
  hyper

SEQ ID NO: 384190 - DNA, 46 bp, Homo sapiens
  chr7:93203796-93203842
  hyper
agacgctggtgggctggctttcctagtttgatgcgagagcaaactg

SEQ ID NO: 384191 - DNA, 180 bp, Homo sapiens; identical to SEQ ID NO: 223145
  chr7:95064267-95064447
  hyper

SEQ ID NO: 384192 - DNA, 117 bp, Homo sapiens; identical to SEQ ID NO: 285184
  chr7:96639201-96639318
  hyper

SEQ ID NO: 384193 - DNA, 150 bp, Homo sapiens; identical to SEQ ID NO: 285185
  chr7:96639348-96639498
  hyper

SEQ ID NO: 384194 - DNA, 188 bp, Homo sapiens; identical to SEQ ID NO: 201057
  chr7:97361999-97362187
  hyper

SEQ ID NO: 384195 - DNA, 51 bp, Homo sapiens; identical to SEQ ID NO: 233060
  chr7:98030099-98030150
  hyper

SEQ ID NO: 384196 - DNA, 74 bp, Homo sapiens; identical to SEQ ID NO: 223155
  chr7:99613133-99613207
  hyper

SEQ ID NO: 384197 - DNA, 140 bp, Homo sapiens; identical to SEQ ID NO: 201066
  chr7:99679773-99679913
  hyper

SEQ ID NO: 384198 - DNA, 226 bp, Homo sapiens; identical to SEQ ID NO: 233075
  chr7:99699434-99699660
  hyper

SEQ ID NO: 384199 - DNA, 169 bp, Homo sapiens; identical to SEQ ID NO: 285215
  chr7:99725637-99725806
  hyper

SEQ ID NO: 384200 - DNA, 188 bp, Homo sapiens; identical to SEQ ID NO: 233087
  chr7:100424341-100424529
  hyper

SEQ ID NO: 384201 - DNA, 66 bp, Homo sapiens; identical to SEQ ID NO: 201105
  chr7:101842081-101842147
  hyper

SEQ ID NO: 384202 - DNA, 303 bp, Homo sapiens; identical to SEQ ID NO: 201110
  chr7:101870646-101870949
  hyper

SEQ ID NO: 384203 - DNA, 65 bp, Homo sapiens; identical to SEQ ID NO: 201121
  chr7:101926003-101926068
  hyper

SEQ ID NO: 384204 - DNA, 87 bp, Homo sapiens; identical to SEQ ID NO: 233116
  chr7:102985260-102985347
  hyper

SEQ ID NO: 384205 - DNA, 71 bp, Homo sapiens
  chr7:107642740-107642811
  hyper
ggagctaggggagcccatggacagtccctggggctctggagtggtttcaaggcttctccattccagggaag

SEQ ID NO: 384206 - DNA, 76 bp, Homo sapiens; identical to SEQ ID NO: 201138
  chr7:107643995-107644071
  hyper

SEQ ID NO: 384207 - DNA, 253 bp, Homo sapiens; identical to SEQ ID NO: 233149
  chr7:112579978-112580231
  hyper

SEQ ID NO: 384208 - DNA, 41 bp, Homo sapiens; identical to SEQ ID NO: 201150
  chr7:115850424-115850465
  hyper

SEQ ID NO: 384209 - DNA, 548 bp, Homo sapiens; identical to SEQ ID NO: 201158
  chr7:120497836-120498384
  hyper

SEQ ID NO: 384210 - DNA, 67 bp, Homo sapiens; identical to SEQ ID NO: 233180
  chr7:121943301-121943368
  hyper

SEQ ID NO: 384211 - DNA, 46 bp, Homo sapiens; identical to SEQ ID NO: 201173
  chr7:124405510-124405556
  hyper

SEQ ID NO: 384212 - DNA, 219 bp, Homo sapiens; identical to SEQ ID NO: 285387
  chr7:124406227-124406446
  hyper

SEQ ID NO: 384213 - DNA, 318 bp, Homo sapiens; identical to SEQ ID NO: 233218
  chr7:128695028-128695346
  hyper

SEQ ID NO: 384214 - DNA, 176 bp, Homo sapiens; identical to SEQ ID NO: 233260
  chr7:138666618-138666794
  hyper

SEQ ID NO: 384215 - DNA, 437 bp, Homo sapiens; identical to SEQ ID NO: 223234
  chr7:139478051-139478488
  hyper

SEQ ID NO: 384216 - DNA, 86 bp, Homo sapiens; identical to SEQ ID NO: 233271
  chr7:140373221-140373307
  hyper

SEQ ID NO: 384217 - DNA, 37 bp, Homo sapiens; identical to SEQ ID NO: 233272
  chr7:140624448-140624485
  hyper

SEQ ID NO: 384218 - DNA, 257 bp, Homo sapiens; identical to SEQ ID NO: 223241
  chr7:144100839-144101096
  hyper

SEQ ID NO: 384219 - DNA, 152 bp, Homo sapiens; identical to SEQ ID NO: 201215
  chr7:145981901-145982053
  hyper

SEQ ID NO: 384220 - DNA, 71 bp, Homo sapiens; identical to SEQ ID NO: 201219
  chr7:148508741-148508812
  hyper

SEQ ID NO: 384221 - DNA, 588 bp, Homo sapiens; identical to SEQ ID NO: 285530
  chr7:150864924-150865512
  hyper

SEQ ID NO: 384222 - DNA, 252 bp, Homo sapiens; identical to SEQ ID NO: 233326
  chr7:150929281-150929533
  hyper

SEQ ID NO: 384223 - DNA, 119 bp, Homo sapiens; identical to SEQ ID NO: 233338
  chr7:152373449-152373568
  hyper

SEQ ID NO: 384224 - DNA, 333 bp, Homo sapiens; identical to SEQ ID NO: 201270
  chr7:157130634-157130967
  hyper

SEQ ID NO: 384225 - DNA, 93 bp, Homo sapiens; identical to SEQ ID NO: 285610
  chr8:495072-495165
  hyper

SEQ ID NO: 384226 - DNA, 167 bp, Homo sapiens; identical to SEQ ID NO: 223304
  chr8:8750284-8750451
  hyper

SEQ ID NO: 384227 - DNA, 139 bp, Homo sapiens; identical to SEQ ID NO: 223305
  chr8:8750520-8750659
  hyper

SEQ ID NO: 384228 - DNA, 128 bp, Homo sapiens; identical to SEQ ID NO: 201317
  chr8:17013473-17013601
  hyper

SEQ ID NO: 384229 - DNA, 56 bp, Homo sapiens; identical to SEQ ID NO: 285693
  chr8:19615264-19615320
  hyper

SEQ ID NO: 384230 - DNA, 78 bp, Homo sapiens
  chr8:22408681-22408759
  hyper
cccgggggggccgctcccttgggctgatttcctccctgtgcttgcacgtgtgtgagcgtccccacgtttgcagtgtac

SEQ ID NO: 384231 - DNA, 309 bp, Homo sapiens; identical to SEQ ID NO: 223333
  chr8:22925472-22925781
  hyper

SEQ ID NO: 384232 - DNA, 201 bp, Homo sapiens; identical to SEQ ID NO: 285730
  chr8:23261046-23261247
  hyper

SEQ ID NO: 384233 - DNA, 76 bp, Homo sapiens; identical to SEQ ID NO: 285731
  chr8:23261271-23261347
  hyper

SEQ ID NO: 384234 - DNA, 47 bp, Homo sapiens; identical to SEQ ID NO: 233508
  chr8:23540842-23540889
  hyper

SEQ ID NO: 384235 - DNA, 144 bp, Homo sapiens; identical to SEQ ID NO: 285758
  chr8:25902185-25902329
  hyper

SEQ ID NO: 384236 - DNA, 43 bp, Homo sapiens
  chr8:26372150-26372193
  hyper
cggagggcctcgggcaaagaagccctgcagaacatcaacgacc

SEQ ID NO: 384237 - DNA, 64 bp, Homo sapiens; identical to SEQ ID NO: 223345
  chr8:26435020-26435084
  hyper

SEQ ID NO: 384238 - DNA, 38 bp, Homo sapiens; identical to SEQ ID NO: 285784
  chr8:27449813-27449851
  hyper

SEQ ID NO: 384239 - DNA, 181 bp, Homo sapiens; identical to SEQ ID NO: 285785
  chr8:27449881-27450062
  hyper

SEQ ID NO: 384240 - DNA, 126 bp, Homo sapiens; identical to SEQ ID NO: 201369
  chr8:28560085-28560211
  hyper

SEQ ID NO: 384241 - DNA, 42 bp, Homo sapiens; identical to SEQ ID NO: 233596
  chr8:38034153-38034195
  hyper

SEQ ID NO: 384242 - DNA, 34 bp, Homo sapiens; identical to SEQ ID NO: 201399
  chr8:42040329-42040363
  hyper

SEQ ID NO: 384243 - DNA, 240 bp, Homo sapiens; identical to SEQ ID NO: 223372
  chr8:48650853-48651093
  hyper

SEQ ID NO: 384244 - DNA, 50 bp, Homo sapiens; identical to SEQ ID NO: 201403
  chr8:48872787-48872837
  hyper

SEQ ID NO: 384245 - DNA, 50 bp, Homo sapiens; identical to SEQ ID NO: 233631
  chr8:49292489-49292539
  hyper

SEQ ID NO: 384246 - DNA, 75 bp, Homo sapiens; identical to SEQ ID NO: 201410
  chr8:54754915-54754990
  hyper

SEQ ID NO: 384247 - DNA, 124 bp, Homo sapiens; identical to SEQ ID NO: 233664
  chr8:56987181-56987305
  hyper

SEQ ID NO: 384248 - DNA, 39 bp, Homo sapiens; identical to SEQ ID NO: 285882
  chr8:57025552-57025591
  hyper

SEQ ID NO: 384249 - DNA, 1119 bp, Homo sapiens; identical to SEQ ID NO: 223399
  chr8:62626314-62627433
  hyper

SEQ ID NO: 384250 - DNA, 72 bp, Homo sapiens
  chr8:65283690-65283762
  hyper
gcttgggttctttcctaaggcctccccaccaacaaggctgaaattccaaggccctggaagatgaggcaaagc

SEQ ID NO: 384251 - DNA, 157 bp, Homo sapiens; identical to SEQ ID NO: 285903
  chr8:65285899-65286056
  hyper

SEQ ID NO: 384252 - DNA, 42 bp, Homo sapiens; identical to SEQ ID NO: 285925
  chr8:67090411-67090453
  hyper

SEQ ID NO: 384253 - DNA, 221 bp, Homo sapiens; identical to SEQ ID NO: 116746
  chr8:67974225-67974446
  hyper

SEQ ID NO: 384254 - DNA, 271 bp, Homo sapiens
  chr8:68864200-68864471
  hyper
acgcagtacttccccagggttgtgtttcctttttcctgagatttggcgaagggtaaagggtcggagtcacatggatacaaagcttttgattaatgtccaagtcactgctgtggctgccgaagccgcttcccctccagccccggccgtgtgaggccagagcagcggggccgggcgcgcagggcctggccggagcccccactcccaggagtttcctctgcagagccccgcgccccccgcgccgggatttcagcccgatcccctcctctccctg

SEQ ID NO: 384255 - DNA, 38 bp, Homo sapiens
  chr8:68864942-68864980
  hyper
cgcggggatttgttggtgccccgagactcactgagttg

SEQ ID NO: 384256 - DNA, 280 bp, Homo sapiens; identical to SEQ ID NO: 233752
  chr8:76318950-76319230
  hyper

SEQ ID NO: 384257 - DNA, 44 bp, Homo sapiens; identical to SEQ ID NO: 285984
  chr8:77586691-77586735
  hyper

SEQ ID NO: 384258 - DNA, 102 bp, Homo sapiens; identical to SEQ ID NO: 233785
  chr8:86132907-86133009
  hyper

SEQ ID NO: 384259 - DNA, 57 bp, Homo sapiens; identical to SEQ ID NO: 116870
  chr8:86350926-86350983
  hyper

SEQ ID NO: 384260 - DNA, 82 bp, Homo sapiens; identical to SEQ ID NO: 286028
  chr8:93113864-93113946
  hyper

SEQ ID NO: 384261 - DNA, 242 bp, Homo sapiens; identical to SEQ ID NO: 201502
  chr8:93115140-93115382
  hyper

SEQ ID NO: 384262 - DNA, 88 bp, Homo sapiens; identical to SEQ ID NO: 233810
  chr8:95653853-95653941
  hyper

SEQ ID NO: 384263 - DNA, 43 bp, Homo sapiens; identical to SEQ ID NO: 201539
  chr8:101920619-101920662
  hyper

SEQ ID NO: 384264 - DNA, 231 bp, Homo sapiens; identical to SEQ ID NO: 233865
  chr8:103424261-103424492
  hyper

SEQ ID NO: 384265 - DNA, 218 bp, Homo sapiens; identical to SEQ ID NO: 233898
  chr8:116680622-116680840
  hyper

SEQ ID NO: 384266 - DNA, 84 bp, Homo sapiens; identical to SEQ ID NO: 201572
  chr8:117861184-117861268
  hyper

SEQ ID NO: 384267 - DNA, 107 bp, Homo sapiens; identical to SEQ ID NO: 201580
  chr8:117870590-117870697
  hyper

SEQ ID NO: 384268 - DNA, 224 bp, Homo sapiens; identical to SEQ ID NO: 233944
  chr8:134308718-134308942
  hyper

SEQ ID NO: 384269 - DNA, 37 bp, Homo sapiens; identical to SEQ ID NO: 233950
  chr8:135844538-135844575
  hyper

SEQ ID NO: 384270 - DNA, 561 bp, Homo sapiens; identical to SEQ ID NO: 223499
  chr8:142010302-142010863
  hyper

SEQ ID NO: 384271 - DNA, 303 bp, Homo sapiens
  chr8:144512510-144512813
  hyper
gttgacgtactcgatggccagcgggctgctgggcagctcggcgcccatcgccagctccgcggccatcgcccggggcccgcgcccggccgcgccccgacgggcggcgtgggagtggggggggagctgcaggcctctcccccccctgctccccgcgggcggcggtcccggcgggggcgggggggcgccggcgcggggcggcggcgccgaggggcgcagggaaaagtttcacgtggtcaactccggggcggcgcgctaggggcaccgctggccaggtgtctcgggcgaccccgggcccgcgtcgcc

SEQ ID NO: 384272 - DNA, 170 bp, Homo sapiens; identical to SEQ ID NO: 201629
  chr8:144614411-144614581
  hyper

SEQ ID NO: 384273 - DNA, 301 bp, Homo sapiens; identical to SEQ ID NO: 234064
  chr9:18473916-18474217
  hyper

SEQ ID NO: 384274 - DNA, 149 bp, Homo sapiens; identical to SEQ ID NO: 234069
  chr9:20621410-20621559
  hyper

SEQ ID NO: 384275 - DNA, 150 bp, Homo sapiens
  chr9:25677903-25678053
  hyper
ttcgtgctggcctcttcagggacccggcgtgcctccgcgggcgtcccgttgccgccttcgccggggagccgcaaagcctgacggaagaggctgcggttctcgcgcttcagccgccggttctcgagccgcagccgggcgttctcctgacgc

SEQ ID NO: 384276 - DNA, 256 bp, Homo sapiens
  chr9:25678127-25678383
  hyper
ccgctcctccagctgctgtcgggcgccgtccgcgcggcctcgccagcccacgccgccgccgccgccgctggggctgcccccaccacgagcccggccggagcggcctggccctcggccgtccgcagcaccgtccccgccgcagcaactcccgcgcctagtggcgccaccacgcatgcgccacatcggtcccatcccaaccgcgccgccagccccgtgggctgaggggccgcgcggccaggcgcgggcaagttcgggg

SEQ ID NO: 384277 - DNA, 225 bp, Homo sapiens; identical to SEQ ID NO: 234100
  chr9:33166527-33166752
  hyper

SEQ ID NO: 384278 - DNA, 60 bp, Homo sapiens; identical to SEQ ID NO: 286384
  chr9:33524278-33524338
  hyper

SEQ ID NO: 384279 - DNA, 228 bp, Homo sapiens; identical to SEQ ID NO: 234117
  chr9:35096044-35096272
  hyper

SEQ ID NO: 384280 - DNA, 220 bp, Homo sapiens; identical to SEQ ID NO: 234132
  chr9:36572867-36573087
  hyper

SEQ ID NO: 384281 - DNA, 333 bp, Homo sapiens
  chr9:38067788-38068121
  hyper
aagcagcacgccagccccgacccagggtcctaggccgaagctgaagtagagactcaacaccagagcggcgggtgcctcggtttccccgtgcgcaccgtggctctggaacctcgggaagaggccaaggggcaccttaccttgtccttcttgccggccccgctctcctccgcggctgaggcggcgcacttgttgagcagtttcttgcctccgcaggccgtcgggctccaggtgcggccgcccgcgcaggcgccccccagggggtccccggccccaccgcccgcggcgctctccactttgatgaggcggtgcttgggggagatgtagcgcacctcg

SEQ ID NO: 384282 - DNA, 749 bp, Homo sapiens; identical to SEQ ID NO: 201714
  chr9:38068158-38068907
  hyper

SEQ ID NO: 384283 - DNA, 477 bp, Homo sapiens; identical to SEQ ID NO: 234161
  chr9:71319341-71319818
  hyper

SEQ ID NO: 384284 - DNA, 73 bp, Homo sapiens; identical to SEQ ID NO: 234171
  chr9:72874193-72874266
  hyper

SEQ ID NO: 384285 - DNA, 32 bp, Homo sapiens; identical to SEQ ID NO: 234178
  chr9:74980723-74980755
  hyper

SEQ ID NO: 384286 - DNA, 64 bp, Homo sapiens; identical to SEQ ID NO: 234207
  chr9:82187860-82187924
  hyper

SEQ ID NO: 384287 - DNA, 155 bp, Homo sapiens; identical to SEQ ID NO: 286580
  chr9:99380838-99380993
  hyper

SEQ ID NO: 384288 - DNA, 426 bp, Homo sapiens; identical to SEQ ID NO: 286581
  chr9:99381077-99381503
  hyper

SEQ ID NO: 384289 - DNA, 629 bp, Homo sapiens; identical to SEQ ID NO: 201802
  chr9:99381680-99382309
  hyper

SEQ ID NO: 384290 - DNA, 204 bp, Homo sapiens; identical to SEQ ID NO: 223644
  chr9:99417397-99417601
  hyper

SEQ ID NO: 384291 - DNA, 121 bp, Homo sapiens; identical to SEQ ID NO: 201805
  chr9:99539844-99539965
  hyper

SEQ ID NO: 384292 - DNA, 646 bp, Homo sapiens; identical to SEQ ID NO: 286587
  chr9:99540006-99540652
  hyper

SEQ ID NO: 384293 - DNA, 96 bp, Homo sapiens; identical to SEQ ID NO: 234395
  chr9:127905903-127905999
  hyper

SEQ ID NO: 384294 - DNA, 33 bp, Homo sapiens
  chr9:129373385-129373418
  hyper
gtgtgtgtgtgtgtagggggaatgaatggacag

SEQ ID NO: 384295 - DNA, 166 bp, Homo sapiens; identical to SEQ ID NO: 234406
  chr9:129384573-129384739
  hyper

SEQ ID NO: 384296 - DNA, 209 bp, Homo sapiens; identical to SEQ ID NO: 234414
  chr9:130308066-130308275
  hyper

SEQ ID NO: 384297 - DNA, 251 bp, Homo sapiens; identical to SEQ ID NO: 234426
  chr9:131486506-131486757
  hyper

SEQ ID NO: 384298 - DNA, 65 bp, Homo sapiens; identical to SEQ ID NO: 286791
  chr9:132427556-132427621
  hyper

SEQ ID NO: 384299 - DNA, 181 bp, Homo sapiens; identical to SEQ ID NO: 286805
  chr9:133319785-133319966
  hyper

SEQ ID NO: 384300 - DNA, 55 bp, Homo sapiens; identical to SEQ ID NO: 286806
  chr9:133320002-133320057
  hyper

SEQ ID NO: 384301 - DNA, 274 bp, Homo sapiens; identical to SEQ ID NO: 234461
  chr9:133568977-133569251
  hyper

SEQ ID NO: 384302 - DNA, 155 bp, Homo sapiens; identical to SEQ ID NO: 201937
  chr9:139838241-139838396
  hyper

SEQ ID NO: 384303 - DNA, 82 bp, Homo sapiens; identical to SEQ ID NO: 234587
  chr10:13141818-13141900
  hyper

SEQ ID NO: 384304 - DNA, 241 bp, Homo sapiens; identical to SEQ ID NO: 201985
  chr10:13341387-13341628
  hyper

SEQ ID NO: 384305 - DNA, 277 bp, Homo sapiens; identical to SEQ ID NO: 286957
  chr10:14215913-14216190
  hyper

SEQ ID NO: 384306 - DNA, 282 bp, Homo sapiens
  chr10:21463291-21463573
  hyper
ggggagcccaggtgggcggcggctggggagggagggatccaggcgggggaggtgacaaacaccggtggggagagtgctcaaacccgcgtactcccttccctccctcttctcttccccagccgggggcaccctcatcccaggctgactgacgtccctggcacccaaatgtcgcggggagtgcggggccagggtgcgccctccctcctcctccagccagtgaaacccgggacagcggcacccagccccagggcggaggccgtctctgctgcgcgcagcgacgca

SEQ ID NO: 384307 - DNA, 129 bp, Homo sapiens; identical to SEQ ID NO: 234615
  chr10:21822289-21822418
  hyper

SEQ ID NO: 384308 - DNA, 49 bp, Homo sapiens; identical to SEQ ID NO: 234649
  chr10:25305303-25305352
  hyper

SEQ ID NO: 384309 - DNA, 35 bp, Homo sapiens; identical to SEQ ID NO: 287036
  chr10:28957388-28957423
  hyper

SEQ ID NO: 384310 - DNA, 61 bp, Homo sapiens; identical to SEQ ID NO: 223802
  chr10:29738072-29738133
  hyper

SEQ ID NO: 384311 - DNA, 35 bp, Homo sapiens
  chr10:35105213-35105248
  hyper
ctaaaggaacgtggaccgagttagggaacgtaact

SEQ ID NO: 384312 - DNA, 307 bp, Homo sapiens; identical to SEQ ID NO: 234702
  chr10:43133483-43133790
  hyper

SEQ ID NO: 384313 - DNA, 33 bp, Homo sapiens; identical to SEQ ID NO: 287105
  chr10:49731361-49731394
  hyper

SEQ ID NO: 384314 - DNA, 280 bp, Homo sapiens; identical to SEQ ID NO: 202079
  chr10:52834081-52834361
  hyper

SEQ ID NO: 384315 - DNA, 109 bp, Homo sapiens; identical to SEQ ID NO: 202080
  chr10:52834756-52834865
  hyper

SEQ ID NO: 384316 - DNA, 57 bp, Homo sapiens; identical to SEQ ID NO: 234750
  chr10:58121111-58121168
  hyper

SEQ ID NO: 384317 - DNA, 352 bp, Homo sapiens; identical to SEQ ID NO: 234786
  chr10:70748247-70748599
  hyper

SEQ ID NO: 384318 - DNA, 35 bp, Homo sapiens
  chr10:71892801-71892836
  hyper
gagccattcagacttggtttaaagtgtcctttcag

SEQ ID NO: 384319 - DNA, 100 bp, Homo sapiens
  chr10:73848222-73848322
  hyper
agtgggtcgcggctgaaatgtgacctggttaggagatgcacttgtctgaaaaagcccagcactggacgcggagagggagagagaatcagagaggctgcgc

SEQ ID NO: 384320 - DNA, 294 bp, Homo sapiens; identical to SEQ ID NO: 223842
  chr10:74032607-74032901
  hyper

SEQ ID NO: 384321 - DNA, 141 bp, Homo sapiens; identical to SEQ ID NO: 223844
  chr10:75408169-75408310
  hyper

SEQ ID NO: 384322 - DNA, 113 bp, Homo sapiens; identical to SEQ ID NO: 202134
  chr10:75671364-75671477
  hyper

SEQ ID NO: 384323 - DNA, 253 bp, Homo sapiens; identical to SEQ ID NO: 287259
  chr10:79471071-79471324
  hyper

SEQ ID NO: 384324 - DNA, 469 bp, Homo sapiens; identical to SEQ ID NO: 223850
  chr10:79686575-79687044
  hyper

SEQ ID NO: 384325 - DNA, 84 bp, Homo sapiens; identical to SEQ ID NO: 234858
  chr10:80830851-80830935
  hyper

SEQ ID NO: 384326 - DNA, 57 bp, Homo sapiens; identical to SEQ ID NO: 234859
  chr10:81107046-81107103
  hyper

SEQ ID NO: 384327 - DNA, 62 bp, Homo sapiens; identical to SEQ ID NO: 287273
  chr10:81664375-81664437
  hyper

SEQ ID NO: 384328 - DNA, 34 bp, Homo sapiens; identical to SEQ ID NO: 234942
  chr10:99093445-99093479
  hyper

SEQ ID NO: 384329 - DNA, 228 bp, Homo sapiens; identical to SEQ ID NO: 234944
  chr10:99258429-99258657
  hyper

SEQ ID NO: 384330 - DNA, 501 bp, Homo sapiens; identical to SEQ ID NO: 234971
  chr10:101945663-101946164
  hyper

SEQ ID NO: 384331 - DNA, 388 bp, Homo sapiens; identical to SEQ ID NO: 234972
  chr10:102046129-102046517
  hyper

SEQ ID NO: 384332 - DNA, 112 bp, Homo sapiens; identical to SEQ ID NO: 234995
  chr10:102505252-102505364
  hyper

SEQ ID NO: 384333 - DNA, 113 bp, Homo sapiens; identical to SEQ ID NO: 235006
  chr10:102802620-102802733
  hyper

SEQ ID NO: 384334 - DNA, 403 bp, Homo sapiens; identical to SEQ ID NO: 235008
  chr10:102809890-102810293
  hyper

SEQ ID NO: 384335 - DNA, 439 bp, Homo sapiens; identical to SEQ ID NO: 235035
  chr10:103347719-103348158
  hyper

SEQ ID NO: 384336 - DNA, 142 bp, Homo sapiens; identical to SEQ ID NO: 235059
  chr10:104262487-104262629
  hyper

SEQ ID NO: 384337 - DNA, 173 bp, Homo sapiens; identical to SEQ ID NO: 202252
  chr10:109674972-109675145
  hyper

SEQ ID NO: 384338 - DNA, 76 bp, Homo sapiens; identical to SEQ ID NO: 202262
  chr10:112328695-112328771
  hyper

SEQ ID NO: 384339 - DNA, 151 bp, Homo sapiens; identical to SEQ ID NO: 202277
  chr10:112352830-112352981
  hyper

SEQ ID NO: 384340 - DNA, 404 bp, Homo sapiens; identical to SEQ ID NO: 202285
  chr10:112363988-112364392
  hyper

SEQ ID NO: 384341 - DNA, 69 bp, Homo sapiens; identical to SEQ ID NO: 235101
  chr10:112678715-112678784
  hyper

SEQ ID NO: 384342 - DNA, 136 bp, Homo sapiens; identical to SEQ ID NO: 235102
  chr10:112678992-112679128
  hyper

SEQ ID NO: 384343 - DNA, 43 bp, Homo sapiens; identical to SEQ ID NO: 235123
  chr10:116581330-116581373
  hyper

SEQ ID NO: 384344 - DNA, 115 bp, Homo sapiens; identical to SEQ ID NO: 235130
  chr10:118764187-118764302
  hyper

SEQ ID NO: 384345 - DNA, 164 bp, Homo sapiens; identical to SEQ ID NO: 235142
  chr10:119256046-119256210
  hyper

SEQ ID NO: 384346 - DNA, 141 bp, Homo sapiens; identical to SEQ ID NO: 202328
  chr10:119305975-119306116
  hyper

SEQ ID NO: 384347 - DNA, 57 bp, Homo sapiens; identical to SEQ ID NO: 287604
  chr10:119306372-119306429
  hyper

SEQ ID NO: 384348 - DNA, 141 bp, Homo sapiens; identical to SEQ ID NO: 235153
  chr10:119309782-119309923
  hyper

SEQ ID NO: 384349 - DNA, 223 bp, Homo sapiens; identical to SEQ ID NO: 235158
  chr10:119805618-119805841
  hyper

SEQ ID NO: 384350 - DNA, 106 bp, Homo sapiens; identical to SEQ ID NO: 202335
  chr10:121632626-121632732
  hyper

SEQ ID NO: 384351 - DNA, 819 bp, Homo sapiens; identical to SEQ ID NO: 202342
  chr10:123872187-123873006
  hyper

SEQ ID NO: 384352 - DNA, 442 bp, Homo sapiens; identical to SEQ ID NO: 287633
  chr10:123873040-123873482
  hyper

SEQ ID NO: 384353 - DNA, 118 bp, Homo sapiens; identical to SEQ ID NO: 287654
  chr10:126847239-126847357
  hyper

SEQ ID NO: 384354 - DNA, 153 bp, Homo sapiens; identical to SEQ ID NO: 202363
  chr10:128593608-128593761
  hyper

SEQ ID NO: 384355 - DNA, 98 bp, Homo sapiens
  chr10:128593793-128593891
  hyper
gcggagcgcggggctgggcgcactgggacagaggaaggggagccccggcgaccgcggggtcggggcccagggtccgcgccgagggcgggcgcagagcc

SEQ ID NO: 384356 - DNA, 160 bp, Homo sapiens; identical to SEQ ID NO: 287681
  chr10:133999363-133999523
  hyper

SEQ ID NO: 384357 - DNA, 116 bp, Homo sapiens; identical to SEQ ID NO: 287691
  chr10:134597971-134598087
  hyper

SEQ ID NO: 384358 - DNA, 97 bp, Homo sapiens; identical to SEQ ID NO: 47990
  chr10:135071117-135071214
  hyper

SEQ ID NO: 384359 - DNA, 182 bp, Homo sapiens; identical to SEQ ID NO: 202391
  chr11:518712-518894
  hyper

SEQ ID NO: 384360 - DNA, 61 bp, Homo sapiens; identical to SEQ ID NO: 287725
  chr11:518933-518994
  hyper

SEQ ID NO: 384361 - DNA, 473 bp, Homo sapiens; identical to SEQ ID NO: 287743
  chr11:1357818-1358291
  hyper

SEQ ID NO: 384362 - DNA, 52 bp, Homo sapiens; identical to SEQ ID NO: 287744
  chr11:1358332-1358384
  hyper

SEQ ID NO: 384363 - DNA, 41 bp, Homo sapiens; identical to SEQ ID NO: 202420
  chr11:6440456-6440497
  hyper

SEQ ID NO: 384364 - DNA, 349 bp, Homo sapiens; identical to SEQ ID NO: 235321
  chr11:6704608-6704957
  hyper

SEQ ID NO: 384365 - DNA, 577 bp, Homo sapiens; identical to SEQ ID NO: 224046
  chr11:9685464-9686041
  hyper

SEQ ID NO: 384366 - DNA, 137 bp, Homo sapiens; identical to SEQ ID NO: 235373
  chr11:14542171-14542308
  hyper

SEQ ID NO: 384367 - DNA, 260 bp, Homo sapiens; identical to SEQ ID NO: 224059
  chr11:17498486-17498746
  hyper

SEQ ID NO: 384368 - DNA, 32 bp, Homo sapiens; identical to SEQ ID NO: 235407
  chr11:18656064-18656096
  hyper

SEQ ID NO: 384369 - DNA, 110 bp, Homo sapiens; identical to SEQ ID NO: 287925
  chr11:22363209-22363319
  hyper

SEQ ID NO: 384370 - DNA, 199 bp, Homo sapiens; identical to SEQ ID NO: 235526
  chr11:36531740-36531939
  hyper

SEQ ID NO: 384371 - DNA, 246 bp, Homo sapiens; identical to SEQ ID NO: 235580
  chr11:47279142-47279388
  hyper

SEQ ID NO: 384372 - DNA, 78 bp, Homo sapiens; identical to SEQ ID NO: 235593
  chr11:57298238-57298316
  hyper

SEQ ID NO: 384373 - DNA, 109 bp, Homo sapiens; identical to SEQ ID NO: 202550
  chr11:57425067-57425176
  hyper

SEQ ID NO: 384374 - DNA, 240 bp, Homo sapiens; identical to SEQ ID NO: 224116
  chr11:61520025-61520265
  hyper

SEQ ID NO: 384375 - DNA, 35 bp, Homo sapiens; identical to SEQ ID NO: 235631
  chr11:61735124-61735159
  hyper

SEQ ID NO: 384376 - DNA, 209 bp, Homo sapiens; identical to SEQ ID NO: 235654
  chr11:63580539-63580748
  hyper

SEQ ID NO: 384377 - DNA, 246 bp, Homo sapiens; identical to SEQ ID NO: 235681
  chr11:64578117-64578363
  hyper

SEQ ID NO: 384378 - DNA, 263 bp, Homo sapiens; identical to SEQ ID NO: 235684
  chr11:64863597-64863860
  hyper

SEQ ID NO: 384379 - DNA, 76 bp, Homo sapiens; identical to SEQ ID NO: 235686
  chr11:64889776-64889852
  hyper

SEQ ID NO: 384380 - DNA, 82 bp, Homo sapiens; identical to SEQ ID NO: 288190
  chr11:65197599-65197681
  hyper

SEQ ID NO: 384381 - DNA, 241 bp, Homo sapiens; identical to SEQ ID NO: 235702
  chr11:65266934-65267175
  hyper

SEQ ID NO: 384382 - DNA, 173 bp, Homo sapiens; identical to SEQ ID NO: 202598
  chr11:65342125-65342298
  hyper

SEQ ID NO: 384383 - DNA, 270 bp, Homo sapiens; identical to SEQ ID NO: 235733
  chr11:66335704-66335974
  hyper

SEQ ID NO: 384384 - DNA, 89 bp, Homo sapiens; identical to SEQ ID NO: 235742
  chr11:67007554-67007643
  hyper

SEQ ID NO: 384385 - DNA, 105 bp, Homo sapiens; identical to SEQ ID NO: 224150
  chr11:67141093-67141198
  hyper

SEQ ID NO: 384386 - DNA, 115 bp, Homo sapiens; identical to SEQ ID NO: 235750
  chr11:67236852-67236967
  hyper

SEQ ID NO: 384387 - DNA, 110 bp, Homo sapiens; identical to SEQ ID NO: 224156
  chr11:68080104-68080214
  hyper

SEQ ID NO: 384388 - DNA, 289 bp, Homo sapiens; identical to SEQ ID NO: 235766
  chr11:68816177-68816466
  hyper

SEQ ID NO: 384389 - DNA, 114 bp, Homo sapiens; identical to SEQ ID NO: 202653
  chr11:72929153-72929267
  hyper

SEQ ID NO: 384390 - DNA, 209 bp, Homo sapiens; identical to SEQ ID NO: 235803
  chr11:73472197-73472406
  hyper

SEQ ID NO: 384391 - DNA, 58 bp, Homo sapiens; identical to SEQ ID NO: 235815
  chr11:74851768-74851826
  hyper

SEQ ID NO: 384392 - DNA, 160 bp, Homo sapiens; identical to SEQ ID NO: 202676
  chr11:85780826-85780986
  hyper

SEQ ID NO: 384393 - DNA, 283 bp, Homo sapiens; identical to SEQ ID NO: 224181
  chr11:86513414-86513697
  hyper

SEQ ID NO: 384394 - DNA, 148 bp, Homo sapiens; identical to SEQ ID NO: 235863
  chr11:88070647-88070795
  hyper

SEQ ID NO: 384395 - DNA, 33 bp, Homo sapiens; identical to SEQ ID NO: 235885
  chr11:100557940-100557973
  hyper

SEQ ID NO: 384396 - DNA, 206 bp, Homo sapiens
  chr11:101453848-101454054
  hyper
gaggagcaaacctagacaaccccgcctcccccactccccgcgcgcccctccactcactcaggtcccagccctggctctcgcggacctcccagcaccgtcctaggaggtacacacgcgggttcaggacgcgcgcggacggactcggccactcctgcgagcgcacaacctccctccgcgcagcccgcgcccgatccgccccgcgtcgc

SEQ ID NO: 384397 - DNA, 39 bp, Homo sapiens; identical to SEQ ID NO: 288410
  chr11:101454747-101454786
  hyper

SEQ ID NO: 384398 - DNA, 127 bp, Homo sapiens; identical to SEQ ID NO: 235901
  chr11:107328545-107328672
  hyper

SEQ ID NO: 384399 - DNA, 127 bp, Homo sapiens; identical to SEQ ID NO: 235904
  chr11:107992141-107992268
  hyper

SEQ ID NO: 384400 - DNA, 90 bp, Homo sapiens; identical to SEQ ID NO: 235909
  chr11:108535765-108535855
  hyper

SEQ ID NO: 384401 - DNA, 251 bp, Homo sapiens; identical to SEQ ID NO: 235926
  chr11:113644420-113644671
  hyper

SEQ ID NO: 384402 - DNA, 211 bp, Homo sapiens; identical to SEQ ID NO: 235932
  chr11:115372960-115373171
  hyper

SEQ ID NO: 384403 - DNA, 88 bp, Homo sapiens; identical to SEQ ID NO: 288462
  chr11:116706882-116706970
  hyper

SEQ ID NO: 384404 - DNA, 505 bp, Homo sapiens; identical to SEQ ID NO: 235942
  chr11:117014686-117015191
  hyper

SEQ ID NO: 384405 - DNA, 65 bp, Homo sapiens; identical to SEQ ID NO: 235947
  chr11:117198410-117198475
  hyper

SEQ ID NO: 384406 - DNA, 250 bp, Homo sapiens; identical to SEQ ID NO: 224203
  chr11:117352704-117352954
  hyper

SEQ ID NO: 384407 - DNA, 189 bp, Homo sapiens; identical to SEQ ID NO: 235981
  chr11:121163483-121163672
  hyper

SEQ ID NO: 384408 - DNA, 206 bp, Homo sapiens; identical to SEQ ID NO: 235985
  chr11:122526547-122526753
  hyper

SEQ ID NO: 384409 - DNA, 203 bp, Homo sapiens; identical to SEQ ID NO: 288540
  chr11:123066197-123066400
  hyper

SEQ ID NO: 384410 - DNA, 244 bp, Homo sapiens; identical to SEQ ID NO: 288541
  chr11:123066463-123066707
  hyper

SEQ ID NO: 384411 - DNA, 42 bp, Homo sapiens
  chr11:124709075-124709117
  hyper
caaagtcccgggtcacctcggcctggaatccatctaactcag

SEQ ID NO: 384412 - DNA, 249 bp, Homo sapiens; identical to SEQ ID NO: 202775
  chr11:124709233-124709482
  hyper

SEQ ID NO: 384413 - DNA, 210 bp, Homo sapiens; identical to SEQ ID NO: 202776
  chr11:124709856-124710066
  hyper

SEQ ID NO: 384414 - DNA, 506 bp, Homo sapiens; identical to SEQ ID NO: 236020
  chr11:126225361-126225867
  hyper

SEQ ID NO: 384415 - DNA, 172 bp, Homo sapiens; identical to SEQ ID NO: 288600
  chr11:132813317-132813489
  hyper

SEQ ID NO: 384416 - DNA, 36 bp, Homo sapiens; identical to SEQ ID NO: 236058
  chr11:134094348-134094384
  hyper

SEQ ID NO: 384417 - DNA, 52 bp, Homo sapiens; identical to SEQ ID NO: 236088
  chr12:3068385-3068437
  hyper

SEQ ID NO: 384418 - DNA, 72 bp, Homo sapiens
  chr12:3601270-3601342
  hyper
cctggggccaggtctgccccctgcagtgccttgaccgtctcctgccgctgcctcagctttacccttcaagct

SEQ ID NO: 384419 - DNA, 101 bp, Homo sapiens; identical to SEQ ID NO: 202831
  chr12:3601377-3601478
  hyper

SEQ ID NO: 384420 - DNA, 97 bp, Homo sapiens; identical to SEQ ID NO: 288683
  chr12:5152818-5152915
  hyper

SEQ ID NO: 384421 - DNA, 33 bp, Homo sapiens; identical to SEQ ID NO: 236144
  chr12:11803181-11803214
  hyper

SEQ ID NO: 384422 - DNA, 217 bp, Homo sapiens; identical to SEQ ID NO: 224295
  chr12:12006278-12006495
  hyper

SEQ ID NO: 384423 - DNA, 2801 bp, Homo sapiens; identical to SEQ ID NO: 202878
  chr12:12043874-12046675
  hyper

SEQ ID NO: 384424 - DNA, 206 bp, Homo sapiens; identical to SEQ ID NO: 236147
  chr12:12510050-12510256
  hyper

SEQ ID NO: 384425 - DNA, 103 bp, Homo sapiens; identical to SEQ ID NO: 236151
  chr12:12876593-12876696
  hyper

SEQ ID NO: 384426 - DNA, 443 bp, Homo sapiens; identical to SEQ ID NO: 236154
  chr12:13044060-13044503
  hyper

SEQ ID NO: 384427 - DNA, 93 bp, Homo sapiens; identical to SEQ ID NO: 224308
  chr12:13154241-13154334
  hyper

SEQ ID NO: 384428 - DNA, 308 bp, Homo sapiens; identical to SEQ ID NO: 202916
  chr12:25347959-25348267
  hyper

SEQ ID NO: 384429 - DNA, 88 bp, Homo sapiens; identical to SEQ ID NO: 202920
  chr12:26986791-26986879
  hyper

SEQ ID NO: 384430 - DNA, 33 bp, Homo sapiens; identical to SEQ ID NO: 202931
  chr12:33048899-33048932
  hyper

SEQ ID NO: 384431 - DNA, 86 bp, Homo sapiens; identical to SEQ ID NO: 202949
  chr12:41087106-41087192
  hyper

SEQ ID NO: 384432 - DNA, 120 bp, Homo sapiens; identical to SEQ ID NO: 236243
  chr12:44200419-44200539
  hyper

SEQ ID NO: 384433 - DNA, 149 bp, Homo sapiens; identical to SEQ ID NO: 288943
  chr12:52416804-52416953
  hyper

SEQ ID NO: 384434 - DNA, 179 bp, Homo sapiens; identical to SEQ ID NO: 288944
  chr12:52416985-52417164
  hyper

SEQ ID NO: 384435 - DNA, 51 bp, Homo sapiens; identical to SEQ ID NO: 236321
  chr12:52627539-52627590
  hyper

SEQ ID NO: 384436 - DNA, 373 bp, Homo sapiens; identical to SEQ ID NO: 236334
  chr12:53472778-53473151
  hyper

SEQ ID NO: 384437 - DNA, 66 bp, Homo sapiens; identical to SEQ ID NO: 236336
  chr12:53607267-53607333
  hyper

SEQ ID NO: 384438 - DNA, 256 bp, Homo sapiens; identical to SEQ ID NO: 203011
  chr12:54388855-54389111
  hyper

SEQ ID NO: 384439 - DNA, 101 bp, Homo sapiens; identical to SEQ ID NO: 236405
  chr12:54582781-54582882
  hyper

SEQ ID NO: 384440 - DNA, 78 bp, Homo sapiens; identical to SEQ ID NO: 236411
  chr12:55413596-55413674
  hyper

SEQ ID NO: 384441 - DNA, 96 bp, Homo sapiens; identical to SEQ ID NO: 236416
  chr12:56211700-56211796
  hyper

SEQ ID NO: 384442 - DNA, 64 bp, Homo sapiens; identical to SEQ ID NO: 236426
  chr12:56522028-56522092
  hyper

SEQ ID NO: 384443 - DNA, 31 bp, Homo sapiens; identical to SEQ ID NO: 289112
  chr12:58159870-58159901
  hyper

SEQ ID NO: 384444 - DNA, 137 bp, Homo sapiens
  chr12:59313525-59313662
  hyper
cccccaaccctggtctacctgcagccagttaggacgcgccaagagcccacctgcgccgcccgcaaagcacgtgggagggaaactgaggcccggacagttctttttccacgcccacggagcgccgatcgcggcctggg

SEQ ID NO: 384445 - DNA, 318 bp, Homo sapiens
  chr12:63328404-63328722
  hyper
gcaggggcaggtccgagcctccgcagctgccgccgccgtgctcggagcctgagctgccagccatgatgccgcccatgaaattggccacggcagatttcactcgagtgagcatattactccggcgcccggctgcagcggtgcgagcaggaggcggcgggggccgggcaaggcgcagcgcggggcatgcaggctgcggtgggcgccgggcgcacggcgagtcgggccactgggacgcgccgcgcgcggctcccagagcctagtgctgcagggggccgagccccggcctctcgtgcttagtgccgcggtggccgccgcctc

SEQ ID NO: 384446 - DNA, 302 bp, Homo sapiens; identical to SEQ ID NO: 289149
  chr12:66216562-66216864
  hyper

SEQ ID NO: 384447 - DNA, 85 bp, Homo sapiens; identical to SEQ ID NO: 203082
  chr12:66216924-66217009
  hyper

SEQ ID NO: 384448 - DNA, 64 bp, Homo sapiens; identical to SEQ ID NO: 224404
  chr12:69080591-69080655
  hyper

SEQ ID NO: 384449 - DNA, 165 bp, Homo sapiens; identical to SEQ ID NO: 236508
  chr12:69550940-69551105
  hyper

SEQ ID NO: 384450 - DNA, 116 bp, Homo sapiens; identical to SEQ ID NO: 203102
  chr12:72332525-72332641
  hyper

SEQ ID NO: 384451 - DNA, 77 bp, Homo sapiens; identical to SEQ ID NO: 203103
  chr12:72332696-72332773
  hyper

SEQ ID NO: 384452 - DNA, 237 bp, Homo sapiens; identical to SEQ ID NO: 236554
  chr12:89919819-89920056
  hyper

SEQ ID NO: 384453 - DNA, 91 bp, Homo sapiens; identical to SEQ ID NO: 49909
  chr12:91775751-91775842
  hyper

SEQ ID NO: 384454 - DNA, 255 bp, Homo sapiens; identical to SEQ ID NO: 236559
  chr12:93835925-93836180
  hyper

SEQ ID NO: 384455 - DNA, 33 bp, Homo sapiens; identical to SEQ ID NO: 224420
  chr12:96618052-96618085
  hyper

SEQ ID NO: 384456 - DNA, 79 bp, Homo sapiens; identical to SEQ ID NO: 236578
  chr12:97300789-97300868
  hyper

SEQ ID NO: 384457 - DNA, 38 bp, Homo sapiens; identical to SEQ ID NO: 289316
  chr12:108079429-108079467
  hyper

SEQ ID NO: 384458 - DNA, 115 bp, Homo sapiens; identical to SEQ ID NO: 122946
  chr12:108079515-108079630
  hyper

SEQ ID NO: 384459 - DNA, 41 bp, Homo sapiens; identical to SEQ ID NO: 226552
  chr12:108298348-108298389
  hyper

SEQ ID NO: 384460 - DNA, 98 bp, Homo sapiens; identical to SEQ ID NO: 203176
  chr12:109535377-109535475
  hyper

SEQ ID NO: 384461 - DNA, 295 bp, Homo sapiens
  chr12:109746919-109747214
  hyper
gtacctggagccgatcctcgcggggccgccgctgccggcgctccgggggtgggcaggggttccggaggggggctccctcgcgctcgcccctcgcgttccgcaatttggccgccgtcgcagctcgaaccgtttttaaatttccctctctggagctgtccagctcagagcatgcgcagtagccgtgcggggggcttttccccaagggtcagttacagggcagggtcaaggggattgcagcgggcgtttcccagcagccgcgagccttgcacgccccggggttctggggggggggtgt

SEQ ID NO: 384462 - DNA, 85 bp, Homo sapiens; identical to SEQ ID NO: 236652
  chr12:109747423-109747508
  hyper

SEQ ID NO: 384463 - DNA, 48 bp, Homo sapiens; identical to SEQ ID NO: 289339
  chr12:110939787-110939835
  hyper

SEQ ID NO: 384464 - DNA, 102 bp, Homo sapiens; identical to SEQ ID NO: 122993
  chr12:110939888-110939990
  hyper

SEQ ID NO: 384465 - DNA, 58 bp, Homo sapiens; identical to SEQ ID NO: 203187
  chr12:112915451-112915509
  hyper

SEQ ID NO: 384466 - DNA, 142 bp, Homo sapiens; identical to SEQ ID NO: 289387
  chr12:114843805-114843947
  hyper

SEQ ID NO: 384467 - DNA, 109 bp, Homo sapiens; identical to SEQ ID NO: 203209
  chr12:114883302-114883411
  hyper

SEQ ID NO: 384468 - DNA, 203 bp, Homo sapiens; identical to SEQ ID NO: 236725
  chr12:116713913-116714116
  hyper

SEQ ID NO: 384469 - DNA, 170 bp, Homo sapiens; identical to SEQ ID NO: 289434
  chr12:119418346-119418516
  hyper

SEQ ID NO: 384470 - DNA, 59 bp, Homo sapiens; identical to SEQ ID NO: 203227
  chr12:119419899-119419958
  hyper

SEQ ID NO: 384471 - DNA, 253 bp, Homo sapiens; identical to SEQ ID NO: 236751
  chr12:120315130-120315383
  hyper

SEQ ID NO: 384472 - DNA, 76 bp, Homo sapiens; identical to SEQ ID NO: 236756
  chr12:120739996-120740072
  hyper

SEQ ID NO: 384473 - DNA, 42 bp, Homo sapiens; identical to SEQ ID NO: 236759
  chr12:120884034-120884076
  hyper

SEQ ID NO: 384474 - DNA, 192 bp, Homo sapiens; identical to SEQ ID NO: 289502
  chr12:127211385-127211577
  hyper

SEQ ID NO: 384475 - DNA, 36 bp, Homo sapiens
  chr12:130498862-130498898
  hyper
gcctgtaatcccagaactttgggaggctgagatggg

SEQ ID NO: 384476 - DNA, 442 bp, Homo sapiens; identical to SEQ ID NO: 226553
  chr12:133443618-133444060
  hyper

SEQ ID NO: 384477 - DNA, 41 bp, Homo sapiens; identical to SEQ ID NO: 289539
  chr13:20532066-20532107
  hyper

SEQ ID NO: 384478 - DNA, 105 bp, Homo sapiens; identical to SEQ ID NO: 224501
  chr13:21141668-21141773
  hyper

SEQ ID NO: 384479 - DNA, 122 bp, Homo sapiens; identical to SEQ ID NO: 236864
  chr13:21635883-21636005
  hyper

SEQ ID NO: 384480 - DNA, 190 bp, Homo sapiens; identical to SEQ ID NO: 203287
  chr13:25497658-25497848
  hyper

SEQ ID NO: 384481 - DNA, 94 bp, Homo sapiens; identical to SEQ ID NO: 289582
  chr13:26624294-26624388
  hyper

SEQ ID NO: 384482 - DNA, 58 bp, Homo sapiens; identical to SEQ ID NO: 289593
  chr13:28364282-28364340
  hyper

SEQ ID NO: 384483 - DNA, 146 bp, Homo sapiens; identical to SEQ ID NO: 224540
  chr13:32905055-32905201
  hyper

SEQ ID NO: 384484 - DNA, 96 bp, Homo sapiens; identical to SEQ ID NO: 224543
  chr13:32918694-32918790
  hyper

SEQ ID NO: 384485 - DNA, 218 bp, Homo sapiens; identical to SEQ ID NO: 203322
  chr13:33924391-33924609
  hyper

SEQ ID NO: 384486 - DNA, 130 bp, Homo sapiens; identical to SEQ ID NO: 203323
  chr13:33924790-33924920
  hyper

SEQ ID NO: 384487 - DNA, 1233 bp, Homo sapiens; identical to SEQ ID NO: 236979
  chr13:40176535-40177768
  hyper

SEQ ID NO: 384488 - DNA, 172 bp, Homo sapiens; identical to SEQ ID NO: 236987
  chr13:41885138-41885310
  hyper

SEQ ID NO: 384489 - DNA, 174 bp, Homo sapiens; identical to SEQ ID NO: 203345
  chr13:43148495-43148669
  hyper

SEQ ID NO: 384490 - DNA, 473 bp, Homo sapiens; identical to SEQ ID NO: 203346
  chr13:43148698-43149171
  hyper

SEQ ID NO: 384491 - DNA, 43 bp, Homo sapiens; identical to SEQ ID NO: 203347
  chr13:43149172-43149215
  hyper

SEQ ID NO: 384492 - DNA, 34 bp, Homo sapiens; identical to SEQ ID NO: 289709
  chr13:43149333-43149367
  hyper

SEQ ID NO: 384493 - DNA, 47 bp, Homo sapiens; identical to SEQ ID NO: 203366
  chr13:51086772-51086819
  hyper

SEQ ID NO: 384494 - DNA, 223 bp, Homo sapiens; identical to SEQ ID NO: 237034
  chr13:52586275-52586498
  hyper

SEQ ID NO: 384495 - DNA, 256 bp, Homo sapiens; identical to SEQ ID NO: 237039
  chr13:53029197-53029453
  hyper

SEQ ID NO: 384496 - DNA, 171 bp, Homo sapiens; identical to SEQ ID NO: 203393
  chr13:77901202-77901373
  hyper

SEQ ID NO: 384497 - DNA, 166 bp, Homo sapiens; identical to SEQ ID NO: 237107
  chr13:95354380-95354546
  hyper

SEQ ID NO: 384498 - DNA, 58 bp, Homo sapiens; identical to SEQ ID NO: 237187
  chr13:111268659-111268717
  hyper

SEQ ID NO: 384499 - DNA, 150 bp, Homo sapiens; identical to SEQ ID NO: 203457
  chr13:111358789-111358939
  hyper

SEQ ID NO: 384500 - DNA, 87 bp, Homo sapiens; identical to SEQ ID NO: 203465
  chr13:113951225-113951312
  hyper

SEQ ID NO: 384501 - DNA, 138 bp, Homo sapiens; identical to SEQ ID NO: 237222
  chr13:114566904-114567042
  hyper

SEQ ID NO: 384502 - DNA, 165 bp, Homo sapiens; identical to SEQ ID NO: 224663
  chr14:21150255-21150420
  hyper

SEQ ID NO: 384503 - DNA, 153 bp, Homo sapiens; identical to SEQ ID NO: 203486
  chr14:21493030-21493183
  hyper

SEQ ID NO: 384504 - DNA, 240 bp, Homo sapiens; identical to SEQ ID NO: 237253
  chr14:21979450-21979690
  hyper

SEQ ID NO: 384505 - DNA, 223 bp, Homo sapiens; identical to SEQ ID NO: 289994
  chr14:23355821-23356044
  hyper

SEQ ID NO: 384506 - DNA, 204 bp, Homo sapiens; identical to SEQ ID NO: 289998
  chr14:23450224-23450428
  hyper

SEQ ID NO: 384507 - DNA, 107 bp, Homo sapiens; identical to SEQ ID NO: 203495
  chr14:23450746-23450853
  hyper

SEQ ID NO: 384508 - DNA, 188 bp, Homo sapiens; identical to SEQ ID NO: 203499
  chr14:23776071-23776259
  hyper

SEQ ID NO: 384509 - DNA, 36 bp, Homo sapiens; identical to SEQ ID NO: 237281
  chr14:24025555-24025591
  hyper

SEQ ID NO: 384510 - DNA, 223 bp, Homo sapiens; identical to SEQ ID NO: 237286
  chr14:24605551-24605774
  hyper

SEQ ID NO: 384511 - DNA, 72 bp, Homo sapiens; identical to SEQ ID NO: 237289
  chr14:24658235-24658307
  hyper

SEQ ID NO: 384512 - DNA, 143 bp, Homo sapiens; identical to SEQ ID NO: 237294
  chr14:24711905-24712048
  hyper

SEQ ID NO: 384513 - DNA, 194 bp, Homo sapiens; identical to SEQ ID NO: 290037
  chr14:24837550-24837744
  hyper

SEQ ID NO: 384514 - DNA, 82 bp, Homo sapiens; identical to SEQ ID NO: 290038
  chr14:24837824-24837906
  hyper

SEQ ID NO: 384515 - DNA, 71 bp, Homo sapiens; identical to SEQ ID NO: 290054
  chr14:29242908-29242979
  hyper

SEQ ID NO: 384516 - DNA, 51 bp, Homo sapiens; identical to SEQ ID NO: 290100
  chr14:36981788-36981839
  hyper

SEQ ID NO: 384517 - DNA, 34 bp, Homo sapiens; identical to SEQ ID NO: 237397
  chr14:45722603-45722637
  hyper

SEQ ID NO: 384518 - DNA, 71 bp, Homo sapiens; identical to SEQ ID NO: 237431
  chr14:53619544-53619615
  hyper

SEQ ID NO: 384519 - DNA, 290 bp, Homo sapiens; identical to SEQ ID NO: 237436
  chr14:54908014-54908304
  hyper

SEQ ID NO: 384520 - DNA, 39 bp, Homo sapiens; identical to SEQ ID NO: 237453
  chr14:57281266-57281305
  hyper

SEQ ID NO: 384521 - DNA, 188 bp, Homo sapiens; identical to SEQ ID NO: 237499
  chr14:62229157-62229345
  hyper

SEQ ID NO: 384522 - DNA, 31 bp, Homo sapiens; identical to SEQ ID NO: 203629
  chr14:63511825-63511856
  hyper

SEQ ID NO: 384523 - DNA, 533 bp, Homo sapiens; identical to SEQ ID NO: 237504
  chr14:64108074-64108607
  hyper

SEQ ID NO: 384524 - DNA, 138 bp, Homo sapiens; identical to SEQ ID NO: 237510
  chr14:65008388-65008526
  hyper

SEQ ID NO: 384525 - DNA, 56 bp, Homo sapiens; identical to SEQ ID NO: 237535
  chr14:69260259-69260315
  hyper

SEQ ID NO: 384526 - DNA, 129 bp, Homo sapiens; identical to SEQ ID NO: 237557
  chr14:71786797-71786926
  hyper

SEQ ID NO: 384527 - DNA, 44 bp, Homo sapiens; identical to SEQ ID NO: 203664
  chr14:74225613-74225657
  hyper

SEQ ID NO: 384528 - DNA, 222 bp, Homo sapiens; identical to SEQ ID NO: 237584
  chr14:74724285-74724507
  hyper

SEQ ID NO: 384529 - DNA, 44 bp, Homo sapiens; identical to SEQ ID NO: 237586
  chr14:74959041-74959085
  hyper

SEQ ID NO: 384530 - DNA, 145 bp, Homo sapiens; identical to SEQ ID NO: 203673
  chr14:75230400-75230545
  hyper

SEQ ID NO: 384531 - DNA, 124 bp, Homo sapiens; identical to SEQ ID NO: 237594
  chr14:75349046-75349170
  hyper

SEQ ID NO: 384532 - DNA, 734 bp, Homo sapiens; identical to SEQ ID NO: 237595
  chr14:75469162-75469896
  hyper

SEQ ID NO: 384533 - DNA, 88 bp, Homo sapiens
  chr14:77736779-77736867
  hyper
cggctctcggggcaccccagtaccctgataccggcagcggggtgcacccctgcagtcgctacctaaggaagacgcaggaggcacaagg

SEQ ID NO: 384534 - DNA, 97 bp, Homo sapiens; identical to SEQ ID NO: 290401
  chr14:77736883-77736980
  hyper

SEQ ID NO: 384535 - DNA, 55 bp, Homo sapiens; identical to SEQ ID NO: 203688
  chr14:78266694-78266749
  hyper

SEQ ID NO: 384536 - DNA, 148 bp, Homo sapiens; identical to SEQ ID NO: 237634
  chr14:82000298-82000446
  hyper

SEQ ID NO: 384537 - DNA, 154 bp, Homo sapiens; identical to SEQ ID NO: 237640
  chr14:88851824-88851978
  hyper

SEQ ID NO: 384538 - DNA, 352 bp, Homo sapiens; identical to SEQ ID NO: 237642
  chr14:89029588-89029940
  hyper

SEQ ID NO: 384539 - DNA, 725 bp, Homo sapiens; identical to SEQ ID NO: 290430
  chr14:89290490-89291215
  hyper

SEQ ID NO: 384540 - DNA, 134 bp, Homo sapiens; identical to SEQ ID NO: 237646
  chr14:89506861-89506995
  hyper

SEQ ID NO: 384541 - DNA, 46 bp, Homo sapiens; identical to SEQ ID NO: 290486
  chr14:95237576-95237622
  hyper

SEQ ID NO: 384542 - DNA, 85 bp, Homo sapiens; identical to SEQ ID NO: 290487
  chr14:95237782-95237867
  hyper

SEQ ID NO: 384543 - DNA, 302 bp, Homo sapiens; identical to SEQ ID NO: 290488
  chr14:95237922-95238224
  hyper

SEQ ID NO: 384544 - DNA, 240 bp, Homo sapiens; identical to SEQ ID NO: 224774
  chr14:100070301-100070541
  hyper

SEQ ID NO: 384545 - DNA, 52 bp, Homo sapiens; identical to SEQ ID NO: 290544
  chr14:101923286-101923338
  hyper

SEQ ID NO: 384546 - DNA, 241 bp, Homo sapiens; identical to SEQ ID NO: 237745
  chr14:102771431-102771672
  hyper

SEQ ID NO: 384547 - DNA, 55 bp, Homo sapiens
  chr14:103430379-103430434
  hyper
gttactgcttggagttagggaaaaatttcaagtgagaatgccatcttcaacctct

SEQ ID NO: 384548 - DNA, 38 bp, Homo sapiens; identical to SEQ ID NO: 237757
  chr14:103571012-103571050
  hyper

SEQ ID NO: 384549 - DNA, 109 bp, Homo sapiens; identical to SEQ ID NO: 237770
  chr14:104094604-104094713
  hyper

SEQ ID NO: 384550 - DNA, 144 bp, Homo sapiens; identical to SEQ ID NO: 224807
  chr14:105647609-105647753
  hyper

SEQ ID NO: 384551 - DNA, 58 bp, Homo sapiens; identical to SEQ ID NO: 203807
  chr15:29864126-29864184
  hyper

SEQ ID NO: 384552 - DNA, 257 bp, Homo sapiens; identical to SEQ ID NO: 237830
  chr15:34394021-34394278
  hyper

SEQ ID NO: 384553 - DNA, 65 bp, Homo sapiens; identical to SEQ ID NO: 203827
  chr15:35280590-35280655
  hyper

SEQ ID NO: 384554 - DNA, 42 bp, Homo sapiens; identical to SEQ ID NO: 237840
  chr15:35280893-35280935
  hyper

SEQ ID NO: 384555 - DNA, 213 bp, Homo sapiens; identical to SEQ ID NO: 237854
  chr15:40075102-40075315
  hyper

SEQ ID NO: 384556 - DNA, 357 bp, Homo sapiens; identical to SEQ ID NO: 290701
  chr15:40212244-40212601
  hyper

SEQ ID NO: 384557 - DNA, 470 bp, Homo sapiens; identical to SEQ ID NO: 290702
  chr15:40212954-40213424
  hyper

SEQ ID NO: 384558 - DNA, 36 bp, Homo sapiens; identical to SEQ ID NO: 203836
  chr15:40559555-40559591
  hyper

SEQ ID NO: 384559 - DNA, 54 bp, Homo sapiens; identical to SEQ ID NO: 237860
  chr15:40698353-40698407
  hyper

SEQ ID NO: 384560 - DNA, 97 bp, Homo sapiens; identical to SEQ ID NO: 203849
  chr15:42841085-42841182
  hyper

SEQ ID NO: 384561 - DNA, 31 bp, Homo sapiens; identical to SEQ ID NO: 237913
  chr15:45879207-45879238
  hyper

SEQ ID NO: 384562 - DNA, 156 bp, Homo sapiens; identical to SEQ ID NO: 237920
  chr15:48623408-48623564
  hyper

SEQ ID NO: 384563 - DNA, 264 bp, Homo sapiens; identical to SEQ ID NO: 203876
  chr15:52028982-52029246
  hyper

SEQ ID NO: 384564 - DNA, 300 bp, Homo sapiens; identical to SEQ ID NO: 224853
  chr15:52820625-52820925
  hyper

SEQ ID NO: 384565 - DNA, 151 bp, Homo sapiens; identical to SEQ ID NO: 203890
  chr15:57883948-57884099
  hyper

SEQ ID NO: 384566 - DNA, 453 bp, Homo sapiens; identical to SEQ ID NO: 203893
  chr15:59397170-59397623
  hyper

SEQ ID NO: 384567 - DNA, 170 bp, Homo sapiens; identical to SEQ ID NO: 237971
  chr15:59664777-59664947
  hyper

SEQ ID NO: 384568 - DNA, 336 bp, Homo sapiens; identical to SEQ ID NO: 238000
  chr15:64455663-64455999
  hyper

SEQ ID NO: 384569 - DNA, 39 bp, Homo sapiens; identical to SEQ ID NO: 290902
  chr15:65477569-65477608
  hyper

SEQ ID NO: 384570 - DNA, 188 bp, Homo sapiens; identical to SEQ ID NO: 238012
  chr15:65578946-65579134
  hyper

SEQ ID NO: 384571 - DNA, 89 bp, Homo sapiens; identical to SEQ ID NO: 290904
  chr15:65647775-65647864
  hyper

SEQ ID NO: 384572 - DNA, 241 bp, Homo sapiens; identical to SEQ ID NO: 290905
  chr15:65648151-65648392
  hyper

SEQ ID NO: 384573 - DNA, 390 bp, Homo sapiens; identical to SEQ ID NO: 203925
  chr15:65670244-65670634
  hyper

SEQ ID NO: 384574 - DNA, 173 bp, Homo sapiens; identical to SEQ ID NO: 238057
  chr15:69111353-69111526
  hyper

SEQ ID NO: 384575 - DNA, 164 bp, Homo sapiens; identical to SEQ ID NO: 224892
  chr15:73344008-73344172
  hyper

SEQ ID NO: 384576 - DNA, 283 bp, Homo sapiens; identical to SEQ ID NO: 290986
  chr15:73611203-73611486
  hyper

SEQ ID NO: 384577 - DNA, 58 bp, Homo sapiens; identical to SEQ ID NO: 238121
  chr15:76136832-76136890
  hyper

SEQ ID NO: 384578 - DNA, 115 bp, Homo sapiens; identical to SEQ ID NO: 238133
  chr15:77924998-77925113
  hyper

SEQ ID NO: 384579 - DNA, 162 bp, Homo sapiens; identical to SEQ ID NO: 238160
  chr15:81616530-81616692
  hyper

SEQ ID NO: 384580 - DNA, 60 bp, Homo sapiens; identical to SEQ ID NO: 291094
  chr15:84322262-84322322
  hyper

SEQ ID NO: 384581 - DNA, 328 bp, Homo sapiens; identical to SEQ ID NO: 224922
  chr15:85143661-85143989
  hyper

SEQ ID NO: 384582 - DNA, 56 bp, Homo sapiens; identical to SEQ ID NO: 126306
  chr15:85923617-85923673
  hyper

SEQ ID NO: 384583 - DNA, 98 bp, Homo sapiens; identical to SEQ ID NO: 238185
  chr15:86126184-86126282
  hyper

SEQ ID NO: 384584 - DNA, 265 bp, Homo sapiens; identical to SEQ ID NO: 238190
  chr15:89010954-89011219
  hyper

SEQ ID NO: 384585 - DNA, 251 bp, Homo sapiens; identical to SEQ ID NO: 238199
  chr15:89878847-89879098
  hyper

SEQ ID NO: 384586 - DNA, 300 bp, Homo sapiens
  chr15:94774274-94774574
  hyper
ctgtggatctgggcgggcatcttccacccacagtcgcgcacacgtggcataggttaataggctgtctggctcgggtacctcttcccagggtcagggcgttacaaagggaggctgctgtcttcccatgaatctattagggacctacaggagcgaagagaacccttctgagtatcagcgaagacagcttattaagactttacgagtttgcaagccatcctcgtcctatttcctcacttcggactttttggacacaccttccttttcctgtgagccaacccaaacgaatgagttacaagtaat

SEQ ID NO: 384587 - DNA, 89 bp, Homo sapiens; identical to SEQ ID NO: 291169
  chr15:96876448-96876537
  hyper

SEQ ID NO: 384588 - DNA, 199 bp, Homo sapiens; identical to SEQ ID NO: 204047
  chr15:96876621-96876820
  hyper

SEQ ID NO: 384589 - DNA, 42 bp, Homo sapiens; identical to SEQ ID NO: 204068
  chr15:100273862-100273904
  hyper

SEQ ID NO: 384590 - DNA, 48 bp, Homo sapiens; identical to SEQ ID NO: 224955
  chr15:100273946-100273994
  hyper

SEQ ID NO: 384591 - DNA, 246 bp, Homo sapiens; identical to SEQ ID NO: 238271
  chr15:101142345-101142591
  hyper

SEQ ID NO: 384592 - DNA, 270 bp, Homo sapiens; identical to SEQ ID NO: 238273
  chr15:101419539-101419809
  hyper

SEQ ID NO: 384593 - DNA, 434 bp, Homo sapiens; identical to SEQ ID NO: 224987
  chr16:1660449-1660883
  hyper

SEQ ID NO: 384594 - DNA, 37 bp, Homo sapiens; identical to SEQ ID NO: 291287
  chr16:3097009-3097046
  hyper

SEQ ID NO: 384595 - DNA, 219 bp, Homo sapiens; identical to SEQ ID NO: 238360
  chr16:4475918-4476137
  hyper

SEQ ID NO: 384596 - DNA, 215 bp, Homo sapiens; identical to SEQ ID NO: 225008
  chr16:4852975-4853190
  hyper

SEQ ID NO: 384597 - DNA, 57 bp, Homo sapiens; identical to SEQ ID NO: 238431
  chr16:22308550-22308607
  hyper

SEQ ID NO: 384598 - DNA, 307 bp, Homo sapiens; identical to SEQ ID NO: 238462
  chr16:28874813-28875120
  hyper

SEQ ID NO: 384599 - DNA, 79 bp, Homo sapiens; identical to SEQ ID NO: 204150
  chr16:29606232-29606311
  hyper

SEQ ID NO: 384600 - DNA, 76 bp, Homo sapiens; identical to SEQ ID NO: 204164
  chr16:30786651-30786727
  hyper

SEQ ID NO: 384601 - DNA, 212 bp, Homo sapiens; identical to SEQ ID NO: 238507
  chr16:31085565-31085777
  hyper

SEQ ID NO: 384602 - DNA, 402 bp, Homo sapiens; identical to SEQ ID NO: 225055
  chr16:31453960-31454362
  hyper

SEQ ID NO: 384603 - DNA, 175 bp, Homo sapiens
  chr16:31498818-31498993
  hyper
aaggagggtcccctgacggccttgcccggcagccttccacgaggtgggcgggtattcgggtctcttcgacaaatacctgggagcagcgacttcgctgacggtgtccgaggatccagccgtgggaaacatctccagcttctgctatcgaccccggcccgactcctaccacctgctc

SEQ ID NO: 384604 - DNA, 603 bp, Homo sapiens; identical to SEQ ID NO: 238520
  chr16:31885057-31885660
  hyper

SEQ ID NO: 384605 - DNA, 138 bp, Homo sapiens; identical to SEQ ID NO: 204211
  chr16:55499096-55499234
  hyper

SEQ ID NO: 384606 - DNA, 145 bp, Homo sapiens; identical to SEQ ID NO: 238590
  chr16:57570647-57570792
  hyper

SEQ ID NO: 384607 - DNA, 212 bp, Homo sapiens; identical to SEQ ID NO: 291593
  chr16:58548939-58549151
  hyper

SEQ ID NO: 384608 - DNA, 876 bp, Homo sapiens; identical to SEQ ID NO: 291594
  chr16:58549238-58550114
  hyper

SEQ ID NO: 384609 - DNA, 152 bp, Homo sapiens; identical to SEQ ID NO: 238618
  chr16:67218041-67218193
  hyper

SEQ ID NO: 384610 - DNA, 74 bp, Homo sapiens; identical to SEQ ID NO: 204250
  chr16:67280819-67280893
  hyper

SEQ ID NO: 384611 - DNA, 76 bp, Homo sapiens; identical to SEQ ID NO: 238638
  chr16:68057151-68057227
  hyper

SEQ ID NO: 384612 - DNA, 660 bp, Homo sapiens; identical to SEQ ID NO: 225107
  chr16:69139815-69140475
  hyper

SEQ ID NO: 384613 - DNA, 255 bp, Homo sapiens; identical to SEQ ID NO: 238653
  chr16:69458315-69458570
  hyper

SEQ ID NO: 384614 - DNA, 457 bp, Homo sapiens; identical to SEQ ID NO: 238657
  chr16:70415351-70415808
  hyper

SEQ ID NO: 384615 - DNA, 141 bp, Homo sapiens; identical to SEQ ID NO: 238669
  chr16:71842652-71842793
  hyper

SEQ ID NO: 384616 - DNA, 249 bp, Homo sapiens; identical to SEQ ID NO: 238671
  chr16:72127405-72127654
  hyper

SEQ ID NO: 384617 - DNA, 149 bp, Homo sapiens; identical to SEQ ID NO: 225111
  chr16:72699010-72699159
  hyper

SEQ ID NO: 384618 - DNA, 334 bp, Homo sapiens; identical to SEQ ID NO: 291692
  chr16:73091551-73091885
  hyper

SEQ ID NO: 384619 - DNA, 217 bp, Homo sapiens; identical to SEQ ID NO: 53263
  chr16:73091900-73092117
  hyper

SEQ ID NO: 384620 - DNA, 161 bp, Homo sapiens; identical to SEQ ID NO: 238676
  chr16:74640802-74640963
  hyper

SEQ ID NO: 384621 - DNA, 40 bp, Homo sapiens; identical to SEQ ID NO: 204287
  chr16:75018963-75019003
  hyper

SEQ ID NO: 384622 - DNA, 165 bp, Homo sapiens; identical to SEQ ID NO: 204293
  chr16:75529727-75529892
  hyper

SEQ ID NO: 384623 - DNA, 507 bp, Homo sapiens; identical to SEQ ID NO: 204340
  chr16:88878527-88879034
  hyper

SEQ ID NO: 384624 - DNA, 32 bp, Homo sapiens; identical to SEQ ID NO: 238772
  chr16:89787466-89787498
  hyper

SEQ ID NO: 384625 - DNA, 50 bp, Homo sapiens; identical to SEQ ID NO: 238777
  chr16:89984233-89984283
  hyper

SEQ ID NO: 384626 - DNA, 253 bp, Homo sapiens; identical to SEQ ID NO: 238780
  chr16:89990062-89990315
  hyper

SEQ ID NO: 384627 - DNA, 91 bp, Homo sapiens; identical to SEQ ID NO: 291848
  chr17:655679-655770
  hyper

SEQ ID NO: 384628 - DNA, 90 bp, Homo sapiens; identical to SEQ ID NO: 127827
  chr17:655880-655970
  hyper

SEQ ID NO: 384629 - DNA, 84 bp, Homo sapiens; identical to SEQ ID NO: 225185
  chr17:883202-883286
  hyper

SEQ ID NO: 384630 - DNA, 98 bp, Homo sapiens; identical to SEQ ID NO: 238823
  chr17:4607657-4607755
  hyper

SEQ ID NO: 384631 - DNA, 105 bp, Homo sapiens; identical to SEQ ID NO: 238828
  chr17:4871286-4871391
  hyper

SEQ ID NO: 384632 - DNA, 491 bp, Homo sapiens; identical to SEQ ID NO: 238868
  chr17:7284208-7284699
  hyper

SEQ ID NO: 384633 - DNA, 274 bp, Homo sapiens; identical to SEQ ID NO: 225215
  chr17:7340607-7340881
  hyper

SEQ ID NO: 384634 - DNA, 329 bp, Homo sapiens; identical to SEQ ID NO: 204409
  chr17:7590625-7590954
  hyper

SEQ ID NO: 384635 - DNA, 199 bp, Homo sapiens; identical to SEQ ID NO: 238885
  chr17:7905914-7906113
  hyper

SEQ ID NO: 384636 - DNA, 433 bp, Homo sapiens; identical to SEQ ID NO: 291977
  chr17:7975836-7976269
  hyper

SEQ ID NO: 384637 - DNA, 320 bp, Homo sapiens; identical to SEQ ID NO: 291978
  chr17:7976318-7976638
  hyper

SEQ ID NO: 384638 - DNA, 211 bp, Homo sapiens; identical to SEQ ID NO: 238891
  chr17:8026217-8026428
  hyper

SEQ ID NO: 384639 - DNA, 109 bp, Homo sapiens; identical to SEQ ID NO: 204434
  chr17:13505656-13505765
  hyper

SEQ ID NO: 384640 - DNA, 57 bp, Homo sapiens; identical to SEQ ID NO: 225243
  chr17:16395229-16395286
  hyper

SEQ ID NO: 384641 - DNA, 66 bp, Homo sapiens
  chr17:18908242-18908308
  hyper
gaaaatatcagaggcctaagcccaagagctcctggaacacccatcccagagagggacagtgttctc

SEQ ID NO: 384642 - DNA, 265 bp, Homo sapiens; identical to SEQ ID NO: 292083
  chr17:19770124-19770389
  hyper

SEQ ID NO: 384643 - DNA, 42 bp, Homo sapiens; identical to SEQ ID NO: 238970
  chr17:20059384-20059426
  hyper

SEQ ID NO: 384644 - DNA, 202 bp, Homo sapiens; identical to SEQ ID NO: 204466
  chr17:25659906-25660108
  hyper

SEQ ID NO: 384645 - DNA, 72 bp, Homo sapiens; identical to SEQ ID NO: 238989
  chr17:27039397-27039469
  hyper

SEQ ID NO: 384646 - DNA, 74 bp, Homo sapiens
  chr17:27333201-27333275
  hyper
tgtgggcacacggcccctgcccttctgcgctgcccacccccagccaagcatgccaccctctttcccgttaacgg

SEQ ID NO: 384647 - DNA, 174 bp, Homo sapiens; identical to SEQ ID NO: 204493
  chr17:29527439-29527613
  hyper

SEQ ID NO: 384648 - DNA, 136 bp, Homo sapiens; identical to SEQ ID NO: 204499
  chr17:29546009-29546145
  hyper

SEQ ID NO: 384649 - DNA, 250 bp, Homo sapiens; identical to SEQ ID NO: 204503
  chr17:29553452-29553702
  hyper

SEQ ID NO: 384650 - DNA, 117 bp, Homo sapiens; identical to SEQ ID NO: 204510
  chr17:29559090-29559207
  hyper

SEQ ID NO: 384651 - DNA, 143 bp, Homo sapiens; identical to SEQ ID NO: 204536
  chr17:29685497-29685640
  hyper

SEQ ID NO: 384652 - DNA, 89 bp, Homo sapiens; identical to SEQ ID NO: 204542
  chr17:30813422-30813511
  hyper

SEQ ID NO: 384653 - DNA, 105 bp, Homo sapiens; identical to SEQ ID NO: 225322
  chr17:31203740-31203845
  hyper

SEQ ID NO: 384654 - DNA, 106 bp, Homo sapiens; identical to SEQ ID NO: 239060
  chr17:35716404-35716510
  hyper

SEQ ID NO: 384655 - DNA, 239 bp, Homo sapiens; identical to SEQ ID NO: 292253
  chr17:37307753-37307992
  hyper

SEQ ID NO: 384656 - DNA, 83 bp, Homo sapiens; identical to SEQ ID NO: 292285
  chr17:38255680-38255763
  hyper

SEQ ID NO: 384657 - DNA, 56 bp, Homo sapiens; identical to SEQ ID NO: 128592
  chr17:38255830-38255886
  hyper

SEQ ID NO: 384658 - DNA, 89 bp, Homo sapiens; identical to SEQ ID NO: 239113
  chr17:38296368-38296457
  hyper

SEQ ID NO: 384659 - DNA, 165 bp, Homo sapiens; identical to SEQ ID NO: 239116
  chr17:38443942-38444107
  hyper

SEQ ID NO: 384660 - DNA, 137 bp, Homo sapiens; identical to SEQ ID NO: 239124
  chr17:38739098-38739235
  hyper

SEQ ID NO: 384661 - DNA, 173 bp, Homo sapiens; identical to SEQ ID NO: 239129
  chr17:40428745-40428918
  hyper

SEQ ID NO: 384662 - DNA, 56 bp, Homo sapiens; identical to SEQ ID NO: 292312
  chr17:40441311-40441367
  hyper

SEQ ID NO: 384663 - DNA, 89 bp, Homo sapiens; identical to SEQ ID NO: 225369
  chr17:41242960-41243049
  hyper

SEQ ID NO: 384664 - DNA, 120 bp, Homo sapiens; identical to SEQ ID NO: 239151
  chr17:41393018-41393138
  hyper

SEQ ID NO: 384665 - DNA, 330 bp, Homo sapiens; identical to SEQ ID NO: 239152
  chr17:41446506-41446836
  hyper

SEQ ID NO: 384666 - DNA, 125 bp, Homo sapiens; identical to SEQ ID NO: 239166
  chr17:42072190-42072315
  hyper

SEQ ID NO: 384667 - DNA, 111 bp, Homo sapiens; identical to SEQ ID NO: 204627
  chr17:42264411-42264522
  hyper

SEQ ID NO: 384668 - DNA, 614 bp, Homo sapiens; identical to SEQ ID NO: 292390
  chr17:42298856-42299470
  hyper

SEQ ID NO: 384669 - DNA, 100 bp, Homo sapiens; identical to SEQ ID NO: 204635
  chr17:42635760-42635860
  hyper

SEQ ID NO: 384670 - DNA, 85 bp, Homo sapiens
  chr17:47928527-47928612
  hyper
cggccgagcccgccgcccctcccggtgccctcggccacccgggcacggccctggccggtgcgtccagctccgcccggtccccgcg

SEQ ID NO: 384671 - DNA, 173 bp, Homo sapiens; identical to SEQ ID NO: 225421
  chr17:47929093-47929266
  hyper

SEQ ID NO: 384672 - DNA, 282 bp, Homo sapiens; identical to SEQ ID NO: 225427
  chr17:48072333-48072615
  hyper

SEQ ID NO: 384673 - DNA, 177 bp, Homo sapiens; identical to SEQ ID NO: 204703
  chr17:48278764-48278941
  hyper

SEQ ID NO: 384674 - DNA, 45 bp, Homo sapiens; identical to SEQ ID NO: 239315
  chr17:48796758-48796803
  hyper

SEQ ID NO: 384675 - DNA, 119 bp, Homo sapiens; identical to SEQ ID NO: 239340
  chr17:55927364-55927483
  hyper

SEQ ID NO: 384676 - DNA, 75 bp, Homo sapiens; identical to SEQ ID NO: 239343
  chr17:56084800-56084875
  hyper

SEQ ID NO: 384677 - DNA, 125 bp, Homo sapiens; identical to SEQ ID NO: 204731
  chr17:58711213-58711338
  hyper

SEQ ID NO: 384678 - DNA, 33 bp, Homo sapiens
  chr17:59475183-59475216
  hyper
gcacacatttagatgtacacatactcttacaag

SEQ ID NO: 384679 - DNA, 50 bp, Homo sapiens; identical to SEQ ID NO: 239384
  chr17:60781592-60781642
  hyper

SEQ ID NO: 384680 - DNA, 164 bp, Homo sapiens; identical to SEQ ID NO: 239399
  chr17:62075060-62075224
  hyper

SEQ ID NO: 384681 - DNA, 75 bp, Homo sapiens; identical to SEQ ID NO: 239404
  chr17:62971851-62971926
  hyper

SEQ ID NO: 384682 - DNA, 165 bp, Homo sapiens; identical to SEQ ID NO: 239411
  chr17:65713844-65714009
  hyper

SEQ ID NO: 384683 - DNA, 271 bp, Homo sapiens; identical to SEQ ID NO: 292656
  chr17:70587739-70588010
  hyper

SEQ ID NO: 384684 - DNA, 41 bp, Homo sapiens
  chr17:70588131-70588172
  hyper
tggggtggtcgctgaccaccgtgtcccaggtgaatcagctc

SEQ ID NO: 384685 - DNA, 252 bp, Homo sapiens; identical to SEQ ID NO: 239466
  chr17:73127892-73128144
  hyper

SEQ ID NO: 384686 - DNA, 33 bp, Homo sapiens; identical to SEQ ID NO: 204792
  chr17:73521010-73521043
  hyper

SEQ ID NO: 384687 - DNA, 150 bp, Homo sapiens; identical to SEQ ID NO: 239488
  chr17:74261114-74261264
  hyper

SEQ ID NO: 384688 - DNA, 232 bp, Homo sapiens; identical to SEQ ID NO: 204805
  chr17:74732973-74733205
  hyper

SEQ ID NO: 384689 - DNA, 189 bp, Homo sapiens; identical to SEQ ID NO: 239498
  chr17:74734106-74734295
  hyper

SEQ ID NO: 384690 - DNA, 157 bp, Homo sapiens; identical to SEQ ID NO: 225520
  chr17:76349231-76349388
  hyper

SEQ ID NO: 384691 - DNA, 386 bp, Homo sapiens; identical to SEQ ID NO: 225527
  chr17:77774854-77775240
  hyper

SEQ ID NO: 384692 - DNA, 443 bp, Homo sapiens; identical to SEQ ID NO: 225536
  chr17:78010060-78010503
  hyper

SEQ ID NO: 384693 - DNA, 75 bp, Homo sapiens; identical to SEQ ID NO: 239554
  chr17:79319124-79319199
  hyper

SEQ ID NO: 384694 - DNA, 47 bp, Homo sapiens; identical to SEQ ID NO: 239560
  chr17:79884793-79884840
  hyper

SEQ ID NO: 384695 - DNA, 138 bp, Homo sapiens; identical to SEQ ID NO: 225549
  chr17:79885939-79886077
  hyper

SEQ ID NO: 384696 - DNA, 40 bp, Homo sapiens; identical to SEQ ID NO: 204847
  chr17:79989900-79989940
  hyper

SEQ ID NO: 384697 - DNA, 31 bp, Homo sapiens; identical to SEQ ID NO: 239582
  chr18:658431-658462
  hyper

SEQ ID NO: 384698 - DNA, 74 bp, Homo sapiens
  chr18:4455561-4455635
  hyper
gggtgggaagtgcgctcgccccggaccgaggggaaagcccaacatccccgggatggaacagagaggcggccacc

SEQ ID NO: 384699 - DNA, 200 bp, Homo sapiens; identical to SEQ ID NO: 292896
  chr18:8367259-8367459
  hyper

SEQ ID NO: 384700 - DNA, 95 bp, Homo sapiens; identical to SEQ ID NO: 292908
  chr18:10032590-10032685
  hyper

SEQ ID NO: 384701 - DNA, 36 bp, Homo sapiens; identical to SEQ ID NO: 129750
  chr18:10032841-10032877
  hyper

SEQ ID NO: 384702 - DNA, 681 bp, Homo sapiens
  chr18:12308216-12308897
  hyper
cgggacgcgcgcagccggcccgcagttgccgctgtcgtccgcagagccagttcctagcgcagagccgcgcccgccatgagggagatcgtgcacatccaggcgggccagtgcgggaaccagatcggcaccaaggtgggcctggcgcggtgcagggcctctccgcgggtcggctgctggcgggccccgggtctcccggcgcgacccccgccggggcgcgcacccgctgtgcgcccctgggtcctcggagcccggtgcggacccgcgagggccgcagggagggagcgcccggggcgtggccggccggggaccttctactcttcgctccccacccccatcccaactgggagcggctgccggcggctcaggcgcgcctggaattcggccgccggggcgcctggggtgggcgcgggtggcggcgtcccgggctctgggttctgagcgtctgtccccccgccttgccctgcccaagttttgggaagtgatcagcgatgagcacggcatcgacccggccggaggctacgtgggagactcggcgctgcagctggagagaatcaacgtctactacaatgagtcatcgtgtgagtagcaaggccgccgcgccctgcccggccgggacccgcgtggacgctccggcgccgcctcttagcgcggcgagtttgcttcgggaaaagttctctcggg

SEQ ID NO: 384703 - DNA, 125 bp, Homo sapiens
  chr18:12308927-12309052
  hyper
ctcctccggggcgggaaatccgccgtcagtttattcaaacagctcgattcagcctatcctgagggtctgagcgcttgaacgggaccacccgttagcgttgtgaaatcaacgtagcggttcctgcc

SEQ ID NO: 384704 - DNA, 383 bp, Homo sapiens; identical to SEQ ID NO: 239668
  chr18:21033058-21033441
  hyper

SEQ ID NO: 384705 - DNA, 325 bp, Homo sapiens; identical to SEQ ID NO: 292972
  chr18:21977677-21978002
  hyper

SEQ ID NO: 384706 - DNA, 90 bp, Homo sapiens; identical to SEQ ID NO: 292973
  chr18:21978034-21978124
  hyper

SEQ ID NO: 384707 - DNA, 105 bp, Homo sapiens; identical to SEQ ID NO: 225614
  chr18:22653839-22653944
  hyper

SEQ ID NO: 384708 - DNA, 177 bp, Homo sapiens; identical to SEQ ID NO: 292992
  chr18:28680887-28681064
  hyper

SEQ ID NO: 384709 - DNA, 781 bp, Homo sapiens; identical to SEQ ID NO: 204934
  chr18:28681213-28681994
  hyper

SEQ ID NO: 384710 - DNA, 217 bp, Homo sapiens; identical to SEQ ID NO: 204935
  chr18:28682029-28682246
  hyper

SEQ ID NO: 384711 - DNA, 73 bp, Homo sapiens; identical to SEQ ID NO: 54990
  chr18:28682286-28682359
  hyper

SEQ ID NO: 384712 - DNA, 36 bp, Homo sapiens; identical to SEQ ID NO: 204939
  chr18:29265160-29265196
  hyper

SEQ ID NO: 384713 - DNA, 118 bp, Homo sapiens; identical to SEQ ID NO: 239699
  chr18:30050221-30050339
  hyper

SEQ ID NO: 384714 - DNA, 467 bp, Homo sapiens; identical to SEQ ID NO: 239700
  chr18:30051179-30051646
  hyper

SEQ ID NO: 384715 - DNA, 68 bp, Homo sapiens; identical to SEQ ID NO: 204963
  chr18:39172188-39172256
  hyper

SEQ ID NO: 384716 - DNA, 67 bp, Homo sapiens; identical to SEQ ID NO: 204969
  chr18:42531892-42531959
  hyper

SEQ ID NO: 384717 - DNA, 53 bp, Homo sapiens; identical to SEQ ID NO: 293057
  chr18:44676978-44677031
  hyper

SEQ ID NO: 384718 - DNA, 196 bp, Homo sapiens; identical to SEQ ID NO: 129980
  chr18:44677055-44677251
  hyper

SEQ ID NO: 384719 - DNA, 179 bp, Homo sapiens; identical to SEQ ID NO: 239766
  chr18:46065664-46065843
  hyper

SEQ ID NO: 384720 - DNA, 671 bp, Homo sapiens; identical to SEQ ID NO: 239767
  chr18:46066503-46067174
  hyper

SEQ ID NO: 384721 - DNA, 296 bp, Homo sapiens; identical to SEQ ID NO: 239777
  chr18:48723995-48724291
  hyper

SEQ ID NO: 384722 - DNA, 79 bp, Homo sapiens; identical to SEQ ID NO: 239781
  chr18:51795698-51795777
  hyper

SEQ ID NO: 384723 - DNA, 245 bp, Homo sapiens; identical to SEQ ID NO: 239800
  chr18:55710765-55711010
  hyper

SEQ ID NO: 384724 - DNA, 80 bp, Homo sapiens; identical to SEQ ID NO: 293134
  chr18:56934820-56934900
  hyper

SEQ ID NO: 384725 - DNA, 60 bp, Homo sapiens; identical to SEQ ID NO: 293143
  chr18:59000631-59000691
  hyper

SEQ ID NO: 384726 - DNA, 53 bp, Homo sapiens; identical to SEQ ID NO: 239822
  chr18:60382505-60382558
  hyper

SEQ ID NO: 384727 - DNA, 1435 bp, Homo sapiens; identical to SEQ ID NO: 205030
  chr18:60382939-60384374
  hyper

SEQ ID NO: 384728 - DNA, 84 bp, Homo sapiens; identical to SEQ ID NO: 293170
  chr18:70208929-70209013
  hyper

SEQ ID NO: 384729 - DNA, 442 bp, Homo sapiens; identical to SEQ ID NO: 293177
  chr18:72124285-72124727
  hyper

SEQ ID NO: 384730 - DNA, 356 bp, Homo sapiens; identical to SEQ ID NO: 293196
  chr18:77193428-77193784
  hyper

SEQ ID NO: 384731 - DNA, 159 bp, Homo sapiens; identical to SEQ ID NO: 239877
  chr19:633641-633800
  hyper

SEQ ID NO: 384732 - DNA, 36 bp, Homo sapiens; identical to SEQ ID NO: 239888
  chr19:1041004-1041040
  hyper

SEQ ID NO: 384733 - DNA, 202 bp, Homo sapiens; identical to SEQ ID NO: 239904
  chr19:1507917-1508119
  hyper

SEQ ID NO: 384734 - DNA, 34 bp, Homo sapiens; identical to SEQ ID NO: 239924
  chr19:1848728-1848762
  hyper

SEQ ID NO: 384735 - DNA, 300 bp, Homo sapiens; identical to SEQ ID NO: 225727
  chr19:2944752-2945052
  hyper

SEQ ID NO: 384736 - DNA, 141 bp, Homo sapiens; identical to SEQ ID NO: 205110
  chr19:2977372-2977513
  hyper

SEQ ID NO: 384737 - DNA, 143 bp, Homo sapiens; identical to SEQ ID NO: 225731
  chr19:3094777-3094920
  hyper

SEQ ID NO: 384738 - DNA, 489 bp, Homo sapiens; identical to SEQ ID NO: 225737
  chr19:3606743-3607232
  hyper

SEQ ID NO: 384739 - DNA, 188 bp, Homo sapiens; identical to SEQ ID NO: 239973
  chr19:3762567-3762755
  hyper

SEQ ID NO: 384740 - DNA, 124 bp, Homo sapiens; identical to SEQ ID NO: 239984
  chr19:4278961-4279085
  hyper

SEQ ID NO: 384741 - DNA, 77 bp, Homo sapiens; identical to SEQ ID NO: 205131
  chr19:4769517-4769594
  hyper

SEQ ID NO: 384742 - DNA, 199 bp, Homo sapiens; identical to SEQ ID NO: 205142
  chr19:6464135-6464334
  hyper

SEQ ID NO: 384743 - DNA, 253 bp, Homo sapiens; identical to SEQ ID NO: 240026
  chr19:7069469-7069722
  hyper

SEQ ID NO: 384744 - DNA, 166 bp, Homo sapiens; identical to SEQ ID NO: 240072
  chr19:10305760-10305926
  hyper

SEQ ID NO: 384745 - DNA, 251 bp, Homo sapiens; identical to SEQ ID NO: 240094
  chr19:10654404-10654655
  hyper

SEQ ID NO: 384746 - DNA, 369 bp, Homo sapiens; identical to SEQ ID NO: 240096
  chr19:10679763-10680132
  hyper

SEQ ID NO: 384747 - DNA, 266 bp, Homo sapiens; identical to SEQ ID NO: 225793
  chr19:11308102-11308368
  hyper

SEQ ID NO: 384748 - DNA, 40 bp, Homo sapiens; identical to SEQ ID NO: 293534
  chr19:11532654-11532694
  hyper

SEQ ID NO: 384749 - DNA, 179 bp, Homo sapiens; identical to SEQ ID NO: 240115
  chr19:11545952-11546131
  hyper

SEQ ID NO: 384750 - DNA, 358 bp, Homo sapiens; identical to SEQ ID NO: 240117
  chr19:11639727-11640085
  hyper

SEQ ID NO: 384751 - DNA, 79 bp, Homo sapiens; identical to SEQ ID NO: 293563
  chr19:12305760-12305839
  hyper

SEQ ID NO: 384752 - DNA, 86 bp, Homo sapiens; identical to SEQ ID NO: 205211
  chr19:12885894-12885980
  hyper

SEQ ID NO: 384753 - DNA, 36 bp, Homo sapiens; identical to SEQ ID NO: 240152
  chr19:12917228-12917264
  hyper

SEQ ID NO: 384754 - DNA, 98 bp, Homo sapiens; identical to SEQ ID NO: 205217
  chr19:13029775-13029873
  hyper

SEQ ID NO: 384755 - DNA, 51 bp, Homo sapiens
  chr19:13030316-13030367
  hyper
gtgaggctcctgggttccacggggcgcccaggttatacggatctcagagtc

SEQ ID NO: 384756 - DNA, 54 bp, Homo sapiens; identical to SEQ ID NO: 240163
  chr19:13068137-13068191
  hyper

SEQ ID NO: 384757 - DNA, 144 bp, Homo sapiens
  chr19:13106028-13106172
  hyper
atgtgtggcggggtccgagtcccgctgcgtgtcagcgtgtgtctgcgctggaacgcgggccagcacgtgtcagggcggccgcgtcggtgtgcgcccccgcgcgcgcgtgtgcgtgtgttcgtgtgtgtgtgtgcatgtgtgtgc

SEQ ID NO: 384758 - DNA, 194 bp, Homo sapiens; identical to SEQ ID NO: 240168
  chr19:13260761-13260955
  hyper

SEQ ID NO: 384759 - DNA, 326 bp, Homo sapiens; identical to SEQ ID NO: 240171
  chr19:13264660-13264986
  hyper

SEQ ID NO: 384760 - DNA, 174 bp, Homo sapiens; identical to SEQ ID NO: 205236
  chr19:14202317-14202491
  hyper

SEQ ID NO: 384761 - DNA, 81 bp, Homo sapiens; identical to SEQ ID NO: 205237
  chr19:14583720-14583801
  hyper

SEQ ID NO: 384762 - DNA, 140 bp, Homo sapiens; identical to SEQ ID NO: 240189
  chr19:14682852-14682992
  hyper

SEQ ID NO: 384763 - DNA, 32 bp, Homo sapiens
  chr19:14887561-14887593
  hyper
ctcccatggttccagctgagctgccggcagga

SEQ ID NO: 384764 - DNA, 171 bp, Homo sapiens; identical to SEQ ID NO: 240235
  chr19:17970699-17970870
  hyper

SEQ ID NO: 384765 - DNA, 303 bp, Homo sapiens; identical to SEQ ID NO: 240238
  chr19:18043467-18043770
  hyper

SEQ ID NO: 384766 - DNA, 112 bp, Homo sapiens; identical to SEQ ID NO: 240253
  chr19:18343303-18343415
  hyper

SEQ ID NO: 384767 - DNA, 330 bp, Homo sapiens; identical to SEQ ID NO: 205279
  chr19:18420497-18420827
  hyper

SEQ ID NO: 384768 - DNA, 117 bp, Homo sapiens; identical to SEQ ID NO: 293789
  chr19:22817085-22817202
  hyper

SEQ ID NO: 384769 - DNA, 221 bp, Homo sapiens; identical to SEQ ID NO: 293801
  chr19:23653859-23654080
  hyper

SEQ ID NO: 384770 - DNA, 75 bp, Homo sapiens; identical to SEQ ID NO: 205336
  chr19:28284060-28284135
  hyper

SEQ ID NO: 384771 - DNA, 33 bp, Homo sapiens; identical to SEQ ID NO: 293816
  chr19:31210819-31210852
  hyper

SEQ ID NO: 384772 - DNA, 1022 bp, Homo sapiens
  chr19:33790839-33791861
  hyper
ttgactttgatatgtttatattatagatataatacataaaacatctagagtgagactctacgttctccccaaaagaagagaaccaagccgtccttccctgctcccagccccagtgatgcgttggcgggaggccacctcccttcccgaccaggagccagggcctctgggggacaagccttgtgggcagcccaggccggaggggctggggaaagctgagggcaaaggagaacccccctcacctcattggtcccccaggatcaaaagtaatcccaaaaccaaaaggaaagggagtctcagacccttcccccagctgccgacggagagtctcattttggcaagtatccgagcaaaaccaaaacaaaacaaaaaccaaataaaatggtggtttagcagagacgcgcacattcacattgcacaaggcactgctggggcacagaggccagatacaagtgttgatatcggctgataaagcaaaatatttggaaagcttgtcataactccggtccctctgggatggactgatcgtgcttcgtgttcctaggcaatgctgaaggcatacagtacaaacaaggctgagggtcccagtggcccttcaccccccatgcccgccccacagccagatctctaggtctccctctcccaccaggggtatacatcctcagagctgacccacgacctagctttctggtgtgactcggggtgggggctcccactggtcacctggtgacccccatcgcagtgagttccgccccaaggggaagcccagcctatagcaggctggggtggggtgtgtgcggagggaggtgggagaggcgtggaactagagaccctccaccttcatgtagaactaggggaacaaccttaggttccaagccccaagtccctatgtttccacccctttctaaggacaggcgtggaggagcggctggggctggcgggcttgtcgggatctcagctccctgagccctcctcctgccacgggcctgctcccctccttctctcatgggggtctgctgtagcct

SEQ ID NO: 384773 - DNA, 85 bp, Homo sapiens; identical to SEQ ID NO: 240386
  chr19:34919058-34919143
  hyper

SEQ ID NO: 384774 - DNA, 188 bp, Homo sapiens; identical to SEQ ID NO: 240421
  chr19:36485952-36486140
  hyper

SEQ ID NO: 384775 - DNA, 676 bp, Homo sapiens; identical to SEQ ID NO: 240475
  chr19:39322018-39322694
  hyper

SEQ ID NO: 384776 - DNA, 39 bp, Homo sapiens; identical to SEQ ID NO: 205410
  chr19:40022937-40022976
  hyper

SEQ ID NO: 384777 - DNA, 409 bp, Homo sapiens; identical to SEQ ID NO: 240503
  chr19:40791307-40791716
  hyper

SEQ ID NO: 384778 - DNA, 36 bp, Homo sapiens; identical to SEQ ID NO: 240517
  chr19:41082735-41082771
  hyper

SEQ ID NO: 384779 - DNA, 73 bp, Homo sapiens; identical to SEQ ID NO: 205430
  chr19:41222270-41222343
  hyper

SEQ ID NO: 384780 - DNA, 106 bp, Homo sapiens; identical to SEQ ID NO: 205431
  chr19:41223422-41223528
  hyper

SEQ ID NO: 384781 - DNA, 370 bp, Homo sapiens; identical to SEQ ID NO: 205446
  chr19:42680242-42680612
  hyper

SEQ ID NO: 384782 - DNA, 194 bp, Homo sapiens; identical to SEQ ID NO: 240553
  chr19:42806829-42807023
  hyper

SEQ ID NO: 384783 - DNA, 344 bp, Homo sapiens; identical to SEQ ID NO: 240554
  chr19:42830248-42830592
  hyper

SEQ ID NO: 384784 - DNA, 272 bp, Homo sapiens; identical to SEQ ID NO: 205451
  chr19:44029739-44030011
  hyper

SEQ ID NO: 384785 - DNA, 222 bp, Homo sapiens; identical to SEQ ID NO: 240565
  chr19:44100424-44100646
  hyper

SEQ ID NO: 384786 - DNA, 172 bp, Homo sapiens; identical to SEQ ID NO: 240567
  chr19:44144236-44144408
  hyper

SEQ ID NO: 384787 - DNA, 129 bp, Homo sapiens; identical to SEQ ID NO: 240571
  chr19:44439732-44439861
  hyper

SEQ ID NO: 384788 - DNA, 72 bp, Homo sapiens; identical to SEQ ID NO: 205458
  chr19:44507929-44508001
  hyper

SEQ ID NO: 384789 - DNA, 250 bp, Homo sapiens; identical to SEQ ID NO: 205461
  chr19:44617149-44617399
  hyper

SEQ ID NO: 384790 - DNA, 368 bp, Homo sapiens; identical to SEQ ID NO: 294084
  chr19:45347906-45348274
  hyper

SEQ ID NO: 384791 - DNA, 465 bp, Homo sapiens; identical to SEQ ID NO: 240601
  chr19:45873582-45874047
  hyper

SEQ ID NO: 384792 - DNA, 136 bp, Homo sapiens; identical to SEQ ID NO: 240625
  chr19:46405055-46405191
  hyper

SEQ ID NO: 384793 - DNA, 364 bp, Homo sapiens; identical to SEQ ID NO: 240645
  chr19:47217682-47218046
  hyper

SEQ ID NO: 384794 - DNA, 75 bp, Homo sapiens
  chr19:47363328-47363403
  hyper
ttcacagaaccaaaaacaagttgcatggacgcgcgcgttggctgcagattttcttcacagccaggagaaagagca

SEQ ID NO: 384795 - DNA, 96 bp, Homo sapiens; identical to SEQ ID NO: 240665
  chr19:47951397-47951493
  hyper

SEQ ID NO: 384796 - DNA, 250 bp, Homo sapiens; identical to SEQ ID NO: 294187
  chr19:48867042-48867292
  hyper

SEQ ID NO: 384797 - DNA, 142 bp, Homo sapiens; identical to SEQ ID NO: 131903
  chr19:48867354-48867496
  hyper

SEQ ID NO: 384798 - DNA, 105 bp, Homo sapiens; identical to SEQ ID NO: 225981
  chr19:48994476-48994581
  hyper

SEQ ID NO: 384799 - DNA, 97 bp, Homo sapiens; identical to SEQ ID NO: 240691
  chr19:49217819-49217916
  hyper

SEQ ID NO: 384800 - DNA, 153 bp, Homo sapiens; identical to SEQ ID NO: 205522
  chr19:49314168-49314321
  hyper

SEQ ID NO: 384801 - DNA, 108 bp, Homo sapiens; identical to SEQ ID NO: 205530
  chr19:49926734-49926842
  hyper

SEQ ID NO: 384802 - DNA, 384 bp, Homo sapiens; identical to SEQ ID NO: 294293
  chr19:52407644-52408028
  hyper

SEQ ID NO: 384803 - DNA, 144 bp, Homo sapiens; identical to SEQ ID NO: 294294
  chr19:52408242-52408386
  hyper

SEQ ID NO: 384804 - DNA, 69 bp, Homo sapiens; identical to SEQ ID NO: 240907
  chr19:58874447-58874516
  hyper

SEQ ID NO: 384805 - DNA, 71 bp, Homo sapiens; identical to SEQ ID NO: 226057
  chr19:58920316-58920387
  hyper

SEQ ID NO: 384806 - DNA, 165 bp, Homo sapiens; identical to SEQ ID NO: 240943
  chr20:2723863-2724028
  hyper

SEQ ID NO: 384807 - DNA, 152 bp, Homo sapiens; identical to SEQ ID NO: 240949
  chr20:2821253-2821405
  hyper

SEQ ID NO: 384808 - DNA, 57 bp, Homo sapiens; identical to SEQ ID NO: 205681
  chr20:3766679-3766736
  hyper

SEQ ID NO: 384809 - DNA, 85 bp, Homo sapiens; identical to SEQ ID NO: 241006
  chr20:10655603-10655688
  hyper

SEQ ID NO: 384810 - DNA, 360 bp, Homo sapiens; identical to SEQ ID NO: 226090
  chr20:11871901-11872261
  hyper

SEQ ID NO: 384811 - DNA, 105 bp, Homo sapiens
  chr20:21495255-21495360
  hyper
agccggaaaattggcgatttgtggcgcctttggaaaagggggagggggcgaaggccgagctgcggaaatctctcctttccatcgttggtggttgcctaaacaaga

SEQ ID NO: 384812 - DNA, 359 bp, Homo sapiens; identical to SEQ ID NO: 205772
  chr20:31019123-31019482
  hyper

SEQ ID NO: 384813 - DNA, 634 bp, Homo sapiens; identical to SEQ ID NO: 205774
  chr20:31021086-31021720
  hyper

SEQ ID NO: 384814 - DNA, 116 bp, Homo sapiens; identical to SEQ ID NO: 241116
  chr20:31072615-31072731
  hyper

SEQ ID NO: 384815 - DNA, 349 bp, Homo sapiens; identical to SEQ ID NO: 241122
  chr20:32262417-32262766
  hyper

SEQ ID NO: 384816 - DNA, 126 bp, Homo sapiens; identical to SEQ ID NO: 241162
  chr20:37101359-37101485
  hyper

SEQ ID NO: 384817 - DNA, 204 bp, Homo sapiens; identical to SEQ ID NO: 205810
  chr20:40247056-40247260
  hyper

SEQ ID NO: 384818 - DNA, 45 bp, Homo sapiens; identical to SEQ ID NO: 205820
  chr20:44639093-44639138
  hyper

SEQ ID NO: 384819 - DNA, 268 bp, Homo sapiens; identical to SEQ ID NO: 294820
  chr20:44660337-44660605
  hyper

SEQ ID NO: 384820 - DNA, 166 bp, Homo sapiens; identical to SEQ ID NO: 294856
  chr20:49410874-49411040
  hyper

SEQ ID NO: 384821 - DNA, 457 bp, Homo sapiens; identical to SEQ ID NO: 241297
  chr20:55926142-55926599
  hyper

SEQ ID NO: 384822 - DNA, 90 bp, Homo sapiens; identical to SEQ ID NO: 294933
  chr20:58152282-58152372
  hyper

SEQ ID NO: 384823 - DNA, 75 bp, Homo sapiens; identical to SEQ ID NO: 294934
  chr20:58152388-58152463
  hyper

SEQ ID NO: 384824 - DNA, 61 bp, Homo sapiens; identical to SEQ ID NO: 241335
  chr20:61274240-61274301
  hyper

SEQ ID NO: 384825 - DNA, 148 bp, Homo sapiens; identical to SEQ ID NO: 241340
  chr20:61557990-61558138
  hyper

SEQ ID NO: 384826 - DNA, 419 bp, Homo sapiens; identical to SEQ ID NO: 241369
  chr20:62496242-62496661
  hyper

SEQ ID NO: 384827 - DNA, 322 bp, Homo sapiens; identical to SEQ ID NO: 295000
  chr20:62679894-62680216
  hyper

SEQ ID NO: 384828 - DNA, 57 bp, Homo sapiens; identical to SEQ ID NO: 241382
  chr21:16437726-16437783
  hyper

SEQ ID NO: 384829 - DNA, 695 bp, Homo sapiens; identical to SEQ ID NO: 241385
  chr21:18885713-18886408
  hyper

SEQ ID NO: 384830 - DNA, 154 bp, Homo sapiens; identical to SEQ ID NO: 205949
  chr21:31312503-31312657
  hyper

SEQ ID NO: 384831 - DNA, 105 bp, Homo sapiens; identical to SEQ ID NO: 226254
  chr21:32932326-32932431
  hyper

SEQ ID NO: 384832 - DNA, 49 bp, Homo sapiens; identical to SEQ ID NO: 241406
  chr21:33651478-33651527
  hyper

SEQ ID NO: 384833 - DNA, 110 bp, Homo sapiens; identical to SEQ ID NO: 241409
  chr21:33984700-33984810
  hyper

SEQ ID NO: 384834 - DNA, 131 bp, Homo sapiens; identical to SEQ ID NO: 205982
  chr21:36421464-36421595
  hyper

SEQ ID NO: 384835 - DNA, 153 bp, Homo sapiens; identical to SEQ ID NO: 226275
  chr21:38362192-38362345
  hyper

SEQ ID NO: 384836 - DNA, 144 bp, Homo sapiens; identical to SEQ ID NO: 226299
  chr21:45660255-45660399
  hyper

SEQ ID NO: 384837 - DNA, 211 bp, Homo sapiens
  chr21:45662515-45662726
  hyper
gggcgcaggtgagccgggcgggctgcgggcagcgccacctcctcccggaggccctccctgattgaccggccgggaaccgcgcgcctctgggcctgcggctgaggtccggggctgcgccgcgccgatgagctgacgccgggccgagcgctccacccccagggccgggcgcacctgaatcccctccacccgcgggactgcggagagggggacg

SEQ ID NO: 384838 - DNA, 79 bp, Homo sapiens; identical to SEQ ID NO: 241502
  chr21:46359652-46359731
  hyper

SEQ ID NO: 384839 - DNA, 165 bp, Homo sapiens; identical to SEQ ID NO: 241512
  chr21:47744098-47744263
  hyper

SEQ ID NO: 384840 - DNA, 139 bp, Homo sapiens; identical to SEQ ID NO: 295210
  chr22:17602027-17602166
  hyper

SEQ ID NO: 384841 - DNA, 50 bp, Homo sapiens; identical to SEQ ID NO: 241521
  chr22:18257398-18257448
  hyper

SEQ ID NO: 384842 - DNA, 31 bp, Homo sapiens; identical to SEQ ID NO: 206054
  chr22:18593348-18593379
  hyper

SEQ ID NO: 384843 - DNA, 288 bp, Homo sapiens; identical to SEQ ID NO: 295228
  chr22:19748301-19748589
  hyper

SEQ ID NO: 384844 - DNA, 40 bp, Homo sapiens; identical to SEQ ID NO: 133782
  chr22:19749084-19749124
  hyper

SEQ ID NO: 384845 - DNA, 38 bp, Homo sapiens; identical to SEQ ID NO: 241536
  chr22:19754288-19754326
  hyper

SEQ ID NO: 384846 - DNA, 195 bp, Homo sapiens; identical to SEQ ID NO: 241551
  chr22:21922624-21922819
  hyper

SEQ ID NO: 384847 - DNA, 80 bp, Homo sapiens; identical to SEQ ID NO: 241562
  chr22:23522446-23522526
  hyper

SEQ ID NO: 384848 - DNA, 89 bp, Homo sapiens; identical to SEQ ID NO: 206070
  chr22:24236849-24236938
  hyper

SEQ ID NO: 384849 - DNA, 91 bp, Homo sapiens; identical to SEQ ID NO: 206073
  chr22:24989196-24989287
  hyper

SEQ ID NO: 384850 - DNA, 139 bp, Homo sapiens; identical to SEQ ID NO: 206084
  chr22:26880366-26880505
  hyper

SEQ ID NO: 384851 - DNA, 210 bp, Homo sapiens; identical to SEQ ID NO: 295301
  chr22:28197049-28197259
  hyper

SEQ ID NO: 384852 - DNA, 44 bp, Homo sapiens
  chr22:29469129-29469173
  hyper
agccgcccgcctcgccctgctctccgccgcggcgctcacgctgg

SEQ ID NO: 384853 - DNA, 202 bp, Homo sapiens; identical to SEQ ID NO: 206096
  chr22:29469213-29469415
  hyper

SEQ ID NO: 384854 - DNA, 45 bp, Homo sapiens; identical to SEQ ID NO: 13392
  chr22:29469460-29469505
  hyper

SEQ ID NO: 384855 - DNA, 676 bp, Homo sapiens
  chr22:29702500-29703176
  hyper
tttcagggtcaaaaatgagcattcagtgagcacaaggagccctcagtcgccaggggcatcctccccctccccgcggcggtgccgtttatctggccaggggaggtccacccgggaggaggtgactttgcagcctccagccgctatcgcttcctgccttcatcttgggaacaggccgtgctgtgcgccagcccggggagcccaccgtctggggaggggggcgattaaaaggtcccaacctcctccccaggagaccaaagaggttggacggggccccgggtactaggctgggtgggggttgggcgcctgggccggtcgcagttgtctgggggccctggggctctctgcgtcgagagcgctcgaagacccgggattcctggcccgatcgcgggcggggggagaccccagctccaccccagctcccgccggctcggggaaggggcggcccctttaagagcgcgcggccccgcccgccccctccgggcaggatccgaattccagggaggcggggcggagacggcggcgaggaggaggccgcggcgcgggacgcatagagctgcggctcgggcggcgcctccctgcggcggcccggcccggctccggcccccgctggggcaatgctccccggggccgcgggatgagccaggtgagcgcggagacccccagcactccctgcctg

SEQ ID NO: 384856 - DNA, 112 bp, Homo sapiens; identical to SEQ ID NO: 206100
  chr22:30642966-30643078
  hyper

SEQ ID NO: 384857 - DNA, 120 bp, Homo sapiens; identical to SEQ ID NO: 206107
  chr22:31477077-31477197
  hyper

SEQ ID NO: 384858 - DNA, 333 bp, Homo sapiens; identical to SEQ ID NO: 241656
  chr22:36784309-36784642
  hyper

SEQ ID NO: 384859 - DNA, 114 bp, Homo sapiens; identical to SEQ ID NO: 241680
  chr22:38200880-38200994
  hyper

SEQ ID NO: 384860 - DNA, 155 bp, Homo sapiens; identical to SEQ ID NO: 241691
  chr22:38597888-38598043
  hyper

SEQ ID NO: 384861 - DNA, 95 bp, Homo sapiens; identical to SEQ ID NO: 295436
  chr22:39150552-39150647
  hyper

SEQ ID NO: 384862 - DNA, 189 bp, Homo sapiens; identical to SEQ ID NO: 295441
  chr22:39239935-39240124
  hyper

SEQ ID NO: 384863 - DNA, 47 bp, Homo sapiens; identical to SEQ ID NO: 206139
  chr22:39638593-39638640
  hyper

SEQ ID NO: 384864 - DNA, 189 bp, Homo sapiens; identical to SEQ ID NO: 206140
  chr22:39715621-39715810
  hyper

SEQ ID NO: 384865 - DNA, 131 bp, Homo sapiens; identical to SEQ ID NO: 295452
  chr22:39745646-39745777
  hyper

SEQ ID NO: 384866 - DNA, 278 bp, Homo sapiens; identical to SEQ ID NO: 295453
  chr22:39746119-39746397
  hyper

SEQ ID NO: 384867 - DNA, 94 bp, Homo sapiens; identical to SEQ ID NO: 241725
  chr22:41215480-41215574
  hyper

SEQ ID NO: 384868 - DNA, 204 bp, Homo sapiens; identical to SEQ ID NO: 241737
  chr22:41940462-41940666
  hyper

SEQ ID NO: 384869 - DNA, 78 bp, Homo sapiens; identical to SEQ ID NO: 241738
  chr22:41985628-41985706
  hyper

SEQ ID NO: 384870 - DNA, 105 bp, Homo sapiens; identical to SEQ ID NO: 226389
  chr22:42670075-42670180
  hyper

SEQ ID NO: 384871 - DNA, 296 bp, Homo sapiens; identical to SEQ ID NO: 241755
  chr22:43506224-43506520
  hyper

SEQ ID NO: 384872 - DNA, 112 bp, Homo sapiens; identical to SEQ ID NO: 241777
  chr22:45559225-45559337
  hyper

SEQ ID NO: 384873 - DNA, 282 bp, Homo sapiens; identical to SEQ ID NO: 241823
  chrX:3630855-3631137
  hyper

SEQ ID NO: 384874 - DNA, 373 bp, Homo sapiens; identical to SEQ ID NO: 206201
  chrX:7066303-7066676
  hyper

SEQ ID NO: 384875 - DNA, 161 bp, Homo sapiens; identical to SEQ ID NO: 226428
  chrX:11776190-11776351
  hyper

SEQ ID NO: 384876 - DNA, 46 bp, Homo sapiens; identical to SEQ ID NO: 295657
  chrX:39868176-39868222
  hyper

SEQ ID NO: 384877 - DNA, 82 bp, Homo sapiens; identical to SEQ ID NO: 295658
  chrX:39868252-39868334
  hyper

SEQ ID NO: 384878 - DNA, 167 bp, Homo sapiens; identical to SEQ ID NO: 206234
  chrX:39916407-39916574
  hyper

SEQ ID NO: 384879 - DNA, 1059 bp, Homo sapiens
  chrX:39932474-39933533
  hyper
ggtgggaagcccatagggcagcccaggctttggggcaaggtgcccaggaaacagactgccattgggtaacaaaactgggtgagggtagacaggtcctttgccatgtaaggagaggggacttacagcaatgccctcaggggctgggtaagggaggtaactcctggggtagggaattggtggggacctgaatgcctcatttggagacagaaatatagagcttggtggaaggccgttctcgtttgctttgaaactcggttctgggttgctggctttggcgcccttgctgctggtgctgctactgtgcttggcaggagtggccgggggctggcccacgtgctgaataacggatggtgtggtttctacagagctcctgctggttttggtgccatctgcattggcattgggggcgggtgatgcggaggctgggcggcctgcactcgacactgaccctgaaacgttagtgatgacagcatcggtgccgcccatgcgcgggcatgatgaactccgctgctgtggtatcgcccagtccaatgccttgtttttcagcgacatgcttttgccattgttctcttcgttaggacttggcccgggcaccacccaggatgagggagcagtgctgatgatttcagatctatagatagcacaaccatttcctggaggagatagtgtttctttcggaatctcacttccggagagcactaagccacttccagccctgctgtgaaccaggaccgtgggagccatctttttcatgtggtcagctttggaagcatctacatccaccactttagaagacaagtctagtggcttatctgtgacgtctttggtaacggtctgcttctccaacagaggaggtgagctgccatcttttctgtcttgaaccgctgtcttccgggcatgcccgggcactggctgggcaccttcgcccccttccggagccttgggatacttgccattggagagcctggccgcggggaactcgctgctaactgtcatgtatggctttgacagggcaactgaaggagaggtggagatcctggcatagtgcttgtggaactc

SEQ ID NO: 384880 - DNA, 359 bp, Homo sapiens; identical to SEQ ID NO: 226464
  chrX:73163983-73164342
  hyper

SEQ ID NO: 384881 - DNA, 41 bp, Homo sapiens; identical to SEQ ID NO: 206274
  chrX:107003164-107003205
  hyper

SEQ ID NO: 384882 - DNA, 97 bp, Homo sapiens; identical to SEQ ID NO: 206283
  chrX:123171376-123171473
  hyper

SEQ ID NO: 384883 - DNA, 77 bp, Homo sapiens; identical to SEQ ID NO: 206284
  chrX:123176418-123176495
  hyper

SEQ ID NO: 384884 - DNA, 135 bp, Homo sapiens; identical to SEQ ID NO: 206288
  chrX:123184024-123184159
  hyper

SEQ ID NO: 384885 - DNA, 102 bp, Homo sapiens; identical to SEQ ID NO: 206301
  chrX:123211806-123211908
  hyper

SEQ ID NO: 384886 - DNA, 2398 bp, Homo sapiens
  chrX:129147791-129150189
  hyper
ggcccctgcccctccgtctgtgcccatgcccactccaaccccatcttccggcccaccttctacccccaccctcatccccgcctttgctcctacaccggtgcctgcacccaccccagcccccatctttactccagcccctacacccatgcctgctgccacgccagctgccattcccacctctgcacccatcccggcctccttcagtttgagtagagtgtgctttcctgcagctcaggcaccagctatgcaaaaagtccccctgtcctttcagccagggacagtgctgaccccgagccagccgctggtatatatcccgcctccaagctgtgggcagccactcagtgtggccacactgccaaccactctaggggtttcctccactcttacgctccctgtcctgccgtcctacctgcaggacaggtgtctcccaggcgtgctagcctcccccgagctccgttcttacccgtatgcattttctgtggcccggcctctgacttcggattccaagctggtatctctggaggtgaacaggctcccctgcacttccccatccggtagcaccaccacccagcctgcacccgatggggtccctgggcctttggcagatacctcccttgttactgcttctgccaaggtgcttccaactccacagcctctgctgccagcccccagtgggagctcagccccaccgcaccccgccaagatgcccagtggcaccgagcagcaaacagaagggacttccgttaccttctctcctcttaagtcaccgccacagctggaacgagagatggcctctccacctgagtgcagcgagatgccccttgatctgtcctccaagtccaaccgccagaagcttccattgccgaaccagcgcaagacaccccccatgcctgtgttgacccccgtgcacaccagcagcaaggccctcctctccacagtcctgtctaggtctcagcgcacaacccaggctgccggtggcaatgtcacctcctgcctgggctccacttcctcgccctttgtcatctttcccgagatcgtgaggaatggggacccgagcacctgggtgaagaactcaactgcactgatcagcaccattcctggcacctacgtgggagtggccaacccagtgcctgcatccctgctgctgaacaaagaccccaacctgggcctcaaccgtgacccccgccatctccccaagcaggagcccatctccatcattgatcaaggagagcctaagggcactggtgccacgtgtggcaaaaagggcagccaggctggtgctgagggacagccaagcacagtgaaacgatatactccagcccgcattgcccctgggctgccagggtgccaaaccaaggaactctctttgtggaaacccacggggccggcaaatatttatccccggtgttcagtcaatgggaaacctaccagcacccaggtcctgcctgttggctggtccccgtaccaccaggcgtctctgctttccattggcatttccagtgccgggcagctgacccccagtcagggggcgcccatcaggcccaccagcgttgtttcggagttttctggtgtgccatctctcagctccagcgaagccgtgcacggacttcctgaggggcaaccacggcctgggggctccttcgttccagagcaggaccctgttacaaagaacaaaacttgccggattgctgccaagccttatgaagaacaagtcaatcctgtcctcttgaccctcagccctcagactgggaccctggcactgtctgttcagcctagcggtggggacattcgaatgaatcaggggcctgaggaatcagagagccacctctgctctgacagcactcctaagatggaaggcccccagggggcttgtggcctgaagctggcaggagacacgaagcctaagaaccaagtgctggccacctacatgtcccatgagctggtcctggccaccccccagaacctgcctaagatgcctgagctgcctttgctacctcacgacagccaccccaaggaacttatattggacgtggttccgagcagcaggaggggctccagcacagagcgcccacagcttggaagccaggtggatctggggcgagtgaaaatggagaaggtggatggtgatgtggtcttcaatttagccacctgcttccgggctgatggcctcccagtggctccccagaggggccaagctgaagttcgggctaaggccgggcaggctcgagtgaaacaggaaagcgtaggggtctttgcttgcaagaacaagtggcagccagatgatgtgacggaatctctgccgcccaagaagatgaagtgcggcaaagagaaggacagtgaagagcagcagctccagccacaagccaaggccgtggtccggagttcccacagacccaag

SEQ ID NO: 384887 - DNA, 44 bp, Homo sapiens; identical to SEQ ID NO: 206327
  chrX:133527938-133527982
  hyper

SEQ ID NO: 384888 - DNA, 61 bp, Homo sapiens; identical to SEQ ID NO: 206346
  chrY:21729023-21729084
  hyper

SEQ ID NO: 384889 - DNA, 1005 bp, Homo sapiens; identical to SEQ ID NO: 247283
  chr1:915023-916028
  hypo

SEQ ID NO: 384890 - DNA, 392 bp, Homo sapiens; identical to SEQ ID NO: 197235
  chr1:955508-955900
  hypo

SEQ ID NO: 384891 - DNA, 207 bp, Homo sapiens; identical to SEQ ID NO: 247292
  chr1:990294-990501
  hypo

SEQ ID NO: 384892 - DNA, 130 bp, Homo sapiens; identical to SEQ ID NO: 221177
  chr1:1052182-1052312
  hypo

SEQ ID NO: 384893 - DNA, 670 bp, Homo sapiens; identical to SEQ ID NO: 247302
  chr1:1062954-1063624
  hypo

SEQ ID NO: 384894 - DNA, 316 bp, Homo sapiens; identical to SEQ ID NO: 206382
  chr1:1069739-1070055
  hypo

SEQ ID NO: 384895 - DNA, 67 bp, Homo sapiens; identical to SEQ ID NO: 206393
  chr1:1221510-1221577
  hypo

SEQ ID NO: 384896 - DNA, 33 bp, Homo sapiens; identical to SEQ ID NO: 247343
  chr1:1258113-1258146
  hypo

SEQ ID NO: 384897 - DNA, 148 bp, Homo sapiens; identical to SEQ ID NO: 247345
  chr1:1265340-1265488
  hypo

SEQ ID NO: 384898 - DNA, 108 bp, Homo sapiens; identical to SEQ ID NO: 206401
  chr1:1272384-1272492
  hypo

SEQ ID NO: 384899 - DNA, 123 bp, Homo sapiens; identical to SEQ ID NO: 247366
  chr1:1496748-1496871
  hypo

SEQ ID NO: 384900 - DNA, 122 bp, Homo sapiens; identical to SEQ ID NO: 247368
  chr1:1519092-1519214
  hypo

SEQ ID NO: 384901 - DNA, 280 bp, Homo sapiens; identical to SEQ ID NO: 247389
  chr1:1724694-1724974
  hypo

SEQ ID NO: 384902 - DNA, 101 bp, Homo sapiens; identical to SEQ ID NO: 247409
  chr1:2025268-2025369
  hypo

SEQ ID NO: 384903 - DNA, 218 bp, Homo sapiens; identical to SEQ ID NO: 206430
  chr1:2065387-2065605
  hypo

SEQ ID NO: 384904 - DNA, 521 bp, Homo sapiens; identical to SEQ ID NO: 247420
  chr1:2107353-2107874
  hypo

SEQ ID NO: 384905 - DNA, 472 bp, Homo sapiens; identical to SEQ ID NO: 247438
  chr1:2234639-2235111
  hypo

SEQ ID NO: 384906 - DNA, 31 bp, Homo sapiens; identical to SEQ ID NO: 296043
  chr1:2307894-2307925
  hypo

SEQ ID NO: 384907 - DNA, 150 bp, Homo sapiens; identical to SEQ ID NO: 296044
  chr1:2307955-2308105
  hypo

SEQ ID NO: 384908 - DNA, 195 bp, Homo sapiens; identical to SEQ ID NO: 296045
  chr1:2309953-2310148
  hypo

SEQ ID NO: 384909 - DNA, 162 bp, Homo sapiens; identical to SEQ ID NO: 296046
  chr1:2310244-2310406
  hypo

SEQ ID NO: 384910 - DNA, 114 bp, Homo sapiens; identical to SEQ ID NO: 247479
  chr1:2430550-2430664
  hypo

SEQ ID NO: 384911 - DNA, 177 bp, Homo sapiens; identical to SEQ ID NO: 206481
  chr1:2463122-2463299
  hypo

SEQ ID NO: 384912 - DNA, 276 bp, Homo sapiens; identical to SEQ ID NO: 247511
  chr1:2878440-2878716
  hypo

SEQ ID NO: 384913 - DNA, 238 bp, Homo sapiens; identical to SEQ ID NO: 206519
  chr1:3327630-3327868
  hypo

SEQ ID NO: 384914 - DNA, 493 bp, Homo sapiens; identical to SEQ ID NO: 247590
  chr1:3422675-3423168
  hypo

SEQ ID NO: 384915 - DNA, 187 bp, Homo sapiens; identical to SEQ ID NO: 247593
  chr1:3436853-3437040
  hypo

SEQ ID NO: 384916 - DNA, 211 bp, Homo sapiens; identical to SEQ ID NO: 206542
  chr1:3655597-3655808
  hypo

SEQ ID NO: 384917 - DNA, 35 bp, Homo sapiens; identical to SEQ ID NO: 296234
  chr1:3664741-3664776
  hypo

SEQ ID NO: 384918 - DNA, 35 bp, Homo sapiens; identical to SEQ ID NO: 247639
  chr1:4391727-4391762
  hypo

SEQ ID NO: 384919 - DNA, 34 bp, Homo sapiens; identical to SEQ ID NO: 247640
  chr1:4392062-4392096
  hypo

SEQ ID NO: 384920 - DNA, 53 bp, Homo sapiens; identical to SEQ ID NO: 247647
  chr1:4696907-4696960
  hypo

SEQ ID NO: 384921 - DNA, 95 bp, Homo sapiens; identical to SEQ ID NO: 247651
  chr1:5587302-5587397
  hypo

SEQ ID NO: 384922 - DNA, 235 bp, Homo sapiens; identical to SEQ ID NO: 247655
  chr1:5922581-5922816
  hypo

SEQ ID NO: 384923 - DNA, 121 bp, Homo sapiens; identical to SEQ ID NO: 247659
  chr1:5931724-5931845
  hypo

SEQ ID NO: 384924 - DNA, 68 bp, Homo sapiens; identical to SEQ ID NO: 247681
  chr1:6111618-6111686
  hypo

SEQ ID NO: 384925 - DNA, 138 bp, Homo sapiens; identical to SEQ ID NO: 206587
  chr1:6382126-6382264
  hypo

SEQ ID NO: 384926 - DNA, 87 bp, Homo sapiens; identical to SEQ ID NO: 383686
  chr1:6526181-6526268
  hypo

SEQ ID NO: 384927 - DNA, 62 bp, Homo sapiens; identical to SEQ ID NO: 206593
  chr1:6537439-6537501
  hypo

SEQ ID NO: 384928 - DNA, 190 bp, Homo sapiens; identical to SEQ ID NO: 206594
  chr1:6537537-6537727
  hypo

SEQ ID NO: 384929 - DNA, 40 bp, Homo sapiens; identical to SEQ ID NO: 206596
  chr1:6672155-6672195
  hypo

SEQ ID NO: 384930 - DNA, 141 bp, Homo sapiens; identical to SEQ ID NO: 206597
  chr1:6675989-6676130
  hypo

SEQ ID NO: 384931 - DNA, 125 bp, Homo sapiens; identical to SEQ ID NO: 247758
  chr1:7567307-7567432
  hypo

SEQ ID NO: 384932 - DNA, 162 bp, Homo sapiens; identical to SEQ ID NO: 247764
  chr1:7742818-7742980
  hypo

SEQ ID NO: 384933 - DNA, 34 bp, Homo sapiens; identical to SEQ ID NO: 247769
  chr1:8106657-8106691
  hypo

SEQ ID NO: 384934 - DNA, 213 bp, Homo sapiens; identical to SEQ ID NO: 247776
  chr1:8399490-8399703
  hypo

SEQ ID NO: 384935 - DNA, 81 bp, Homo sapiens; identical to SEQ ID NO: 206626
  chr1:9084938-9085019
  hypo

SEQ ID NO: 384936 - DNA, 268 bp, Homo sapiens; identical to SEQ ID NO: 221223
  chr1:9188954-9189222
  hypo

SEQ ID NO: 384937 - DNA, 48 bp, Homo sapiens; identical to SEQ ID NO: 247797
  chr1:9332433-9332481
  hypo

SEQ ID NO: 384938 - DNA, 87 bp, Homo sapiens; identical to SEQ ID NO: 247798
  chr1:9357986-9358073
  hypo

SEQ ID NO: 384939 - DNA, 425 bp, Homo sapiens; identical to SEQ ID NO: 247807
  chr1:9427427-9427852
  hypo

SEQ ID NO: 384940 - DNA, 127 bp, Homo sapiens; identical to SEQ ID NO: 206642
  chr1:9666790-9666917
  hypo

SEQ ID NO: 384941 - DNA, 149 bp, Homo sapiens; identical to SEQ ID NO: 206646
  chr1:9781134-9781283
  hypo

SEQ ID NO: 384942 - DNA, 143 bp, Homo sapiens; identical to SEQ ID NO: 247823
  chr1:9787397-9787540
  hypo

SEQ ID NO: 384943 - DNA, 360 bp, Homo sapiens; identical to SEQ ID NO: 206653
  chr1:10174923-10175283
  hypo

SEQ ID NO: 384944 - DNA, 213 bp, Homo sapiens; identical to SEQ ID NO: 247841
  chr1:10238658-10238871
  hypo

SEQ ID NO: 384945 - DNA, 365 bp, Homo sapiens; identical to SEQ ID NO: 247870
  chr1:10757887-10758252
  hypo

SEQ ID NO: 384946 - DNA, 216 bp, Homo sapiens; identical to SEQ ID NO: 247871
  chr1:10765349-10765565
  hypo

SEQ ID NO: 384947 - DNA, 90 bp, Homo sapiens; identical to SEQ ID NO: 247898
  chr1:11236360-11236450
  hypo

SEQ ID NO: 384948 - DNA, 142 bp, Homo sapiens; identical to SEQ ID NO: 247923
  chr1:12218910-12219052
  hypo

SEQ ID NO: 384949 - DNA, 215 bp, Homo sapiens; identical to SEQ ID NO: 247926
  chr1:12252961-12253176
  hypo

SEQ ID NO: 384950 - DNA, 37 bp, Homo sapiens; identical to SEQ ID NO: 206703
  chr1:12267963-12268000
  hypo

SEQ ID NO: 384951 - DNA, 65 bp, Homo sapiens; identical to SEQ ID NO: 247938
  chr1:12567168-12567233
  hypo

SEQ ID NO: 384952 - DNA, 165 bp, Homo sapiens; identical to SEQ ID NO: 206707
  chr1:12607962-12608127
  hypo

SEQ ID NO: 384953 - DNA, 130 bp, Homo sapiens; identical to SEQ ID NO: 247956
  chr1:14105492-14105622
  hypo

SEQ ID NO: 384954 - DNA, 236 bp, Homo sapiens; identical to SEQ ID NO: 247984
  chr1:15556611-15556847
  hypo

SEQ ID NO: 384955 - DNA, 35 bp, Homo sapiens; identical to SEQ ID NO: 247985
  chr1:15751733-15751768
  hypo

SEQ ID NO: 384956 - DNA, 155 bp, Homo sapiens; identical to SEQ ID NO: 206725
  chr1:15892452-15892607
  hypo

SEQ ID NO: 384957 - DNA, 200 bp, Homo sapiens; identical to SEQ ID NO: 248049
  chr1:17702234-17702434
  hypo

SEQ ID NO: 384958 - DNA, 143 bp, Homo sapiens; identical to SEQ ID NO: 206764
  chr1:19245955-19246098
  hypo

SEQ ID NO: 384959 - DNA, 232 bp, Homo sapiens; identical to SEQ ID NO: 248082
  chr1:19491254-19491486
  hypo

SEQ ID NO: 384960 - DNA, 388 bp, Homo sapiens; identical to SEQ ID NO: 206770
  chr1:20060808-20061196
  hypo

SEQ ID NO: 384961 - DNA, 116 bp, Homo sapiens; identical to SEQ ID NO: 296765
  chr1:20205178-20205294
  hypo

SEQ ID NO: 384962 - DNA, 274 bp, Homo sapiens; identical to SEQ ID NO: 296766
  chr1:20205324-20205598
  hypo

SEQ ID NO: 384963 - DNA, 256 bp, Homo sapiens; identical to SEQ ID NO: 248116
  chr1:21037714-21037970
  hypo

SEQ ID NO: 384964 - DNA, 157 bp, Homo sapiens; identical to SEQ ID NO: 206781
  chr1:21062548-21062705
  hypo

SEQ ID NO: 384965 - DNA, 42 bp, Homo sapiens; identical to SEQ ID NO: 248127
  chr1:21786548-21786590
  hypo

SEQ ID NO: 384966 - DNA, 68 bp, Homo sapiens
  chr1:22777322-22777390
  hypo
attgcagatggaaaaggtataaccacagaggaagctggacattgcactaagatggctggatttgggca

SEQ ID NO: 384967 - DNA, 133 bp, Homo sapiens; identical to SEQ ID NO: 206801
  chr1:23063031-23063164
  hypo

SEQ ID NO: 384968 - DNA, 120 bp, Homo sapiens; identical to SEQ ID NO: 206810
  chr1:23567755-23567875
  hypo

SEQ ID NO: 384969 - DNA, 168 bp, Homo sapiens; identical to SEQ ID NO: 296852
  chr1:23693910-23694078
  hypo

SEQ ID NO: 384970 - DNA, 34 bp, Homo sapiens; identical to SEQ ID NO: 248189
  chr1:24016636-24016670
  hypo

SEQ ID NO: 384971 - DNA, 105 bp, Homo sapiens; identical to SEQ ID NO: 248200
  chr1:24620325-24620430
  hypo

SEQ ID NO: 384972 - DNA, 142 bp, Homo sapiens; identical to SEQ ID NO: 206822
  chr1:24701524-24701666
  hypo

SEQ ID NO: 384973 - DNA, 88 bp, Homo sapiens; identical to SEQ ID NO: 206823
  chr1:24706236-24706324
  hypo

SEQ ID NO: 384974 - DNA, 33 bp, Homo sapiens; identical to SEQ ID NO: 248205
  chr1:24708666-24708699
  hypo

SEQ ID NO: 384975 - DNA, 287 bp, Homo sapiens; identical to SEQ ID NO: 248209
  chr1:24976291-24976578
  hypo

SEQ ID NO: 384976 - DNA, 192 bp, Homo sapiens; identical to SEQ ID NO: 248220
  chr1:25510193-25510385
  hypo

SEQ ID NO: 384977 - DNA, 151 bp, Homo sapiens; identical to SEQ ID NO: 221270
  chr1:25870618-25870769
  hypo

SEQ ID NO: 384978 - DNA, 158 bp, Homo sapiens; identical to SEQ ID NO: 206831
  chr1:25890394-25890552
  hypo

SEQ ID NO: 384979 - DNA, 76 bp, Homo sapiens; identical to SEQ ID NO: 248230
  chr1:25895704-25895780
  hypo

SEQ ID NO: 384980 - DNA, 39 bp, Homo sapiens; identical to SEQ ID NO: 248247
  chr1:26969659-26969698
  hypo

SEQ ID NO: 384981 - DNA, 76 bp, Homo sapiens; identical to SEQ ID NO: 248268
  chr1:27862696-27862772
  hypo

SEQ ID NO: 384982 - DNA, 33 bp, Homo sapiens; identical to SEQ ID NO: 206857
  chr1:28148833-28148866
  hypo

SEQ ID NO: 384983 - DNA, 37 bp, Homo sapiens; identical to SEQ ID NO: 206858
  chr1:28364954-28364991
  hypo

SEQ ID NO: 384984 - DNA, 52 bp, Homo sapiens; identical to SEQ ID NO: 206861
  chr1:28853770-28853822
  hypo

SEQ ID NO: 384985 - DNA, 97 bp, Homo sapiens; identical to SEQ ID NO: 248300
  chr1:29273976-29274073
  hypo

SEQ ID NO: 384986 - DNA, 79 bp, Homo sapiens; identical to SEQ ID NO: 248304
  chr1:29473803-29473882
  hypo

SEQ ID NO: 384987 - DNA, 140 bp, Homo sapiens; identical to SEQ ID NO: 197428
  chr1:31192212-31192352
  hypo

SEQ ID NO: 384988 - DNA, 64 bp, Homo sapiens; identical to SEQ ID NO: 206877
  chr1:31478716-31478780
  hypo

SEQ ID NO: 384989 - DNA, 36 bp, Homo sapiens; identical to SEQ ID NO: 206879
  chr1:31732224-31732260
  hypo

SEQ ID NO: 384990 - DNA, 121 bp, Homo sapiens; identical to SEQ ID NO: 221290
  chr1:32666272-32666393
  hypo

SEQ ID NO: 384991 - DNA, 113 bp, Homo sapiens; identical to SEQ ID NO: 297028
  chr1:32705375-32705488
  hypo

SEQ ID NO: 384992 - DNA, 82 bp, Homo sapiens; identical to SEQ ID NO: 297029
  chr1:32705579-32705661
  hypo

SEQ ID NO: 384993 - DNA, 93 bp, Homo sapiens; identical to SEQ ID NO: 248354
  chr1:33226462-33226555
  hypo

SEQ ID NO: 384994 - DNA, 37 bp, Homo sapiens; identical to SEQ ID NO: 206895
  chr1:33432070-33432107
  hypo

SEQ ID NO: 384995 - DNA, 498 bp, Homo sapiens; identical to SEQ ID NO: 197450
  chr1:33721208-33721706
  hypo

SEQ ID NO: 384996 - DNA, 88 bp, Homo sapiens; identical to SEQ ID NO: 248387
  chr1:36637143-36637231
  hypo

SEQ ID NO: 384997 - DNA, 218 bp, Homo sapiens; identical to SEQ ID NO: 197463
  chr1:36933230-36933448
  hypo

SEQ ID NO: 384998 - DNA, 150 bp, Homo sapiens; identical to SEQ ID NO: 206915
  chr1:36979463-36979613
  hypo

SEQ ID NO: 384999 - DNA, 98 bp, Homo sapiens; identical to SEQ ID NO: 221316
  chr1:38580185-38580283
  hypo

SEQ ID NO: 385000 - DNA, 31 bp, Homo sapiens; identical to SEQ ID NO: 206921
  chr1:39739272-39739303
  hypo

SEQ ID NO: 385001 - DNA, 31 bp, Homo sapiens; identical to SEQ ID NO: 221329
  chr1:40420568-40420599
  hypo

SEQ ID NO: 385002 - DNA, 79 bp, Homo sapiens; identical to SEQ ID NO: 248438
  chr1:41295714-41295793
  hypo

SEQ ID NO: 385003 - DNA, 394 bp, Homo sapiens; identical to SEQ ID NO: 248440
  chr1:41472915-41473309
  hypo

SEQ ID NO: 385004 - DNA, 211 bp, Homo sapiens; identical to SEQ ID NO: 248448
  chr1:41970958-41971169
  hypo

SEQ ID NO: 385005 - DNA, 35 bp, Homo sapiens; identical to SEQ ID NO: 248472
  chr1:43626939-43626974
  hypo

SEQ ID NO: 385006 - DNA, 70 bp, Homo sapiens; identical to SEQ ID NO: 297193
  chr1:43750607-43750677
  hypo

SEQ ID NO: 385007 - DNA, 151 bp, Homo sapiens; identical to SEQ ID NO: 297194
  chr1:43750707-43750858
  hypo

SEQ ID NO: 385008 - DNA, 45 bp, Homo sapiens; identical to SEQ ID NO: 248488
  chr1:44030403-44030448
  hypo

SEQ ID NO: 385009 - DNA, 238 bp, Homo sapiens; identical to SEQ ID NO: 248495
  chr1:44072459-44072697
  hypo

SEQ ID NO: 385010 - DNA, 83 bp, Homo sapiens; identical to SEQ ID NO: 206973
  chr1:45454356-45454439
  hypo

SEQ ID NO: 385011 - DNA, 105 bp, Homo sapiens; identical to SEQ ID NO: 248539
  chr1:45529304-45529409
  hypo

SEQ ID NO: 385012 - DNA, 59 bp, Homo sapiens; identical to SEQ ID NO: 206977
  chr1:46752071-46752130
  hypo

SEQ ID NO: 385013 - DNA, 188 bp, Homo sapiens; identical to SEQ ID NO: 248569
  chr1:48257294-48257482
  hypo

SEQ ID NO: 385014 - DNA, 355 bp, Homo sapiens; identical to SEQ ID NO: 248574
  chr1:51165682-51166037
  hypo

SEQ ID NO: 385015 - DNA, 74 bp, Homo sapiens; identical to SEQ ID NO: 206993
  chr1:51761677-51761751
  hypo

SEQ ID NO: 385016 - DNA, 83 bp, Homo sapiens; identical to SEQ ID NO: 248579
  chr1:51848399-51848482
  hypo

SEQ ID NO: 385017 - DNA, 38 bp, Homo sapiens; identical to SEQ ID NO: 206997
  chr1:52089596-52089634
  hypo

SEQ ID NO: 385018 - DNA, 42 bp, Homo sapiens; identical to SEQ ID NO: 248584
  chr1:52284963-52285005
  hypo

SEQ ID NO: 385019 - DNA, 77 bp, Homo sapiens; identical to SEQ ID NO: 248607
  chr1:54009675-54009752
  hypo

SEQ ID NO: 385020 - DNA, 92 bp, Homo sapiens; identical to SEQ ID NO: 248628
  chr1:54757486-54757578
  hypo

SEQ ID NO: 385021 - DNA, 138 bp, Homo sapiens; identical to SEQ ID NO: 248635
  chr1:54880303-54880441
  hypo

SEQ ID NO: 385022 - DNA, 94 bp, Homo sapiens; identical to SEQ ID NO: 207015
  chr1:55033218-55033312
  hypo

SEQ ID NO: 385023 - DNA, 118 bp, Homo sapiens; identical to SEQ ID NO: 248651
  chr1:55560944-55561062
  hypo

SEQ ID NO: 385024 - DNA, 171 bp, Homo sapiens; identical to SEQ ID NO: 221369
  chr1:59369797-59369968
  hypo

SEQ ID NO: 385025 - DNA, 34 bp, Homo sapiens; identical to SEQ ID NO: 248656
  chr1:59500703-59500737
  hypo

SEQ ID NO: 385026 - DNA, 198 bp, Homo sapiens; identical to SEQ ID NO: 248661
  chr1:60382733-60382931
  hypo

SEQ ID NO: 385027 - DNA, 36 bp, Homo sapiens; identical to SEQ ID NO: 248673
  chr1:62213623-62213659
  hypo

SEQ ID NO: 385028 - DNA, 130 bp, Homo sapiens; identical to SEQ ID NO: 207044
  chr1:64383872-64384002
  hypo

SEQ ID NO: 385029 - DNA, 91 bp, Homo sapiens; identical to SEQ ID NO: 248683
  chr1:65513412-65513503
  hypo

SEQ ID NO: 385030 - DNA, 74 bp, Homo sapiens; identical to SEQ ID NO: 383730
  chr1:66259003-66259077
  hypo

SEQ ID NO: 385031 - DNA, 35 bp, Homo sapiens; identical to SEQ ID NO: 248690
  chr1:69982630-69982665
  hypo

SEQ ID NO: 385032 - DNA, 35 bp, Homo sapiens; identical to SEQ ID NO: 248707
  chr1:78510240-78510275
  hypo

SEQ ID NO: 385033 - DNA, 36 bp, Homo sapiens; identical to SEQ ID NO: 248722
  chr1:89451827-89451863
  hypo

SEQ ID NO: 385034 - DNA, 44 bp, Homo sapiens; identical to SEQ ID NO: 248734
  chr1:92371564-92371608
  hypo

SEQ ID NO: 385035 - DNA, 35 bp, Homo sapiens; identical to SEQ ID NO: 221405
  chr1:92946278-92946313
  hypo

SEQ ID NO: 385036 - DNA, 300 bp, Homo sapiens; identical to SEQ ID NO: 221412
  chr1:93914141-93914441
  hypo

SEQ ID NO: 385037 - DNA, 44 bp, Homo sapiens; identical to SEQ ID NO: 248738
  chr1:93973207-93973251
  hypo

SEQ ID NO: 385038 - DNA, 102 bp, Homo sapiens; identical to SEQ ID NO: 207075
  chr1:94546400-94546502
  hypo

SEQ ID NO: 385039 - DNA, 31 bp, Homo sapiens; identical to SEQ ID NO: 248753
  chr1:95222491-95222522
  hypo

SEQ ID NO: 385040 - DNA, 168 bp, Homo sapiens; identical to SEQ ID NO: 207088
  chr1:99667088-99667256
  hypo

SEQ ID NO: 385041 - DNA, 32 bp, Homo sapiens; identical to SEQ ID NO: 248769
  chr1:102292873-102292905
  hypo

SEQ ID NO: 385042 - DNA, 294 bp, Homo sapiens; identical to SEQ ID NO: 297563
  chr1:109646918-109647212
  hypo

SEQ ID NO: 385043 - DNA, 31 bp, Homo sapiens; identical to SEQ ID NO: 248788
  chr1:109805822-109805853
  hypo

SEQ ID NO: 385044 - DNA, 177 bp, Homo sapiens; identical to SEQ ID NO: 248807
  chr1:110771215-110771392
  hypo

SEQ ID NO: 385045 - DNA, 33 bp, Homo sapiens; identical to SEQ ID NO: 207116
  chr1:110947365-110947398
  hypo

SEQ ID NO: 385046 - DNA, 120 bp, Homo sapiens; identical to SEQ ID NO: 207117
  chr1:110947698-110947818
  hypo

SEQ ID NO: 385047 - DNA, 426 bp, Homo sapiens; identical to SEQ ID NO: 278753
  chr1:113051157-113051583
  hypo

SEQ ID NO: 385048 - DNA, 105 bp, Homo sapiens; identical to SEQ ID NO: 221451
  chr1:114697920-114698025
  hypo

SEQ ID NO: 385049 - DNA, 279 bp, Homo sapiens; identical to SEQ ID NO: 248840
  chr1:115829155-115829434
  hypo

SEQ ID NO: 385050 - DNA, 56 bp, Homo sapiens; identical to SEQ ID NO: 248852
  chr1:116952565-116952621
  hypo

SEQ ID NO: 385051 - DNA, 203 bp, Homo sapiens; identical to SEQ ID NO: 207137
  chr1:117076615-117076818
  hypo

SEQ ID NO: 385052 - DNA, 52 bp, Homo sapiens; identical to SEQ ID NO: 248872
  chr1:118114932-118114984
  hypo

SEQ ID NO: 385053 - DNA, 43 bp, Homo sapiens; identical to SEQ ID NO: 207157
  chr1:150581803-150581846
  hypo

SEQ ID NO: 385054 - DNA, 37 bp, Homo sapiens; identical to SEQ ID NO: 248903
  chr1:150858612-150858649
  hypo

SEQ ID NO: 385055 - DNA, 149 bp, Homo sapiens; identical to SEQ ID NO: 207170
  chr1:151481647-151481796
  hypo

SEQ ID NO: 385056 - DNA, 256 bp, Homo sapiens; identical to SEQ ID NO: 221464
  chr1:151763859-151764115
  hypo

SEQ ID NO: 385057 - DNA, 90 bp, Homo sapiens; identical to SEQ ID NO: 278845
  chr1:152084599-152084689
  hypo

SEQ ID NO: 385058 - DNA, 180 bp, Homo sapiens; identical to SEQ ID NO: 207183
  chr1:153937388-153937568
  hypo

SEQ ID NO: 385059 - DNA, 39 bp, Homo sapiens; identical to SEQ ID NO: 248961
  chr1:154933540-154933579
  hypo

SEQ ID NO: 385060 - DNA, 154 bp, Homo sapiens; identical to SEQ ID NO: 248965
  chr1:154965405-154965559
  hypo

SEQ ID NO: 385061 - DNA, 180 bp, Homo sapiens; identical to SEQ ID NO: 221475
  chr1:155099753-155099933
  hypo

SEQ ID NO: 385062 - DNA, 81 bp, Homo sapiens; identical to SEQ ID NO: 248974
  chr1:155152431-155152512
  hypo

SEQ ID NO: 385063 - DNA, 82 bp, Homo sapiens; identical to SEQ ID NO: 207207
  chr1:155466712-155466794
  hypo

SEQ ID NO: 385064 - DNA, 36 bp, Homo sapiens; identical to SEQ ID NO: 248999
  chr1:155972836-155972872
  hypo

SEQ ID NO: 385065 - DNA, 48 bp, Homo sapiens; identical to SEQ ID NO: 297817
  chr1:156111314-156111362
  hypo

SEQ ID NO: 385066 - DNA, 201 bp, Homo sapiens; identical to SEQ ID NO: 138312
  chr1:156111379-156111580
  hypo

SEQ ID NO: 385067 - DNA, 190 bp, Homo sapiens; identical to SEQ ID NO: 207221
  chr1:156256080-156256270
  hypo

SEQ ID NO: 385068 - DNA, 144 bp, Homo sapiens; identical to SEQ ID NO: 207225
  chr1:156432942-156433086
  hypo

SEQ ID NO: 385069 - DNA, 101 bp, Homo sapiens; identical to SEQ ID NO: 249023
  chr1:156667364-156667465
  hypo

SEQ ID NO: 385070 - DNA, 42 bp, Homo sapiens; identical to SEQ ID NO: 249025
  chr1:156768640-156768682
  hypo

SEQ ID NO: 385071 - DNA, 132 bp, Homo sapiens; identical to SEQ ID NO: 249026
  chr1:156785630-156785762
  hypo

SEQ ID NO: 385072 - DNA, 32 bp, Homo sapiens; identical to SEQ ID NO: 278940
  chr1:159750347-159750379
  hypo

SEQ ID NO: 385073 - DNA, 145 bp, Homo sapiens; identical to SEQ ID NO: 383759
  chr1:159750772-159750917
  hypo

SEQ ID NO: 385074 - DNA, 60 bp, Homo sapiens; identical to SEQ ID NO: 207247
  chr1:160063720-160063780
  hypo

SEQ ID NO: 385075 - DNA, 156 bp, Homo sapiens; identical to SEQ ID NO: 249056
  chr1:160385715-160385871
  hypo

SEQ ID NO: 385076 - DNA, 104 bp, Homo sapiens; identical to SEQ ID NO: 207273
  chr1:164590520-164590624
  hypo

SEQ ID NO: 385077 - DNA, 189 bp, Homo sapiens; identical to SEQ ID NO: 279005
  chr1:165345284-165345473
  hypo

SEQ ID NO: 385078 - DNA, 32 bp, Homo sapiens; identical to SEQ ID NO: 249113
  chr1:165495513-165495545
  hypo

SEQ ID NO: 385079 - DNA, 150 bp, Homo sapiens; identical to SEQ ID NO: 221513
  chr1:167423964-167424114
  hypo

SEQ ID NO: 385080 - DNA, 41 bp, Homo sapiens; identical to SEQ ID NO: 249136
  chr1:168062078-168062119
  hypo

SEQ ID NO: 385081 - DNA, 36 bp, Homo sapiens; identical to SEQ ID NO: 249170
  chr1:174048026-174048062
  hypo

SEQ ID NO: 385082 - DNA, 37 bp, Homo sapiens; identical to SEQ ID NO: 249183
  chr1:176695195-176695232
  hypo

SEQ ID NO: 385083 - DNA, 131 bp, Homo sapiens; identical to SEQ ID NO: 249188
  chr1:178469645-178469776
  hypo

SEQ ID NO: 385084 - DNA, 299 bp, Homo sapiens; identical to SEQ ID NO: 249204
  chr1:180097383-180097682
  hypo

SEQ ID NO: 385085 - DNA, 291 bp, Homo sapiens; identical to SEQ ID NO: 249205
  chr1:180134709-180135000
  hypo

SEQ ID NO: 385086 - DNA, 40 bp, Homo sapiens; identical to SEQ ID NO: 249232
  chr1:182148663-182148703
  hypo

SEQ ID NO: 385087 - DNA, 39 bp, Homo sapiens; identical to SEQ ID NO: 207340
  chr1:182767636-182767675
  hypo

SEQ ID NO: 385088 - DNA, 165 bp, Homo sapiens; identical to SEQ ID NO: 249246
  chr1:184333001-184333166
  hypo

SEQ ID NO: 385089 - DNA, 60 bp, Homo sapiens; identical to SEQ ID NO: 383773
  chr1:184722970-184723030
  hypo

SEQ ID NO: 385090 - DNA, 176 bp, Homo sapiens; identical to SEQ ID NO: 207355
  chr1:188612098-188612274
  hypo

SEQ ID NO: 385091 - DNA, 33 bp, Homo sapiens; identical to SEQ ID NO: 249262
  chr1:195578617-195578650
  hypo

SEQ ID NO: 385092 - DNA, 32 bp, Homo sapiens; identical to SEQ ID NO: 207359
  chr1:197116742-197116774
  hypo

SEQ ID NO: 385093 - DNA, 92 bp, Homo sapiens; identical to SEQ ID NO: 207362
  chr1:197704760-197704852
  hypo

SEQ ID NO: 385094 - DNA, 78 bp, Homo sapiens; identical to SEQ ID NO: 207372
  chr1:201055718-201055796
  hypo

SEQ ID NO: 385095 - DNA, 152 bp, Homo sapiens; identical to SEQ ID NO: 249295
  chr1:201244944-201245096
  hypo

SEQ ID NO: 385096 - DNA, 42 bp, Homo sapiens; identical to SEQ ID NO: 249298
  chr1:201325776-201325818
  hypo

SEQ ID NO: 385097 - DNA, 96 bp, Homo sapiens; identical to SEQ ID NO: 249300
  chr1:201351265-201351361
  hypo

SEQ ID NO: 385098 - DNA, 42 bp, Homo sapiens; identical to SEQ ID NO: 249315
  chr1:202022787-202022829
  hypo

SEQ ID NO: 385099 - DNA, 42 bp, Homo sapiens; identical to SEQ ID NO: 249320
  chr1:202058380-202058422
  hypo

SEQ ID NO: 385100 - DNA, 189 bp, Homo sapiens; identical to SEQ ID NO: 249324
  chr1:202218132-202218321
  hypo

SEQ ID NO: 385101 - DNA, 297 bp, Homo sapiens; identical to SEQ ID NO: 221543
  chr1:202830569-202830866
  hypo

SEQ ID NO: 385102 - DNA, 136 bp, Homo sapiens; identical to SEQ ID NO: 207391
  chr1:202934401-202934537
  hypo

SEQ ID NO: 385103 - DNA, 231 bp, Homo sapiens; identical to SEQ ID NO: 249343
  chr1:203192503-203192734
  hypo

SEQ ID NO: 385104 - DNA, 153 bp, Homo sapiens; identical to SEQ ID NO: 249346
  chr1:203455859-203456012
  hypo

SEQ ID NO: 385105 - DNA, 114 bp, Homo sapiens
  chr1:203690678-203690792
  hypo
ggtgcattatgctactatatgtactcatacagtactcttgagtacagtgtgtactgtgtgtactcaagaatttcacaagggaggctttattatttctttctttctttttttttt

SEQ ID NO: 385106 - DNA, 161 bp, Homo sapiens; identical to SEQ ID NO: 249351
  chr1:204003761-204003922
  hypo

SEQ ID NO: 385107 - DNA, 103 bp, Homo sapiens; identical to SEQ ID NO: 207399
  chr1:204217170-204217273
  hypo

SEQ ID NO: 385108 - DNA, 100 bp, Homo sapiens; identical to SEQ ID NO: 249366
  chr1:204299942-204300042
  hypo

SEQ ID NO: 385109 - DNA, 120 bp, Homo sapiens; identical to SEQ ID NO: 249372
  chr1:204493508-204493628
  hypo

SEQ ID NO: 385110 - DNA, 104 bp, Homo sapiens; identical to SEQ ID NO: 221548
  chr1:204518752-204518856
  hypo

SEQ ID NO: 385111 - DNA, 101 bp, Homo sapiens; identical to SEQ ID NO: 249390
  chr1:205210756-205210857
  hypo

SEQ ID NO: 385112 - DNA, 70 bp, Homo sapiens; identical to SEQ ID NO: 249391
  chr1:205238244-205238314
  hypo

SEQ ID NO: 385113 - DNA, 183 bp, Homo sapiens; identical to SEQ ID NO: 249405
  chr1:207130059-207130242
  hypo

SEQ ID NO: 385114 - DNA, 282 bp, Homo sapiens; identical to SEQ ID NO: 249425
  chr1:207994389-207994671
  hypo

SEQ ID NO: 385115 - DNA, 105 bp, Homo sapiens; identical to SEQ ID NO: 197930
  chr1:207995292-207995397
  hypo

SEQ ID NO: 385116 - DNA, 165 bp, Homo sapiens; identical to SEQ ID NO: 249430
  chr1:208328464-208328629
  hypo

SEQ ID NO: 385117 - DNA, 751 bp, Homo sapiens; identical to SEQ ID NO: 249431
  chr1:208404328-208405079
  hypo

SEQ ID NO: 385118 - DNA, 257 bp, Homo sapiens; identical to SEQ ID NO: 221561
  chr1:208416772-208417029
  hypo

SEQ ID NO: 385119 - DNA, 105 bp, Homo sapiens; identical to SEQ ID NO: 249450
  chr1:211430456-211430561
  hypo

SEQ ID NO: 385120 - DNA, 209 bp, Homo sapiens; identical to SEQ ID NO: 249463
  chr1:212647420-212647629
  hypo

SEQ ID NO: 385121 - DNA, 51 bp, Homo sapiens; identical to SEQ ID NO: 207454
  chr1:214638186-214638237
  hypo

SEQ ID NO: 385122 - DNA, 42 bp, Homo sapiens; identical to SEQ ID NO: 249504
  chr1:223908289-223908331
  hypo

SEQ ID NO: 385123 - DNA, 63 bp, Homo sapiens; identical to SEQ ID NO: 298372
  chr1:223927891-223927954
  hypo

SEQ ID NO: 385124 - DNA, 33 bp, Homo sapiens; identical to SEQ ID NO: 207491
  chr1:225608023-225608056
  hypo

SEQ ID NO: 385125 - DNA, 45 bp, Homo sapiens; identical to SEQ ID NO: 249523
  chr1:225696995-225697040
  hypo

SEQ ID NO: 385126 - DNA, 130 bp, Homo sapiens; identical to SEQ ID NO: 249532
  chr1:226059446-226059576
  hypo

SEQ ID NO: 385127 - DNA, 56 bp, Homo sapiens; identical to SEQ ID NO: 221594
  chr1:226497394-226497450
  hypo

SEQ ID NO: 385128 - DNA, 82 bp, Homo sapiens; identical to SEQ ID NO: 207508
  chr1:227248038-227248120
  hypo

SEQ ID NO: 385129 - DNA, 204 bp, Homo sapiens; identical to SEQ ID NO: 207514
  chr1:227948693-227948897
  hypo

SEQ ID NO: 385130 - DNA, 60 bp, Homo sapiens; identical to SEQ ID NO: 249609
  chr1:228529845-228529905
  hypo

SEQ ID NO: 385131 - DNA, 143 bp, Homo sapiens; identical to SEQ ID NO: 207549
  chr1:229462409-229462552
  hypo

SEQ ID NO: 385132 - DNA, 35 bp, Homo sapiens; identical to SEQ ID NO: 207552
  chr1:229678578-229678613
  hypo

SEQ ID NO: 385133 - DNA, 219 bp, Homo sapiens; identical to SEQ ID NO: 198009
  chr1:230223230-230223449
  hypo

SEQ ID NO: 385134 - DNA, 99 bp, Homo sapiens; identical to SEQ ID NO: 249640
  chr1:230250129-230250228
  hypo

SEQ ID NO: 385135 - DNA, 312 bp, Homo sapiens; identical to SEQ ID NO: 249650
  chr1:230398099-230398411
  hypo

SEQ ID NO: 385136 - DNA, 103 bp, Homo sapiens; identical to SEQ ID NO: 298549
  chr1:230453705-230453808
  hypo

SEQ ID NO: 385137 - DNA, 127 bp, Homo sapiens; identical to SEQ ID NO: 249703
  chr1:234452341-234452468
  hypo

SEQ ID NO: 385138 - DNA, 277 bp, Homo sapiens; identical to SEQ ID NO: 249706
  chr1:234587511-234587788
  hypo

SEQ ID NO: 385139 - DNA, 92 bp, Homo sapiens; identical to SEQ ID NO: 298606
  chr1:234621343-234621435
  hypo

SEQ ID NO: 385140 - DNA, 35 bp, Homo sapiens; identical to SEQ ID NO: 249717
  chr1:234863731-234863766
  hypo

SEQ ID NO: 385141 - DNA, 169 bp, Homo sapiens; identical to SEQ ID NO: 207601
  chr1:235037109-235037278
  hypo

SEQ ID NO: 385142 - DNA, 31 bp, Homo sapiens; identical to SEQ ID NO: 207610
  chr1:235855354-235855385
  hypo

SEQ ID NO: 385143 - DNA, 39 bp, Homo sapiens; identical to SEQ ID NO: 249748
  chr1:236069953-236069992
  hypo

SEQ ID NO: 385144 - DNA, 33 bp, Homo sapiens; identical to SEQ ID NO: 249763
  chr1:236318110-236318143
  hypo

SEQ ID NO: 385145 - DNA, 56 bp, Homo sapiens; identical to SEQ ID NO: 207622
  chr1:236561305-236561361
  hypo

SEQ ID NO: 385146 - DNA, 95 bp, Homo sapiens; identical to SEQ ID NO: 249822
  chr1:244896511-244896606
  hypo

SEQ ID NO: 385147 - DNA, 157 bp, Homo sapiens; identical to SEQ ID NO: 249832
  chr1:245370678-245370835
  hypo

SEQ ID NO: 385148 - DNA, 192 bp, Homo sapiens; identical to SEQ ID NO: 207653
  chr1:245576466-245576658
  hypo

SEQ ID NO: 385149 - DNA, 211 bp, Homo sapiens; identical to SEQ ID NO: 249859
  chr1:245765879-245766090
  hypo

SEQ ID NO: 385150 - DNA, 183 bp, Homo sapiens; identical to SEQ ID NO: 249869
  chr1:246019929-246020112
  hypo

SEQ ID NO: 385151 - DNA, 78 bp, Homo sapiens; identical to SEQ ID NO: 249871
  chr1:246032887-246032965
  hypo

SEQ ID NO: 385152 - DNA, 149 bp, Homo sapiens; identical to SEQ ID NO: 249891
  chr1:246899321-246899470
  hypo

SEQ ID NO: 385153 - DNA, 91 bp, Homo sapiens; identical to SEQ ID NO: 249895
  chr1:246944244-246944335
  hypo

SEQ ID NO: 385154 - DNA, 123 bp, Homo sapiens; identical to SEQ ID NO: 207682
  chr1:249212002-249212125
  hypo

SEQ ID NO: 385155 - DNA, 136 bp, Homo sapiens; identical to SEQ ID NO: 249935
  chr2:249730-249866
  hypo

SEQ ID NO: 385156 - DNA, 117 bp, Homo sapiens; identical to SEQ ID NO: 249946
  chr2:465771-465888
  hypo

SEQ ID NO: 385157 - DNA, 32 bp, Homo sapiens; identical to SEQ ID NO: 298866
  chr2:720804-720836
  hypo

SEQ ID NO: 385158 - DNA, 99 bp, Homo sapiens; identical to SEQ ID NO: 298867
  chr2:720897-720996
  hypo

SEQ ID NO: 385159 - DNA, 42 bp, Homo sapiens; identical to SEQ ID NO: 249965
  chr2:911370-911412
  hypo

SEQ ID NO: 385160 - DNA, 197 bp, Homo sapiens; identical to SEQ ID NO: 298902
  chr2:1669971-1670168
  hypo

SEQ ID NO: 385161 - DNA, 167 bp, Homo sapiens; identical to SEQ ID NO: 207714
  chr2:1932938-1933105
  hypo

SEQ ID NO: 385162 - DNA, 336 bp, Homo sapiens
  chr2:2189143-2189479
  hypo
actcaccacaaattgtgtggcgtgcaaactaatatattcacctgattggcctccacacgtgagggggacgcagccgggcctcctcgagtcccgcgttccttctgtgagggggacgcagccaggccttccgggccttcccgagtcccgcgttccttctgtgaggcggacgcagccgggcctcctcgagtcccgcgttccttccgtgagggggacgcagccaggccttccgggccttcccgagtcccgcgttccttctgtgaggcggacgcagccgggcctcccagacgcccgcgttccttacgtgagggggacgcagccgggccttccgggccttcc

SEQ ID NO: 385163 - DNA, 64 bp, Homo sapiens; identical to SEQ ID NO: 250012
  chr2:2325021-2325085
  hypo

SEQ ID NO: 385164 - DNA, 260 bp, Homo sapiens; identical to SEQ ID NO: 250016
  chr2:2584324-2584584
  hypo

SEQ ID NO: 385165 - DNA, 168 bp, Homo sapiens; identical to SEQ ID NO: 250035
  chr2:2795035-2795203
  hypo

SEQ ID NO: 385166 - DNA, 159 bp, Homo sapiens; identical to SEQ ID NO: 250038
  chr2:2800085-2800244
  hypo

SEQ ID NO: 385167 - DNA, 167 bp, Homo sapiens; identical to SEQ ID NO: 250053
  chr2:3113370-3113537
  hypo

SEQ ID NO: 385168 - DNA, 65 bp, Homo sapiens; identical to SEQ ID NO: 250054
  chr2:3118887-3118952
  hypo

SEQ ID NO: 385169 - DNA, 286 bp, Homo sapiens; identical to SEQ ID NO: 250058
  chr2:3214976-3215262
  hypo

SEQ ID NO: 385170 - DNA, 360 bp, Homo sapiens; identical to SEQ ID NO: 250088
  chr2:3452857-3453217
  hypo

SEQ ID NO: 385171 - DNA, 192 bp, Homo sapiens; identical to SEQ ID NO: 250089
  chr2:3456147-3456339
  hypo

SEQ ID NO: 385172 - DNA, 42 bp, Homo sapiens; identical to SEQ ID NO: 250093
  chr2:3498265-3498307
  hypo

SEQ ID NO: 385173 - DNA, 71 bp, Homo sapiens; identical to SEQ ID NO: 207750
  chr2:3593598-3593669
  hypo

SEQ ID NO: 385174 - DNA, 198 bp, Homo sapiens; identical to SEQ ID NO: 299033
  chr2:3990922-3991120
  hypo

SEQ ID NO: 385175 - DNA, 102 bp, Homo sapiens; identical to SEQ ID NO: 207760
  chr2:7237053-7237155
  hypo

SEQ ID NO: 385176 - DNA, 665 bp, Homo sapiens; identical to SEQ ID NO: 221657
  chr2:8818829-8819494
  hypo

SEQ ID NO: 385177 - DNA, 174 bp, Homo sapiens; identical to SEQ ID NO: 250164
  chr2:9250674-9250848
  hypo

SEQ ID NO: 385178 - DNA, 59 bp, Homo sapiens; identical to SEQ ID NO: 207785
  chr2:9251105-9251164
  hypo

SEQ ID NO: 385179 - DNA, 95 bp, Homo sapiens; identical to SEQ ID NO: 250170
  chr2:9427258-9427353
  hypo

SEQ ID NO: 385180 - DNA, 470 bp, Homo sapiens; identical to SEQ ID NO: 207790
  chr2:9455454-9455924
  hypo

SEQ ID NO: 385181 - DNA, 42 bp, Homo sapiens; identical to SEQ ID NO: 250210
  chr2:10226144-10226186
  hypo

SEQ ID NO: 385182 - DNA, 180 bp, Homo sapiens; identical to SEQ ID NO: 221667
  chr2:10443826-10444006
  hypo

SEQ ID NO: 385183 - DNA, 40 bp, Homo sapiens; identical to SEQ ID NO: 250229
  chr2:10519315-10519355
  hypo

SEQ ID NO: 385184 - DNA, 540 bp, Homo sapiens; identical to SEQ ID NO: 299170
  chr2:10525735-10526275
  hypo

SEQ ID NO: 385185 - DNA, 42 bp, Homo sapiens; identical to SEQ ID NO: 250231
  chr2:10536068-10536110
  hypo

SEQ ID NO: 385186 - DNA, 100 bp, Homo sapiens; identical to SEQ ID NO: 207820
  chr2:10601535-10601635
  hypo

SEQ ID NO: 385187 - DNA, 79 bp, Homo sapiens; identical to SEQ ID NO: 207821
  chr2:10615284-10615363
  hypo

SEQ ID NO: 385188 - DNA, 461 bp, Homo sapiens; identical to SEQ ID NO: 250252
  chr2:10686607-10687068
  hypo

SEQ ID NO: 385189 - DNA, 241 bp, Homo sapiens; identical to SEQ ID NO: 250265
  chr2:11238183-11238424
  hypo

SEQ ID NO: 385190 - DNA, 87 bp, Homo sapiens; identical to SEQ ID NO: 105506
  chr2:16080304-16080391
  hypo

SEQ ID NO: 385191 - DNA, 39 bp, Homo sapiens; identical to SEQ ID NO: 250300
  chr2:17090481-17090520
  hypo

SEQ ID NO: 385192 - DNA, 284 bp, Homo sapiens; identical to SEQ ID NO: 250303
  chr2:18112741-18113025
  hypo

SEQ ID NO: 385193 - DNA, 81 bp, Homo sapiens; identical to SEQ ID NO: 250308
  chr2:20521041-20521122
  hypo

SEQ ID NO: 385194 - DNA, 101 bp, Homo sapiens; identical to SEQ ID NO: 250318
  chr2:21079879-21079980
  hypo

SEQ ID NO: 385195 - DNA, 174 bp, Homo sapiens; identical to SEQ ID NO: 207859
  chr2:24060295-24060469
  hypo

SEQ ID NO: 385196 - DNA, 155 bp, Homo sapiens; identical to SEQ ID NO: 250349
  chr2:25034777-25034932
  hypo

SEQ ID NO: 385197 - DNA, 139 bp, Homo sapiens; identical to SEQ ID NO: 198123
  chr2:25458563-25458702
  hypo

SEQ ID NO: 385198 - DNA, 162 bp, Homo sapiens; identical to SEQ ID NO: 198133
  chr2:25470449-25470611
  hypo

SEQ ID NO: 385199 - DNA, 188 bp, Homo sapiens; identical to SEQ ID NO: 250358
  chr2:25533430-25533618
  hypo

SEQ ID NO: 385200 - DNA, 94 bp, Homo sapiens; identical to SEQ ID NO: 207897
  chr2:26832824-26832918
  hypo

SEQ ID NO: 385201 - DNA, 35 bp, Homo sapiens; identical to SEQ ID NO: 250407
  chr2:27764227-27764262
  hypo

SEQ ID NO: 385202 - DNA, 210 bp, Homo sapiens; identical to SEQ ID NO: 250419
  chr2:30480379-30480589
  hypo

SEQ ID NO: 385203 - DNA, 111 bp, Homo sapiens; identical to SEQ ID NO: 250431
  chr2:31480365-31480476
  hypo

SEQ ID NO: 385204 - DNA, 40 bp, Homo sapiens; identical to SEQ ID NO: 250439
  chr2:32315098-32315138
  hypo

SEQ ID NO: 385205 - DNA, 156 bp, Homo sapiens; identical to SEQ ID NO: 250453
  chr2:33534845-33535001
  hypo

SEQ ID NO: 385206 - DNA, 99 bp, Homo sapiens; identical to SEQ ID NO: 250461
  chr2:37027667-37027766
  hypo

SEQ ID NO: 385207 - DNA, 221 bp, Homo sapiens; identical to SEQ ID NO: 250473
  chr2:38489624-38489845
  hypo

SEQ ID NO: 385208 - DNA, 120 bp, Homo sapiens; identical to SEQ ID NO: 207936
  chr2:39016315-39016435
  hypo

SEQ ID NO: 385209 - DNA, 205 bp, Homo sapiens; identical to SEQ ID NO: 207962
  chr2:45927198-45927403
  hypo

SEQ ID NO: 385210 - DNA, 223 bp, Homo sapiens; identical to SEQ ID NO: 250551
  chr2:47095093-47095316
  hypo

SEQ ID NO: 385211 - DNA, 438 bp, Homo sapiens; identical to SEQ ID NO: 221743
  chr2:47630103-47630541
  hypo

SEQ ID NO: 385212 - DNA, 2545 bp, Homo sapiens; identical to SEQ ID NO: 221764
  chr2:48025749-48028294
  hypo

SEQ ID NO: 385213 - DNA, 266 bp, Homo sapiens; identical to SEQ ID NO: 221765
  chr2:48030558-48030824
  hypo

SEQ ID NO: 385214 - DNA, 107 bp, Homo sapiens; identical to SEQ ID NO: 250572
  chr2:48742859-48742966
  hypo

SEQ ID NO: 385215 - DNA, 91 bp, Homo sapiens; identical to SEQ ID NO: 207980
  chr2:49621663-49621754
  hypo

SEQ ID NO: 385216 - DNA, 42 bp, Homo sapiens; identical to SEQ ID NO: 250596
  chr2:55825329-55825371
  hypo

SEQ ID NO: 385217 - DNA, 34 bp, Homo sapiens; identical to SEQ ID NO: 250600
  chr2:58788931-58788965
  hypo

SEQ ID NO: 385218 - DNA, 36 bp, Homo sapiens; identical to SEQ ID NO: 207990
  chr2:60705871-60705907
  hypo

SEQ ID NO: 385219 - DNA, 53 bp, Homo sapiens; identical to SEQ ID NO: 207995
  chr2:61175238-61175291
  hypo

SEQ ID NO: 385220 - DNA, 40 bp, Homo sapiens; identical to SEQ ID NO: 250618
  chr2:61186779-61186819
  hypo

SEQ ID NO: 385221 - DNA, 342 bp, Homo sapiens; identical to SEQ ID NO: 221777
  chr2:61990960-61991302
  hypo

SEQ ID NO: 385222 - DNA, 237 bp, Homo sapiens; identical to SEQ ID NO: 208010
  chr2:63123375-63123612
  hypo

SEQ ID NO: 385223 - DNA, 34 bp, Homo sapiens; identical to SEQ ID NO: 250663
  chr2:67721499-67721533
  hypo

SEQ ID NO: 385224 - DNA, 53 bp, Homo sapiens; identical to SEQ ID NO: 221793
  chr2:71502836-71502889
  hypo

SEQ ID NO: 385225 - DNA, 89 bp, Homo sapiens; identical to SEQ ID NO: 208063
  chr2:79933147-79933236
  hypo

SEQ ID NO: 385226 - DNA, 37 bp, Homo sapiens; identical to SEQ ID NO: 208064
  chr2:85227244-85227281
  hypo

SEQ ID NO: 385227 - DNA, 155 bp, Homo sapiens; identical to SEQ ID NO: 250745
  chr2:85596563-85596718
  hypo

SEQ ID NO: 385228 - DNA, 47 bp, Homo sapiens
  chr2:85878798-85878845
  hypo
gagaaatgtctctgaggtggcaggcccctgaattgtttgtttgtttg

SEQ ID NO: 385229 - DNA, 60 bp, Homo sapiens; identical to SEQ ID NO: 208082
  chr2:86425628-86425688
  hypo

SEQ ID NO: 385230 - DNA, 196 bp, Homo sapiens; identical to SEQ ID NO: 250773
  chr2:88559425-88559621
  hypo

SEQ ID NO: 385231 - DNA, 345 bp, Homo sapiens; identical to SEQ ID NO: 280001
  chr2:95825283-95825628
  hypo

SEQ ID NO: 385232 - DNA, 37 bp, Homo sapiens; identical to SEQ ID NO: 250792
  chr2:96839116-96839153
  hypo

SEQ ID NO: 385233 - DNA, 33 bp, Homo sapiens; identical to SEQ ID NO: 250793
  chr2:96993131-96993164
  hypo

SEQ ID NO: 385234 - DNA, 129 bp, Homo sapiens; identical to SEQ ID NO: 250807
  chr2:97436177-97436306
  hypo

SEQ ID NO: 385235 - DNA, 156 bp, Homo sapiens; identical to SEQ ID NO: 221833
  chr2:97482863-97483019
  hypo

SEQ ID NO: 385236 - DNA, 36 bp, Homo sapiens; identical to SEQ ID NO: 208108
  chr2:97485727-97485763
  hypo

SEQ ID NO: 385237 - DNA, 32 bp, Homo sapiens; identical to SEQ ID NO: 250827
  chr2:97578424-97578456
  hypo

SEQ ID NO: 385238 - DNA, 163 bp, Homo sapiens; identical to SEQ ID NO: 250883
  chr2:102232955-102233118
  hypo

SEQ ID NO: 385239 - DNA, 55 bp, Homo sapiens; identical to SEQ ID NO: 250902
  chr2:105859043-105859098
  hypo

SEQ ID NO: 385240 - DNA, 36 bp, Homo sapiens; identical to SEQ ID NO: 208155
  chr2:106081974-106082010
  hypo

SEQ ID NO: 385241 - DNA, 241 bp, Homo sapiens; identical to SEQ ID NO: 250913
  chr2:106227199-106227440
  hypo

SEQ ID NO: 385242 - DNA, 162 bp, Homo sapiens; identical to SEQ ID NO: 221851
  chr2:106362018-106362180
  hypo

SEQ ID NO: 385243 - DNA, 240 bp, Homo sapiens; identical to SEQ ID NO: 250918
  chr2:106713428-106713668
  hypo

SEQ ID NO: 385244 - DNA, 87 bp, Homo sapiens; identical to SEQ ID NO: 208166
  chr2:108918020-108918107
  hypo

SEQ ID NO: 385245 - DNA, 37 bp, Homo sapiens; identical to SEQ ID NO: 208183
  chr2:110352252-110352289
  hypo

SEQ ID NO: 385246 - DNA, 145 bp, Homo sapiens; identical to SEQ ID NO: 250972
  chr2:110855514-110855659
  hypo

SEQ ID NO: 385247 - DNA, 175 bp, Homo sapiens; identical to SEQ ID NO: 250973
  chr2:110861845-110862020
  hypo

SEQ ID NO: 385248 - DNA, 32 bp, Homo sapiens; identical to SEQ ID NO: 300044
  chr2:111438523-111438555
  hypo

SEQ ID NO: 385249 - DNA, 142 bp, Homo sapiens; identical to SEQ ID NO: 250985
  chr2:112810885-112811027
  hypo

SEQ ID NO: 385250 - DNA, 188 bp, Homo sapiens; identical to SEQ ID NO: 208196
  chr2:113973331-113973519
  hypo

SEQ ID NO: 385251 - DNA, 82 bp, Homo sapiens; identical to SEQ ID NO: 208201
  chr2:120069741-120069823
  hypo

SEQ ID NO: 385252 - DNA, 88 bp, Homo sapiens; identical to SEQ ID NO: 208219
  chr2:122102164-122102252
  hypo

SEQ ID NO: 385253 - DNA, 46 bp, Homo sapiens; identical to SEQ ID NO: 251070
  chr2:122260203-122260249
  hypo

SEQ ID NO: 385254 - DNA, 31 bp, Homo sapiens; identical to SEQ ID NO: 208222
  chr2:122497730-122497761
  hypo

SEQ ID NO: 385255 - DNA, 314 bp, Homo sapiens; identical to SEQ ID NO: 251085
  chr2:127734331-127734645
  hypo

SEQ ID NO: 385256 - DNA, 215 bp, Homo sapiens; identical to SEQ ID NO: 251090
  chr2:127933496-127933711
  hypo

SEQ ID NO: 385257 - DNA, 78 bp, Homo sapiens; identical to SEQ ID NO: 208229
  chr2:128273731-128273809
  hypo

SEQ ID NO: 385258 - DNA, 77 bp, Homo sapiens; identical to SEQ ID NO: 208230
  chr2:128273869-128273946
  hypo

SEQ ID NO: 385259 - DNA, 152 bp, Homo sapiens; identical to SEQ ID NO: 251119
  chr2:129539249-129539401
  hypo

SEQ ID NO: 385260 - DNA, 128 bp, Homo sapiens; identical to SEQ ID NO: 251131
  chr2:131116461-131116589
  hypo

SEQ ID NO: 385261 - DNA, 138 bp, Homo sapiens; identical to SEQ ID NO: 208245
  chr2:131639163-131639301
  hypo

SEQ ID NO: 385262 - DNA, 39 bp, Homo sapiens; identical to SEQ ID NO: 208246
  chr2:131639331-131639370
  hypo

SEQ ID NO: 385263 - DNA, 159 bp, Homo sapiens; identical to SEQ ID NO: 208251
  chr2:132348675-132348834
  hypo

SEQ ID NO: 385264 - DNA, 99 bp, Homo sapiens; identical to SEQ ID NO: 198434
  chr2:132767530-132767629
  hypo

SEQ ID NO: 385265 - DNA, 217 bp, Homo sapiens; identical to SEQ ID NO: 251158
  chr2:135926165-135926382
  hypo

SEQ ID NO: 385266 - DNA, 164 bp, Homo sapiens; identical to SEQ ID NO: 251161
  chr2:136721521-136721685
  hypo

SEQ ID NO: 385267 - DNA, 74 bp, Homo sapiens; identical to SEQ ID NO: 251169
  chr2:144227051-144227125
  hypo

SEQ ID NO: 385268 - DNA, 37 bp, Homo sapiens; identical to SEQ ID NO: 208271
  chr2:149045675-149045712
  hypo

SEQ ID NO: 385269 - DNA, 194 bp, Homo sapiens; identical to SEQ ID NO: 208272
  chr2:149227323-149227517
  hypo

SEQ ID NO: 385270 - DNA, 237 bp, Homo sapiens; identical to SEQ ID NO: 383864
  chr2:150186614-150186851
  hypo

SEQ ID NO: 385271 - DNA, 33 bp, Homo sapiens; identical to SEQ ID NO: 251187
  chr2:152265327-152265360
  hypo

SEQ ID NO: 385272 - DNA, 148 bp, Homo sapiens; identical to SEQ ID NO: 221906
  chr2:157189365-157189513
  hypo

SEQ ID NO: 385273 - DNA, 138 bp, Homo sapiens; identical to SEQ ID NO: 251220
  chr2:164966392-164966530
  hypo

SEQ ID NO: 385274 - DNA, 214 bp, Homo sapiens; identical to SEQ ID NO: 208307
  chr2:165637158-165637372
  hypo

SEQ ID NO: 385275 - DNA, 31 bp, Homo sapiens; identical to SEQ ID NO: 251231
  chr2:169561397-169561428
  hypo

SEQ ID NO: 385276 - DNA, 72 bp, Homo sapiens; identical to SEQ ID NO: 251268
  chr2:175113858-175113930
  hypo

SEQ ID NO: 385277 - DNA, 32 bp, Homo sapiens; identical to SEQ ID NO: 208345
  chr2:176569574-176569606
  hypo

SEQ ID NO: 385278 - DNA, 84 bp, Homo sapiens; identical to SEQ ID NO: 208371
  chr2:192342592-192342676
  hypo

SEQ ID NO: 385279 - DNA, 42 bp, Homo sapiens; identical to SEQ ID NO: 251306
  chr2:196362209-196362251
  hypo

SEQ ID NO: 385280 - DNA, 44 bp, Homo sapiens; identical to SEQ ID NO: 208374
  chr2:196402553-196402597
  hypo

SEQ ID NO: 385281 - DNA, 31 bp, Homo sapiens; identical to SEQ ID NO: 251312
  chr2:197003966-197003997
  hypo

SEQ ID NO: 385282 - DNA, 178 bp, Homo sapiens; identical to SEQ ID NO: 198634
  chr2:198265429-198265607
  hypo

SEQ ID NO: 385283 - DNA, 70 bp, Homo sapiens; identical to SEQ ID NO: 198637
  chr2:198268366-198268436
  hypo

SEQ ID NO: 385284 - DNA, 339 bp, Homo sapiens; identical to SEQ ID NO: 251325
  chr2:201652446-201652785
  hypo

SEQ ID NO: 385285 - DNA, 43 bp, Homo sapiens; identical to SEQ ID NO: 251334
  chr2:202893412-202893455
  hypo

SEQ ID NO: 385286 - DNA, 31 bp, Homo sapiens; identical to SEQ ID NO: 251347
  chr2:204206113-204206144
  hypo

SEQ ID NO: 385287 - DNA, 153 bp, Homo sapiens; identical to SEQ ID NO: 208409
  chr2:206826960-206827113
  hypo

SEQ ID NO: 385288 - DNA, 44 bp, Homo sapiens; identical to SEQ ID NO: 251392
  chr2:215581840-215581884
  hypo

SEQ ID NO: 385289 - DNA, 58 bp, Homo sapiens; identical to SEQ ID NO: 251394
  chr2:216195106-216195164
  hypo

SEQ ID NO: 385290 - DNA, 45 bp, Homo sapiens; identical to SEQ ID NO: 208432
  chr2:216852232-216852277
  hypo

SEQ ID NO: 385291 - DNA, 183 bp, Homo sapiens; identical to SEQ ID NO: 208433
  chr2:216885426-216885609
  hypo

SEQ ID NO: 385292 - DNA, 177 bp, Homo sapiens; identical to SEQ ID NO: 208461
  chr2:219892664-219892841
  hypo

SEQ ID NO: 385293 - DNA, 130 bp, Homo sapiens; identical to SEQ ID NO: 251452
  chr2:220161581-220161711
  hypo

SEQ ID NO: 385294 - DNA, 234 bp, Homo sapiens; identical to SEQ ID NO: 251458
  chr2:220419207-220419441
  hypo

SEQ ID NO: 385295 - DNA, 119 bp, Homo sapiens; identical to SEQ ID NO: 251469
  chr2:220505456-220505575
  hypo

SEQ ID NO: 385296 - DNA, 230 bp, Homo sapiens; identical to SEQ ID NO: 251472
  chr2:222389989-222390219
  hypo

SEQ ID NO: 385297 - DNA, 82 bp, Homo sapiens; identical to SEQ ID NO: 222033
  chr2:233284387-233284469
  hypo

SEQ ID NO: 385298 - DNA, 291 bp, Homo sapiens; identical to SEQ ID NO: 251557
  chr2:234394404-234394695
  hypo

SEQ ID NO: 385299 - DNA, 283 bp, Homo sapiens; identical to SEQ ID NO: 251559
  chr2:234399624-234399907
  hypo

SEQ ID NO: 385300 - DNA, 46 bp, Homo sapiens; identical to SEQ ID NO: 251561
  chr2:234545415-234545461
  hypo

SEQ ID NO: 385301 - DNA, 186 bp, Homo sapiens; identical to SEQ ID NO: 251582
  chr2:236015360-236015546
  hypo

SEQ ID NO: 385302 - DNA, 421 bp, Homo sapiens; identical to SEQ ID NO: 251607
  chr2:236663445-236663866
  hypo

SEQ ID NO: 385303 - DNA, 328 bp, Homo sapiens; identical to SEQ ID NO: 251615
  chr2:236716147-236716475
  hypo

SEQ ID NO: 385304 - DNA, 176 bp, Homo sapiens; identical to SEQ ID NO: 251654
  chr2:236950837-236951013
  hypo

SEQ ID NO: 385305 - DNA, 45 bp, Homo sapiens; identical to SEQ ID NO: 251656
  chr2:236970389-236970434
  hypo

SEQ ID NO: 385306 - DNA, 54 bp, Homo sapiens; identical to SEQ ID NO: 251677
  chr2:237925352-237925406
  hypo

SEQ ID NO: 385307 - DNA, 41 bp, Homo sapiens; identical to SEQ ID NO: 251686
  chr2:238392737-238392778
  hypo

SEQ ID NO: 385308 - DNA, 332 bp, Homo sapiens; identical to SEQ ID NO: 251694
  chr2:238706995-238707327
  hypo

SEQ ID NO: 385309 - DNA, 56 bp, Homo sapiens; identical to SEQ ID NO: 251736
  chr2:239467687-239467743
  hypo

SEQ ID NO: 385310 - DNA, 205 bp, Homo sapiens; identical to SEQ ID NO: 251750
  chr2:239986521-239986726
  hypo

SEQ ID NO: 385311 - DNA, 169 bp, Homo sapiens; identical to SEQ ID NO: 251754
  chr2:240014779-240014948
  hypo

SEQ ID NO: 385312 - DNA, 274 bp, Homo sapiens; identical to SEQ ID NO: 300992
  chr2:240103304-240103578
  hypo

SEQ ID NO: 385313 - DNA, 42 bp, Homo sapiens; identical to SEQ ID NO: 251797
  chr2:240342330-240342372
  hypo

SEQ ID NO: 385314 - DNA, 110 bp, Homo sapiens; identical to SEQ ID NO: 251807
  chr2:240618673-240618783
  hypo

SEQ ID NO: 385315 - DNA, 225 bp, Homo sapiens; identical to SEQ ID NO: 251808
  chr2:240639523-240639748
  hypo

SEQ ID NO: 385316 - DNA, 151 bp, Homo sapiens; identical to SEQ ID NO: 251809
  chr2:240643423-240643574
  hypo

SEQ ID NO: 385317 - DNA, 138 bp, Homo sapiens; identical to SEQ ID NO: 251822
  chr2:240756517-240756655
  hypo

SEQ ID NO: 385318 - DNA, 195 bp, Homo sapiens; identical to SEQ ID NO: 251835
  chr2:241130457-241130652
  hypo

SEQ ID NO: 385319 - DNA, 194 bp, Homo sapiens; identical to SEQ ID NO: 208660
  chr2:241328246-241328440
  hypo

SEQ ID NO: 385320 - DNA, 114 bp, Homo sapiens; identical to SEQ ID NO: 251855
  chr2:241381612-241381726
  hypo

SEQ ID NO: 385321 - DNA, 48 bp, Homo sapiens; identical to SEQ ID NO: 208665
  chr2:241543042-241543090
  hypo

SEQ ID NO: 385322 - DNA, 229 bp, Homo sapiens; identical to SEQ ID NO: 208671
  chr2:241721305-241721534
  hypo

SEQ ID NO: 385323 - DNA, 61 bp, Homo sapiens
  chr2:241721587-241721648
  hypo
ccgcctccccctgtggccccgtcacgcctacggctgctcagagtccagcacgcctgtcacc

SEQ ID NO: 385324 - DNA, 156 bp, Homo sapiens; identical to SEQ ID NO: 208675
  chr2:241750153-241750309
  hypo

SEQ ID NO: 385325 - DNA, 255 bp, Homo sapiens; identical to SEQ ID NO: 251908
  chr2:242277632-242277887
  hypo

SEQ ID NO: 385326 - DNA, 413 bp, Homo sapiens; identical to SEQ ID NO: 251917
  chr2:242438422-242438835
  hypo

SEQ ID NO: 385327 - DNA, 162 bp, Homo sapiens; identical to SEQ ID NO: 208693
  chr2:242439377-242439539
  hypo

SEQ ID NO: 385328 - DNA, 95 bp, Homo sapiens; identical to SEQ ID NO: 208694
  chr2:242439569-242439664
  hypo

SEQ ID NO: 385329 - DNA, 171 bp, Homo sapiens; identical to SEQ ID NO: 208715
  chr2:242755673-242755844
  hypo

SEQ ID NO: 385330 - DNA, 85 bp, Homo sapiens; identical to SEQ ID NO: 251963
  chr2:242845592-242845677
  hypo

SEQ ID NO: 385331 - DNA, 189 bp, Homo sapiens; identical to SEQ ID NO: 208720
  chr2:242887764-242887953
  hypo

SEQ ID NO: 385332 - DNA, 113 bp, Homo sapiens; identical to SEQ ID NO: 251970
  chr2:242948202-242948315
  hypo

SEQ ID NO: 385333 - DNA, 61 bp, Homo sapiens; identical to SEQ ID NO: 301213
  chr3:3167927-3167988
  hypo

SEQ ID NO: 385334 - DNA, 37 bp, Homo sapiens; identical to SEQ ID NO: 208728
  chr3:4993606-4993643
  hypo

SEQ ID NO: 385335 - DNA, 35 bp, Homo sapiens; identical to SEQ ID NO: 251992
  chr3:6110078-6110113
  hypo

SEQ ID NO: 385336 - DNA, 88 bp, Homo sapiens; identical to SEQ ID NO: 252032
  chr3:11595081-11595169
  hypo

SEQ ID NO: 385337 - DNA, 357 bp, Homo sapiens; identical to SEQ ID NO: 252033
  chr3:11600065-11600422
  hypo

SEQ ID NO: 385338 - DNA, 32 bp, Homo sapiens; identical to SEQ ID NO: 252035
  chr3:11607101-11607133
  hypo

SEQ ID NO: 385339 - DNA, 39 bp, Homo sapiens; identical to SEQ ID NO: 252042
  chr3:12558547-12558586
  hypo

SEQ ID NO: 385340 - DNA, 43 bp, Homo sapiens; identical to SEQ ID NO: 208761
  chr3:12940404-12940447
  hypo

SEQ ID NO: 385341 - DNA, 439 bp, Homo sapiens; identical to SEQ ID NO: 252060
  chr3:12984507-12984946
  hypo

SEQ ID NO: 385342 - DNA, 94 bp, Homo sapiens; identical to SEQ ID NO: 208769
  chr3:13205534-13205628
  hypo

SEQ ID NO: 385343 - DNA, 44 bp, Homo sapiens; identical to SEQ ID NO: 252073
  chr3:14208688-14208732
  hypo

SEQ ID NO: 385344 - DNA, 265 bp, Homo sapiens; identical to SEQ ID NO: 208774
  chr3:14384852-14385117
  hypo

SEQ ID NO: 385345 - DNA, 38 bp, Homo sapiens; identical to SEQ ID NO: 252114
  chr3:20630727-20630765
  hypo

SEQ ID NO: 385346 - DNA, 36 bp, Homo sapiens; identical to SEQ ID NO: 252128
  chr3:27563872-27563908
  hypo

SEQ ID NO: 385347 - DNA, 37 bp, Homo sapiens; identical to SEQ ID NO: 208809
  chr3:31717147-31717184
  hypo

SEQ ID NO: 385348 - DNA, 41 bp, Homo sapiens; identical to SEQ ID NO: 252140
  chr3:32886051-32886092
  hypo

SEQ ID NO: 385349 - DNA, 154 bp, Homo sapiens; identical to SEQ ID NO: 222110
  chr3:37061800-37061954
  hypo

SEQ ID NO: 385350 - DNA, 165 bp, Homo sapiens; identical to SEQ ID NO: 222115
  chr3:37089009-37089174
  hypo

SEQ ID NO: 385351 - DNA, 38 bp, Homo sapiens; identical to SEQ ID NO: 252153
  chr3:37214389-37214427
  hypo

SEQ ID NO: 385352 - DNA, 100 bp, Homo sapiens; identical to SEQ ID NO: 252164
  chr3:38413411-38413511
  hypo

SEQ ID NO: 385353 - DNA, 110 bp, Homo sapiens; identical to SEQ ID NO: 208844
  chr3:43121573-43121683
  hypo

SEQ ID NO: 385354 - DNA, 214 bp, Homo sapiens; identical to SEQ ID NO: 198903
  chr3:43663334-43663548
  hypo

SEQ ID NO: 385355 - DNA, 291 bp, Homo sapiens; identical to SEQ ID NO: 252204
  chr3:44752300-44752591
  hypo

SEQ ID NO: 385356 - DNA, 35 bp, Homo sapiens; identical to SEQ ID NO: 252223
  chr3:46769817-46769852
  hypo

SEQ ID NO: 385357 - DNA, 78 bp, Homo sapiens; identical to SEQ ID NO: 222142
  chr3:47050739-47050817
  hypo

SEQ ID NO: 385358 - DNA, 138 bp, Homo sapiens; identical to SEQ ID NO: 252237
  chr3:47373436-47373574
  hypo

SEQ ID NO: 385359 - DNA, 35 bp, Homo sapiens; identical to SEQ ID NO: 252245
  chr3:48316727-48316762
  hypo

SEQ ID NO: 385360 - DNA, 76 bp, Homo sapiens; identical to SEQ ID NO: 252246
  chr3:48456672-48456748
  hypo

SEQ ID NO: 385361 - DNA, 76 bp, Homo sapiens; identical to SEQ ID NO: 252255
  chr3:48659179-48659255
  hypo

SEQ ID NO: 385362 - DNA, 40 bp, Homo sapiens; identical to SEQ ID NO: 252257
  chr3:48702183-48702223
  hypo

SEQ ID NO: 385363 - DNA, 120 bp, Homo sapiens; identical to SEQ ID NO: 252268
  chr3:49014624-49014744
  hypo

SEQ ID NO: 385364 - DNA, 32 bp, Homo sapiens; identical to SEQ ID NO: 252277
  chr3:49522230-49522262
  hypo

SEQ ID NO: 385365 - DNA, 100 bp, Homo sapiens; identical to SEQ ID NO: 252293
  chr3:50140300-50140400
  hypo

SEQ ID NO: 385366 - DNA, 126 bp, Homo sapiens; identical to SEQ ID NO: 252297
  chr3:50214171-50214297
  hypo

SEQ ID NO: 385367 - DNA, 147 bp, Homo sapiens; identical to SEQ ID NO: 222158
  chr3:53190592-53190739
  hypo

SEQ ID NO: 385368 - DNA, 59 bp, Homo sapiens; identical to SEQ ID NO: 208914
  chr3:53857419-53857478
  hypo

SEQ ID NO: 385369 - DNA, 180 bp, Homo sapiens; identical to SEQ ID NO: 252366
  chr3:57544507-57544687
  hypo

SEQ ID NO: 385370 - DNA, 51 bp, Homo sapiens; identical to SEQ ID NO: 252390
  chr3:66460441-66460492
  hypo

SEQ ID NO: 385371 - DNA, 80 bp, Homo sapiens; identical to SEQ ID NO: 252419
  chr3:71408816-71408896
  hypo

SEQ ID NO: 385372 - DNA, 65 bp, Homo sapiens; identical to SEQ ID NO: 252422
  chr3:71496761-71496826
  hypo

SEQ ID NO: 385373 - DNA, 158 bp, Homo sapiens; identical to SEQ ID NO: 252504
  chr3:120064577-120064735
  hypo

SEQ ID NO: 385374 - DNA, 57 bp, Homo sapiens; identical to SEQ ID NO: 252519
  chr3:122355300-122355357
  hypo

SEQ ID NO: 385375 - DNA, 455 bp, Homo sapiens; identical to SEQ ID NO: 209007
  chr3:123166198-123166653
  hypo

SEQ ID NO: 385376 - DNA, 39 bp, Homo sapiens; identical to SEQ ID NO: 252542
  chr3:125210665-125210704
  hypo

SEQ ID NO: 385377 - DNA, 170 bp, Homo sapiens; identical to SEQ ID NO: 252549
  chr3:125679708-125679878
  hypo

SEQ ID NO: 385378 - DNA, 189 bp, Homo sapiens; identical to SEQ ID NO: 252555
  chr3:125977272-125977461
  hypo

SEQ ID NO: 385379 - DNA, 36 bp, Homo sapiens; identical to SEQ ID NO: 252557
  chr3:126137173-126137209
  hypo

SEQ ID NO: 385380 - DNA, 158 bp, Homo sapiens; identical to SEQ ID NO: 252564
  chr3:126274128-126274286
  hypo

SEQ ID NO: 385381 - DNA, 207 bp, Homo sapiens; identical to SEQ ID NO: 199079
  chr3:127348123-127348330
  hypo

SEQ ID NO: 385382 - DNA, 203 bp, Homo sapiens; identical to SEQ ID NO: 252585
  chr3:127349664-127349867
  hypo

SEQ ID NO: 385383 - DNA, 120 bp, Homo sapiens; identical to SEQ ID NO: 252654
  chr3:131595102-131595222
  hypo

SEQ ID NO: 385384 - DNA, 151 bp, Homo sapiens; identical to SEQ ID NO: 209058
  chr3:132034534-132034685
  hypo

SEQ ID NO: 385385 - DNA, 227 bp, Homo sapiens; identical to SEQ ID NO: 209063
  chr3:133648404-133648631
  hypo

SEQ ID NO: 385386 - DNA, 52 bp, Homo sapiens; identical to SEQ ID NO: 199100
  chr3:133969907-133969959
  hypo

SEQ ID NO: 385387 - DNA, 195 bp, Homo sapiens; identical to SEQ ID NO: 252683
  chr3:137783021-137783216
  hypo

SEQ ID NO: 385388 - DNA, 34 bp, Homo sapiens; identical to SEQ ID NO: 209076
  chr3:138001202-138001236
  hypo

SEQ ID NO: 385389 - DNA, 42 bp, Homo sapiens; identical to SEQ ID NO: 302077
  chr3:140434249-140434291
  hypo

SEQ ID NO: 385390 - DNA, 35 bp, Homo sapiens; identical to SEQ ID NO: 209094
  chr3:141954424-141954459
  hypo

SEQ ID NO: 385391 - DNA, 54 bp, Homo sapiens; identical to SEQ ID NO: 252747
  chr3:148802384-148802438
  hypo

SEQ ID NO: 385392 - DNA, 159 bp, Homo sapiens; identical to SEQ ID NO: 252765
  chr3:150379955-150380114
  hypo

SEQ ID NO: 385393 - DNA, 186 bp, Homo sapiens; identical to SEQ ID NO: 209118
  chr3:150497417-150497603
  hypo

SEQ ID NO: 385394 - DNA, 37 bp, Homo sapiens; identical to SEQ ID NO: 252779
  chr3:153404031-153404068
  hypo

SEQ ID NO: 385395 - DNA, 211 bp, Homo sapiens; identical to SEQ ID NO: 222257
  chr3:159706814-159707025
  hypo

SEQ ID NO: 385396 - DNA, 35 bp, Homo sapiens; identical to SEQ ID NO: 252803
  chr3:160863217-160863252
  hypo

SEQ ID NO: 385397 - DNA, 112 bp, Homo sapiens; identical to SEQ ID NO: 252805
  chr3:166834368-166834480
  hypo

SEQ ID NO: 385398 - DNA, 37 bp, Homo sapiens; identical to SEQ ID NO: 252808
  chr3:168197107-168197144
  hypo

SEQ ID NO: 385399 - DNA, 87 bp, Homo sapiens; identical to SEQ ID NO: 222261
  chr3:169380983-169381070
  hypo

SEQ ID NO: 385400 - DNA, 40 bp, Homo sapiens; identical to SEQ ID NO: 252825
  chr3:170154037-170154077
  hypo

SEQ ID NO: 385401 - DNA, 193 bp, Homo sapiens; identical to SEQ ID NO: 302235
  chr3:172033319-172033512
  hypo

SEQ ID NO: 385402 - DNA, 32 bp, Homo sapiens; identical to SEQ ID NO: 209167
  chr3:175307701-175307733
  hypo

SEQ ID NO: 385403 - DNA, 34 bp, Homo sapiens; identical to SEQ ID NO: 252875
  chr3:176893551-176893585
  hypo

SEQ ID NO: 385404 - DNA, 230 bp, Homo sapiens; identical to SEQ ID NO: 252883
  chr3:177094901-177095131
  hypo

SEQ ID NO: 385405 - DNA, 43 bp, Homo sapiens; identical to SEQ ID NO: 252890
  chr3:177829173-177829216
  hypo

SEQ ID NO: 385406 - DNA, 373 bp, Homo sapiens; identical to SEQ ID NO: 252902
  chr3:179449287-179449660
  hypo

SEQ ID NO: 385407 - DNA, 220 bp, Homo sapiens; identical to SEQ ID NO: 209202
  chr3:183479752-183479972
  hypo

SEQ ID NO: 385408 - DNA, 55 bp, Homo sapiens; identical to SEQ ID NO: 209203
  chr3:183525222-183525277
  hypo

SEQ ID NO: 385409 - DNA, 48 bp, Homo sapiens; identical to SEQ ID NO: 252941
  chr3:183529223-183529271
  hypo

SEQ ID NO: 385410 - DNA, 199 bp, Homo sapiens; identical to SEQ ID NO: 252958
  chr3:183720218-183720417
  hypo

SEQ ID NO: 385411 - DNA, 86 bp, Homo sapiens; identical to SEQ ID NO: 199238
  chr3:183851915-183852001
  hypo

SEQ ID NO: 385412 - DNA, 105 bp, Homo sapiens; identical to SEQ ID NO: 222283
  chr3:184097688-184097793
  hypo

SEQ ID NO: 385413 - DNA, 171 bp, Homo sapiens; identical to SEQ ID NO: 209227
  chr3:184273717-184273888
  hypo

SEQ ID NO: 385414 - DNA, 31 bp, Homo sapiens; identical to SEQ ID NO: 252990
  chr3:184294858-184294889
  hypo

SEQ ID NO: 385415 - DNA, 92 bp, Homo sapiens; identical to SEQ ID NO: 209241
  chr3:184833749-184833841
  hypo

SEQ ID NO: 385416 - DNA, 119 bp, Homo sapiens; identical to SEQ ID NO: 209245
  chr3:185277645-185277764
  hypo

SEQ ID NO: 385417 - DNA, 161 bp, Homo sapiens; identical to SEQ ID NO: 209246
  chr3:185277844-185278005
  hypo

SEQ ID NO: 385418 - DNA, 67 bp, Homo sapiens; identical to SEQ ID NO: 209247
  chr3:185303180-185303247
  hypo

SEQ ID NO: 385419 - DNA, 94 bp, Homo sapiens; identical to SEQ ID NO: 209281
  chr3:188353741-188353835
  hypo

SEQ ID NO: 385420 - DNA, 99 bp, Homo sapiens; identical to SEQ ID NO: 253086
  chr3:193489691-193489790
  hypo

SEQ ID NO: 385421 - DNA, 35 bp, Homo sapiens; identical to SEQ ID NO: 209295
  chr3:193503310-193503345
  hypo

SEQ ID NO: 385422 - DNA, 93 bp, Homo sapiens; identical to SEQ ID NO: 253106
  chr3:194058380-194058473
  hypo

SEQ ID NO: 385423 - DNA, 82 bp, Homo sapiens; identical to SEQ ID NO: 253109
  chr3:194078512-194078594
  hypo

SEQ ID NO: 385424 - DNA, 38 bp, Homo sapiens; identical to SEQ ID NO: 209323
  chr3:194799662-194799700
  hypo

SEQ ID NO: 385425 - DNA, 77 bp, Homo sapiens; identical to SEQ ID NO: 253146
  chr3:195139467-195139544
  hypo

SEQ ID NO: 385426 - DNA, 181 bp, Homo sapiens; identical to SEQ ID NO: 253156
  chr3:195573453-195573634
  hypo

SEQ ID NO: 385427 - DNA, 44 bp, Homo sapiens; identical to SEQ ID NO: 209357
  chr3:195990771-195990815
  hypo

SEQ ID NO: 385428 - DNA, 291 bp, Homo sapiens; identical to SEQ ID NO: 209368
  chr3:196723696-196723987
  hypo

SEQ ID NO: 385429 - DNA, 192 bp, Homo sapiens; identical to SEQ ID NO: 209375
  chr3:196817782-196817974
  hypo

SEQ ID NO: 385430 - DNA, 147 bp, Homo sapiens; identical to SEQ ID NO: 253229
  chr3:196907217-196907364
  hypo

SEQ ID NO: 385431 - DNA, 156 bp, Homo sapiens; identical to SEQ ID NO: 253231
  chr3:197027476-197027632
  hypo

SEQ ID NO: 385432 - DNA, 99 bp, Homo sapiens; identical to SEQ ID NO: 253252
  chr3:197401910-197402009
  hypo

SEQ ID NO: 385433 - DNA, 111 bp, Homo sapiens; identical to SEQ ID NO: 253268
  chr4:610967-611078
  hypo

SEQ ID NO: 385434 - DNA, 236 bp, Homo sapiens; identical to SEQ ID NO: 209403
  chr4:655879-656115
  hypo

SEQ ID NO: 385435 - DNA, 147 bp, Homo sapiens; identical to SEQ ID NO: 222329
  chr4:667619-667766
  hypo

SEQ ID NO: 385436 - DNA, 44 bp, Homo sapiens; identical to SEQ ID NO: 253278
  chr4:708090-708134
  hypo

SEQ ID NO: 385437 - DNA, 97 bp, Homo sapiens; identical to SEQ ID NO: 253292
  chr4:815186-815283
  hypo

SEQ ID NO: 385438 - DNA, 133 bp, Homo sapiens; identical to SEQ ID NO: 253321
  chr4:1012455-1012588
  hypo

SEQ ID NO: 385439 - DNA, 365 bp, Homo sapiens; identical to SEQ ID NO: 209443
  chr4:1222883-1223248
  hypo

SEQ ID NO: 385440 - DNA, 140 bp, Homo sapiens; identical to SEQ ID NO: 199293
  chr4:1243421-1243561
  hypo

SEQ ID NO: 385441 - DNA, 68 bp, Homo sapiens; identical to SEQ ID NO: 253373
  chr4:1334471-1334539
  hypo

SEQ ID NO: 385442 - DNA, 248 bp, Homo sapiens; identical to SEQ ID NO: 253378
  chr4:1354334-1354582
  hypo

SEQ ID NO: 385443 - DNA, 137 bp, Homo sapiens; identical to SEQ ID NO: 253381
  chr4:1411719-1411856
  hypo

SEQ ID NO: 385444 - DNA, 265 bp, Homo sapiens; identical to SEQ ID NO: 253395
  chr4:1626395-1626660
  hypo

SEQ ID NO: 385445 - DNA, 45 bp, Homo sapiens; identical to SEQ ID NO: 253397
  chr4:1642970-1643015
  hypo

SEQ ID NO: 385446 - DNA, 162 bp, Homo sapiens; identical to SEQ ID NO: 209471
  chr4:1656589-1656751
  hypo

SEQ ID NO: 385447 - DNA, 174 bp, Homo sapiens; identical to SEQ ID NO: 383989
  chr4:1794972-1795146
  hypo

SEQ ID NO: 385448 - DNA, 140 bp, Homo sapiens; identical to SEQ ID NO: 209491
  chr4:1835054-1835194
  hypo

SEQ ID NO: 385449 - DNA, 186 bp, Homo sapiens; identical to SEQ ID NO: 253451
  chr4:2303623-2303809
  hypo

SEQ ID NO: 385450 - DNA, 220 bp, Homo sapiens; identical to SEQ ID NO: 253478
  chr4:2687342-2687562
  hypo

SEQ ID NO: 385451 - DNA, 54 bp, Homo sapiens; identical to SEQ ID NO: 253482
  chr4:2745778-2745832
  hypo

SEQ ID NO: 385452 - DNA, 104 bp, Homo sapiens; identical to SEQ ID NO: 253484
  chr4:2806952-2807056
  hypo

SEQ ID NO: 385453 - DNA, 119 bp, Homo sapiens; identical to SEQ ID NO: 253501
  chr4:3265175-3265294
  hypo

SEQ ID NO: 385454 - DNA, 121 bp, Homo sapiens; identical to SEQ ID NO: 209523
  chr4:3292280-3292401
  hypo

SEQ ID NO: 385455 - DNA, 203 bp, Homo sapiens; identical to SEQ ID NO: 253505
  chr4:3310030-3310233
  hypo

SEQ ID NO: 385456 - DNA, 99 bp, Homo sapiens; identical to SEQ ID NO: 253513
  chr4:3375344-3375443
  hypo

SEQ ID NO: 385457 - DNA, 242 bp, Homo sapiens; identical to SEQ ID NO: 253518
  chr4:3416700-3416942
  hypo

SEQ ID NO: 385458 - DNA, 252 bp, Homo sapiens; identical to SEQ ID NO: 253537
  chr4:3515543-3515795
  hypo

SEQ ID NO: 385459 - DNA, 123 bp, Homo sapiens; identical to SEQ ID NO: 383992
  chr4:4861657-4861780
  hypo

SEQ ID NO: 385460 - DNA, 236 bp, Homo sapiens; identical to SEQ ID NO: 209549
  chr4:5970096-5970332
  hypo

SEQ ID NO: 385461 - DNA, 41 bp, Homo sapiens; identical to SEQ ID NO: 253571
  chr4:6658784-6658825
  hypo

SEQ ID NO: 385462 - DNA, 233 bp, Homo sapiens; identical to SEQ ID NO: 303025
  chr4:6669888-6670121
  hypo

SEQ ID NO: 385463 - DNA, 53 bp, Homo sapiens; identical to SEQ ID NO: 303026
  chr4:6670214-6670267
  hypo

SEQ ID NO: 385464 - DNA, 44 bp, Homo sapiens; identical to SEQ ID NO: 253618
  chr4:7791292-7791336
  hypo

SEQ ID NO: 385465 - DNA, 306 bp, Homo sapiens; identical to SEQ ID NO: 209572
  chr4:7813251-7813557
  hypo

SEQ ID NO: 385466 - DNA, 271 bp, Homo sapiens; identical to SEQ ID NO: 253638
  chr4:8285419-8285690
  hypo

SEQ ID NO: 385467 - DNA, 154 bp, Homo sapiens; identical to SEQ ID NO: 253646
  chr4:8411915-8412069
  hypo

SEQ ID NO: 385468 - DNA, 58 bp, Homo sapiens; identical to SEQ ID NO: 199347
  chr4:10089890-10089948
  hypo

SEQ ID NO: 385469 - DNA, 120 bp, Homo sapiens; identical to SEQ ID NO: 253678
  chr4:10447425-10447545
  hypo

SEQ ID NO: 385470 - DNA, 120 bp, Homo sapiens; identical to SEQ ID NO: 253689
  chr4:17438427-17438547
  hypo

SEQ ID NO: 385471 - DNA, 53 bp, Homo sapiens; identical to SEQ ID NO: 253713
  chr4:27570054-27570107
  hypo

SEQ ID NO: 385472 - DNA, 49 bp, Homo sapiens; identical to SEQ ID NO: 253718
  chr4:38016579-38016628
  hypo

SEQ ID NO: 385473 - DNA, 130 bp, Homo sapiens; identical to SEQ ID NO: 253720
  chr4:38313304-38313434
  hypo

SEQ ID NO: 385474 - DNA, 38 bp, Homo sapiens; identical to SEQ ID NO: 209629
  chr4:39964135-39964173
  hypo

SEQ ID NO: 385475 - DNA, 188 bp, Homo sapiens; identical to SEQ ID NO: 209635
  chr4:41012740-41012928
  hypo

SEQ ID NO: 385476 - DNA, 75 bp, Homo sapiens; identical to SEQ ID NO: 199422
  chr4:55569950-55570025
  hypo

SEQ ID NO: 385477 - DNA, 38 bp, Homo sapiens; identical to SEQ ID NO: 209660
  chr4:57051388-57051426
  hypo

SEQ ID NO: 385478 - DNA, 342 bp, Homo sapiens; identical to SEQ ID NO: 303294
  chr4:57921794-57922136
  hypo

SEQ ID NO: 385479 - DNA, 38 bp, Homo sapiens; identical to SEQ ID NO: 253809
  chr4:71774023-71774061
  hypo

SEQ ID NO: 385480 - DNA, 209 bp, Homo sapiens; identical to SEQ ID NO: 209678
  chr4:75137755-75137964
  hypo

SEQ ID NO: 385481 - DNA, 98 bp, Homo sapiens; identical to SEQ ID NO: 253818
  chr4:75260920-75261018
  hypo

SEQ ID NO: 385482 - DNA, 37 bp, Homo sapiens; identical to SEQ ID NO: 253822
  chr4:76553578-76553615
  hypo

SEQ ID NO: 385483 - DNA, 98 bp, Homo sapiens; identical to SEQ ID NO: 253829
  chr4:77596032-77596130
  hypo

SEQ ID NO: 385484 - DNA, 121 bp, Homo sapiens; identical to SEQ ID NO: 253831
  chr4:77662882-77663003
  hypo

SEQ ID NO: 385485 - DNA, 36 bp, Homo sapiens; identical to SEQ ID NO: 209712
  chr4:91052428-91052464
  hypo

SEQ ID NO: 385486 - DNA, 323 bp, Homo sapiens; identical to SEQ ID NO: 209721
  chr4:103941524-103941847
  hypo

SEQ ID NO: 385487 - DNA, 105 bp, Homo sapiens; identical to SEQ ID NO: 222450
  chr4:106068588-106068693
  hypo

SEQ ID NO: 385488 - DNA, 107 bp, Homo sapiens; identical to SEQ ID NO: 199528
  chr4:106182911-106183018
  hypo

SEQ ID NO: 385489 - DNA, 36 bp, Homo sapiens; identical to SEQ ID NO: 209752
  chr4:111383532-111383568
  hypo

SEQ ID NO: 385490 - DNA, 101 bp, Homo sapiens; identical to SEQ ID NO: 209759
  chr4:114528566-114528667
  hypo

SEQ ID NO: 385491 - DNA, 38 bp, Homo sapiens; identical to SEQ ID NO: 209761
  chr4:119501591-119501629
  hypo

SEQ ID NO: 385492 - DNA, 102 bp, Homo sapiens; identical to SEQ ID NO: 199600
  chr4:140097254-140097356
  hypo

SEQ ID NO: 385493 - DNA, 286 bp, Homo sapiens; identical to SEQ ID NO: 253966
  chr4:140357386-140357672
  hypo

SEQ ID NO: 385494 - DNA, 180 bp, Homo sapiens; identical to SEQ ID NO: 222492
  chr4:140587058-140587238
  hypo

SEQ ID NO: 385495 - DNA, 90 bp, Homo sapiens; identical to SEQ ID NO: 253971
  chr4:140701211-140701301
  hypo

SEQ ID NO: 385496 - DNA, 469 bp, Homo sapiens; identical to SEQ ID NO: 222495
  chr4:141074043-141074512
  hypo

SEQ ID NO: 385497 - DNA, 124 bp, Homo sapiens; identical to SEQ ID NO: 253990
  chr4:144507008-144507132
  hypo

SEQ ID NO: 385498 - DNA, 41 bp, Homo sapiens; identical to SEQ ID NO: 253991
  chr4:146047172-146047213
  hypo

SEQ ID NO: 385499 - DNA, 63 bp, Homo sapiens; identical to SEQ ID NO: 253993
  chr4:146694922-146694985
  hypo

SEQ ID NO: 385500 - DNA, 33 bp, Homo sapiens; identical to SEQ ID NO: 199629
  chr4:148538935-148538968
  hypo

SEQ ID NO: 385501 - DNA, 75 bp, Homo sapiens; identical to SEQ ID NO: 253999
  chr4:151435900-151435975
  hypo

SEQ ID NO: 385502 - DNA, 233 bp, Homo sapiens; identical to SEQ ID NO: 254017
  chr4:153985892-153986125
  hypo

SEQ ID NO: 385503 - DNA, 143 bp, Homo sapiens; identical to SEQ ID NO: 209830
  chr4:154520339-154520482
  hypo

SEQ ID NO: 385504 - DNA, 161 bp, Homo sapiens; identical to SEQ ID NO: 254046
  chr4:166035044-166035205
  hypo

SEQ ID NO: 385505 - DNA, 209 bp, Homo sapiens; identical to SEQ ID NO: 254062
  chr4:170037586-170037795
  hypo

SEQ ID NO: 385506 - DNA, 215 bp, Homo sapiens; identical to SEQ ID NO: 209848
  chr4:170652116-170652331
  hypo

SEQ ID NO: 385507 - DNA, 52 bp, Homo sapiens; identical to SEQ ID NO: 209852
  chr4:175940748-175940800
  hypo

SEQ ID NO: 385508 - DNA, 32 bp, Homo sapiens; identical to SEQ ID NO: 209858
  chr4:184051481-184051513
  hypo

SEQ ID NO: 385509 - DNA, 203 bp, Homo sapiens; identical to SEQ ID NO: 222536
  chr4:184328290-184328493
  hypo

SEQ ID NO: 385510 - DNA, 223 bp, Homo sapiens; identical to SEQ ID NO: 254096
  chr4:184343147-184343370
  hypo

SEQ ID NO: 385511 - DNA, 124 bp, Homo sapiens; identical to SEQ ID NO: 209865
  chr4:185239992-185240116
  hypo

SEQ ID NO: 385512 - DNA, 280 bp, Homo sapiens; identical to SEQ ID NO: 209869
  chr4:185353277-185353557
  hypo

SEQ ID NO: 385513 - DNA, 47 bp, Homo sapiens; identical to SEQ ID NO: 209872
  chr4:185480839-185480886
  hypo

SEQ ID NO: 385514 - DNA, 78 bp, Homo sapiens; identical to SEQ ID NO: 254131
  chr4:186066016-186066094
  hypo

SEQ ID NO: 385515 - DNA, 95 bp, Homo sapiens; identical to SEQ ID NO: 209878
  chr4:186319410-186319505
  hypo

SEQ ID NO: 385516 - DNA, 36 bp, Homo sapiens; identical to SEQ ID NO: 254145
  chr4:187509900-187509936
  hypo

SEQ ID NO: 385517 - DNA, 115 bp, Homo sapiens; identical to SEQ ID NO: 254172
  chr5:230941-231056
  hypo

SEQ ID NO: 385518 - DNA, 285 bp, Homo sapiens; identical to SEQ ID NO: 199726
  chr5:374579-374864
  hypo

SEQ ID NO: 385519 - DNA, 120 bp, Homo sapiens; identical to SEQ ID NO: 254243
  chr5:855237-855357
  hypo

SEQ ID NO: 385520 - DNA, 403 bp, Homo sapiens; identical to SEQ ID NO: 254278
  chr5:1036739-1037142
  hypo

SEQ ID NO: 385521 - DNA, 78 bp, Homo sapiens; identical to SEQ ID NO: 209955
  chr5:1046857-1046935
  hypo

SEQ ID NO: 385522 - DNA, 32 bp, Homo sapiens
  chr5:1056006-1056038
  hypo
ggggttaaagataaaaagggaagggaagtgtg

SEQ ID NO: 385523 - DNA, 182 bp, Homo sapiens; identical to SEQ ID NO: 209969
  chr5:1060413-1060595
  hypo

SEQ ID NO: 385524 - DNA, 46 bp, Homo sapiens
  chr5:1060818-1060864
  hypo
gcagctgtgagggcaaggccacagccacaaaccaacctggcacaca

SEQ ID NO: 385525 - DNA, 86 bp, Homo sapiens; identical to SEQ ID NO: 210001
  chr5:1177291-1177377
  hypo

SEQ ID NO: 385526 - DNA, 287 bp, Homo sapiens; identical to SEQ ID NO: 210002
  chr5:1215723-1216010
  hypo

SEQ ID NO: 385527 - DNA, 266 bp, Homo sapiens; identical to SEQ ID NO: 303931
  chr5:1218542-1218808
  hypo

SEQ ID NO: 385528 - DNA, 462 bp, Homo sapiens; identical to SEQ ID NO: 303932
  chr5:1218838-1219300
  hypo

SEQ ID NO: 385529 - DNA, 105 bp, Homo sapiens; identical to SEQ ID NO: 222563
  chr5:1294071-1294176
  hypo

SEQ ID NO: 385530 - DNA, 242 bp, Homo sapiens; identical to SEQ ID NO: 254386
  chr5:1463474-1463716
  hypo

SEQ ID NO: 385531 - DNA, 95 bp, Homo sapiens; identical to SEQ ID NO: 210016
  chr5:1490331-1490426
  hypo

SEQ ID NO: 385532 - DNA, 114 bp, Homo sapiens; identical to SEQ ID NO: 254397
  chr5:1550654-1550768
  hypo

SEQ ID NO: 385533 - DNA, 164 bp, Homo sapiens; identical to SEQ ID NO: 254419
  chr5:1814740-1814904
  hypo

SEQ ID NO: 385534 - DNA, 154 bp, Homo sapiens; identical to SEQ ID NO: 254430
  chr5:1923520-1923674
  hypo

SEQ ID NO: 385535 - DNA, 328 bp, Homo sapiens; identical to SEQ ID NO: 254437
  chr5:2052998-2053326
  hypo

SEQ ID NO: 385536 - DNA, 48 bp, Homo sapiens; identical to SEQ ID NO: 254455
  chr5:2542212-2542260
  hypo

SEQ ID NO: 385537 - DNA, 118 bp, Homo sapiens; identical to SEQ ID NO: 254461
  chr5:2634150-2634268
  hypo

SEQ ID NO: 385538 - DNA, 200 bp, Homo sapiens; identical to SEQ ID NO: 254464
  chr5:2708350-2708550
  hypo

SEQ ID NO: 385539 - DNA, 82 bp, Homo sapiens; identical to SEQ ID NO: 254481
  chr5:3042022-3042104
  hypo

SEQ ID NO: 385540 - DNA, 42 bp, Homo sapiens; identical to SEQ ID NO: 254529
  chr5:6906771-6906813
  hypo

SEQ ID NO: 385541 - DNA, 42 bp, Homo sapiens; identical to SEQ ID NO: 254539
  chr5:9044652-9044694
  hypo

SEQ ID NO: 385542 - DNA, 42 bp, Homo sapiens; identical to SEQ ID NO: 254551
  chr5:9498629-9498671
  hypo

SEQ ID NO: 385543 - DNA, 100 bp, Homo sapiens; identical to SEQ ID NO: 210070
  chr5:10936742-10936842
  hypo

SEQ ID NO: 385544 - DNA, 175 bp, Homo sapiens; identical to SEQ ID NO: 210083
  chr5:14378048-14378223
  hypo

SEQ ID NO: 385545 - DNA, 321 bp, Homo sapiens; identical to SEQ ID NO: 254623
  chr5:14725552-14725873
  hypo

SEQ ID NO: 385546 - DNA, 222 bp, Homo sapiens; identical to SEQ ID NO: 254625
  chr5:14734656-14734878
  hypo

SEQ ID NO: 385547 - DNA, 132 bp, Homo sapiens; identical to SEQ ID NO: 254630
  chr5:14780932-14781064
  hypo

SEQ ID NO: 385548 - DNA, 212 bp, Homo sapiens; identical to SEQ ID NO: 254633
  chr5:14846242-14846454
  hypo

SEQ ID NO: 385549 - DNA, 872 bp, Homo sapiens; identical to SEQ ID NO: 254638
  chr5:15936621-15937493
  hypo

SEQ ID NO: 385550 - DNA, 34 bp, Homo sapiens; identical to SEQ ID NO: 254647
  chr5:16680075-16680109
  hypo

SEQ ID NO: 385551 - DNA, 35 bp, Homo sapiens; identical to SEQ ID NO: 254666
  chr5:17159691-17159726
  hypo

SEQ ID NO: 385552 - DNA, 35 bp, Homo sapiens; identical to SEQ ID NO: 210118
  chr5:17161190-17161225
  hypo

SEQ ID NO: 385553 - DNA, 183 bp, Homo sapiens; identical to SEQ ID NO: 254671
  chr5:17491366-17491549
  hypo

SEQ ID NO: 385554 - DNA, 36 bp, Homo sapiens; identical to SEQ ID NO: 254681
  chr5:18380066-18380102
  hypo

SEQ ID NO: 385555 - DNA, 46 bp, Homo sapiens; identical to SEQ ID NO: 254697
  chr5:31599717-31599763
  hypo

SEQ ID NO: 385556 - DNA, 119 bp, Homo sapiens; identical to SEQ ID NO: 254732
  chr5:33530561-33530680
  hypo

SEQ ID NO: 385557 - DNA, 33 bp, Homo sapiens; identical to SEQ ID NO: 254742
  chr5:34736210-34736243
  hypo

SEQ ID NO: 385558 - DNA, 106 bp, Homo sapiens; identical to SEQ ID NO: 254748
  chr5:37052539-37052645
  hypo

SEQ ID NO: 385559 - DNA, 34 bp, Homo sapiens; identical to SEQ ID NO: 254783
  chr5:42760113-42760147
  hypo

SEQ ID NO: 385560 - DNA, 89 bp, Homo sapiens; identical to SEQ ID NO: 254791
  chr5:43387666-43387755
  hypo

SEQ ID NO: 385561 - DNA, 95 bp, Homo sapiens; identical to SEQ ID NO: 304429
  chr5:55309217-55309312
  hypo

SEQ ID NO: 385562 - DNA, 94 bp, Homo sapiens; identical to SEQ ID NO: 254816
  chr5:55379300-55379394
  hypo

SEQ ID NO: 385563 - DNA, 45 bp, Homo sapiens; identical to SEQ ID NO: 210181
  chr5:60676638-60676683
  hypo

SEQ ID NO: 385564 - DNA, 42 bp, Homo sapiens; identical to SEQ ID NO: 254832
  chr5:62080933-62080975
  hypo

SEQ ID NO: 385565 - DNA, 133 bp, Homo sapiens; identical to SEQ ID NO: 222618
  chr5:63255569-63255702
  hypo

SEQ ID NO: 385566 - DNA, 205 bp, Homo sapiens; identical to SEQ ID NO: 210188
  chr5:65988337-65988542
  hypo

SEQ ID NO: 385567 - DNA, 186 bp, Homo sapiens; identical to SEQ ID NO: 210189
  chr5:66441263-66441449
  hypo

SEQ ID NO: 385568 - DNA, 119 bp, Homo sapiens; identical to SEQ ID NO: 254843
  chr5:66448539-66448658
  hypo

SEQ ID NO: 385569 - DNA, 34 bp, Homo sapiens; identical to SEQ ID NO: 210190
  chr5:66911431-66911465
  hypo

SEQ ID NO: 385570 - DNA, 252 bp, Homo sapiens; identical to SEQ ID NO: 254877
  chr5:72292520-72292772
  hypo

SEQ ID NO: 385571 - DNA, 123 bp, Homo sapiens; identical to SEQ ID NO: 222625
  chr5:73936774-73936897
  hypo

SEQ ID NO: 385572 - DNA, 103 bp, Homo sapiens; identical to SEQ ID NO: 199897
  chr5:74162616-74162719
  hypo

SEQ ID NO: 385573 - DNA, 118 bp, Homo sapiens; identical to SEQ ID NO: 254903
  chr5:77288993-77289111
  hypo

SEQ ID NO: 385574 - DNA, 85 bp, Homo sapiens; identical to SEQ ID NO: 254912
  chr5:77912255-77912340
  hypo

SEQ ID NO: 385575 - DNA, 86 bp, Homo sapiens; identical to SEQ ID NO: 254928
  chr5:79438045-79438131
  hypo

SEQ ID NO: 385576 - DNA, 163 bp, Homo sapiens; identical to SEQ ID NO: 210236
  chr5:79986401-79986564
  hypo

SEQ ID NO: 385577 - DNA, 183 bp, Homo sapiens; identical to SEQ ID NO: 210239
  chr5:80652824-80653007
  hypo

SEQ ID NO: 385578 - DNA, 152 bp, Homo sapiens; identical to SEQ ID NO: 254944
  chr5:81058593-81058745
  hypo

SEQ ID NO: 385579 - DNA, 38 bp, Homo sapiens; identical to SEQ ID NO: 254953
  chr5:88161980-88162018
  hypo

SEQ ID NO: 385580 - DNA, 34 bp, Homo sapiens; identical to SEQ ID NO: 210242
  chr5:90257315-90257349
  hypo

SEQ ID NO: 385581 - DNA, 35 bp, Homo sapiens; identical to SEQ ID NO: 254958
  chr5:93032774-93032809
  hypo

SEQ ID NO: 385582 - DNA, 94 bp, Homo sapiens; identical to SEQ ID NO: 210246
  chr5:94981773-94981867
  hypo

SEQ ID NO: 385583 - DNA, 55 bp, Homo sapiens; identical to SEQ ID NO: 254976
  chr5:96397786-96397841
  hypo

SEQ ID NO: 385584 - DNA, 263 bp, Homo sapiens; identical to SEQ ID NO: 222648
  chr5:98109927-98110190
  hypo

SEQ ID NO: 385585 - DNA, 215 bp, Homo sapiens; identical to SEQ ID NO: 254985
  chr5:108586386-108586601
  hypo

SEQ ID NO: 385586 - DNA, 163 bp, Homo sapiens; identical to SEQ ID NO: 222664
  chr5:114938164-114938327
  hypo

SEQ ID NO: 385587 - DNA, 131 bp, Homo sapiens; identical to SEQ ID NO: 255003
  chr5:121187431-121187562
  hypo

SEQ ID NO: 385588 - DNA, 41 bp, Homo sapiens; identical to SEQ ID NO: 255007
  chr5:122150760-122150801
  hypo

SEQ ID NO: 385589 - DNA, 38 bp, Homo sapiens; identical to SEQ ID NO: 255010
  chr5:122189087-122189125
  hypo

SEQ ID NO: 385590 - DNA, 42 bp, Homo sapiens; identical to SEQ ID NO: 255020
  chr5:127808517-127808559
  hypo

SEQ ID NO: 385591 - DNA, 52 bp, Homo sapiens; identical to SEQ ID NO: 255035
  chr5:131629083-131629135
  hypo

SEQ ID NO: 385592 - DNA, 131 bp, Homo sapiens; identical to SEQ ID NO: 210301
  chr5:131725264-131725395
  hypo

SEQ ID NO: 385593 - DNA, 56 bp, Homo sapiens; identical to SEQ ID NO: 304706
  chr5:131787118-131787174
  hypo

SEQ ID NO: 385594 - DNA, 91 bp, Homo sapiens; identical to SEQ ID NO: 304707
  chr5:131787204-131787295
  hypo

SEQ ID NO: 385595 - DNA, 42 bp, Homo sapiens; identical to SEQ ID NO: 255055
  chr5:133280965-133281007
  hypo

SEQ ID NO: 385596 - DNA, 32 bp, Homo sapiens; identical to SEQ ID NO: 255066
  chr5:133730848-133730880
  hypo

SEQ ID NO: 385597 - DNA, 61 bp, Homo sapiens; identical to SEQ ID NO: 255070
  chr5:133887785-133887846
  hypo

SEQ ID NO: 385598 - DNA, 154 bp, Homo sapiens; identical to SEQ ID NO: 210327
  chr5:134513710-134513864
  hypo

SEQ ID NO: 385599 - DNA, 38 bp, Homo sapiens; identical to SEQ ID NO: 210331
  chr5:134673488-134673526
  hypo

SEQ ID NO: 385600 - DNA, 164 bp, Homo sapiens; identical to SEQ ID NO: 255138
  chr5:139633303-139633467
  hypo

SEQ ID NO: 385601 - DNA, 63 bp, Homo sapiens; identical to SEQ ID NO: 222706
  chr5:139725675-139725738
  hypo

SEQ ID NO: 385602 - DNA, 93 bp, Homo sapiens; identical to SEQ ID NO: 210367
  chr5:141052407-141052500
  hypo

SEQ ID NO: 385603 - DNA, 136 bp, Homo sapiens; identical to SEQ ID NO: 222711
  chr5:141257894-141258030
  hypo

SEQ ID NO: 385604 - DNA, 39 bp, Homo sapiens; identical to SEQ ID NO: 255169
  chr5:143182536-143182575
  hypo

SEQ ID NO: 385605 - DNA, 158 bp, Homo sapiens; identical to SEQ ID NO: 210380
  chr5:145379611-145379769
  hypo

SEQ ID NO: 385606 - DNA, 185 bp, Homo sapiens; identical to SEQ ID NO: 255209
  chr5:149497194-149497379
  hypo

SEQ ID NO: 385607 - DNA, 133 bp, Homo sapiens; identical to SEQ ID NO: 255215
  chr5:149637115-149637248
  hypo

SEQ ID NO: 385608 - DNA, 43 bp, Homo sapiens; identical to SEQ ID NO: 255239
  chr5:155438698-155438741
  hypo

SEQ ID NO: 385609 - DNA, 48 bp, Homo sapiens; identical to SEQ ID NO: 210422
  chr5:167671586-167671634
  hypo

SEQ ID NO: 385610 - DNA, 236 bp, Homo sapiens; identical to SEQ ID NO: 222740
  chr5:167718952-167719188
  hypo

SEQ ID NO: 385611 - DNA, 305 bp, Homo sapiens; identical to SEQ ID NO: 210434
  chr5:168199738-168200043
  hypo

SEQ ID NO: 385612 - DNA, 206 bp, Homo sapiens; identical to SEQ ID NO: 255295
  chr5:170972877-170973083
  hypo

SEQ ID NO: 385613 - DNA, 92 bp, Homo sapiens; identical to SEQ ID NO: 210448
  chr5:171777275-171777367
  hypo

SEQ ID NO: 385614 - DNA, 110 bp, Homo sapiens; identical to SEQ ID NO: 70538
  chr5:171808699-171808809
  hypo

SEQ ID NO: 385615 - DNA, 32 bp, Homo sapiens; identical to SEQ ID NO: 210452
  chr5:172062315-172062347
  hypo

SEQ ID NO: 385616 - DNA, 196 bp, Homo sapiens; identical to SEQ ID NO: 255342
  chr5:172765671-172765867
  hypo

SEQ ID NO: 385617 - DNA, 279 bp, Homo sapiens; identical to SEQ ID NO: 255343
  chr5:173180489-173180768
  hypo

SEQ ID NO: 385618 - DNA, 149 bp, Homo sapiens; identical to SEQ ID NO: 255352
  chr5:174350058-174350207
  hypo

SEQ ID NO: 385619 - DNA, 97 bp, Homo sapiens; identical to SEQ ID NO: 210478
  chr5:176066073-176066170
  hypo

SEQ ID NO: 385620 - DNA, 92 bp, Homo sapiens; identical to SEQ ID NO: 255388
  chr5:176613630-176613722
  hypo

SEQ ID NO: 385621 - DNA, 162 bp, Homo sapiens; identical to SEQ ID NO: 210486
  chr5:176694903-176695065
  hypo

SEQ ID NO: 385622 - DNA, 130 bp, Homo sapiens; identical to SEQ ID NO: 210499
  chr5:177548899-177549029
  hypo

SEQ ID NO: 385623 - DNA, 189 bp, Homo sapiens; identical to SEQ ID NO: 255425
  chr5:177794189-177794378
  hypo

SEQ ID NO: 385624 - DNA, 461 bp, Homo sapiens; identical to SEQ ID NO: 255431
  chr5:177862607-177863068
  hypo

SEQ ID NO: 385625 - DNA, 34 bp, Homo sapiens; identical to SEQ ID NO: 255448
  chr5:178113590-178113624
  hypo

SEQ ID NO: 385626 - DNA, 37 bp, Homo sapiens; identical to SEQ ID NO: 255453
  chr5:178226974-178227011
  hypo

SEQ ID NO: 385627 - DNA, 45 bp, Homo sapiens; identical to SEQ ID NO: 210510
  chr5:178295550-178295595
  hypo

SEQ ID NO: 385628 - DNA, 120 bp, Homo sapiens; identical to SEQ ID NO: 255492
  chr5:179064356-179064476
  hypo

SEQ ID NO: 385629 - DNA, 31 bp, Homo sapiens; identical to SEQ ID NO: 255518
  chr5:179742137-179742168
  hypo

SEQ ID NO: 385630 - DNA, 152 bp, Homo sapiens; identical to SEQ ID NO: 305275
  chr5:179824636-179824788
  hypo

SEQ ID NO: 385631 - DNA, 70 bp, Homo sapiens; identical to SEQ ID NO: 305287
  chr5:180047650-180047720
  hypo

SEQ ID NO: 385632 - DNA, 221 bp, Homo sapiens; identical to SEQ ID NO: 305288
  chr5:180047750-180047971
  hypo

SEQ ID NO: 385633 - DNA, 60 bp, Homo sapiens; identical to SEQ ID NO: 255554
  chr6:356759-356819
  hypo

SEQ ID NO: 385634 - DNA, 136 bp, Homo sapiens; identical to SEQ ID NO: 210556
  chr6:736613-736749
  hypo

SEQ ID NO: 385635 - DNA, 152 bp, Homo sapiens; identical to SEQ ID NO: 384116
  chr6:1610664-1610816
  hypo

SEQ ID NO: 385636 - DNA, 334 bp, Homo sapiens; identical to SEQ ID NO: 200232
  chr6:1610864-1611198
  hypo

SEQ ID NO: 385637 - DNA, 159 bp, Homo sapiens; identical to SEQ ID NO: 255577
  chr6:1679665-1679824
  hypo

SEQ ID NO: 385638 - DNA, 96 bp, Homo sapiens; identical to SEQ ID NO: 210568
  chr6:2233026-2233122
  hypo

SEQ ID NO: 385639 - DNA, 215 bp, Homo sapiens; identical to SEQ ID NO: 255611
  chr6:3193808-3194023
  hypo

SEQ ID NO: 385640 - DNA, 44 bp, Homo sapiens; identical to SEQ ID NO: 255612
  chr6:3194436-3194480
  hypo

SEQ ID NO: 385641 - DNA, 216 bp, Homo sapiens; identical to SEQ ID NO: 255641
  chr6:3468953-3469169
  hypo

SEQ ID NO: 385642 - DNA, 101 bp, Homo sapiens
  chr6:3880267-3880368
  hypo
gtggtggcagatattgaccatatccacttggtactgctttctagcatacagttcagtgtttcacagctccaggcacacacaactcagccatctccctcctc

SEQ ID NO: 385643 - DNA, 91 bp, Homo sapiens; identical to SEQ ID NO: 210610
  chr6:4909755-4909846
  hypo

SEQ ID NO: 385644 - DNA, 73 bp, Homo sapiens; identical to SEQ ID NO: 255710
  chr6:5839914-5839987
  hypo

SEQ ID NO: 385645 - DNA, 57 bp, Homo sapiens; identical to SEQ ID NO: 255714
  chr6:6250343-6250400
  hypo

SEQ ID NO: 385646 - DNA, 85 bp, Homo sapiens; identical to SEQ ID NO: 210624
  chr6:6971301-6971386
  hypo

SEQ ID NO: 385647 - DNA, 98 bp, Homo sapiens; identical to SEQ ID NO: 255729
  chr6:7132660-7132758
  hypo

SEQ ID NO: 385648 - DNA, 180 bp, Homo sapiens; identical to SEQ ID NO: 255737
  chr6:7268060-7268240
  hypo

SEQ ID NO: 385649 - DNA, 559 bp, Homo sapiens; identical to SEQ ID NO: 210634
  chr6:7883236-7883795
  hypo

SEQ ID NO: 385650 - DNA, 43 bp, Homo sapiens; identical to SEQ ID NO: 255766
  chr6:10491329-10491372
  hypo

SEQ ID NO: 385651 - DNA, 136 bp, Homo sapiens; identical to SEQ ID NO: 255820
  chr6:14772274-14772410
  hypo

SEQ ID NO: 385652 - DNA, 36 bp, Homo sapiens; identical to SEQ ID NO: 255822
  chr6:14916087-14916123
  hypo

SEQ ID NO: 385653 - DNA, 31 bp, Homo sapiens; identical to SEQ ID NO: 255823
  chr6:14930077-14930108
  hypo

SEQ ID NO: 385654 - DNA, 31 bp, Homo sapiens; identical to SEQ ID NO: 210678
  chr6:15907074-15907105
  hypo

SEQ ID NO: 385655 - DNA, 120 bp, Homo sapiens; identical to SEQ ID NO: 210688
  chr6:18030874-18030994
  hypo

SEQ ID NO: 385656 - DNA, 104 bp, Homo sapiens; identical to SEQ ID NO: 255866
  chr6:18129286-18129390
  hypo

SEQ ID NO: 385657 - DNA, 33 bp, Homo sapiens; identical to SEQ ID NO: 210692
  chr6:18275933-18275966
  hypo

SEQ ID NO: 385658 - DNA, 32 bp, Homo sapiens; identical to SEQ ID NO: 255885
  chr6:20239105-20239137
  hypo

SEQ ID NO: 385659 - DNA, 32 bp, Homo sapiens; identical to SEQ ID NO: 255910
  chr6:24035312-24035344
  hypo

SEQ ID NO: 385660 - DNA, 161 bp, Homo sapiens; identical to SEQ ID NO: 210709
  chr6:24425299-24425460
  hypo

SEQ ID NO: 385661 - DNA, 72 bp, Homo sapiens; identical to SEQ ID NO: 210720
  chr6:26970361-26970433
  hypo

SEQ ID NO: 385662 - DNA, 159 bp, Homo sapiens; identical to SEQ ID NO: 210724
  chr6:27441962-27442121
  hypo

SEQ ID NO: 385663 - DNA, 266 bp, Homo sapiens; identical to SEQ ID NO: 210733
  chr6:33638299-33638565
  hypo

SEQ ID NO: 385664 - DNA, 130 bp, Homo sapiens; identical to SEQ ID NO: 210737
  chr6:33748502-33748632
  hypo

SEQ ID NO: 385665 - DNA, 78 bp, Homo sapiens; identical to SEQ ID NO: 255966
  chr6:33871408-33871486
  hypo

SEQ ID NO: 385666 - DNA, 107 bp, Homo sapiens; identical to SEQ ID NO: 210739
  chr6:33907853-33907960
  hypo

SEQ ID NO: 385667 - DNA, 243 bp, Homo sapiens; identical to SEQ ID NO: 255983
  chr6:34507099-34507342
  hypo

SEQ ID NO: 385668 - DNA, 243 bp, Homo sapiens; identical to SEQ ID NO: 210750
  chr6:34512043-34512286
  hypo

SEQ ID NO: 385669 - DNA, 95 bp, Homo sapiens; identical to SEQ ID NO: 256005
  chr6:35045149-35045244
  hypo

SEQ ID NO: 385670 - DNA, 148 bp, Homo sapiens; identical to SEQ ID NO: 256038
  chr6:36926814-36926962
  hypo

SEQ ID NO: 385671 - DNA, 177 bp, Homo sapiens; identical to SEQ ID NO: 256039
  chr6:36936701-36936878
  hypo

SEQ ID NO: 385672 - DNA, 97 bp, Homo sapiens; identical to SEQ ID NO: 256042
  chr6:36992805-36992902
  hypo

SEQ ID NO: 385673 - DNA, 40 bp, Homo sapiens; identical to SEQ ID NO: 210772
  chr6:37100545-37100585
  hypo

SEQ ID NO: 385674 - DNA, 597 bp, Homo sapiens; identical to SEQ ID NO: 256055
  chr6:37460887-37461484
  hypo

SEQ ID NO: 385675 - DNA, 153 bp, Homo sapiens; identical to SEQ ID NO: 256056
  chr6:37605017-37605170
  hypo

SEQ ID NO: 385676 - DNA, 125 bp, Homo sapiens; identical to SEQ ID NO: 222857
  chr6:43081636-43081761
  hypo

SEQ ID NO: 385677 - DNA, 215 bp, Homo sapiens; identical to SEQ ID NO: 256117
  chr6:43230737-43230952
  hypo

SEQ ID NO: 385678 - DNA, 83 bp, Homo sapiens; identical to SEQ ID NO: 256132
  chr6:43753108-43753191
  hypo

SEQ ID NO: 385679 - DNA, 76 bp, Homo sapiens; identical to SEQ ID NO: 210811
  chr6:43755593-43755669
  hypo

SEQ ID NO: 385680 - DNA, 192 bp, Homo sapiens; identical to SEQ ID NO: 256144
  chr6:43990914-43991106
  hypo

SEQ ID NO: 385681 - DNA, 34 bp, Homo sapiens; identical to SEQ ID NO: 256149
  chr6:44090098-44090132
  hypo

SEQ ID NO: 385682 - DNA, 39 bp, Homo sapiens; identical to SEQ ID NO: 256163
  chr6:45492176-45492215
  hypo

SEQ ID NO: 385683 - DNA, 264 bp, Homo sapiens; identical to SEQ ID NO: 305972
  chr6:45608783-45609047
  hypo

SEQ ID NO: 385684 - DNA, 41 bp, Homo sapiens; identical to SEQ ID NO: 210827
  chr6:47412331-47412372
  hypo

SEQ ID NO: 385685 - DNA, 144 bp, Homo sapiens; identical to SEQ ID NO: 256175
  chr6:49453725-49453869
  hypo

SEQ ID NO: 385686 - DNA, 282 bp, Homo sapiens; identical to SEQ ID NO: 222871
  chr6:53409809-53410091
  hypo

SEQ ID NO: 385687 - DNA, 144 bp, Homo sapiens; identical to SEQ ID NO: 256202
  chr6:57726146-57726290
  hypo

SEQ ID NO: 385688 - DNA, 120 bp, Homo sapiens; identical to SEQ ID NO: 256245
  chr6:88553999-88554119
  hypo

SEQ ID NO: 385689 - DNA, 332 bp, Homo sapiens; identical to SEQ ID NO: 284237
  chr6:89827121-89827453
  hypo

SEQ ID NO: 385690 - DNA, 34 bp, Homo sapiens; identical to SEQ ID NO: 256263
  chr6:96552675-96552709
  hypo

SEQ ID NO: 385691 - DNA, 32 bp, Homo sapiens; identical to SEQ ID NO: 256268
  chr6:106582673-106582705
  hypo

SEQ ID NO: 385692 - DNA, 36 bp, Homo sapiens; identical to SEQ ID NO: 210881
  chr6:107563806-107563842
  hypo

SEQ ID NO: 385693 - DNA, 102 bp, Homo sapiens; identical to SEQ ID NO: 256312
  chr6:111955506-111955608
  hypo

SEQ ID NO: 385694 - DNA, 40 bp, Homo sapiens; identical to SEQ ID NO: 222921
  chr6:119762016-119762056
  hypo

SEQ ID NO: 385695 - DNA, 92 bp, Homo sapiens; identical to SEQ ID NO: 256335
  chr6:119834901-119834993
  hypo

SEQ ID NO: 385696 - DNA, 105 bp, Homo sapiens; identical to SEQ ID NO: 222922
  chr6:123110275-123110380
  hypo

SEQ ID NO: 385697 - DNA, 35 bp, Homo sapiens; identical to SEQ ID NO: 256389
  chr6:141150320-141150355
  hypo

SEQ ID NO: 385698 - DNA, 72 bp, Homo sapiens; identical to SEQ ID NO: 210933
  chr6:144330175-144330247
  hypo

SEQ ID NO: 385699 - DNA, 69 bp, Homo sapiens; identical to SEQ ID NO: 256406
  chr6:147519322-147519391
  hypo

SEQ ID NO: 385700 - DNA, 210 bp, Homo sapiens; identical to SEQ ID NO: 256426
  chr6:150209155-150209365
  hypo

SEQ ID NO: 385701 - DNA, 43 bp, Homo sapiens; identical to SEQ ID NO: 256431
  chr6:150437286-150437329
  hypo

SEQ ID NO: 385702 - DNA, 118 bp, Homo sapiens; identical to SEQ ID NO: 256433
  chr6:150498913-150499031
  hypo

SEQ ID NO: 385703 - DNA, 125 bp, Homo sapiens; identical to SEQ ID NO: 256439
  chr6:151306909-151307034
  hypo

SEQ ID NO: 385704 - DNA, 369 bp, Homo sapiens; identical to SEQ ID NO: 256443
  chr6:151662637-151663006
  hypo

SEQ ID NO: 385705 - DNA, 40 bp, Homo sapiens; identical to SEQ ID NO: 256477
  chr6:155991045-155991085
  hypo

SEQ ID NO: 385706 - DNA, 65 bp, Homo sapiens; identical to SEQ ID NO: 256478
  chr6:156030251-156030316
  hypo

SEQ ID NO: 385707 - DNA, 139 bp, Homo sapiens; identical to SEQ ID NO: 256482
  chr6:156710186-156710325
  hypo

SEQ ID NO: 385708 - DNA, 45 bp, Homo sapiens; identical to SEQ ID NO: 306372
  chr6:157431600-157431645
  hypo

SEQ ID NO: 385709 - DNA, 98 bp, Homo sapiens; identical to SEQ ID NO: 306373
  chr6:157431675-157431773
  hypo

SEQ ID NO: 385710 - DNA, 86 bp, Homo sapiens; identical to SEQ ID NO: 256495
  chr6:157447664-157447750
  hypo

SEQ ID NO: 385711 - DNA, 59 bp, Homo sapiens; identical to SEQ ID NO: 200718
  chr6:157802884-157802943
  hypo

SEQ ID NO: 385712 - DNA, 275 bp, Homo sapiens; identical to SEQ ID NO: 256514
  chr6:158070271-158070546
  hypo

SEQ ID NO: 385713 - DNA, 35 bp, Homo sapiens; identical to SEQ ID NO: 256525
  chr6:158567710-158567745
  hypo

SEQ ID NO: 385714 - DNA, 162 bp, Homo sapiens; identical to SEQ ID NO: 256545
  chr6:159180413-159180575
  hypo

SEQ ID NO: 385715 - DNA, 178 bp, Homo sapiens; identical to SEQ ID NO: 256549
  chr6:159193321-159193499
  hypo

SEQ ID NO: 385716 - DNA, 35 bp, Homo sapiens; identical to SEQ ID NO: 256554
  chr6:159213572-159213607
  hypo

SEQ ID NO: 385717 - DNA, 37 bp, Homo sapiens; identical to SEQ ID NO: 256558
  chr6:159223841-159223878
  hypo

SEQ ID NO: 385718 - DNA, 71 bp, Homo sapiens; identical to SEQ ID NO: 256577
  chr6:160509961-160510032
  hypo

SEQ ID NO: 385719 - DNA, 362 bp, Homo sapiens; identical to SEQ ID NO: 256590
  chr6:161559597-161559959
  hypo

SEQ ID NO: 385720 - DNA, 221 bp, Homo sapiens; identical to SEQ ID NO: 306491
  chr6:162253713-162253934
  hypo

SEQ ID NO: 385721 - DNA, 290 bp, Homo sapiens; identical to SEQ ID NO: 256604
  chr6:163321044-163321334
  hypo

SEQ ID NO: 385722 - DNA, 153 bp, Homo sapiens; identical to SEQ ID NO: 256607
  chr6:163607798-163607951
  hypo

SEQ ID NO: 385723 - DNA, 115 bp, Homo sapiens; identical to SEQ ID NO: 211015
  chr6:167136191-167136306
  hypo

SEQ ID NO: 385724 - DNA, 90 bp, Homo sapiens; identical to SEQ ID NO: 306533
  chr6:167136408-167136498
  hypo

SEQ ID NO: 385725 - DNA, 65 bp, Homo sapiens; identical to SEQ ID NO: 211017
  chr6:167384339-167384404
  hypo

SEQ ID NO: 385726 - DNA, 86 bp, Homo sapiens; identical to SEQ ID NO: 256654
  chr6:167707449-167707535
  hypo

SEQ ID NO: 385727 - DNA, 36 bp, Homo sapiens; identical to SEQ ID NO: 211022
  chr6:168131201-168131237
  hypo

SEQ ID NO: 385728 - DNA, 33 bp, Homo sapiens; identical to SEQ ID NO: 200752
  chr6:168227910-168227943
  hypo

SEQ ID NO: 385729 - DNA, 103 bp, Homo sapiens; identical to SEQ ID NO: 256691
  chr6:168490178-168490281
  hypo

SEQ ID NO: 385730 - DNA, 209 bp, Homo sapiens; identical to SEQ ID NO: 256695
  chr6:168591119-168591328
  hypo

SEQ ID NO: 385731 - DNA, 252 bp, Homo sapiens; identical to SEQ ID NO: 256697
  chr6:168633686-168633938
  hypo

SEQ ID NO: 385732 - DNA, 354 bp, Homo sapiens; identical to SEQ ID NO: 211044
  chr6:168936432-168936786
  hypo

SEQ ID NO: 385733 - DNA, 193 bp, Homo sapiens; identical to SEQ ID NO: 256721
  chr6:169803235-169803428
  hypo

SEQ ID NO: 385734 - DNA, 120 bp, Homo sapiens; identical to SEQ ID NO: 211065
  chr6:170500862-170500982
  hypo

SEQ ID NO: 385735 - DNA, 74 bp, Homo sapiens; identical to SEQ ID NO: 256742
  chr6:170578858-170578932
  hypo

SEQ ID NO: 385736 - DNA, 120 bp, Homo sapiens; identical to SEQ ID NO: 211068
  chr6:170894913-170895033
  hypo

SEQ ID NO: 385737 - DNA, 139 bp, Homo sapiens; identical to SEQ ID NO: 211069
  chr7:85450-85589
  hypo

SEQ ID NO: 385738 - DNA, 155 bp, Homo sapiens; identical to SEQ ID NO: 256754
  chr7:153660-153815
  hypo

SEQ ID NO: 385739 - DNA, 529 bp, Homo sapiens; identical to SEQ ID NO: 256761
  chr7:175273-175802
  hypo

SEQ ID NO: 385740 - DNA, 148 bp, Homo sapiens; identical to SEQ ID NO: 256764
  chr7:199426-199574
  hypo

SEQ ID NO: 385741 - DNA, 166 bp, Homo sapiens; identical to SEQ ID NO: 256772
  chr7:228056-228222
  hypo

SEQ ID NO: 385742 - DNA, 113 bp, Homo sapiens; identical to SEQ ID NO: 256778
  chr7:289727-289840
  hypo

SEQ ID NO: 385743 - DNA, 233 bp, Homo sapiens; identical to SEQ ID NO: 256780
  chr7:291025-291258
  hypo

SEQ ID NO: 385744 - DNA, 224 bp, Homo sapiens; identical to SEQ ID NO: 306704
  chr7:322815-323039
  hypo

SEQ ID NO: 385745 - DNA, 45 bp, Homo sapiens; identical to SEQ ID NO: 211085
  chr7:328541-328586
  hypo

SEQ ID NO: 385746 - DNA, 55 bp, Homo sapiens; identical to SEQ ID NO: 211086
  chr7:328625-328680
  hypo

SEQ ID NO: 385747 - DNA, 180 bp, Homo sapiens; identical to SEQ ID NO: 256799
  chr7:367650-367830
  hypo

SEQ ID NO: 385748 - DNA, 428 bp, Homo sapiens; identical to SEQ ID NO: 256807
  chr7:418417-418845
  hypo

SEQ ID NO: 385749 - DNA, 60 bp, Homo sapiens; identical to SEQ ID NO: 256827
  chr7:531100-531160
  hypo

SEQ ID NO: 385750 - DNA, 382 bp, Homo sapiens; identical to SEQ ID NO: 256880
  chr7:902843-903225
  hypo

SEQ ID NO: 385751 - DNA, 110 bp, Homo sapiens; identical to SEQ ID NO: 211146
  chr7:986124-986234
  hypo

SEQ ID NO: 385752 - DNA, 186 bp, Homo sapiens; identical to SEQ ID NO: 211147
  chr7:986336-986522
  hypo

SEQ ID NO: 385753 - DNA, 324 bp, Homo sapiens; identical to SEQ ID NO: 256908
  chr7:1007358-1007682
  hypo

SEQ ID NO: 385754 - DNA, 274 bp, Homo sapiens; identical to SEQ ID NO: 222996
  chr7:1069695-1069969
  hypo

SEQ ID NO: 385755 - DNA, 188 bp, Homo sapiens; identical to SEQ ID NO: 256926
  chr7:1103862-1104050
  hypo

SEQ ID NO: 385756 - DNA, 154 bp, Homo sapiens; identical to SEQ ID NO: 256953
  chr7:1357986-1358140
  hypo

SEQ ID NO: 385757 - DNA, 265 bp, Homo sapiens; identical to SEQ ID NO: 256954
  chr7:1358498-1358763
  hypo

SEQ ID NO: 385758 - DNA, 95 bp, Homo sapiens; identical to SEQ ID NO: 256969
  chr7:1493403-1493498
  hypo

SEQ ID NO: 385759 - DNA, 95 bp, Homo sapiens; identical to SEQ ID NO: 256970
  chr7:1496414-1496509
  hypo

SEQ ID NO: 385760 - DNA, 144 bp, Homo sapiens; identical to SEQ ID NO: 211187
  chr7:1534752-1534896
  hypo

SEQ ID NO: 385761 - DNA, 254 bp, Homo sapiens; identical to SEQ ID NO: 306940
  chr7:1627150-1627404
  hypo

SEQ ID NO: 385762 - DNA, 123 bp, Homo sapiens; identical to SEQ ID NO: 306941
  chr7:1627434-1627557
  hypo

SEQ ID NO: 385763 - DNA, 160 bp, Homo sapiens; identical to SEQ ID NO: 257023
  chr7:1785930-1786090
  hypo

SEQ ID NO: 385764 - DNA, 289 bp, Homo sapiens; identical to SEQ ID NO: 211213
  chr7:1865909-1866198
  hypo

SEQ ID NO: 385765 - DNA, 180 bp, Homo sapiens; identical to SEQ ID NO: 211220
  chr7:1950693-1950873
  hypo

SEQ ID NO: 385766 - DNA, 147 bp, Homo sapiens; identical to SEQ ID NO: 211222
  chr7:1969179-1969326
  hypo

SEQ ID NO: 385767 - DNA, 300 bp, Homo sapiens; identical to SEQ ID NO: 257066
  chr7:2053261-2053561
  hypo

SEQ ID NO: 385768 - DNA, 203 bp, Homo sapiens; identical to SEQ ID NO: 257076
  chr7:2091644-2091847
  hypo

SEQ ID NO: 385769 - DNA, 77 bp, Homo sapiens; identical to SEQ ID NO: 223010
  chr7:2555344-2555421
  hypo

SEQ ID NO: 385770 - DNA, 52 bp, Homo sapiens; identical to SEQ ID NO: 257156
  chr7:2680524-2680576
  hypo

SEQ ID NO: 385771 - DNA, 257 bp, Homo sapiens; identical to SEQ ID NO: 211309
  chr7:4152827-4153084
  hypo

SEQ ID NO: 385772 - DNA, 316 bp, Homo sapiens; identical to SEQ ID NO: 211321
  chr7:4272745-4273061
  hypo

SEQ ID NO: 385773 - DNA, 289 bp, Homo sapiens; identical to SEQ ID NO: 307216
  chr7:4308194-4308483
  hypo

SEQ ID NO: 385774 - DNA, 155 bp, Homo sapiens; identical to SEQ ID NO: 257259
  chr7:4348038-4348193
  hypo

SEQ ID NO: 385775 - DNA, 48 bp, Homo sapiens; identical to SEQ ID NO: 257270
  chr7:4770224-4770272
  hypo

SEQ ID NO: 385776 - DNA, 831 bp, Homo sapiens; identical to SEQ ID NO: 257277
  chr7:4806263-4807094
  hypo

SEQ ID NO: 385777 - DNA, 127 bp, Homo sapiens; identical to SEQ ID NO: 257280
  chr7:4823843-4823970
  hypo

SEQ ID NO: 385778 - DNA, 281 bp, Homo sapiens; identical to SEQ ID NO: 257298
  chr7:4916207-4916488
  hypo

SEQ ID NO: 385779 - DNA, 189 bp, Homo sapiens; identical to SEQ ID NO: 257338
  chr7:5530811-5531000
  hypo

SEQ ID NO: 385780 - DNA, 177 bp, Homo sapiens; identical to SEQ ID NO: 211384
  chr7:6500829-6501006
  hypo

SEQ ID NO: 385781 - DNA, 133 bp, Homo sapiens; identical to SEQ ID NO: 257395
  chr7:6662671-6662804
  hypo

SEQ ID NO: 385782 - DNA, 89 bp, Homo sapiens; identical to SEQ ID NO: 257416
  chr7:7666892-7666981
  hypo

SEQ ID NO: 385783 - DNA, 86 bp, Homo sapiens; identical to SEQ ID NO: 257417
  chr7:7799055-7799141
  hypo

SEQ ID NO: 385784 - DNA, 88 bp, Homo sapiens; identical to SEQ ID NO: 257438
  chr7:16313198-16313286
  hypo

SEQ ID NO: 385785 - DNA, 135 bp, Homo sapiens; identical to SEQ ID NO: 211404
  chr7:16438008-16438143
  hypo

SEQ ID NO: 385786 - DNA, 33 bp, Homo sapiens; identical to SEQ ID NO: 257447
  chr7:18041863-18041896
  hypo

SEQ ID NO: 385787 - DNA, 95 bp, Homo sapiens; identical to SEQ ID NO: 257491
  chr7:26687816-26687911
  hypo

SEQ ID NO: 385788 - DNA, 56 bp, Homo sapiens; identical to SEQ ID NO: 257524
  chr7:29689982-29690038
  hypo

SEQ ID NO: 385789 - DNA, 207 bp, Homo sapiens; identical to SEQ ID NO: 257556
  chr7:33542772-33542979
  hypo

SEQ ID NO: 385790 - DNA, 31 bp, Homo sapiens; identical to SEQ ID NO: 257565
  chr7:35066801-35066832
  hypo

SEQ ID NO: 385791 - DNA, 43 bp, Homo sapiens; identical to SEQ ID NO: 257579
  chr7:36823504-36823547
  hypo

SEQ ID NO: 385792 - DNA, 54 bp, Homo sapiens; identical to SEQ ID NO: 257585
  chr7:36985067-36985121
  hypo

SEQ ID NO: 385793 - DNA, 104 bp, Homo sapiens; identical to SEQ ID NO: 211497
  chr7:37250876-37250980
  hypo

SEQ ID NO: 385794 - DNA, 32 bp, Homo sapiens; identical to SEQ ID NO: 257599
  chr7:40156753-40156785
  hypo

SEQ ID NO: 385795 - DNA, 38 bp, Homo sapiens; identical to SEQ ID NO: 257602
  chr7:40840156-40840194
  hypo

SEQ ID NO: 385796 - DNA, 57 bp, Homo sapiens; identical to SEQ ID NO: 257609
  chr7:42142438-42142495
  hypo

SEQ ID NO: 385797 - DNA, 36 bp, Homo sapiens; identical to SEQ ID NO: 257631
  chr7:44250466-44250502
  hypo

SEQ ID NO: 385798 - DNA, 282 bp, Homo sapiens; identical to SEQ ID NO: 257664
  chr7:47338286-47338568
  hypo

SEQ ID NO: 385799 - DNA, 349 bp, Homo sapiens; identical to SEQ ID NO: 307715
  chr7:50341935-50342284
  hypo

SEQ ID NO: 385800 - DNA, 348 bp, Homo sapiens; identical to SEQ ID NO: 307716
  chr7:50342314-50342662
  hypo

SEQ ID NO: 385801 - DNA, 108 bp, Homo sapiens; identical to SEQ ID NO: 257703
  chr7:50460166-50460274
  hypo

SEQ ID NO: 385802 - DNA, 81 bp, Homo sapiens; identical to SEQ ID NO: 257723
  chr7:50821773-50821854
  hypo

SEQ ID NO: 385803 - DNA, 173 bp, Homo sapiens; identical to SEQ ID NO: 257735
  chr7:51130438-51130611
  hypo

SEQ ID NO: 385804 - DNA, 61 bp, Homo sapiens; identical to SEQ ID NO: 257753
  chr7:55468907-55468968
  hypo

SEQ ID NO: 385805 - DNA, 135 bp, Homo sapiens; identical to SEQ ID NO: 307801
  chr7:56144536-56144671
  hypo

SEQ ID NO: 385806 - DNA, 104 bp, Homo sapiens; identical to SEQ ID NO: 211570
  chr7:56636909-56637013
  hypo

SEQ ID NO: 385807 - DNA, 39 bp, Homo sapiens; identical to SEQ ID NO: 257792
  chr7:57712631-57712670
  hypo

SEQ ID NO: 385808 - DNA, 138 bp, Homo sapiens; identical to SEQ ID NO: 257815
  chr7:64478038-64478176
  hypo

SEQ ID NO: 385809 - DNA, 46 bp, Homo sapiens
  chr7:65562643-65562689
  hypo
ggatacaatagtaacatcaaggatcactggtcatagatcagcatga

SEQ ID NO: 385810 - DNA, 129 bp, Homo sapiens; identical to SEQ ID NO: 211600
  chr7:66369062-66369191
  hypo

SEQ ID NO: 385811 - DNA, 81 bp, Homo sapiens; identical to SEQ ID NO: 257885
  chr7:68008895-68008976
  hypo

SEQ ID NO: 385812 - DNA, 88 bp, Homo sapiens; identical to SEQ ID NO: 307935
  chr7:70311133-70311221
  hypo

SEQ ID NO: 385813 - DNA, 162 bp, Homo sapiens; identical to SEQ ID NO: 257911
  chr7:71251956-71252118
  hypo

SEQ ID NO: 385814 - DNA, 93 bp, Homo sapiens; identical to SEQ ID NO: 257921
  chr7:71913527-71913620
  hypo

SEQ ID NO: 385815 - DNA, 159 bp, Homo sapiens; identical to SEQ ID NO: 211621
  chr7:76632095-76632254
  hypo

SEQ ID NO: 385816 - DNA, 39 bp, Homo sapiens; identical to SEQ ID NO: 211622
  chr7:77184920-77184959
  hypo

SEQ ID NO: 385817 - DNA, 92 bp, Homo sapiens; identical to SEQ ID NO: 307984
  chr7:80790225-80790317
  hypo

SEQ ID NO: 385818 - DNA, 83 bp, Homo sapiens; identical to SEQ ID NO: 257951
  chr7:82176346-82176429
  hypo

SEQ ID NO: 385819 - DNA, 80 bp, Homo sapiens; identical to SEQ ID NO: 257956
  chr7:91655605-91655685
  hypo

SEQ ID NO: 385820 - DNA, 247 bp, Homo sapiens; identical to SEQ ID NO: 201045
  chr7:92463701-92463948
  hypo

SEQ ID NO: 385821 - DNA, 129 bp, Homo sapiens; identical to SEQ ID NO: 211647
  chr7:92939972-92940101
  hypo

SEQ ID NO: 385822 - DNA, 63 bp, Homo sapiens; identical to SEQ ID NO: 211649
  chr7:94293684-94293747
  hypo

SEQ ID NO: 385823 - DNA, 180 bp, Homo sapiens; identical to SEQ ID NO: 223145
  chr7:95064267-95064447
  hypo

SEQ ID NO: 385824 - DNA, 343 bp, Homo sapiens; identical to SEQ ID NO: 211661
  chr7:98115911-98116254
  hypo

SEQ ID NO: 385825 - DNA, 70 bp, Homo sapiens; identical to SEQ ID NO: 258035
  chr7:99065118-99065188
  hypo

SEQ ID NO: 385826 - DNA, 74 bp, Homo sapiens; identical to SEQ ID NO: 223155
  chr7:99613133-99613207
  hypo

SEQ ID NO: 385827 - DNA, 169 bp, Homo sapiens; identical to SEQ ID NO: 285215
  chr7:99725637-99725806
  hypo

SEQ ID NO: 385828 - DNA, 92 bp, Homo sapiens; identical to SEQ ID NO: 258058
  chr7:99849463-99849555
  hypo

SEQ ID NO: 385829 - DNA, 115 bp, Homo sapiens; identical to SEQ ID NO: 211686
  chr7:100025340-100025455
  hypo

SEQ ID NO: 385830 - DNA, 36 bp, Homo sapiens; identical to SEQ ID NO: 258073
  chr7:100189309-100189345
  hypo

SEQ ID NO: 385831 - DNA, 95 bp, Homo sapiens; identical to SEQ ID NO: 258076
  chr7:100246355-100246450
  hypo

SEQ ID NO: 385832 - DNA, 32 bp, Homo sapiens; identical to SEQ ID NO: 258077
  chr7:100258217-100258249
  hypo

SEQ ID NO: 385833 - DNA, 36 bp, Homo sapiens; identical to SEQ ID NO: 258100
  chr7:100834973-100835009
  hypo

SEQ ID NO: 385834 - DNA, 283 bp, Homo sapiens; identical to SEQ ID NO: 211720
  chr7:101583547-101583830
  hypo

SEQ ID NO: 385835 - DNA, 215 bp, Homo sapiens; identical to SEQ ID NO: 258140
  chr7:101653175-101653390
  hypo

SEQ ID NO: 385836 - DNA, 66 bp, Homo sapiens; identical to SEQ ID NO: 201105
  chr7:101842081-101842147
  hypo

SEQ ID NO: 385837 - DNA, 303 bp, Homo sapiens; identical to SEQ ID NO: 201110
  chr7:101870646-101870949
  hypo

SEQ ID NO: 385838 - DNA, 65 bp, Homo sapiens; identical to SEQ ID NO: 201121
  chr7:101926003-101926068
  hypo

SEQ ID NO: 385839 - DNA, 120 bp, Homo sapiens; identical to SEQ ID NO: 258168
  chr7:105278913-105279033
  hypo

SEQ ID NO: 385840 - DNA, 189 bp, Homo sapiens; identical to SEQ ID NO: 258171
  chr7:105399236-105399425
  hypo

SEQ ID NO: 385841 - DNA, 115 bp, Homo sapiens; identical to SEQ ID NO: 258189
  chr7:107430184-107430299
  hypo

SEQ ID NO: 385842 - DNA, 38 bp, Homo sapiens; identical to SEQ ID NO: 258208
  chr7:125532056-125532094
  hypo

SEQ ID NO: 385843 - DNA, 32 bp, Homo sapiens; identical to SEQ ID NO: 258209
  chr7:126013969-126014001
  hypo

SEQ ID NO: 385844 - DNA, 245 bp, Homo sapiens; identical to SEQ ID NO: 258212
  chr7:127235457-127235702
  hypo

SEQ ID NO: 385845 - DNA, 83 bp, Homo sapiens; identical to SEQ ID NO: 308344
  chr7:127615838-127615921
  hypo

SEQ ID NO: 385846 - DNA, 42 bp, Homo sapiens; identical to SEQ ID NO: 258240
  chr7:128534159-128534201
  hypo

SEQ ID NO: 385847 - DNA, 39 bp, Homo sapiens; identical to SEQ ID NO: 258259
  chr7:129483110-129483149
  hypo

SEQ ID NO: 385848 - DNA, 74 bp, Homo sapiens; identical to SEQ ID NO: 258269
  chr7:129780114-129780188
  hypo

SEQ ID NO: 385849 - DNA, 31 bp, Homo sapiens
  chr7:132419108-132419139
  hypo
ggaggaactccagggaaaaaccatctccctt

SEQ ID NO: 385850 - DNA, 92 bp, Homo sapiens; identical to SEQ ID NO: 211825
  chr7:133234086-133234178
  hypo

SEQ ID NO: 385851 - DNA, 32 bp, Homo sapiens
  chr7:134880722-134880754
  hypo
gacaggctgaccagtccactggcagctccaac

SEQ ID NO: 385852 - DNA, 238 bp, Homo sapiens; identical to SEQ ID NO: 211833
  chr7:134890670-134890908
  hypo

SEQ ID NO: 385853 - DNA, 96 bp, Homo sapiens; identical to SEQ ID NO: 211839
  chr7:136437909-136438005
  hypo

SEQ ID NO: 385854 - DNA, 37 bp, Homo sapiens; identical to SEQ ID NO: 258325
  chr7:137742304-137742341
  hypo

SEQ ID NO: 385855 - DNA, 37 bp, Homo sapiens; identical to SEQ ID NO: 258334
  chr7:138588489-138588526
  hypo

SEQ ID NO: 385856 - DNA, 437 bp, Homo sapiens; identical to SEQ ID NO: 223234
  chr7:139478051-139478488
  hypo

SEQ ID NO: 385857 - DNA, 346 bp, Homo sapiens; identical to SEQ ID NO: 211856
  chr7:139733611-139733957
  hypo

SEQ ID NO: 385858 - DNA, 142 bp, Homo sapiens; identical to SEQ ID NO: 258357
  chr7:139763645-139763787
  hypo

SEQ ID NO: 385859 - DNA, 44 bp, Homo sapiens; identical to SEQ ID NO: 258359
  chr7:139866424-139866468
  hypo

SEQ ID NO: 385860 - DNA, 169 bp, Homo sapiens; identical to SEQ ID NO: 258368
  chr7:140048397-140048566
  hypo

SEQ ID NO: 385861 - DNA, 77 bp, Homo sapiens; identical to SEQ ID NO: 258378
  chr7:140217363-140217440
  hypo

SEQ ID NO: 385862 - DNA, 180 bp, Homo sapiens; identical to SEQ ID NO: 258389
  chr7:142906905-142907085
  hypo

SEQ ID NO: 385863 - DNA, 144 bp, Homo sapiens; identical to SEQ ID NO: 258391
  chr7:143013314-143013458
  hypo

SEQ ID NO: 385864 - DNA, 257 bp, Homo sapiens; identical to SEQ ID NO: 223241
  chr7:144100839-144101096
  hypo

SEQ ID NO: 385865 - DNA, 152 bp, Homo sapiens; identical to SEQ ID NO: 201215
  chr7:145981901-145982053
  hypo

SEQ ID NO: 385866 - DNA, 42 bp, Homo sapiens; identical to SEQ ID NO: 258399
  chr7:146656356-146656398
  hypo

SEQ ID NO: 385867 - DNA, 128 bp, Homo sapiens; identical to SEQ ID NO: 258409
  chr7:148296995-148297123
  hypo

SEQ ID NO: 385868 - DNA, 71 bp, Homo sapiens; identical to SEQ ID NO: 201219
  chr7:148508741-148508812
  hypo

SEQ ID NO: 385869 - DNA, 319 bp, Homo sapiens; identical to SEQ ID NO: 258428
  chr7:148992084-148992403
  hypo

SEQ ID NO: 385870 - DNA, 32 bp, Homo sapiens; identical to SEQ ID NO: 211900
  chr7:149114320-149114352
  hypo

SEQ ID NO: 385871 - DNA, 131 bp, Homo sapiens; identical to SEQ ID NO: 258442
  chr7:149516460-149516591
  hypo

SEQ ID NO: 385872 - DNA, 51 bp, Homo sapiens; identical to SEQ ID NO: 258479
  chr7:151074139-151074190
  hypo

SEQ ID NO: 385873 - DNA, 131 bp, Homo sapiens; identical to SEQ ID NO: 258509
  chr7:151781606-151781737
  hypo

SEQ ID NO: 385874 - DNA, 205 bp, Homo sapiens; identical to SEQ ID NO: 258513
  chr7:151826350-151826555
  hypo

SEQ ID NO: 385875 - DNA, 80 bp, Homo sapiens; identical to SEQ ID NO: 258517
  chr7:152159225-152159305
  hypo

SEQ ID NO: 385876 - DNA, 39 bp, Homo sapiens; identical to SEQ ID NO: 211955
  chr7:152647711-152647750
  hypo

SEQ ID NO: 385877 - DNA, 86 bp, Homo sapiens; identical to SEQ ID NO: 258540
  chr7:153111045-153111131
  hypo

SEQ ID NO: 385878 - DNA, 233 bp, Homo sapiens; identical to SEQ ID NO: 258550
  chr7:154646528-154646761
  hypo

SEQ ID NO: 385879 - DNA, 68 bp, Homo sapiens; identical to SEQ ID NO: 258553
  chr7:154922371-154922439
  hypo

SEQ ID NO: 385880 - DNA, 195 bp, Homo sapiens; identical to SEQ ID NO: 211966
  chr7:155532479-155532674
  hypo

SEQ ID NO: 385881 - DNA, 187 bp, Homo sapiens; identical to SEQ ID NO: 258610
  chr7:156613330-156613517
  hypo

SEQ ID NO: 385882 - DNA, 86 bp, Homo sapiens; identical to SEQ ID NO: 211992
  chr7:156937634-156937720
  hypo

SEQ ID NO: 385883 - DNA, 222 bp, Homo sapiens; identical to SEQ ID NO: 258628
  chr7:157072934-157073156
  hypo

SEQ ID NO: 385884 - DNA, 123 bp, Homo sapiens; identical to SEQ ID NO: 308829
  chr7:157332825-157332948
  hypo

SEQ ID NO: 385885 - DNA, 115 bp, Homo sapiens; identical to SEQ ID NO: 308830
  chr7:157332978-157333093
  hypo

SEQ ID NO: 385886 - DNA, 134 bp, Homo sapiens; identical to SEQ ID NO: 258668
  chr7:157372651-157372785
  hypo

SEQ ID NO: 385887 - DNA, 249 bp, Homo sapiens; identical to SEQ ID NO: 258678
  chr7:157413023-157413272
  hypo

SEQ ID NO: 385888 - DNA, 155 bp, Homo sapiens; identical to SEQ ID NO: 212027
  chr7:157567209-157567364
  hypo

SEQ ID NO: 385889 - DNA, 123 bp, Homo sapiens; identical to SEQ ID NO: 258714
  chr7:157620461-157620584
  hypo

SEQ ID NO: 385890 - DNA, 40 bp, Homo sapiens; identical to SEQ ID NO: 308913
  chr7:157660158-157660198
  hypo

SEQ ID NO: 385891 - DNA, 65 bp, Homo sapiens; identical to SEQ ID NO: 258737
  chr7:157731890-157731955
  hypo

SEQ ID NO: 385892 - DNA, 50 bp, Homo sapiens; identical to SEQ ID NO: 258754
  chr7:157903545-157903595
  hypo

SEQ ID NO: 385893 - DNA, 104 bp, Homo sapiens; identical to SEQ ID NO: 258755
  chr7:157903815-157903919
  hypo

SEQ ID NO: 385894 - DNA, 151 bp, Homo sapiens; identical to SEQ ID NO: 212062
  chr7:157981292-157981443
  hypo

SEQ ID NO: 385895 - DNA, 290 bp, Homo sapiens; identical to SEQ ID NO: 258778
  chr7:158044818-158045108
  hypo

SEQ ID NO: 385896 - DNA, 117 bp, Homo sapiens; identical to SEQ ID NO: 258807
  chr7:158307739-158307856
  hypo

SEQ ID NO: 385897 - DNA, 196 bp, Homo sapiens; identical to SEQ ID NO: 212098
  chr7:158792183-158792379
  hypo

SEQ ID NO: 385898 - DNA, 106 bp, Homo sapiens; identical to SEQ ID NO: 258840
  chr8:287940-288046
  hypo

SEQ ID NO: 385899 - DNA, 93 bp, Homo sapiens; identical to SEQ ID NO: 285610
  chr8:495072-495165
  hypo

SEQ ID NO: 385900 - DNA, 33 bp, Homo sapiens; identical to SEQ ID NO: 309040
  chr8:566474-566507
  hypo

SEQ ID NO: 385901 - DNA, 76 bp, Homo sapiens; identical to SEQ ID NO: 258857
  chr8:978468-978544
  hypo

SEQ ID NO: 385902 - DNA, 74 bp, Homo sapiens; identical to SEQ ID NO: 212108
  chr8:1048772-1048846
  hypo

SEQ ID NO: 385903 - DNA, 298 bp, Homo sapiens; identical to SEQ ID NO: 258882
  chr8:1475085-1475383
  hypo

SEQ ID NO: 385904 - DNA, 213 bp, Homo sapiens; identical to SEQ ID NO: 309084
  chr8:1501387-1501600
  hypo

SEQ ID NO: 385905 - DNA, 382 bp, Homo sapiens; identical to SEQ ID NO: 258896
  chr8:1791891-1792273
  hypo

SEQ ID NO: 385906 - DNA, 33 bp, Homo sapiens; identical to SEQ ID NO: 212126
  chr8:1926963-1926996
  hypo

SEQ ID NO: 385907 - DNA, 253 bp, Homo sapiens; identical to SEQ ID NO: 258924
  chr8:5829440-5829693
  hypo

SEQ ID NO: 385908 - DNA, 134 bp, Homo sapiens; identical to SEQ ID NO: 258925
  chr8:5909951-5910085
  hypo

SEQ ID NO: 385909 - DNA, 272 bp, Homo sapiens; identical to SEQ ID NO: 258929
  chr8:6323187-6323459
  hypo

SEQ ID NO: 385910 - DNA, 328 bp, Homo sapiens; identical to SEQ ID NO: 258951
  chr8:8471121-8471449
  hypo

SEQ ID NO: 385911 - DNA, 159 bp, Homo sapiens; identical to SEQ ID NO: 212146
  chr8:8690237-8690396
  hypo

SEQ ID NO: 385912 - DNA, 167 bp, Homo sapiens; identical to SEQ ID NO: 223304
  chr8:8750284-8750451
  hypo

SEQ ID NO: 385913 - DNA, 139 bp, Homo sapiens; identical to SEQ ID NO: 223305
  chr8:8750520-8750659
  hypo

SEQ ID NO: 385914 - DNA, 141 bp, Homo sapiens; identical to SEQ ID NO: 309189
  chr8:10192957-10193098
  hypo

SEQ ID NO: 385915 - DNA, 176 bp, Homo sapiens; identical to SEQ ID NO: 212161
  chr8:10261662-10261838
  hypo

SEQ ID NO: 385916 - DNA, 188 bp, Homo sapiens; identical to SEQ ID NO: 212162
  chr8:10261986-10262174
  hypo

SEQ ID NO: 385917 - DNA, 66 bp, Homo sapiens; identical to SEQ ID NO: 212167
  chr8:11612347-11612413
  hypo

SEQ ID NO: 385918 - DNA, 75 bp, Homo sapiens; identical to SEQ ID NO: 258998
  chr8:11646750-11646825
  hypo

SEQ ID NO: 385919 - DNA, 225 bp, Homo sapiens; identical to SEQ ID NO: 212171
  chr8:12623675-12623900
  hypo

SEQ ID NO: 385920 - DNA, 101 bp, Homo sapiens; identical to SEQ ID NO: 259018
  chr8:17360874-17360975
  hypo

SEQ ID NO: 385921 - DNA, 64 bp, Homo sapiens; identical to SEQ ID NO: 259034
  chr8:19715650-19715714
  hypo

SEQ ID NO: 385922 - DNA, 195 bp, Homo sapiens; identical to SEQ ID NO: 259038
  chr8:21590921-21591116
  hypo

SEQ ID NO: 385923 - DNA, 78 bp, Homo sapiens; identical to SEQ ID NO: 384230
  chr8:22408681-22408759
  hypo

SEQ ID NO: 385924 - DNA, 309 bp, Homo sapiens; identical to SEQ ID NO: 223333
  chr8:22925472-22925781
  hypo

SEQ ID NO: 385925 - DNA, 202 bp, Homo sapiens; identical to SEQ ID NO: 259088
  chr8:25107887-25108089
  hypo

SEQ ID NO: 385926 - DNA, 144 bp, Homo sapiens; identical to SEQ ID NO: 285758
  chr8:25902185-25902329
  hypo

SEQ ID NO: 385927 - DNA, 43 bp, Homo sapiens; identical to SEQ ID NO: 384236
  chr8:26372150-26372193
  hypo

SEQ ID NO: 385928 - DNA, 64 bp, Homo sapiens; identical to SEQ ID NO: 223345
  chr8:26435020-26435084
  hypo

SEQ ID NO: 385929 - DNA, 33 bp, Homo sapiens; identical to SEQ ID NO: 259109
  chr8:27327202-27327235
  hypo

SEQ ID NO: 385930 - DNA, 612 bp, Homo sapiens; identical to SEQ ID NO: 259120
  chr8:28208626-28209238
  hypo

SEQ ID NO: 385931 - DNA, 61 bp, Homo sapiens; identical to SEQ ID NO: 259124
  chr8:28269021-28269082
  hypo

SEQ ID NO: 385932 - DNA, 208 bp, Homo sapiens; identical to SEQ ID NO: 259126
  chr8:28610787-28610995
  hypo

SEQ ID NO: 385933 - DNA, 41 bp, Homo sapiens; identical to SEQ ID NO: 212233
  chr8:29951802-29951843
  hypo

SEQ ID NO: 385934 - DNA, 99 bp, Homo sapiens; identical to SEQ ID NO: 212234
  chr8:29958255-29958354
  hypo

SEQ ID NO: 385935 - DNA, 32 bp, Homo sapiens; identical to SEQ ID NO: 259150
  chr8:36636712-36636744
  hypo

SEQ ID NO: 385936 - DNA, 42 bp, Homo sapiens; identical to SEQ ID NO: 259171
  chr8:38361680-38361722
  hypo

SEQ ID NO: 385937 - DNA, 275 bp, Homo sapiens; identical to SEQ ID NO: 259192
  chr8:41590545-41590820
  hypo

SEQ ID NO: 385938 - DNA, 34 bp, Homo sapiens; identical to SEQ ID NO: 201399
  chr8:42040329-42040363
  hypo

SEQ ID NO: 385939 - DNA, 42 bp, Homo sapiens; identical to SEQ ID NO: 212262
  chr8:42256016-42256058
  hypo

SEQ ID NO: 385940 - DNA, 297 bp, Homo sapiens; identical to SEQ ID NO: 259212
  chr8:42293859-42294156
  hypo

SEQ ID NO: 385941 - DNA, 240 bp, Homo sapiens; identical to SEQ ID NO: 223372
  chr8:48650853-48651093
  hypo

SEQ ID NO: 385942 - DNA, 116 bp, Homo sapiens; identical to SEQ ID NO: 259239
  chr8:48694944-48695060
  hypo

SEQ ID NO: 385943 - DNA, 161 bp, Homo sapiens; identical to SEQ ID NO: 259244
  chr8:48854509-48854670
  hypo

SEQ ID NO: 385944 - DNA, 75 bp, Homo sapiens; identical to SEQ ID NO: 212279
  chr8:48854908-48854983
  hypo

SEQ ID NO: 385945 - DNA, 83 bp, Homo sapiens; identical to SEQ ID NO: 259246
  chr8:48985104-48985187
  hypo

SEQ ID NO: 385946 - DNA, 160 bp, Homo sapiens; identical to SEQ ID NO: 259267
  chr8:49803111-49803271
  hypo

SEQ ID NO: 385947 - DNA, 82 bp, Homo sapiens; identical to SEQ ID NO: 259281
  chr8:50740531-50740613
  hypo

SEQ ID NO: 385948 - DNA, 250 bp, Homo sapiens; identical to SEQ ID NO: 259297
  chr8:54507104-54507354
  hypo

SEQ ID NO: 385949 - DNA, 68 bp, Homo sapiens; identical to SEQ ID NO: 212306
  chr8:56361773-56361841
  hypo

SEQ ID NO: 385950 - DNA, 225 bp, Homo sapiens; identical to SEQ ID NO: 309565
  chr8:56362075-56362300
  hypo

SEQ ID NO: 385951 - DNA, 398 bp, Homo sapiens; identical to SEQ ID NO: 259321
  chr8:57079620-57080018
  hypo

SEQ ID NO: 385952 - DNA, 250 bp, Homo sapiens; identical to SEQ ID NO: 259326
  chr8:58117447-58117697
  hypo

SEQ ID NO: 385953 - DNA, 59 bp, Homo sapiens; identical to SEQ ID NO: 259341
  chr8:61590513-61590572
  hypo

SEQ ID NO: 385954 - DNA, 85 bp, Homo sapiens; identical to SEQ ID NO: 259342
  chr8:61627786-61627871
  hypo

SEQ ID NO: 385955 - DNA, 105 bp, Homo sapiens; identical to SEQ ID NO: 259345
  chr8:62221611-62221716
  hypo

SEQ ID NO: 385956 - DNA, 1119 bp, Homo sapiens; identical to SEQ ID NO: 223399
  chr8:62626314-62627433
  hypo

SEQ ID NO: 385957 - DNA, 38 bp, Homo sapiens; identical to SEQ ID NO: 212325
  chr8:65757970-65758008
  hypo

SEQ ID NO: 385958 - DNA, 154 bp, Homo sapiens; identical to SEQ ID NO: 259367
  chr8:68236303-68236457
  hypo

SEQ ID NO: 385959 - DNA, 271 bp, Homo sapiens; identical to SEQ ID NO: 384254
  chr8:68864200-68864471
  hypo

SEQ ID NO: 385960 - DNA, 38 bp, Homo sapiens; identical to SEQ ID NO: 384255
  chr8:68864942-68864980
  hypo

SEQ ID NO: 385961 - DNA, 141 bp, Homo sapiens; identical to SEQ ID NO: 212346
  chr8:75737615-75737756
  hypo

SEQ ID NO: 385962 - DNA, 37 bp, Homo sapiens; identical to SEQ ID NO: 212350
  chr8:80998635-80998672
  hypo

SEQ ID NO: 385963 - DNA, 38 bp, Homo sapiens; identical to SEQ ID NO: 259402
  chr8:81820451-81820489
  hypo

SEQ ID NO: 385964 - DNA, 32 bp, Homo sapiens; identical to SEQ ID NO: 212365
  chr8:92433536-92433568
  hypo

SEQ ID NO: 385965 - DNA, 159 bp, Homo sapiens; identical to SEQ ID NO: 259449
  chr8:97265370-97265529
  hypo

SEQ ID NO: 385966 - DNA, 258 bp, Homo sapiens; identical to SEQ ID NO: 259450
  chr8:97333717-97333975
  hypo

SEQ ID NO: 385967 - DNA, 39 bp, Homo sapiens; identical to SEQ ID NO: 259488
  chr8:102524933-102524972
  hypo

SEQ ID NO: 385968 - DNA, 38 bp, Homo sapiens; identical to SEQ ID NO: 259495
  chr8:103588277-103588315
  hypo

SEQ ID NO: 385969 - DNA, 33 bp, Homo sapiens; identical to SEQ ID NO: 212403
  chr8:103629516-103629549
  hypo

SEQ ID NO: 385970 - DNA, 33 bp, Homo sapiens; identical to SEQ ID NO: 212404
  chr8:103878119-103878152
  hypo

SEQ ID NO: 385971 - DNA, 59 bp, Homo sapiens; identical to SEQ ID NO: 309822
  chr8:110274931-110274990
  hypo

SEQ ID NO: 385972 - DNA, 84 bp, Homo sapiens; identical to SEQ ID NO: 201572
  chr8:117861184-117861268
  hypo

SEQ ID NO: 385973 - DNA, 107 bp, Homo sapiens; identical to SEQ ID NO: 201580
  chr8:117870590-117870697
  hypo

SEQ ID NO: 385974 - DNA, 170 bp, Homo sapiens; identical to SEQ ID NO: 259545
  chr8:119611614-119611784
  hypo

SEQ ID NO: 385975 - DNA, 61 bp, Homo sapiens
  chr8:124187226-124187287
  hypo
gttgtcttgtagattgtcccatgttctggatttttctgattgtttccttctcatgggatga

SEQ ID NO: 385976 - DNA, 31 bp, Homo sapiens
  chr8:124238850-124238881
  hypo
ttgggtaaactgaagcagaagcctgaaaaac

SEQ ID NO: 385977 - DNA, 141 bp, Homo sapiens; identical to SEQ ID NO: 259575
  chr8:124247665-124247806
  hypo

SEQ ID NO: 385978 - DNA, 366 bp, Homo sapiens; identical to SEQ ID NO: 259590
  chr8:124965500-124965866
  hypo

SEQ ID NO: 385979 - DNA, 38 bp, Homo sapiens; identical to SEQ ID NO: 259607
  chr8:125992005-125992043
  hypo

SEQ ID NO: 385980 - DNA, 40 bp, Homo sapiens; identical to SEQ ID NO: 259614
  chr8:126321193-126321233
  hypo

SEQ ID NO: 385981 - DNA, 125 bp, Homo sapiens; identical to SEQ ID NO: 259625
  chr8:128735792-128735917
  hypo

SEQ ID NO: 385982 - DNA, 41 bp, Homo sapiens; identical to SEQ ID NO: 212477
  chr8:128896287-128896328
  hypo

SEQ ID NO: 385983 - DNA, 483 bp, Homo sapiens; identical to SEQ ID NO: 259661
  chr8:134278414-134278897
  hypo

SEQ ID NO: 385984 - DNA, 77 bp, Homo sapiens; identical to SEQ ID NO: 259750
  chr8:141436007-141436084
  hypo

SEQ ID NO: 385985 - DNA, 66 bp, Homo sapiens; identical to SEQ ID NO: 212529
  chr8:141587942-141588008
  hypo

SEQ ID NO: 385986 - DNA, 102 bp, Homo sapiens; identical to SEQ ID NO: 212532
  chr8:141594755-141594857
  hypo

SEQ ID NO: 385987 - DNA, 50 bp, Homo sapiens; identical to SEQ ID NO: 212533
  chr8:141594912-141594962
  hypo

SEQ ID NO: 385988 - DNA, 152 bp, Homo sapiens; identical to SEQ ID NO: 212539
  chr8:141636160-141636312
  hypo

SEQ ID NO: 385989 - DNA, 561 bp, Homo sapiens; identical to SEQ ID NO: 223499
  chr8:142010302-142010863
  hypo

SEQ ID NO: 385990 - DNA, 235 bp, Homo sapiens; identical to SEQ ID NO: 259792
  chr8:142190007-142190242
  hypo

SEQ ID NO: 385991 - DNA, 117 bp, Homo sapiens; identical to SEQ ID NO: 259817
  chr8:142278840-142278957
  hypo

SEQ ID NO: 385992 - DNA, 239 bp, Homo sapiens; identical to SEQ ID NO: 212584
  chr8:142537302-142537541
  hypo

SEQ ID NO: 385993 - DNA, 148 bp, Homo sapiens; identical to SEQ ID NO: 259846
  chr8:142544218-142544366
  hypo

SEQ ID NO: 385994 - DNA, 563 bp, Homo sapiens; identical to SEQ ID NO: 212591
  chr8:143152592-143153155
  hypo

SEQ ID NO: 385995 - DNA, 315 bp, Homo sapiens; identical to SEQ ID NO: 259885
  chr8:143406189-143406504
  hypo

SEQ ID NO: 385996 - DNA, 221 bp, Homo sapiens; identical to SEQ ID NO: 212603
  chr8:143424645-143424866
  hypo

SEQ ID NO: 385997 - DNA, 43 bp, Homo sapiens; identical to SEQ ID NO: 259899
  chr8:143550866-143550909
  hypo

SEQ ID NO: 385998 - DNA, 688 bp, Homo sapiens; identical to SEQ ID NO: 259915
  chr8:143868761-143869449
  hypo

SEQ ID NO: 385999 - DNA, 185 bp, Homo sapiens; identical to SEQ ID NO: 212620
  chr8:144203468-144203653
  hypo

SEQ ID NO: 386000 - DNA, 35 bp, Homo sapiens; identical to SEQ ID NO: 212621
  chr8:144203942-144203977
  hypo

SEQ ID NO: 386001 - DNA, 418 bp, Homo sapiens; identical to SEQ ID NO: 212622
  chr8:144204021-144204439
  hypo

SEQ ID NO: 386002 - DNA, 79 bp, Homo sapiens; identical to SEQ ID NO: 259960
  chr8:144387632-144387711
  hypo

SEQ ID NO: 386003 - DNA, 95 bp, Homo sapiens; identical to SEQ ID NO: 259961
  chr8:144390545-144390640
  hypo

SEQ ID NO: 386004 - DNA, 303 bp, Homo sapiens; identical to SEQ ID NO: 384271
  chr8:144512510-144512813
  hypo

SEQ ID NO: 386005 - DNA, 37 bp, Homo sapiens; identical to SEQ ID NO: 259982
  chr8:144567459-144567496
  hypo

SEQ ID NO: 386006 - DNA, 147 bp, Homo sapiens; identical to SEQ ID NO: 259984
  chr8:144577123-144577270
  hypo

SEQ ID NO: 386007 - DNA, 33 bp, Homo sapiens; identical to SEQ ID NO: 212646
  chr8:144589672-144589705
  hypo

SEQ ID NO: 386008 - DNA, 60 bp, Homo sapiens; identical to SEQ ID NO: 260001
  chr8:145163871-145163931
  hypo

SEQ ID NO: 386009 - DNA, 211 bp, Homo sapiens; identical to SEQ ID NO: 260014
  chr8:145736700-145736911
  hypo

SEQ ID NO: 386010 - DNA, 566 bp, Homo sapiens; identical to SEQ ID NO: 260025
  chr8:145772641-145773207
  hypo

SEQ ID NO: 386011 - DNA, 188 bp, Homo sapiens; identical to SEQ ID NO: 260028
  chr8:145804872-145805060
  hypo

SEQ ID NO: 386012 - DNA, 36 bp, Homo sapiens; identical to SEQ ID NO: 212673
  chr8:145826579-145826615
  hypo

SEQ ID NO: 386013 - DNA, 42 bp, Homo sapiens; identical to SEQ ID NO: 260044
  chr8:145849872-145849914
  hypo

SEQ ID NO: 386014 - DNA, 93 bp, Homo sapiens; identical to SEQ ID NO: 260068
  chr9:2272286-2272379
  hypo

SEQ ID NO: 386015 - DNA, 78 bp, Homo sapiens; identical to SEQ ID NO: 212696
  chr9:4714888-4714966
  hypo

SEQ ID NO: 386016 - DNA, 160 bp, Homo sapiens; identical to SEQ ID NO: 260077
  chr9:4804634-4804794
  hypo

SEQ ID NO: 386017 - DNA, 113 bp, Homo sapiens; identical to SEQ ID NO: 260089
  chr9:7032961-7033074
  hypo

SEQ ID NO: 386018 - DNA, 96 bp, Homo sapiens; identical to SEQ ID NO: 260098
  chr9:14355600-14355696
  hypo

SEQ ID NO: 386019 - DNA, 206 bp, Homo sapiens; identical to SEQ ID NO: 212719
  chr9:14607839-14608045
  hypo

SEQ ID NO: 386020 - DNA, 150 bp, Homo sapiens; identical to SEQ ID NO: 384275
  chr9:25677903-25678053
  hypo

SEQ ID NO: 386021 - DNA, 256 bp, Homo sapiens; identical to SEQ ID NO: 384276
  chr9:25678127-25678383
  hypo

SEQ ID NO: 386022 - DNA, 32 bp, Homo sapiens; identical to SEQ ID NO: 212742
  chr9:33834158-33834190
  hypo

SEQ ID NO: 386023 - DNA, 81 bp, Homo sapiens; identical to SEQ ID NO: 212747
  chr9:34316317-34316398
  hypo

SEQ ID NO: 386024 - DNA, 112 bp, Homo sapiens; identical to SEQ ID NO: 260163
  chr9:36118828-36118940
  hypo

SEQ ID NO: 386025 - DNA, 142 bp, Homo sapiens; identical to SEQ ID NO: 260175
  chr9:37409148-37409290
  hypo

SEQ ID NO: 386026 - DNA, 333 bp, Homo sapiens; identical to SEQ ID NO: 384281
  chr9:38067788-38068121
  hypo

SEQ ID NO: 386027 - DNA, 749 bp, Homo sapiens; identical to SEQ ID NO: 201714
  chr9:38068158-38068907
  hypo

SEQ ID NO: 386028 - DNA, 92 bp, Homo sapiens; identical to SEQ ID NO: 260199
  chr9:38075105-38075197
  hypo

SEQ ID NO: 386029 - DNA, 102 bp, Homo sapiens; identical to SEQ ID NO: 260216
  chr9:71664072-71664174
  hypo

SEQ ID NO: 386030 - DNA, 100 bp, Homo sapiens; identical to SEQ ID NO: 260234
  chr9:75136042-75136142
  hypo

SEQ ID NO: 386031 - DNA, 87 bp, Homo sapiens; identical to SEQ ID NO: 260273
  chr9:80544725-80544812
  hypo

SEQ ID NO: 386032 - DNA, 203 bp, Homo sapiens; identical to SEQ ID NO: 260275
  chr9:80563224-80563427
  hypo

SEQ ID NO: 386033 - DNA, 33 bp, Homo sapiens; identical to SEQ ID NO: 260295
  chr9:87655019-87655052
  hypo

SEQ ID NO: 386034 - DNA, 248 bp, Homo sapiens; identical to SEQ ID NO: 212818
  chr9:88694097-88694345
  hypo

SEQ ID NO: 386035 - DNA, 108 bp, Homo sapiens; identical to SEQ ID NO: 212819
  chr9:88694438-88694546
  hypo

SEQ ID NO: 386036 - DNA, 47 bp, Homo sapiens; identical to SEQ ID NO: 260327
  chr9:91140238-91140285
  hypo

SEQ ID NO: 386037 - DNA, 51 bp, Homo sapiens; identical to SEQ ID NO: 212839
  chr9:92140641-92140692
  hypo

SEQ ID NO: 386038 - DNA, 40 bp, Homo sapiens; identical to SEQ ID NO: 260347
  chr9:92231503-92231543
  hypo

SEQ ID NO: 386039 - DNA, 223 bp, Homo sapiens; identical to SEQ ID NO: 212845
  chr9:94124707-94124930
  hypo

SEQ ID NO: 386040 - DNA, 100 bp, Homo sapiens; identical to SEQ ID NO: 212848
  chr9:95003570-95003670
  hypo

SEQ ID NO: 386041 - DNA, 38 bp, Homo sapiens; identical to SEQ ID NO: 212849
  chr9:95010672-95010710
  hypo

SEQ ID NO: 386042 - DNA, 96 bp, Homo sapiens; identical to SEQ ID NO: 260372
  chr9:95380371-95380467
  hypo

SEQ ID NO: 386043 - DNA, 231 bp, Homo sapiens; identical to SEQ ID NO: 260374
  chr9:95403858-95404089
  hypo

SEQ ID NO: 386044 - DNA, 36 bp, Homo sapiens; identical to SEQ ID NO: 212859
  chr9:96230446-96230482
  hypo

SEQ ID NO: 386045 - DNA, 410 bp, Homo sapiens; identical to SEQ ID NO: 212861
  chr9:96275710-96276120
  hypo

SEQ ID NO: 386046 - DNA, 171 bp, Homo sapiens; identical to SEQ ID NO: 260405
  chr9:96446747-96446918
  hypo

SEQ ID NO: 386047 - DNA, 168 bp, Homo sapiens; identical to SEQ ID NO: 310874
  chr9:97679314-97679482
  hypo

SEQ ID NO: 386048 - DNA, 216 bp, Homo sapiens; identical to SEQ ID NO: 260438
  chr9:97847400-97847616
  hypo

SEQ ID NO: 386049 - DNA, 77 bp, Homo sapiens; identical to SEQ ID NO: 260446
  chr9:97887433-97887510
  hypo

SEQ ID NO: 386050 - DNA, 207 bp, Homo sapiens; identical to SEQ ID NO: 260453
  chr9:98490544-98490751
  hypo

SEQ ID NO: 386051 - DNA, 196 bp, Homo sapiens; identical to SEQ ID NO: 260462
  chr9:99267708-99267904
  hypo

SEQ ID NO: 386052 - DNA, 204 bp, Homo sapiens; identical to SEQ ID NO: 223644
  chr9:99417397-99417601
  hypo

SEQ ID NO: 386053 - DNA, 76 bp, Homo sapiens; identical to SEQ ID NO: 260471
  chr9:100308892-100308968
  hypo

SEQ ID NO: 386054 - DNA, 128 bp, Homo sapiens; identical to SEQ ID NO: 212891
  chr9:100890703-100890831
  hypo

SEQ ID NO: 386055 - DNA, 156 bp, Homo sapiens; identical to SEQ ID NO: 212895
  chr9:101280572-101280728
  hypo

SEQ ID NO: 386056 - DNA, 120 bp, Homo sapiens; identical to SEQ ID NO: 260515
  chr9:108257889-108258009
  hypo

SEQ ID NO: 386057 - DNA, 265 bp, Homo sapiens; identical to SEQ ID NO: 212911
  chr9:110096156-110096421
  hypo

SEQ ID NO: 386058 - DNA, 44 bp, Homo sapiens; identical to SEQ ID NO: 260536
  chr9:110861945-110861989
  hypo

SEQ ID NO: 386059 - DNA, 32 bp, Homo sapiens; identical to SEQ ID NO: 260537
  chr9:111446306-111446338
  hypo

SEQ ID NO: 386060 - DNA, 78 bp, Homo sapiens; identical to SEQ ID NO: 260546
  chr9:112295751-112295829
  hypo

SEQ ID NO: 386061 - DNA, 84 bp, Homo sapiens; identical to SEQ ID NO: 260547
  chr9:112847321-112847405
  hypo

SEQ ID NO: 386062 - DNA, 240 bp, Homo sapiens; identical to SEQ ID NO: 212924
  chr9:114619240-114619480
  hypo

SEQ ID NO: 386063 - DNA, 157 bp, Homo sapiens; identical to SEQ ID NO: 212926
  chr9:114750309-114750466
  hypo

SEQ ID NO: 386064 - DNA, 181 bp, Homo sapiens; identical to SEQ ID NO: 260559
  chr9:114823149-114823330
  hypo

SEQ ID NO: 386065 - DNA, 137 bp, Homo sapiens; identical to SEQ ID NO: 212928
  chr9:114832553-114832690
  hypo

SEQ ID NO: 386066 - DNA, 78 bp, Homo sapiens; identical to SEQ ID NO: 260571
  chr9:115519017-115519095
  hypo

SEQ ID NO: 386067 - DNA, 199 bp, Homo sapiens; identical to SEQ ID NO: 260572
  chr9:115550632-115550831
  hypo

SEQ ID NO: 386068 - DNA, 273 bp, Homo sapiens; identical to SEQ ID NO: 260575
  chr9:115630952-115631225
  hypo

SEQ ID NO: 386069 - DNA, 233 bp, Homo sapiens; identical to SEQ ID NO: 212932
  chr9:116061763-116061996
  hypo

SEQ ID NO: 386070 - DNA, 71 bp, Homo sapiens
  chr9:116066129-116066200
  hypo
gctcaaattctttttgtacctatggtcctcttttctttctctctctctttctttctttttttttttctttc

SEQ ID NO: 386071 - DNA, 233 bp, Homo sapiens; identical to SEQ ID NO: 260593
  chr9:116663446-116663679
  hypo

SEQ ID NO: 386072 - DNA, 137 bp, Homo sapiens; identical to SEQ ID NO: 212937
  chr9:116671888-116672025
  hypo

SEQ ID NO: 386073 - DNA, 150 bp, Homo sapiens; identical to SEQ ID NO: 260603
  chr9:116760431-116760581
  hypo

SEQ ID NO: 386074 - DNA, 104 bp, Homo sapiens; identical to SEQ ID NO: 212957
  chr9:123965022-123965126
  hypo

SEQ ID NO: 386075 - DNA, 42 bp, Homo sapiens; identical to SEQ ID NO: 260664
  chr9:125573936-125573978
  hypo

SEQ ID NO: 386076 - DNA, 42 bp, Homo sapiens; identical to SEQ ID NO: 260669
  chr9:125878079-125878121
  hypo

SEQ ID NO: 386077 - DNA, 195 bp, Homo sapiens; identical to SEQ ID NO: 212969
  chr9:126100875-126101070
  hypo

SEQ ID NO: 386078 - DNA, 78 bp, Homo sapiens; identical to SEQ ID NO: 260695
  chr9:126403904-126403982
  hypo

SEQ ID NO: 386079 - DNA, 37 bp, Homo sapiens; identical to SEQ ID NO: 260729
  chr9:128032923-128032960
  hypo

SEQ ID NO: 386080 - DNA, 138 bp, Homo sapiens; identical to SEQ ID NO: 212989
  chr9:128135749-128135887
  hypo

SEQ ID NO: 386081 - DNA, 93 bp, Homo sapiens; identical to SEQ ID NO: 212991
  chr9:128399989-128400082
  hypo

SEQ ID NO: 386082 - DNA, 105 bp, Homo sapiens; identical to SEQ ID NO: 260746
  chr9:128718758-128718863
  hypo

SEQ ID NO: 386083 - DNA, 295 bp, Homo sapiens; identical to SEQ ID NO: 260757
  chr9:129038608-129038903
  hypo

SEQ ID NO: 386084 - DNA, 119 bp, Homo sapiens; identical to SEQ ID NO: 260760
  chr9:129454751-129454870
  hypo

SEQ ID NO: 386085 - DNA, 38 bp, Homo sapiens; identical to SEQ ID NO: 260773
  chr9:129648781-129648819
  hypo

SEQ ID NO: 386086 - DNA, 317 bp, Homo sapiens; identical to SEQ ID NO: 260780
  chr9:130270528-130270845
  hypo

SEQ ID NO: 386087 - DNA, 198 bp, Homo sapiens; identical to SEQ ID NO: 213004
  chr9:130271243-130271441
  hypo

SEQ ID NO: 386088 - DNA, 69 bp, Homo sapiens; identical to SEQ ID NO: 213006
  chr9:130279231-130279300
  hypo

SEQ ID NO: 386089 - DNA, 203 bp, Homo sapiens; identical to SEQ ID NO: 260788
  chr9:130297782-130297985
  hypo

SEQ ID NO: 386090 - DNA, 185 bp, Homo sapiens; identical to SEQ ID NO: 213015
  chr9:130635124-130635309
  hypo

SEQ ID NO: 386091 - DNA, 107 bp, Homo sapiens; identical to SEQ ID NO: 260815
  chr9:130716085-130716192
  hypo

SEQ ID NO: 386092 - DNA, 40 bp, Homo sapiens; identical to SEQ ID NO: 213024
  chr9:131060967-131061007
  hypo

SEQ ID NO: 386093 - DNA, 147 bp, Homo sapiens; identical to SEQ ID NO: 213026
  chr9:131411426-131411573
  hypo

SEQ ID NO: 386094 - DNA, 112 bp, Homo sapiens; identical to SEQ ID NO: 213033
  chr9:131776674-131776786
  hypo

SEQ ID NO: 386095 - DNA, 36 bp, Homo sapiens; identical to SEQ ID NO: 260865
  chr9:132285635-132285671
  hypo

SEQ ID NO: 386096 - DNA, 33 bp, Homo sapiens; identical to SEQ ID NO: 260919
  chr9:133580976-133581009
  hypo

SEQ ID NO: 386097 - DNA, 69 bp, Homo sapiens
  chr9:133593031-133593100
  hypo
gtgtctctggggggtaaaaaaaaaaaaaaatacagttcattggtagagtttcttaaaggcagccagcct

SEQ ID NO: 386098 - DNA, 157 bp, Homo sapiens; identical to SEQ ID NO: 260980
  chr9:135360968-135361125
  hypo

SEQ ID NO: 386099 - DNA, 83 bp, Homo sapiens; identical to SEQ ID NO: 260983
  chr9:135479250-135479333
  hypo

SEQ ID NO: 386100 - DNA, 112 bp, Homo sapiens; identical to SEQ ID NO: 260989
  chr9:135537995-135538107
  hypo

SEQ ID NO: 386101 - DNA, 176 bp, Homo sapiens; identical to SEQ ID NO: 213114
  chr9:136382777-136382953
  hypo

SEQ ID NO: 386102 - DNA, 174 bp, Homo sapiens; identical to SEQ ID NO: 213133
  chr9:136699684-136699858
  hypo

SEQ ID NO: 386103 - DNA, 179 bp, Homo sapiens; identical to SEQ ID NO: 213137
  chr9:136723290-136723469
  hypo

SEQ ID NO: 386104 - DNA, 230 bp, Homo sapiens; identical to SEQ ID NO: 261114
  chr9:136920306-136920536
  hypo

SEQ ID NO: 386105 - DNA, 99 bp, Homo sapiens; identical to SEQ ID NO: 261132
  chr9:137497208-137497307
  hypo

SEQ ID NO: 386106 - DNA, 81 bp, Homo sapiens; identical to SEQ ID NO: 311653
  chr9:137575945-137576026
  hypo

SEQ ID NO: 386107 - DNA, 82 bp, Homo sapiens; identical to SEQ ID NO: 261165
  chr9:137926909-137926991
  hypo

SEQ ID NO: 386108 - DNA, 43 bp, Homo sapiens; identical to SEQ ID NO: 261173
  chr9:138150429-138150472
  hypo

SEQ ID NO: 386109 - DNA, 89 bp, Homo sapiens; identical to SEQ ID NO: 213163
  chr9:138297097-138297186
  hypo

SEQ ID NO: 386110 - DNA, 56 bp, Homo sapiens; identical to SEQ ID NO: 311704
  chr9:138353991-138354047
  hypo

SEQ ID NO: 386111 - DNA, 77 bp, Homo sapiens; identical to SEQ ID NO: 213175
  chr9:138796808-138796885
  hypo

SEQ ID NO: 386112 - DNA, 55 bp, Homo sapiens; identical to SEQ ID NO: 213183
  chr9:138907131-138907186
  hypo

SEQ ID NO: 386113 - DNA, 184 bp, Homo sapiens; identical to SEQ ID NO: 213184
  chr9:138910983-138911167
  hypo

SEQ ID NO: 386114 - DNA, 52 bp, Homo sapiens; identical to SEQ ID NO: 311785
  chr9:139114399-139114451
  hypo

SEQ ID NO: 386115 - DNA, 848 bp, Homo sapiens; identical to SEQ ID NO: 311786
  chr9:139114481-139115329
  hypo

SEQ ID NO: 386116 - DNA, 138 bp, Homo sapiens; identical to SEQ ID NO: 261266
  chr9:139121427-139121565
  hypo

SEQ ID NO: 386117 - DNA, 34 bp, Homo sapiens; identical to SEQ ID NO: 213210
  chr9:139272165-139272199
  hypo

SEQ ID NO: 386118 - DNA, 365 bp, Homo sapiens; identical to SEQ ID NO: 213217
  chr9:139345460-139345825
  hypo

SEQ ID NO: 386119 - DNA, 80 bp, Homo sapiens; identical to SEQ ID NO: 311815
  chr9:139367958-139368038
  hypo

SEQ ID NO: 386120 - DNA, 321 bp, Homo sapiens; identical to SEQ ID NO: 213233
  chr9:139585994-139586315
  hypo

SEQ ID NO: 386121 - DNA, 60 bp, Homo sapiens; identical to SEQ ID NO: 311851
  chr9:139638538-139638598
  hypo

SEQ ID NO: 386122 - DNA, 32 bp, Homo sapiens; identical to SEQ ID NO: 261386
  chr9:140216846-140216878
  hypo

SEQ ID NO: 386123 - DNA, 37 bp, Homo sapiens; identical to SEQ ID NO: 261408
  chr9:140418788-140418825
  hypo

SEQ ID NO: 386124 - DNA, 42 bp, Homo sapiens; identical to SEQ ID NO: 213286
  chr9:140576167-140576209
  hypo

SEQ ID NO: 386125 - DNA, 381 bp, Homo sapiens; identical to SEQ ID NO: 213293
  chr9:140615063-140615444
  hypo

SEQ ID NO: 386126 - DNA, 79 bp, Homo sapiens; identical to SEQ ID NO: 213294
  chr9:140615492-140615571
  hypo

SEQ ID NO: 386127 - DNA, 40 bp, Homo sapiens; identical to SEQ ID NO: 213299
  chr9:140633524-140633564
  hypo

SEQ ID NO: 386128 - DNA, 92 bp, Homo sapiens; identical to SEQ ID NO: 312041
  chr10:673704-673796
  hypo

SEQ ID NO: 386129 - DNA, 40 bp, Homo sapiens; identical to SEQ ID NO: 213335
  chr10:685212-685252
  hypo

SEQ ID NO: 386130 - DNA, 235 bp, Homo sapiens; identical to SEQ ID NO: 213357
  chr10:1252355-1252590
  hypo

SEQ ID NO: 386131 - DNA, 128 bp, Homo sapiens; identical to SEQ ID NO: 213358
  chr10:1252620-1252748
  hypo

SEQ ID NO: 386132 - DNA, 724 bp, Homo sapiens; identical to SEQ ID NO: 261532
  chr10:1283790-1284514
  hypo

SEQ ID NO: 386133 - DNA, 211 bp, Homo sapiens; identical to SEQ ID NO: 261533
  chr10:1286699-1286910
  hypo

SEQ ID NO: 386134 - DNA, 79 bp, Homo sapiens; identical to SEQ ID NO: 261565
  chr10:2364622-2364701
  hypo

SEQ ID NO: 386135 - DNA, 42 bp, Homo sapiens; identical to SEQ ID NO: 261570
  chr10:2782246-2782288
  hypo

SEQ ID NO: 386136 - DNA, 55 bp, Homo sapiens; identical to SEQ ID NO: 261582
  chr10:3171106-3171161
  hypo

SEQ ID NO: 386137 - DNA, 230 bp, Homo sapiens; identical to SEQ ID NO: 261604
  chr10:3512565-3512795
  hypo

SEQ ID NO: 386138 - DNA, 78 bp, Homo sapiens; identical to SEQ ID NO: 261647
  chr10:5902471-5902549
  hypo

SEQ ID NO: 386139 - DNA, 256 bp, Homo sapiens; identical to SEQ ID NO: 261662
  chr10:6151972-6152228
  hypo

SEQ ID NO: 386140 - DNA, 264 bp, Homo sapiens; identical to SEQ ID NO: 261666
  chr10:6211184-6211448
  hypo

SEQ ID NO: 386141 - DNA, 195 bp, Homo sapiens; identical to SEQ ID NO: 261674
  chr10:6852535-6852730
  hypo

SEQ ID NO: 386142 - DNA, 42 bp, Homo sapiens; identical to SEQ ID NO: 261679
  chr10:7083317-7083359
  hypo

SEQ ID NO: 386143 - DNA, 138 bp, Homo sapiens; identical to SEQ ID NO: 261715
  chr10:7426168-7426306
  hypo

SEQ ID NO: 386144 - DNA, 41 bp, Homo sapiens; identical to SEQ ID NO: 213446
  chr10:11184680-11184721
  hypo

SEQ ID NO: 386145 - DNA, 75 bp, Homo sapiens; identical to SEQ ID NO: 261763
  chr10:11847448-11847523
  hypo

SEQ ID NO: 386146 - DNA, 78 bp, Homo sapiens; identical to SEQ ID NO: 261768
  chr10:11911399-11911477
  hypo

SEQ ID NO: 386147 - DNA, 32 bp, Homo sapiens; identical to SEQ ID NO: 261769
  chr10:11914996-11915028
  hypo

SEQ ID NO: 386148 - DNA, 50 bp, Homo sapiens; identical to SEQ ID NO: 261772
  chr10:11941266-11941316
  hypo

SEQ ID NO: 386149 - DNA, 181 bp, Homo sapiens; identical to SEQ ID NO: 261794
  chr10:12768863-12769044
  hypo

SEQ ID NO: 386150 - DNA, 241 bp, Homo sapiens; identical to SEQ ID NO: 201985
  chr10:13341387-13341628
  hypo

SEQ ID NO: 386151 - DNA, 35 bp, Homo sapiens; identical to SEQ ID NO: 261808
  chr10:13516622-13516657
  hypo

SEQ ID NO: 386152 - DNA, 333 bp, Homo sapiens; identical to SEQ ID NO: 261818
  chr10:13769492-13769825
  hypo

SEQ ID NO: 386153 - DNA, 101 bp, Homo sapiens; identical to SEQ ID NO: 261834
  chr10:15022595-15022696
  hypo

SEQ ID NO: 386154 - DNA, 97 bp, Homo sapiens; identical to SEQ ID NO: 261855
  chr10:16955825-16955922
  hypo

SEQ ID NO: 386155 - DNA, 39 bp, Homo sapiens
  chr10:17157575-17157614
  hypo
gtctcaggtgggcagtgacaactgttggttacacaagag

SEQ ID NO: 386156 - DNA, 32 bp, Homo sapiens; identical to SEQ ID NO: 261859
  chr10:17331810-17331842
  hypo

SEQ ID NO: 386157 - DNA, 37 bp, Homo sapiens; identical to SEQ ID NO: 261898
  chr10:24966120-24966157
  hypo

SEQ ID NO: 386158 - DNA, 33 bp, Homo sapiens; identical to SEQ ID NO: 261902
  chr10:26819343-26819376
  hypo

SEQ ID NO: 386159 - DNA, 89 bp, Homo sapiens; identical to SEQ ID NO: 213506
  chr10:27089296-27089385
  hypo

SEQ ID NO: 386160 - DNA, 36 bp, Homo sapiens; identical to SEQ ID NO: 213507
  chr10:27096989-27097025
  hypo

SEQ ID NO: 386161 - DNA, 86 bp, Homo sapiens; identical to SEQ ID NO: 213516
  chr10:29300155-29300241
  hypo

SEQ ID NO: 386162 - DNA, 61 bp, Homo sapiens; identical to SEQ ID NO: 223802
  chr10:29738072-29738133
  hypo

SEQ ID NO: 386163 - DNA, 158 bp, Homo sapiens; identical to SEQ ID NO: 261934
  chr10:29821666-29821824
  hypo

SEQ ID NO: 386164 - DNA, 207 bp, Homo sapiens; identical to SEQ ID NO: 261937
  chr10:29884472-29884679
  hypo

SEQ ID NO: 386165 - DNA, 47 bp, Homo sapiens; identical to SEQ ID NO: 261939
  chr10:30280769-30280816
  hypo

SEQ ID NO: 386166 - DNA, 240 bp, Homo sapiens; identical to SEQ ID NO: 261941
  chr10:30454426-30454666
  hypo

SEQ ID NO: 386167 - DNA, 36 bp, Homo sapiens; identical to SEQ ID NO: 213525
  chr10:32333609-32333645
  hypo

SEQ ID NO: 386168 - DNA, 167 bp, Homo sapiens; identical to SEQ ID NO: 261970
  chr10:34558597-34558764
  hypo

SEQ ID NO: 386169 - DNA, 35 bp, Homo sapiens; identical to SEQ ID NO: 384311
  chr10:35105213-35105248
  hypo

SEQ ID NO: 386170 - DNA, 52 bp, Homo sapiens; identical to SEQ ID NO: 262026
  chr10:61552788-61552840
  hypo

SEQ ID NO: 386171 - DNA, 41 bp, Homo sapiens; identical to SEQ ID NO: 213564
  chr10:63757869-63757910
  hypo

SEQ ID NO: 386172 - DNA, 120 bp, Homo sapiens; identical to SEQ ID NO: 213566
  chr10:69853849-69853969
  hypo

SEQ ID NO: 386173 - DNA, 35 bp, Homo sapiens; identical to SEQ ID NO: 384318
  chr10:71892801-71892836
  hypo

SEQ ID NO: 386174 - DNA, 99 bp, Homo sapiens; identical to SEQ ID NO: 262083
  chr10:73036106-73036205
  hypo

SEQ ID NO: 386175 - DNA, 53 bp, Homo sapiens; identical to SEQ ID NO: 213586
  chr10:73553163-73553216
  hypo

SEQ ID NO: 386176 - DNA, 100 bp, Homo sapiens; identical to SEQ ID NO: 384319
  chr10:73848222-73848322
  hypo

SEQ ID NO: 386177 - DNA, 294 bp, Homo sapiens; identical to SEQ ID NO: 223842
  chr10:74032607-74032901
  hypo

SEQ ID NO: 386178 - DNA, 141 bp, Homo sapiens; identical to SEQ ID NO: 223844
  chr10:75408169-75408310
  hypo

SEQ ID NO: 386179 - DNA, 96 bp, Homo sapiens; identical to SEQ ID NO: 312743
  chr10:75832593-75832689
  hypo

SEQ ID NO: 386180 - DNA, 366 bp, Homo sapiens; identical to SEQ ID NO: 262130
  chr10:76780147-76780513
  hypo

SEQ ID NO: 386181 - DNA, 173 bp, Homo sapiens; identical to SEQ ID NO: 213599
  chr10:76796613-76796786
  hypo

SEQ ID NO: 386182 - DNA, 469 bp, Homo sapiens; identical to SEQ ID NO: 223850
  chr10:79686575-79687044
  hypo

SEQ ID NO: 386183 - DNA, 63 bp, Homo sapiens; identical to SEQ ID NO: 213610
  chr10:80739956-80740019
  hypo

SEQ ID NO: 386184 - DNA, 316 bp, Homo sapiens; identical to SEQ ID NO: 262175
  chr10:80953306-80953622
  hypo

SEQ ID NO: 386185 - DNA, 47 bp, Homo sapiens; identical to SEQ ID NO: 262190
  chr10:81029634-81029681
  hypo

SEQ ID NO: 386186 - DNA, 433 bp, Homo sapiens; identical to SEQ ID NO: 213630
  chr10:81036657-81037090
  hypo

SEQ ID NO: 386187 - DNA, 162 bp, Homo sapiens; identical to SEQ ID NO: 262205
  chr10:81861006-81861168
  hypo

SEQ ID NO: 386188 - DNA, 224 bp, Homo sapiens; identical to SEQ ID NO: 262226
  chr10:88470510-88470734
  hypo

SEQ ID NO: 386189 - DNA, 277 bp, Homo sapiens; identical to SEQ ID NO: 213650
  chr10:90029772-90030049
  hypo

SEQ ID NO: 386190 - DNA, 95 bp, Homo sapiens; identical to SEQ ID NO: 262263
  chr10:98482590-98482685
  hypo

SEQ ID NO: 386191 - DNA, 34 bp, Homo sapiens; identical to SEQ ID NO: 262266
  chr10:98676070-98676104
  hypo

SEQ ID NO: 386192 - DNA, 426 bp, Homo sapiens; identical to SEQ ID NO: 213673
  chr10:100178510-100178936
  hypo

SEQ ID NO: 386193 - DNA, 211 bp, Homo sapiens; identical to SEQ ID NO: 262281
  chr10:100194215-100194426
  hypo

SEQ ID NO: 386194 - DNA, 61 bp, Homo sapiens; identical to SEQ ID NO: 312968
  chr10:104161594-104161655
  hypo

SEQ ID NO: 386195 - DNA, 34 bp, Homo sapiens; identical to SEQ ID NO: 213685
  chr10:104230570-104230604
  hypo

SEQ ID NO: 386196 - DNA, 33 bp, Homo sapiens; identical to SEQ ID NO: 213691
  chr10:105238592-105238625
  hypo

SEQ ID NO: 386197 - DNA, 321 bp, Homo sapiens; identical to SEQ ID NO: 262320
  chr10:105345023-105345344
  hypo

SEQ ID NO: 386198 - DNA, 38 bp, Homo sapiens; identical to SEQ ID NO: 262325
  chr10:105487458-105487496
  hypo

SEQ ID NO: 386199 - DNA, 35 bp, Homo sapiens; identical to SEQ ID NO: 262330
  chr10:106032651-106032686
  hypo

SEQ ID NO: 386200 - DNA, 55 bp, Homo sapiens; identical to SEQ ID NO: 213693
  chr10:106075696-106075751
  hypo

SEQ ID NO: 386201 - DNA, 76 bp, Homo sapiens; identical to SEQ ID NO: 202262
  chr10:112328695-112328771
  hypo

SEQ ID NO: 386202 - DNA, 151 bp, Homo sapiens; identical to SEQ ID NO: 202277
  chr10:112352830-112352981
  hypo

SEQ ID NO: 386203 - DNA, 404 bp, Homo sapiens; identical to SEQ ID NO: 202285
  chr10:112363988-112364392
  hypo

SEQ ID NO: 386204 - DNA, 102 bp, Homo sapiens; identical to SEQ ID NO: 213730
  chr10:114867548-114867650
  hypo

SEQ ID NO: 386205 - DNA, 138 bp, Homo sapiens; identical to SEQ ID NO: 262364
  chr10:114868048-114868186
  hypo

SEQ ID NO: 386206 - DNA, 92 bp, Homo sapiens; identical to SEQ ID NO: 313075
  chr10:115844855-115844947
  hypo

SEQ ID NO: 386207 - DNA, 131 bp, Homo sapiens; identical to SEQ ID NO: 213750
  chr10:121265440-121265571
  hypo

SEQ ID NO: 386208 - DNA, 77 bp, Homo sapiens; identical to SEQ ID NO: 262427
  chr10:123335738-123335815
  hypo

SEQ ID NO: 386209 - DNA, 45 bp, Homo sapiens; identical to SEQ ID NO: 213766
  chr10:124712595-124712640
  hypo

SEQ ID NO: 386210 - DNA, 80 bp, Homo sapiens; identical to SEQ ID NO: 262449
  chr10:125984183-125984263
  hypo

SEQ ID NO: 386211 - DNA, 181 bp, Homo sapiens; identical to SEQ ID NO: 262499
  chr10:126763482-126763663
  hypo

SEQ ID NO: 386212 - DNA, 291 bp, Homo sapiens; identical to SEQ ID NO: 262508
  chr10:126789760-126790051
  hypo

SEQ ID NO: 386213 - DNA, 85 bp, Homo sapiens; identical to SEQ ID NO: 262526
  chr10:127659356-127659441
  hypo

SEQ ID NO: 386214 - DNA, 203 bp, Homo sapiens; identical to SEQ ID NO: 262545
  chr10:128904395-128904598
  hypo

SEQ ID NO: 386215 - DNA, 194 bp, Homo sapiens; identical to SEQ ID NO: 262547
  chr10:128936062-128936256
  hypo

SEQ ID NO: 386216 - DNA, 52 bp, Homo sapiens; identical to SEQ ID NO: 262577
  chr10:130259851-130259903
  hypo

SEQ ID NO: 386217 - DNA, 191 bp, Homo sapiens; identical to SEQ ID NO: 213820
  chr10:131577565-131577756
  hypo

SEQ ID NO: 386218 - DNA, 152 bp, Homo sapiens; identical to SEQ ID NO: 262605
  chr10:131826126-131826278
  hypo

SEQ ID NO: 386219 - DNA, 36 bp, Homo sapiens; identical to SEQ ID NO: 262613
  chr10:132284135-132284171
  hypo

SEQ ID NO: 386220 - DNA, 32 bp, Homo sapiens; identical to SEQ ID NO: 262626
  chr10:133229420-133229452
  hypo

SEQ ID NO: 386221 - DNA, 89 bp, Homo sapiens; identical to SEQ ID NO: 213826
  chr10:133557718-133557807
  hypo

SEQ ID NO: 386222 - DNA, 158 bp, Homo sapiens; identical to SEQ ID NO: 262629
  chr10:133572409-133572567
  hypo

SEQ ID NO: 386223 - DNA, 291 bp, Homo sapiens; identical to SEQ ID NO: 262640
  chr10:133981379-133981670
  hypo

SEQ ID NO: 386224 - DNA, 40 bp, Homo sapiens; identical to SEQ ID NO: 313361
  chr10:134019294-134019334
  hypo

SEQ ID NO: 386225 - DNA, 408 bp, Homo sapiens; identical to SEQ ID NO: 313362
  chr10:134019364-134019772
  hypo

SEQ ID NO: 386226 - DNA, 349 bp, Homo sapiens; identical to SEQ ID NO: 262650
  chr10:134035687-134036036
  hypo

SEQ ID NO: 386227 - DNA, 44 bp, Homo sapiens; identical to SEQ ID NO: 262667
  chr10:134171806-134171850
  hypo

SEQ ID NO: 386228 - DNA, 201 bp, Homo sapiens; identical to SEQ ID NO: 262688
  chr10:134459516-134459717
  hypo

SEQ ID NO: 386229 - DNA, 669 bp, Homo sapiens; identical to SEQ ID NO: 262742
  chr10:134722154-134722823
  hypo

SEQ ID NO: 386230 - DNA, 178 bp, Homo sapiens; identical to SEQ ID NO: 262744
  chr10:134724608-134724786
  hypo

SEQ ID NO: 386231 - DNA, 258 bp, Homo sapiens; identical to SEQ ID NO: 262778
  chr10:134920248-134920506
  hypo

SEQ ID NO: 386232 - DNA, 86 bp, Homo sapiens; identical to SEQ ID NO: 262827
  chr10:135381780-135381866
  hypo

SEQ ID NO: 386233 - DNA, 138 bp, Homo sapiens; identical to SEQ ID NO: 262829
  chr11:251677-251815
  hypo

SEQ ID NO: 386234 - DNA, 153 bp, Homo sapiens; identical to SEQ ID NO: 262843
  chr11:419276-419429
  hypo

SEQ ID NO: 386235 - DNA, 182 bp, Homo sapiens; identical to SEQ ID NO: 202391
  chr11:518712-518894
  hypo

SEQ ID NO: 386236 - DNA, 61 bp, Homo sapiens; identical to SEQ ID NO: 287725
  chr11:518933-518994
  hypo

SEQ ID NO: 386237 - DNA, 37 bp, Homo sapiens; identical to SEQ ID NO: 213934
  chr11:534210-534247
  hypo

SEQ ID NO: 386238 - DNA, 129 bp, Homo sapiens; identical to SEQ ID NO: 262875
  chr11:605030-605159
  hypo

SEQ ID NO: 386239 - DNA, 68 bp, Homo sapiens; identical to SEQ ID NO: 262882
  chr11:702894-702962
  hypo

SEQ ID NO: 386240 - DNA, 61 bp, Homo sapiens; identical to SEQ ID NO: 262904
  chr11:873724-873785
  hypo

SEQ ID NO: 386241 - DNA, 294 bp, Homo sapiens; identical to SEQ ID NO: 213957
  chr11:991642-991936
  hypo

SEQ ID NO: 386242 - DNA, 268 bp, Homo sapiens; identical to SEQ ID NO: 262930
  chr11:1035491-1035759
  hypo

SEQ ID NO: 386243 - DNA, 55 bp, Homo sapiens; identical to SEQ ID NO: 262967
  chr11:1312883-1312938
  hypo

SEQ ID NO: 386244 - DNA, 278 bp, Homo sapiens; identical to SEQ ID NO: 262968
  chr11:1360071-1360349
  hypo

SEQ ID NO: 386245 - DNA, 58 bp, Homo sapiens; identical to SEQ ID NO: 262971
  chr11:1390811-1390869
  hypo

SEQ ID NO: 386246 - DNA, 197 bp, Homo sapiens; identical to SEQ ID NO: 262997
  chr11:1553266-1553463
  hypo

SEQ ID NO: 386247 - DNA, 328 bp, Homo sapiens; identical to SEQ ID NO: 313785
  chr11:1857545-1857873
  hypo

SEQ ID NO: 386248 - DNA, 129 bp, Homo sapiens; identical to SEQ ID NO: 313786
  chr11:1857933-1858062
  hypo

SEQ ID NO: 386249 - DNA, 191 bp, Homo sapiens; identical to SEQ ID NO: 263047
  chr11:2051191-2051382
  hypo

SEQ ID NO: 386250 - DNA, 152 bp, Homo sapiens; identical to SEQ ID NO: 263051
  chr11:2107097-2107249
  hypo

SEQ ID NO: 386251 - DNA, 171 bp, Homo sapiens; identical to SEQ ID NO: 263062
  chr11:2136032-2136203
  hypo

SEQ ID NO: 386252 - DNA, 200 bp, Homo sapiens; identical to SEQ ID NO: 263067
  chr11:2183694-2183894
  hypo

SEQ ID NO: 386253 - DNA, 106 bp, Homo sapiens; identical to SEQ ID NO: 214011
  chr11:2294685-2294791
  hypo

SEQ ID NO: 386254 - DNA, 43 bp, Homo sapiens; identical to SEQ ID NO: 263109
  chr11:2581754-2581797
  hypo

SEQ ID NO: 386255 - DNA, 63 bp, Homo sapiens; identical to SEQ ID NO: 263111
  chr11:2595670-2595733
  hypo

SEQ ID NO: 386256 - DNA, 143 bp, Homo sapiens; identical to SEQ ID NO: 263115
  chr11:2720203-2720346
  hypo

SEQ ID NO: 386257 - DNA, 218 bp, Homo sapiens; identical to SEQ ID NO: 263127
  chr11:2865183-2865401
  hypo

SEQ ID NO: 386258 - DNA, 215 bp, Homo sapiens; identical to SEQ ID NO: 263129
  chr11:2874227-2874442
  hypo

SEQ ID NO: 386259 - DNA, 54 bp, Homo sapiens; identical to SEQ ID NO: 263131
  chr11:2885741-2885795
  hypo

SEQ ID NO: 386260 - DNA, 197 bp, Homo sapiens; identical to SEQ ID NO: 214033
  chr11:2939101-2939298
  hypo

SEQ ID NO: 386261 - DNA, 179 bp, Homo sapiens; identical to SEQ ID NO: 214060
  chr11:8759790-8759969
  hypo

SEQ ID NO: 386262 - DNA, 190 bp, Homo sapiens; identical to SEQ ID NO: 263206
  chr11:9074512-9074702
  hypo

SEQ ID NO: 386263 - DNA, 105 bp, Homo sapiens; identical to SEQ ID NO: 214068
  chr11:9567905-9568010
  hypo

SEQ ID NO: 386264 - DNA, 49 bp, Homo sapiens; identical to SEQ ID NO: 263220
  chr11:9620658-9620707
  hypo

SEQ ID NO: 386265 - DNA, 577 bp, Homo sapiens; identical to SEQ ID NO: 224046
  chr11:9685464-9686041
  hypo

SEQ ID NO: 386266 - DNA, 112 bp, Homo sapiens; identical to SEQ ID NO: 263224
  chr11:10512606-10512718
  hypo

SEQ ID NO: 386267 - DNA, 198 bp, Homo sapiens; identical to SEQ ID NO: 263267
  chr11:12296625-12296823
  hypo

SEQ ID NO: 386268 - DNA, 104 bp, Homo sapiens; identical to SEQ ID NO: 263275
  chr11:12990320-12990424
  hypo

SEQ ID NO: 386269 - DNA, 260 bp, Homo sapiens; identical to SEQ ID NO: 224059
  chr11:17498486-17498746
  hypo

SEQ ID NO: 386270 - DNA, 58 bp, Homo sapiens; identical to SEQ ID NO: 314088
  chr11:17653729-17653787
  hypo

SEQ ID NO: 386271 - DNA, 158 bp, Homo sapiens; identical to SEQ ID NO: 263298
  chr11:17905736-17905894
  hypo

SEQ ID NO: 386272 - DNA, 36 bp, Homo sapiens; identical to SEQ ID NO: 263314
  chr11:27381177-27381213
  hypo

SEQ ID NO: 386273 - DNA, 83 bp, Homo sapiens; identical to SEQ ID NO: 263321
  chr11:31760147-31760230
  hypo

SEQ ID NO: 386274 - DNA, 127 bp, Homo sapiens; identical to SEQ ID NO: 263331
  chr11:33667398-33667525
  hypo

SEQ ID NO: 386275 - DNA, 111 bp, Homo sapiens; identical to SEQ ID NO: 263337
  chr11:34190793-34190904
  hypo

SEQ ID NO: 386276 - DNA, 74 bp, Homo sapiens; identical to SEQ ID NO: 214138
  chr11:35661156-35661230
  hypo

SEQ ID NO: 386277 - DNA, 38 bp, Homo sapiens; identical to SEQ ID NO: 214139
  chr11:36060520-36060558
  hypo

SEQ ID NO: 386278 - DNA, 37 bp, Homo sapiens; identical to SEQ ID NO: 214140
  chr11:36060798-36060835
  hypo

SEQ ID NO: 386279 - DNA, 82 bp, Homo sapiens; identical to SEQ ID NO: 214143
  chr11:40039796-40039878
  hypo

SEQ ID NO: 386280 - DNA, 33 bp, Homo sapiens; identical to SEQ ID NO: 263388
  chr11:44993090-44993123
  hypo

SEQ ID NO: 386281 - DNA, 195 bp, Homo sapiens; identical to SEQ ID NO: 214157
  chr11:45951099-45951294
  hypo

SEQ ID NO: 386282 - DNA, 189 bp, Homo sapiens; identical to SEQ ID NO: 263399
  chr11:45955789-45955978
  hypo

SEQ ID NO: 386283 - DNA, 186 bp, Homo sapiens; identical to SEQ ID NO: 214170
  chr11:47169578-47169764
  hypo

SEQ ID NO: 386284 - DNA, 80 bp, Homo sapiens; identical to SEQ ID NO: 263422
  chr11:47431265-47431345
  hypo

SEQ ID NO: 386285 - DNA, 180 bp, Homo sapiens; identical to SEQ ID NO: 263423
  chr11:47479675-47479855
  hypo

SEQ ID NO: 386286 - DNA, 93 bp, Homo sapiens; identical to SEQ ID NO: 263472
  chr11:60680209-60680302
  hypo

SEQ ID NO: 386287 - DNA, 230 bp, Homo sapiens; identical to SEQ ID NO: 214192
  chr11:60689401-60689631
  hypo

SEQ ID NO: 386288 - DNA, 173 bp, Homo sapiens; identical to SEQ ID NO: 214195
  chr11:60880738-60880911
  hypo

SEQ ID NO: 386289 - DNA, 100 bp, Homo sapiens; identical to SEQ ID NO: 214204
  chr11:61108987-61109087
  hypo

SEQ ID NO: 386290 - DNA, 169 bp, Homo sapiens; identical to SEQ ID NO: 263494
  chr11:61110433-61110602
  hypo

SEQ ID NO: 386291 - DNA, 52 bp, Homo sapiens; identical to SEQ ID NO: 263504
  chr11:61475156-61475208
  hypo

SEQ ID NO: 386292 - DNA, 240 bp, Homo sapiens; identical to SEQ ID NO: 224116
  chr11:61520025-61520265
  hypo

SEQ ID NO: 386293 - DNA, 458 bp, Homo sapiens; identical to SEQ ID NO: 214219
  chr11:61522483-61522941
  hypo

SEQ ID NO: 386294 - DNA, 407 bp, Homo sapiens; identical to SEQ ID NO: 214223
  chr11:61632399-61632806
  hypo

SEQ ID NO: 386295 - DNA, 63 bp, Homo sapiens; identical to SEQ ID NO: 314360
  chr11:61666025-61666088
  hypo

SEQ ID NO: 386296 - DNA, 66 bp, Homo sapiens; identical to SEQ ID NO: 214236
  chr11:61688731-61688797
  hypo

SEQ ID NO: 386297 - DNA, 44 bp, Homo sapiens; identical to SEQ ID NO: 214242
  chr11:61825693-61825737
  hypo

SEQ ID NO: 386298 - DNA, 49 bp, Homo sapiens; identical to SEQ ID NO: 314392
  chr11:62450079-62450128
  hypo

SEQ ID NO: 386299 - DNA, 120 bp, Homo sapiens; identical to SEQ ID NO: 263573
  chr11:62658210-62658330
  hypo

SEQ ID NO: 386300 - DNA, 69 bp, Homo sapiens; identical to SEQ ID NO: 214260
  chr11:63764163-63764232
  hypo

SEQ ID NO: 386301 - DNA, 252 bp, Homo sapiens; identical to SEQ ID NO: 263613
  chr11:63916439-63916691
  hypo

SEQ ID NO: 386302 - DNA, 229 bp, Homo sapiens; identical to SEQ ID NO: 214281
  chr11:64120593-64120822
  hypo

SEQ ID NO: 386303 - DNA, 171 bp, Homo sapiens; identical to SEQ ID NO: 214282
  chr11:64120948-64121119
  hypo

SEQ ID NO: 386304 - DNA, 42 bp, Homo sapiens; identical to SEQ ID NO: 214288
  chr11:64335474-64335516
  hypo

SEQ ID NO: 386305 - DNA, 65 bp, Homo sapiens; identical to SEQ ID NO: 263655
  chr11:64521038-64521103
  hypo

SEQ ID NO: 386306 - DNA, 99 bp, Homo sapiens; identical to SEQ ID NO: 314526
  chr11:64975361-64975460
  hypo

SEQ ID NO: 386307 - DNA, 329 bp, Homo sapiens; identical to SEQ ID NO: 314527
  chr11:64975532-64975861
  hypo

SEQ ID NO: 386308 - DNA, 168 bp, Homo sapiens; identical to SEQ ID NO: 214312
  chr11:65306213-65306381
  hypo

SEQ ID NO: 386309 - DNA, 350 bp, Homo sapiens; identical to SEQ ID NO: 214313
  chr11:65306425-65306775
  hypo

SEQ ID NO: 386310 - DNA, 299 bp, Homo sapiens
  chr11:65306805-65307104
  hypo
gcgggcgcgggaggcgtcgagctggaagccgccgggacactcgcacacggcgccgcccggccgcggcacgcagcggccactcacgcagcgacactcgtctgaatcctcctctgaactgtcctcatctgcgtggcccggaacaatatggacttcaacactgagccccggccaaaggctaccaaccccgccaccgcccgacccggcagcactcacctcttgggggcttccccaacagcagggggcttgtgtcccagaaggaattgctctcgctctgcgatgtcgggcaatgggaccctggg

SEQ ID NO: 386311 - DNA, 224 bp, Homo sapiens; identical to SEQ ID NO: 214315
  chr11:65353078-65353302
  hypo

SEQ ID NO: 386312 - DNA, 37 bp, Homo sapiens; identical to SEQ ID NO: 214322
  chr11:65524510-65524547
  hypo

SEQ ID NO: 386313 - DNA, 226 bp, Homo sapiens; identical to SEQ ID NO: 314567
  chr11:65629224-65629450
  hypo

SEQ ID NO: 386314 - DNA, 119 bp, Homo sapiens; identical to SEQ ID NO: 263749
  chr11:66461612-66461731
  hypo

SEQ ID NO: 386315 - DNA, 97 bp, Homo sapiens; identical to SEQ ID NO: 263768
  chr11:66637738-66637835
  hypo

SEQ ID NO: 386316 - DNA, 40 bp, Homo sapiens; identical to SEQ ID NO: 263769
  chr11:66639553-66639593
  hypo

SEQ ID NO: 386317 - DNA, 298 bp, Homo sapiens; identical to SEQ ID NO: 214361
  chr11:66676020-66676318
  hypo

SEQ ID NO: 386318 - DNA, 346 bp, Homo sapiens; identical to SEQ ID NO: 214364
  chr11:66701354-66701700
  hypo

SEQ ID NO: 386319 - DNA, 31 bp, Homo sapiens; identical to SEQ ID NO: 214369
  chr11:67002080-67002111
  hypo

SEQ ID NO: 386320 - DNA, 77 bp, Homo sapiens; identical to SEQ ID NO: 214370
  chr11:67051193-67051270
  hypo

SEQ ID NO: 386321 - DNA, 105 bp, Homo sapiens; identical to SEQ ID NO: 224150
  chr11:67141093-67141198
  hypo

SEQ ID NO: 386322 - DNA, 76 bp, Homo sapiens; identical to SEQ ID NO: 263806
  chr11:67145532-67145608
  hypo

SEQ ID NO: 386323 - DNA, 289 bp, Homo sapiens; identical to SEQ ID NO: 263819
  chr11:67257336-67257625
  hypo

SEQ ID NO: 386324 - DNA, 64 bp, Homo sapiens; identical to SEQ ID NO: 214390
  chr11:67810254-67810318
  hypo

SEQ ID NO: 386325 - DNA, 257 bp, Homo sapiens; identical to SEQ ID NO: 214398
  chr11:67984063-67984320
  hypo

SEQ ID NO: 386326 - DNA, 44 bp, Homo sapiens; identical to SEQ ID NO: 314706
  chr11:67984388-67984432
  hypo

SEQ ID NO: 386327 - DNA, 110 bp, Homo sapiens; identical to SEQ ID NO: 224156
  chr11:68080104-68080214
  hypo

SEQ ID NO: 386328 - DNA, 192 bp, Homo sapiens; identical to SEQ ID NO: 214415
  chr11:68201117-68201309
  hypo

SEQ ID NO: 386329 - DNA, 156 bp, Homo sapiens; identical to SEQ ID NO: 263886
  chr11:68341483-68341639
  hypo

SEQ ID NO: 386330 - DNA, 137 bp, Homo sapiens; identical to SEQ ID NO: 263892
  chr11:68442013-68442150
  hypo

SEQ ID NO: 386331 - DNA, 176 bp, Homo sapiens; identical to SEQ ID NO: 214428
  chr11:68838712-68838888
  hypo

SEQ ID NO: 386332 - DNA, 71 bp, Homo sapiens; identical to SEQ ID NO: 214429
  chr11:68853901-68853972
  hypo

SEQ ID NO: 386333 - DNA, 196 bp, Homo sapiens; identical to SEQ ID NO: 263913
  chr11:68968788-68968984
  hypo

SEQ ID NO: 386334 - DNA, 77 bp, Homo sapiens; identical to SEQ ID NO: 263943
  chr11:69971958-69972035
  hypo

SEQ ID NO: 386335 - DNA, 163 bp, Homo sapiens; identical to SEQ ID NO: 263950
  chr11:69985998-69986161
  hypo

SEQ ID NO: 386336 - DNA, 182 bp, Homo sapiens; identical to SEQ ID NO: 263962
  chr11:70080115-70080297
  hypo

SEQ ID NO: 386337 - DNA, 74 bp, Homo sapiens; identical to SEQ ID NO: 263963
  chr11:70125200-70125274
  hypo

SEQ ID NO: 386338 - DNA, 31 bp, Homo sapiens; identical to SEQ ID NO: 263964
  chr11:70139604-70139635
  hypo

SEQ ID NO: 386339 - DNA, 157 bp, Homo sapiens; identical to SEQ ID NO: 264013
  chr11:73476967-73477124
  hypo

SEQ ID NO: 386340 - DNA, 35 bp, Homo sapiens; identical to SEQ ID NO: 264018
  chr11:73662698-73662733
  hypo

SEQ ID NO: 386341 - DNA, 96 bp, Homo sapiens; identical to SEQ ID NO: 264025
  chr11:74100758-74100854
  hypo

SEQ ID NO: 386342 - DNA, 141 bp, Homo sapiens; identical to SEQ ID NO: 264051
  chr11:75315461-75315602
  hypo

SEQ ID NO: 386343 - DNA, 92 bp, Homo sapiens; identical to SEQ ID NO: 264052
  chr11:75389093-75389185
  hypo

SEQ ID NO: 386344 - DNA, 192 bp, Homo sapiens; identical to SEQ ID NO: 214498
  chr11:76408273-76408465
  hypo

SEQ ID NO: 386345 - DNA, 42 bp, Homo sapiens; identical to SEQ ID NO: 264093
  chr11:85319011-85319053
  hypo

SEQ ID NO: 386346 - DNA, 169 bp, Homo sapiens; identical to SEQ ID NO: 214506
  chr11:85692740-85692909
  hypo

SEQ ID NO: 386347 - DNA, 283 bp, Homo sapiens; identical to SEQ ID NO: 224181
  chr11:86513414-86513697
  hypo

SEQ ID NO: 386348 - DNA, 101 bp, Homo sapiens; identical to SEQ ID NO: 264106
  chr11:93065699-93065800
  hypo

SEQ ID NO: 386349 - DNA, 34 bp, Homo sapiens; identical to SEQ ID NO: 214518
  chr11:94952098-94952132
  hypo

SEQ ID NO: 386350 - DNA, 203 bp, Homo sapiens; identical to SEQ ID NO: 264120
  chr11:95526175-95526378
  hypo

SEQ ID NO: 386351 - DNA, 43 bp, Homo sapiens; identical to SEQ ID NO: 264143
  chr11:112066436-112066479
  hypo

SEQ ID NO: 386352 - DNA, 34 bp, Homo sapiens; identical to SEQ ID NO: 214530
  chr11:113747597-113747631
  hypo

SEQ ID NO: 386353 - DNA, 31 bp, Homo sapiens; identical to SEQ ID NO: 264163
  chr11:116256383-116256414
  hypo

SEQ ID NO: 386354 - DNA, 35 bp, Homo sapiens; identical to SEQ ID NO: 264171
  chr11:116960726-116960761
  hypo

SEQ ID NO: 386355 - DNA, 250 bp, Homo sapiens; identical to SEQ ID NO: 224203
  chr11:117352704-117352954
  hypo

SEQ ID NO: 386356 - DNA, 381 bp, Homo sapiens; identical to SEQ ID NO: 214553
  chr11:117389166-117389547
  hypo

SEQ ID NO: 386357 - DNA, 114 bp, Homo sapiens; identical to SEQ ID NO: 264192
  chr11:117403090-117403204
  hypo

SEQ ID NO: 386358 - DNA, 100 bp, Homo sapiens; identical to SEQ ID NO: 264196
  chr11:117949567-117949667
  hypo

SEQ ID NO: 386359 - DNA, 54 bp, Homo sapiens; identical to SEQ ID NO: 264207
  chr11:119052936-119052990
  hypo

SEQ ID NO: 386360 - DNA, 85 bp, Homo sapiens; identical to SEQ ID NO: 214574
  chr11:119493220-119493305
  hypo

SEQ ID NO: 386361 - DNA, 186 bp, Homo sapiens; identical to SEQ ID NO: 264223
  chr11:119536817-119537003
  hypo

SEQ ID NO: 386362 - DNA, 73 bp, Homo sapiens; identical to SEQ ID NO: 214585
  chr11:119576250-119576323
  hypo

SEQ ID NO: 386363 - DNA, 147 bp, Homo sapiens; identical to SEQ ID NO: 264262
  chr11:122621690-122621837
  hypo

SEQ ID NO: 386364 - DNA, 42 bp, Homo sapiens; identical to SEQ ID NO: 384411
  chr11:124709075-124709117
  hypo

SEQ ID NO: 386365 - DNA, 249 bp, Homo sapiens; identical to SEQ ID NO: 202775
  chr11:124709233-124709482
  hypo

SEQ ID NO: 386366 - DNA, 210 bp, Homo sapiens; identical to SEQ ID NO: 202776
  chr11:124709856-124710066
  hypo

SEQ ID NO: 386367 - DNA, 141 bp, Homo sapiens; identical to SEQ ID NO: 264271
  chr11:124792306-124792447
  hypo

SEQ ID NO: 386368 - DNA, 41 bp, Homo sapiens; identical to SEQ ID NO: 264313
  chr11:129897979-129898020
  hypo

SEQ ID NO: 386369 - DNA, 36 bp, Homo sapiens; identical to SEQ ID NO: 264316
  chr11:129968278-129968314
  hypo

SEQ ID NO: 386370 - DNA, 234 bp, Homo sapiens; identical to SEQ ID NO: 264374
  chr11:134571549-134571783
  hypo

SEQ ID NO: 386371 - DNA, 108 bp, Homo sapiens; identical to SEQ ID NO: 214682
  chr12:658733-658841
  hypo

SEQ ID NO: 386372 - DNA, 69 bp, Homo sapiens; identical to SEQ ID NO: 264401
  chr12:1005679-1005748
  hypo

SEQ ID NO: 386373 - DNA, 120 bp, Homo sapiens; identical to SEQ ID NO: 214697
  chr12:1840409-1840529
  hypo

SEQ ID NO: 386374 - DNA, 133 bp, Homo sapiens; identical to SEQ ID NO: 264423
  chr12:1987522-1987655
  hypo

SEQ ID NO: 386375 - DNA, 36 bp, Homo sapiens; identical to SEQ ID NO: 264439
  chr12:2654536-2654572
  hypo

SEQ ID NO: 386376 - DNA, 426 bp, Homo sapiens; identical to SEQ ID NO: 264440
  chr12:2664072-2664498
  hypo

SEQ ID NO: 386377 - DNA, 83 bp, Homo sapiens; identical to SEQ ID NO: 214712
  chr12:2778072-2778155
  hypo

SEQ ID NO: 386378 - DNA, 72 bp, Homo sapiens; identical to SEQ ID NO: 384418
  chr12:3601270-3601342
  hypo

SEQ ID NO: 386379 - DNA, 101 bp, Homo sapiens; identical to SEQ ID NO: 202831
  chr12:3601377-3601478
  hypo

SEQ ID NO: 386380 - DNA, 95 bp, Homo sapiens; identical to SEQ ID NO: 264515
  chr12:6199649-6199744
  hypo

SEQ ID NO: 386381 - DNA, 38 bp, Homo sapiens; identical to SEQ ID NO: 264544
  chr12:6749347-6749385
  hypo

SEQ ID NO: 386382 - DNA, 45 bp, Homo sapiens; identical to SEQ ID NO: 264549
  chr12:6871063-6871108
  hypo

SEQ ID NO: 386383 - DNA, 55 bp, Homo sapiens; identical to SEQ ID NO: 264550
  chr12:7249425-7249480
  hypo

SEQ ID NO: 386384 - DNA, 32 bp, Homo sapiens; identical to SEQ ID NO: 214768
  chr12:8009570-8009602
  hypo

SEQ ID NO: 386385 - DNA, 32 bp, Homo sapiens; identical to SEQ ID NO: 214769
  chr12:8017218-8017250
  hypo

SEQ ID NO: 386386 - DNA, 64 bp, Homo sapiens; identical to SEQ ID NO: 264562
  chr12:8022094-8022158
  hypo

SEQ ID NO: 386387 - DNA, 33 bp, Homo sapiens; identical to SEQ ID NO: 214779
  chr12:8808923-8808956
  hypo

SEQ ID NO: 386388 - DNA, 214 bp, Homo sapiens; identical to SEQ ID NO: 264593
  chr12:10073226-10073440
  hypo

SEQ ID NO: 386389 - DNA, 217 bp, Homo sapiens; identical to SEQ ID NO: 224295
  chr12:12006278-12006495
  hypo

SEQ ID NO: 386390 - DNA, 2801 bp, Homo sapiens; identical to SEQ ID NO: 202878
  chr12:12043874-12046675
  hypo

SEQ ID NO: 386391 - DNA, 93 bp, Homo sapiens; identical to SEQ ID NO: 224308
  chr12:13154241-13154334
  hypo

SEQ ID NO: 386392 - DNA, 36 bp, Homo sapiens; identical to SEQ ID NO: 214807
  chr12:14721513-14721549
  hypo

SEQ ID NO: 386393 - DNA, 72 bp, Homo sapiens; identical to SEQ ID NO: 264637
  chr12:15057301-15057373
  hypo

SEQ ID NO: 386394 - DNA, 199 bp, Homo sapiens; identical to SEQ ID NO: 214830
  chr12:26966974-26967173
  hypo

SEQ ID NO: 386395 - DNA, 34 bp, Homo sapiens; identical to SEQ ID NO: 214841
  chr12:32831180-32831214
  hypo

SEQ ID NO: 386396 - DNA, 682 bp, Homo sapiens; identical to SEQ ID NO: 214848
  chr12:34319319-34320001
  hypo

SEQ ID NO: 386397 - DNA, 572 bp, Homo sapiens; identical to SEQ ID NO: 214851
  chr12:38548366-38548938
  hypo

SEQ ID NO: 386398 - DNA, 123 bp, Homo sapiens; identical to SEQ ID NO: 214852
  chr12:38548968-38549091
  hypo

SEQ ID NO: 386399 - DNA, 196 bp, Homo sapiens; identical to SEQ ID NO: 315705
  chr12:38550957-38551153
  hypo

SEQ ID NO: 386400 - DNA, 60 bp, Homo sapiens; identical to SEQ ID NO: 214854
  chr12:38551305-38551365
  hypo

SEQ ID NO: 386401 - DNA, 149 bp, Homo sapiens; identical to SEQ ID NO: 264733
  chr12:47699297-47699446
  hypo

SEQ ID NO: 386402 - DNA, 154 bp, Homo sapiens; identical to SEQ ID NO: 214883
  chr12:49620906-49621060
  hypo

SEQ ID NO: 386403 - DNA, 85 bp, Homo sapiens; identical to SEQ ID NO: 264753
  chr12:49647106-49647191
  hypo

SEQ ID NO: 386404 - DNA, 307 bp, Homo sapiens; identical to SEQ ID NO: 214889
  chr12:50366185-50366492
  hypo

SEQ ID NO: 386405 - DNA, 120 bp, Homo sapiens; identical to SEQ ID NO: 264782
  chr12:51478095-51478215
  hypo

SEQ ID NO: 386406 - DNA, 149 bp, Homo sapiens; identical to SEQ ID NO: 288943
  chr12:52416804-52416953
  hypo

SEQ ID NO: 386407 - DNA, 179 bp, Homo sapiens; identical to SEQ ID NO: 288944
  chr12:52416985-52417164
  hypo

SEQ ID NO: 386408 - DNA, 72 bp, Homo sapiens; identical to SEQ ID NO: 264808
  chr12:52911390-52911462
  hypo

SEQ ID NO: 386409 - DNA, 421 bp, Homo sapiens; identical to SEQ ID NO: 264816
  chr12:53183249-53183670
  hypo

SEQ ID NO: 386410 - DNA, 33 bp, Homo sapiens; identical to SEQ ID NO: 264820
  chr12:53345414-53345447
  hypo

SEQ ID NO: 386411 - DNA, 58 bp, Homo sapiens; identical to SEQ ID NO: 264828
  chr12:53547966-53548024
  hypo

SEQ ID NO: 386412 - DNA, 92 bp, Homo sapiens; identical to SEQ ID NO: 264836
  chr12:53796833-53796925
  hypo

SEQ ID NO: 386413 - DNA, 38 bp, Homo sapiens; identical to SEQ ID NO: 264852
  chr12:54718115-54718153
  hypo

SEQ ID NO: 386414 - DNA, 31 bp, Homo sapiens; identical to SEQ ID NO: 264855
  chr12:54890476-54890507
  hypo

SEQ ID NO: 386415 - DNA, 108 bp, Homo sapiens; identical to SEQ ID NO: 264880
  chr12:57431637-57431745
  hypo

SEQ ID NO: 386416 - DNA, 32 bp, Homo sapiens; identical to SEQ ID NO: 214937
  chr12:57446184-57446216
  hypo

SEQ ID NO: 386417 - DNA, 35 bp, Homo sapiens; identical to SEQ ID NO: 264887
  chr12:57572148-57572183
  hypo

SEQ ID NO: 386418 - DNA, 86 bp, Homo sapiens; identical to SEQ ID NO: 264904
  chr12:58068674-58068760
  hypo

SEQ ID NO: 386419 - DNA, 166 bp, Homo sapiens; identical to SEQ ID NO: 214945
  chr12:58152861-58153027
  hypo

SEQ ID NO: 386420 - DNA, 41 bp, Homo sapiens; identical to SEQ ID NO: 264911
  chr12:58274994-58275035
  hypo

SEQ ID NO: 386421 - DNA, 137 bp, Homo sapiens; identical to SEQ ID NO: 384444
  chr12:59313525-59313662
  hypo

SEQ ID NO: 386422 - DNA, 266 bp, Homo sapiens; identical to SEQ ID NO: 264922
  chr12:63397171-63397437
  hypo

SEQ ID NO: 386423 - DNA, 64 bp, Homo sapiens; identical to SEQ ID NO: 224404
  chr12:69080591-69080655
  hypo

SEQ ID NO: 386424 - DNA, 209 bp, Homo sapiens; identical to SEQ ID NO: 214969
  chr12:69190343-69190552
  hypo

SEQ ID NO: 386425 - DNA, 137 bp, Homo sapiens; identical to SEQ ID NO: 264951
  chr12:69219402-69219539
  hypo

SEQ ID NO: 386426 - DNA, 33 bp, Homo sapiens; identical to SEQ ID NO: 264967
  chr12:70435915-70435948
  hypo

SEQ ID NO: 386427 - DNA, 171 bp, Homo sapiens; identical to SEQ ID NO: 214974
  chr12:70648187-70648358
  hypo

SEQ ID NO: 386428 - DNA, 70 bp, Homo sapiens; identical to SEQ ID NO: 264984
  chr12:77002013-77002083
  hypo

SEQ ID NO: 386429 - DNA, 141 bp, Homo sapiens; identical to SEQ ID NO: 265008
  chr12:94093737-94093878
  hypo

SEQ ID NO: 386430 - DNA, 37 bp, Homo sapiens; identical to SEQ ID NO: 265021
  chr12:95900348-95900385
  hypo

SEQ ID NO: 386431 - DNA, 94 bp, Homo sapiens; identical to SEQ ID NO: 265023
  chr12:96131819-96131913
  hypo

SEQ ID NO: 386432 - DNA, 59 bp, Homo sapiens; identical to SEQ ID NO: 265028
  chr12:96613304-96613363
  hypo

SEQ ID NO: 386433 - DNA, 33 bp, Homo sapiens; identical to SEQ ID NO: 224420
  chr12:96618052-96618085
  hypo

SEQ ID NO: 386434 - DNA, 77 bp, Homo sapiens; identical to SEQ ID NO: 265029
  chr12:96633652-96633729
  hypo

SEQ ID NO: 386435 - DNA, 36 bp, Homo sapiens; identical to SEQ ID NO: 265041
  chr12:101962172-101962208
  hypo

SEQ ID NO: 386436 - DNA, 189 bp, Homo sapiens; identical to SEQ ID NO: 215028
  chr12:106881472-106881661
  hypo

SEQ ID NO: 386437 - DNA, 41 bp, Homo sapiens; identical to SEQ ID NO: 226552
  chr12:108298348-108298389
  hypo

SEQ ID NO: 386438 - DNA, 169 bp, Homo sapiens; identical to SEQ ID NO: 265088
  chr12:109181383-109181552
  hypo

SEQ ID NO: 386439 - DNA, 295 bp, Homo sapiens; identical to SEQ ID NO: 384461
  chr12:109746919-109747214
  hypo

SEQ ID NO: 386440 - DNA, 39 bp, Homo sapiens; identical to SEQ ID NO: 265101
  chr12:109878129-109878168
  hypo

SEQ ID NO: 386441 - DNA, 195 bp, Homo sapiens; identical to SEQ ID NO: 265102
  chr12:109881228-109881423
  hypo

SEQ ID NO: 386442 - DNA, 34 bp, Homo sapiens; identical to SEQ ID NO: 265117
  chr12:110250928-110250962
  hypo

SEQ ID NO: 386443 - DNA, 303 bp, Homo sapiens; identical to SEQ ID NO: 265136
  chr12:110785458-110785761
  hypo

SEQ ID NO: 386444 - DNA, 61 bp, Homo sapiens; identical to SEQ ID NO: 265154
  chr12:111855883-111855944
  hypo

SEQ ID NO: 386445 - DNA, 481 bp, Homo sapiens; identical to SEQ ID NO: 265184
  chr12:112893631-112894112
  hypo

SEQ ID NO: 386446 - DNA, 58 bp, Homo sapiens; identical to SEQ ID NO: 203187
  chr12:112915451-112915509
  hypo

SEQ ID NO: 386447 - DNA, 199 bp, Homo sapiens; identical to SEQ ID NO: 316286
  chr12:114295304-114295503
  hypo

SEQ ID NO: 386448 - DNA, 283 bp, Homo sapiens; identical to SEQ ID NO: 265206
  chr12:114399937-114400220
  hypo

SEQ ID NO: 386449 - DNA, 138 bp, Homo sapiens; identical to SEQ ID NO: 265216
  chr12:116401202-116401340
  hypo

SEQ ID NO: 386450 - DNA, 34 bp, Homo sapiens; identical to SEQ ID NO: 265229
  chr12:116936895-116936929
  hypo

SEQ ID NO: 386451 - DNA, 40 bp, Homo sapiens; identical to SEQ ID NO: 265232
  chr12:116981481-116981521
  hypo

SEQ ID NO: 386452 - DNA, 43 bp, Homo sapiens; identical to SEQ ID NO: 215113
  chr12:117588696-117588739
  hypo

SEQ ID NO: 386453 - DNA, 32 bp, Homo sapiens; identical to SEQ ID NO: 265276
  chr12:118361967-118361999
  hypo

SEQ ID NO: 386454 - DNA, 120 bp, Homo sapiens; identical to SEQ ID NO: 215122
  chr12:118481549-118481669
  hypo

SEQ ID NO: 386455 - DNA, 39 bp, Homo sapiens; identical to SEQ ID NO: 265332
  chr12:121199754-121199793
  hypo

SEQ ID NO: 386456 - DNA, 110 bp, Homo sapiens; identical to SEQ ID NO: 265368
  chr12:122268640-122268750
  hypo

SEQ ID NO: 386457 - DNA, 133 bp, Homo sapiens; identical to SEQ ID NO: 215190
  chr12:122958416-122958549
  hypo

SEQ ID NO: 386458 - DNA, 124 bp, Homo sapiens; identical to SEQ ID NO: 316517
  chr12:122958579-122958703
  hypo

SEQ ID NO: 386459 - DNA, 36 bp, Homo sapiens; identical to SEQ ID NO: 265417
  chr12:123097245-123097281
  hypo

SEQ ID NO: 386460 - DNA, 537 bp, Homo sapiens; identical to SEQ ID NO: 265446
  chr12:123773444-123773981
  hypo

SEQ ID NO: 386461 - DNA, 48 bp, Homo sapiens; identical to SEQ ID NO: 265461
  chr12:124175161-124175209
  hypo

SEQ ID NO: 386462 - DNA, 82 bp, Homo sapiens; identical to SEQ ID NO: 316584
  chr12:124651851-124651933
  hypo

SEQ ID NO: 386463 - DNA, 145 bp, Homo sapiens; identical to SEQ ID NO: 265476
  chr12:124668398-124668543
  hypo

SEQ ID NO: 386464 - DNA, 71 bp, Homo sapiens; identical to SEQ ID NO: 265503
  chr12:124915171-124915242
  hypo

SEQ ID NO: 386465 - DNA, 230 bp, Homo sapiens; identical to SEQ ID NO: 265509
  chr12:124966043-124966273
  hypo

SEQ ID NO: 386466 - DNA, 31 bp, Homo sapiens; identical to SEQ ID NO: 265567
  chr12:129806103-129806134
  hypo

SEQ ID NO: 386467 - DNA, 224 bp, Homo sapiens; identical to SEQ ID NO: 215274
  chr12:130906937-130907161
  hypo

SEQ ID NO: 386468 - DNA, 102 bp, Homo sapiens; identical to SEQ ID NO: 265594
  chr12:130929720-130929822
  hypo

SEQ ID NO: 386469 - DNA, 216 bp, Homo sapiens; identical to SEQ ID NO: 265645
  chr12:131515098-131515314
  hypo

SEQ ID NO: 386470 - DNA, 64 bp, Homo sapiens; identical to SEQ ID NO: 215302
  chr12:132205019-132205083
  hypo

SEQ ID NO: 386471 - DNA, 130 bp, Homo sapiens; identical to SEQ ID NO: 215316
  chr12:132400435-132400565
  hypo

SEQ ID NO: 386472 - DNA, 206 bp, Homo sapiens; identical to SEQ ID NO: 215325
  chr12:132546645-132546851
  hypo

SEQ ID NO: 386473 - DNA, 225 bp, Homo sapiens; identical to SEQ ID NO: 265719
  chr12:132561923-132562148
  hypo

SEQ ID NO: 386474 - DNA, 38 bp, Homo sapiens; identical to SEQ ID NO: 215329
  chr12:132581294-132581332
  hypo

SEQ ID NO: 386475 - DNA, 41 bp, Homo sapiens; identical to SEQ ID NO: 215342
  chr12:133019660-133019701
  hypo

SEQ ID NO: 386476 - DNA, 94 bp, Homo sapiens; identical to SEQ ID NO: 265762
  chr12:133148941-133149035
  hypo

SEQ ID NO: 386477 - DNA, 150 bp, Homo sapiens; identical to SEQ ID NO: 316906
  chr12:133168795-133168945
  hypo

SEQ ID NO: 386478 - DNA, 44 bp, Homo sapiens; identical to SEQ ID NO: 215363
  chr12:133225533-133225577
  hypo

SEQ ID NO: 386479 - DNA, 442 bp, Homo sapiens; identical to SEQ ID NO: 226553
  chr12:133443618-133444060
  hypo

SEQ ID NO: 386480 - DNA, 125 bp, Homo sapiens; identical to SEQ ID NO: 215381
  chr12:133449100-133449225
  hypo

SEQ ID NO: 386481 - DNA, 313 bp, Homo sapiens; identical to SEQ ID NO: 265820
  chr13:21047373-21047686
  hypo

SEQ ID NO: 386482 - DNA, 105 bp, Homo sapiens; identical to SEQ ID NO: 224501
  chr13:21141668-21141773
  hypo

SEQ ID NO: 386483 - DNA, 91 bp, Homo sapiens; identical to SEQ ID NO: 265852
  chr13:22786757-22786848
  hypo

SEQ ID NO: 386484 - DNA, 140 bp, Homo sapiens; identical to SEQ ID NO: 265854
  chr13:23629553-23629693
  hypo

SEQ ID NO: 386485 - DNA, 51 bp, Homo sapiens; identical to SEQ ID NO: 265869
  chr13:24819243-24819294
  hypo

SEQ ID NO: 386486 - DNA, 164 bp, Homo sapiens; identical to SEQ ID NO: 215418
  chr13:25932257-25932421
  hypo

SEQ ID NO: 386487 - DNA, 31 bp, Homo sapiens; identical to SEQ ID NO: 215426
  chr13:27914840-27914871
  hypo

SEQ ID NO: 386488 - DNA, 149 bp, Homo sapiens; identical to SEQ ID NO: 215442
  chr13:30087251-30087400
  hypo

SEQ ID NO: 386489 - DNA, 146 bp, Homo sapiens; identical to SEQ ID NO: 224540
  chr13:32905055-32905201
  hypo

SEQ ID NO: 386490 - DNA, 96 bp, Homo sapiens; identical to SEQ ID NO: 224543
  chr13:32918694-32918790
  hypo

SEQ ID NO: 386491 - DNA, 137 bp, Homo sapiens; identical to SEQ ID NO: 265979
  chr13:45741238-45741375
  hypo

SEQ ID NO: 386492 - DNA, 64 bp, Homo sapiens; identical to SEQ ID NO: 265984
  chr13:45939385-45939449
  hypo

SEQ ID NO: 386493 - DNA, 136 bp, Homo sapiens; identical to SEQ ID NO: 215477
  chr13:46037882-46038018
  hypo

SEQ ID NO: 386494 - DNA, 87 bp, Homo sapiens; identical to SEQ ID NO: 265991
  chr13:46318163-46318250
  hypo

SEQ ID NO: 386495 - DNA, 44 bp, Homo sapiens
  chr13:46948591-46948635
  hypo
ggagcaagctcctagtccatgtccctgctccaaaaatccattta

SEQ ID NO: 386496 - DNA, 157 bp, Homo sapiens; identical to SEQ ID NO: 266030
  chr13:73636133-73636290
  hypo

SEQ ID NO: 386497 - DNA, 38 bp, Homo sapiens; identical to SEQ ID NO: 266033
  chr13:73642917-73642955
  hypo

SEQ ID NO: 386498 - DNA, 51 bp, Homo sapiens; identical to SEQ ID NO: 266056
  chr13:87732415-87732466
  hypo

SEQ ID NO: 386499 - DNA, 150 bp, Homo sapiens; identical to SEQ ID NO: 266060
  chr13:95061643-95061793
  hypo

SEQ ID NO: 386500 - DNA, 92 bp, Homo sapiens; identical to SEQ ID NO: 266087
  chr13:98761016-98761108
  hypo

SEQ ID NO: 386501 - DNA, 95 bp, Homo sapiens; identical to SEQ ID NO: 266105
  chr13:99141397-99141492
  hypo

SEQ ID NO: 386502 - DNA, 124 bp, Homo sapiens; identical to SEQ ID NO: 266123
  chr13:100005097-100005221
  hypo

SEQ ID NO: 386503 - DNA, 38 bp, Homo sapiens; identical to SEQ ID NO: 317384
  chr13:103569193-103569231
  hypo

SEQ ID NO: 386504 - DNA, 42 bp, Homo sapiens; identical to SEQ ID NO: 266181
  chr13:111087191-111087233
  hypo

SEQ ID NO: 386505 - DNA, 186 bp, Homo sapiens; identical to SEQ ID NO: 266191
  chr13:111279860-111280046
  hypo

SEQ ID NO: 386506 - DNA, 56 bp, Homo sapiens; identical to SEQ ID NO: 215593
  chr13:112051223-112051279
  hypo

SEQ ID NO: 386507 - DNA, 111 bp, Homo sapiens; identical to SEQ ID NO: 317468
  chr13:112062637-112062748
  hypo

SEQ ID NO: 386508 - DNA, 68 bp, Homo sapiens; identical to SEQ ID NO: 317469
  chr13:112062778-112062846
  hypo

SEQ ID NO: 386509 - DNA, 179 bp, Homo sapiens; identical to SEQ ID NO: 266238
  chr13:112334238-112334417
  hypo

SEQ ID NO: 386510 - DNA, 52 bp, Homo sapiens; identical to SEQ ID NO: 266260
  chr13:112887814-112887866
  hypo

SEQ ID NO: 386511 - DNA, 42 bp, Homo sapiens; identical to SEQ ID NO: 266271
  chr13:113111904-113111946
  hypo

SEQ ID NO: 386512 - DNA, 98 bp, Homo sapiens; identical to SEQ ID NO: 266283
  chr13:113342679-113342777
  hypo

SEQ ID NO: 386513 - DNA, 241 bp, Homo sapiens; identical to SEQ ID NO: 266291
  chr13:113368823-113369064
  hypo

SEQ ID NO: 386514 - DNA, 90 bp, Homo sapiens; identical to SEQ ID NO: 266296
  chr13:113382140-113382230
  hypo

SEQ ID NO: 386515 - DNA, 248 bp, Homo sapiens; identical to SEQ ID NO: 266320
  chr13:113474180-113474428
  hypo

SEQ ID NO: 386516 - DNA, 35 bp, Homo sapiens; identical to SEQ ID NO: 266325
  chr13:113493552-113493587
  hypo

SEQ ID NO: 386517 - DNA, 75 bp, Homo sapiens; identical to SEQ ID NO: 215639
  chr13:113516326-113516401
  hypo

SEQ ID NO: 386518 - DNA, 99 bp, Homo sapiens; identical to SEQ ID NO: 266337
  chr13:113537723-113537822
  hypo

SEQ ID NO: 386519 - DNA, 208 bp, Homo sapiens; identical to SEQ ID NO: 215642
  chr13:113539438-113539646
  hypo

SEQ ID NO: 386520 - DNA, 45 bp, Homo sapiens; identical to SEQ ID NO: 215644
  chr13:113555445-113555490
  hypo

SEQ ID NO: 386521 - DNA, 118 bp, Homo sapiens; identical to SEQ ID NO: 266353
  chr13:113631096-113631214
  hypo

SEQ ID NO: 386522 - DNA, 62 bp, Homo sapiens; identical to SEQ ID NO: 215652
  chr13:113719023-113719085
  hypo

SEQ ID NO: 386523 - DNA, 786 bp, Homo sapiens; identical to SEQ ID NO: 317623
  chr13:113719189-113719975
  hypo

SEQ ID NO: 386524 - DNA, 96 bp, Homo sapiens; identical to SEQ ID NO: 266374
  chr13:113739496-113739592
  hypo

SEQ ID NO: 386525 - DNA, 87 bp, Homo sapiens; identical to SEQ ID NO: 203465
  chr13:113951225-113951312
  hypo

SEQ ID NO: 386526 - DNA, 290 bp, Homo sapiens; identical to SEQ ID NO: 266384
  chr13:113980176-113980466
  hypo

SEQ ID NO: 386527 - DNA, 83 bp, Homo sapiens; identical to SEQ ID NO: 266390
  chr13:114002279-114002362
  hypo

SEQ ID NO: 386528 - DNA, 145 bp, Homo sapiens; identical to SEQ ID NO: 215690
  chr13:114246191-114246336
  hypo

SEQ ID NO: 386529 - DNA, 157 bp, Homo sapiens; identical to SEQ ID NO: 266438
  chr13:114290658-114290815
  hypo

SEQ ID NO: 386530 - DNA, 42 bp, Homo sapiens; identical to SEQ ID NO: 266443
  chr13:114296440-114296482
  hypo

SEQ ID NO: 386531 - DNA, 263 bp, Homo sapiens; identical to SEQ ID NO: 317709
  chr13:114318243-114318506
  hypo

SEQ ID NO: 386532 - DNA, 142 bp, Homo sapiens; identical to SEQ ID NO: 317713
  chr13:114497267-114497409
  hypo

SEQ ID NO: 386533 - DNA, 31 bp, Homo sapiens; identical to SEQ ID NO: 317714
  chr13:114497439-114497470
  hypo

SEQ ID NO: 386534 - DNA, 69 bp, Homo sapiens; identical to SEQ ID NO: 317720
  chr13:114517613-114517682
  hypo

SEQ ID NO: 386535 - DNA, 51 bp, Homo sapiens; identical to SEQ ID NO: 317721
  chr13:114517712-114517763
  hypo

SEQ ID NO: 386536 - DNA, 144 bp, Homo sapiens; identical to SEQ ID NO: 215715
  chr13:114791748-114791892
  hypo

SEQ ID NO: 386537 - DNA, 48 bp, Homo sapiens; identical to SEQ ID NO: 266494
  chr13:114804554-114804602
  hypo

SEQ ID NO: 386538 - DNA, 65 bp, Homo sapiens; identical to SEQ ID NO: 266495
  chr13:114804861-114804926
  hypo

SEQ ID NO: 386539 - DNA, 43 bp, Homo sapiens; identical to SEQ ID NO: 215720
  chr13:114855701-114855744
  hypo

SEQ ID NO: 386540 - DNA, 165 bp, Homo sapiens; identical to SEQ ID NO: 224663
  chr14:21150255-21150420
  hypo

SEQ ID NO: 386541 - DNA, 88 bp, Homo sapiens; identical to SEQ ID NO: 266545
  chr14:23530469-23530557
  hypo

SEQ ID NO: 386542 - DNA, 188 bp, Homo sapiens; identical to SEQ ID NO: 203499
  chr14:23776071-23776259
  hypo

SEQ ID NO: 386543 - DNA, 84 bp, Homo sapiens; identical to SEQ ID NO: 266574
  chr14:31035127-31035211
  hypo

SEQ ID NO: 386544 - DNA, 100 bp, Homo sapiens; identical to SEQ ID NO: 215747
  chr14:31456881-31456981
  hypo

SEQ ID NO: 386545 - DNA, 44 bp, Homo sapiens; identical to SEQ ID NO: 215753
  chr14:32597576-32597620
  hypo

SEQ ID NO: 386546 - DNA, 34 bp, Homo sapiens; identical to SEQ ID NO: 215761
  chr14:37174263-37174297
  hypo

SEQ ID NO: 386547 - DNA, 31 bp, Homo sapiens; identical to SEQ ID NO: 266632
  chr14:45437736-45437767
  hypo

SEQ ID NO: 386548 - DNA, 42 bp, Homo sapiens; identical to SEQ ID NO: 266651
  chr14:51148375-51148417
  hypo

SEQ ID NO: 386549 - DNA, 84 bp, Homo sapiens; identical to SEQ ID NO: 266660
  chr14:53196020-53196104
  hypo

SEQ ID NO: 386550 - DNA, 164 bp, Homo sapiens; identical to SEQ ID NO: 215790
  chr14:55819829-55819993
  hypo

SEQ ID NO: 386551 - DNA, 31 bp, Homo sapiens; identical to SEQ ID NO: 215791
  chr14:55894600-55894631
  hypo

SEQ ID NO: 386552 - DNA, 184 bp, Homo sapiens; identical to SEQ ID NO: 266700
  chr14:61246679-61246863
  hypo

SEQ ID NO: 386553 - DNA, 84 bp, Homo sapiens; identical to SEQ ID NO: 215826
  chr14:65237647-65237731
  hypo

SEQ ID NO: 386554 - DNA, 61 bp, Homo sapiens; identical to SEQ ID NO: 266751
  chr14:66560926-66560987
  hypo

SEQ ID NO: 386555 - DNA, 37 bp, Homo sapiens; identical to SEQ ID NO: 266755
  chr14:66976456-66976493
  hypo

SEQ ID NO: 386556 - DNA, 99 bp, Homo sapiens; identical to SEQ ID NO: 266770
  chr14:69050653-69050752
  hypo

SEQ ID NO: 386557 - DNA, 140 bp, Homo sapiens; identical to SEQ ID NO: 318074
  chr14:69867591-69867731
  hypo

SEQ ID NO: 386558 - DNA, 83 bp, Homo sapiens; identical to SEQ ID NO: 318075
  chr14:69867761-69867844
  hypo

SEQ ID NO: 386559 - DNA, 87 bp, Homo sapiens; identical to SEQ ID NO: 266794
  chr14:70387802-70387889
  hypo

SEQ ID NO: 386560 - DNA, 73 bp, Homo sapiens; identical to SEQ ID NO: 215858
  chr14:73428614-73428687
  hypo

SEQ ID NO: 386561 - DNA, 37 bp, Homo sapiens; identical to SEQ ID NO: 266822
  chr14:73926314-73926351
  hypo

SEQ ID NO: 386562 - DNA, 39 bp, Homo sapiens; identical to SEQ ID NO: 266840
  chr14:75416062-75416101
  hypo

SEQ ID NO: 386563 - DNA, 71 bp, Homo sapiens; identical to SEQ ID NO: 215873
  chr14:75423075-75423146
  hypo

SEQ ID NO: 386564 - DNA, 88 bp, Homo sapiens; identical to SEQ ID NO: 384533
  chr14:77736779-77736867
  hypo

SEQ ID NO: 386565 - DNA, 97 bp, Homo sapiens; identical to SEQ ID NO: 290401
  chr14:77736883-77736980
  hypo

SEQ ID NO: 386566 - DNA, 37 bp, Homo sapiens; identical to SEQ ID NO: 266888
  chr14:81904519-81904556
  hypo

SEQ ID NO: 386567 - DNA, 34 bp, Homo sapiens; identical to SEQ ID NO: 266890
  chr14:86054380-86054414
  hypo

SEQ ID NO: 386568 - DNA, 147 bp, Homo sapiens; identical to SEQ ID NO: 266896
  chr14:88587438-88587585
  hypo

SEQ ID NO: 386569 - DNA, 725 bp, Homo sapiens; identical to SEQ ID NO: 290430
  chr14:89290490-89291215
  hypo

SEQ ID NO: 386570 - DNA, 181 bp, Homo sapiens; identical to SEQ ID NO: 266904
  chr14:89646424-89646605
  hypo

SEQ ID NO: 386571 - DNA, 109 bp, Homo sapiens; identical to SEQ ID NO: 318240
  chr14:90983360-90983469
  hypo

SEQ ID NO: 386572 - DNA, 131 bp, Homo sapiens; identical to SEQ ID NO: 215923
  chr14:91127198-91127329
  hypo

SEQ ID NO: 386573 - DNA, 67 bp, Homo sapiens; identical to SEQ ID NO: 318259
  chr14:91758193-91758260
  hypo

SEQ ID NO: 386574 - DNA, 100 bp, Homo sapiens; identical to SEQ ID NO: 215930
  chr14:91775792-91775892
  hypo

SEQ ID NO: 386575 - DNA, 207 bp, Homo sapiens; identical to SEQ ID NO: 215938
  chr14:91850943-91851150
  hypo

SEQ ID NO: 386576 - DNA, 189 bp, Homo sapiens; identical to SEQ ID NO: 215945
  chr14:93486022-93486211
  hypo

SEQ ID NO: 386577 - DNA, 281 bp, Homo sapiens; identical to SEQ ID NO: 266988
  chr14:93533287-93533568
  hypo

SEQ ID NO: 386578 - DNA, 175 bp, Homo sapiens; identical to SEQ ID NO: 267005
  chr14:94829568-94829743
  hypo

SEQ ID NO: 386579 - DNA, 214 bp, Homo sapiens; identical to SEQ ID NO: 267035
  chr14:99509012-99509226
  hypo

SEQ ID NO: 386580 - DNA, 330 bp, Homo sapiens; identical to SEQ ID NO: 267037
  chr14:99655545-99655875
  hypo

SEQ ID NO: 386581 - DNA, 97 bp, Homo sapiens; identical to SEQ ID NO: 267038
  chr14:99681714-99681811
  hypo

SEQ ID NO: 386582 - DNA, 241 bp, Homo sapiens; identical to SEQ ID NO: 267048
  chr14:99932772-99933013
  hypo

SEQ ID NO: 386583 - DNA, 240 bp, Homo sapiens; identical to SEQ ID NO: 224774
  chr14:100070301-100070541
  hypo

SEQ ID NO: 386584 - DNA, 177 bp, Homo sapiens; identical to SEQ ID NO: 267053
  chr14:100118139-100118316
  hypo

SEQ ID NO: 386585 - DNA, 228 bp, Homo sapiens; identical to SEQ ID NO: 267065
  chr14:100681486-100681714
  hypo

SEQ ID NO: 386586 - DNA, 42 bp, Homo sapiens; identical to SEQ ID NO: 267081
  chr14:100980664-100980706
  hypo

SEQ ID NO: 386587 - DNA, 1413 bp, Homo sapiens; identical to SEQ ID NO: 267083
  chr14:101003646-101005059
  hypo

SEQ ID NO: 386588 - DNA, 133 bp, Homo sapiens; identical to SEQ ID NO: 318430
  chr14:101506260-101506393
  hypo

SEQ ID NO: 386589 - DNA, 274 bp, Homo sapiens; identical to SEQ ID NO: 215997
  chr14:101579008-101579282
  hypo

SEQ ID NO: 386590 - DNA, 34 bp, Homo sapiens; identical to SEQ ID NO: 267110
  chr14:101727903-101727937
  hypo

SEQ ID NO: 386591 - DNA, 127 bp, Homo sapiens; identical to SEQ ID NO: 267120
  chr14:102186689-102186816
  hypo

SEQ ID NO: 386592 - DNA, 128 bp, Homo sapiens
  chr14:102230011-102230139
  hypo
ccatcctggatctggtatttttaagttcatttcccacacctcaaacccagcaaccctcctgtatagattggtcttatgcagtctatggtgttgctatgttgcttttagctttagggtcatctccccac

SEQ ID NO: 386593 - DNA, 324 bp, Homo sapiens; identical to SEQ ID NO: 267129
  chr14:102330613-102330937
  hypo

SEQ ID NO: 386594 - DNA, 118 bp, Homo sapiens; identical to SEQ ID NO: 267158
  chr14:102680415-102680533
  hypo

SEQ ID NO: 386595 - DNA, 159 bp, Homo sapiens; identical to SEQ ID NO: 318498
  chr14:102909003-102909162
  hypo

SEQ ID NO: 386596 - DNA, 289 bp, Homo sapiens; identical to SEQ ID NO: 318499
  chr14:102909192-102909481
  hypo

SEQ ID NO: 386597 - DNA, 55 bp, Homo sapiens; identical to SEQ ID NO: 384547
  chr14:103430379-103430434
  hypo

SEQ ID NO: 386598 - DNA, 72 bp, Homo sapiens; identical to SEQ ID NO: 267223
  chr14:103697779-103697851
  hypo

SEQ ID NO: 386599 - DNA, 231 bp, Homo sapiens; identical to SEQ ID NO: 267264
  chr14:104570011-104570242
  hypo

SEQ ID NO: 386600 - DNA, 36 bp, Homo sapiens; identical to SEQ ID NO: 267293
  chr14:104813345-104813381
  hypo

SEQ ID NO: 386601 - DNA, 122 bp, Homo sapiens; identical to SEQ ID NO: 318647
  chr14:105157363-105157485
  hypo

SEQ ID NO: 386602 - DNA, 108 bp, Homo sapiens; identical to SEQ ID NO: 267317
  chr14:105225798-105225906
  hypo

SEQ ID NO: 386603 - DNA, 324 bp, Homo sapiens; identical to SEQ ID NO: 267355
  chr14:105621962-105622286
  hypo

SEQ ID NO: 386604 - DNA, 144 bp, Homo sapiens; identical to SEQ ID NO: 224807
  chr14:105647609-105647753
  hypo

SEQ ID NO: 386605 - DNA, 142 bp, Homo sapiens; identical to SEQ ID NO: 216123
  chr15:22966142-22966284
  hypo

SEQ ID NO: 386606 - DNA, 103 bp, Homo sapiens; identical to SEQ ID NO: 216126
  chr15:22979738-22979841
  hypo

SEQ ID NO: 386607 - DNA, 149 bp, Homo sapiens; identical to SEQ ID NO: 267399
  chr15:28358254-28358403
  hypo

SEQ ID NO: 386608 - DNA, 50 bp, Homo sapiens; identical to SEQ ID NO: 318752
  chr15:28389777-28389827
  hypo

SEQ ID NO: 386609 - DNA, 65 bp, Homo sapiens; identical to SEQ ID NO: 216133
  chr15:28390033-28390098
  hypo

SEQ ID NO: 386610 - DNA, 350 bp, Homo sapiens; identical to SEQ ID NO: 216141
  chr15:29236505-29236855
  hypo

SEQ ID NO: 386611 - DNA, 65 bp, Homo sapiens; identical to SEQ ID NO: 267434
  chr15:29487547-29487612
  hypo

SEQ ID NO: 386612 - DNA, 75 bp, Homo sapiens; identical to SEQ ID NO: 267449
  chr15:31490444-31490519
  hypo

SEQ ID NO: 386613 - DNA, 218 bp, Homo sapiens; identical to SEQ ID NO: 267494
  chr15:39742868-39743086
  hypo

SEQ ID NO: 386614 - DNA, 158 bp, Homo sapiens; identical to SEQ ID NO: 216182
  chr15:39881427-39881585
  hypo

SEQ ID NO: 386615 - DNA, 36 bp, Homo sapiens; identical to SEQ ID NO: 203836
  chr15:40559555-40559591
  hypo

SEQ ID NO: 386616 - DNA, 43 bp, Homo sapiens; identical to SEQ ID NO: 267512
  chr15:40701565-40701608
  hypo

SEQ ID NO: 386617 - DNA, 120 bp, Homo sapiens; identical to SEQ ID NO: 267539
  chr15:42151063-42151183
  hypo

SEQ ID NO: 386618 - DNA, 71 bp, Homo sapiens; identical to SEQ ID NO: 216206
  chr15:42167406-42167477
  hypo

SEQ ID NO: 386619 - DNA, 101 bp, Homo sapiens; identical to SEQ ID NO: 267548
  chr15:42211495-42211596
  hypo

SEQ ID NO: 386620 - DNA, 44 bp, Homo sapiens; identical to SEQ ID NO: 216209
  chr15:42388224-42388268
  hypo

SEQ ID NO: 386621 - DNA, 76 bp, Homo sapiens; identical to SEQ ID NO: 267562
  chr15:42446969-42447045
  hypo

SEQ ID NO: 386622 - DNA, 33 bp, Homo sapiens; identical to SEQ ID NO: 267580
  chr15:43124802-43124835
  hypo

SEQ ID NO: 386623 - DNA, 120 bp, Homo sapiens; identical to SEQ ID NO: 267613
  chr15:45809769-45809889
  hypo

SEQ ID NO: 386624 - DNA, 37 bp, Homo sapiens; identical to SEQ ID NO: 216231
  chr15:51016480-51016517
  hypo

SEQ ID NO: 386625 - DNA, 197 bp, Homo sapiens; identical to SEQ ID NO: 267630
  chr15:51659607-51659804
  hypo

SEQ ID NO: 386626 - DNA, 300 bp, Homo sapiens; identical to SEQ ID NO: 224853
  chr15:52820625-52820925
  hypo

SEQ ID NO: 386627 - DNA, 166 bp, Homo sapiens; identical to SEQ ID NO: 267667
  chr15:58761931-58762097
  hypo

SEQ ID NO: 386628 - DNA, 40 bp, Homo sapiens; identical to SEQ ID NO: 267673
  chr15:59291804-59291844
  hypo

SEQ ID NO: 386629 - DNA, 102 bp, Homo sapiens; identical to SEQ ID NO: 267679
  chr15:59561665-59561767
  hypo

SEQ ID NO: 386630 - DNA, 41 bp, Homo sapiens; identical to SEQ ID NO: 267700
  chr15:62753414-62753455
  hypo

SEQ ID NO: 386631 - DNA, 161 bp, Homo sapiens; identical to SEQ ID NO: 267724
  chr15:63028501-63028662
  hypo

SEQ ID NO: 386632 - DNA, 136 bp, Homo sapiens; identical to SEQ ID NO: 267758
  chr15:63647633-63647769
  hypo

SEQ ID NO: 386633 - DNA, 62 bp, Homo sapiens; identical to SEQ ID NO: 216296
  chr15:63753619-63753681
  hypo

SEQ ID NO: 386634 - DNA, 88 bp, Homo sapiens; identical to SEQ ID NO: 216306
  chr15:64865096-64865184
  hypo

SEQ ID NO: 386635 - DNA, 195 bp, Homo sapiens; identical to SEQ ID NO: 267787
  chr15:65538640-65538835
  hypo

SEQ ID NO: 386636 - DNA, 258 bp, Homo sapiens; identical to SEQ ID NO: 216323
  chr15:69002974-69003232
  hypo

SEQ ID NO: 386637 - DNA, 113 bp, Homo sapiens; identical to SEQ ID NO: 267832
  chr15:69285723-69285836
  hypo

SEQ ID NO: 386638 - DNA, 214 bp, Homo sapiens; identical to SEQ ID NO: 216330
  chr15:69590152-69590366
  hypo

SEQ ID NO: 386639 - DNA, 71 bp, Homo sapiens; identical to SEQ ID NO: 319253
  chr15:70347466-70347537
  hypo

SEQ ID NO: 386640 - DNA, 33 bp, Homo sapiens; identical to SEQ ID NO: 319254
  chr15:70347575-70347608
  hypo

SEQ ID NO: 386641 - DNA, 31 bp, Homo sapiens; identical to SEQ ID NO: 216343
  chr15:71466447-71466478
  hypo

SEQ ID NO: 386642 - DNA, 99 bp, Homo sapiens; identical to SEQ ID NO: 267870
  chr15:71966264-71966363
  hypo

SEQ ID NO: 386643 - DNA, 37 bp, Homo sapiens; identical to SEQ ID NO: 267882
  chr15:72525047-72525084
  hypo

SEQ ID NO: 386644 - DNA, 164 bp, Homo sapiens; identical to SEQ ID NO: 224892
  chr15:73344008-73344172
  hypo

SEQ ID NO: 386645 - DNA, 99 bp, Homo sapiens; identical to SEQ ID NO: 267894
  chr15:73635760-73635859
  hypo

SEQ ID NO: 386646 - DNA, 103 bp, Homo sapiens; identical to SEQ ID NO: 267922
  chr15:75498358-75498461
  hypo

SEQ ID NO: 386647 - DNA, 151 bp, Homo sapiens; identical to SEQ ID NO: 267924
  chr15:75594676-75594827
  hypo

SEQ ID NO: 386648 - DNA, 205 bp, Homo sapiens; identical to SEQ ID NO: 267931
  chr15:75949260-75949465
  hypo

SEQ ID NO: 386649 - DNA, 126 bp, Homo sapiens; identical to SEQ ID NO: 216370
  chr15:75981377-75981503
  hypo

SEQ ID NO: 386650 - DNA, 42 bp, Homo sapiens; identical to SEQ ID NO: 267938
  chr15:77072238-77072280
  hypo

SEQ ID NO: 386651 - DNA, 183 bp, Homo sapiens; identical to SEQ ID NO: 267944
  chr15:77473436-77473619
  hypo

SEQ ID NO: 386652 - DNA, 38 bp, Homo sapiens; identical to SEQ ID NO: 267959
  chr15:78295565-78295603
  hypo

SEQ ID NO: 386653 - DNA, 93 bp, Homo sapiens; identical to SEQ ID NO: 267960
  chr15:78403530-78403623
  hypo

SEQ ID NO: 386654 - DNA, 79 bp, Homo sapiens; identical to SEQ ID NO: 216377
  chr15:78450091-78450170
  hypo

SEQ ID NO: 386655 - DNA, 81 bp, Homo sapiens; identical to SEQ ID NO: 216381
  chr15:78510187-78510268
  hypo

SEQ ID NO: 386656 - DNA, 133 bp, Homo sapiens; identical to SEQ ID NO: 267978
  chr15:79050495-79050628
  hypo

SEQ ID NO: 386657 - DNA, 232 bp, Homo sapiens; identical to SEQ ID NO: 267980
  chr15:79056239-79056471
  hypo

SEQ ID NO: 386658 - DNA, 125 bp, Homo sapiens; identical to SEQ ID NO: 216387
  chr15:79309573-79309698
  hypo

SEQ ID NO: 386659 - DNA, 133 bp, Homo sapiens; identical to SEQ ID NO: 267988
  chr15:79310062-79310195
  hypo

SEQ ID NO: 386660 - DNA, 223 bp, Homo sapiens; identical to SEQ ID NO: 267990
  chr15:80216925-80217148
  hypo

SEQ ID NO: 386661 - DNA, 229 bp, Homo sapiens; identical to SEQ ID NO: 268004
  chr15:81224341-81224570
  hypo

SEQ ID NO: 386662 - DNA, 328 bp, Homo sapiens; identical to SEQ ID NO: 224922
  chr15:85143661-85143989
  hypo

SEQ ID NO: 386663 - DNA, 186 bp, Homo sapiens; identical to SEQ ID NO: 216411
  chr15:89404008-89404194
  hypo

SEQ ID NO: 386664 - DNA, 45 bp, Homo sapiens; identical to SEQ ID NO: 268047
  chr15:89807367-89807412
  hypo

SEQ ID NO: 386665 - DNA, 41 bp, Homo sapiens; identical to SEQ ID NO: 268056
  chr15:90317994-90318035
  hypo

SEQ ID NO: 386666 - DNA, 32 bp, Homo sapiens; identical to SEQ ID NO: 268067
  chr15:90702246-90702278
  hypo

SEQ ID NO: 386667 - DNA, 200 bp, Homo sapiens; identical to SEQ ID NO: 268076
  chr15:90806189-90806389
  hypo

SEQ ID NO: 386668 - DNA, 120 bp, Homo sapiens; identical to SEQ ID NO: 216448
  chr15:93350343-93350463
  hypo

SEQ ID NO: 386669 - DNA, 81 bp, Homo sapiens; identical to SEQ ID NO: 216452
  chr15:93567908-93567989
  hypo

SEQ ID NO: 386670 - DNA, 300 bp, Homo sapiens; identical to SEQ ID NO: 384586
  chr15:94774274-94774574
  hypo

SEQ ID NO: 386671 - DNA, 220 bp, Homo sapiens; identical to SEQ ID NO: 268131
  chr15:94778462-94778682
  hypo

SEQ ID NO: 386672 - DNA, 76 bp, Homo sapiens; identical to SEQ ID NO: 268133
  chr15:94841669-94841745
  hypo

SEQ ID NO: 386673 - DNA, 56 bp, Homo sapiens; identical to SEQ ID NO: 268136
  chr15:95019094-95019150
  hypo

SEQ ID NO: 386674 - DNA, 390 bp, Homo sapiens; identical to SEQ ID NO: 268138
  chr15:95398763-95399153
  hypo

SEQ ID NO: 386675 - DNA, 33 bp, Homo sapiens; identical to SEQ ID NO: 268152
  chr15:99190315-99190348
  hypo

SEQ ID NO: 386676 - DNA, 108 bp, Homo sapiens; identical to SEQ ID NO: 216476
  chr15:99440185-99440293
  hypo

SEQ ID NO: 386677 - DNA, 97 bp, Homo sapiens; identical to SEQ ID NO: 268189
  chr15:99954583-99954680
  hypo

SEQ ID NO: 386678 - DNA, 42 bp, Homo sapiens; identical to SEQ ID NO: 204068
  chr15:100273862-100273904
  hypo

SEQ ID NO: 386679 - DNA, 48 bp, Homo sapiens; identical to SEQ ID NO: 224955
  chr15:100273946-100273994
  hypo

SEQ ID NO: 386680 - DNA, 92 bp, Homo sapiens; identical to SEQ ID NO: 216486
  chr15:100274190-100274282
  hypo

SEQ ID NO: 386681 - DNA, 209 bp, Homo sapiens; identical to SEQ ID NO: 216487
  chr15:100649031-100649240
  hypo

SEQ ID NO: 386682 - DNA, 196 bp, Homo sapiens; identical to SEQ ID NO: 216497
  chr15:101862667-101862863
  hypo

SEQ ID NO: 386683 - DNA, 32 bp, Homo sapiens; identical to SEQ ID NO: 216500
  chr15:101949766-101949798
  hypo

SEQ ID NO: 386684 - DNA, 172 bp, Homo sapiens; identical to SEQ ID NO: 216502
  chr15:102004885-102005057
  hypo

SEQ ID NO: 386685 - DNA, 134 bp, Homo sapiens; identical to SEQ ID NO: 216522
  chr16:354255-354389
  hypo

SEQ ID NO: 386686 - DNA, 92 bp, Homo sapiens; identical to SEQ ID NO: 268289
  chr16:439056-439148
  hypo

SEQ ID NO: 386687 - DNA, 39 bp, Homo sapiens
  chr16:468014-468053
  hypo
gtattttctaggattttatgtaagtggagtcataaggta

SEQ ID NO: 386688 - DNA, 568 bp, Homo sapiens; identical to SEQ ID NO: 268300
  chr16:525278-525846
  hypo

SEQ ID NO: 386689 - DNA, 518 bp, Homo sapiens; identical to SEQ ID NO: 216565
  chr16:767027-767545
  hypo

SEQ ID NO: 386690 - DNA, 100 bp, Homo sapiens; identical to SEQ ID NO: 268431
  chr16:1370327-1370427
  hypo

SEQ ID NO: 386691 - DNA, 145 bp, Homo sapiens; identical to SEQ ID NO: 268433
  chr16:1390248-1390393
  hypo

SEQ ID NO: 386692 - DNA, 67 bp, Homo sapiens; identical to SEQ ID NO: 216621
  chr16:1613977-1614044
  hypo

SEQ ID NO: 386693 - DNA, 434 bp, Homo sapiens; identical to SEQ ID NO: 224987
  chr16:1660449-1660883
  hypo

SEQ ID NO: 386694 - DNA, 68 bp, Homo sapiens; identical to SEQ ID NO: 268495
  chr16:1748235-1748303
  hypo

SEQ ID NO: 386695 - DNA, 71 bp, Homo sapiens; identical to SEQ ID NO: 268553
  chr16:2144843-2144914
  hypo

SEQ ID NO: 386696 - DNA, 160 bp, Homo sapiens; identical to SEQ ID NO: 268580
  chr16:2339391-2339551
  hypo

SEQ ID NO: 386697 - DNA, 396 bp, Homo sapiens; identical to SEQ ID NO: 268581
  chr16:2347405-2347801
  hypo

SEQ ID NO: 386698 - DNA, 165 bp, Homo sapiens; identical to SEQ ID NO: 320120
  chr16:2819593-2819758
  hypo

SEQ ID NO: 386699 - DNA, 232 bp, Homo sapiens; identical to SEQ ID NO: 268615
  chr16:2975080-2975312
  hypo

SEQ ID NO: 386700 - DNA, 65 bp, Homo sapiens; identical to SEQ ID NO: 268617
  chr16:3051091-3051156
  hypo

SEQ ID NO: 386701 - DNA, 37 bp, Homo sapiens; identical to SEQ ID NO: 291287
  chr16:3097009-3097046
  hypo

SEQ ID NO: 386702 - DNA, 118 bp, Homo sapiens; identical to SEQ ID NO: 268641
  chr16:3635039-3635157
  hypo

SEQ ID NO: 386703 - DNA, 146 bp, Homo sapiens; identical to SEQ ID NO: 268649
  chr16:3777135-3777281
  hypo

SEQ ID NO: 386704 - DNA, 138 bp, Homo sapiens; identical to SEQ ID NO: 268668
  chr16:4029240-4029378
  hypo

SEQ ID NO: 386705 - DNA, 273 bp, Homo sapiens; identical to SEQ ID NO: 268672
  chr16:4160070-4160343
  hypo

SEQ ID NO: 386706 - DNA, 204 bp, Homo sapiens; identical to SEQ ID NO: 320203
  chr16:4385112-4385316
  hypo

SEQ ID NO: 386707 - DNA, 44 bp, Homo sapiens; identical to SEQ ID NO: 268688
  chr16:4414173-4414217
  hypo

SEQ ID NO: 386708 - DNA, 215 bp, Homo sapiens; identical to SEQ ID NO: 225008
  chr16:4852975-4853190
  hypo

SEQ ID NO: 386709 - DNA, 96 bp, Homo sapiens; identical to SEQ ID NO: 216745
  chr16:4900508-4900604
  hypo

SEQ ID NO: 386710 - DNA, 117 bp, Homo sapiens; identical to SEQ ID NO: 216746
  chr16:4900634-4900751
  hypo

SEQ ID NO: 386711 - DNA, 167 bp, Homo sapiens; identical to SEQ ID NO: 216752
  chr16:4980311-4980478
  hypo

SEQ ID NO: 386712 - DNA, 186 bp, Homo sapiens; identical to SEQ ID NO: 216761
  chr16:10631325-10631511
  hypo

SEQ ID NO: 386713 - DNA, 41 bp, Homo sapiens; identical to SEQ ID NO: 268771
  chr16:11225773-11225814
  hypo

SEQ ID NO: 386714 - DNA, 104 bp, Homo sapiens; identical to SEQ ID NO: 216776
  chr16:11265077-11265181
  hypo

SEQ ID NO: 386715 - DNA, 138 bp, Homo sapiens; identical to SEQ ID NO: 320309
  chr16:11282895-11283033
  hypo

SEQ ID NO: 386716 - DNA, 52 bp, Homo sapiens; identical to SEQ ID NO: 216777
  chr16:11370335-11370387
  hypo

SEQ ID NO: 386717 - DNA, 110 bp, Homo sapiens; identical to SEQ ID NO: 320321
  chr16:11770050-11770160
  hypo

SEQ ID NO: 386718 - DNA, 134 bp, Homo sapiens; identical to SEQ ID NO: 320322
  chr16:11770190-11770324
  hypo

SEQ ID NO: 386719 - DNA, 78 bp, Homo sapiens; identical to SEQ ID NO: 216792
  chr16:12136759-12136837
  hypo

SEQ ID NO: 386720 - DNA, 101 bp, Homo sapiens; identical to SEQ ID NO: 268828
  chr16:12331021-12331122
  hypo

SEQ ID NO: 386721 - DNA, 55 bp, Homo sapiens; identical to SEQ ID NO: 268888
  chr16:15798699-15798754
  hypo

SEQ ID NO: 386722 - DNA, 42 bp, Homo sapiens; identical to SEQ ID NO: 268894
  chr16:15991506-15991548
  hypo

SEQ ID NO: 386723 - DNA, 35 bp, Homo sapiens; identical to SEQ ID NO: 268897
  chr16:16041979-16042014
  hypo

SEQ ID NO: 386724 - DNA, 39 bp, Homo sapiens; identical to SEQ ID NO: 268898
  chr16:16090901-16090940
  hypo

SEQ ID NO: 386725 - DNA, 36 bp, Homo sapiens; identical to SEQ ID NO: 268919
  chr16:19085558-19085594
  hypo

SEQ ID NO: 386726 - DNA, 42 bp, Homo sapiens; identical to SEQ ID NO: 216827
  chr16:19184226-19184268
  hypo

SEQ ID NO: 386727 - DNA, 86 bp, Homo sapiens; identical to SEQ ID NO: 268931
  chr16:19706325-19706411
  hypo

SEQ ID NO: 386728 - DNA, 149 bp, Homo sapiens; identical to SEQ ID NO: 320481
  chr16:21539210-21539359
  hypo

SEQ ID NO: 386729 - DNA, 155 bp, Homo sapiens; identical to SEQ ID NO: 268978
  chr16:23402871-23403026
  hypo

SEQ ID NO: 386730 - DNA, 86 bp, Homo sapiens; identical to SEQ ID NO: 268994
  chr16:24079284-24079370
  hypo

SEQ ID NO: 386731 - DNA, 118 bp, Homo sapiens; identical to SEQ ID NO: 320545
  chr16:27052120-27052238
  hypo

SEQ ID NO: 386732 - DNA, 119 bp, Homo sapiens; identical to SEQ ID NO: 320546
  chr16:27052308-27052427
  hypo

SEQ ID NO: 386733 - DNA, 42 bp, Homo sapiens; identical to SEQ ID NO: 269037
  chr16:27945907-27945949
  hypo

SEQ ID NO: 386734 - DNA, 120 bp, Homo sapiens; identical to SEQ ID NO: 216881
  chr16:28822780-28822900
  hypo

SEQ ID NO: 386735 - DNA, 175 bp, Homo sapiens; identical to SEQ ID NO: 320599
  chr16:29230296-29230471
  hypo

SEQ ID NO: 386736 - DNA, 79 bp, Homo sapiens; identical to SEQ ID NO: 204150
  chr16:29606232-29606311
  hypo

SEQ ID NO: 386737 - DNA, 180 bp, Homo sapiens; identical to SEQ ID NO: 269070
  chr16:29703876-29704056
  hypo

SEQ ID NO: 386738 - DNA, 413 bp, Homo sapiens; identical to SEQ ID NO: 216893
  chr16:29755602-29756015
  hypo

SEQ ID NO: 386739 - DNA, 104 bp, Homo sapiens; identical to SEQ ID NO: 269085
  chr16:29971777-29971881
  hypo

SEQ ID NO: 386740 - DNA, 127 bp, Homo sapiens; identical to SEQ ID NO: 216905
  chr16:30125291-30125418
  hypo

SEQ ID NO: 386741 - DNA, 403 bp, Homo sapiens; identical to SEQ ID NO: 216907
  chr16:30199143-30199546
  hypo

SEQ ID NO: 386742 - DNA, 39 bp, Homo sapiens; identical to SEQ ID NO: 269107
  chr16:30506741-30506780
  hypo

SEQ ID NO: 386743 - DNA, 47 bp, Homo sapiens; identical to SEQ ID NO: 269112
  chr16:30737305-30737352
  hypo

SEQ ID NO: 386744 - DNA, 100 bp, Homo sapiens; identical to SEQ ID NO: 216911
  chr16:30794665-30794765
  hypo

SEQ ID NO: 386745 - DNA, 198 bp, Homo sapiens; identical to SEQ ID NO: 269126
  chr16:30939779-30939977
  hypo

SEQ ID NO: 386746 - DNA, 250 bp, Homo sapiens; identical to SEQ ID NO: 269128
  chr16:30964630-30964880
  hypo

SEQ ID NO: 386747 - DNA, 63 bp, Homo sapiens; identical to SEQ ID NO: 269136
  chr16:31009764-31009827
  hypo

SEQ ID NO: 386748 - DNA, 402 bp, Homo sapiens; identical to SEQ ID NO: 225055
  chr16:31453960-31454362
  hypo

SEQ ID NO: 386749 - DNA, 175 bp, Homo sapiens; identical to SEQ ID NO: 269161
  chr16:34986007-34986182
  hypo

SEQ ID NO: 386750 - DNA, 82 bp, Homo sapiens; identical to SEQ ID NO: 216965
  chr16:53825645-53825727
  hypo

SEQ ID NO: 386751 - DNA, 43 bp, Homo sapiens; identical to SEQ ID NO: 269234
  chr16:56902581-56902624
  hypo

SEQ ID NO: 386752 - DNA, 57 bp, Homo sapiens; identical to SEQ ID NO: 269250
  chr16:57686683-57686740
  hypo

SEQ ID NO: 386753 - DNA, 207 bp, Homo sapiens; identical to SEQ ID NO: 269254
  chr16:57759978-57760185
  hypo

SEQ ID NO: 386754 - DNA, 67 bp, Homo sapiens; identical to SEQ ID NO: 216988
  chr16:58076202-58076269
  hypo

SEQ ID NO: 386755 - DNA, 757 bp, Homo sapiens; identical to SEQ ID NO: 269277
  chr16:66835306-66836063
  hypo

SEQ ID NO: 386756 - DNA, 120 bp, Homo sapiens; identical to SEQ ID NO: 269279
  chr16:66986333-66986453
  hypo

SEQ ID NO: 386757 - DNA, 368 bp, Homo sapiens; identical to SEQ ID NO: 217008
  chr16:67469689-67470057
  hypo

SEQ ID NO: 386758 - DNA, 66 bp, Homo sapiens; identical to SEQ ID NO: 269300
  chr16:67574479-67574545
  hypo

SEQ ID NO: 386759 - DNA, 34 bp, Homo sapiens; identical to SEQ ID NO: 217031
  chr16:68739594-68739628
  hypo

SEQ ID NO: 386760 - DNA, 88 bp, Homo sapiens; identical to SEQ ID NO: 269319
  chr16:68782327-68782415
  hypo

SEQ ID NO: 386761 - DNA, 660 bp, Homo sapiens; identical to SEQ ID NO: 225107
  chr16:69139815-69140475
  hypo

SEQ ID NO: 386762 - DNA, 36 bp, Homo sapiens; identical to SEQ ID NO: 217049
  chr16:69439224-69439260
  hypo

SEQ ID NO: 386763 - DNA, 275 bp, Homo sapiens; identical to SEQ ID NO: 217051
  chr16:69557609-69557884
  hypo

SEQ ID NO: 386764 - DNA, 41 bp, Homo sapiens; identical to SEQ ID NO: 269347
  chr16:69613048-69613089
  hypo

SEQ ID NO: 386765 - DNA, 130 bp, Homo sapiens; identical to SEQ ID NO: 217063
  chr16:70286315-70286445
  hypo

SEQ ID NO: 386766 - DNA, 96 bp, Homo sapiens; identical to SEQ ID NO: 269382
  chr16:70829399-70829495
  hypo

SEQ ID NO: 386767 - DNA, 35 bp, Homo sapiens; identical to SEQ ID NO: 269391
  chr16:71756040-71756075
  hypo

SEQ ID NO: 386768 - DNA, 149 bp, Homo sapiens; identical to SEQ ID NO: 225111
  chr16:72699010-72699159
  hypo

SEQ ID NO: 386769 - DNA, 334 bp, Homo sapiens; identical to SEQ ID NO: 291692
  chr16:73091551-73091885
  hypo

SEQ ID NO: 386770 - DNA, 217 bp, Homo sapiens; identical to SEQ ID NO: 53263
  chr16:73091900-73092117
  hypo

SEQ ID NO: 386771 - DNA, 40 bp, Homo sapiens; identical to SEQ ID NO: 204287
  chr16:75018963-75019003
  hypo

SEQ ID NO: 386772 - DNA, 457 bp, Homo sapiens; identical to SEQ ID NO: 269456
  chr16:75513119-75513576
  hypo

SEQ ID NO: 386773 - DNA, 165 bp, Homo sapiens; identical to SEQ ID NO: 204293
  chr16:75529727-75529892
  hypo

SEQ ID NO: 386774 - DNA, 580 bp, Homo sapiens; identical to SEQ ID NO: 217123
  chr16:77228259-77228839
  hypo

SEQ ID NO: 386775 - DNA, 43 bp, Homo sapiens; identical to SEQ ID NO: 217124
  chr16:77229453-77229496
  hypo

SEQ ID NO: 386776 - DNA, 38 bp, Homo sapiens; identical to SEQ ID NO: 217135
  chr16:80654697-80654735
  hypo

SEQ ID NO: 386777 - DNA, 158 bp, Homo sapiens; identical to SEQ ID NO: 269478
  chr16:80714339-80714497
  hypo

SEQ ID NO: 386778 - DNA, 55 bp, Homo sapiens
  chr16:84132212-84132267
  hypo
aaaaaaataaataaataaaaaggaaaagaaaaaataaaacacacactgagagaag

SEQ ID NO: 386779 - DNA, 255 bp, Homo sapiens; identical to SEQ ID NO: 269546
  chr16:84537368-84537623
  hypo

SEQ ID NO: 386780 - DNA, 139 bp, Homo sapiens; identical to SEQ ID NO: 217165
  chr16:84593079-84593218
  hypo

SEQ ID NO: 386781 - DNA, 41 bp, Homo sapiens; identical to SEQ ID NO: 269555
  chr16:84735938-84735979
  hypo

SEQ ID NO: 386782 - DNA, 450 bp, Homo sapiens; identical to SEQ ID NO: 269562
  chr16:84824664-84825114
  hypo

SEQ ID NO: 386783 - DNA, 182 bp, Homo sapiens; identical to SEQ ID NO: 217171
  chr16:84965070-84965252
  hypo

SEQ ID NO: 386784 - DNA, 458 bp, Homo sapiens; identical to SEQ ID NO: 269581
  chr16:85019752-85020210
  hypo

SEQ ID NO: 386785 - DNA, 143 bp, Homo sapiens; identical to SEQ ID NO: 269582
  chr16:85024470-85024613
  hypo

SEQ ID NO: 386786 - DNA, 173 bp, Homo sapiens; identical to SEQ ID NO: 217184
  chr16:85214271-85214444
  hypo

SEQ ID NO: 386787 - DNA, 374 bp, Homo sapiens; identical to SEQ ID NO: 269595
  chr16:85216377-85216751
  hypo

SEQ ID NO: 386788 - DNA, 53 bp, Homo sapiens; identical to SEQ ID NO: 321222
  chr16:85317797-85317850
  hypo

SEQ ID NO: 386789 - DNA, 107 bp, Homo sapiens; identical to SEQ ID NO: 321223
  chr16:85317882-85317989
  hypo

SEQ ID NO: 386790 - DNA, 172 bp, Homo sapiens; identical to SEQ ID NO: 269606
  chr16:85329623-85329795
  hypo

SEQ ID NO: 386791 - DNA, 141 bp, Homo sapiens; identical to SEQ ID NO: 269636
  chr16:85520266-85520407
  hypo

SEQ ID NO: 386792 - DNA, 413 bp, Homo sapiens; identical to SEQ ID NO: 269638
  chr16:85529540-85529953
  hypo

SEQ ID NO: 386793 - DNA, 173 bp, Homo sapiens; identical to SEQ ID NO: 321265
  chr16:85537318-85537491
  hypo

SEQ ID NO: 386794 - DNA, 521 bp, Homo sapiens; identical to SEQ ID NO: 269648
  chr16:85616219-85616740
  hypo

SEQ ID NO: 386795 - DNA, 74 bp, Homo sapiens; identical to SEQ ID NO: 217223
  chr16:85678761-85678835
  hypo

SEQ ID NO: 386796 - DNA, 37 bp, Homo sapiens; identical to SEQ ID NO: 269674
  chr16:85954880-85954917
  hypo

SEQ ID NO: 386797 - DNA, 47 bp, Homo sapiens; identical to SEQ ID NO: 217246
  chr16:87447846-87447893
  hypo

SEQ ID NO: 386798 - DNA, 169 bp, Homo sapiens; identical to SEQ ID NO: 269712
  chr16:87625740-87625909
  hypo

SEQ ID NO: 386799 - DNA, 178 bp, Homo sapiens; identical to SEQ ID NO: 269720
  chr16:87756599-87756777
  hypo

SEQ ID NO: 386800 - DNA, 150 bp, Homo sapiens; identical to SEQ ID NO: 269723
  chr16:87784654-87784804
  hypo

SEQ ID NO: 386801 - DNA, 45 bp, Homo sapiens; identical to SEQ ID NO: 269732
  chr16:87934808-87934853
  hypo

SEQ ID NO: 386802 - DNA, 49 bp, Homo sapiens; identical to SEQ ID NO: 217265
  chr16:88078972-88079021
  hypo

SEQ ID NO: 386803 - DNA, 268 bp, Homo sapiens; identical to SEQ ID NO: 269762
  chr16:88385554-88385822
  hypo

SEQ ID NO: 386804 - DNA, 431 bp, Homo sapiens; identical to SEQ ID NO: 321409
  chr16:88460215-88460646
  hypo

SEQ ID NO: 386805 - DNA, 45 bp, Homo sapiens; identical to SEQ ID NO: 217281
  chr16:88537675-88537720
  hypo

SEQ ID NO: 386806 - DNA, 65 bp, Homo sapiens; identical to SEQ ID NO: 321443
  chr16:88722261-88722326
  hypo

SEQ ID NO: 386807 - DNA, 113 bp, Homo sapiens; identical to SEQ ID NO: 217296
  chr16:88722817-88722930
  hypo

SEQ ID NO: 386808 - DNA, 127 bp, Homo sapiens; identical to SEQ ID NO: 217300
  chr16:88738306-88738433
  hypo

SEQ ID NO: 386809 - DNA, 322 bp, Homo sapiens; identical to SEQ ID NO: 269807
  chr16:88776937-88777259
  hypo

SEQ ID NO: 386810 - DNA, 31 bp, Homo sapiens; identical to SEQ ID NO: 269808
  chr16:88780638-88780669
  hypo

SEQ ID NO: 386811 - DNA, 38 bp, Homo sapiens; identical to SEQ ID NO: 269811
  chr16:88785880-88785918
  hypo

SEQ ID NO: 386812 - DNA, 62 bp, Homo sapiens; identical to SEQ ID NO: 217304
  chr16:88788384-88788446
  hypo

SEQ ID NO: 386813 - DNA, 59 bp, Homo sapiens; identical to SEQ ID NO: 217313
  chr16:88831171-88831230
  hypo

SEQ ID NO: 386814 - DNA, 142 bp, Homo sapiens; identical to SEQ ID NO: 217314
  chr16:88831297-88831439
  hypo

SEQ ID NO: 386815 - DNA, 507 bp, Homo sapiens; identical to SEQ ID NO: 204340
  chr16:88878527-88879034
  hypo

SEQ ID NO: 386816 - DNA, 201 bp, Homo sapiens; identical to SEQ ID NO: 321523
  chr16:89010085-89010286
  hypo

SEQ ID NO: 386817 - DNA, 200 bp, Homo sapiens; identical to SEQ ID NO: 269876
  chr16:89027649-89027849
  hypo

SEQ ID NO: 386818 - DNA, 164 bp, Homo sapiens; identical to SEQ ID NO: 269881
  chr16:89089219-89089383
  hypo

SEQ ID NO: 386819 - DNA, 240 bp, Homo sapiens; identical to SEQ ID NO: 269897
  chr16:89147081-89147321
  hypo

SEQ ID NO: 386820 - DNA, 324 bp, Homo sapiens; identical to SEQ ID NO: 269905
  chr16:89179513-89179837
  hypo

SEQ ID NO: 386821 - DNA, 98 bp, Homo sapiens; identical to SEQ ID NO: 217359
  chr16:89255153-89255251
  hypo

SEQ ID NO: 386822 - DNA, 314 bp, Homo sapiens; identical to SEQ ID NO: 217364
  chr16:89359017-89359331
  hypo

SEQ ID NO: 386823 - DNA, 47 bp, Homo sapiens; identical to SEQ ID NO: 217386
  chr16:89715825-89715872
  hypo

SEQ ID NO: 386824 - DNA, 85 bp, Homo sapiens; identical to SEQ ID NO: 217391
  chr16:89807744-89807829
  hypo

SEQ ID NO: 386825 - DNA, 38 bp, Homo sapiens; identical to SEQ ID NO: 217393
  chr16:89830047-89830085
  hypo

SEQ ID NO: 386826 - DNA, 64 bp, Homo sapiens; identical to SEQ ID NO: 269987
  chr16:89920072-89920136
  hypo

SEQ ID NO: 386827 - DNA, 310 bp, Homo sapiens; identical to SEQ ID NO: 217399
  chr16:89966590-89966900
  hypo

SEQ ID NO: 386828 - DNA, 135 bp, Homo sapiens; identical to SEQ ID NO: 217407
  chr16:90059132-90059267
  hypo

SEQ ID NO: 386829 - DNA, 206 bp, Homo sapiens; identical to SEQ ID NO: 270007
  chr16:90109929-90110135
  hypo

SEQ ID NO: 386830 - DNA, 41 bp, Homo sapiens; identical to SEQ ID NO: 270011
  chr17:523202-523243
  hypo

SEQ ID NO: 386831 - DNA, 464 bp, Homo sapiens; identical to SEQ ID NO: 217426
  chr17:693367-693831
  hypo

SEQ ID NO: 386832 - DNA, 84 bp, Homo sapiens; identical to SEQ ID NO: 225185
  chr17:883202-883286
  hypo

SEQ ID NO: 386833 - DNA, 214 bp, Homo sapiens; identical to SEQ ID NO: 270054
  chr17:1240771-1240985
  hypo

SEQ ID NO: 386834 - DNA, 204 bp, Homo sapiens; identical to SEQ ID NO: 270076
  chr17:1527254-1527458
  hypo

SEQ ID NO: 386835 - DNA, 39 bp, Homo sapiens; identical to SEQ ID NO: 270079
  chr17:1562742-1562781
  hypo

SEQ ID NO: 386836 - DNA, 58 bp, Homo sapiens; identical to SEQ ID NO: 270090
  chr17:1802318-1802376
  hypo

SEQ ID NO: 386837 - DNA, 146 bp, Homo sapiens; identical to SEQ ID NO: 321770
  chr17:1824435-1824581
  hypo

SEQ ID NO: 386838 - DNA, 79 bp, Homo sapiens; identical to SEQ ID NO: 321771
  chr17:1824611-1824690
  hypo

SEQ ID NO: 386839 - DNA, 156 bp, Homo sapiens; identical to SEQ ID NO: 217459
  chr17:2182384-2182540
  hypo

SEQ ID NO: 386840 - DNA, 51 bp, Homo sapiens; identical to SEQ ID NO: 321789
  chr17:2278750-2278801
  hypo

SEQ ID NO: 386841 - DNA, 452 bp, Homo sapiens; identical to SEQ ID NO: 321790
  chr17:2278925-2279377
  hypo

SEQ ID NO: 386842 - DNA, 66 bp, Homo sapiens
  chr17:2326291-2326357
  hypo
aaaaggataaaaaagaaaaaacaccaagtcaggtttgaagatctttttctgctaaaaggaatctga

SEQ ID NO: 386843 - DNA, 203 bp, Homo sapiens; identical to SEQ ID NO: 217465
  chr17:2595624-2595827
  hypo

SEQ ID NO: 386844 - DNA, 34 bp, Homo sapiens; identical to SEQ ID NO: 217468
  chr17:2616132-2616166
  hypo

SEQ ID NO: 386845 - DNA, 190 bp, Homo sapiens; identical to SEQ ID NO: 270144
  chr17:3653522-3653712
  hypo

SEQ ID NO: 386846 - DNA, 138 bp, Homo sapiens; identical to SEQ ID NO: 270195
  chr17:6419897-6420035
  hypo

SEQ ID NO: 386847 - DNA, 159 bp, Homo sapiens; identical to SEQ ID NO: 270203
  chr17:7076077-7076236
  hypo

SEQ ID NO: 386848 - DNA, 274 bp, Homo sapiens; identical to SEQ ID NO: 225215
  chr17:7340607-7340881
  hypo

SEQ ID NO: 386849 - DNA, 85 bp, Homo sapiens; identical to SEQ ID NO: 270225
  chr17:7486579-7486664
  hypo

SEQ ID NO: 386850 - DNA, 329 bp, Homo sapiens; identical to SEQ ID NO: 204409
  chr17:7590625-7590954
  hypo

SEQ ID NO: 386851 - DNA, 79 bp, Homo sapiens; identical to SEQ ID NO: 217543
  chr17:7813720-7813799
  hypo

SEQ ID NO: 386852 - DNA, 83 bp, Homo sapiens; identical to SEQ ID NO: 217550
  chr17:8325971-8326054
  hypo

SEQ ID NO: 386853 - DNA, 57 bp, Homo sapiens; identical to SEQ ID NO: 270271
  chr17:8471465-8471522
  hypo

SEQ ID NO: 386854 - DNA, 44 bp, Homo sapiens; identical to SEQ ID NO: 321991
  chr17:9065675-9065719
  hypo

SEQ ID NO: 386855 - DNA, 106 bp, Homo sapiens; identical to SEQ ID NO: 321992
  chr17:9065749-9065855
  hypo

SEQ ID NO: 386856 - DNA, 275 bp, Homo sapiens; identical to SEQ ID NO: 270287
  chr17:9124886-9125161
  hypo

SEQ ID NO: 386857 - DNA, 193 bp, Homo sapiens; identical to SEQ ID NO: 270293
  chr17:9264056-9264249
  hypo

SEQ ID NO: 386858 - DNA, 184 bp, Homo sapiens; identical to SEQ ID NO: 270305
  chr17:10216484-10216668
  hypo

SEQ ID NO: 386859 - DNA, 242 bp, Homo sapiens; identical to SEQ ID NO: 217571
  chr17:12905698-12905940
  hypo

SEQ ID NO: 386860 - DNA, 121 bp, Homo sapiens; identical to SEQ ID NO: 217582
  chr17:16385291-16385412
  hypo

SEQ ID NO: 386861 - DNA, 57 bp, Homo sapiens; identical to SEQ ID NO: 225243
  chr17:16395229-16395286
  hypo

SEQ ID NO: 386862 - DNA, 119 bp, Homo sapiens; identical to SEQ ID NO: 270339
  chr17:17012232-17012351
  hypo

SEQ ID NO: 386863 - DNA, 206 bp, Homo sapiens; identical to SEQ ID NO: 270354
  chr17:17250660-17250866
  hypo

SEQ ID NO: 386864 - DNA, 311 bp, Homo sapiens; identical to SEQ ID NO: 217590
  chr17:17251122-17251433
  hypo

SEQ ID NO: 386865 - DNA, 101 bp, Homo sapiens; identical to SEQ ID NO: 270356
  chr17:17255033-17255134
  hypo

SEQ ID NO: 386866 - DNA, 132 bp, Homo sapiens; identical to SEQ ID NO: 217594
  chr17:17447945-17448077
  hypo

SEQ ID NO: 386867 - DNA, 65 bp, Homo sapiens; identical to SEQ ID NO: 217611
  chr17:19641468-19641533
  hypo

SEQ ID NO: 386868 - DNA, 58 bp, Homo sapiens; identical to SEQ ID NO: 270412
  chr17:19642884-19642942
  hypo

SEQ ID NO: 386869 - DNA, 71 bp, Homo sapiens; identical to SEQ ID NO: 270423
  chr17:19772163-19772234
  hypo

SEQ ID NO: 386870 - DNA, 93 bp, Homo sapiens; identical to SEQ ID NO: 270426
  chr17:19861688-19861781
  hypo

SEQ ID NO: 386871 - DNA, 120 bp, Homo sapiens; identical to SEQ ID NO: 270428
  chr17:19902538-19902658
  hypo

SEQ ID NO: 386872 - DNA, 78 bp, Homo sapiens; identical to SEQ ID NO: 270435
  chr17:20141015-20141093
  hypo

SEQ ID NO: 386873 - DNA, 33 bp, Homo sapiens; identical to SEQ ID NO: 270439
  chr17:20220061-20220094
  hypo

SEQ ID NO: 386874 - DNA, 129 bp, Homo sapiens; identical to SEQ ID NO: 217643
  chr17:27011597-27011726
  hypo

SEQ ID NO: 386875 - DNA, 64 bp, Homo sapiens; identical to SEQ ID NO: 270492
  chr17:27028074-27028138
  hypo

SEQ ID NO: 386876 - DNA, 96 bp, Homo sapiens; identical to SEQ ID NO: 270499
  chr17:27171310-27171406
  hypo

SEQ ID NO: 386877 - DNA, 74 bp, Homo sapiens; identical to SEQ ID NO: 384646
  chr17:27333201-27333275
  hypo

SEQ ID NO: 386878 - DNA, 69 bp, Homo sapiens; identical to SEQ ID NO: 217648
  chr17:27407262-27407331
  hypo

SEQ ID NO: 386879 - DNA, 36 bp, Homo sapiens; identical to SEQ ID NO: 270518
  chr17:27908746-27908782
  hypo

SEQ ID NO: 386880 - DNA, 174 bp, Homo sapiens; identical to SEQ ID NO: 204493
  chr17:29527439-29527613
  hypo

SEQ ID NO: 386881 - DNA, 136 bp, Homo sapiens; identical to SEQ ID NO: 204499
  chr17:29546009-29546145
  hypo

SEQ ID NO: 386882 - DNA, 250 bp, Homo sapiens; identical to SEQ ID NO: 204503
  chr17:29553452-29553702
  hypo

SEQ ID NO: 386883 - DNA, 117 bp, Homo sapiens; identical to SEQ ID NO: 204510
  chr17:29559090-29559207
  hypo

SEQ ID NO: 386884 - DNA, 143 bp, Homo sapiens; identical to SEQ ID NO: 204536
  chr17:29685497-29685640
  hypo

SEQ ID NO: 386885 - DNA, 241 bp, Homo sapiens; identical to SEQ ID NO: 270534
  chr17:30348356-30348597
  hypo

SEQ ID NO: 386886 - DNA, 40 bp, Homo sapiens; identical to SEQ ID NO: 270536
  chr17:30582939-30582979
  hypo

SEQ ID NO: 386887 - DNA, 89 bp, Homo sapiens; identical to SEQ ID NO: 204542
  chr17:30813422-30813511
  hypo

SEQ ID NO: 386888 - DNA, 105 bp, Homo sapiens; identical to SEQ ID NO: 225322
  chr17:31203740-31203845
  hypo

SEQ ID NO: 386889 - DNA, 42 bp, Homo sapiens; identical to SEQ ID NO: 217742
  chr17:36967822-36967864
  hypo

SEQ ID NO: 386890 - DNA, 35 bp, Homo sapiens; identical to SEQ ID NO: 270580
  chr17:37276419-37276454
  hypo

SEQ ID NO: 386891 - DNA, 85 bp, Homo sapiens; identical to SEQ ID NO: 217747
  chr17:37483846-37483931
  hypo

SEQ ID NO: 386892 - DNA, 180 bp, Homo sapiens; identical to SEQ ID NO: 270587
  chr17:37583288-37583468
  hypo

SEQ ID NO: 386893 - DNA, 31 bp, Homo sapiens; identical to SEQ ID NO: 322392
  chr17:37887589-37887620
  hypo

SEQ ID NO: 386894 - DNA, 120 bp, Homo sapiens; identical to SEQ ID NO: 217758
  chr17:38105714-38105834
  hypo

SEQ ID NO: 386895 - DNA, 504 bp, Homo sapiens; identical to SEQ ID NO: 217763
  chr17:38249240-38249744
  hypo

SEQ ID NO: 386896 - DNA, 124 bp, Homo sapiens; identical to SEQ ID NO: 217764
  chr17:38251853-38251977
  hypo

SEQ ID NO: 386897 - DNA, 120 bp, Homo sapiens; identical to SEQ ID NO: 270602
  chr17:38276209-38276329
  hypo

SEQ ID NO: 386898 - DNA, 323 bp, Homo sapiens; identical to SEQ ID NO: 270612
  chr17:38774236-38774559
  hypo

SEQ ID NO: 386899 - DNA, 111 bp, Homo sapiens; identical to SEQ ID NO: 270625
  chr17:39694232-39694343
  hypo

SEQ ID NO: 386900 - DNA, 203 bp, Homo sapiens; identical to SEQ ID NO: 270633
  chr17:40362204-40362407
  hypo

SEQ ID NO: 386901 - DNA, 418 bp, Homo sapiens; identical to SEQ ID NO: 270645
  chr17:40456105-40456523
  hypo

SEQ ID NO: 386902 - DNA, 196 bp, Homo sapiens; identical to SEQ ID NO: 270655
  chr17:40695505-40695701
  hypo

SEQ ID NO: 386903 - DNA, 42 bp, Homo sapiens; identical to SEQ ID NO: 270658
  chr17:40711057-40711099
  hypo

SEQ ID NO: 386904 - DNA, 104 bp, Homo sapiens; identical to SEQ ID NO: 270662
  chr17:40820751-40820855
  hypo

SEQ ID NO: 386905 - DNA, 89 bp, Homo sapiens; identical to SEQ ID NO: 225369
  chr17:41242960-41243049
  hypo

SEQ ID NO: 386906 - DNA, 37 bp, Homo sapiens; identical to SEQ ID NO: 270687
  chr17:41915919-41915956
  hypo

SEQ ID NO: 386907 - DNA, 614 bp, Homo sapiens; identical to SEQ ID NO: 292390
  chr17:42298856-42299470
  hypo

SEQ ID NO: 386908 - DNA, 198 bp, Homo sapiens; identical to SEQ ID NO: 270706
  chr17:42427016-42427214
  hypo

SEQ ID NO: 386909 - DNA, 207 bp, Homo sapiens; identical to SEQ ID NO: 217821
  chr17:42992858-42993065
  hypo

SEQ ID NO: 386910 - DNA, 85 bp, Homo sapiens; identical to SEQ ID NO: 217825
  chr17:43124006-43124091
  hypo

SEQ ID NO: 386911 - DNA, 33 bp, Homo sapiens; identical to SEQ ID NO: 217826
  chr17:43173433-43173466
  hypo

SEQ ID NO: 386912 - DNA, 223 bp, Homo sapiens; identical to SEQ ID NO: 270724
  chr17:43208547-43208770
  hypo

SEQ ID NO: 386913 - DNA, 113 bp, Homo sapiens; identical to SEQ ID NO: 217833
  chr17:43321183-43321296
  hypo

SEQ ID NO: 386914 - DNA, 88 bp, Homo sapiens; identical to SEQ ID NO: 217834
  chr17:43321347-43321435
  hypo

SEQ ID NO: 386915 - DNA, 37 bp, Homo sapiens; identical to SEQ ID NO: 270747
  chr17:46017956-46017993
  hypo

SEQ ID NO: 386916 - DNA, 33 bp, Homo sapiens; identical to SEQ ID NO: 217842
  chr17:46123911-46123944
  hypo

SEQ ID NO: 386917 - DNA, 57 bp, Homo sapiens; identical to SEQ ID NO: 270754
  chr17:46176826-46176883
  hypo

SEQ ID NO: 386918 - DNA, 119 bp, Homo sapiens; identical to SEQ ID NO: 322624
  chr17:47170956-47171075
  hypo

SEQ ID NO: 386919 - DNA, 85 bp, Homo sapiens; identical to SEQ ID NO: 384670
  chr17:47928527-47928612
  hypo

SEQ ID NO: 386920 - DNA, 173 bp, Homo sapiens; identical to SEQ ID NO: 225421
  chr17:47929093-47929266
  hypo

SEQ ID NO: 386921 - DNA, 282 bp, Homo sapiens; identical to SEQ ID NO: 225427
  chr17:48072333-48072615
  hypo

SEQ ID NO: 386922 - DNA, 113 bp, Homo sapiens; identical to SEQ ID NO: 270776
  chr17:48183244-48183357
  hypo

SEQ ID NO: 386923 - DNA, 45 bp, Homo sapiens; identical to SEQ ID NO: 322657
  chr17:48620600-48620645
  hypo

SEQ ID NO: 386924 - DNA, 46 bp, Homo sapiens; identical to SEQ ID NO: 270808
  chr17:49354211-49354257
  hypo

SEQ ID NO: 386925 - DNA, 43 bp, Homo sapiens; identical to SEQ ID NO: 270810
  chr17:52865183-52865226
  hypo

SEQ ID NO: 386926 - DNA, 34 bp, Homo sapiens; identical to SEQ ID NO: 217889
  chr17:55426663-55426697
  hypo

SEQ ID NO: 386927 - DNA, 44 bp, Homo sapiens; identical to SEQ ID NO: 217890
  chr17:55519664-55519708
  hypo

SEQ ID NO: 386928 - DNA, 32 bp, Homo sapiens; identical to SEQ ID NO: 270831
  chr17:55615595-55615627
  hypo

SEQ ID NO: 386929 - DNA, 91 bp, Homo sapiens; identical to SEQ ID NO: 270834
  chr17:55647400-55647491
  hypo

SEQ ID NO: 386930 - DNA, 182 bp, Homo sapiens; identical to SEQ ID NO: 217892
  chr17:55752305-55752487
  hypo

SEQ ID NO: 386931 - DNA, 31 bp, Homo sapiens; identical to SEQ ID NO: 217907
  chr17:57832470-57832501
  hypo

SEQ ID NO: 386932 - DNA, 36 bp, Homo sapiens; identical to SEQ ID NO: 217910
  chr17:58590466-58590502
  hypo

SEQ ID NO: 386933 - DNA, 125 bp, Homo sapiens; identical to SEQ ID NO: 204731
  chr17:58711213-58711338
  hypo

SEQ ID NO: 386934 - DNA, 599 bp, Homo sapiens; identical to SEQ ID NO: 270884
  chr17:59520971-59521570
  hypo

SEQ ID NO: 386935 - DNA, 41 bp, Homo sapiens; identical to SEQ ID NO: 270900
  chr17:60750844-60750885
  hypo

SEQ ID NO: 386936 - DNA, 393 bp, Homo sapiens; identical to SEQ ID NO: 270916
  chr17:61514950-61515343
  hypo

SEQ ID NO: 386937 - DNA, 89 bp, Homo sapiens; identical to SEQ ID NO: 270921
  chr17:61611415-61611504
  hypo

SEQ ID NO: 386938 - DNA, 85 bp, Homo sapiens; identical to SEQ ID NO: 270946
  chr17:63497915-63498000
  hypo

SEQ ID NO: 386939 - DNA, 127 bp, Homo sapiens; identical to SEQ ID NO: 270977
  chr17:67081066-67081193
  hypo

SEQ ID NO: 386940 - DNA, 209 bp, Homo sapiens; identical to SEQ ID NO: 270978
  chr17:67468376-67468585
  hypo

SEQ ID NO: 386941 - DNA, 31 bp, Homo sapiens; identical to SEQ ID NO: 270979
  chr17:68197136-68197167
  hypo

SEQ ID NO: 386942 - DNA, 64 bp, Homo sapiens; identical to SEQ ID NO: 270984
  chr17:70507522-70507586
  hypo

SEQ ID NO: 386943 - DNA, 85 bp, Homo sapiens; identical to SEQ ID NO: 270986
  chr17:70705003-70705088
  hypo

SEQ ID NO: 386944 - DNA, 42 bp, Homo sapiens; identical to SEQ ID NO: 270993
  chr17:71190856-71190898
  hypo

SEQ ID NO: 386945 - DNA, 87 bp, Homo sapiens; identical to SEQ ID NO: 217979
  chr17:71272524-71272611
  hypo

SEQ ID NO: 386946 - DNA, 154 bp, Homo sapiens; identical to SEQ ID NO: 271004
  chr17:71326305-71326459
  hypo

SEQ ID NO: 386947 - DNA, 221 bp, Homo sapiens; identical to SEQ ID NO: 271065
  chr17:73131495-73131716
  hypo

SEQ ID NO: 386948 - DNA, 120 bp, Homo sapiens; identical to SEQ ID NO: 271071
  chr17:73172030-73172150
  hypo

SEQ ID NO: 386949 - DNA, 180 bp, Homo sapiens; identical to SEQ ID NO: 218016
  chr17:73209661-73209841
  hypo

SEQ ID NO: 386950 - DNA, 214 bp, Homo sapiens; identical to SEQ ID NO: 271081
  chr17:73274193-73274407
  hypo

SEQ ID NO: 386951 - DNA, 397 bp, Homo sapiens; identical to SEQ ID NO: 218023
  chr17:73311549-73311946
  hypo

SEQ ID NO: 386952 - DNA, 31 bp, Homo sapiens; identical to SEQ ID NO: 218047
  chr17:73904785-73904816
  hypo

SEQ ID NO: 386953 - DNA, 44 bp, Homo sapiens; identical to SEQ ID NO: 271128
  chr17:73915888-73915932
  hypo

SEQ ID NO: 386954 - DNA, 102 bp, Homo sapiens; identical to SEQ ID NO: 271133
  chr17:74008701-74008803
  hypo

SEQ ID NO: 386955 - DNA, 31 bp, Homo sapiens; identical to SEQ ID NO: 271140
  chr17:74041104-74041135
  hypo

SEQ ID NO: 386956 - DNA, 232 bp, Homo sapiens; identical to SEQ ID NO: 204805
  chr17:74732973-74733205
  hypo

SEQ ID NO: 386957 - DNA, 253 bp, Homo sapiens; identical to SEQ ID NO: 218077
  chr17:74771040-74771293
  hypo

SEQ ID NO: 386958 - DNA, 201 bp, Homo sapiens; identical to SEQ ID NO: 271197
  chr17:75354844-75355045
  hypo

SEQ ID NO: 386959 - DNA, 59 bp, Homo sapiens; identical to SEQ ID NO: 271206
  chr17:75452368-75452427
  hypo

SEQ ID NO: 386960 - DNA, 515 bp, Homo sapiens; identical to SEQ ID NO: 218096
  chr17:75476867-75477382
  hypo

SEQ ID NO: 386961 - DNA, 31 bp, Homo sapiens; identical to SEQ ID NO: 271220
  chr17:75603635-75603666
  hypo

SEQ ID NO: 386962 - DNA, 42 bp, Homo sapiens; identical to SEQ ID NO: 271234
  chr17:76076532-76076574
  hypo

SEQ ID NO: 386963 - DNA, 157 bp, Homo sapiens; identical to SEQ ID NO: 225520
  chr17:76349231-76349388
  hypo

SEQ ID NO: 386964 - DNA, 85 bp, Homo sapiens; identical to SEQ ID NO: 271331
  chr17:77206526-77206611
  hypo

SEQ ID NO: 386965 - DNA, 386 bp, Homo sapiens; identical to SEQ ID NO: 225527
  chr17:77774854-77775240
  hypo

SEQ ID NO: 386966 - DNA, 63 bp, Homo sapiens; identical to SEQ ID NO: 271346
  chr17:77900547-77900610
  hypo

SEQ ID NO: 386967 - DNA, 61 bp, Homo sapiens; identical to SEQ ID NO: 271366
  chr17:77954476-77954537
  hypo

SEQ ID NO: 386968 - DNA, 484 bp, Homo sapiens; identical to SEQ ID NO: 271370
  chr17:77975731-77976215
  hypo

SEQ ID NO: 386969 - DNA, 443 bp, Homo sapiens; identical to SEQ ID NO: 225536
  chr17:78010060-78010503
  hypo

SEQ ID NO: 386970 - DNA, 175 bp, Homo sapiens; identical to SEQ ID NO: 271377
  chr17:78022348-78022523
  hypo

SEQ ID NO: 386971 - DNA, 194 bp, Homo sapiens; identical to SEQ ID NO: 323348
  chr17:78083553-78083747
  hypo

SEQ ID NO: 386972 - DNA, 37 bp, Homo sapiens; identical to SEQ ID NO: 323349
  chr17:78083818-78083855
  hypo

SEQ ID NO: 386973 - DNA, 33 bp, Homo sapiens; identical to SEQ ID NO: 271399
  chr17:78179550-78179583
  hypo

SEQ ID NO: 386974 - DNA, 54 bp, Homo sapiens; identical to SEQ ID NO: 271411
  chr17:78338098-78338152
  hypo

SEQ ID NO: 386975 - DNA, 136 bp, Homo sapiens; identical to SEQ ID NO: 271419
  chr17:78442642-78442778
  hypo

SEQ ID NO: 386976 - DNA, 117 bp, Homo sapiens; identical to SEQ ID NO: 271420
  chr17:78475921-78476038
  hypo

SEQ ID NO: 386977 - DNA, 290 bp, Homo sapiens; identical to SEQ ID NO: 271441
  chr17:78747664-78747954
  hypo

SEQ ID NO: 386978 - DNA, 31 bp, Homo sapiens; identical to SEQ ID NO: 271448
  chr17:78783241-78783272
  hypo

SEQ ID NO: 386979 - DNA, 232 bp, Homo sapiens; identical to SEQ ID NO: 271463
  chr17:78870192-78870424
  hypo

SEQ ID NO: 386980 - DNA, 183 bp, Homo sapiens; identical to SEQ ID NO: 218206
  chr17:78873841-78874024
  hypo

SEQ ID NO: 386981 - DNA, 449 bp, Homo sapiens; identical to SEQ ID NO: 218207
  chr17:78876642-78877091
  hypo

SEQ ID NO: 386982 - DNA, 109 bp, Homo sapiens; identical to SEQ ID NO: 218208
  chr17:78877957-78878066
  hypo

SEQ ID NO: 386983 - DNA, 37 bp, Homo sapiens; identical to SEQ ID NO: 271477
  chr17:78975640-78975677
  hypo

SEQ ID NO: 386984 - DNA, 97 bp, Homo sapiens; identical to SEQ ID NO: 218221
  chr17:79065509-79065606
  hypo

SEQ ID NO: 386985 - DNA, 123 bp, Homo sapiens; identical to SEQ ID NO: 218230
  chr17:79083370-79083493
  hypo

SEQ ID NO: 386986 - DNA, 356 bp, Homo sapiens; identical to SEQ ID NO: 218238
  chr17:79102634-79102990
  hypo

SEQ ID NO: 386987 - DNA, 148 bp, Homo sapiens; identical to SEQ ID NO: 271525
  chr17:79133081-79133229
  hypo

SEQ ID NO: 386988 - DNA, 260 bp, Homo sapiens; identical to SEQ ID NO: 271571
  chr17:79772552-79772812
  hypo

SEQ ID NO: 386989 - DNA, 42 bp, Homo sapiens; identical to SEQ ID NO: 271572
  chr17:79776471-79776513
  hypo

SEQ ID NO: 386990 - DNA, 243 bp, Homo sapiens; identical to SEQ ID NO: 271577
  chr17:79804099-79804342
  hypo

SEQ ID NO: 386991 - DNA, 138 bp, Homo sapiens; identical to SEQ ID NO: 225549
  chr17:79885939-79886077
  hypo

SEQ ID NO: 386992 - DNA, 40 bp, Homo sapiens; identical to SEQ ID NO: 204847
  chr17:79989900-79989940
  hypo

SEQ ID NO: 386993 - DNA, 87 bp, Homo sapiens; identical to SEQ ID NO: 218289
  chr17:80040622-80040709
  hypo

SEQ ID NO: 386994 - DNA, 187 bp, Homo sapiens; identical to SEQ ID NO: 271623
  chr17:80135500-80135687
  hypo

SEQ ID NO: 386995 - DNA, 236 bp, Homo sapiens; identical to SEQ ID NO: 271626
  chr17:80159381-80159617
  hypo

SEQ ID NO: 386996 - DNA, 109 bp, Homo sapiens; identical to SEQ ID NO: 271627
  chr17:80176133-80176242
  hypo

SEQ ID NO: 386997 - DNA, 176 bp, Homo sapiens; identical to SEQ ID NO: 271629
  chr17:80202410-80202586
  hypo

SEQ ID NO: 386998 - DNA, 138 bp, Homo sapiens; identical to SEQ ID NO: 271630
  chr17:80207968-80208106
  hypo

SEQ ID NO: 386999 - DNA, 323 bp, Homo sapiens; identical to SEQ ID NO: 271652
  chr17:80355877-80356200
  hypo

SEQ ID NO: 387000 - DNA, 62 bp, Homo sapiens; identical to SEQ ID NO: 271666
  chr17:80503130-80503192
  hypo

SEQ ID NO: 387001 - DNA, 159 bp, Homo sapiens; identical to SEQ ID NO: 271693
  chr17:80671194-80671353
  hypo

SEQ ID NO: 387002 - DNA, 74 bp, Homo sapiens; identical to SEQ ID NO: 218323
  chr17:80678256-80678330
  hypo

SEQ ID NO: 387003 - DNA, 37 bp, Homo sapiens; identical to SEQ ID NO: 323672
  chr17:80692926-80692963
  hypo

SEQ ID NO: 387004 - DNA, 34 bp, Homo sapiens; identical to SEQ ID NO: 271721
  chr17:80825506-80825540
  hypo

SEQ ID NO: 387005 - DNA, 78 bp, Homo sapiens; identical to SEQ ID NO: 218336
  chr17:80830876-80830954
  hypo

SEQ ID NO: 387006 - DNA, 349 bp, Homo sapiens; identical to SEQ ID NO: 271743
  chr17:80898972-80899321
  hypo

SEQ ID NO: 387007 - DNA, 192 bp, Homo sapiens; identical to SEQ ID NO: 271771
  chr17:81102241-81102433
  hypo

SEQ ID NO: 387008 - DNA, 36 bp, Homo sapiens; identical to SEQ ID NO: 271811
  chr18:3412987-3413023
  hypo

SEQ ID NO: 387009 - DNA, 120 bp, Homo sapiens; identical to SEQ ID NO: 218379
  chr18:3443851-3443971
  hypo

SEQ ID NO: 387010 - DNA, 42 bp, Homo sapiens; identical to SEQ ID NO: 218384
  chr18:3534580-3534622
  hypo

SEQ ID NO: 387011 - DNA, 62 bp, Homo sapiens; identical to SEQ ID NO: 271825
  chr18:3592367-3592429
  hypo

SEQ ID NO: 387012 - DNA, 76 bp, Homo sapiens; identical to SEQ ID NO: 271829
  chr18:3608039-3608115
  hypo

SEQ ID NO: 387013 - DNA, 74 bp, Homo sapiens; identical to SEQ ID NO: 384698
  chr18:4455561-4455635
  hypo

SEQ ID NO: 387014 - DNA, 154 bp, Homo sapiens; identical to SEQ ID NO: 271845
  chr18:5149403-5149557
  hypo

SEQ ID NO: 387015 - DNA, 198 bp, Homo sapiens; identical to SEQ ID NO: 271849
  chr18:6284881-6285079
  hypo

SEQ ID NO: 387016 - DNA, 200 bp, Homo sapiens; identical to SEQ ID NO: 292896
  chr18:8367259-8367459
  hypo

SEQ ID NO: 387017 - DNA, 269 bp, Homo sapiens; identical to SEQ ID NO: 271901
  chr18:9838068-9838337
  hypo

SEQ ID NO: 387018 - DNA, 83 bp, Homo sapiens; identical to SEQ ID NO: 271908
  chr18:10047642-10047725
  hypo

SEQ ID NO: 387019 - DNA, 98 bp, Homo sapiens; identical to SEQ ID NO: 271913
  chr18:10336858-10336956
  hypo

SEQ ID NO: 387020 - DNA, 64 bp, Homo sapiens; identical to SEQ ID NO: 271918
  chr18:10538267-10538331
  hypo

SEQ ID NO: 387021 - DNA, 681 bp, Homo sapiens; identical to SEQ ID NO: 384702
  chr18:12308216-12308897
  hypo

SEQ ID NO: 387022 - DNA, 125 bp, Homo sapiens; identical to SEQ ID NO: 384703
  chr18:12308927-12309052
  hypo

SEQ ID NO: 387023 - DNA, 98 bp, Homo sapiens; identical to SEQ ID NO: 218443
  chr18:12431471-12431569
  hypo

SEQ ID NO: 387024 - DNA, 101 bp, Homo sapiens; identical to SEQ ID NO: 271963
  chr18:13181960-13182061
  hypo

SEQ ID NO: 387025 - DNA, 125 bp, Homo sapiens; identical to SEQ ID NO: 324006
  chr18:13460975-13461100
  hypo

SEQ ID NO: 387026 - DNA, 98 bp, Homo sapiens; identical to SEQ ID NO: 324007
  chr18:13461383-13461481
  hypo

SEQ ID NO: 387027 - DNA, 147 bp, Homo sapiens; identical to SEQ ID NO: 272001
  chr18:13519311-13519458
  hypo

SEQ ID NO: 387028 - DNA, 256 bp, Homo sapiens; identical to SEQ ID NO: 272031
  chr18:20853662-20853918
  hypo

SEQ ID NO: 387029 - DNA, 42 bp, Homo sapiens; identical to SEQ ID NO: 218478
  chr18:20910923-20910965
  hypo

SEQ ID NO: 387030 - DNA, 155 bp, Homo sapiens; identical to SEQ ID NO: 272036
  chr18:21104196-21104351
  hypo

SEQ ID NO: 387031 - DNA, 204 bp, Homo sapiens; identical to SEQ ID NO: 272048
  chr18:22098635-22098839
  hypo

SEQ ID NO: 387032 - DNA, 105 bp, Homo sapiens; identical to SEQ ID NO: 225614
  chr18:22653839-22653944
  hypo

SEQ ID NO: 387033 - DNA, 36 bp, Homo sapiens; identical to SEQ ID NO: 204939
  chr18:29265160-29265196
  hypo

SEQ ID NO: 387034 - DNA, 54 bp, Homo sapiens; identical to SEQ ID NO: 218493
  chr18:29293795-29293849
  hypo

SEQ ID NO: 387035 - DNA, 67 bp, Homo sapiens; identical to SEQ ID NO: 204969
  chr18:42531892-42531959
  hypo

SEQ ID NO: 387036 - DNA, 192 bp, Homo sapiens; identical to SEQ ID NO: 272098
  chr18:43307167-43307359
  hypo

SEQ ID NO: 387037 - DNA, 291 bp, Homo sapiens; identical to SEQ ID NO: 272122
  chr18:46142031-46142322
  hypo

SEQ ID NO: 387038 - DNA, 84 bp, Homo sapiens; identical to SEQ ID NO: 272131
  chr18:46524824-46524908
  hypo

SEQ ID NO: 387039 - DNA, 33 bp, Homo sapiens; identical to SEQ ID NO: 272160
  chr18:55817734-55817767
  hypo

SEQ ID NO: 387040 - DNA, 184 bp, Homo sapiens; identical to SEQ ID NO: 272168
  chr18:55945680-55945864
  hypo

SEQ ID NO: 387041 - DNA, 173 bp, Homo sapiens; identical to SEQ ID NO: 272170
  chr18:55977131-55977304
  hypo

SEQ ID NO: 387042 - DNA, 141 bp, Homo sapiens; identical to SEQ ID NO: 272177
  chr18:56359260-56359401
  hypo

SEQ ID NO: 387043 - DNA, 1435 bp, Homo sapiens; identical to SEQ ID NO: 205030
  chr18:60382939-60384374
  hypo

SEQ ID NO: 387044 - DNA, 111 bp, Homo sapiens; identical to SEQ ID NO: 272218
  chr18:60959765-60959876
  hypo

SEQ ID NO: 387045 - DNA, 361 bp, Homo sapiens; identical to SEQ ID NO: 272229
  chr18:67992600-67992961
  hypo

SEQ ID NO: 387046 - DNA, 34 bp, Homo sapiens; identical to SEQ ID NO: 272268
  chr18:73282767-73282801
  hypo

SEQ ID NO: 387047 - DNA, 465 bp, Homo sapiens; identical to SEQ ID NO: 272298
  chr18:74143894-74144359
  hypo

SEQ ID NO: 387048 - DNA, 51 bp, Homo sapiens; identical to SEQ ID NO: 272300
  chr18:74147444-74147495
  hypo

SEQ ID NO: 387049 - DNA, 171 bp, Homo sapiens; identical to SEQ ID NO: 272303
  chr18:74149887-74150058
  hypo

SEQ ID NO: 387050 - DNA, 203 bp, Homo sapiens; identical to SEQ ID NO: 272317
  chr18:74275176-74275379
  hypo

SEQ ID NO: 387051 - DNA, 280 bp, Homo sapiens; identical to SEQ ID NO: 272325
  chr18:74420127-74420407
  hypo

SEQ ID NO: 387052 - DNA, 62 bp, Homo sapiens; identical to SEQ ID NO: 272338
  chr18:74627687-74627749
  hypo

SEQ ID NO: 387053 - DNA, 99 bp, Homo sapiens; identical to SEQ ID NO: 218625
  chr18:74729467-74729566
  hypo

SEQ ID NO: 387054 - DNA, 284 bp, Homo sapiens; identical to SEQ ID NO: 272355
  chr18:74734080-74734364
  hypo

SEQ ID NO: 387055 - DNA, 210 bp, Homo sapiens; identical to SEQ ID NO: 272405
  chr18:76546830-76547040
  hypo

SEQ ID NO: 387056 - DNA, 45 bp, Homo sapiens; identical to SEQ ID NO: 272420
  chr18:77143641-77143686
  hypo

SEQ ID NO: 387057 - DNA, 356 bp, Homo sapiens; identical to SEQ ID NO: 293196
  chr18:77193428-77193784
  hypo

SEQ ID NO: 387058 - DNA, 157 bp, Homo sapiens; identical to SEQ ID NO: 272438
  chr18:77208090-77208247
  hypo

SEQ ID NO: 387059 - DNA, 458 bp, Homo sapiens; identical to SEQ ID NO: 218674
  chr18:77212957-77213415
  hypo

SEQ ID NO: 387060 - DNA, 189 bp, Homo sapiens; identical to SEQ ID NO: 272457
  chr18:77304066-77304255
  hypo

SEQ ID NO: 387061 - DNA, 41 bp, Homo sapiens; identical to SEQ ID NO: 218688
  chr18:77315948-77315989
  hypo

SEQ ID NO: 387062 - DNA, 103 bp, Homo sapiens; identical to SEQ ID NO: 272483
  chr18:77390502-77390605
  hypo

SEQ ID NO: 387063 - DNA, 367 bp, Homo sapiens; identical to SEQ ID NO: 218712
  chr18:77638243-77638610
  hypo

SEQ ID NO: 387064 - DNA, 130 bp, Homo sapiens; identical to SEQ ID NO: 272523
  chr18:77685460-77685590
  hypo

SEQ ID NO: 387065 - DNA, 38 bp, Homo sapiens; identical to SEQ ID NO: 272535
  chr18:77913923-77913961
  hypo

SEQ ID NO: 387066 - DNA, 88 bp, Homo sapiens; identical to SEQ ID NO: 272539
  chr18:77957216-77957304
  hypo

SEQ ID NO: 387067 - DNA, 34 bp, Homo sapiens; identical to SEQ ID NO: 272564
  chr19:484683-484717
  hypo

SEQ ID NO: 387068 - DNA, 126 bp, Homo sapiens; identical to SEQ ID NO: 272582
  chr19:585310-585436
  hypo

SEQ ID NO: 387069 - DNA, 218 bp, Homo sapiens; identical to SEQ ID NO: 324691
  chr19:624025-624243
  hypo

SEQ ID NO: 387070 - DNA, 56 bp, Homo sapiens; identical to SEQ ID NO: 272612
  chr19:762948-763004
  hypo

SEQ ID NO: 387071 - DNA, 319 bp, Homo sapiens; identical to SEQ ID NO: 272616
  chr19:813011-813330
  hypo

SEQ ID NO: 387072 - DNA, 33 bp, Homo sapiens; identical to SEQ ID NO: 272630
  chr19:927379-927412
  hypo

SEQ ID NO: 387073 - DNA, 48 bp, Homo sapiens; identical to SEQ ID NO: 272647
  chr19:962810-962858
  hypo

SEQ ID NO: 387074 - DNA, 480 bp, Homo sapiens; identical to SEQ ID NO: 272670
  chr19:1077669-1078149
  hypo

SEQ ID NO: 387075 - DNA, 35 bp, Homo sapiens; identical to SEQ ID NO: 324787
  chr19:1082938-1082973
  hypo

SEQ ID NO: 387076 - DNA, 305 bp, Homo sapiens; identical to SEQ ID NO: 324788
  chr19:1083009-1083314
  hypo

SEQ ID NO: 387077 - DNA, 33 bp, Homo sapiens; identical to SEQ ID NO: 218819
  chr19:1555127-1555160
  hypo

SEQ ID NO: 387078 - DNA, 342 bp, Homo sapiens; identical to SEQ ID NO: 324875
  chr19:1578503-1578845
  hypo

SEQ ID NO: 387079 - DNA, 68 bp, Homo sapiens; identical to SEQ ID NO: 218821
  chr19:1579338-1579406
  hypo

SEQ ID NO: 387080 - DNA, 391 bp, Homo sapiens; identical to SEQ ID NO: 272752
  chr19:1638548-1638939
  hypo

SEQ ID NO: 387081 - DNA, 200 bp, Homo sapiens; identical to SEQ ID NO: 218854
  chr19:2148550-2148750
  hypo

SEQ ID NO: 387082 - DNA, 315 bp, Homo sapiens; identical to SEQ ID NO: 272806
  chr19:2176355-2176670
  hypo

SEQ ID NO: 387083 - DNA, 210 bp, Homo sapiens; identical to SEQ ID NO: 324954
  chr19:2214155-2214365
  hypo

SEQ ID NO: 387084 - DNA, 268 bp, Homo sapiens; identical to SEQ ID NO: 272822
  chr19:2255405-2255673
  hypo

SEQ ID NO: 387085 - DNA, 205 bp, Homo sapiens; identical to SEQ ID NO: 272824
  chr19:2278466-2278671
  hypo

SEQ ID NO: 387086 - DNA, 76 bp, Homo sapiens; identical to SEQ ID NO: 272849
  chr19:2733948-2734024
  hypo

SEQ ID NO: 387087 - DNA, 300 bp, Homo sapiens; identical to SEQ ID NO: 225727
  chr19:2944752-2945052
  hypo

SEQ ID NO: 387088 - DNA, 141 bp, Homo sapiens; identical to SEQ ID NO: 205110
  chr19:2977372-2977513
  hypo

SEQ ID NO: 387089 - DNA, 61 bp, Homo sapiens; identical to SEQ ID NO: 218898
  chr19:2996848-2996909
  hypo

SEQ ID NO: 387090 - DNA, 143 bp, Homo sapiens; identical to SEQ ID NO: 272872
  chr19:3053351-3053494
  hypo

SEQ ID NO: 387091 - DNA, 143 bp, Homo sapiens; identical to SEQ ID NO: 225731
  chr19:3094777-3094920
  hypo

SEQ ID NO: 387092 - DNA, 670 bp, Homo sapiens; identical to SEQ ID NO: 272883
  chr19:3148406-3149076
  hypo

SEQ ID NO: 387093 - DNA, 32 bp, Homo sapiens; identical to SEQ ID NO: 272899
  chr19:3453421-3453453
  hypo

SEQ ID NO: 387094 - DNA, 69 bp, Homo sapiens; identical to SEQ ID NO: 272908
  chr19:3509503-3509572
  hypo

SEQ ID NO: 387095 - DNA, 489 bp, Homo sapiens; identical to SEQ ID NO: 225737
  chr19:3606743-3607232
  hypo

SEQ ID NO: 387096 - DNA, 122 bp, Homo sapiens; identical to SEQ ID NO: 272921
  chr19:3630283-3630405
  hypo

SEQ ID NO: 387097 - DNA, 61 bp, Homo sapiens; identical to SEQ ID NO: 272966
  chr19:4042780-4042841
  hypo

SEQ ID NO: 387098 - DNA, 45 bp, Homo sapiens; identical to SEQ ID NO: 325145
  chr19:4050362-4050407
  hypo

SEQ ID NO: 387099 - DNA, 143 bp, Homo sapiens; identical to SEQ ID NO: 272981
  chr19:4168249-4168392
  hypo

SEQ ID NO: 387100 - DNA, 42 bp, Homo sapiens; identical to SEQ ID NO: 272988
  chr19:4360669-4360711
  hypo

SEQ ID NO: 387101 - DNA, 48 bp, Homo sapiens; identical to SEQ ID NO: 272991
  chr19:4419788-4419836
  hypo

SEQ ID NO: 387102 - DNA, 185 bp, Homo sapiens; identical to SEQ ID NO: 218970
  chr19:4442913-4443098
  hypo

SEQ ID NO: 387103 - DNA, 237 bp, Homo sapiens; identical to SEQ ID NO: 218972
  chr19:4483097-4483334
  hypo

SEQ ID NO: 387104 - DNA, 166 bp, Homo sapiens; identical to SEQ ID NO: 273026
  chr19:4851997-4852163
  hypo

SEQ ID NO: 387105 - DNA, 34 bp, Homo sapiens; identical to SEQ ID NO: 273027
  chr19:4902800-4902834
  hypo

SEQ ID NO: 387106 - DNA, 59 bp, Homo sapiens; identical to SEQ ID NO: 218985
  chr19:4962295-4962354
  hypo

SEQ ID NO: 387107 - DNA, 116 bp, Homo sapiens; identical to SEQ ID NO: 218986
  chr19:4962384-4962500
  hypo

SEQ ID NO: 387108 - DNA, 81 bp, Homo sapiens; identical to SEQ ID NO: 273034
  chr19:4973466-4973547
  hypo

SEQ ID NO: 387109 - DNA, 311 bp, Homo sapiens; identical to SEQ ID NO: 325232
  chr19:5058359-5058670
  hypo

SEQ ID NO: 387110 - DNA, 77 bp, Homo sapiens; identical to SEQ ID NO: 325233
  chr19:5058700-5058777
  hypo

SEQ ID NO: 387111 - DNA, 268 bp, Homo sapiens; identical to SEQ ID NO: 218996
  chr19:5060971-5061239
  hypo

SEQ ID NO: 387112 - DNA, 988 bp, Homo sapiens; identical to SEQ ID NO: 273067
  chr19:5237605-5238593
  hypo

SEQ ID NO: 387113 - DNA, 275 bp, Homo sapiens; identical to SEQ ID NO: 273084
  chr19:5661522-5661797
  hypo

SEQ ID NO: 387114 - DNA, 103 bp, Homo sapiens; identical to SEQ ID NO: 273085
  chr19:5667770-5667873
  hypo

SEQ ID NO: 387115 - DNA, 44 bp, Homo sapiens; identical to SEQ ID NO: 273092
  chr19:5722397-5722441
  hypo

SEQ ID NO: 387116 - DNA, 198 bp, Homo sapiens; identical to SEQ ID NO: 219013
  chr19:5785480-5785678
  hypo

SEQ ID NO: 387117 - DNA, 162 bp, Homo sapiens; identical to SEQ ID NO: 219032
  chr19:5985339-5985501
  hypo

SEQ ID NO: 387118 - DNA, 390 bp, Homo sapiens; identical to SEQ ID NO: 273146
  chr19:6021709-6022099
  hypo

SEQ ID NO: 387119 - DNA, 580 bp, Homo sapiens; identical to SEQ ID NO: 273150
  chr19:6026959-6027539
  hypo

SEQ ID NO: 387120 - DNA, 36 bp, Homo sapiens; identical to SEQ ID NO: 273158
  chr19:6076061-6076097
  hypo

SEQ ID NO: 387121 - DNA, 267 bp, Homo sapiens; identical to SEQ ID NO: 273163
  chr19:6215002-6215269
  hypo

SEQ ID NO: 387122 - DNA, 235 bp, Homo sapiens; identical to SEQ ID NO: 273165
  chr19:6230445-6230680
  hypo

SEQ ID NO: 387123 - DNA, 164 bp, Homo sapiens; identical to SEQ ID NO: 273168
  chr19:6249578-6249742
  hypo

SEQ ID NO: 387124 - DNA, 118 bp, Homo sapiens; identical to SEQ ID NO: 273175
  chr19:6433456-6433574
  hypo

SEQ ID NO: 387125 - DNA, 188 bp, Homo sapiens; identical to SEQ ID NO: 219070
  chr19:7484059-7484247
  hypo

SEQ ID NO: 387126 - DNA, 613 bp, Homo sapiens; identical to SEQ ID NO: 273216
  chr19:7680032-7680645
  hypo

SEQ ID NO: 387127 - DNA, 44 bp, Homo sapiens; identical to SEQ ID NO: 273225
  chr19:7862879-7862923
  hypo

SEQ ID NO: 387128 - DNA, 45 bp, Homo sapiens; identical to SEQ ID NO: 273249
  chr19:8440196-8440241
  hypo

SEQ ID NO: 387129 - DNA, 228 bp, Homo sapiens; identical to SEQ ID NO: 273255
  chr19:8495657-8495885
  hypo

SEQ ID NO: 387130 - DNA, 156 bp, Homo sapiens; identical to SEQ ID NO: 219096
  chr19:8528411-8528567
  hypo

SEQ ID NO: 387131 - DNA, 164 bp, Homo sapiens; identical to SEQ ID NO: 273262
  chr19:8554605-8554769
  hypo

SEQ ID NO: 387132 - DNA, 228 bp, Homo sapiens; identical to SEQ ID NO: 273270
  chr19:8618012-8618240
  hypo

SEQ ID NO: 387133 - DNA, 105 bp, Homo sapiens; identical to SEQ ID NO: 273279
  chr19:9894646-9894751
  hypo

SEQ ID NO: 387134 - DNA, 38 bp, Homo sapiens; identical to SEQ ID NO: 325493
  chr19:9937315-9937353
  hypo

SEQ ID NO: 387135 - DNA, 115 bp, Homo sapiens; identical to SEQ ID NO: 219111
  chr19:10246096-10246211
  hypo

SEQ ID NO: 387136 - DNA, 253 bp, Homo sapiens; identical to SEQ ID NO: 219112
  chr19:10246253-10246506
  hypo

SEQ ID NO: 387137 - DNA, 416 bp, Homo sapiens; identical to SEQ ID NO: 219113
  chr19:10246566-10246982
  hypo

SEQ ID NO: 387138 - DNA, 145 bp, Homo sapiens; identical to SEQ ID NO: 219115
  chr19:10295674-10295819
  hypo

SEQ ID NO: 387139 - DNA, 36 bp, Homo sapiens; identical to SEQ ID NO: 219132
  chr19:10794362-10794398
  hypo

SEQ ID NO: 387140 - DNA, 147 bp, Homo sapiens; identical to SEQ ID NO: 273322
  chr19:10822778-10822925
  hypo

SEQ ID NO: 387141 - DNA, 151 bp, Homo sapiens; identical to SEQ ID NO: 325565
  chr19:11002590-11002741
  hypo

SEQ ID NO: 387142 - DNA, 266 bp, Homo sapiens; identical to SEQ ID NO: 225793
  chr19:11308102-11308368
  hypo

SEQ ID NO: 387143 - DNA, 148 bp, Homo sapiens; identical to SEQ ID NO: 273385
  chr19:11820662-11820810
  hypo

SEQ ID NO: 387144 - DNA, 43 bp, Homo sapiens; identical to SEQ ID NO: 273393
  chr19:12416132-12416175
  hypo

SEQ ID NO: 387145 - DNA, 40 bp, Homo sapiens; identical to SEQ ID NO: 273397
  chr19:12701915-12701955
  hypo

SEQ ID NO: 387146 - DNA, 75 bp, Homo sapiens; identical to SEQ ID NO: 273421
  chr19:13017983-13018058
  hypo

SEQ ID NO: 387147 - DNA, 98 bp, Homo sapiens; identical to SEQ ID NO: 205217
  chr19:13029775-13029873
  hypo

SEQ ID NO: 387148 - DNA, 51 bp, Homo sapiens; identical to SEQ ID NO: 384755
  chr19:13030316-13030367
  hypo

SEQ ID NO: 387149 - DNA, 144 bp, Homo sapiens; identical to SEQ ID NO: 384757
  chr19:13106028-13106172
  hypo

SEQ ID NO: 387150 - DNA, 37 bp, Homo sapiens; identical to SEQ ID NO: 273438
  chr19:13154726-13154763
  hypo

SEQ ID NO: 387151 - DNA, 32 bp, Homo sapiens; identical to SEQ ID NO: 384763
  chr19:14887561-14887593
  hypo

SEQ ID NO: 387152 - DNA, 81 bp, Homo sapiens; identical to SEQ ID NO: 273519
  chr19:15346126-15346207
  hypo

SEQ ID NO: 387153 - DNA, 396 bp, Homo sapiens; identical to SEQ ID NO: 219235
  chr19:15375241-15375637
  hypo

SEQ ID NO: 387154 - DNA, 206 bp, Homo sapiens; identical to SEQ ID NO: 273529
  chr19:15487800-15488006
  hypo

SEQ ID NO: 387155 - DNA, 120 bp, Homo sapiens; identical to SEQ ID NO: 219238
  chr19:15506075-15506195
  hypo

SEQ ID NO: 387156 - DNA, 258 bp, Homo sapiens; identical to SEQ ID NO: 273617
  chr19:17657447-17657705
  hypo

SEQ ID NO: 387157 - DNA, 41 bp, Homo sapiens; identical to SEQ ID NO: 219290
  chr19:18054174-18054215
  hypo

SEQ ID NO: 387158 - DNA, 47 bp, Homo sapiens; identical to SEQ ID NO: 273635
  chr19:18120713-18120760
  hypo

SEQ ID NO: 387159 - DNA, 330 bp, Homo sapiens; identical to SEQ ID NO: 205279
  chr19:18420497-18420827
  hypo

SEQ ID NO: 387160 - DNA, 142 bp, Homo sapiens; identical to SEQ ID NO: 273659
  chr19:18591739-18591881
  hypo

SEQ ID NO: 387161 - DNA, 81 bp, Homo sapiens; identical to SEQ ID NO: 219308
  chr19:18675984-18676065
  hypo

SEQ ID NO: 387162 - DNA, 36 bp, Homo sapiens; identical to SEQ ID NO: 325996
  chr19:19218819-19218855
  hypo

SEQ ID NO: 387163 - DNA, 275 bp, Homo sapiens; identical to SEQ ID NO: 273705
  chr19:19231766-19232041
  hypo

SEQ ID NO: 387164 - DNA, 194 bp, Homo sapiens; identical to SEQ ID NO: 273717
  chr19:19611820-19612014
  hypo

SEQ ID NO: 387165 - DNA, 98 bp, Homo sapiens; identical to SEQ ID NO: 273721
  chr19:19624553-19624651
  hypo

SEQ ID NO: 387166 - DNA, 54 bp, Homo sapiens; identical to SEQ ID NO: 273730
  chr19:19766967-19767021
  hypo

SEQ ID NO: 387167 - DNA, 225 bp, Homo sapiens; identical to SEQ ID NO: 273734
  chr19:19822261-19822486
  hypo

SEQ ID NO: 387168 - DNA, 37 bp, Homo sapiens; identical to SEQ ID NO: 273738
  chr19:20095094-20095131
  hypo

SEQ ID NO: 387169 - DNA, 41 bp, Homo sapiens; identical to SEQ ID NO: 273740
  chr19:20115867-20115908
  hypo

SEQ ID NO: 387170 - DNA, 180 bp, Homo sapiens; identical to SEQ ID NO: 273757
  chr19:21798902-21799082
  hypo

SEQ ID NO: 387171 - DNA, 180 bp, Homo sapiens; identical to SEQ ID NO: 273772
  chr19:23435643-23435823
  hypo

SEQ ID NO: 387172 - DNA, 33 bp, Homo sapiens; identical to SEQ ID NO: 293816
  chr19:31210819-31210852
  hypo

SEQ ID NO: 387173 - DNA, 107 bp, Homo sapiens; identical to SEQ ID NO: 273814
  chr19:31792447-31792554
  hypo

SEQ ID NO: 387174 - DNA, 1022 bp, Homo sapiens; identical to SEQ ID NO: 384772
  chr19:33790839-33791861
  hypo

SEQ ID NO: 387175 - DNA, 52 bp, Homo sapiens; identical to SEQ ID NO: 273867
  chr19:33917859-33917911
  hypo

SEQ ID NO: 387176 - DNA, 183 bp, Homo sapiens; identical to SEQ ID NO: 219398
  chr19:33939089-33939272
  hypo

SEQ ID NO: 387177 - DNA, 32 bp, Homo sapiens; identical to SEQ ID NO: 273882
  chr19:34537937-34537969
  hypo

SEQ ID NO: 387178 - DNA, 78 bp, Homo sapiens; identical to SEQ ID NO: 273936
  chr19:36172746-36172824
  hypo

SEQ ID NO: 387179 - DNA, 50 bp, Homo sapiens
  chr19:36593115-36593165
  hypo
gtccctggagttggctccccagcagggccaggagggtgagtggagagcaa

SEQ ID NO: 387180 - DNA, 246 bp, Homo sapiens; identical to SEQ ID NO: 219426
  chr19:36641157-36641403
  hypo

SEQ ID NO: 387181 - DNA, 190 bp, Homo sapiens; identical to SEQ ID NO: 219429
  chr19:37504006-37504196
  hypo

SEQ ID NO: 387182 - DNA, 284 bp, Homo sapiens; identical to SEQ ID NO: 219430
  chr19:37504226-37504510
  hypo

SEQ ID NO: 387183 - DNA, 36 bp, Homo sapiens; identical to SEQ ID NO: 273981
  chr19:37674960-37674996
  hypo

SEQ ID NO: 387184 - DNA, 241 bp, Homo sapiens; identical to SEQ ID NO: 273987
  chr19:37853603-37853844
  hypo

SEQ ID NO: 387185 - DNA, 39 bp, Homo sapiens; identical to SEQ ID NO: 219433
  chr19:38287060-38287099
  hypo

SEQ ID NO: 387186 - DNA, 142 bp, Homo sapiens; identical to SEQ ID NO: 219441
  chr19:38572720-38572862
  hypo

SEQ ID NO: 387187 - DNA, 221 bp, Homo sapiens; identical to SEQ ID NO: 274013
  chr19:38625953-38626174
  hypo

SEQ ID NO: 387188 - DNA, 58 bp, Homo sapiens; identical to SEQ ID NO: 326367
  chr19:38782477-38782535
  hypo

SEQ ID NO: 387189 - DNA, 73 bp, Homo sapiens; identical to SEQ ID NO: 326368
  chr19:38782670-38782743
  hypo

SEQ ID NO: 387190 - DNA, 125 bp, Homo sapiens; identical to SEQ ID NO: 274064
  chr19:39092089-39092214
  hypo

SEQ ID NO: 387191 - DNA, 79 bp, Homo sapiens; identical to SEQ ID NO: 219465
  chr19:39144877-39144956
  hypo

SEQ ID NO: 387192 - DNA, 86 bp, Homo sapiens; identical to SEQ ID NO: 274078
  chr19:39211068-39211154
  hypo

SEQ ID NO: 387193 - DNA, 36 bp, Homo sapiens; identical to SEQ ID NO: 219476
  chr19:39310980-39311016
  hypo

SEQ ID NO: 387194 - DNA, 147 bp, Homo sapiens; identical to SEQ ID NO: 274101
  chr19:39439160-39439307
  hypo

SEQ ID NO: 387195 - DNA, 42 bp, Homo sapiens; identical to SEQ ID NO: 274104
  chr19:39568094-39568136
  hypo

SEQ ID NO: 387196 - DNA, 95 bp, Homo sapiens; identical to SEQ ID NO: 274140
  chr19:40343350-40343445
  hypo

SEQ ID NO: 387197 - DNA, 119 bp, Homo sapiens; identical to SEQ ID NO: 274144
  chr19:40408775-40408894
  hypo

SEQ ID NO: 387198 - DNA, 42 bp, Homo sapiens; identical to SEQ ID NO: 274150
  chr19:40706865-40706907
  hypo

SEQ ID NO: 387199 - DNA, 169 bp, Homo sapiens; identical to SEQ ID NO: 219504
  chr19:40828672-40828841
  hypo

SEQ ID NO: 387200 - DNA, 109 bp, Homo sapiens; identical to SEQ ID NO: 219507
  chr19:40873917-40874026
  hypo

SEQ ID NO: 387201 - DNA, 93 bp, Homo sapiens; identical to SEQ ID NO: 274184
  chr19:41168076-41168169
  hypo

SEQ ID NO: 387202 - DNA, 41 bp, Homo sapiens; identical to SEQ ID NO: 219515
  chr19:41616326-41616367
  hypo

SEQ ID NO: 387203 - DNA, 124 bp, Homo sapiens; identical to SEQ ID NO: 326543
  chr19:41919971-41920095
  hypo

SEQ ID NO: 387204 - DNA, 185 bp, Homo sapiens; identical to SEQ ID NO: 274213
  chr19:42700691-42700876
  hypo

SEQ ID NO: 387205 - DNA, 322 bp, Homo sapiens; identical to SEQ ID NO: 274242
  chr19:44932984-44933306
  hypo

SEQ ID NO: 387206 - DNA, 38 bp, Homo sapiens; identical to SEQ ID NO: 274261
  chr19:45328104-45328142
  hypo

SEQ ID NO: 387207 - DNA, 368 bp, Homo sapiens; identical to SEQ ID NO: 294084
  chr19:45347906-45348274
  hypo

SEQ ID NO: 387208 - DNA, 78 bp, Homo sapiens
  chr19:45377394-45377472
  hypo
tgagggaggaggggctgggcctaaattcctaagtcctccaggatgaagggagcttgcattttggcaatttggggtctc

SEQ ID NO: 387209 - DNA, 212 bp, Homo sapiens; identical to SEQ ID NO: 219558
  chr19:45567707-45567919
  hypo

SEQ ID NO: 387210 - DNA, 316 bp, Homo sapiens; identical to SEQ ID NO: 274315
  chr19:46326464-46326780
  hypo

SEQ ID NO: 387211 - DNA, 75 bp, Homo sapiens; identical to SEQ ID NO: 384794
  chr19:47363328-47363403
  hypo

SEQ ID NO: 387212 - DNA, 56 bp, Homo sapiens; identical to SEQ ID NO: 326722
  chr19:47540628-47540684
  hypo

SEQ ID NO: 387213 - DNA, 79 bp, Homo sapiens; identical to SEQ ID NO: 326723
  chr19:47540719-47540798
  hypo

SEQ ID NO: 387214 - DNA, 39 bp, Homo sapiens; identical to SEQ ID NO: 219600
  chr19:48145667-48145706
  hypo

SEQ ID NO: 387215 - DNA, 45 bp, Homo sapiens; identical to SEQ ID NO: 274373
  chr19:48251493-48251538
  hypo

SEQ ID NO: 387216 - DNA, 53 bp, Homo sapiens; identical to SEQ ID NO: 274387
  chr19:48846609-48846662
  hypo

SEQ ID NO: 387217 - DNA, 144 bp, Homo sapiens; identical to SEQ ID NO: 219609
  chr19:48889258-48889402
  hypo

SEQ ID NO: 387218 - DNA, 105 bp, Homo sapiens; identical to SEQ ID NO: 225981
  chr19:48994476-48994581
  hypo

SEQ ID NO: 387219 - DNA, 93 bp, Homo sapiens; identical to SEQ ID NO: 219624
  chr19:49419216-49419309
  hypo

SEQ ID NO: 387220 - DNA, 48 bp, Homo sapiens; identical to SEQ ID NO: 274430
  chr19:49509361-49509409
  hypo

SEQ ID NO: 387221 - DNA, 190 bp, Homo sapiens; identical to SEQ ID NO: 219635
  chr19:50063175-50063365
  hypo

SEQ ID NO: 387222 - DNA, 135 bp, Homo sapiens; identical to SEQ ID NO: 274465
  chr19:50289573-50289708
  hypo

SEQ ID NO: 387223 - DNA, 203 bp, Homo sapiens; identical to SEQ ID NO: 274466
  chr19:50291871-50292074
  hypo

SEQ ID NO: 387224 - DNA, 34 bp, Homo sapiens; identical to SEQ ID NO: 219644
  chr19:50305176-50305210
  hypo

SEQ ID NO: 387225 - DNA, 162 bp, Homo sapiens; identical to SEQ ID NO: 219645
  chr19:50305240-50305402
  hypo

SEQ ID NO: 387226 - DNA, 89 bp, Homo sapiens; identical to SEQ ID NO: 274479
  chr19:50326703-50326792
  hypo

SEQ ID NO: 387227 - DNA, 43 bp, Homo sapiens; identical to SEQ ID NO: 326897
  chr19:50938504-50938547
  hypo

SEQ ID NO: 387228 - DNA, 44 bp, Homo sapiens; identical to SEQ ID NO: 219657
  chr19:51098421-51098465
  hypo

SEQ ID NO: 387229 - DNA, 204 bp, Homo sapiens; identical to SEQ ID NO: 326903
  chr19:51128562-51128766
  hypo

SEQ ID NO: 387230 - DNA, 35 bp, Homo sapiens; identical to SEQ ID NO: 326904
  chr19:51128799-51128834
  hypo

SEQ ID NO: 387231 - DNA, 136 bp, Homo sapiens; identical to SEQ ID NO: 219659
  chr19:51293556-51293692
  hypo

SEQ ID NO: 387232 - DNA, 253 bp, Homo sapiens; identical to SEQ ID NO: 274518
  chr19:51607194-51607447
  hypo

SEQ ID NO: 387233 - DNA, 47 bp, Homo sapiens; identical to SEQ ID NO: 219672
  chr19:52405665-52405712
  hypo

SEQ ID NO: 387234 - DNA, 31 bp, Homo sapiens; identical to SEQ ID NO: 219687
  chr19:52861439-52861470
  hypo

SEQ ID NO: 387235 - DNA, 38 bp, Homo sapiens; identical to SEQ ID NO: 274560
  chr19:53055548-53055586
  hypo

SEQ ID NO: 387236 - DNA, 79 bp, Homo sapiens; identical to SEQ ID NO: 274561
  chr19:53058376-53058455
  hypo

SEQ ID NO: 387237 - DNA, 158 bp, Homo sapiens; identical to SEQ ID NO: 219692
  chr19:53089793-53089951
  hypo

SEQ ID NO: 387238 - DNA, 31 bp, Homo sapiens; identical to SEQ ID NO: 274574
  chr19:53163140-53163171
  hypo

SEQ ID NO: 387239 - DNA, 515 bp, Homo sapiens; identical to SEQ ID NO: 274576
  chr19:53228720-53229235
  hypo

SEQ ID NO: 387240 - DNA, 290 bp, Homo sapiens; identical to SEQ ID NO: 219710
  chr19:53886631-53886921
  hypo

SEQ ID NO: 387241 - DNA, 225 bp, Homo sapiens; identical to SEQ ID NO: 274649
  chr19:54152258-54152483
  hypo

SEQ ID NO: 387242 - DNA, 33 bp, Homo sapiens; identical to SEQ ID NO: 274656
  chr19:54212284-54212317
  hypo

SEQ ID NO: 387243 - DNA, 91 bp, Homo sapiens; identical to SEQ ID NO: 274756
  chr19:57254044-57254135
  hypo

SEQ ID NO: 387244 - DNA, 42 bp, Homo sapiens; identical to SEQ ID NO: 274779
  chr19:58184721-58184763
  hypo

SEQ ID NO: 387245 - DNA, 31 bp, Homo sapiens; identical to SEQ ID NO: 274792
  chr19:58555625-58555656
  hypo

SEQ ID NO: 387246 - DNA, 318 bp, Homo sapiens; identical to SEQ ID NO: 219785
  chr19:58557757-58558075
  hypo

SEQ ID NO: 387247 - DNA, 71 bp, Homo sapiens; identical to SEQ ID NO: 226057
  chr19:58920316-58920387
  hypo

SEQ ID NO: 387248 - DNA, 91 bp, Homo sapiens; identical to SEQ ID NO: 274826
  chr20:631995-632086
  hypo

SEQ ID NO: 387249 - DNA, 137 bp, Homo sapiens; identical to SEQ ID NO: 274829
  chr20:773017-773154
  hypo

SEQ ID NO: 387250 - DNA, 36 bp, Homo sapiens; identical to SEQ ID NO: 219809
  chr20:1276610-1276646
  hypo

SEQ ID NO: 387251 - DNA, 135 bp, Homo sapiens; identical to SEQ ID NO: 274856
  chr20:3208371-3208506
  hypo

SEQ ID NO: 387252 - DNA, 35 bp, Homo sapiens; identical to SEQ ID NO: 274885
  chr20:5649290-5649325
  hypo

SEQ ID NO: 387253 - DNA, 180 bp, Homo sapiens; identical to SEQ ID NO: 219833
  chr20:5734498-5734678
  hypo

SEQ ID NO: 387254 - DNA, 120 bp, Homo sapiens; identical to SEQ ID NO: 219841
  chr20:6302507-6302627
  hypo

SEQ ID NO: 387255 - DNA, 169 bp, Homo sapiens; identical to SEQ ID NO: 274898
  chr20:6759075-6759244
  hypo

SEQ ID NO: 387256 - DNA, 35 bp, Homo sapiens; identical to SEQ ID NO: 219844
  chr20:6861141-6861176
  hypo

SEQ ID NO: 387257 - DNA, 360 bp, Homo sapiens; identical to SEQ ID NO: 226090
  chr20:11871901-11872261
  hypo

SEQ ID NO: 387258 - DNA, 119 bp, Homo sapiens; identical to SEQ ID NO: 219869
  chr20:20392662-20392781
  hypo

SEQ ID NO: 387259 - DNA, 105 bp, Homo sapiens; identical to SEQ ID NO: 384811
  chr20:21495255-21495360
  hypo

SEQ ID NO: 387260 - DNA, 42 bp, Homo sapiens; identical to SEQ ID NO: 274966
  chr20:23283473-23283515
  hypo

SEQ ID NO: 387261 - DNA, 383 bp, Homo sapiens; identical to SEQ ID NO: 274969
  chr20:23346218-23346601
  hypo

SEQ ID NO: 387262 - DNA, 76 bp, Homo sapiens; identical to SEQ ID NO: 274976
  chr20:24236950-24237026
  hypo

SEQ ID NO: 387263 - DNA, 224 bp, Homo sapiens; identical to SEQ ID NO: 275000
  chr20:25254265-25254489
  hypo

SEQ ID NO: 387264 - DNA, 43 bp, Homo sapiens; identical to SEQ ID NO: 275001
  chr20:25254609-25254652
  hypo

SEQ ID NO: 387265 - DNA, 33 bp, Homo sapiens; identical to SEQ ID NO: 219893
  chr20:25278858-25278891
  hypo

SEQ ID NO: 387266 - DNA, 218 bp, Homo sapiens; identical to SEQ ID NO: 275018
  chr20:25972702-25972920
  hypo

SEQ ID NO: 387267 - DNA, 41 bp, Homo sapiens; identical to SEQ ID NO: 219904
  chr20:30468561-30468602
  hypo

SEQ ID NO: 387268 - DNA, 359 bp, Homo sapiens; identical to SEQ ID NO: 205772
  chr20:31019123-31019482
  hypo

SEQ ID NO: 387269 - DNA, 634 bp, Homo sapiens; identical to SEQ ID NO: 205774
  chr20:31021086-31021720
  hypo

SEQ ID NO: 387270 - DNA, 88 bp, Homo sapiens; identical to SEQ ID NO: 219923
  chr20:31115869-31115957
  hypo

SEQ ID NO: 387271 - DNA, 56 bp, Homo sapiens; identical to SEQ ID NO: 219924
  chr20:31146689-31146745
  hypo

SEQ ID NO: 387272 - DNA, 210 bp, Homo sapiens; identical to SEQ ID NO: 275066
  chr20:32284902-32285112
  hypo

SEQ ID NO: 387273 - DNA, 200 bp, Homo sapiens; identical to SEQ ID NO: 219934
  chr20:32376690-32376890
  hypo

SEQ ID NO: 387274 - DNA, 76 bp, Homo sapiens; identical to SEQ ID NO: 275096
  chr20:33544843-33544919
  hypo

SEQ ID NO: 387275 - DNA, 49 bp, Homo sapiens; identical to SEQ ID NO: 275109
  chr20:34092136-34092185
  hypo

SEQ ID NO: 387276 - DNA, 171 bp, Homo sapiens; identical to SEQ ID NO: 275114
  chr20:34171852-34172023
  hypo

SEQ ID NO: 387277 - DNA, 102 bp, Homo sapiens; identical to SEQ ID NO: 275145
  chr20:35940186-35940288
  hypo

SEQ ID NO: 387278 - DNA, 279 bp, Homo sapiens; identical to SEQ ID NO: 219976
  chr20:36770537-36770816
  hypo

SEQ ID NO: 387279 - DNA, 232 bp, Homo sapiens; identical to SEQ ID NO: 275171
  chr20:37536535-37536767
  hypo

SEQ ID NO: 387280 - DNA, 85 bp, Homo sapiens; identical to SEQ ID NO: 275176
  chr20:37622329-37622414
  hypo

SEQ ID NO: 387281 - DNA, 75 bp, Homo sapiens; identical to SEQ ID NO: 275182
  chr20:37671509-37671584
  hypo

SEQ ID NO: 387282 - DNA, 220 bp, Homo sapiens; identical to SEQ ID NO: 275193
  chr20:39791147-39791367
  hypo

SEQ ID NO: 387283 - DNA, 41 bp, Homo sapiens; identical to SEQ ID NO: 275199
  chr20:40352413-40352454
  hypo

SEQ ID NO: 387284 - DNA, 188 bp, Homo sapiens; identical to SEQ ID NO: 275236
  chr20:44463585-44463773
  hypo

SEQ ID NO: 387285 - DNA, 132 bp, Homo sapiens; identical to SEQ ID NO: 275243
  chr20:44578453-44578585
  hypo

SEQ ID NO: 387286 - DNA, 128 bp, Homo sapiens; identical to SEQ ID NO: 275254
  chr20:45343199-45343327
  hypo

SEQ ID NO: 387287 - DNA, 196 bp, Homo sapiens; identical to SEQ ID NO: 220014
  chr20:45837756-45837952
  hypo

SEQ ID NO: 387288 - DNA, 31 bp, Homo sapiens; identical to SEQ ID NO: 275270
  chr20:46175277-46175308
  hypo

SEQ ID NO: 387289 - DNA, 140 bp, Homo sapiens; identical to SEQ ID NO: 327787
  chr20:46315385-46315525
  hypo

SEQ ID NO: 387290 - DNA, 31 bp, Homo sapiens; identical to SEQ ID NO: 275300
  chr20:47805438-47805469
  hypo

SEQ ID NO: 387291 - DNA, 39 bp, Homo sapiens; identical to SEQ ID NO: 275319
  chr20:48549957-48549996
  hypo

SEQ ID NO: 387292 - DNA, 42 bp, Homo sapiens; identical to SEQ ID NO: 275328
  chr20:48791873-48791915
  hypo

SEQ ID NO: 387293 - DNA, 42 bp, Homo sapiens; identical to SEQ ID NO: 275333
  chr20:48936571-48936613
  hypo

SEQ ID NO: 387294 - DNA, 79 bp, Homo sapiens; identical to SEQ ID NO: 275390
  chr20:50213712-50213791
  hypo

SEQ ID NO: 387295 - DNA, 31 bp, Homo sapiens; identical to SEQ ID NO: 220056
  chr20:50326111-50326142
  hypo

SEQ ID NO: 387296 - DNA, 149 bp, Homo sapiens; identical to SEQ ID NO: 220066
  chr20:50408300-50408449
  hypo

SEQ ID NO: 387297 - DNA, 157 bp, Homo sapiens; identical to SEQ ID NO: 275407
  chr20:50451581-50451738
  hypo

SEQ ID NO: 387298 - DNA, 182 bp, Homo sapiens; identical to SEQ ID NO: 275425
  chr20:52481243-52481425
  hypo

SEQ ID NO: 387299 - DNA, 274 bp, Homo sapiens; identical to SEQ ID NO: 275458
  chr20:56076054-56076328
  hypo

SEQ ID NO: 387300 - DNA, 67 bp, Homo sapiens; identical to SEQ ID NO: 275474
  chr20:56717706-56717773
  hypo

SEQ ID NO: 387301 - DNA, 234 bp, Homo sapiens; identical to SEQ ID NO: 220102
  chr20:57244309-57244543
  hypo

SEQ ID NO: 387302 - DNA, 519 bp, Homo sapiens; identical to SEQ ID NO: 275518
  chr20:59965387-59965906
  hypo

SEQ ID NO: 387303 - DNA, 195 bp, Homo sapiens; identical to SEQ ID NO: 275520
  chr20:60098286-60098481
  hypo

SEQ ID NO: 387304 - DNA, 190 bp, Homo sapiens; identical to SEQ ID NO: 220136
  chr20:60361300-60361490
  hypo

SEQ ID NO: 387305 - DNA, 557 bp, Homo sapiens; identical to SEQ ID NO: 275553
  chr20:60495766-60496323
  hypo

SEQ ID NO: 387306 - DNA, 34 bp, Homo sapiens; identical to SEQ ID NO: 328111
  chr20:60635123-60635157
  hypo

SEQ ID NO: 387307 - DNA, 234 bp, Homo sapiens; identical to SEQ ID NO: 220174
  chr20:60913381-60913615
  hypo

SEQ ID NO: 387308 - DNA, 62 bp, Homo sapiens; identical to SEQ ID NO: 328198
  chr20:61411118-61411180
  hypo

SEQ ID NO: 387309 - DNA, 92 bp, Homo sapiens; identical to SEQ ID NO: 275667
  chr20:61540950-61541042
  hypo

SEQ ID NO: 387310 - DNA, 135 bp, Homo sapiens; identical to SEQ ID NO: 220200
  chr20:61576504-61576639
  hypo

SEQ ID NO: 387311 - DNA, 210 bp, Homo sapiens; identical to SEQ ID NO: 275674
  chr20:61666077-61666287
  hypo

SEQ ID NO: 387312 - DNA, 165 bp, Homo sapiens; identical to SEQ ID NO: 220207
  chr20:61748971-61749136
  hypo

SEQ ID NO: 387313 - DNA, 86 bp, Homo sapiens; identical to SEQ ID NO: 275686
  chr20:61759828-61759914
  hypo

SEQ ID NO: 387314 - DNA, 154 bp, Homo sapiens; identical to SEQ ID NO: 275691
  chr20:61819884-61820038
  hypo

SEQ ID NO: 387315 - DNA, 55 bp, Homo sapiens; identical to SEQ ID NO: 220216
  chr20:61895763-61895818
  hypo

SEQ ID NO: 387316 - DNA, 58 bp, Homo sapiens; identical to SEQ ID NO: 220218
  chr20:61913595-61913653
  hypo

SEQ ID NO: 387317 - DNA, 187 bp, Homo sapiens; identical to SEQ ID NO: 220222
  chr20:61982647-61982834
  hypo

SEQ ID NO: 387318 - DNA, 77 bp, Homo sapiens; identical to SEQ ID NO: 220234
  chr20:62190624-62190701
  hypo

SEQ ID NO: 387319 - DNA, 184 bp, Homo sapiens; identical to SEQ ID NO: 275751
  chr20:62209403-62209587
  hypo

SEQ ID NO: 387320 - DNA, 278 bp, Homo sapiens; identical to SEQ ID NO: 275753
  chr20:62218275-62218553
  hypo

SEQ ID NO: 387321 - DNA, 230 bp, Homo sapiens; identical to SEQ ID NO: 328336
  chr20:62329296-62329526
  hypo

SEQ ID NO: 387322 - DNA, 126 bp, Homo sapiens; identical to SEQ ID NO: 328337
  chr20:62329556-62329682
  hypo

SEQ ID NO: 387323 - DNA, 55 bp, Homo sapiens; identical to SEQ ID NO: 220248
  chr20:62398949-62399004
  hypo

SEQ ID NO: 387324 - DNA, 244 bp, Homo sapiens; identical to SEQ ID NO: 275804
  chr20:62571650-62571894
  hypo

SEQ ID NO: 387325 - DNA, 322 bp, Homo sapiens; identical to SEQ ID NO: 295000
  chr20:62679894-62680216
  hypo

SEQ ID NO: 387326 - DNA, 71 bp, Homo sapiens; identical to SEQ ID NO: 275826
  chr20:62797053-62797124
  hypo

SEQ ID NO: 387327 - DNA, 38 bp, Homo sapiens; identical to SEQ ID NO: 275836
  chr20:62912885-62912923
  hypo

SEQ ID NO: 387328 - DNA, 42 bp, Homo sapiens; identical to SEQ ID NO: 275866
  chr21:30488430-30488472
  hypo

SEQ ID NO: 387329 - DNA, 105 bp, Homo sapiens; identical to SEQ ID NO: 226254
  chr21:32932326-32932431
  hypo

SEQ ID NO: 387330 - DNA, 65 bp, Homo sapiens; identical to SEQ ID NO: 220316
  chr21:33849056-33849121
  hypo

SEQ ID NO: 387331 - DNA, 109 bp, Homo sapiens; identical to SEQ ID NO: 275906
  chr21:33976772-33976881
  hypo

SEQ ID NO: 387332 - DNA, 176 bp, Homo sapiens; identical to SEQ ID NO: 275911
  chr21:34498741-34498917
  hypo

SEQ ID NO: 387333 - DNA, 92 bp, Homo sapiens; identical to SEQ ID NO: 220321
  chr21:34710940-34711032
  hypo

SEQ ID NO: 387334 - DNA, 32 bp, Homo sapiens; identical to SEQ ID NO: 220322
  chr21:34711332-34711364
  hypo

SEQ ID NO: 387335 - DNA, 251 bp, Homo sapiens; identical to SEQ ID NO: 328512
  chr21:34927031-34927282
  hypo

SEQ ID NO: 387336 - DNA, 180 bp, Homo sapiens; identical to SEQ ID NO: 328513
  chr21:34927363-34927543
  hypo

SEQ ID NO: 387337 - DNA, 154 bp, Homo sapiens; identical to SEQ ID NO: 275924
  chr21:35453130-35453284
  hypo

SEQ ID NO: 387338 - DNA, 131 bp, Homo sapiens; identical to SEQ ID NO: 205982
  chr21:36421464-36421595
  hypo

SEQ ID NO: 387339 - DNA, 42 bp, Homo sapiens; identical to SEQ ID NO: 275942
  chr21:37514437-37514479
  hypo

SEQ ID NO: 387340 - DNA, 45 bp, Homo sapiens; identical to SEQ ID NO: 275952
  chr21:37727417-37727462
  hypo

SEQ ID NO: 387341 - DNA, 200 bp, Homo sapiens; identical to SEQ ID NO: 275969
  chr21:38282807-38283007
  hypo

SEQ ID NO: 387342 - DNA, 153 bp, Homo sapiens; identical to SEQ ID NO: 226275
  chr21:38362192-38362345
  hypo

SEQ ID NO: 387343 - DNA, 122 bp, Homo sapiens; identical to SEQ ID NO: 328578
  chr21:38383188-38383310
  hypo

SEQ ID NO: 387344 - DNA, 245 bp, Homo sapiens; identical to SEQ ID NO: 276034
  chr21:40764919-40765164
  hypo

SEQ ID NO: 387345 - DNA, 86 bp, Homo sapiens; identical to SEQ ID NO: 276038
  chr21:40952126-40952212
  hypo

SEQ ID NO: 387346 - DNA, 35 bp, Homo sapiens; identical to SEQ ID NO: 276040
  chr21:41711102-41711137
  hypo

SEQ ID NO: 387347 - DNA, 85 bp, Homo sapiens; identical to SEQ ID NO: 220381
  chr21:42609014-42609099
  hypo

SEQ ID NO: 387348 - DNA, 120 bp, Homo sapiens; identical to SEQ ID NO: 220388
  chr21:42896357-42896477
  hypo

SEQ ID NO: 387349 - DNA, 39 bp, Homo sapiens; identical to SEQ ID NO: 276073
  chr21:43108231-43108270
  hypo

SEQ ID NO: 387350 - DNA, 162 bp, Homo sapiens; identical to SEQ ID NO: 276082
  chr21:43171157-43171319
  hypo

SEQ ID NO: 387351 - DNA, 153 bp, Homo sapiens; identical to SEQ ID NO: 276090
  chr21:43269265-43269418
  hypo

SEQ ID NO: 387352 - DNA, 89 bp, Homo sapiens; identical to SEQ ID NO: 220409
  chr21:43347890-43347979
  hypo

SEQ ID NO: 387353 - DNA, 34 bp, Homo sapiens; identical to SEQ ID NO: 276150
  chr21:44129779-44129813
  hypo

SEQ ID NO: 387354 - DNA, 136 bp, Homo sapiens; identical to SEQ ID NO: 276154
  chr21:44176666-44176802
  hypo

SEQ ID NO: 387355 - DNA, 246 bp, Homo sapiens; identical to SEQ ID NO: 220427
  chr21:44440492-44440738
  hypo

SEQ ID NO: 387356 - DNA, 46 bp, Homo sapiens; identical to SEQ ID NO: 328799
  chr21:44480610-44480656
  hypo

SEQ ID NO: 387357 - DNA, 229 bp, Homo sapiens; identical to SEQ ID NO: 220435
  chr21:44601206-44601435
  hypo

SEQ ID NO: 387358 - DNA, 82 bp, Homo sapiens; identical to SEQ ID NO: 276185
  chr21:44792954-44793036
  hypo

SEQ ID NO: 387359 - DNA, 201 bp, Homo sapiens; identical to SEQ ID NO: 220437
  chr21:44799064-44799265
  hypo

SEQ ID NO: 387360 - DNA, 500 bp, Homo sapiens
  chr21:45176320-45176820
  hypo
gctgggctgggcctgggtggcctctgtctttgcatctctgagaaggagtcgggtggtaacggttggggtcaggaagaattctgccaagtatctttactgtcattctgaccatagcctctttgttcccgcattcgaacttttggttcttactttgctgctcgtttagtccctggggatttcagatcttaggctgttgtttcaccgtatgggagggttgatgtgagcttgcttggagacacacggtgcagcatcagggaccttcccaggccccagcaaattcaagtcggtctgcagacctctcagctacccgcgggacctcttgtaacccatcggcatcttccaggaatccgccgagtgacttgaggaagatgctaacgcagtaaggtctgtgctgggccaagagcagctttgaagctccagagaaccaccccgtcaggttccttgtggaagctcccctcatccgtggtgcagcaggctgagcactgcgcgtttgccacgtg

SEQ ID NO: 387361 - DNA, 113 bp, Homo sapiens; identical to SEQ ID NO: 276240
  chr21:45355818-45355931
  hypo

SEQ ID NO: 387362 - DNA, 156 bp, Homo sapiens; identical to SEQ ID NO: 328890
  chr21:45411685-45411841
  hypo

SEQ ID NO: 387363 - DNA, 192 bp, Homo sapiens; identical to SEQ ID NO: 220471
  chr21:45558785-45558977
  hypo

SEQ ID NO: 387364 - DNA, 144 bp, Homo sapiens; identical to SEQ ID NO: 226299
  chr21:45660255-45660399
  hypo

SEQ ID NO: 387365 - DNA, 211 bp, Homo sapiens; identical to SEQ ID NO: 384837
  chr21:45662515-45662726
  hypo

SEQ ID NO: 387366 - DNA, 192 bp, Homo sapiens; identical to SEQ ID NO: 328957
  chr21:46183769-46183961
  hypo

SEQ ID NO: 387367 - DNA, 150 bp, Homo sapiens; identical to SEQ ID NO: 328958
  chr21:46184287-46184437
  hypo

SEQ ID NO: 387368 - DNA, 468 bp, Homo sapiens; identical to SEQ ID NO: 276341
  chr21:46330230-46330698
  hypo

SEQ ID NO: 387369 - DNA, 255 bp, Homo sapiens; identical to SEQ ID NO: 220506
  chr21:46763204-46763459
  hypo

SEQ ID NO: 387370 - DNA, 138 bp, Homo sapiens; identical to SEQ ID NO: 220518
  chr21:46827462-46827600
  hypo

SEQ ID NO: 387371 - DNA, 322 bp, Homo sapiens; identical to SEQ ID NO: 276400
  chr21:46846292-46846614
  hypo

SEQ ID NO: 387372 - DNA, 127 bp, Homo sapiens; identical to SEQ ID NO: 276460
  chr21:47403601-47403728
  hypo

SEQ ID NO: 387373 - DNA, 141 bp, Homo sapiens; identical to SEQ ID NO: 220563
  chr21:47417619-47417760
  hypo

SEQ ID NO: 387374 - DNA, 318 bp, Homo sapiens; identical to SEQ ID NO: 220564
  chr21:47418109-47418427
  hypo

SEQ ID NO: 387375 - DNA, 226 bp, Homo sapiens; identical to SEQ ID NO: 276470
  chr21:47421947-47422173
  hypo

SEQ ID NO: 387376 - DNA, 58 bp, Homo sapiens; identical to SEQ ID NO: 329162
  chr21:47737837-47737895
  hypo

SEQ ID NO: 387377 - DNA, 98 bp, Homo sapiens; identical to SEQ ID NO: 220575
  chr21:47773781-47773879
  hypo

SEQ ID NO: 387378 - DNA, 114 bp, Homo sapiens; identical to SEQ ID NO: 276510
  chr21:47897027-47897141
  hypo

SEQ ID NO: 387379 - DNA, 78 bp, Homo sapiens; identical to SEQ ID NO: 276523
  chr22:17932151-17932229
  hypo

SEQ ID NO: 387380 - DNA, 44 bp, Homo sapiens; identical to SEQ ID NO: 276543
  chr22:18345292-18345336
  hypo

SEQ ID NO: 387381 - DNA, 154 bp, Homo sapiens; identical to SEQ ID NO: 220600
  chr22:18355710-18355864
  hypo

SEQ ID NO: 387382 - DNA, 105 bp, Homo sapiens; identical to SEQ ID NO: 220604
  chr22:18400898-18401003
  hypo

SEQ ID NO: 387383 - DNA, 262 bp, Homo sapiens; identical to SEQ ID NO: 276559
  chr22:18451007-18451269
  hypo

SEQ ID NO: 387384 - DNA, 288 bp, Homo sapiens; identical to SEQ ID NO: 295228
  chr22:19748301-19748589
  hypo

SEQ ID NO: 387385 - DNA, 40 bp, Homo sapiens; identical to SEQ ID NO: 133782
  chr22:19749084-19749124
  hypo

SEQ ID NO: 387386 - DNA, 84 bp, Homo sapiens; identical to SEQ ID NO: 220618
  chr22:19856498-19856582
  hypo

SEQ ID NO: 387387 - DNA, 132 bp, Homo sapiens; identical to SEQ ID NO: 276592
  chr22:19870367-19870499
  hypo

SEQ ID NO: 387388 - DNA, 177 bp, Homo sapiens; identical to SEQ ID NO: 276598
  chr22:19892921-19893098
  hypo

SEQ ID NO: 387389 - DNA, 42 bp, Homo sapiens; identical to SEQ ID NO: 276618
  chr22:20120590-20120632
  hypo

SEQ ID NO: 387390 - DNA, 120 bp, Homo sapiens; identical to SEQ ID NO: 276629
  chr22:20857254-20857374
  hypo

SEQ ID NO: 387391 - DNA, 42 bp, Homo sapiens; identical to SEQ ID NO: 276662
  chr22:22108627-22108669
  hypo

SEQ ID NO: 387392 - DNA, 36 bp, Homo sapiens; identical to SEQ ID NO: 276669
  chr22:22939290-22939326
  hypo

SEQ ID NO: 387393 - DNA, 113 bp, Homo sapiens; identical to SEQ ID NO: 276679
  chr22:23610355-23610468
  hypo

SEQ ID NO: 387394 - DNA, 91 bp, Homo sapiens; identical to SEQ ID NO: 206073
  chr22:24989196-24989287
  hypo

SEQ ID NO: 387395 - DNA, 36 bp, Homo sapiens; identical to SEQ ID NO: 276703
  chr22:25091139-25091175
  hypo

SEQ ID NO: 387396 - DNA, 120 bp, Homo sapiens; identical to SEQ ID NO: 220675
  chr22:25336184-25336304
  hypo

SEQ ID NO: 387397 - DNA, 331 bp, Homo sapiens; identical to SEQ ID NO: 220679
  chr22:25461275-25461606
  hypo

SEQ ID NO: 387398 - DNA, 40 bp, Homo sapiens; identical to SEQ ID NO: 276710
  chr22:25464946-25464986
  hypo

SEQ ID NO: 387399 - DNA, 33 bp, Homo sapiens; identical to SEQ ID NO: 276723
  chr22:26069299-26069332
  hypo

SEQ ID NO: 387400 - DNA, 125 bp, Homo sapiens; identical to SEQ ID NO: 276728
  chr22:26422520-26422645
  hypo

SEQ ID NO: 387401 - DNA, 232 bp, Homo sapiens; identical to SEQ ID NO: 276741
  chr22:27486749-27486981
  hypo

SEQ ID NO: 387402 - DNA, 210 bp, Homo sapiens; identical to SEQ ID NO: 295301
  chr22:28197049-28197259
  hypo

SEQ ID NO: 387403 - DNA, 44 bp, Homo sapiens; identical to SEQ ID NO: 384852
  chr22:29469129-29469173
  hypo

SEQ ID NO: 387404 - DNA, 202 bp, Homo sapiens; identical to SEQ ID NO: 206096
  chr22:29469213-29469415
  hypo

SEQ ID NO: 387405 - DNA, 80 bp, Homo sapiens; identical to SEQ ID NO: 276750
  chr22:29525175-29525255
  hypo

SEQ ID NO: 387406 - DNA, 676 bp, Homo sapiens; identical to SEQ ID NO: 384855
  chr22:29702500-29703176
  hypo

SEQ ID NO: 387407 - DNA, 179 bp, Homo sapiens; identical to SEQ ID NO: 276772
  chr22:30073518-30073697
  hypo

SEQ ID NO: 387408 - DNA, 209 bp, Homo sapiens; identical to SEQ ID NO: 276775
  chr22:30086757-30086966
  hypo

SEQ ID NO: 387409 - DNA, 197 bp, Homo sapiens; identical to SEQ ID NO: 220720
  chr22:30656576-30656773
  hypo

SEQ ID NO: 387410 - DNA, 72 bp, Homo sapiens; identical to SEQ ID NO: 276794
  chr22:30681973-30682045
  hypo

SEQ ID NO: 387411 - DNA, 64 bp, Homo sapiens; identical to SEQ ID NO: 276798
  chr22:30843508-30843572
  hypo

SEQ ID NO: 387412 - DNA, 33 bp, Homo sapiens; identical to SEQ ID NO: 220725
  chr22:31062272-31062305
  hypo

SEQ ID NO: 387413 - DNA, 36 bp, Homo sapiens; identical to SEQ ID NO: 276816
  chr22:31261979-31262015
  hypo

SEQ ID NO: 387414 - DNA, 221 bp, Homo sapiens; identical to SEQ ID NO: 276820
  chr22:31301689-31301910
  hypo

SEQ ID NO: 387415 - DNA, 107 bp, Homo sapiens; identical to SEQ ID NO: 276857
  chr22:33250662-33250769
  hypo

SEQ ID NO: 387416 - DNA, 153 bp, Homo sapiens; identical to SEQ ID NO: 276879
  chr22:36123184-36123337
  hypo

SEQ ID NO: 387417 - DNA, 110 bp, Homo sapiens; identical to SEQ ID NO: 276922
  chr22:37562423-37562533
  hypo

SEQ ID NO: 387418 - DNA, 255 bp, Homo sapiens; identical to SEQ ID NO: 276977
  chr22:38520660-38520915
  hypo

SEQ ID NO: 387419 - DNA, 364 bp, Homo sapiens; identical to SEQ ID NO: 276985
  chr22:38618369-38618733
  hypo

SEQ ID NO: 387420 - DNA, 114 bp, Homo sapiens; identical to SEQ ID NO: 276987
  chr22:38634943-38635057
  hypo

SEQ ID NO: 387421 - DNA, 42 bp, Homo sapiens; identical to SEQ ID NO: 277008
  chr22:39175179-39175221
  hypo

SEQ ID NO: 387422 - DNA, 189 bp, Homo sapiens; identical to SEQ ID NO: 295441
  chr22:39239935-39240124
  hypo

SEQ ID NO: 387423 - DNA, 204 bp, Homo sapiens; identical to SEQ ID NO: 277014
  chr22:39474506-39474710
  hypo

SEQ ID NO: 387424 - DNA, 100 bp, Homo sapiens; identical to SEQ ID NO: 220804
  chr22:39530873-39530973
  hypo

SEQ ID NO: 387425 - DNA, 47 bp, Homo sapiens; identical to SEQ ID NO: 206139
  chr22:39638593-39638640
  hypo

SEQ ID NO: 387426 - DNA, 108 bp, Homo sapiens; identical to SEQ ID NO: 220821
  chr22:40444189-40444297
  hypo

SEQ ID NO: 387427 - DNA, 39 bp, Homo sapiens; identical to SEQ ID NO: 220823
  chr22:40621438-40621477
  hypo

SEQ ID NO: 387428 - DNA, 282 bp, Homo sapiens; identical to SEQ ID NO: 277059
  chr22:40693256-40693538
  hypo

SEQ ID NO: 387429 - DNA, 33 bp, Homo sapiens
  chr22:41639669-41639702
  hypo
gggcatggtggttcatgcctgttaagtgagctg

SEQ ID NO: 387430 - DNA, 105 bp, Homo sapiens; identical to SEQ ID NO: 226389
  chr22:42670075-42670180
  hypo

SEQ ID NO: 387431 - DNA, 189 bp, Homo sapiens; identical to SEQ ID NO: 277123
  chr22:43005280-43005469
  hypo

SEQ ID NO: 387432 - DNA, 163 bp, Homo sapiens; identical to SEQ ID NO: 277140
  chr22:43390391-43390554
  hypo

SEQ ID NO: 387433 - DNA, 92 bp, Homo sapiens; identical to SEQ ID NO: 277141
  chr22:43402810-43402902
  hypo

SEQ ID NO: 387434 - DNA, 143 bp, Homo sapiens; identical to SEQ ID NO: 277148
  chr22:43559030-43559173
  hypo

SEQ ID NO: 387435 - DNA, 182 bp, Homo sapiens; identical to SEQ ID NO: 220869
  chr22:43581409-43581591
  hypo

SEQ ID NO: 387436 - DNA, 130 bp, Homo sapiens; identical to SEQ ID NO: 329896
  chr22:43581627-43581757
  hypo

SEQ ID NO: 387437 - DNA, 313 bp, Homo sapiens; identical to SEQ ID NO: 329897
  chr22:43608344-43608657
  hypo

SEQ ID NO: 387438 - DNA, 75 bp, Homo sapiens; identical to SEQ ID NO: 329898
  chr22:43608687-43608762
  hypo

SEQ ID NO: 387439 - DNA, 135 bp, Homo sapiens; identical to SEQ ID NO: 220870
  chr22:43689261-43689396
  hypo

SEQ ID NO: 387440 - DNA, 50 bp, Homo sapiens; identical to SEQ ID NO: 277156
  chr22:43861119-43861169
  hypo

SEQ ID NO: 387441 - DNA, 301 bp, Homo sapiens; identical to SEQ ID NO: 220871
  chr22:43926571-43926872
  hypo

SEQ ID NO: 387442 - DNA, 52 bp, Homo sapiens; identical to SEQ ID NO: 277182
  chr22:45085115-45085167
  hypo

SEQ ID NO: 387443 - DNA, 56 bp, Homo sapiens; identical to SEQ ID NO: 277248
  chr22:46158114-46158170
  hypo

SEQ ID NO: 387444 - DNA, 147 bp, Homo sapiens; identical to SEQ ID NO: 330017
  chr22:46410634-46410781
  hypo

SEQ ID NO: 387445 - DNA, 36 bp, Homo sapiens; identical to SEQ ID NO: 220910
  chr22:46455649-46455685
  hypo

SEQ ID NO: 387446 - DNA, 402 bp, Homo sapiens; identical to SEQ ID NO: 277286
  chr22:46787966-46788368
  hypo

SEQ ID NO: 387447 - DNA, 167 bp, Homo sapiens; identical to SEQ ID NO: 277303
  chr22:46905651-46905818
  hypo

SEQ ID NO: 387448 - DNA, 235 bp, Homo sapiens; identical to SEQ ID NO: 277344
  chr22:47393097-47393332
  hypo

SEQ ID NO: 387449 - DNA, 217 bp, Homo sapiens; identical to SEQ ID NO: 277370
  chr22:48723482-48723699
  hypo

SEQ ID NO: 387450 - DNA, 570 bp, Homo sapiens; identical to SEQ ID NO: 277377
  chr22:48921050-48921620
  hypo

SEQ ID NO: 387451 - DNA, 110 bp, Homo sapiens; identical to SEQ ID NO: 277381
  chr22:48956016-48956126
  hypo

SEQ ID NO: 387452 - DNA, 91 bp, Homo sapiens; identical to SEQ ID NO: 277402
  chr22:49087333-49087424
  hypo

SEQ ID NO: 387453 - DNA, 31 bp, Homo sapiens; identical to SEQ ID NO: 277423
  chr22:49424884-49424915
  hypo

SEQ ID NO: 387454 - DNA, 108 bp, Homo sapiens; identical to SEQ ID NO: 277429
  chr22:49535540-49535648
  hypo

SEQ ID NO: 387455 - DNA, 174 bp, Homo sapiens; identical to SEQ ID NO: 277509
  chr22:50250093-50250267
  hypo

SEQ ID NO: 387456 - DNA, 197 bp, Homo sapiens; identical to SEQ ID NO: 277529
  chr22:50521454-50521651
  hypo

SEQ ID NO: 387457 - DNA, 463 bp, Homo sapiens; identical to SEQ ID NO: 220996
  chr22:50721365-50721828
  hypo

SEQ ID NO: 387458 - DNA, 616 bp, Homo sapiens; identical to SEQ ID NO: 330323
  chr22:50721872-50722488
  hypo

SEQ ID NO: 387459 - DNA, 72 bp, Homo sapiens; identical to SEQ ID NO: 221004
  chr22:50874675-50874747
  hypo

SEQ ID NO: 387460 - DNA, 115 bp, Homo sapiens; identical to SEQ ID NO: 277549
  chr22:50882626-50882741
  hypo

SEQ ID NO: 387461 - DNA, 137 bp, Homo sapiens; identical to SEQ ID NO: 277555
  chr22:50918772-50918909
  hypo

SEQ ID NO: 387462 - DNA, 139 bp, Homo sapiens; identical to SEQ ID NO: 330349
  chr22:50938934-50939073
  hypo

SEQ ID NO: 387463 - DNA, 33 bp, Homo sapiens; identical to SEQ ID NO: 330350
  chr22:50939111-50939144
  hypo

SEQ ID NO: 387464 - DNA, 80 bp, Homo sapiens; identical to SEQ ID NO: 330369
  chrX:2931093-2931173
  hypo

SEQ ID NO: 387465 - DNA, 161 bp, Homo sapiens; identical to SEQ ID NO: 226428
  chrX:11776190-11776351
  hypo

SEQ ID NO: 387466 - DNA, 31 bp, Homo sapiens; identical to SEQ ID NO: 221046
  chrX:19530839-19530870
  hypo

SEQ ID NO: 387467 - DNA, 221 bp, Homo sapiens; identical to SEQ ID NO: 221047
  chrX:20135284-20135505
  hypo

SEQ ID NO: 387468 - DNA, 33 bp, Homo sapiens; identical to SEQ ID NO: 277602
  chrX:24128931-24128964
  hypo

SEQ ID NO: 387469 - DNA, 167 bp, Homo sapiens; identical to SEQ ID NO: 206234
  chrX:39916407-39916574
  hypo

SEQ ID NO: 387470 - DNA, 1059 bp, Homo sapiens; identical to SEQ ID NO: 384879
  chrX:39932474-39933533
  hypo

SEQ ID NO: 387471 - DNA, 317 bp, Homo sapiens; identical to SEQ ID NO: 277627
  chrX:70797825-70798142
  hypo

SEQ ID NO: 387472 - DNA, 359 bp, Homo sapiens; identical to SEQ ID NO: 226464
  chrX:73163983-73164342
  hypo

SEQ ID NO: 387473 - DNA, 97 bp, Homo sapiens; identical to SEQ ID NO: 206283
  chrX:123171376-123171473
  hypo

SEQ ID NO: 387474 - DNA, 77 bp, Homo sapiens; identical to SEQ ID NO: 206284
  chrX:123176418-123176495
  hypo

SEQ ID NO: 387475 - DNA, 135 bp, Homo sapiens; identical to SEQ ID NO: 206288
  chrX:123184024-123184159
  hypo

SEQ ID NO: 387476 - DNA, 102 bp, Homo sapiens; identical to SEQ ID NO: 206301
  chrX:123211806-123211908
  hypo

SEQ ID NO: 387477 - DNA, 2398 bp, Homo sapiens; identical to SEQ ID NO: 384886
  chrX:129147791-129150189
  hypo

SEQ ID NO: 387478 - DNA, 44 bp, Homo sapiens; identical to SEQ ID NO: 206327
  chrX:133527938-133527982
  hypo

SEQ ID NO: 387479 - DNA, 45 bp, Homo sapiens; identical to SEQ ID NO: 277648
  chrY:16001309-16001354
  hypo

SEQ ID NO: 387480 - DNA, 45 bp, Homo sapiens; identical to SEQ ID NO: 277649
  chrY:16001474-16001519
  hypo

SEQ ID NO: 387481 - DNA, 152 bp, Homo sapiens; identical to SEQ ID NO: 221140
  chrY:21226202-21226354
  hypo

SEQ ID NO: 387482 - DNA, 166 bp, Homo sapiens; identical to SEQ ID NO: 277658
  AC153808.1_1-20788:1301-1467
  hypo

SEQ ID NO: 387483 - DNA, 120 bp, Homo sapiens; identical to SEQ ID NO: 221147
  AEKP01221093.1_87-1602:855-975
  hypo

SEQ ID NO: 387484 - DNA, 142 bp, Homo sapiens; identical to SEQ ID NO: 221156
  NW_001838993.2_42143-59442:15877-16019
  hypo

SEQ ID NO: 387485 - DNA, 207 bp, Homo sapiens; identical to SEQ ID NO: 277695
  NW_001839407.1_18933-24809:5028-5235
  hypo

SEQ ID NO: 387486 - DNA, 120 bp, Homo sapiens; identical to SEQ ID NO: 277710
  NW_001839651.1_32960-37353:877-997
  hypo

SEQ ID NO: 387487 - DNA, 61 bp, Homo sapiens; identical to SEQ ID NO: 221164
  NW_001840859.1_1-2890:1537-1598
  hypo

SEQ ID NO: 387488 - DNA, 120 bp, Homo sapiens; identical to SEQ ID NO: 221167
  NW_001841145.1_129149-174453:6133-6253
  hypo

SEQ ID NO: 387489 - DNA, 180 bp, Homo sapiens; identical to SEQ ID NO: 277739
  NW_001841145.1_40791-55171:240-420
  hypo

SEQ ID NO: 387490 - DNA, 265 bp, Homo sapiens; identical to SEQ ID NO: 277745
  NW_001841507.1_62-5931:3856-4121
  hypo

SEQ ID NO: 387491 - DNA, 178 bp, Homo sapiens; identical to SEQ ID NO: 277748
  NW_001842432.1_1-179261:39824-40002
  hypo

SEQ ID NO: 387492 - DNA, 187 bp, Homo sapiens; identical to SEQ ID NO: 197232
  chr1:877475-877662
  hyper

SEQ ID NO: 387493 - DNA, 299 bp, Homo sapiens; identical to SEQ ID NO: 226564
  chr1:901741-902040
  hyper

SEQ ID NO: 387494 - DNA, 392 bp, Homo sapiens; identical to SEQ ID NO: 197235
  chr1:955508-955900
  hyper

SEQ ID NO: 387495 - DNA, 256 bp, Homo sapiens; identical to SEQ ID NO: 277801
  chr1:975561-975817
  hyper

SEQ ID NO: 387496 - DNA, 130 bp, Homo sapiens; identical to SEQ ID NO: 221177
  chr1:1052182-1052312
  hyper

SEQ ID NO: 387497 - DNA, 268 bp, Homo sapiens; identical to SEQ ID NO: 226571
  chr1:1334561-1334829
  hyper

SEQ ID NO: 387498 - DNA, 44 bp, Homo sapiens; identical to SEQ ID NO: 197244
  chr1:1747214-1747258
  hyper

SEQ ID NO: 387499 - DNA, 82 bp, Homo sapiens; identical to SEQ ID NO: 226582
  chr1:1976105-1976187
  hyper

SEQ ID NO: 387500 - DNA, 66 bp, Homo sapiens; identical to SEQ ID NO: 226583
  chr1:2078513-2078579
  hyper

SEQ ID NO: 387501 - DNA, 92 bp, Homo sapiens; identical to SEQ ID NO: 226584
  chr1:2136247-2136339
  hyper

SEQ ID NO: 387502 - DNA, 373 bp, Homo sapiens; identical to SEQ ID NO: 197252
  chr1:2457940-2458313
  hyper

SEQ ID NO: 387503 - DNA, 39 bp, Homo sapiens; identical to SEQ ID NO: 277850
  chr1:2986307-2986346
  hyper

SEQ ID NO: 387504 - DNA, 56 bp, Homo sapiens; identical to SEQ ID NO: 34924
  chr1:2987628-2987684
  hyper

SEQ ID NO: 387505 - DNA, 144 bp, Homo sapiens; identical to SEQ ID NO: 197269
  chr1:3713029-3713173
  hyper

SEQ ID NO: 387506 - DNA, 179 bp, Homo sapiens; identical to SEQ ID NO: 277881
  chr1:6208937-6209116
  hyper

SEQ ID NO: 387507 - DNA, 222 bp, Homo sapiens; identical to SEQ ID NO: 226637
  chr1:6259131-6259353
  hyper

SEQ ID NO: 387508 - DNA, 232 bp, Homo sapiens; identical to SEQ ID NO: 277894
  chr1:6479023-6479255
  hyper

SEQ ID NO: 387509 - DNA, 478 bp, Homo sapiens; identical to SEQ ID NO: 277895
  chr1:6479314-6479792
  hyper

SEQ ID NO: 387510 - DNA, 110 bp, Homo sapiens; identical to SEQ ID NO: 226648
  chr1:6483912-6484022
  hyper

SEQ ID NO: 387511 - DNA, 87 bp, Homo sapiens; identical to SEQ ID NO: 383686
  chr1:6526181-6526268
  hyper

SEQ ID NO: 387512 - DNA, 217 bp, Homo sapiens; identical to SEQ ID NO: 226658
  chr1:6614573-6614790
  hyper

SEQ ID NO: 387513 - DNA, 163 bp, Homo sapiens; identical to SEQ ID NO: 197288
  chr1:6663518-6663681
  hyper

SEQ ID NO: 387514 - DNA, 178 bp, Homo sapiens; identical to SEQ ID NO: 226662
  chr1:7022452-7022630
  hyper

SEQ ID NO: 387515 - DNA, 40 bp, Homo sapiens; identical to SEQ ID NO: 197291
  chr1:7843653-7843693
  hyper

SEQ ID NO: 387516 - DNA, 390 bp, Homo sapiens; identical to SEQ ID NO: 226667
  chr1:8021446-8021836
  hyper

SEQ ID NO: 387517 - DNA, 268 bp, Homo sapiens; identical to SEQ ID NO: 221223
  chr1:9188954-9189222
  hyper

SEQ ID NO: 387518 - DNA, 47 bp, Homo sapiens; identical to SEQ ID NO: 226675
  chr1:9599387-9599434
  hyper

SEQ ID NO: 387519 - DNA, 348 bp, Homo sapiens; identical to SEQ ID NO: 226687
  chr1:10532553-10532901
  hyper

SEQ ID NO: 387520 - DNA, 502 bp, Homo sapiens; identical to SEQ ID NO: 197309
  chr1:10853673-10854175
  hyper

SEQ ID NO: 387521 - DNA, 231 bp, Homo sapiens; identical to SEQ ID NO: 226709
  chr1:11994683-11994914
  hyper

SEQ ID NO: 387522 - DNA, 62 bp, Homo sapiens
  chr1:15928927-15928989
  hyper
tatgatattccaatgatagattcacctaagatgcatttctcatatctctgttaaacaatgca

SEQ ID NO: 387523 - DNA, 75 bp, Homo sapiens
  chr1:15929019-15929094
  hyper
atgtctgaaaacaaagggcactgaaacctgtttgttcactttagttcacaggctgattagaaaagtaagtaaaat

SEQ ID NO: 387524 - DNA, 212 bp, Homo sapiens; identical to SEQ ID NO: 226735
  chr1:16399670-16399882
  hyper

SEQ ID NO: 387525 - DNA, 801 bp, Homo sapiens; identical to SEQ ID NO: 226736
  chr1:16481258-16482059
  hyper

SEQ ID NO: 387526 - DNA, 304 bp, Homo sapiens; identical to SEQ ID NO: 226740
  chr1:16563566-16563870
  hyper

SEQ ID NO: 387527 - DNA, 208 bp, Homo sapiens; identical to SEQ ID NO: 197347
  chr1:17591036-17591244
  hyper

SEQ ID NO: 387528 - DNA, 502 bp, Homo sapiens; identical to SEQ ID NO: 226748
  chr1:17866199-17866701
  hyper

SEQ ID NO: 387529 - DNA, 241 bp, Homo sapiens; identical to SEQ ID NO: 226779
  chr1:19812417-19812658
  hyper

SEQ ID NO: 387530 - DNA, 408 bp, Homo sapiens; identical to SEQ ID NO: 197377
  chr1:20987844-20988252
  hyper

SEQ ID NO: 387531 - DNA, 56 bp, Homo sapiens; identical to SEQ ID NO: 278062
  chr1:21058207-21058263
  hyper

SEQ ID NO: 387532 - DNA, 257 bp, Homo sapiens; identical to SEQ ID NO: 226816
  chr1:23694766-23695023
  hyper

SEQ ID NO: 387533 - DNA, 62 bp, Homo sapiens; identical to SEQ ID NO: 226820
  chr1:23857274-23857336
  hyper

SEQ ID NO: 387534 - DNA, 105 bp, Homo sapiens; identical to SEQ ID NO: 221265
  chr1:23857853-23857958
  hyper

SEQ ID NO: 387535 - DNA, 94 bp, Homo sapiens; identical to SEQ ID NO: 226836
  chr1:24969452-24969546
  hyper

SEQ ID NO: 387536 - DNA, 247 bp, Homo sapiens; identical to SEQ ID NO: 226842
  chr1:25757172-25757419
  hyper

SEQ ID NO: 387537 - DNA, 151 bp, Homo sapiens; identical to SEQ ID NO: 221270
  chr1:25870618-25870769
  hyper

SEQ ID NO: 387538 - DNA, 288 bp, Homo sapiens; identical to SEQ ID NO: 226845
  chr1:26185983-26186271
  hyper

SEQ ID NO: 387539 - DNA, 79 bp, Homo sapiens; identical to SEQ ID NO: 278132
  chr1:26737102-26737181
  hyper

SEQ ID NO: 387540 - DNA, 413 bp, Homo sapiens; identical to SEQ ID NO: 226858
  chr1:26758410-26758823
  hyper

SEQ ID NO: 387541 - DNA, 120 bp, Homo sapiens; identical to SEQ ID NO: 226866
  chr1:27321040-27321160
  hyper

SEQ ID NO: 387542 - DNA, 218 bp, Homo sapiens; identical to SEQ ID NO: 226869
  chr1:27718844-27719062
  hyper

SEQ ID NO: 387543 - DNA, 190 bp, Homo sapiens; identical to SEQ ID NO: 221281
  chr1:27929167-27929357
  hyper

SEQ ID NO: 387544 - DNA, 49 bp, Homo sapiens; identical to SEQ ID NO: 226875
  chr1:28099536-28099585
  hyper

SEQ ID NO: 387545 - DNA, 143 bp, Homo sapiens; identical to SEQ ID NO: 197421
  chr1:28414990-28415133
  hyper

SEQ ID NO: 387546 - DNA, 156 bp, Homo sapiens; identical to SEQ ID NO: 226883
  chr1:28586719-28586875
  hyper

SEQ ID NO: 387547 - DNA, 300 bp, Homo sapiens; identical to SEQ ID NO: 226890
  chr1:28974716-28975016
  hyper

SEQ ID NO: 387548 - DNA, 48 bp, Homo sapiens; identical to SEQ ID NO: 383706
  chr1:29448910-29448958
  hyper

SEQ ID NO: 387549 - DNA, 239 bp, Homo sapiens; identical to SEQ ID NO: 226897
  chr1:29449138-29449377
  hyper

SEQ ID NO: 387550 - DNA, 143 bp, Homo sapiens; identical to SEQ ID NO: 278185
  chr1:29564623-29564766
  hyper

SEQ ID NO: 387551 - DNA, 335 bp, Homo sapiens; identical to SEQ ID NO: 278186
  chr1:29564802-29565137
  hyper

SEQ ID NO: 387552 - DNA, 58 bp, Homo sapiens; identical to SEQ ID NO: 226904
  chr1:30559447-30559505
  hyper

SEQ ID NO: 387553 - DNA, 140 bp, Homo sapiens; identical to SEQ ID NO: 197428
  chr1:31192212-31192352
  hyper

SEQ ID NO: 387554 - DNA, 43 bp, Homo sapiens; identical to SEQ ID NO: 278194
  chr1:31538418-31538461
  hyper

SEQ ID NO: 387555 - DNA, 165 bp, Homo sapiens; identical to SEQ ID NO: 103003
  chr1:31538499-31538664
  hyper

SEQ ID NO: 387556 - DNA, 229 bp, Homo sapiens; identical to SEQ ID NO: 226912
  chr1:32083723-32083952
  hyper

SEQ ID NO: 387557 - DNA, 73 bp, Homo sapiens; identical to SEQ ID NO: 226918
  chr1:32480181-32480254
  hyper

SEQ ID NO: 387558 - DNA, 121 bp, Homo sapiens; identical to SEQ ID NO: 221290
  chr1:32666272-32666393
  hyper

SEQ ID NO: 387559 - DNA, 137 bp, Homo sapiens; identical to SEQ ID NO: 221291
  chr1:32757550-32757687
  hyper

SEQ ID NO: 387560 - DNA, 254 bp, Homo sapiens; identical to SEQ ID NO: 226931
  chr1:33282729-33282983
  hyper

SEQ ID NO: 387561 - DNA, 498 bp, Homo sapiens; identical to SEQ ID NO: 197450
  chr1:33721208-33721706
  hyper

SEQ ID NO: 387562 - DNA, 173 bp, Homo sapiens; identical to SEQ ID NO: 197460
  chr1:36615012-36615185
  hyper

SEQ ID NO: 387563 - DNA, 40 bp, Homo sapiens; identical to SEQ ID NO: 226960
  chr1:36789376-36789416
  hyper

SEQ ID NO: 387564 - DNA, 218 bp, Homo sapiens; identical to SEQ ID NO: 197463
  chr1:36933230-36933448
  hyper

SEQ ID NO: 387565 - DNA, 82 bp, Homo sapiens; identical to SEQ ID NO: 226968
  chr1:37940787-37940869
  hyper

SEQ ID NO: 387566 - DNA, 98 bp, Homo sapiens; identical to SEQ ID NO: 221316
  chr1:38580185-38580283
  hyper

SEQ ID NO: 387567 - DNA, 42 bp, Homo sapiens; identical to SEQ ID NO: 197475
  chr1:39874199-39874241
  hyper

SEQ ID NO: 387568 - DNA, 120 bp, Homo sapiens; identical to SEQ ID NO: 226994
  chr1:40254568-40254688
  hyper

SEQ ID NO: 387569 - DNA, 77 bp, Homo sapiens; identical to SEQ ID NO: 226995
  chr1:40367951-40368028
  hyper

SEQ ID NO: 387570 - DNA, 31 bp, Homo sapiens; identical to SEQ ID NO: 221329
  chr1:40420568-40420599
  hyper

SEQ ID NO: 387571 - DNA, 239 bp, Homo sapiens; identical to SEQ ID NO: 197481
  chr1:41328054-41328293
  hyper

SEQ ID NO: 387572 - DNA, 146 bp, Homo sapiens; identical to SEQ ID NO: 278306
  chr1:41444974-41445120
  hyper

SEQ ID NO: 387573 - DNA, 119 bp, Homo sapiens; identical to SEQ ID NO: 391
  chr1:43919541-43919660
  hyper

SEQ ID NO: 387574 - DNA, 217 bp, Homo sapiens; identical to SEQ ID NO: 227025
  chr1:43997371-43997588
  hyper

SEQ ID NO: 387575 - DNA, 112 bp, Homo sapiens; identical to SEQ ID NO: 278338
  chr1:44402260-44402372
  hyper

SEQ ID NO: 387576 - DNA, 270 bp, Homo sapiens; identical to SEQ ID NO: 227029
  chr1:44412317-44412587
  hyper

SEQ ID NO: 387577 - DNA, 44 bp, Homo sapiens; identical to SEQ ID NO: 227032
  chr1:44445510-44445554
  hyper

SEQ ID NO: 387578 - DNA, 227 bp, Homo sapiens; identical to SEQ ID NO: 227046
  chr1:45477622-45477849
  hyper

SEQ ID NO: 387579 - DNA, 35 bp, Homo sapiens; identical to SEQ ID NO: 227047
  chr1:45671645-45671680
  hyper

SEQ ID NO: 387580 - DNA, 977 bp, Homo sapiens; identical to SEQ ID NO: 227052
  chr1:45986970-45987947
  hyper

SEQ ID NO: 387581 - DNA, 185 bp, Homo sapiens; identical to SEQ ID NO: 227054
  chr1:46153751-46153936
  hyper

SEQ ID NO: 387582 - DNA, 31 bp, Homo sapiens; identical to SEQ ID NO: 227061
  chr1:46806341-46806372
  hyper

SEQ ID NO: 387583 - DNA, 42 bp, Homo sapiens; identical to SEQ ID NO: 227064
  chr1:46932180-46932222
  hyper

SEQ ID NO: 387584 - DNA, 81 bp, Homo sapiens; identical to SEQ ID NO: 227107
  chr1:50896802-50896883
  hyper

SEQ ID NO: 387585 - DNA, 261 bp, Homo sapiens; identical to SEQ ID NO: 227113
  chr1:52082578-52082839
  hyper

SEQ ID NO: 387586 - DNA, 192 bp, Homo sapiens; identical to SEQ ID NO: 227117
  chr1:52521176-52521368
  hyper

SEQ ID NO: 387587 - DNA, 161 bp, Homo sapiens; identical to SEQ ID NO: 227118
  chr1:52832014-52832175
  hyper

SEQ ID NO: 387588 - DNA, 55 bp, Homo sapiens; identical to SEQ ID NO: 197539
  chr1:53686483-53686538
  hyper

SEQ ID NO: 387589 - DNA, 193 bp, Homo sapiens; identical to SEQ ID NO: 197544
  chr1:55353149-55353342
  hyper

SEQ ID NO: 387590 - DNA, 331 bp, Homo sapiens; identical to SEQ ID NO: 221363
  chr1:56943370-56943701
  hyper

SEQ ID NO: 387591 - DNA, 101 bp, Homo sapiens; identical to SEQ ID NO: 197551
  chr1:59249797-59249898
  hyper

SEQ ID NO: 387592 - DNA, 171 bp, Homo sapiens; identical to SEQ ID NO: 221369
  chr1:59369797-59369968
  hyper

SEQ ID NO: 387593 - DNA, 31 bp, Homo sapiens; identical to SEQ ID NO: 227154
  chr1:59762509-59762540
  hyper

SEQ ID NO: 387594 - DNA, 114 bp, Homo sapiens
  chr1:60280227-60280341
  hyper
cgcaacctcccacccccgccctcactgcacctgccaggtcataaacctcttcccacccactctcactctctacccaaggctcaggcttgtctcacgttgattggccagagccca

SEQ ID NO: 387595 - DNA, 82 bp, Homo sapiens; identical to SEQ ID NO: 227157
  chr1:60747090-60747172
  hyper

SEQ ID NO: 387596 - DNA, 40 bp, Homo sapiens; identical to SEQ ID NO: 197558
  chr1:61516034-61516074
  hyper

SEQ ID NO: 387597 - DNA, 327 bp, Homo sapiens; identical to SEQ ID NO: 227178
  chr1:65211031-65211358
  hyper

SEQ ID NO: 387598 - DNA, 39 bp, Homo sapiens; identical to SEQ ID NO: 197579
  chr1:65720329-65720368
  hyper

SEQ ID NO: 387599 - DNA, 81 bp, Homo sapiens; identical to SEQ ID NO: 197581
  chr1:66258064-66258145
  hyper

SEQ ID NO: 387600 - DNA, 74 bp, Homo sapiens; identical to SEQ ID NO: 383730
  chr1:66259003-66259077
  hyper

SEQ ID NO: 387601 - DNA, 325 bp, Homo sapiens; identical to SEQ ID NO: 227205
  chr1:70820330-70820655
  hyper

SEQ ID NO: 387602 - DNA, 55 bp, Homo sapiens; identical to SEQ ID NO: 227210
  chr1:75595516-75595571
  hyper

SEQ ID NO: 387603 - DNA, 67 bp, Homo sapiens; identical to SEQ ID NO: 278535
  chr1:75598806-75598873
  hyper

SEQ ID NO: 387604 - DNA, 179 bp, Homo sapiens; identical to SEQ ID NO: 278567
  chr1:84464234-84464413
  hyper

SEQ ID NO: 387605 - DNA, 503 bp, Homo sapiens; identical to SEQ ID NO: 278568
  chr1:84464878-84465381
  hyper

SEQ ID NO: 387606 - DNA, 161 bp, Homo sapiens; identical to SEQ ID NO: 197615
  chr1:85666112-85666273
  hyper

SEQ ID NO: 387607 - DNA, 35 bp, Homo sapiens; identical to SEQ ID NO: 227252
  chr1:86042647-86042682
  hyper

SEQ ID NO: 387608 - DNA, 63 bp, Homo sapiens; identical to SEQ ID NO: 278591
  chr1:86622127-86622190
  hyper

SEQ ID NO: 387609 - DNA, 143 bp, Homo sapiens; identical to SEQ ID NO: 221399
  chr1:90228347-90228490
  hyper

SEQ ID NO: 387610 - DNA, 172 bp, Homo sapiens; identical to SEQ ID NO: 197626
  chr1:90286176-90286348
  hyper

SEQ ID NO: 387611 - DNA, 45 bp, Homo sapiens; identical to SEQ ID NO: 197627
  chr1:90287493-90287538
  hyper

SEQ ID NO: 387612 - DNA, 58 bp, Homo sapiens; identical to SEQ ID NO: 227274
  chr1:91179581-91179639
  hyper

SEQ ID NO: 387613 - DNA, 114 bp, Homo sapiens; identical to SEQ ID NO: 227288
  chr1:91486937-91487051
  hyper

SEQ ID NO: 387614 - DNA, 170 bp, Homo sapiens; identical to SEQ ID NO: 197636
  chr1:92350554-92350724
  hyper

SEQ ID NO: 387615 - DNA, 35 bp, Homo sapiens; identical to SEQ ID NO: 221405
  chr1:92946278-92946313
  hyper

SEQ ID NO: 387616 - DNA, 324 bp, Homo sapiens
  chr1:93914141-93914465
  hyper
gccgtgatcccctcttgttccttctccctcctccaccttcacttttcccgacgcctggcttcgcgcccggcggctcctctcttcctttgtatctctcctcccggaggcgggggagggggcccattgtccccaaggggcgctgttcgagggcggggaggggaccggccgcgattcctcgcccgggccaggtccgcggggctagggcgtcgcccgtctggggcggcgccgcccagagccctcgccccaggtatggggacccaggcggctttgttcggagcccggcctcgggccagccaggcccagcccacacgcacatttctctct

SEQ ID NO: 387617 - DNA, 240 bp, Homo sapiens; identical to SEQ ID NO: 221415
  chr1:95007280-95007520
  hyper

SEQ ID NO: 387618 - DNA, 178 bp, Homo sapiens; identical to SEQ ID NO: 227323
  chr1:95583390-95583568
  hyper

SEQ ID NO: 387619 - DNA, 65 bp, Homo sapiens; identical to SEQ ID NO: 227341
  chr1:100817825-100817890
  hyper

SEQ ID NO: 387620 - DNA, 182 bp, Homo sapiens; identical to SEQ ID NO: 227362
  chr1:109235041-109235223
  hyper

SEQ ID NO: 387621 - DNA, 46 bp, Homo sapiens; identical to SEQ ID NO: 278744
  chr1:111813500-111813546
  hyper

SEQ ID NO: 387622 - DNA, 63 bp, Homo sapiens; identical to SEQ ID NO: 278745
  chr1:111813604-111813667
  hyper

SEQ ID NO: 387623 - DNA, 145 bp, Homo sapiens; identical to SEQ ID NO: 227408
  chr1:112532138-112532283
  hyper

SEQ ID NO: 387624 - DNA, 426 bp, Homo sapiens; identical to SEQ ID NO: 278753
  chr1:113051157-113051583
  hyper

SEQ ID NO: 387625 - DNA, 140 bp, Homo sapiens; identical to SEQ ID NO: 197710
  chr1:113258352-113258492
  hyper

SEQ ID NO: 387626 - DNA, 57 bp, Homo sapiens; identical to SEQ ID NO: 278761
  chr1:113392152-113392209
  hyper

SEQ ID NO: 387627 - DNA, 105 bp, Homo sapiens; identical to SEQ ID NO: 221451
  chr1:114697920-114698025
  hyper

SEQ ID NO: 387628 - DNA, 195 bp, Homo sapiens; identical to SEQ ID NO: 227433
  chr1:115323253-115323448
  hyper

SEQ ID NO: 387629 - DNA, 191 bp, Homo sapiens; identical to SEQ ID NO: 227446
  chr1:117209809-117210000
  hyper

SEQ ID NO: 387630 - DNA, 412 bp, Homo sapiens; identical to SEQ ID NO: 227450
  chr1:118148622-118149034
  hyper

SEQ ID NO: 387631 - DNA, 136 bp, Homo sapiens; identical to SEQ ID NO: 278797
  chr1:119527652-119527788
  hyper

SEQ ID NO: 387632 - DNA, 48 bp, Homo sapiens; identical to SEQ ID NO: 278798
  chr1:119527820-119527868
  hyper

SEQ ID NO: 387633 - DNA, 80 bp, Homo sapiens; identical to SEQ ID NO: 197733
  chr1:119544707-119544787
  hyper

SEQ ID NO: 387634 - DNA, 69 bp, Homo sapiens; identical to SEQ ID NO: 227479
  chr1:150849135-150849204
  hyper

SEQ ID NO: 387635 - DNA, 87 bp, Homo sapiens; identical to SEQ ID NO: 227480
  chr1:150898621-150898708
  hyper

SEQ ID NO: 387636 - DNA, 232 bp, Homo sapiens; identical to SEQ ID NO: 227493
  chr1:151483994-151484226
  hyper

SEQ ID NO: 387637 - DNA, 46 bp, Homo sapiens
  chr1:151566653-151566699
  hyper
ggggatggactaagttcccttttagctctaaaattccatgggtctt

SEQ ID NO: 387638 - DNA, 256 bp, Homo sapiens; identical to SEQ ID NO: 221464
  chr1:151763859-151764115
  hyper

SEQ ID NO: 387639 - DNA, 86 bp, Homo sapiens; identical to SEQ ID NO: 278840
  chr1:151811028-151811114
  hyper

SEQ ID NO: 387640 - DNA, 90 bp, Homo sapiens; identical to SEQ ID NO: 278845
  chr1:152084599-152084689
  hyper

SEQ ID NO: 387641 - DNA, 278 bp, Homo sapiens; identical to SEQ ID NO: 227524
  chr1:153963330-153963608
  hyper

SEQ ID NO: 387642 - DNA, 180 bp, Homo sapiens; identical to SEQ ID NO: 221475
  chr1:155099753-155099933
  hyper

SEQ ID NO: 387643 - DNA, 34 bp, Homo sapiens; identical to SEQ ID NO: 227548
  chr1:155278672-155278706
  hyper

SEQ ID NO: 387644 - DNA, 65 bp, Homo sapiens; identical to SEQ ID NO: 227553
  chr1:156023928-156023993
  hyper

SEQ ID NO: 387645 - DNA, 105 bp, Homo sapiens; identical to SEQ ID NO: 221480
  chr1:156084256-156084361
  hyper

SEQ ID NO: 387646 - DNA, 139 bp, Homo sapiens; identical to SEQ ID NO: 227570
  chr1:156571300-156571439
  hyper

SEQ ID NO: 387647 - DNA, 222 bp, Homo sapiens; identical to SEQ ID NO: 227581
  chr1:156710901-156711123
  hyper

SEQ ID NO: 387648 - DNA, 209 bp, Homo sapiens; identical to SEQ ID NO: 227585
  chr1:156722050-156722259
  hyper

SEQ ID NO: 387649 - DNA, 32 bp, Homo sapiens; identical to SEQ ID NO: 278940
  chr1:159750347-159750379
  hyper

SEQ ID NO: 387650 - DNA, 145 bp, Homo sapiens; identical to SEQ ID NO: 383759
  chr1:159750772-159750917
  hyper

SEQ ID NO: 387651 - DNA, 386 bp, Homo sapiens; identical to SEQ ID NO: 278945
  chr1:159915360-159915746
  hyper

SEQ ID NO: 387652 - DNA, 58 bp, Homo sapiens; identical to SEQ ID NO: 278946
  chr1:159915791-159915849
  hyper

SEQ ID NO: 387653 - DNA, 223 bp, Homo sapiens; identical to SEQ ID NO: 227603
  chr1:160001425-160001648
  hyper

SEQ ID NO: 387654 - DNA, 106 bp, Homo sapiens; identical to SEQ ID NO: 227617
  chr1:161102589-161102695
  hyper

SEQ ID NO: 387655 - DNA, 131 bp, Homo sapiens; identical to SEQ ID NO: 227620
  chr1:161136046-161136177
  hyper

SEQ ID NO: 387656 - DNA, 125 bp, Homo sapiens; identical to SEQ ID NO: 227641
  chr1:162531409-162531534
  hyper

SEQ ID NO: 387657 - DNA, 312 bp, Homo sapiens; identical to SEQ ID NO: 227645
  chr1:164529156-164529468
  hyper

SEQ ID NO: 387658 - DNA, 42 bp, Homo sapiens; identical to SEQ ID NO: 197830
  chr1:165323109-165323151
  hyper

SEQ ID NO: 387659 - DNA, 66 bp, Homo sapiens; identical to SEQ ID NO: 197831
  chr1:165323181-165323247
  hyper

SEQ ID NO: 387660 - DNA, 189 bp, Homo sapiens; identical to SEQ ID NO: 279005
  chr1:165345284-165345473
  hyper

SEQ ID NO: 387661 - DNA, 55 bp, Homo sapiens; identical to SEQ ID NO: 197834
  chr1:165599887-165599942
  hyper

SEQ ID NO: 387662 - DNA, 124 bp, Homo sapiens; identical to SEQ ID NO: 227657
  chr1:165667436-165667560
  hyper

SEQ ID NO: 387663 - DNA, 208 bp, Homo sapiens; identical to SEQ ID NO: 197837
  chr1:166944964-166945172
  hyper

SEQ ID NO: 387664 - DNA, 150 bp, Homo sapiens; identical to SEQ ID NO: 221513
  chr1:167423964-167424114
  hyper

SEQ ID NO: 387665 - DNA, 37 bp, Homo sapiens; identical to SEQ ID NO: 197847
  chr1:170043654-170043691
  hyper

SEQ ID NO: 387666 - DNA, 32 bp, Homo sapiens; identical to SEQ ID NO: 383769
  chr1:171220888-171220920
  hyper

SEQ ID NO: 387667 - DNA, 38 bp, Homo sapiens; identical to SEQ ID NO: 279075
  chr1:179050619-179050657
  hyper

SEQ ID NO: 387668 - DNA, 42 bp, Homo sapiens; identical to SEQ ID NO: 197863
  chr1:179711890-179711932
  hyper

SEQ ID NO: 387669 - DNA, 68 bp, Homo sapiens; identical to SEQ ID NO: 279084
  chr1:180197993-180198061
  hyper

SEQ ID NO: 387670 - DNA, 82 bp, Homo sapiens; identical to SEQ ID NO: 279095
  chr1:182026347-182026429
  hyper

SEQ ID NO: 387671 - DNA, 71 bp, Homo sapiens; identical to SEQ ID NO: 197873
  chr1:182360888-182360959
  hyper

SEQ ID NO: 387672 - DNA, 225 bp, Homo sapiens; identical to SEQ ID NO: 227744
  chr1:182991637-182991862
  hyper

SEQ ID NO: 387673 - DNA, 201 bp, Homo sapiens; identical to SEQ ID NO: 227747
  chr1:183441278-183441479
  hyper

SEQ ID NO: 387674 - DNA, 60 bp, Homo sapiens; identical to SEQ ID NO: 383773
  chr1:184722970-184723030
  hyper

SEQ ID NO: 387675 - DNA, 254 bp, Homo sapiens; identical to SEQ ID NO: 227759
  chr1:185125952-185126206
  hyper

SEQ ID NO: 387676 - DNA, 493 bp, Homo sapiens; identical to SEQ ID NO: 227765
  chr1:186798092-186798585
  hyper

SEQ ID NO: 387677 - DNA, 43 bp, Homo sapiens; identical to SEQ ID NO: 197887
  chr1:190444812-190444855
  hyper

SEQ ID NO: 387678 - DNA, 139 bp, Homo sapiens; identical to SEQ ID NO: 227771
  chr1:193028795-193028934
  hyper

SEQ ID NO: 387679 - DNA, 125 bp, Homo sapiens; identical to SEQ ID NO: 227790
  chr1:201083266-201083391
  hyper

SEQ ID NO: 387680 - DNA, 233 bp, Homo sapiens; identical to SEQ ID NO: 197903
  chr1:201437933-201438166
  hyper

SEQ ID NO: 387681 - DNA, 297 bp, Homo sapiens; identical to SEQ ID NO: 221543
  chr1:202830569-202830866
  hyper

SEQ ID NO: 387682 - DNA, 64 bp, Homo sapiens; identical to SEQ ID NO: 197911
  chr1:202858344-202858408
  hyper

SEQ ID NO: 387683 - DNA, 148 bp, Homo sapiens; identical to SEQ ID NO: 227810
  chr1:202976330-202976478
  hyper

SEQ ID NO: 387684 - DNA, 200 bp, Homo sapiens; identical to SEQ ID NO: 279200
  chr1:204518656-204518856
  hyper

SEQ ID NO: 387685 - DNA, 65 bp, Homo sapiens; identical to SEQ ID NO: 227831
  chr1:205290855-205290920
  hyper

SEQ ID NO: 387686 - DNA, 105 bp, Homo sapiens; identical to SEQ ID NO: 197930
  chr1:207995292-207995397
  hyper

SEQ ID NO: 387687 - DNA, 257 bp, Homo sapiens; identical to SEQ ID NO: 221561
  chr1:208416772-208417029
  hyper

SEQ ID NO: 387688 - DNA, 218 bp, Homo sapiens; identical to SEQ ID NO: 227854
  chr1:209364148-209364366
  hyper

SEQ ID NO: 387689 - DNA, 42 bp, Homo sapiens; identical to SEQ ID NO: 227862
  chr1:210405541-210405583
  hyper

SEQ ID NO: 387690 - DNA, 117 bp, Homo sapiens; identical to SEQ ID NO: 227870
  chr1:211434031-211434148
  hyper

SEQ ID NO: 387691 - DNA, 118 bp, Homo sapiens; identical to SEQ ID NO: 227872
  chr1:211499931-211500049
  hyper

SEQ ID NO: 387692 - DNA, 189 bp, Homo sapiens; identical to SEQ ID NO: 227874
  chr1:211750953-211751142
  hyper

SEQ ID NO: 387693 - DNA, 41 bp, Homo sapiens; identical to SEQ ID NO: 227889
  chr1:214160834-214160875
  hyper

SEQ ID NO: 387694 - DNA, 146 bp, Homo sapiens; identical to SEQ ID NO: 227896
  chr1:215740687-215740833
  hyper

SEQ ID NO: 387695 - DNA, 334 bp, Homo sapiens; identical to SEQ ID NO: 227910
  chr1:220267776-220268110
  hyper

SEQ ID NO: 387696 - DNA, 85 bp, Homo sapiens; identical to SEQ ID NO: 197966
  chr1:220959916-220960001
  hyper

SEQ ID NO: 387697 - DNA, 74 bp, Homo sapiens; identical to SEQ ID NO: 227923
  chr1:223297159-223297233
  hyper

SEQ ID NO: 387698 - DNA, 220 bp, Homo sapiens; identical to SEQ ID NO: 279300
  chr1:223537693-223537913
  hyper

SEQ ID NO: 387699 - DNA, 36 bp, Homo sapiens; identical to SEQ ID NO: 383794
  chr1:223537946-223537982
  hyper

SEQ ID NO: 387700 - DNA, 150 bp, Homo sapiens; identical to SEQ ID NO: 197972
  chr1:224302336-224302486
  hyper

SEQ ID NO: 387701 - DNA, 289 bp, Homo sapiens; identical to SEQ ID NO: 197981
  chr1:226070382-226070671
  hyper

SEQ ID NO: 387702 - DNA, 56 bp, Homo sapiens; identical to SEQ ID NO: 221594
  chr1:226497394-226497450
  hyper

SEQ ID NO: 387703 - DNA, 282 bp, Homo sapiens; identical to SEQ ID NO: 279342
  chr1:228134409-228134691
  hyper

SEQ ID NO: 387704 - DNA, 31 bp, Homo sapiens; identical to SEQ ID NO: 227959
  chr1:228193571-228193602
  hyper

SEQ ID NO: 387705 - DNA, 178 bp, Homo sapiens; identical to SEQ ID NO: 227980
  chr1:228674803-228674981
  hyper

SEQ ID NO: 387706 - DNA, 156 bp, Homo sapiens; identical to SEQ ID NO: 227990
  chr1:229694643-229694799
  hyper

SEQ ID NO: 387707 - DNA, 219 bp, Homo sapiens; identical to SEQ ID NO: 198009
  chr1:230223230-230223449
  hyper

SEQ ID NO: 387708 - DNA, 34 bp, Homo sapiens; identical to SEQ ID NO: 227998
  chr1:231473772-231473806
  hyper

SEQ ID NO: 387709 - DNA, 277 bp, Homo sapiens; identical to SEQ ID NO: 228006
  chr1:233086110-233086387
  hyper

SEQ ID NO: 387710 - DNA, 110 bp, Homo sapiens; identical to SEQ ID NO: 228020
  chr1:235491613-235491723
  hyper

SEQ ID NO: 387711 - DNA, 85 bp, Homo sapiens; identical to SEQ ID NO: 228028
  chr1:236305805-236305890
  hyper

SEQ ID NO: 387712 - DNA, 185 bp, Homo sapiens; identical to SEQ ID NO: 228041
  chr1:242011573-242011758
  hyper

SEQ ID NO: 387713 - DNA, 95 bp, Homo sapiens; identical to SEQ ID NO: 228052
  chr1:245028045-245028140
  hyper

SEQ ID NO: 387714 - DNA, 330 bp, Homo sapiens; identical to SEQ ID NO: 221641
  chr1:246887311-246887641
  hyper

SEQ ID NO: 387715 - DNA, 137 bp, Homo sapiens; identical to SEQ ID NO: 228064
  chr1:247536197-247536334
  hyper

SEQ ID NO: 387716 - DNA, 239 bp, Homo sapiens; identical to SEQ ID NO: 198052
  chr2:677555-677794
  hyper

SEQ ID NO: 387717 - DNA, 35 bp, Homo sapiens; identical to SEQ ID NO: 198055
  chr2:5832394-5832429
  hyper

SEQ ID NO: 387718 - DNA, 60 bp, Homo sapiens; identical to SEQ ID NO: 198056
  chr2:5832655-5832715
  hyper

SEQ ID NO: 387719 - DNA, 665 bp, Homo sapiens; identical to SEQ ID NO: 221657
  chr2:8818829-8819494
  hyper

SEQ ID NO: 387720 - DNA, 136 bp, Homo sapiens; identical to SEQ ID NO: 198063
  chr2:8823634-8823770
  hyper

SEQ ID NO: 387721 - DNA, 208 bp, Homo sapiens; identical to SEQ ID NO: 198064
  chr2:8825635-8825843
  hyper

SEQ ID NO: 387722 - DNA, 298 bp, Homo sapiens
  chr2:9347695-9347993
  hyper
cgcccggggtctttggtacccggtgcggaccttatcaacttgttcttgaagtggaccggcgggggcagctccgcgctccgagctccccgccgcagcccccgagcgccgcagggcccccaccctcgggtccgcgggtccggggcatcccgggctgcccgggaaggcgtgcccgcctcagccagggcggcctggctgcgctccacccgtgcccggagaaggaactgcgggcaaggtgtgtgagagtcggcgcttctgggtccaagaagcctccaggagccgctccccggttacctgggtc

SEQ ID NO: 387723 - DNA, 123 bp, Homo sapiens; identical to SEQ ID NO: 279496
  chr2:9348023-9348146
  hyper

SEQ ID NO: 387724 - DNA, 180 bp, Homo sapiens; identical to SEQ ID NO: 221667
  chr2:10443826-10444006
  hyper

SEQ ID NO: 387725 - DNA, 33 bp, Homo sapiens; identical to SEQ ID NO: 198081
  chr2:11621413-11621446
  hyper

SEQ ID NO: 387726 - DNA, 87 bp, Homo sapiens; identical to SEQ ID NO: 105506
  chr2:16080304-16080391
  hyper

SEQ ID NO: 387727 - DNA, 42 bp, Homo sapiens; identical to SEQ ID NO: 198103
  chr2:20190155-20190197
  hyper

SEQ ID NO: 387728 - DNA, 80 bp, Homo sapiens; identical to SEQ ID NO: 228150
  chr2:20251798-20251878
  hyper

SEQ ID NO: 387729 - DNA, 32 bp, Homo sapiens; identical to SEQ ID NO: 228161
  chr2:23886284-23886316
  hyper

SEQ ID NO: 387730 - DNA, 81 bp, Homo sapiens; identical to SEQ ID NO: 228168
  chr2:24346201-24346282
  hyper

SEQ ID NO: 387731 - DNA, 181 bp, Homo sapiens; identical to SEQ ID NO: 228169
  chr2:24583444-24583625
  hyper

SEQ ID NO: 387732 - DNA, 120 bp, Homo sapiens; identical to SEQ ID NO: 198121
  chr2:25440006-25440126
  hyper

SEQ ID NO: 387733 - DNA, 139 bp, Homo sapiens; identical to SEQ ID NO: 198123
  chr2:25458563-25458702
  hyper

SEQ ID NO: 387734 - DNA, 52 bp, Homo sapiens
  chr2:25464537-25464589
  hyper
ggtccacctgaatgcccaagtccttcagcaccaggagccctgcaccagccag

SEQ ID NO: 387735 - DNA, 162 bp, Homo sapiens; identical to SEQ ID NO: 198133
  chr2:25470449-25470611
  hyper

SEQ ID NO: 387736 - DNA, 237 bp, Homo sapiens; identical to SEQ ID NO: 198136
  chr2:25505304-25505541
  hyper

SEQ ID NO: 387737 - DNA, 217 bp, Homo sapiens; identical to SEQ ID NO: 228176
  chr2:26101334-26101551
  hyper

SEQ ID NO: 387738 - DNA, 141 bp, Homo sapiens; identical to SEQ ID NO: 228184
  chr2:27008750-27008891
  hyper

SEQ ID NO: 387739 - DNA, 224 bp, Homo sapiens; identical to SEQ ID NO: 228197
  chr2:27440128-27440352
  hyper

SEQ ID NO: 387740 - DNA, 429 bp, Homo sapiens; identical to SEQ ID NO: 228226
  chr2:32264569-32264998
  hyper

SEQ ID NO: 387741 - DNA, 318 bp, Homo sapiens; identical to SEQ ID NO: 228227
  chr2:32288258-32288576
  hyper

SEQ ID NO: 387742 - DNA, 139 bp, Homo sapiens; identical to SEQ ID NO: 198160
  chr2:33171660-33171799
  hyper

SEQ ID NO: 387743 - DNA, 258 bp, Homo sapiens; identical to SEQ ID NO: 228234
  chr2:36825136-36825394
  hyper

SEQ ID NO: 387744 - DNA, 77 bp, Homo sapiens; identical to SEQ ID NO: 279678
  chr2:37571656-37571733
  hyper

SEQ ID NO: 387745 - DNA, 77 bp, Homo sapiens; identical to SEQ ID NO: 279679
  chr2:37571910-37571987
  hyper

SEQ ID NO: 387746 - DNA, 163 bp, Homo sapiens; identical to SEQ ID NO: 228239
  chr2:37572275-37572438
  hyper

SEQ ID NO: 387747 - DNA, 193 bp, Homo sapiens; identical to SEQ ID NO: 228245
  chr2:39005144-39005337
  hyper

SEQ ID NO: 387748 - DNA, 245 bp, Homo sapiens; identical to SEQ ID NO: 228259
  chr2:42795911-42796156
  hyper

SEQ ID NO: 387749 - DNA, 80 bp, Homo sapiens; identical to SEQ ID NO: 228276
  chr2:45030318-45030398
  hyper

SEQ ID NO: 387750 - DNA, 531 bp, Homo sapiens; identical to SEQ ID NO: 279720
  chr2:45180203-45180734
  hyper

SEQ ID NO: 387751 - DNA, 608 bp, Homo sapiens; identical to SEQ ID NO: 228302
  chr2:46727082-46727690
  hyper

SEQ ID NO: 387752 - DNA, 56 bp, Homo sapiens; identical to SEQ ID NO: 228303
  chr2:46926176-46926232
  hyper

SEQ ID NO: 387753 - DNA, 97 bp, Homo sapiens; identical to SEQ ID NO: 228306
  chr2:47169106-47169203
  hyper

SEQ ID NO: 387754 - DNA, 438 bp, Homo sapiens; identical to SEQ ID NO: 221743
  chr2:47630103-47630541
  hyper

SEQ ID NO: 387755 - DNA, 450 bp, Homo sapiens; identical to SEQ ID NO: 221758
  chr2:47709917-47710367
  hyper

SEQ ID NO: 387756 - DNA, 2545 bp, Homo sapiens; identical to SEQ ID NO: 221764
  chr2:48025749-48028294
  hyper

SEQ ID NO: 387757 - DNA, 266 bp, Homo sapiens; identical to SEQ ID NO: 221765
  chr2:48030558-48030824
  hyper

SEQ ID NO: 387758 - DNA, 90 bp, Homo sapiens; identical to SEQ ID NO: 221767
  chr2:48032756-48032846
  hyper

SEQ ID NO: 387759 - DNA, 227 bp, Homo sapiens; identical to SEQ ID NO: 228315
  chr2:48131259-48131486
  hyper

SEQ ID NO: 387760 - DNA, 55 bp, Homo sapiens; identical to SEQ ID NO: 228316
  chr2:48543151-48543206
  hyper

SEQ ID NO: 387761 - DNA, 133 bp, Homo sapiens; identical to SEQ ID NO: 198202
  chr2:50573244-50573377
  hyper

SEQ ID NO: 387762 - DNA, 251 bp, Homo sapiens; identical to SEQ ID NO: 198204
  chr2:50629607-50629858
  hyper

SEQ ID NO: 387763 - DNA, 41 bp, Homo sapiens; identical to SEQ ID NO: 198206
  chr2:54682463-54682504
  hyper

SEQ ID NO: 387764 - DNA, 140 bp, Homo sapiens; identical to SEQ ID NO: 221769
  chr2:54683032-54683172
  hyper

SEQ ID NO: 387765 - DNA, 101 bp, Homo sapiens; identical to SEQ ID NO: 279798
  chr2:55646327-55646428
  hyper

SEQ ID NO: 387766 - DNA, 680 bp, Homo sapiens; identical to SEQ ID NO: 279799
  chr2:55646458-55647138
  hyper

SEQ ID NO: 387767 - DNA, 342 bp, Homo sapiens; identical to SEQ ID NO: 221777
  chr2:61990960-61991302
  hyper

SEQ ID NO: 387768 - DNA, 78 bp, Homo sapiens; identical to SEQ ID NO: 228363
  chr2:61991708-61991786
  hyper

SEQ ID NO: 387769 - DNA, 178 bp, Homo sapiens; identical to SEQ ID NO: 228366
  chr2:62132600-62132778
  hyper

SEQ ID NO: 387770 - DNA, 423 bp, Homo sapiens; identical to SEQ ID NO: 228367
  chr2:62422576-62422999
  hyper

SEQ ID NO: 387771 - DNA, 850 bp, Homo sapiens; identical to SEQ ID NO: 279842
  chr2:63276492-63277342
  hyper

SEQ ID NO: 387772 - DNA, 489 bp, Homo sapiens; identical to SEQ ID NO: 228377
  chr2:63815746-63816235
  hyper

SEQ ID NO: 387773 - DNA, 41 bp, Homo sapiens; identical to SEQ ID NO: 228395
  chr2:68384727-68384768
  hyper

SEQ ID NO: 387774 - DNA, 180 bp, Homo sapiens; identical to SEQ ID NO: 198265
  chr2:70418116-70418296
  hyper

SEQ ID NO: 387775 - DNA, 409 bp, Homo sapiens; identical to SEQ ID NO: 228413
  chr2:70520657-70521066
  hyper

SEQ ID NO: 387776 - DNA, 53 bp, Homo sapiens; identical to SEQ ID NO: 221793
  chr2:71502836-71502889
  hyper

SEQ ID NO: 387777 - DNA, 40 bp, Homo sapiens; identical to SEQ ID NO: 198270
  chr2:71504818-71504858
  hyper

SEQ ID NO: 387778 - DNA, 83 bp, Homo sapiens
  chr2:72375815-72375898
  hyper
ggggtgaggcggggtggggttgggggaggaggtggaaaacccgagctgggctattgtatcaattaagaaaaggcagtccgtcc

SEQ ID NO: 387779 - DNA, 198 bp, Homo sapiens; identical to SEQ ID NO: 279906
  chr2:72376168-72376366
  hyper

SEQ ID NO: 387780 - DNA, 146 bp, Homo sapiens; identical to SEQ ID NO: 228448
  chr2:74406031-74406177
  hyper

SEQ ID NO: 387781 - DNA, 104 bp, Homo sapiens; identical to SEQ ID NO: 228461
  chr2:74756283-74756387
  hyper

SEQ ID NO: 387782 - DNA, 142 bp, Homo sapiens; identical to SEQ ID NO: 198306
  chr2:74776396-74776538
  hyper

SEQ ID NO: 387783 - DNA, 198 bp, Homo sapiens; identical to SEQ ID NO: 228479
  chr2:85553952-85554150
  hyper

SEQ ID NO: 387784 - DNA, 145 bp, Homo sapiens; identical to SEQ ID NO: 228480
  chr2:85555444-85555589
  hyper

SEQ ID NO: 387785 - DNA, 108 bp, Homo sapiens; identical to SEQ ID NO: 228484
  chr2:85804638-85804746
  hyper

SEQ ID NO: 387786 - DNA, 224 bp, Homo sapiens; identical to SEQ ID NO: 221813
  chr2:85829251-85829475
  hyper

SEQ ID NO: 387787 - DNA, 158 bp, Homo sapiens; identical to SEQ ID NO: 228487
  chr2:85830122-85830280
  hyper

SEQ ID NO: 387788 - DNA, 168 bp, Homo sapiens; identical to SEQ ID NO: 228488
  chr2:85982463-85982631
  hyper

SEQ ID NO: 387789 - DNA, 761 bp, Homo sapiens; identical to SEQ ID NO: 228489
  chr2:86114869-86115630
  hyper

SEQ ID NO: 387790 - DNA, 204 bp, Homo sapiens; identical to SEQ ID NO: 106290
  chr2:86333309-86333513
  hyper

SEQ ID NO: 387791 - DNA, 81 bp, Homo sapiens; identical to SEQ ID NO: 228499
  chr2:88355120-88355201
  hyper

SEQ ID NO: 387792 - DNA, 345 bp, Homo sapiens; identical to SEQ ID NO: 280001
  chr2:95825283-95825628
  hyper

SEQ ID NO: 387793 - DNA, 114 bp, Homo sapiens; identical to SEQ ID NO: 228511
  chr2:95831017-95831131
  hyper

SEQ ID NO: 387794 - DNA, 156 bp, Homo sapiens; identical to SEQ ID NO: 221833
  chr2:97482863-97483019
  hyper

SEQ ID NO: 387795 - DNA, 78 bp, Homo sapiens; identical to SEQ ID NO: 228532
  chr2:97523294-97523372
  hyper

SEQ ID NO: 387796 - DNA, 137 bp, Homo sapiens; identical to SEQ ID NO: 228533
  chr2:97523809-97523946
  hyper

SEQ ID NO: 387797 - DNA, 98 bp, Homo sapiens; identical to SEQ ID NO: 228534
  chr2:97534367-97534465
  hyper

SEQ ID NO: 387798 - DNA, 69 bp, Homo sapiens; identical to SEQ ID NO: 198332
  chr2:98261938-98262007
  hyper

SEQ ID NO: 387799 - DNA, 35 bp, Homo sapiens; identical to SEQ ID NO: 228544
  chr2:99224744-99224779
  hyper

SEQ ID NO: 387800 - DNA, 45 bp, Homo sapiens; identical to SEQ ID NO: 228568
  chr2:103095718-103095763
  hyper

SEQ ID NO: 387801 - DNA, 60 bp, Homo sapiens; identical to SEQ ID NO: 280079
  chr2:105471748-105471808
  hyper

SEQ ID NO: 387802 - DNA, 60 bp, Homo sapiens; identical to SEQ ID NO: 198364
  chr2:105472048-105472108
  hyper

SEQ ID NO: 387803 - DNA, 162 bp, Homo sapiens; identical to SEQ ID NO: 221851
  chr2:106362018-106362180
  hyper

SEQ ID NO: 387804 - DNA, 410 bp, Homo sapiens; identical to SEQ ID NO: 228595
  chr2:109402898-109403308
  hyper

SEQ ID NO: 387805 - DNA, 67 bp, Homo sapiens; identical to SEQ ID NO: 228611
  chr2:113239297-113239364
  hyper

SEQ ID NO: 387806 - DNA, 276 bp, Homo sapiens; identical to SEQ ID NO: 198396
  chr2:119532328-119532604
  hyper

SEQ ID NO: 387807 - DNA, 52 bp, Homo sapiens; identical to SEQ ID NO: 280144
  chr2:119566105-119566157
  hyper

SEQ ID NO: 387808 - DNA, 36 bp, Homo sapiens; identical to SEQ ID NO: 228628
  chr2:119599150-119599186
  hyper

SEQ ID NO: 387809 - DNA, 85 bp, Homo sapiens; identical to SEQ ID NO: 198398
  chr2:119600864-119600949
  hyper

SEQ ID NO: 387810 - DNA, 94 bp, Homo sapiens; identical to SEQ ID NO: 280153
  chr2:119606041-119606135
  hyper

SEQ ID NO: 387811 - DNA, 75 bp, Homo sapiens; identical to SEQ ID NO: 198402
  chr2:119606630-119606705
  hyper

SEQ ID NO: 387812 - DNA, 162 bp, Homo sapiens; identical to SEQ ID NO: 198410
  chr2:120189853-120190015
  hyper

SEQ ID NO: 387813 - DNA, 138 bp, Homo sapiens; identical to SEQ ID NO: 228649
  chr2:120516995-120517133
  hyper

SEQ ID NO: 387814 - DNA, 33 bp, Homo sapiens; identical to SEQ ID NO: 280176
  chr2:121105241-121105274
  hyper

SEQ ID NO: 387815 - DNA, 265 bp, Homo sapiens; identical to SEQ ID NO: 228664
  chr2:122408113-122408378
  hyper

SEQ ID NO: 387816 - DNA, 71 bp, Homo sapiens; identical to SEQ ID NO: 198432
  chr2:128848514-128848585
  hyper

SEQ ID NO: 387817 - DNA, 99 bp, Homo sapiens; identical to SEQ ID NO: 198434
  chr2:132767530-132767629
  hyper

SEQ ID NO: 387818 - DNA, 304 bp, Homo sapiens; identical to SEQ ID NO: 198451
  chr2:137522037-137522341
  hyper

SEQ ID NO: 387819 - DNA, 47 bp, Homo sapiens
  chr2:137523778-137523825
  hyper
gttcagtgccagtggaggatagctgagcaagccaagaagttttgcag

SEQ ID NO: 387820 - DNA, 265 bp, Homo sapiens; identical to SEQ ID NO: 280247
  chr2:137523855-137524120
  hyper

SEQ ID NO: 387821 - DNA, 76 bp, Homo sapiens; identical to SEQ ID NO: 280253
  chr2:148601211-148601287
  hyper

SEQ ID NO: 387822 - DNA, 252 bp, Homo sapiens; identical to SEQ ID NO: 383861
  chr2:148601349-148601601
  hyper

SEQ ID NO: 387823 - DNA, 266 bp, Homo sapiens; identical to SEQ ID NO: 228726
  chr2:149267061-149267327
  hyper

SEQ ID NO: 387824 - DNA, 142 bp, Homo sapiens; identical to SEQ ID NO: 228727
  chr2:149402958-149403100
  hyper

SEQ ID NO: 387825 - DNA, 173 bp, Homo sapiens; identical to SEQ ID NO: 198465
  chr2:149894865-149895038
  hyper

SEQ ID NO: 387826 - DNA, 36 bp, Homo sapiens; identical to SEQ ID NO: 198466
  chr2:150061862-150061898
  hyper

SEQ ID NO: 387827 - DNA, 237 bp, Homo sapiens; identical to SEQ ID NO: 383864
  chr2:150186614-150186851
  hyper

SEQ ID NO: 387828 - DNA, 39 bp, Homo sapiens; identical to SEQ ID NO: 383865
  chr2:151342533-151342572
  hyper

SEQ ID NO: 387829 - DNA, 148 bp, Homo sapiens; identical to SEQ ID NO: 221906
  chr2:157189365-157189513
  hyper

SEQ ID NO: 387830 - DNA, 71 bp, Homo sapiens; identical to SEQ ID NO: 228763
  chr2:160654718-160654789
  hyper

SEQ ID NO: 387831 - DNA, 340 bp, Homo sapiens; identical to SEQ ID NO: 198496
  chr2:160919062-160919402
  hyper

SEQ ID NO: 387832 - DNA, 97 bp, Homo sapiens; identical to SEQ ID NO: 198499
  chr2:161560616-161560713
  hyper

SEQ ID NO: 387833 - DNA, 268 bp, Homo sapiens; identical to SEQ ID NO: 198518
  chr2:170218861-170219129
  hyper

SEQ ID NO: 387834 - DNA, 49 bp, Homo sapiens
  chr2:171571797-171571846
  hyper
ggcccagcaaagtccttatcaaattcttggaggtgatcctgaagcgctc

SEQ ID NO: 387835 - DNA, 279 bp, Homo sapiens; identical to SEQ ID NO: 198526
  chr2:171572068-171572347
  hyper

SEQ ID NO: 387836 - DNA, 240 bp, Homo sapiens; identical to SEQ ID NO: 221934
  chr2:172379834-172380074
  hyper

SEQ ID NO: 387837 - DNA, 162 bp, Homo sapiens; identical to SEQ ID NO: 280380
  chr2:172950953-172951115
  hyper

SEQ ID NO: 387838 - DNA, 38 bp, Homo sapiens; identical to SEQ ID NO: 228848
  chr2:173292254-173292292
  hyper

SEQ ID NO: 387839 - DNA, 103 bp, Homo sapiens; identical to SEQ ID NO: 221936
  chr2:174147823-174147926
  hyper

SEQ ID NO: 387840 - DNA, 318 bp, Homo sapiens; identical to SEQ ID NO: 198563
  chr2:175260398-175260716
  hyper

SEQ ID NO: 387841 - DNA, 94 bp, Homo sapiens; identical to SEQ ID NO: 280416
  chr2:176943767-176943861
  hyper

SEQ ID NO: 387842 - DNA, 170 bp, Homo sapiens; identical to SEQ ID NO: 280417
  chr2:176943902-176944072
  hyper

SEQ ID NO: 387843 - DNA, 280 bp, Homo sapiens; identical to SEQ ID NO: 280418
  chr2:176950481-176950761
  hyper

SEQ ID NO: 387844 - DNA, 123 bp, Homo sapiens; identical to SEQ ID NO: 280430
  chr2:176973442-176973565
  hyper

SEQ ID NO: 387845 - DNA, 116 bp, Homo sapiens; identical to SEQ ID NO: 107053
  chr2:176973598-176973714
  hyper

SEQ ID NO: 387846 - DNA, 250 bp, Homo sapiens; identical to SEQ ID NO: 228905
  chr2:178076955-178077205
  hyper

SEQ ID NO: 387847 - DNA, 85 bp, Homo sapiens; identical to SEQ ID NO: 198592
  chr2:180129611-180129696
  hyper

SEQ ID NO: 387848 - DNA, 97 bp, Homo sapiens; identical to SEQ ID NO: 280467
  chr2:182544331-182544428
  hyper

SEQ ID NO: 387849 - DNA, 111 bp, Homo sapiens; identical to SEQ ID NO: 198608
  chr2:190306062-190306173
  hyper

SEQ ID NO: 387850 - DNA, 252 bp, Homo sapiens; identical to SEQ ID NO: 228950
  chr2:191878927-191879179
  hyper

SEQ ID NO: 387851 - DNA, 54 bp, Homo sapiens; identical to SEQ ID NO: 228953
  chr2:192542863-192542917
  hyper

SEQ ID NO: 387852 - DNA, 178 bp, Homo sapiens; identical to SEQ ID NO: 198634
  chr2:198265429-198265607
  hyper

SEQ ID NO: 387853 - DNA, 70 bp, Homo sapiens; identical to SEQ ID NO: 198637
  chr2:198268366-198268436
  hyper

SEQ ID NO: 387854 - DNA, 93 bp, Homo sapiens; identical to SEQ ID NO: 198638
  chr2:198269812-198269905
  hyper

SEQ ID NO: 387855 - DNA, 297 bp, Homo sapiens; identical to SEQ ID NO: 228961
  chr2:198364582-198364879
  hyper

SEQ ID NO: 387856 - DNA, 77 bp, Homo sapiens; identical to SEQ ID NO: 280550
  chr2:200334887-200334964
  hyper

SEQ ID NO: 387857 - DNA, 111 bp, Homo sapiens; identical to SEQ ID NO: 198654
  chr2:200820437-200820548
  hyper

SEQ ID NO: 387858 - DNA, 250 bp, Homo sapiens; identical to SEQ ID NO: 228984
  chr2:201729265-201729515
  hyper

SEQ ID NO: 387859 - DNA, 74 bp, Homo sapiens; identical to SEQ ID NO: 228996
  chr2:204192792-204192866
  hyper

SEQ ID NO: 387860 - DNA, 224 bp, Homo sapiens; identical to SEQ ID NO: 229003
  chr2:206949799-206950023
  hyper

SEQ ID NO: 387861 - DNA, 152 bp, Homo sapiens; identical to SEQ ID NO: 229004
  chr2:206950964-206951116
  hyper

SEQ ID NO: 387862 - DNA, 118 bp, Homo sapiens; identical to SEQ ID NO: 229017
  chr2:209130875-209130993
  hyper

SEQ ID NO: 387863 - DNA, 137 bp, Homo sapiens; identical to SEQ ID NO: 198681
  chr2:213401042-213401179
  hyper

SEQ ID NO: 387864 - DNA, 208 bp, Homo sapiens; identical to SEQ ID NO: 280612
  chr2:214148842-214149050
  hyper

SEQ ID NO: 387865 - DNA, 311 bp, Homo sapiens; identical to SEQ ID NO: 280613
  chr2:214149129-214149440
  hyper

SEQ ID NO: 387866 - DNA, 53 bp, Homo sapiens; identical to SEQ ID NO: 229025
  chr2:216176512-216176565
  hyper

SEQ ID NO: 387867 - DNA, 310 bp, Homo sapiens; identical to SEQ ID NO: 280618
  chr2:217236253-217236563
  hyper

SEQ ID NO: 387868 - DNA, 339 bp, Homo sapiens; identical to SEQ ID NO: 198686
  chr2:217236604-217236943
  hyper

SEQ ID NO: 387869 - DNA, 334 bp, Homo sapiens; identical to SEQ ID NO: 229040
  chr2:218899131-218899465
  hyper

SEQ ID NO: 387870 - DNA, 63 bp, Homo sapiens; identical to SEQ ID NO: 229041
  chr2:219157359-219157422
  hyper

SEQ ID NO: 387871 - DNA, 38 bp, Homo sapiens; identical to SEQ ID NO: 229048
  chr2:219725693-219725731
  hyper

SEQ ID NO: 387872 - DNA, 255 bp, Homo sapiens; identical to SEQ ID NO: 229056
  chr2:219761613-219761868
  hyper

SEQ ID NO: 387873 - DNA, 40 bp, Homo sapiens; identical to SEQ ID NO: 229062
  chr2:219825941-219825981
  hyper

SEQ ID NO: 387874 - DNA, 112 bp, Homo sapiens; identical to SEQ ID NO: 229078
  chr2:220093844-220093956
  hyper

SEQ ID NO: 387875 - DNA, 96 bp, Homo sapiens; identical to SEQ ID NO: 229097
  chr2:220492611-220492707
  hyper

SEQ ID NO: 387876 - DNA, 146 bp, Homo sapiens; identical to SEQ ID NO: 198733
  chr2:223177678-223177824
  hyper

SEQ ID NO: 387877 - DNA, 265 bp, Homo sapiens; identical to SEQ ID NO: 222020
  chr2:224904376-224904641
  hyper

SEQ ID NO: 387878 - DNA, 91 bp, Homo sapiens; identical to SEQ ID NO: 229142
  chr2:230786754-230786845
  hyper

SEQ ID NO: 387879 - DNA, 82 bp, Homo sapiens; identical to SEQ ID NO: 222033
  chr2:233284387-233284469
  hyper

SEQ ID NO: 387880 - DNA, 264 bp, Homo sapiens; identical to SEQ ID NO: 222056
  chr2:241375298-241375562
  hyper

SEQ ID NO: 387881 - DNA, 168 bp, Homo sapiens; identical to SEQ ID NO: 198792
  chr2:241499837-241500005
  hyper

SEQ ID NO: 387882 - DNA, 162 bp, Homo sapiens; identical to SEQ ID NO: 198795
  chr2:242088871-242089033
  hyper

SEQ ID NO: 387883 - DNA, 71 bp, Homo sapiens; identical to SEQ ID NO: 280855
  chr3:3842608-3842679
  hyper

SEQ ID NO: 387884 - DNA, 47 bp, Homo sapiens; identical to SEQ ID NO: 280856
  chr3:3842731-3842778
  hyper

SEQ ID NO: 387885 - DNA, 293 bp, Homo sapiens; identical to SEQ ID NO: 229257
  chr3:5028396-5028689
  hyper

SEQ ID NO: 387886 - DNA, 60 bp, Homo sapiens
  chr3:6903528-6903588
  hyper
ggagtgattggggcttcggggagttcggtctccatcatggtagccaacatcctgaggctc

SEQ ID NO: 387887 - DNA, 67 bp, Homo sapiens; identical to SEQ ID NO: 229267
  chr3:9291320-9291387
  hyper

SEQ ID NO: 387888 - DNA, 275 bp, Homo sapiens; identical to SEQ ID NO: 229279
  chr3:9932166-9932441
  hyper

SEQ ID NO: 387889 - DNA, 137 bp, Homo sapiens; identical to SEQ ID NO: 198815
  chr3:10052429-10052566
  hyper

SEQ ID NO: 387890 - DNA, 66 bp, Homo sapiens; identical to SEQ ID NO: 383898
  chr3:10206277-10206343
  hyper

SEQ ID NO: 387891 - DNA, 70 bp, Homo sapiens; identical to SEQ ID NO: 198818
  chr3:11035434-11035504
  hyper

SEQ ID NO: 387892 - DNA, 48 bp, Homo sapiens; identical to SEQ ID NO: 198823
  chr3:12851562-12851610
  hyper

SEQ ID NO: 387893 - DNA, 223 bp, Homo sapiens; identical to SEQ ID NO: 280906
  chr3:12851692-12851915
  hyper

SEQ ID NO: 387894 - DNA, 102 bp, Homo sapiens; identical to SEQ ID NO: 198826
  chr3:13323321-13323423
  hyper

SEQ ID NO: 387895 - DNA, 156 bp, Homo sapiens; identical to SEQ ID NO: 198828
  chr3:13692028-13692184
  hyper

SEQ ID NO: 387896 - DNA, 440 bp, Homo sapiens; identical to SEQ ID NO: 383899
  chr3:13922041-13922481
  hyper

SEQ ID NO: 387897 - DNA, 372 bp, Homo sapiens; identical to SEQ ID NO: 229322
  chr3:15642964-15643336
  hyper

SEQ ID NO: 387898 - DNA, 37 bp, Homo sapiens; identical to SEQ ID NO: 229337
  chr3:20227787-20227824
  hyper

SEQ ID NO: 387899 - DNA, 152 bp, Homo sapiens; identical to SEQ ID NO: 222085
  chr3:23986746-23986898
  hyper

SEQ ID NO: 387900 - DNA, 103 bp, Homo sapiens; identical to SEQ ID NO: 280959
  chr3:24535351-24535454
  hyper

SEQ ID NO: 387901 - DNA, 86 bp, Homo sapiens
  chr3:24535595-24535681
  hyper
acggcgcacgccaacatccaggataattctcctttccaagcccgggagttccggggcaggcgaaaaaggggggatgggagacccac

SEQ ID NO: 387902 - DNA, 161 bp, Homo sapiens; identical to SEQ ID NO: 280971
  chr3:26663871-26664032
  hyper

SEQ ID NO: 387903 - DNA, 132 bp, Homo sapiens; identical to SEQ ID NO: 198859
  chr3:27755955-27756087
  hyper

SEQ ID NO: 387904 - DNA, 74 bp, Homo sapiens
  chr3:27756242-27756316
  hyper
gttttgagtaggccgttcggaaacgcggagcaggagttcgagcccccaaggtcacgggtggcgcgggaagaact

SEQ ID NO: 387905 - DNA, 137 bp, Homo sapiens; identical to SEQ ID NO: 198869
  chr3:32442878-32443015
  hyper

SEQ ID NO: 387906 - DNA, 55 bp, Homo sapiens; identical to SEQ ID NO: 198870
  chr3:32443510-32443565
  hyper

SEQ ID NO: 387907 - DNA, 124 bp, Homo sapiens; identical to SEQ ID NO: 198873
  chr3:33137820-33137944
  hyper

SEQ ID NO: 387908 - DNA, 280 bp, Homo sapiens; identical to SEQ ID NO: 222107
  chr3:37053310-37053590
  hyper

SEQ ID NO: 387909 - DNA, 154 bp, Homo sapiens; identical to SEQ ID NO: 222110
  chr3:37061800-37061954
  hyper

SEQ ID NO: 387910 - DNA, 165 bp, Homo sapiens; identical to SEQ ID NO: 222115
  chr3:37089009-37089174
  hyper

SEQ ID NO: 387911 - DNA, 418 bp, Homo sapiens
  chr3:37493091-37493509
  hyper
cggagaccacacttcgggaatcactggtgtacgagaccaagtgactagaatatggaggggtgctctgctcgcttccacgtggctactattgttatgaacaacaacagccggcgtttactgagcactgctcctacagcttatctcacaactgggtgaaggagcagaggatgcgcagggctagaacctggagtctaaactcgtccttcacccgggttgctctggatcttactggttgtgagacagggagggaaagagagacaaaggcagggagacaggcccagcagggccggcagagcctgtagtgacggaggggagcagccttatctccgggaacccgagcgccccgtgcgcggcggggagggggcagttcggggcgccccggcgggtcccaggggctgactcccgcccgggaagtgcg

SEQ ID NO: 387912 - DNA, 153 bp, Homo sapiens; identical to SEQ ID NO: 229394
  chr3:38178729-38178882
  hyper

SEQ ID NO: 387913 - DNA, 83 bp, Homo sapiens; identical to SEQ ID NO: 281039
  chr3:38179801-38179884
  hyper

SEQ ID NO: 387914 - DNA, 147 bp, Homo sapiens; identical to SEQ ID NO: 39092
  chr3:38179984-38180131
  hyper

SEQ ID NO: 387915 - DNA, 156 bp, Homo sapiens; identical to SEQ ID NO: 229401
  chr3:38537735-38537891
  hyper

SEQ ID NO: 387916 - DNA, 278 bp, Homo sapiens; identical to SEQ ID NO: 281049
  chr3:38690811-38691089
  hyper

SEQ ID NO: 387917 - DNA, 69 bp, Homo sapiens; identical to SEQ ID NO: 281050
  chr3:38691144-38691213
  hyper

SEQ ID NO: 387918 - DNA, 91 bp, Homo sapiens; identical to SEQ ID NO: 198893
  chr3:41240629-41240720
  hyper

SEQ ID NO: 387919 - DNA, 54 bp, Homo sapiens; identical to SEQ ID NO: 229415
  chr3:41240948-41241002
  hyper

SEQ ID NO: 387920 - DNA, 161 bp, Homo sapiens; identical to SEQ ID NO: 198894
  chr3:42056668-42056829
  hyper

SEQ ID NO: 387921 - DNA, 45 bp, Homo sapiens; identical to SEQ ID NO: 198896
  chr3:42641736-42641781
  hyper

SEQ ID NO: 387922 - DNA, 214 bp, Homo sapiens; identical to SEQ ID NO: 198903
  chr3:43663334-43663548
  hyper

SEQ ID NO: 387923 - DNA, 162 bp, Homo sapiens; identical to SEQ ID NO: 198912
  chr3:44626179-44626341
  hyper

SEQ ID NO: 387924 - DNA, 66 bp, Homo sapiens; identical to SEQ ID NO: 198914
  chr3:44690079-44690145
  hyper

SEQ ID NO: 387925 - DNA, 255 bp, Homo sapiens; identical to SEQ ID NO: 198915
  chr3:44690175-44690430
  hyper

SEQ ID NO: 387926 - DNA, 213 bp, Homo sapiens; identical to SEQ ID NO: 281095
  chr3:44690489-44690702
  hyper

SEQ ID NO: 387927 - DNA, 188 bp, Homo sapiens; identical to SEQ ID NO: 229446
  chr3:45017826-45018014
  hyper

SEQ ID NO: 387928 - DNA, 87 bp, Homo sapiens; identical to SEQ ID NO: 229452
  chr3:46854159-46854246
  hyper

SEQ ID NO: 387929 - DNA, 237 bp, Homo sapiens; identical to SEQ ID NO: 229457
  chr3:47018180-47018417
  hyper

SEQ ID NO: 387930 - DNA, 78 bp, Homo sapiens; identical to SEQ ID NO: 222142
  chr3:47050739-47050817
  hyper

SEQ ID NO: 387931 - DNA, 218 bp, Homo sapiens; identical to SEQ ID NO: 229468
  chr3:48470350-48470568
  hyper

SEQ ID NO: 387932 - DNA, 47 bp, Homo sapiens; identical to SEQ ID NO: 198929
  chr3:48885300-48885347
  hyper

SEQ ID NO: 387933 - DNA, 293 bp, Homo sapiens; identical to SEQ ID NO: 229483
  chr3:49044449-49044742
  hyper

SEQ ID NO: 387934 - DNA, 137 bp, Homo sapiens; identical to SEQ ID NO: 229484
  chr3:49057921-49058058
  hyper

SEQ ID NO: 387935 - DNA, 286 bp, Homo sapiens; identical to SEQ ID NO: 229488
  chr3:49131391-49131677
  hyper

SEQ ID NO: 387936 - DNA, 239 bp, Homo sapiens; identical to SEQ ID NO: 229495
  chr3:49395700-49395939
  hyper

SEQ ID NO: 387937 - DNA, 104 bp, Homo sapiens; identical to SEQ ID NO: 281153
  chr3:49449335-49449439
  hyper

SEQ ID NO: 387938 - DNA, 525 bp, Homo sapiens; identical to SEQ ID NO: 108317
  chr3:49449454-49449979
  hyper

SEQ ID NO: 387939 - DNA, 165 bp, Homo sapiens; identical to SEQ ID NO: 281157
  chr3:49591667-49591832
  hyper

SEQ ID NO: 387940 - DNA, 67 bp, Homo sapiens; identical to SEQ ID NO: 229506
  chr3:49977376-49977443
  hyper

SEQ ID NO: 387941 - DNA, 39 bp, Homo sapiens; identical to SEQ ID NO: 198940
  chr3:50126252-50126291
  hyper

SEQ ID NO: 387942 - DNA, 172 bp, Homo sapiens; identical to SEQ ID NO: 229508
  chr3:50192568-50192740
  hyper

SEQ ID NO: 387943 - DNA, 312 bp, Homo sapiens; identical to SEQ ID NO: 281182
  chr3:51975954-51976266
  hyper

SEQ ID NO: 387944 - DNA, 188 bp, Homo sapiens; identical to SEQ ID NO: 229530
  chr3:52029759-52029947
  hyper

SEQ ID NO: 387945 - DNA, 322 bp, Homo sapiens; identical to SEQ ID NO: 229537
  chr3:52804893-52805215
  hyper

SEQ ID NO: 387946 - DNA, 147 bp, Homo sapiens; identical to SEQ ID NO: 222158
  chr3:53190592-53190739
  hyper

SEQ ID NO: 387947 - DNA, 302 bp, Homo sapiens; identical to SEQ ID NO: 229542
  chr3:53381571-53381873
  hyper

SEQ ID NO: 387948 - DNA, 154 bp, Homo sapiens; identical to SEQ ID NO: 222161
  chr3:53528643-53528797
  hyper

SEQ ID NO: 387949 - DNA, 273 bp, Homo sapiens; identical to SEQ ID NO: 198958
  chr3:53925898-53926171
  hyper

SEQ ID NO: 387950 - DNA, 139 bp, Homo sapiens; identical to SEQ ID NO: 229560
  chr3:57262340-57262479
  hyper

SEQ ID NO: 387951 - DNA, 62 bp, Homo sapiens; identical to SEQ ID NO: 229565
  chr3:57742969-57743031
  hyper

SEQ ID NO: 387952 - DNA, 166 bp, Homo sapiens; identical to SEQ ID NO: 229567
  chr3:58203325-58203491
  hyper

SEQ ID NO: 387953 - DNA, 156 bp, Homo sapiens; identical to SEQ ID NO: 222173
  chr3:69062098-69062254
  hyper

SEQ ID NO: 387954 - DNA, 68 bp, Homo sapiens
  chr3:71833751-71833819
  hyper
tccaaaagtacttgagaagactcagagagaaacttctttcagcctaacagaagaaaaatgcgaggagt

SEQ ID NO: 387955 - DNA, 339 bp, Homo sapiens; identical to SEQ ID NO: 229625
  chr3:77087670-77088009
  hyper

SEQ ID NO: 387956 - DNA, 73 bp, Homo sapiens; identical to SEQ ID NO: 229628
  chr3:79068799-79068872
  hyper

SEQ ID NO: 387957 - DNA, 243 bp, Homo sapiens; identical to SEQ ID NO: 383925
  chr3:85008991-85009234
  hyper

SEQ ID NO: 387958 - DNA, 60 bp, Homo sapiens; identical to SEQ ID NO: 199012
  chr3:87039596-87039656
  hyper

SEQ ID NO: 387959 - DNA, 206 bp, Homo sapiens; identical to SEQ ID NO: 199013
  chr3:87040548-87040754
  hyper

SEQ ID NO: 387960 - DNA, 432 bp, Homo sapiens; identical to SEQ ID NO: 281314
  chr3:89156623-89157055
  hyper

SEQ ID NO: 387961 - DNA, 38 bp, Homo sapiens; identical to SEQ ID NO: 199017
  chr3:93692750-93692788
  hyper

SEQ ID NO: 387962 - DNA, 37 bp, Homo sapiens; identical to SEQ ID NO: 229650
  chr3:97691378-97691415
  hyper

SEQ ID NO: 387963 - DNA, 323 bp, Homo sapiens; identical to SEQ ID NO: 281329
  chr3:98451047-98451370
  hyper

SEQ ID NO: 387964 - DNA, 206 bp, Homo sapiens; identical to SEQ ID NO: 281330
  chr3:98451479-98451685
  hyper

SEQ ID NO: 387965 - DNA, 160 bp, Homo sapiens; identical to SEQ ID NO: 281331
  chr3:98452371-98452531
  hyper

SEQ ID NO: 387966 - DNA, 56 bp, Homo sapiens; identical to SEQ ID NO: 229657
  chr3:99787818-99787874
  hyper

SEQ ID NO: 387967 - DNA, 204 bp, Homo sapiens; identical to SEQ ID NO: 229667
  chr3:101546676-101546880
  hyper

SEQ ID NO: 387968 - DNA, 76 bp, Homo sapiens; identical to SEQ ID NO: 383933
  chr3:110791244-110791320
  hyper

SEQ ID NO: 387969 - DNA, 229 bp, Homo sapiens; identical to SEQ ID NO: 229690
  chr3:113557578-113557807
  hyper

SEQ ID NO: 387970 - DNA, 52 bp, Homo sapiens; identical to SEQ ID NO: 199053
  chr3:117715651-117715703
  hyper

SEQ ID NO: 387971 - DNA, 101 bp, Homo sapiens; identical to SEQ ID NO: 229714
  chr3:121553926-121554027
  hyper

SEQ ID NO: 387972 - DNA, 285 bp, Homo sapiens; identical to SEQ ID NO: 229717
  chr3:122101937-122102222
  hyper

SEQ ID NO: 387973 - DNA, 585 bp, Homo sapiens; identical to SEQ ID NO: 281411
  chr3:122746969-122747554
  hyper

SEQ ID NO: 387974 - DNA, 186 bp, Homo sapiens; identical to SEQ ID NO: 229725
  chr3:122920576-122920762
  hyper

SEQ ID NO: 387975 - DNA, 191 bp, Homo sapiens; identical to SEQ ID NO: 281427
  chr3:125931775-125931966
  hyper

SEQ ID NO: 387976 - DNA, 232 bp, Homo sapiens; identical to SEQ ID NO: 199072
  chr3:125932020-125932252
  hyper

SEQ ID NO: 387977 - DNA, 361 bp, Homo sapiens; identical to SEQ ID NO: 281430
  chr3:126074822-126075183
  hyper

SEQ ID NO: 387978 - DNA, 306 bp, Homo sapiens; identical to SEQ ID NO: 281431
  chr3:126075653-126075959
  hyper

SEQ ID NO: 387979 - DNA, 179 bp, Homo sapiens; identical to SEQ ID NO: 281432
  chr3:126076063-126076242
  hyper

SEQ ID NO: 387980 - DNA, 70 bp, Homo sapiens; identical to SEQ ID NO: 281434
  chr3:126242791-126242861
  hyper

SEQ ID NO: 387981 - DNA, 327 bp, Homo sapiens; identical to SEQ ID NO: 281435
  chr3:126243058-126243385
  hyper

SEQ ID NO: 387982 - DNA, 176 bp, Homo sapiens; identical to SEQ ID NO: 281436
  chr3:126243461-126243637
  hyper

SEQ ID NO: 387983 - DNA, 113 bp, Homo sapiens; identical to SEQ ID NO: 281441
  chr3:126854312-126854425
  hyper

SEQ ID NO: 387984 - DNA, 140 bp, Homo sapiens; identical to SEQ ID NO: 229752
  chr3:127174691-127174831
  hyper

SEQ ID NO: 387985 - DNA, 207 bp, Homo sapiens; identical to SEQ ID NO: 199079
  chr3:127348123-127348330
  hyper

SEQ ID NO: 387986 - DNA, 46 bp, Homo sapiens; identical to SEQ ID NO: 281462
  chr3:128564768-128564814
  hyper

SEQ ID NO: 387987 - DNA, 120 bp, Homo sapiens; identical to SEQ ID NO: 229769
  chr3:128598081-128598201
  hyper

SEQ ID NO: 387988 - DNA, 188 bp, Homo sapiens; identical to SEQ ID NO: 199087
  chr3:128840084-128840272
  hyper

SEQ ID NO: 387989 - DNA, 120 bp, Homo sapiens; identical to SEQ ID NO: 229775
  chr3:128968529-128968649
  hyper

SEQ ID NO: 387990 - DNA, 49 bp, Homo sapiens; identical to SEQ ID NO: 199099
  chr3:133276458-133276507
  hyper

SEQ ID NO: 387991 - DNA, 385 bp, Homo sapiens; identical to SEQ ID NO: 229798
  chr3:133524471-133524856
  hyper

SEQ ID NO: 387992 - DNA, 35 bp, Homo sapiens; identical to SEQ ID NO: 281501
  chr3:133748105-133748140
  hyper

SEQ ID NO: 387993 - DNA, 52 bp, Homo sapiens; identical to SEQ ID NO: 199100
  chr3:133969907-133969959
  hyper

SEQ ID NO: 387994 - DNA, 72 bp, Homo sapiens; identical to SEQ ID NO: 281511
  chr3:134125148-134125220
  hyper

SEQ ID NO: 387995 - DNA, 366 bp, Homo sapiens; identical to SEQ ID NO: 229805
  chr3:134204740-134205106
  hyper

SEQ ID NO: 387996 - DNA, 750 bp, Homo sapiens; identical to SEQ ID NO: 281525
  chr3:137482464-137483214
  hyper

SEQ ID NO: 387997 - DNA, 69 bp, Homo sapiens; identical to SEQ ID NO: 281526
  chr3:137483244-137483313
  hyper

SEQ ID NO: 387998 - DNA, 158 bp, Homo sapiens; identical to SEQ ID NO: 229826
  chr3:137906199-137906357
  hyper

SEQ ID NO: 387999 - DNA, 33 bp, Homo sapiens; identical to SEQ ID NO: 281536
  chr3:138066747-138066780
  hyper

SEQ ID NO: 388000 - DNA, 560 bp, Homo sapiens; identical to SEQ ID NO: 199116
  chr3:138153256-138153816
  hyper

SEQ ID NO: 388001 - DNA, 43 bp, Homo sapiens; identical to SEQ ID NO: 229832
  chr3:138553746-138553789
  hyper

SEQ ID NO: 388002 - DNA, 268 bp, Homo sapiens; identical to SEQ ID NO: 281549
  chr3:138668328-138668596
  hyper

SEQ ID NO: 388003 - DNA, 237 bp, Homo sapiens; identical to SEQ ID NO: 229849
  chr3:140950012-140950249
  hyper

SEQ ID NO: 388004 - DNA, 110 bp, Homo sapiens; identical to SEQ ID NO: 281557
  chr3:141030361-141030471
  hyper

SEQ ID NO: 388005 - DNA, 103 bp, Homo sapiens; identical to SEQ ID NO: 109000
  chr3:141030521-141030624
  hyper

SEQ ID NO: 388006 - DNA, 33 bp, Homo sapiens; identical to SEQ ID NO: 229856
  chr3:142166775-142166808
  hyper

SEQ ID NO: 388007 - DNA, 356 bp, Homo sapiens; identical to SEQ ID NO: 281574
  chr3:147074101-147074457
  hyper

SEQ ID NO: 388008 - DNA, 131 bp, Homo sapiens; identical to SEQ ID NO: 281575
  chr3:147074487-147074618
  hyper

SEQ ID NO: 388009 - DNA, 431 bp, Homo sapiens; identical to SEQ ID NO: 229873
  chr3:147095403-147095834
  hyper

SEQ ID NO: 388010 - DNA, 129 bp, Homo sapiens; identical to SEQ ID NO: 229878
  chr3:147107635-147107764
  hyper

SEQ ID NO: 388011 - DNA, 292 bp, Homo sapiens; identical to SEQ ID NO: 281590
  chr3:147112343-147112635
  hyper

SEQ ID NO: 388012 - DNA, 40 bp, Homo sapiens; identical to SEQ ID NO: 199132
  chr3:147112665-147112705
  hyper

SEQ ID NO: 388013 - DNA, 54 bp, Homo sapiens; identical to SEQ ID NO: 199136
  chr3:150126521-150126575
  hyper

SEQ ID NO: 388014 - DNA, 37 bp, Homo sapiens; identical to SEQ ID NO: 229897
  chr3:151556892-151556929
  hyper

SEQ ID NO: 388015 - DNA, 211 bp, Homo sapiens; identical to SEQ ID NO: 222257
  chr3:159706814-159707025
  hyper

SEQ ID NO: 388016 - DNA, 157 bp, Homo sapiens; identical to SEQ ID NO: 199177
  chr3:164924661-164924818
  hyper

SEQ ID NO: 388017 - DNA, 351 bp, Homo sapiens; identical to SEQ ID NO: 229946
  chr3:167453720-167454071
  hyper

SEQ ID NO: 388018 - DNA, 234 bp, Homo sapiens; identical to SEQ ID NO: 229951
  chr3:168867255-168867489
  hyper

SEQ ID NO: 388019 - DNA, 87 bp, Homo sapiens; identical to SEQ ID NO: 222261
  chr3:169380983-169381070
  hyper

SEQ ID NO: 388020 - DNA, 172 bp, Homo sapiens; identical to SEQ ID NO: 281697
  chr3:170136455-170136627
  hyper

SEQ ID NO: 388021 - DNA, 243 bp, Homo sapiens; identical to SEQ ID NO: 281714
  chr3:173113694-173113937
  hyper

SEQ ID NO: 388022 - DNA, 201 bp, Homo sapiens; identical to SEQ ID NO: 229989
  chr3:174158463-174158664
  hyper

SEQ ID NO: 388023 - DNA, 116 bp, Homo sapiens; identical to SEQ ID NO: 229998
  chr3:179280318-179280434
  hyper

SEQ ID NO: 388024 - DNA, 190 bp, Homo sapiens; identical to SEQ ID NO: 230008
  chr3:180630143-180630333
  hyper

SEQ ID NO: 388025 - DNA, 236 bp, Homo sapiens; identical to SEQ ID NO: 230011
  chr3:181418234-181418470
  hyper

SEQ ID NO: 388026 - DNA, 64 bp, Homo sapiens; identical to SEQ ID NO: 199216
  chr3:181428196-181428260
  hyper

SEQ ID NO: 388027 - DNA, 145 bp, Homo sapiens; identical to SEQ ID NO: 199227
  chr3:182698591-182698736
  hyper

SEQ ID NO: 388028 - DNA, 231 bp, Homo sapiens; identical to SEQ ID NO: 222281
  chr3:183602814-183603045
  hyper

SEQ ID NO: 388029 - DNA, 86 bp, Homo sapiens; identical to SEQ ID NO: 199238
  chr3:183851915-183852001
  hyper

SEQ ID NO: 388030 - DNA, 45 bp, Homo sapiens; identical to SEQ ID NO: 230045
  chr3:183852315-183852360
  hyper

SEQ ID NO: 388031 - DNA, 117 bp, Homo sapiens; identical to SEQ ID NO: 230048
  chr3:183967307-183967424
  hyper

SEQ ID NO: 388032 - DNA, 105 bp, Homo sapiens; identical to SEQ ID NO: 222283
  chr3:184097688-184097793
  hyper

SEQ ID NO: 388033 - DNA, 69 bp, Homo sapiens; identical to SEQ ID NO: 230057
  chr3:184280320-184280389
  hyper

SEQ ID NO: 388034 - DNA, 63 bp, Homo sapiens; identical to SEQ ID NO: 230063
  chr3:184430244-184430307
  hyper

SEQ ID NO: 388035 - DNA, 165 bp, Homo sapiens; identical to SEQ ID NO: 230066
  chr3:185303809-185303974
  hyper

SEQ ID NO: 388036 - DNA, 236 bp, Homo sapiens; identical to SEQ ID NO: 199248
  chr3:185542334-185542570
  hyper

SEQ ID NO: 388037 - DNA, 172 bp, Homo sapiens; identical to SEQ ID NO: 230072
  chr3:185826001-185826173
  hyper

SEQ ID NO: 388038 - DNA, 144 bp, Homo sapiens; identical to SEQ ID NO: 222300
  chr3:187462668-187462812
  hyper

SEQ ID NO: 388039 - DNA, 72 bp, Homo sapiens; identical to SEQ ID NO: 230094
  chr3:187463255-187463327
  hyper

SEQ ID NO: 388040 - DNA, 358 bp, Homo sapiens; identical to SEQ ID NO: 281828
  chr3:189838066-189838424
  hyper

SEQ ID NO: 388041 - DNA, 60 bp, Homo sapiens; identical to SEQ ID NO: 281829
  chr3:189838441-189838501
  hyper

SEQ ID NO: 388042 - DNA, 196 bp, Homo sapiens; identical to SEQ ID NO: 230112
  chr3:193310837-193311033
  hyper

SEQ ID NO: 388043 - DNA, 441 bp, Homo sapiens; identical to SEQ ID NO: 222307
  chr3:193721033-193721474
  hyper

SEQ ID NO: 388044 - DNA, 104 bp, Homo sapiens; identical to SEQ ID NO: 222308
  chr3:193721577-193721681
  hyper

SEQ ID NO: 388045 - DNA, 180 bp, Homo sapiens; identical to SEQ ID NO: 222310
  chr3:193853887-193854067
  hyper

SEQ ID NO: 388046 - DNA, 117 bp, Homo sapiens; identical to SEQ ID NO: 281855
  chr3:194406436-194406553
  hyper

SEQ ID NO: 388047 - DNA, 477 bp, Homo sapiens; identical to SEQ ID NO: 40105
  chr3:194406589-194407066
  hyper

SEQ ID NO: 388048 - DNA, 194 bp, Homo sapiens; identical to SEQ ID NO: 230125
  chr3:194992081-194992275
  hyper

SEQ ID NO: 388049 - DNA, 183 bp, Homo sapiens; identical to SEQ ID NO: 230129
  chr3:195809187-195809370
  hyper

SEQ ID NO: 388050 - DNA, 46 bp, Homo sapiens; identical to SEQ ID NO: 230134
  chr3:196466463-196466509
  hyper

SEQ ID NO: 388051 - DNA, 190 bp, Homo sapiens; identical to SEQ ID NO: 230141
  chr3:197517983-197518173
  hyper

SEQ ID NO: 388052 - DNA, 40 bp, Homo sapiens; identical to SEQ ID NO: 109581
  chr3:197808380-197808420
  hyper

SEQ ID NO: 388053 - DNA, 147 bp, Homo sapiens; identical to SEQ ID NO: 222329
  chr4:667619-667766
  hyper

SEQ ID NO: 388054 - DNA, 309 bp, Homo sapiens; identical to SEQ ID NO: 222331
  chr4:966933-967242
  hyper

SEQ ID NO: 388055 - DNA, 318 bp, Homo sapiens; identical to SEQ ID NO: 281906
  chr4:1049472-1049790
  hyper

SEQ ID NO: 388056 - DNA, 140 bp, Homo sapiens; identical to SEQ ID NO: 199293
  chr4:1243421-1243561
  hyper

SEQ ID NO: 388057 - DNA, 358 bp, Homo sapiens; identical to SEQ ID NO: 383987
  chr4:1397889-1398247
  hyper

SEQ ID NO: 388058 - DNA, 298 bp, Homo sapiens; identical to SEQ ID NO: 281914
  chr4:1398378-1398676
  hyper

SEQ ID NO: 388059 - DNA, 174 bp, Homo sapiens; identical to SEQ ID NO: 383989
  chr4:1794972-1795146
  hyper

SEQ ID NO: 388060 - DNA, 104 bp, Homo sapiens; identical to SEQ ID NO: 222346
  chr4:1828625-1828729
  hyper

SEQ ID NO: 388061 - DNA, 68 bp, Homo sapiens; identical to SEQ ID NO: 230182
  chr4:2421165-2421233
  hyper

SEQ ID NO: 388062 - DNA, 136 bp, Homo sapiens; identical to SEQ ID NO: 199303
  chr4:2965827-2965963
  hyper

SEQ ID NO: 388063 - DNA, 221 bp, Homo sapiens; identical to SEQ ID NO: 281961
  chr4:4859825-4860046
  hyper

SEQ ID NO: 388064 - DNA, 61 bp, Homo sapiens; identical to SEQ ID NO: 281962
  chr4:4860075-4860136
  hyper

SEQ ID NO: 388065 - DNA, 123 bp, Homo sapiens; identical to SEQ ID NO: 383992
  chr4:4861657-4861780
  hyper

SEQ ID NO: 388066 - DNA, 155 bp, Homo sapiens; identical to SEQ ID NO: 230232
  chr4:7070680-7070835
  hyper

SEQ ID NO: 388067 - DNA, 153 bp, Homo sapiens; identical to SEQ ID NO: 282009
  chr4:8874787-8874940
  hyper

SEQ ID NO: 388068 - DNA, 209 bp, Homo sapiens; identical to SEQ ID NO: 199346
  chr4:9684933-9685142
  hyper

SEQ ID NO: 388069 - DNA, 58 bp, Homo sapiens; identical to SEQ ID NO: 199347
  chr4:10089890-10089948
  hyper

SEQ ID NO: 388070 - DNA, 223 bp, Homo sapiens; identical to SEQ ID NO: 230263
  chr4:13486089-13486312
  hyper

SEQ ID NO: 388071 - DNA, 44 bp, Homo sapiens; identical to SEQ ID NO: 199354
  chr4:13550560-13550604
  hyper

SEQ ID NO: 388072 - DNA, 271 bp, Homo sapiens; identical to SEQ ID NO: 230281
  chr4:17616177-17616448
  hyper

SEQ ID NO: 388073 - DNA, 174 bp, Homo sapiens
  chr4:20254519-20254693
  hyper
gcagcagctctcatcctccacttggcctcttggagttcctcgccggagtgctgactagtggatatttctgcccggctgcggcggcccgactgcccttttgtcttttctgcgtgacctcggggcaggtcctggtgcagagcgtcgccaaggacgccgagcgggaggcgggattgc

SEQ ID NO: 388074 - DNA, 207 bp, Homo sapiens; identical to SEQ ID NO: 199365
  chr4:20255120-20255327
  hyper

SEQ ID NO: 388075 - DNA, 436 bp, Homo sapiens; identical to SEQ ID NO: 230292
  chr4:24474654-24475090
  hyper

SEQ ID NO: 388076 - DNA, 68 bp, Homo sapiens; identical to SEQ ID NO: 230303
  chr4:26585707-26585775
  hyper

SEQ ID NO: 388077 - DNA, 182 bp, Homo sapiens; identical to SEQ ID NO: 230304
  chr4:26862030-26862212
  hyper

SEQ ID NO: 388078 - DNA, 107 bp, Homo sapiens; identical to SEQ ID NO: 282087
  chr4:37245430-37245537
  hyper

SEQ ID NO: 388079 - DNA, 126 bp, Homo sapiens; identical to SEQ ID NO: 230322
  chr4:39639612-39639738
  hyper

SEQ ID NO: 388080 - DNA, 61 bp, Homo sapiens; identical to SEQ ID NO: 110024
  chr4:41882651-41882712
  hyper

SEQ ID NO: 388081 - DNA, 177 bp, Homo sapiens; identical to SEQ ID NO: 199398
  chr4:41991961-41992138
  hyper

SEQ ID NO: 388082 - DNA, 207 bp, Homo sapiens; identical to SEQ ID NO: 230359
  chr4:44680670-44680877
  hyper

SEQ ID NO: 388083 - DNA, 400 bp, Homo sapiens; identical to SEQ ID NO: 230369
  chr4:47916484-47916884
  hyper

SEQ ID NO: 388084 - DNA, 256 bp, Homo sapiens; identical to SEQ ID NO: 199411
  chr4:48908455-48908711
  hyper

SEQ ID NO: 388085 - DNA, 207 bp, Homo sapiens; identical to SEQ ID NO: 110080
  chr4:52904505-52904712
  hyper

SEQ ID NO: 388086 - DNA, 65 bp, Homo sapiens; identical to SEQ ID NO: 230384
  chr4:54930698-54930763
  hyper

SEQ ID NO: 388087 - DNA, 175 bp, Homo sapiens; identical to SEQ ID NO: 230385
  chr4:54931050-54931225
  hyper

SEQ ID NO: 388088 - DNA, 75 bp, Homo sapiens; identical to SEQ ID NO: 199422
  chr4:55569950-55570025
  hyper

SEQ ID NO: 388089 - DNA, 54 bp, Homo sapiens; identical to SEQ ID NO: 282184
  chr4:55990892-55990946
  hyper

SEQ ID NO: 388090 - DNA, 91 bp, Homo sapiens; identical to SEQ ID NO: 230406
  chr4:56501808-56501899
  hyper

SEQ ID NO: 388091 - DNA, 301 bp, Homo sapiens; identical to SEQ ID NO: 230408
  chr4:56502563-56502864
  hyper

SEQ ID NO: 388092 - DNA, 126 bp, Homo sapiens; identical to SEQ ID NO: 282196
  chr4:56719667-56719793
  hyper

SEQ ID NO: 388093 - DNA, 419 bp, Homo sapiens; identical to SEQ ID NO: 110145
  chr4:56719823-56720242
  hyper

SEQ ID NO: 388094 - DNA, 177 bp, Homo sapiens; identical to SEQ ID NO: 230412
  chr4:57253559-57253736
  hyper

SEQ ID NO: 388095 - DNA, 66 bp, Homo sapiens; identical to SEQ ID NO: 230424
  chr4:57844898-57844964
  hyper

SEQ ID NO: 388096 - DNA, 217 bp, Homo sapiens; identical to SEQ ID NO: 282231
  chr4:74734859-74735076
  hyper

SEQ ID NO: 388097 - DNA, 177 bp, Homo sapiens; identical to SEQ ID NO: 110211
  chr4:74735193-74735370
  hyper

SEQ ID NO: 388098 - DNA, 357 bp, Homo sapiens
  chr4:74904790-74905147
  hyper
gacttctttagaggaagagagctttgtctccttagttatcagatttgctggggacccggagacaggcgagttttccctcagctatcctctctctatatagtctatcctctatgttaacctcccggtctctgcctctctcattttcggtttagcgttatttcatgtacatctaacatcatgctctctgtgaaagtacagccatcgtctcggattccagagaagaatgttctacttgttccttgttttgcatattctctaatcacacttagaataccttgtttacgttttccatttggtggcaacagattatcagtgtcaaaatttgaattcagtgttagtgtccgtggaagccagggc

SEQ ID NO: 388099 - DNA, 362 bp, Homo sapiens
  chr4:75859572-75859934
  hyper
gattctactcgtgctttagtctgtatatcctccctctgagttcgtcgggttcctacagttgtggacacgagtcgtcgcaatcccttgaaaagaagctagcggttttcaggcagctcacagtgggtaatgcagttataaggaaaagtttcccaacttgaaactatagcgtattttctctacttagtgaacgtccgtctgagaaaacctctttctcgctggtatctcggcacggtttggagacgcgtccgcggacagttcccgaatactcgcaggcggctttggctgcccagcctcgggctgagatgagagagcctaggtccggcaggtgcaataggcagcggagctcccggctggctgcgggt

SEQ ID NO: 388100 - DNA, 472 bp, Homo sapiens; identical to SEQ ID NO: 199460
  chr4:77818185-77818657
  hyper

SEQ ID NO: 388101 - DNA, 131 bp, Homo sapiens; identical to SEQ ID NO: 384011
  chr4:77818754-77818885
  hyper

SEQ ID NO: 388102 - DNA, 111 bp, Homo sapiens; identical to SEQ ID NO: 230468
  chr4:78079532-78079643
  hyper

SEQ ID NO: 388103 - DNA, 578 bp, Homo sapiens; identical to SEQ ID NO: 230471
  chr4:78979792-78980370
  hyper

SEQ ID NO: 388104 - DNA, 100 bp, Homo sapiens; identical to SEQ ID NO: 282265
  chr4:79472691-79472791
  hyper

SEQ ID NO: 388105 - DNA, 86 bp, Homo sapiens; identical to SEQ ID NO: 282266
  chr4:79473111-79473197
  hyper

SEQ ID NO: 388106 - DNA, 283 bp, Homo sapiens; identical to SEQ ID NO: 230493
  chr4:83812351-83812634
  hyper

SEQ ID NO: 388107 - DNA, 234 bp, Homo sapiens; identical to SEQ ID NO: 230494
  chr4:83821698-83821932
  hyper

SEQ ID NO: 388108 - DNA, 267 bp, Homo sapiens; identical to SEQ ID NO: 230497
  chr4:84205947-84206214
  hyper

SEQ ID NO: 388109 - DNA, 571 bp, Homo sapiens; identical to SEQ ID NO: 230498
  chr4:84376736-84377307
  hyper

SEQ ID NO: 388110 - DNA, 441 bp, Homo sapiens; identical to SEQ ID NO: 230524
  chr4:89299895-89300336
  hyper

SEQ ID NO: 388111 - DNA, 234 bp, Homo sapiens; identical to SEQ ID NO: 199492
  chr4:91048333-91048567
  hyper

SEQ ID NO: 388112 - DNA, 91 bp, Homo sapiens; identical to SEQ ID NO: 199493
  chr4:91048568-91048659
  hyper

SEQ ID NO: 388113 - DNA, 71 bp, Homo sapiens; identical to SEQ ID NO: 230541
  chr4:95372822-95372893
  hyper

SEQ ID NO: 388114 - DNA, 49 bp, Homo sapiens; identical to SEQ ID NO: 230549
  chr4:100484871-100484920
  hyper

SEQ ID NO: 388115 - DNA, 119 bp, Homo sapiens; identical to SEQ ID NO: 199510
  chr4:101111126-101111245
  hyper

SEQ ID NO: 388116 - DNA, 216 bp, Homo sapiens; identical to SEQ ID NO: 199511
  chr4:101111971-101112187
  hyper

SEQ ID NO: 388117 - DNA, 406 bp, Homo sapiens; identical to SEQ ID NO: 230562
  chr4:103748279-103748685
  hyper

SEQ ID NO: 388118 - DNA, 203 bp, Homo sapiens; identical to SEQ ID NO: 230565
  chr4:105412285-105412488
  hyper

SEQ ID NO: 388119 - DNA, 105 bp, Homo sapiens; identical to SEQ ID NO: 222450
  chr4:106068588-106068693
  hyper

SEQ ID NO: 388120 - DNA, 107 bp, Homo sapiens; identical to SEQ ID NO: 199528
  chr4:106182911-106183018
  hyper

SEQ ID NO: 388121 - DNA, 3101 bp, Homo sapiens; identical to SEQ ID NO: 199531
  chr4:106196198-106199299
  hyper

SEQ ID NO: 388122 - DNA, 334 bp, Homo sapiens; identical to SEQ ID NO: 230572
  chr4:107237672-107238006
  hyper

SEQ ID NO: 388123 - DNA, 416 bp, Homo sapiens; identical to SEQ ID NO: 199541
  chr4:109092685-109093101
  hyper

SEQ ID NO: 388124 - DNA, 56 bp, Homo sapiens; identical to SEQ ID NO: 384025
  chr4:110343800-110343856
  hyper

SEQ ID NO: 388125 - DNA, 286 bp, Homo sapiens; identical to SEQ ID NO: 230621
  chr4:113558540-113558826
  hyper

SEQ ID NO: 388126 - DNA, 304 bp, Homo sapiens; identical to SEQ ID NO: 199569
  chr4:119200550-119200854
  hyper

SEQ ID NO: 388127 - DNA, 50 bp, Homo sapiens; identical to SEQ ID NO: 230634
  chr4:119757206-119757256
  hyper

SEQ ID NO: 388128 - DNA, 250 bp, Homo sapiens; identical to SEQ ID NO: 230637
  chr4:120133569-120133819
  hyper

SEQ ID NO: 388129 - DNA, 50 bp, Homo sapiens; identical to SEQ ID NO: 199576
  chr4:120221611-120221661
  hyper

SEQ ID NO: 388130 - DNA, 330 bp, Homo sapiens; identical to SEQ ID NO: 230649
  chr4:122744981-122745311
  hyper

SEQ ID NO: 388131 - DNA, 178 bp, Homo sapiens; identical to SEQ ID NO: 199585
  chr4:123653964-123654142
  hyper

SEQ ID NO: 388132 - DNA, 338 bp, Homo sapiens; identical to SEQ ID NO: 230661
  chr4:124319560-124319898
  hyper

SEQ ID NO: 388133 - DNA, 209 bp, Homo sapiens; identical to SEQ ID NO: 282491
  chr4:124426861-124427070
  hyper

SEQ ID NO: 388134 - DNA, 79 bp, Homo sapiens; identical to SEQ ID NO: 282492
  chr4:124427137-124427216
  hyper

SEQ ID NO: 388135 - DNA, 242 bp, Homo sapiens; identical to SEQ ID NO: 282496
  chr4:126236000-126236242
  hyper

SEQ ID NO: 388136 - DNA, 250 bp, Homo sapiens; identical to SEQ ID NO: 282497
  chr4:126237060-126237310
  hyper

SEQ ID NO: 388137 - DNA, 43 bp, Homo sapiens; identical to SEQ ID NO: 199592
  chr4:126237611-126237654
  hyper

SEQ ID NO: 388138 - DNA, 137 bp, Homo sapiens; identical to SEQ ID NO: 199594
  chr4:128703235-128703372
  hyper

SEQ ID NO: 388139 - DNA, 57 bp, Homo sapiens; identical to SEQ ID NO: 199597
  chr4:134067733-134067790
  hyper

SEQ ID NO: 388140 - DNA, 92 bp, Homo sapiens; identical to SEQ ID NO: 230680
  chr4:140005146-140005238
  hyper

SEQ ID NO: 388141 - DNA, 102 bp, Homo sapiens; identical to SEQ ID NO: 199600
  chr4:140097254-140097356
  hyper

SEQ ID NO: 388142 - DNA, 403 bp, Homo sapiens; identical to SEQ ID NO: 230684
  chr4:140222258-140222661
  hyper

SEQ ID NO: 388143 - DNA, 180 bp, Homo sapiens; identical to SEQ ID NO: 222492
  chr4:140587058-140587238
  hyper

SEQ ID NO: 388144 - DNA, 36 bp, Homo sapiens; identical to SEQ ID NO: 230687
  chr4:140969978-140970014
  hyper

SEQ ID NO: 388145 - DNA, 469 bp, Homo sapiens; identical to SEQ ID NO: 222495
  chr4:141074043-141074512
  hyper

SEQ ID NO: 388146 - DNA, 224 bp, Homo sapiens; identical to SEQ ID NO: 282535
  chr4:141348840-141349064
  hyper

SEQ ID NO: 388147 - DNA, 383 bp, Homo sapiens; identical to SEQ ID NO: 230706
  chr4:144256959-144257342
  hyper

SEQ ID NO: 388148 - DNA, 147 bp, Homo sapiens; identical to SEQ ID NO: 230707
  chr4:144258528-144258675
  hyper

SEQ ID NO: 388149 - DNA, 270 bp, Homo sapiens; identical to SEQ ID NO: 230708
  chr4:144434324-144434594
  hyper

SEQ ID NO: 388150 - DNA, 43 bp, Homo sapiens; identical to SEQ ID NO: 199626
  chr4:147443081-147443124
  hyper

SEQ ID NO: 388151 - DNA, 33 bp, Homo sapiens; identical to SEQ ID NO: 199629
  chr4:148538935-148538968
  hyper

SEQ ID NO: 388152 - DNA, 271 bp, Homo sapiens; identical to SEQ ID NO: 282591
  chr4:154710914-154711185
  hyper

SEQ ID NO: 388153 - DNA, 178 bp, Homo sapiens; identical to SEQ ID NO: 199659
  chr4:157891924-157892102
  hyper

SEQ ID NO: 388154 - DNA, 129 bp, Homo sapiens; identical to SEQ ID NO: 230768
  chr4:159593505-159593634
  hyper

SEQ ID NO: 388155 - DNA, 79 bp, Homo sapiens; identical to SEQ ID NO: 230777
  chr4:166248060-166248139
  hyper

SEQ ID NO: 388156 - DNA, 467 bp, Homo sapiens; identical to SEQ ID NO: 230783
  chr4:169401169-169401636
  hyper

SEQ ID NO: 388157 - DNA, 178 bp, Homo sapiens; identical to SEQ ID NO: 230787
  chr4:169931434-169931612
  hyper

SEQ ID NO: 388158 - DNA, 260 bp, Homo sapiens
  chr4:170946845-170947105
  hyper
gagagcttcagtagcgaggcggcggctcgcagcacccacagccgcccgcactcctgcggcatcaggacacggcgccctcccgacgcggaacccgcattcacgttctccggagccctggccagcgcacgctcctccctgtccgggtaaactgaggcacagcgatgagagagatccagagcccagcgaaagcccccacggctgttcggcgtccccttcccccacgacacctaggaggctcgccggcagctggcagtggattc

SEQ ID NO: 388159 - DNA, 42 bp, Homo sapiens; identical to SEQ ID NO: 230795
  chr4:174254798-174254840
  hyper

SEQ ID NO: 388160 - DNA, 514 bp, Homo sapiens; identical to SEQ ID NO: 230797
  chr4:174415375-174415889
  hyper

SEQ ID NO: 388161 - DNA, 76 bp, Homo sapiens; identical to SEQ ID NO: 282650
  chr4:174429791-174429867
  hyper

SEQ ID NO: 388162 - DNA, 43 bp, Homo sapiens; identical to SEQ ID NO: 110864
  chr4:174429949-174429992
  hyper

SEQ ID NO: 388163 - DNA, 398 bp, Homo sapiens; identical to SEQ ID NO: 110869
  chr4:174439053-174439451
  hyper

SEQ ID NO: 388164 - DNA, 236 bp, Homo sapiens; identical to SEQ ID NO: 230826
  chr4:178363508-178363744
  hyper

SEQ ID NO: 388165 - DNA, 126 bp, Homo sapiens; identical to SEQ ID NO: 230827
  chr4:178363969-178364095
  hyper

SEQ ID NO: 388166 - DNA, 211 bp, Homo sapiens; identical to SEQ ID NO: 282679
  chr4:183063455-183063666
  hyper

SEQ ID NO: 388167 - DNA, 429 bp, Homo sapiens; identical to SEQ ID NO: 282680
  chr4:183065517-183065946
  hyper

SEQ ID NO: 388168 - DNA, 318 bp, Homo sapiens; identical to SEQ ID NO: 282681
  chr4:183066306-183066624
  hyper

SEQ ID NO: 388169 - DNA, 321 bp, Homo sapiens; identical to SEQ ID NO: 282688
  chr4:184328290-184328611
  hyper

SEQ ID NO: 388170 - DNA, 36 bp, Homo sapiens; identical to SEQ ID NO: 230836
  chr4:184365599-184365635
  hyper

SEQ ID NO: 388171 - DNA, 191 bp, Homo sapiens; identical to SEQ ID NO: 230845
  chr4:185938975-185939166
  hyper

SEQ ID NO: 388172 - DNA, 254 bp, Homo sapiens; identical to SEQ ID NO: 384052
  chr4:186456473-186456727
  hyper

SEQ ID NO: 388173 - DNA, 285 bp, Homo sapiens; identical to SEQ ID NO: 199726
  chr5:374579-374864
  hyper

SEQ ID NO: 388174 - DNA, 370 bp, Homo sapiens
  chr5:1064042-1064412
  hyper
gtccacctgggccacggtgaagatacgcatccggcacttcctccacacctgcagacagggagggcatggctgtggggcctcagaggagcccgtcccggcccgcagcacgtggggtggccgtgctccggctggcgtgtccccgtcgcacgccccaccttgtgctggcgcagcaggaagggcagcagcatgagcatgccgccgtcgtgcacgatccaccacacgtcgatgtggcccccgccgaagcgctcctggttttgcggaaacgagtcgacgttcttggccaccagcagagcctggtgcgcggcggtggtgtcgcggacggtgtctgcggagagaggcggccgtccgcaggtcatctgaggccagggtg

SEQ ID NO: 388175 - DNA, 105 bp, Homo sapiens; identical to SEQ ID NO: 222563
  chr5:1294071-1294176
  hyper

SEQ ID NO: 388176 - DNA, 89 bp, Homo sapiens; identical to SEQ ID NO: 282760
  chr5:1882047-1882136
  hyper

SEQ ID NO: 388177 - DNA, 99 bp, Homo sapiens; identical to SEQ ID NO: 111084
  chr5:2741122-2741221
  hyper

SEQ ID NO: 388178 - DNA, 208 bp, Homo sapiens; identical to SEQ ID NO: 282771
  chr5:3590903-3591111
  hyper

SEQ ID NO: 388179 - DNA, 94 bp, Homo sapiens; identical to SEQ ID NO: 199747
  chr5:3591458-3591552
  hyper

SEQ ID NO: 388180 - DNA, 79 bp, Homo sapiens; identical to SEQ ID NO: 282774
  chr5:3592384-3592463
  hyper

SEQ ID NO: 388181 - DNA, 302 bp, Homo sapiens; identical to SEQ ID NO: 282775
  chr5:3592881-3593183
  hyper

SEQ ID NO: 388182 - DNA, 85 bp, Homo sapiens; identical to SEQ ID NO: 282786
  chr5:7851299-7851384
  hyper

SEQ ID NO: 388183 - DNA, 629 bp, Homo sapiens
  chr5:10441676-10442305
  hyper
cgcccaggcgatcagccccttcacttaacccgcttccctcctagcaggcccgagtcccctagcctcagcctcacgcagccagagcaaggggaagagggagtccttcgtgagttcgccgctcacattcggcggtgggaaaccgatccgaagatgcttttgtaggcgaaacgctcagctcgcgcggctctgaaccaccggggagcagcggctgctgctagtcggactacgccagcacctccttgtccagcccgggagcagccccgcctcgctcagggccgcgtgcgcgtgcgcggctccaggggcggggcctgctcgcgtcccgggtgcctggataccgagcgcgtccgtagtggcggctggcgctagggaactgcagggtctagggtgttgtcggagtggcagttggtccgaatttctcccgaagcccgcggaggagcgggtaagagccccgcgaatccggccccaacctcgggaacgggatgggaggcggccctggccgcaagccccgcgctgctagcgggtccaccgcgtcgtagccgacagccgcccttcttcctcgcagcgcgccgcgattcaccagcctggtcccttctgcggagagcgatgccgcttcccgacaccatgttctg

SEQ ID NO: 388184 - DNA, 170 bp, Homo sapiens; identical to SEQ ID NO: 199758
  chr5:10988184-10988354
  hyper

SEQ ID NO: 388185 - DNA, 58 bp, Homo sapiens; identical to SEQ ID NO: 199761
  chr5:14108555-14108613
  hyper

SEQ ID NO: 388186 - DNA, 53 bp, Homo sapiens; identical to SEQ ID NO: 199762
  chr5:14108840-14108893
  hyper

SEQ ID NO: 388187 - DNA, 94 bp, Homo sapiens; identical to SEQ ID NO: 230950
  chr5:14810079-14810173
  hyper

SEQ ID NO: 388188 - DNA, 31 bp, Homo sapiens; identical to SEQ ID NO: 384061
  chr5:17217142-17217173
  hyper

SEQ ID NO: 388189 - DNA, 76 bp, Homo sapiens; identical to SEQ ID NO: 199779
  chr5:17987028-17987104
  hyper

SEQ ID NO: 388190 - DNA, 193 bp, Homo sapiens; identical to SEQ ID NO: 230975
  chr5:34007307-34007500
  hyper

SEQ ID NO: 388191 - DNA, 88 bp, Homo sapiens; identical to SEQ ID NO: 230981
  chr5:34929946-34930034
  hyper

SEQ ID NO: 388192 - DNA, 175 bp, Homo sapiens; identical to SEQ ID NO: 282853
  chr5:36066734-36066909
  hyper

SEQ ID NO: 388193 - DNA, 316 bp, Homo sapiens; identical to SEQ ID NO: 230994
  chr5:37370926-37371242
  hyper

SEQ ID NO: 388194 - DNA, 42 bp, Homo sapiens; identical to SEQ ID NO: 199804
  chr5:39424510-39424552
  hyper

SEQ ID NO: 388195 - DNA, 343 bp, Homo sapiens; identical to SEQ ID NO: 231012
  chr5:41904222-41904565
  hyper

SEQ ID NO: 388196 - DNA, 316 bp, Homo sapiens; identical to SEQ ID NO: 231013
  chr5:41925471-41925787
  hyper

SEQ ID NO: 388197 - DNA, 34 bp, Homo sapiens; identical to SEQ ID NO: 199816
  chr5:42993813-42993847
  hyper

SEQ ID NO: 388198 - DNA, 349 bp, Homo sapiens; identical to SEQ ID NO: 231028
  chr5:43041474-43041823
  hyper

SEQ ID NO: 388199 - DNA, 36 bp, Homo sapiens; identical to SEQ ID NO: 231031
  chr5:43120913-43120949
  hyper

SEQ ID NO: 388200 - DNA, 32 bp, Homo sapiens; identical to SEQ ID NO: 231032
  chr5:43121558-43121590
  hyper

SEQ ID NO: 388201 - DNA, 274 bp, Homo sapiens; identical to SEQ ID NO: 199829
  chr5:44389052-44389326
  hyper

SEQ ID NO: 388202 - DNA, 57 bp, Homo sapiens; identical to SEQ ID NO: 282927
  chr5:50694660-50694717
  hyper

SEQ ID NO: 388203 - DNA, 205 bp, Homo sapiens; identical to SEQ ID NO: 282928
  chr5:50695463-50695668
  hyper

SEQ ID NO: 388204 - DNA, 107 bp, Homo sapiens; identical to SEQ ID NO: 199840
  chr5:52776321-52776428
  hyper

SEQ ID NO: 388205 - DNA, 232 bp, Homo sapiens; identical to SEQ ID NO: 199843
  chr5:53813366-53813598
  hyper

SEQ ID NO: 388206 - DNA, 480 bp, Homo sapiens; identical to SEQ ID NO: 222613
  chr5:57755480-57755960
  hyper

SEQ ID NO: 388207 - DNA, 74 bp, Homo sapiens; identical to SEQ ID NO: 231094
  chr5:61708381-61708455
  hyper

SEQ ID NO: 388208 - DNA, 359 bp, Homo sapiens
  chr5:63255343-63255702
  hyper
gcagtaagtaagtggcgatgtcaggtcgtacacactcgccagctacctgtacaaacagcgtccgctctctccactgtatgattgtcagtttctttggtgagtgctgacaccaaggcaagcataaacaaagtggtctgcacaccctcctcctccttgctctcccccactggcccggccttgtacttacaagtccactctaaaagataccttctagccacttgctttgagtccaaggaaacaaaggaaataggggttgtgcactgcacgagagagttaatctcaagtctgcgagaagacggggaatcccgggggcaccgctggcacggggaaaagcagcctcttccgcctctccggaccag

SEQ ID NO: 388209 - DNA, 63 bp, Homo sapiens; identical to SEQ ID NO: 231098
  chr5:63462188-63462251
  hyper

SEQ ID NO: 388210 - DNA, 162 bp, Homo sapiens; identical to SEQ ID NO: 231105
  chr5:64920140-64920302
  hyper

SEQ ID NO: 388211 - DNA, 162 bp, Homo sapiens; identical to SEQ ID NO: 199876
  chr5:65017234-65017396
  hyper

SEQ ID NO: 388212 - DNA, 47 bp, Homo sapiens; identical to SEQ ID NO: 231110
  chr5:65891728-65891775
  hyper

SEQ ID NO: 388213 - DNA, 189 bp, Homo sapiens; identical to SEQ ID NO: 199878
  chr5:66124999-66125188
  hyper

SEQ ID NO: 388214 - DNA, 41 bp, Homo sapiens; identical to SEQ ID NO: 199880
  chr5:68179341-68179382
  hyper

SEQ ID NO: 388215 - DNA, 229 bp, Homo sapiens; identical to SEQ ID NO: 231119
  chr5:71616291-71616520
  hyper

SEQ ID NO: 388216 - DNA, 49 bp, Homo sapiens; identical to SEQ ID NO: 111542
  chr5:72678365-72678414
  hyper

SEQ ID NO: 388217 - DNA, 123 bp, Homo sapiens; identical to SEQ ID NO: 222625
  chr5:73936774-73936897
  hyper

SEQ ID NO: 388218 - DNA, 103 bp, Homo sapiens; identical to SEQ ID NO: 199897
  chr5:74162616-74162719
  hyper

SEQ ID NO: 388219 - DNA, 106 bp, Homo sapiens; identical to SEQ ID NO: 231178
  chr5:76938270-76938376
  hyper

SEQ ID NO: 388220 - DNA, 48 bp, Homo sapiens
  chr5:77591340-77591388
  hyper
ctcaaaaaaatgaaaaagaaaagaaaacatcttggggccaccagttcc

SEQ ID NO: 388221 - DNA, 68 bp, Homo sapiens; identical to SEQ ID NO: 231186
  chr5:77656465-77656533
  hyper

SEQ ID NO: 388222 - DNA, 50 bp, Homo sapiens; identical to SEQ ID NO: 283080
  chr5:77805996-77806046
  hyper

SEQ ID NO: 388223 - DNA, 76 bp, Homo sapiens; identical to SEQ ID NO: 283081
  chr5:77806320-77806396
  hyper

SEQ ID NO: 388224 - DNA, 122 bp, Homo sapiens; identical to SEQ ID NO: 199917
  chr5:78281720-78281842
  hyper

SEQ ID NO: 388225 - DNA, 365 bp, Homo sapiens; identical to SEQ ID NO: 283131
  chr5:87987787-87988152
  hyper

SEQ ID NO: 388226 - DNA, 67 bp, Homo sapiens; identical to SEQ ID NO: 283132
  chr5:87988651-87988718
  hyper

SEQ ID NO: 388227 - DNA, 43 bp, Homo sapiens; identical to SEQ ID NO: 199942
  chr5:89770671-89770714
  hyper

SEQ ID NO: 388228 - DNA, 62 bp, Homo sapiens; identical to SEQ ID NO: 231254
  chr5:92943194-92943256
  hyper

SEQ ID NO: 388229 - DNA, 382 bp, Homo sapiens; identical to SEQ ID NO: 231259
  chr5:93954161-93954543
  hyper

SEQ ID NO: 388230 - DNA, 152 bp, Homo sapiens; identical to SEQ ID NO: 231261
  chr5:94890673-94890825
  hyper

SEQ ID NO: 388231 - DNA, 236 bp, Homo sapiens; identical to SEQ ID NO: 283168
  chr5:95768384-95768620
  hyper

SEQ ID NO: 388232 - DNA, 208 bp, Homo sapiens; identical to SEQ ID NO: 199957
  chr5:98108684-98108892
  hyper

SEQ ID NO: 388233 - DNA, 263 bp, Homo sapiens; identical to SEQ ID NO: 222648
  chr5:98109927-98110190
  hyper

SEQ ID NO: 388234 - DNA, 224 bp, Homo sapiens; identical to SEQ ID NO: 199963
  chr5:100240289-100240513
  hyper

SEQ ID NO: 388235 - DNA, 125 bp, Homo sapiens; identical to SEQ ID NO: 199968
  chr5:107005046-107005171
  hyper

SEQ ID NO: 388236 - DNA, 102 bp, Homo sapiens; identical to SEQ ID NO: 199971
  chr5:107007963-107008065
  hyper

SEQ ID NO: 388237 - DNA, 214 bp, Homo sapiens; identical to SEQ ID NO: 231295
  chr5:110428255-110428469
  hyper

SEQ ID NO: 388238 - DNA, 110 bp, Homo sapiens
  chr5:110848376-110848486
  hyper
gtgtggagggctgattggtggccgataaatggaatgattccgcgtgggtgtgggctggcccgagccgcgccagggttccctggatgtctggggttgcctgcaggtttgga

SEQ ID NO: 388239 - DNA, 99 bp, Homo sapiens; identical to SEQ ID NO: 111818
  chr5:111496549-111496648
  hyper

SEQ ID NO: 388240 - DNA, 163 bp, Homo sapiens; identical to SEQ ID NO: 222664
  chr5:114938164-114938327
  hyper

SEQ ID NO: 388241 - DNA, 146 bp, Homo sapiens; identical to SEQ ID NO: 199994
  chr5:115421021-115421167
  hyper

SEQ ID NO: 388242 - DNA, 77 bp, Homo sapiens; identical to SEQ ID NO: 231345
  chr5:122621428-122621505
  hyper

SEQ ID NO: 388243 - DNA, 52 bp, Homo sapiens; identical to SEQ ID NO: 231346
  chr5:122759250-122759302
  hyper

SEQ ID NO: 388244 - DNA, 79 bp, Homo sapiens; identical to SEQ ID NO: 231367
  chr5:130971007-130971086
  hyper

SEQ ID NO: 388245 - DNA, 66 bp, Homo sapiens; identical to SEQ ID NO: 283283
  chr5:131131878-131131944
  hyper

SEQ ID NO: 388246 - DNA, 390 bp, Homo sapiens; identical to SEQ ID NO: 283285
  chr5:131347237-131347627
  hyper

SEQ ID NO: 388247 - DNA, 154 bp, Homo sapiens; identical to SEQ ID NO: 231391
  chr5:133968282-133968436
  hyper

SEQ ID NO: 388248 - DNA, 49 bp, Homo sapiens; identical to SEQ ID NO: 283317
  chr5:134376163-134376212
  hyper

SEQ ID NO: 388249 - DNA, 182 bp, Homo sapiens; identical to SEQ ID NO: 283318
  chr5:134376375-134376557
  hyper

SEQ ID NO: 388250 - DNA, 216 bp, Homo sapiens; identical to SEQ ID NO: 222687
  chr5:134463608-134463824
  hyper

SEQ ID NO: 388251 - DNA, 60 bp, Homo sapiens; identical to SEQ ID NO: 231431
  chr5:137910697-137910757
  hyper

SEQ ID NO: 388252 - DNA, 376 bp, Homo sapiens; identical to SEQ ID NO: 231433
  chr5:138609205-138609581
  hyper

SEQ ID NO: 388253 - DNA, 124 bp, Homo sapiens; identical to SEQ ID NO: 231434
  chr5:138677832-138677956
  hyper

SEQ ID NO: 388254 - DNA, 1077 bp, Homo sapiens
  chr5:139016945-139018022
  hyper
ccccctcagccgctgtgcccctttgcgggtcagtgtgttgtttgacctcggccgcgggtgcccccacccctgccggccccgccgcccctcccccgcaccgtccgcccgcgccgcgcggcgatcgatcgccattgattgtccctgacgagctgctccactttccagccaatgtcaggaggggggatctccgccgccctggcggtgtcatttccacacactccctgggctgccgccagcgcgggcgcctcgaagagccggcctggatcgcccggagctcgggctggaccgcccacaccgcgcgaggaagcccccgatggcgtggcccgaccccagtctgccggcctgcccgccctaggcctctgcacccaagcccccttcccagcgctggtggatgttgtcaccacaggagtttaagctgggccgggtatggggagggacgctgtgtcgggtgcgccctgcgcttgccctggtgggggcgcggggctgtttccggcgggcggaggcgccagcaggccaactttgccgcggcccaaacagatgctaatgattttccgggaggcgccggttatctctggccccagccggccggtgtgctgggactgggctcccggcacagacaccacctcgccccccaccctcaccctcctgagccccacctaataaccacttgtccccgagtggacgggttgggggggcgtcggggggagtccgcaggctgccccgggtgtcctggaactgttgctgtgtgggattatttgcgcctcctccacccaggatgctaccgtctttctgagcacttcgcaaagccaaacacacacccgagcacgggaaactgaggttcatagaagctcggcccaaggtcatgccgacccattccctgctcagctgagtgggtcaccctctgaaaaccatcccgtcggaggacccgcagccccctgtccccttctcgctcaggggcctgagccagtttccagactccccggttggaagtgctgacgtggctctgggcagctgtctggggccgggaagcggggcagatgtcacgcagcccaggggaggaggcggctccgcggggag

SEQ ID NO: 388255 - DNA, 64 bp, Homo sapiens; identical to SEQ ID NO: 200058
  chr5:139039951-139040015
  hyper

SEQ ID NO: 388256 - DNA, 61 bp, Homo sapiens; identical to SEQ ID NO: 200061
  chr5:139091111-139091172
  hyper

SEQ ID NO: 388257 - DNA, 111 bp, Homo sapiens; identical to SEQ ID NO: 231453
  chr5:139682661-139682772
  hyper

SEQ ID NO: 388258 - DNA, 63 bp, Homo sapiens; identical to SEQ ID NO: 222706
  chr5:139725675-139725738
  hyper

SEQ ID NO: 388259 - DNA, 169 bp, Homo sapiens; identical to SEQ ID NO: 231454
  chr5:139726535-139726704
  hyper

SEQ ID NO: 388260 - DNA, 134 bp, Homo sapiens
  chr5:141030966-141031100
  hyper
ctccggaactggaggaagccccgcccactatggagccccgccccaggccaggtcaggccccgccctctgcccgcccacgacttgtccggcgacgtcgcagggcgcggaagcgagagggggccaccgagaaacta

SEQ ID NO: 388261 - DNA, 80 bp, Homo sapiens; identical to SEQ ID NO: 200078
  chr5:141031150-141031230
  hyper

SEQ ID NO: 388262 - DNA, 68 bp, Homo sapiens; identical to SEQ ID NO: 231478
  chr5:141061849-141061917
  hyper

SEQ ID NO: 388263 - DNA, 881 bp, Homo sapiens; identical to SEQ ID NO: 283402
  chr5:141257149-141258030
  hyper

SEQ ID NO: 388264 - DNA, 202 bp, Homo sapiens; identical to SEQ ID NO: 231499
  chr5:145718089-145718291
  hyper

SEQ ID NO: 388265 - DNA, 87 bp, Homo sapiens; identical to SEQ ID NO: 283438
  chr5:149109659-149109746
  hyper

SEQ ID NO: 388266 - DNA, 192 bp, Homo sapiens; identical to SEQ ID NO: 112268
  chr5:149109802-149109994
  hyper

SEQ ID NO: 388267 - DNA, 36 bp, Homo sapiens; identical to SEQ ID NO: 283464
  chr5:153853519-153853555
  hyper

SEQ ID NO: 388268 - DNA, 166 bp, Homo sapiens; identical to SEQ ID NO: 231565
  chr5:158758339-158758505
  hyper

SEQ ID NO: 388269 - DNA, 73 bp, Homo sapiens; identical to SEQ ID NO: 283501
  chr5:159615598-159615671
  hyper

SEQ ID NO: 388270 - DNA, 43 bp, Homo sapiens; identical to SEQ ID NO: 283514
  chr5:161275109-161275152
  hyper

SEQ ID NO: 388271 - DNA, 223 bp, Homo sapiens; identical to SEQ ID NO: 283515
  chr5:161275590-161275813
  hyper

SEQ ID NO: 388272 - DNA, 357 bp, Homo sapiens; identical to SEQ ID NO: 231583
  chr5:162887185-162887542
  hyper

SEQ ID NO: 388273 - DNA, 118 bp, Homo sapiens; identical to SEQ ID NO: 200138
  chr5:162930156-162930274
  hyper

SEQ ID NO: 388274 - DNA, 63 bp, Homo sapiens; identical to SEQ ID NO: 200139
  chr5:162930320-162930383
  hyper

SEQ ID NO: 388275 - DNA, 152 bp, Homo sapiens; identical to SEQ ID NO: 200142
  chr5:167000608-167000760
  hyper

SEQ ID NO: 388276 - DNA, 236 bp, Homo sapiens; identical to SEQ ID NO: 222740
  chr5:167718952-167719188
  hyper

SEQ ID NO: 388277 - DNA, 134 bp, Homo sapiens; identical to SEQ ID NO: 231597
  chr5:169010586-169010720
  hyper

SEQ ID NO: 388278 - DNA, 105 bp, Homo sapiens; identical to SEQ ID NO: 231609
  chr5:170744958-170745063
  hyper

SEQ ID NO: 388279 - DNA, 115 bp, Homo sapiens; identical to SEQ ID NO: 231611
  chr5:170814440-170814555
  hyper

SEQ ID NO: 388280 - DNA, 93 bp, Homo sapiens; identical to SEQ ID NO: 283545
  chr5:172068057-172068150
  hyper

SEQ ID NO: 388281 - DNA, 92 bp, Homo sapiens; identical to SEQ ID NO: 222749
  chr5:172444179-172444271
  hyper

SEQ ID NO: 388282 - DNA, 274 bp, Homo sapiens; identical to SEQ ID NO: 231621
  chr5:172483102-172483376
  hyper

SEQ ID NO: 388283 - DNA, 259 bp, Homo sapiens; identical to SEQ ID NO: 283558
  chr5:172663579-172663838
  hyper

SEQ ID NO: 388284 - DNA, 32 bp, Homo sapiens; identical to SEQ ID NO: 231643
  chr5:174147150-174147182
  hyper

SEQ ID NO: 388285 - DNA, 208 bp, Homo sapiens; identical to SEQ ID NO: 283581
  chr5:174159593-174159801
  hyper

SEQ ID NO: 388286 - DNA, 82 bp, Homo sapiens; identical to SEQ ID NO: 283595
  chr5:176046196-176046278
  hyper

SEQ ID NO: 388287 - DNA, 294 bp, Homo sapiens; identical to SEQ ID NO: 200189
  chr5:176738658-176738952
  hyper

SEQ ID NO: 388288 - DNA, 210 bp, Homo sapiens; identical to SEQ ID NO: 231682
  chr5:176853271-176853481
  hyper

SEQ ID NO: 388289 - DNA, 50 bp, Homo sapiens; identical to SEQ ID NO: 200191
  chr5:177019030-177019080
  hyper

SEQ ID NO: 388290 - DNA, 59 bp, Homo sapiens; identical to SEQ ID NO: 231691
  chr5:177558239-177558298
  hyper

SEQ ID NO: 388291 - DNA, 311 bp, Homo sapiens; identical to SEQ ID NO: 231695
  chr5:177706982-177707293
  hyper

SEQ ID NO: 388292 - DNA, 64 bp, Homo sapiens; identical to SEQ ID NO: 283627
  chr5:178054094-178054158
  hyper

SEQ ID NO: 388293 - DNA, 149 bp, Homo sapiens; identical to SEQ ID NO: 112631
  chr5:178054178-178054327
  hyper

SEQ ID NO: 388294 - DNA, 295 bp, Homo sapiens; identical to SEQ ID NO: 283630
  chr5:178322844-178323139
  hyper

SEQ ID NO: 388295 - DNA, 271 bp, Homo sapiens; identical to SEQ ID NO: 283631
  chr5:178323249-178323520
  hyper

SEQ ID NO: 388296 - DNA, 48 bp, Homo sapiens; identical to SEQ ID NO: 231708
  chr5:179233842-179233890
  hyper

SEQ ID NO: 388297 - DNA, 147 bp, Homo sapiens; identical to SEQ ID NO: 222772
  chr5:179234473-179234620
  hyper

SEQ ID NO: 388298 - DNA, 512 bp, Homo sapiens; identical to SEQ ID NO: 231734
  chr5:180670801-180671313
  hyper

SEQ ID NO: 388299 - DNA, 152 bp, Homo sapiens; identical to SEQ ID NO: 384116
  chr6:1610664-1610816
  hyper

SEQ ID NO: 388300 - DNA, 334 bp, Homo sapiens; identical to SEQ ID NO: 200232
  chr6:1610864-1611198
  hyper

SEQ ID NO: 388301 - DNA, 183 bp, Homo sapiens; identical to SEQ ID NO: 231756
  chr6:1612303-1612486
  hyper

SEQ ID NO: 388302 - DNA, 134 bp, Homo sapiens; identical to SEQ ID NO: 283697
  chr6:1619970-1620104
  hyper

SEQ ID NO: 388303 - DNA, 168 bp, Homo sapiens; identical to SEQ ID NO: 231761
  chr6:2764960-2765128
  hyper

SEQ ID NO: 388304 - DNA, 205 bp, Homo sapiens; identical to SEQ ID NO: 231764
  chr6:3118559-3118764
  hyper

SEQ ID NO: 388305 - DNA, 79 bp, Homo sapiens
  chr6:6000060-6000139
  hyper
ttctgttccccacttcctcttcctccttcccacaacctgcctggatcctccttgctctccacagttcccggctcagatt

SEQ ID NO: 388306 - DNA, 31 bp, Homo sapiens; identical to SEQ ID NO: 200270
  chr6:10414549-10414580
  hyper

SEQ ID NO: 388307 - DNA, 180 bp, Homo sapiens; identical to SEQ ID NO: 231809
  chr6:10529013-10529193
  hyper

SEQ ID NO: 388308 - DNA, 83 bp, Homo sapiens; identical to SEQ ID NO: 283778
  chr6:13488595-13488678
  hyper

SEQ ID NO: 388309 - DNA, 150 bp, Homo sapiens; identical to SEQ ID NO: 231825
  chr6:14117386-14117536
  hyper

SEQ ID NO: 388310 - DNA, 227 bp, Homo sapiens; identical to SEQ ID NO: 231827
  chr6:16129890-16130117
  hyper

SEQ ID NO: 388311 - DNA, 252 bp, Homo sapiens; identical to SEQ ID NO: 231830
  chr6:16761654-16761906
  hyper

SEQ ID NO: 388312 - DNA, 324 bp, Homo sapiens; identical to SEQ ID NO: 200307
  chr6:20401055-20401379
  hyper

SEQ ID NO: 388313 - DNA, 262 bp, Homo sapiens; identical to SEQ ID NO: 231854
  chr6:24403465-24403727
  hyper

SEQ ID NO: 388314 - DNA, 213 bp, Homo sapiens; identical to SEQ ID NO: 231859
  chr6:25278942-25279155
  hyper

SEQ ID NO: 388315 - DNA, 178 bp, Homo sapiens; identical to SEQ ID NO: 283832
  chr6:26021528-26021706
  hyper

SEQ ID NO: 388316 - DNA, 110 bp, Homo sapiens; identical to SEQ ID NO: 283833
  chr6:26022178-26022288
  hyper

SEQ ID NO: 388317 - DNA, 35 bp, Homo sapiens; identical to SEQ ID NO: 200319
  chr6:26032843-26032878
  hyper

SEQ ID NO: 388318 - DNA, 231 bp, Homo sapiens; identical to SEQ ID NO: 231869
  chr6:26056526-26056757
  hyper

SEQ ID NO: 388319 - DNA, 118 bp, Homo sapiens; identical to SEQ ID NO: 200351
  chr6:26383468-26383586
  hyper

SEQ ID NO: 388320 - DNA, 43 bp, Homo sapiens; identical to SEQ ID NO: 200362
  chr6:27100142-27100185
  hyper

SEQ ID NO: 388321 - DNA, 118 bp, Homo sapiens; identical to SEQ ID NO: 231927
  chr6:27101539-27101657
  hyper

SEQ ID NO: 388322 - DNA, 38 bp, Homo sapiens; identical to SEQ ID NO: 283909
  chr6:27248068-27248106
  hyper

SEQ ID NO: 388323 - DNA, 31 bp, Homo sapiens; identical to SEQ ID NO: 231958
  chr6:27561177-27561208
  hyper

SEQ ID NO: 388324 - DNA, 65 bp, Homo sapiens; identical to SEQ ID NO: 200398
  chr6:28109924-28109989
  hyper

SEQ ID NO: 388325 - DNA, 191 bp, Homo sapiens; identical to SEQ ID NO: 200400
  chr6:28220077-28220268
  hyper

SEQ ID NO: 388326 - DNA, 43 bp, Homo sapiens; identical to SEQ ID NO: 200410
  chr6:34113557-34113600
  hyper

SEQ ID NO: 388327 - DNA, 215 bp, Homo sapiens; identical to SEQ ID NO: 222843
  chr6:34359521-34359736
  hyper

SEQ ID NO: 388328 - DNA, 113 bp, Homo sapiens; identical to SEQ ID NO: 232022
  chr6:36354418-36354531
  hyper

SEQ ID NO: 388329 - DNA, 343 bp, Homo sapiens; identical to SEQ ID NO: 232028
  chr6:36646212-36646555
  hyper

SEQ ID NO: 388330 - DNA, 129 bp, Homo sapiens; identical to SEQ ID NO: 232029
  chr6:36703003-36703132
  hyper

SEQ ID NO: 388331 - DNA, 126 bp, Homo sapiens; identical to SEQ ID NO: 283994
  chr6:36954119-36954245
  hyper

SEQ ID NO: 388332 - DNA, 232 bp, Homo sapiens
  chr6:41340475-41340707
  hyper
tcacaaaggtgacttgaccaaggtcgtggagctaaaaaccgaggaggagaaactgaaacccaaggcgaccaaacaccaaacccaaagagcttaaccgcttcgctgccccggctcaggcaaggtcaaagctaaggtatgataactctggcaggagaaagtctgttttcctacgtggtagaaagtccttgggcccgccacgacccttcccccatcccggccgctggggcaccgg

SEQ ID NO: 388333 - DNA, 68 bp, Homo sapiens; identical to SEQ ID NO: 232062
  chr6:41513949-41514017
  hyper

SEQ ID NO: 388334 - DNA, 123 bp, Homo sapiens; identical to SEQ ID NO: 232066
  chr6:41754978-41755101
  hyper

SEQ ID NO: 388335 - DNA, 50 bp, Homo sapiens; identical to SEQ ID NO: 113330
  chr6:42072647-42072697
  hyper

SEQ ID NO: 388336 - DNA, 125 bp, Homo sapiens; identical to SEQ ID NO: 222857
  chr6:43081636-43081761
  hyper

SEQ ID NO: 388337 - DNA, 75 bp, Homo sapiens; identical to SEQ ID NO: 232092
  chr6:43337694-43337769
  hyper

SEQ ID NO: 388338 - DNA, 252 bp, Homo sapiens; identical to SEQ ID NO: 232095
  chr6:43543534-43543786
  hyper

SEQ ID NO: 388339 - DNA, 126 bp, Homo sapiens; identical to SEQ ID NO: 232096
  chr6:43597011-43597137
  hyper

SEQ ID NO: 388340 - DNA, 141 bp, Homo sapiens; identical to SEQ ID NO: 232097
  chr6:43597646-43597787
  hyper

SEQ ID NO: 388341 - DNA, 195 bp, Homo sapiens; identical to SEQ ID NO: 232129
  chr6:50785153-50785348
  hyper

SEQ ID NO: 388342 - DNA, 124 bp, Homo sapiens; identical to SEQ ID NO: 284111
  chr6:50814599-50814723
  hyper

SEQ ID NO: 388343 - DNA, 405 bp, Homo sapiens; identical to SEQ ID NO: 232149
  chr6:52284759-52285164
  hyper

SEQ ID NO: 388344 - DNA, 186 bp, Homo sapiens; identical to SEQ ID NO: 232156
  chr6:53224377-53224563
  hyper

SEQ ID NO: 388345 - DNA, 282 bp, Homo sapiens; identical to SEQ ID NO: 222871
  chr6:53409809-53410091
  hyper

SEQ ID NO: 388346 - DNA, 197 bp, Homo sapiens; identical to SEQ ID NO: 284139
  chr6:58149331-58149528
  hyper

SEQ ID NO: 388347 - DNA, 78 bp, Homo sapiens; identical to SEQ ID NO: 232183
  chr6:71377331-71377409
  hyper

SEQ ID NO: 388348 - DNA, 91 bp, Homo sapiens; identical to SEQ ID NO: 284168
  chr6:75914015-75914106
  hyper

SEQ ID NO: 388349 - DNA, 303 bp, Homo sapiens; identical to SEQ ID NO: 284169
  chr6:75914158-75914461
  hyper

SEQ ID NO: 388350 - DNA, 106 bp, Homo sapiens; identical to SEQ ID NO: 200508
  chr6:75914599-75914705
  hyper

SEQ ID NO: 388351 - DNA, 143 bp, Homo sapiens; identical to SEQ ID NO: 200509
  chr6:75914738-75914881
  hyper

SEQ ID NO: 388352 - DNA, 526 bp, Homo sapiens; identical to SEQ ID NO: 232205
  chr6:79788062-79788588
  hyper

SEQ ID NO: 388353 - DNA, 165 bp, Homo sapiens; identical to SEQ ID NO: 232212
  chr6:80816657-80816822
  hyper

SEQ ID NO: 388354 - DNA, 215 bp, Homo sapiens; identical to SEQ ID NO: 200532
  chr6:83775565-83775780
  hyper

SEQ ID NO: 388355 - DNA, 91 bp, Homo sapiens; identical to SEQ ID NO: 232216
  chr6:83902912-83903003
  hyper

SEQ ID NO: 388356 - DNA, 196 bp, Homo sapiens; identical to SEQ ID NO: 232217
  chr6:83903545-83903741
  hyper

SEQ ID NO: 388357 - DNA, 71 bp, Homo sapiens; identical to SEQ ID NO: 200533
  chr6:84419415-84419486
  hyper

SEQ ID NO: 388358 - DNA, 145 bp, Homo sapiens; identical to SEQ ID NO: 222892
  chr6:87832386-87832531
  hyper

SEQ ID NO: 388359 - DNA, 251 bp, Homo sapiens; identical to SEQ ID NO: 232241
  chr6:88117490-88117741
  hyper

SEQ ID NO: 388360 - DNA, 332 bp, Homo sapiens; identical to SEQ ID NO: 284237
  chr6:89827121-89827453
  hyper

SEQ ID NO: 388361 - DNA, 319 bp, Homo sapiens; identical to SEQ ID NO: 222896
  chr6:90062632-90062951
  hyper

SEQ ID NO: 388362 - DNA, 149 bp, Homo sapiens; identical to SEQ ID NO: 232256
  chr6:90529581-90529730
  hyper

SEQ ID NO: 388363 - DNA, 245 bp, Homo sapiens; identical to SEQ ID NO: 232257
  chr6:90539225-90539470
  hyper

SEQ ID NO: 388364 - DNA, 241 bp, Homo sapiens; identical to SEQ ID NO: 384148
  chr6:99273607-99273848
  hyper

SEQ ID NO: 388365 - DNA, 126 bp, Homo sapiens; identical to SEQ ID NO: 200572
  chr6:99273901-99274027
  hyper

SEQ ID NO: 388366 - DNA, 74 bp, Homo sapiens; identical to SEQ ID NO: 200608
  chr6:107780253-107780327
  hyper

SEQ ID NO: 388367 - DNA, 349 bp, Homo sapiens; identical to SEQ ID NO: 284341
  chr6:108436829-108437178
  hyper

SEQ ID NO: 388368 - DNA, 179 bp, Homo sapiens; identical to SEQ ID NO: 284342
  chr6:108438577-108438756
  hyper

SEQ ID NO: 388369 - DNA, 216 bp, Homo sapiens; identical to SEQ ID NO: 284348
  chr6:108491987-108492203
  hyper

SEQ ID NO: 388370 - DNA, 429 bp, Homo sapiens; identical to SEQ ID NO: 200619
  chr6:109777177-109777606
  hyper

SEQ ID NO: 388371 - DNA, 48 bp, Homo sapiens; identical to SEQ ID NO: 232370
  chr6:111580350-111580398
  hyper

SEQ ID NO: 388372 - DNA, 31 bp, Homo sapiens; identical to SEQ ID NO: 232377
  chr6:114178491-114178522
  hyper

SEQ ID NO: 388373 - DNA, 199 bp, Homo sapiens; identical to SEQ ID NO: 200627
  chr6:114662113-114662312
  hyper

SEQ ID NO: 388374 - DNA, 351 bp, Homo sapiens; identical to SEQ ID NO: 284391
  chr6:117197786-117198137
  hyper

SEQ ID NO: 388375 - DNA, 205 bp, Homo sapiens; identical to SEQ ID NO: 284392
  chr6:117198339-117198544
  hyper

SEQ ID NO: 388376 - DNA, 184 bp, Homo sapiens; identical to SEQ ID NO: 200630
  chr6:117198574-117198758
  hyper

SEQ ID NO: 388377 - DNA, 703 bp, Homo sapiens; identical to SEQ ID NO: 222918
  chr6:117803613-117804316
  hyper

SEQ ID NO: 388378 - DNA, 40 bp, Homo sapiens; identical to SEQ ID NO: 222921
  chr6:119762016-119762056
  hyper

SEQ ID NO: 388379 - DNA, 105 bp, Homo sapiens; identical to SEQ ID NO: 222922
  chr6:123110275-123110380
  hyper

SEQ ID NO: 388380 - DNA, 240 bp, Homo sapiens; identical to SEQ ID NO: 232411
  chr6:124123917-124124157
  hyper

SEQ ID NO: 388381 - DNA, 53 bp, Homo sapiens; identical to SEQ ID NO: 232427
  chr6:127468330-127468383
  hyper

SEQ ID NO: 388382 - DNA, 209 bp, Homo sapiens; identical to SEQ ID NO: 200655
  chr6:132271777-132271986
  hyper

SEQ ID NO: 388383 - DNA, 194 bp, Homo sapiens; identical to SEQ ID NO: 284458
  chr6:132721835-132722029
  hyper

SEQ ID NO: 388384 - DNA, 536 bp, Homo sapiens; identical to SEQ ID NO: 232451
  chr6:134212582-134213118
  hyper

SEQ ID NO: 388385 - DNA, 142 bp, Homo sapiens; identical to SEQ ID NO: 200657
  chr6:134216762-134216904
  hyper

SEQ ID NO: 388386 - DNA, 369 bp, Homo sapiens; identical to SEQ ID NO: 200658
  chr6:134217001-134217370
  hyper

SEQ ID NO: 388387 - DNA, 77 bp, Homo sapiens; identical to SEQ ID NO: 200659
  chr6:134217461-134217538
  hyper

SEQ ID NO: 388388 - DNA, 445 bp, Homo sapiens; identical to SEQ ID NO: 232458
  chr6:135502364-135502809
  hyper

SEQ ID NO: 388389 - DNA, 210 bp, Homo sapiens; identical to SEQ ID NO: 232463
  chr6:136610843-136611053
  hyper

SEQ ID NO: 388390 - DNA, 535 bp, Homo sapiens; identical to SEQ ID NO: 222937
  chr6:136870742-136871277
  hyper

SEQ ID NO: 388391 - DNA, 44 bp, Homo sapiens; identical to SEQ ID NO: 232471
  chr6:137365286-137365330
  hyper

SEQ ID NO: 388392 - DNA, 86 bp, Homo sapiens; identical to SEQ ID NO: 232481
  chr6:138428363-138428449
  hyper

SEQ ID NO: 388393 - DNA, 236 bp, Homo sapiens; identical to SEQ ID NO: 232491
  chr6:139349617-139349853
  hyper

SEQ ID NO: 388394 - DNA, 447 bp, Homo sapiens; identical to SEQ ID NO: 232496
  chr6:139695584-139696031
  hyper

SEQ ID NO: 388395 - DNA, 458 bp, Homo sapiens; identical to SEQ ID NO: 232506
  chr6:143771538-143771996
  hyper

SEQ ID NO: 388396 - DNA, 358 bp, Homo sapiens; identical to SEQ ID NO: 200685
  chr6:144384552-144384910
  hyper

SEQ ID NO: 388397 - DNA, 304 bp, Homo sapiens; identical to SEQ ID NO: 232513
  chr6:146285325-146285629
  hyper

SEQ ID NO: 388398 - DNA, 189 bp, Homo sapiens; identical to SEQ ID NO: 232522
  chr6:149637867-149638056
  hyper

SEQ ID NO: 388399 - DNA, 48 bp, Homo sapiens; identical to SEQ ID NO: 232523
  chr6:149867345-149867393
  hyper

SEQ ID NO: 388400 - DNA, 135 bp, Homo sapiens; identical to SEQ ID NO: 200701
  chr6:150072001-150072136
  hyper

SEQ ID NO: 388401 - DNA, 648 bp, Homo sapiens; identical to SEQ ID NO: 232532
  chr6:150259501-150260149
  hyper

SEQ ID NO: 388402 - DNA, 659 bp, Homo sapiens; identical to SEQ ID NO: 284557
  chr6:150262844-150263503
  hyper

SEQ ID NO: 388403 - DNA, 70 bp, Homo sapiens; identical to SEQ ID NO: 232539
  chr6:150336633-150336703
  hyper

SEQ ID NO: 388404 - DNA, 82 bp, Homo sapiens; identical to SEQ ID NO: 200706
  chr6:150920982-150921064
  hyper

SEQ ID NO: 388405 - DNA, 244 bp, Homo sapiens; identical to SEQ ID NO: 200716
  chr6:154360330-154360574
  hyper

SEQ ID NO: 388406 - DNA, 59 bp, Homo sapiens; identical to SEQ ID NO: 200718
  chr6:157802884-157802943
  hyper

SEQ ID NO: 388407 - DNA, 58 bp, Homo sapiens; identical to SEQ ID NO: 232573
  chr6:160112589-160112647
  hyper

SEQ ID NO: 388408 - DNA, 163 bp, Homo sapiens; identical to SEQ ID NO: 232590
  chr6:166188884-166189047
  hyper

SEQ ID NO: 388409 - DNA, 33 bp, Homo sapiens; identical to SEQ ID NO: 200752
  chr6:168227910-168227943
  hyper

SEQ ID NO: 388410 - DNA, 33 bp, Homo sapiens; identical to SEQ ID NO: 200754
  chr6:168228539-168228572
  hyper

SEQ ID NO: 388411 - DNA, 329 bp, Homo sapiens; identical to SEQ ID NO: 284652
  chr6:168842518-168842847
  hyper

SEQ ID NO: 388412 - DNA, 136 bp, Homo sapiens; identical to SEQ ID NO: 232621
  chr6:170615733-170615869
  hyper

SEQ ID NO: 388413 - DNA, 43 bp, Homo sapiens; identical to SEQ ID NO: 200760
  chr6:170862217-170862260
  hyper

SEQ ID NO: 388414 - DNA, 274 bp, Homo sapiens; identical to SEQ ID NO: 222996
  chr7:1069695-1069969
  hyper

SEQ ID NO: 388415 - DNA, 46 bp, Homo sapiens; identical to SEQ ID NO: 284711
  chr7:1279053-1279099
  hyper

SEQ ID NO: 388416 - DNA, 119 bp, Homo sapiens; identical to SEQ ID NO: 200783
  chr7:1283941-1284060
  hyper

SEQ ID NO: 388417 - DNA, 283 bp, Homo sapiens
  chr7:1707336-1707619
  hyper
ccgccccgttaactccgggactccgccgccctccaggttccaacctcccagcttcaccgccgcgtcctctccccggttctgggtctgggggaggggcagggggcgtggagcgcggcgttgggccccggacagatgtcctcgcggcggcggcgccggcgtccgggtaacagcaggccgccaatcggcgcggccacgggggaggggcgacccggccgggactccggggactcggtcgcagccggacggcgcagcctccgctcggggtggggggggggggcggccg

SEQ ID NO: 388418 - DNA, 46 bp, Homo sapiens; identical to SEQ ID NO: 232667
  chr7:2018721-2018767
  hyper

SEQ ID NO: 388419 - DNA, 359 bp, Homo sapiens; identical to SEQ ID NO: 232669
  chr7:2443784-2444143
  hyper

SEQ ID NO: 388420 - DNA, 77 bp, Homo sapiens; identical to SEQ ID NO: 223010
  chr7:2555344-2555421
  hyper

SEQ ID NO: 388421 - DNA, 203 bp, Homo sapiens; identical to SEQ ID NO: 200798
  chr7:5085238-5085441
  hyper

SEQ ID NO: 388422 - DNA, 83 bp, Homo sapiens; identical to SEQ ID NO: 232684
  chr7:5125291-5125374
  hyper

SEQ ID NO: 388423 - DNA, 880 bp, Homo sapiens; identical to SEQ ID NO: 200799
  chr7:5459600-5460480
  hyper

SEQ ID NO: 388424 - DNA, 859 bp, Homo sapiens; identical to SEQ ID NO: 284756
  chr7:5460573-5461432
  hyper

SEQ ID NO: 388425 - DNA, 54 bp, Homo sapiens; identical to SEQ ID NO: 284763
  chr7:5526404-5526458
  hyper

SEQ ID NO: 388426 - DNA, 120 bp, Homo sapiens; identical to SEQ ID NO: 232693
  chr7:5595699-5595819
  hyper

SEQ ID NO: 388427 - DNA, 148 bp, Homo sapiens; identical to SEQ ID NO: 232697
  chr7:6098848-6098996
  hyper

SEQ ID NO: 388428 - DNA, 233 bp, Homo sapiens; identical to SEQ ID NO: 232724
  chr7:12250503-12250736
  hyper

SEQ ID NO: 388429 - DNA, 1160 bp, Homo sapiens; identical to SEQ ID NO: 200824
  chr7:12726287-12727447
  hyper

SEQ ID NO: 388430 - DNA, 49 bp, Homo sapiens
  chr7:20826049-20826098
  hyper
ggaagaatctgcactttgcccagaaggaaaaacttgctctctttacccc

SEQ ID NO: 388431 - DNA, 40 bp, Homo sapiens; identical to SEQ ID NO: 284839
  chr7:20828444-20828484
  hyper

SEQ ID NO: 388432 - DNA, 51 bp, Homo sapiens; identical to SEQ ID NO: 232762
  chr7:22143358-22143409
  hyper

SEQ ID NO: 388433 - DNA, 55 bp, Homo sapiens; identical to SEQ ID NO: 232775
  chr7:24323662-24323717
  hyper

SEQ ID NO: 388434 - DNA, 302 bp, Homo sapiens; identical to SEQ ID NO: 232778
  chr7:24612554-24612856
  hyper

SEQ ID NO: 388435 - DNA, 96 bp, Homo sapiens; identical to SEQ ID NO: 232782
  chr7:25165221-25165317
  hyper

SEQ ID NO: 388436 - DNA, 181 bp, Homo sapiens; identical to SEQ ID NO: 232792
  chr7:25935087-25935268
  hyper

SEQ ID NO: 388437 - DNA, 252 bp, Homo sapiens; identical to SEQ ID NO: 232797
  chr7:26240889-26241141
  hyper

SEQ ID NO: 388438 - DNA, 477 bp, Homo sapiens; identical to SEQ ID NO: 284901
  chr7:27191584-27192061
  hyper

SEQ ID NO: 388439 - DNA, 45 bp, Homo sapiens
  chr7:27192098-27192143
  hyper
ggccggggcttcccttcgctcgccatctccggacaaagcacagcc

SEQ ID NO: 388440 - DNA, 281 bp, Homo sapiens; identical to SEQ ID NO: 200896
  chr7:27227348-27227629
  hyper

SEQ ID NO: 388441 - DNA, 632 bp, Homo sapiens; identical to SEQ ID NO: 284913
  chr7:27228044-27228676
  hyper

SEQ ID NO: 388442 - DNA, 263 bp, Homo sapiens; identical to SEQ ID NO: 200934
  chr7:31375702-31375965
  hyper

SEQ ID NO: 388443 - DNA, 109 bp, Homo sapiens; identical to SEQ ID NO: 200935
  chr7:31376218-31376327
  hyper

SEQ ID NO: 388444 - DNA, 55 bp, Homo sapiens; identical to SEQ ID NO: 284973
  chr7:35298172-35298227
  hyper

SEQ ID NO: 388445 - DNA, 119 bp, Homo sapiens; identical to SEQ ID NO: 114938
  chr7:40174877-40174996
  hyper

SEQ ID NO: 388446 - DNA, 232 bp, Homo sapiens; identical to SEQ ID NO: 232907
  chr7:44240366-44240598
  hyper

SEQ ID NO: 388447 - DNA, 191 bp, Homo sapiens; identical to SEQ ID NO: 232911
  chr7:44645927-44646118
  hyper

SEQ ID NO: 388448 - DNA, 623 bp, Homo sapiens; identical to SEQ ID NO: 223093
  chr7:45026005-45026628
  hyper

SEQ ID NO: 388449 - DNA, 180 bp, Homo sapiens; identical to SEQ ID NO: 285025
  chr7:45961576-45961756
  hyper

SEQ ID NO: 388450 - DNA, 277 bp, Homo sapiens; identical to SEQ ID NO: 285026
  chr7:45961974-45962251
  hyper

SEQ ID NO: 388451 - DNA, 199 bp, Homo sapiens; identical to SEQ ID NO: 285044
  chr7:54731845-54732044
  hyper

SEQ ID NO: 388452 - DNA, 46 bp, Homo sapiens; identical to SEQ ID NO: 285059
  chr7:64030435-64030481
  hyper

SEQ ID NO: 388453 - DNA, 135 bp, Homo sapiens; identical to SEQ ID NO: 285066
  chr7:64700148-64700283
  hyper

SEQ ID NO: 388454 - DNA, 178 bp, Homo sapiens; identical to SEQ ID NO: 232978
  chr7:77325999-77326177
  hyper

SEQ ID NO: 388455 - DNA, 31 bp, Homo sapiens; identical to SEQ ID NO: 201028
  chr7:87104710-87104741
  hyper

SEQ ID NO: 388456 - DNA, 247 bp, Homo sapiens; identical to SEQ ID NO: 201045
  chr7:92463701-92463948
  hyper

SEQ ID NO: 388457 - DNA, 205 bp, Homo sapiens; identical to SEQ ID NO: 223143
  chr7:92464934-92465139
  hyper

SEQ ID NO: 388458 - DNA, 46 bp, Homo sapiens; identical to SEQ ID NO: 384190
  chr7:93203796-93203842
  hyper

SEQ ID NO: 388459 - DNA, 180 bp, Homo sapiens; identical to SEQ ID NO: 223145
  chr7:95064267-95064447
  hyper

SEQ ID NO: 388460 - DNA, 202 bp, Homo sapiens; identical to SEQ ID NO: 285177
  chr7:96626212-96626414
  hyper

SEQ ID NO: 388461 - DNA, 117 bp, Homo sapiens; identical to SEQ ID NO: 285184
  chr7:96639201-96639318
  hyper

SEQ ID NO: 388462 - DNA, 150 bp, Homo sapiens; identical to SEQ ID NO: 285185
  chr7:96639348-96639498
  hyper

SEQ ID NO: 388463 - DNA, 188 bp, Homo sapiens; identical to SEQ ID NO: 201057
  chr7:97361999-97362187
  hyper

SEQ ID NO: 388464 - DNA, 51 bp, Homo sapiens; identical to SEQ ID NO: 233060
  chr7:98030099-98030150
  hyper

SEQ ID NO: 388465 - DNA, 231 bp, Homo sapiens; identical to SEQ ID NO: 233064
  chr7:99006252-99006483
  hyper

SEQ ID NO: 388466 - DNA, 127 bp, Homo sapiens; identical to SEQ ID NO: 115320
  chr7:99097908-99098035
  hyper

SEQ ID NO: 388467 - DNA, 74 bp, Homo sapiens; identical to SEQ ID NO: 223155
  chr7:99613133-99613207
  hyper

SEQ ID NO: 388468 - DNA, 140 bp, Homo sapiens; identical to SEQ ID NO: 201066
  chr7:99679773-99679913
  hyper

SEQ ID NO: 388469 - DNA, 334 bp, Homo sapiens; identical to SEQ ID NO: 285212
  chr7:99698203-99698537
  hyper

SEQ ID NO: 388470 - DNA, 226 bp, Homo sapiens; identical to SEQ ID NO: 233075
  chr7:99699434-99699660
  hyper

SEQ ID NO: 388471 - DNA, 169 bp, Homo sapiens; identical to SEQ ID NO: 285215
  chr7:99725637-99725806
  hyper

SEQ ID NO: 388472 - DNA, 188 bp, Homo sapiens; identical to SEQ ID NO: 233087
  chr7:100424341-100424529
  hyper

SEQ ID NO: 388473 - DNA, 159 bp, Homo sapiens; identical to SEQ ID NO: 223164
  chr7:101457610-101457769
  hyper

SEQ ID NO: 388474 - DNA, 66 bp, Homo sapiens; identical to SEQ ID NO: 201105
  chr7:101842081-101842147
  hyper

SEQ ID NO: 388475 - DNA, 845 bp, Homo sapiens; identical to SEQ ID NO: 201107
  chr7:101844639-101845484
  hyper

SEQ ID NO: 388476 - DNA, 303 bp, Homo sapiens; identical to SEQ ID NO: 201110
  chr7:101870646-101870949
  hyper

SEQ ID NO: 388477 - DNA, 65 bp, Homo sapiens; identical to SEQ ID NO: 201121
  chr7:101926003-101926068
  hyper

SEQ ID NO: 388478 - DNA, 346 bp, Homo sapiens; identical to SEQ ID NO: 233112
  chr7:102104793-102105139
  hyper

SEQ ID NO: 388479 - DNA, 87 bp, Homo sapiens; identical to SEQ ID NO: 233116
  chr7:102985260-102985347
  hyper

SEQ ID NO: 388480 - DNA, 278 bp, Homo sapiens; identical to SEQ ID NO: 233126
  chr7:104654732-104655010
  hyper

SEQ ID NO: 388481 - DNA, 137 bp, Homo sapiens; identical to SEQ ID NO: 201127
  chr7:105331662-105331799
  hyper

SEQ ID NO: 388482 - DNA, 186 bp, Homo sapiens; identical to SEQ ID NO: 201134
  chr7:107302345-107302531
  hyper

SEQ ID NO: 388483 - DNA, 94 bp, Homo sapiens; identical to SEQ ID NO: 233137
  chr7:107383748-107383842
  hyper

SEQ ID NO: 388484 - DNA, 89 bp, Homo sapiens; identical to SEQ ID NO: 233139
  chr7:107531675-107531764
  hyper

SEQ ID NO: 388485 - DNA, 71 bp, Homo sapiens; identical to SEQ ID NO: 384205
  chr7:107642740-107642811
  hyper

SEQ ID NO: 388486 - DNA, 76 bp, Homo sapiens; identical to SEQ ID NO: 201138
  chr7:107643995-107644071
  hyper

SEQ ID NO: 388487 - DNA, 253 bp, Homo sapiens; identical to SEQ ID NO: 233149
  chr7:112579978-112580231
  hyper

SEQ ID NO: 388488 - DNA, 41 bp, Homo sapiens; identical to SEQ ID NO: 201150
  chr7:115850424-115850465
  hyper

SEQ ID NO: 388489 - DNA, 548 bp, Homo sapiens; identical to SEQ ID NO: 201158
  chr7:120497836-120498384
  hyper

SEQ ID NO: 388490 - DNA, 532 bp, Homo sapiens; identical to SEQ ID NO: 201159
  chr7:120628558-120629090
  hyper

SEQ ID NO: 388491 - DNA, 130 bp, Homo sapiens; identical to SEQ ID NO: 201162
  chr7:121513393-121513523
  hyper

SEQ ID NO: 388492 - DNA, 67 bp, Homo sapiens; identical to SEQ ID NO: 233180
  chr7:121943301-121943368
  hyper

SEQ ID NO: 388493 - DNA, 46 bp, Homo sapiens; identical to SEQ ID NO: 201173
  chr7:124405510-124405556
  hyper

SEQ ID NO: 388494 - DNA, 219 bp, Homo sapiens; identical to SEQ ID NO: 285387
  chr7:124406227-124406446
  hyper

SEQ ID NO: 388495 - DNA, 251 bp, Homo sapiens; identical to SEQ ID NO: 233209
  chr7:128001888-128002139
  hyper

SEQ ID NO: 388496 - DNA, 104 bp, Homo sapiens; identical to SEQ ID NO: 223223
  chr7:128509606-128509710
  hyper

SEQ ID NO: 388497 - DNA, 318 bp, Homo sapiens; identical to SEQ ID NO: 233218
  chr7:128695028-128695346
  hyper

SEQ ID NO: 388498 - DNA, 95 bp, Homo sapiens; identical to SEQ ID NO: 233234
  chr7:131012269-131012364
  hyper

SEQ ID NO: 388499 - DNA, 176 bp, Homo sapiens; identical to SEQ ID NO: 233260
  chr7:138666618-138666794
  hyper

SEQ ID NO: 388500 - DNA, 437 bp, Homo sapiens; identical to SEQ ID NO: 223234
  chr7:139478051-139478488
  hyper

SEQ ID NO: 388501 - DNA, 86 bp, Homo sapiens; identical to SEQ ID NO: 233271
  chr7:140373221-140373307
  hyper

SEQ ID NO: 388502 - DNA, 37 bp, Homo sapiens; identical to SEQ ID NO: 233272
  chr7:140624448-140624485
  hyper

SEQ ID NO: 388503 - DNA, 308 bp, Homo sapiens; identical to SEQ ID NO: 233284
  chr7:143599064-143599372
  hyper

SEQ ID NO: 388504 - DNA, 257 bp, Homo sapiens; identical to SEQ ID NO: 223241
  chr7:144100839-144101096
  hyper

SEQ ID NO: 388505 - DNA, 152 bp, Homo sapiens; identical to SEQ ID NO: 201215
  chr7:145981901-145982053
  hyper

SEQ ID NO: 388506 - DNA, 71 bp, Homo sapiens; identical to SEQ ID NO: 201219
  chr7:148508741-148508812
  hyper

SEQ ID NO: 388507 - DNA, 184 bp, Homo sapiens; identical to SEQ ID NO: 201220
  chr7:148511050-148511234
  hyper

SEQ ID NO: 388508 - DNA, 34 bp, Homo sapiens; identical to SEQ ID NO: 201222
  chr7:148513818-148513852
  hyper

SEQ ID NO: 388509 - DNA, 76 bp, Homo sapiens; identical to SEQ ID NO: 201224
  chr7:148515086-148515162
  hyper

SEQ ID NO: 388510 - DNA, 185 bp, Homo sapiens; identical to SEQ ID NO: 233299
  chr7:149535232-149535417
  hyper

SEQ ID NO: 388511 - DNA, 588 bp, Homo sapiens; identical to SEQ ID NO: 285530
  chr7:150864924-150865512
  hyper

SEQ ID NO: 388512 - DNA, 252 bp, Homo sapiens; identical to SEQ ID NO: 233326
  chr7:150929281-150929533
  hyper

SEQ ID NO: 388513 - DNA, 119 bp, Homo sapiens; identical to SEQ ID NO: 233338
  chr7:152373449-152373568
  hyper

SEQ ID NO: 388514 - DNA, 65 bp, Homo sapiens; identical to SEQ ID NO: 201249
  chr7:154705761-154705826
  hyper

SEQ ID NO: 388515 - DNA, 338 bp, Homo sapiens; identical to SEQ ID NO: 201263
  chr7:156792492-156792830
  hyper

SEQ ID NO: 388516 - DNA, 49 bp, Homo sapiens
  chr7:156803673-156803722
  hyper
gcccaagacccgctcccgagacacgtgggcccctccggacttggttggt

SEQ ID NO: 388517 - DNA, 818 bp, Homo sapiens; identical to SEQ ID NO: 285585
  chr7:156803796-156804614
  hyper

SEQ ID NO: 388518 - DNA, 333 bp, Homo sapiens; identical to SEQ ID NO: 201270
  chr7:157130634-157130967
  hyper

SEQ ID NO: 388519 - DNA, 93 bp, Homo sapiens; identical to SEQ ID NO: 285610
  chr8:495072-495165
  hyper

SEQ ID NO: 388520 - DNA, 167 bp, Homo sapiens; identical to SEQ ID NO: 223304
  chr8:8750284-8750451
  hyper

SEQ ID NO: 388521 - DNA, 139 bp, Homo sapiens; identical to SEQ ID NO: 223305
  chr8:8750520-8750659
  hyper

SEQ ID NO: 388522 - DNA, 174 bp, Homo sapiens; identical to SEQ ID NO: 201300
  chr8:11536631-11536805
  hyper

SEQ ID NO: 388523 - DNA, 200 bp, Homo sapiens
  chr8:11537283-11537483
  hyper
gagggagatggagacccccgaataatggaaacgcagaagcctcagagacaccagcaacagatagagaagtgtccctaagaggggaaaatgaggaagagggtaacagtattgttaactggccatgaattttaatccctgttgtgtgtcgccgaatagtttacaaactctttttgcactggggttttgtttctcccactccc

SEQ ID NO: 388524 - DNA, 290 bp, Homo sapiens; identical to SEQ ID NO: 285661
  chr8:11557848-11558138
  hyper

SEQ ID NO: 388525 - DNA, 220 bp, Homo sapiens; identical to SEQ ID NO: 201314
  chr8:15095136-15095356
  hyper

SEQ ID NO: 388526 - DNA, 128 bp, Homo sapiens; identical to SEQ ID NO: 201317
  chr8:17013473-17013601
  hyper

SEQ ID NO: 388527 - DNA, 363 bp, Homo sapiens
  chr8:17434563-17434926
  hyper
caggagaagtcacattacacagagaactaaaaaaaaaaaaaattccccaactttttcccccaaaccttgttcctcctgaagaaaccgaatcctcccgcttcggcgtcccaggagcccgcccctcgcccgccgcctcccctgcgtccccgccccgcgcagccgccgcgctcctgcgctccgaggtccgaggttcccgagatgaaggtctggctgctgcttggtcttctgctggtgcacgaagcgctggaggatggtgagtgactctgggcgcggggccacctagcttgtgccctgactttagccgggacccgaagcccccgccgccctcctgccagctcttggtctaacgttcggccctcggtg

SEQ ID NO: 388528 - DNA, 56 bp, Homo sapiens; identical to SEQ ID NO: 285693
  chr8:19615264-19615320
  hyper

SEQ ID NO: 388529 - DNA, 241 bp, Homo sapiens; identical to SEQ ID NO: 233483
  chr8:21776837-21777078
  hyper

SEQ ID NO: 388530 - DNA, 124 bp, Homo sapiens; identical to SEQ ID NO: 201326
  chr8:21906319-21906443
  hyper

SEQ ID NO: 388531 - DNA, 100 bp, Homo sapiens; identical to SEQ ID NO: 201327
  chr8:21987761-21987861
  hyper

SEQ ID NO: 388532 - DNA, 337 bp, Homo sapiens; identical to SEQ ID NO: 201328
  chr8:21988075-21988412
  hyper

SEQ ID NO: 388533 - DNA, 206 bp, Homo sapiens; identical to SEQ ID NO: 201329
  chr8:21988468-21988674
  hyper

SEQ ID NO: 388534 - DNA, 78 bp, Homo sapiens; identical to SEQ ID NO: 384230
  chr8:22408681-22408759
  hyper

SEQ ID NO: 388535 - DNA, 44 bp, Homo sapiens
  chr8:22409076-22409120
  hyper
gccagccctgcggtaggggccgggatggcagctgggaaaccaga

SEQ ID NO: 388536 - DNA, 217 bp, Homo sapiens; identical to SEQ ID NO: 223331
  chr8:22550331-22550548
  hyper

SEQ ID NO: 388537 - DNA, 309 bp, Homo sapiens; identical to SEQ ID NO: 223333
  chr8:22925472-22925781
  hyper

SEQ ID NO: 388538 - DNA, 201 bp, Homo sapiens; identical to SEQ ID NO: 285730
  chr8:23261046-23261247
  hyper

SEQ ID NO: 388539 - DNA, 76 bp, Homo sapiens; identical to SEQ ID NO: 285731
  chr8:23261271-23261347
  hyper

SEQ ID NO: 388540 - DNA, 144 bp, Homo sapiens; identical to SEQ ID NO: 233506
  chr8:23386286-23386430
  hyper

SEQ ID NO: 388541 - DNA, 47 bp, Homo sapiens; identical to SEQ ID NO: 233508
  chr8:23540842-23540889
  hyper

SEQ ID NO: 388542 - DNA, 60 bp, Homo sapiens; identical to SEQ ID NO: 201342
  chr8:23572273-23572333
  hyper

SEQ ID NO: 388543 - DNA, 121 bp, Homo sapiens; identical to SEQ ID NO: 285741
  chr8:24272711-24272832
  hyper

SEQ ID NO: 388544 - DNA, 144 bp, Homo sapiens; identical to SEQ ID NO: 285758
  chr8:25902185-25902329
  hyper

SEQ ID NO: 388545 - DNA, 43 bp, Homo sapiens; identical to SEQ ID NO: 384236
  chr8:26372150-26372193
  hyper

SEQ ID NO: 388546 - DNA, 64 bp, Homo sapiens; identical to SEQ ID NO: 223345
  chr8:26435020-26435084
  hyper

SEQ ID NO: 388547 - DNA, 38 bp, Homo sapiens; identical to SEQ ID NO: 285784
  chr8:27449813-27449851
  hyper

SEQ ID NO: 388548 - DNA, 181 bp, Homo sapiens; identical to SEQ ID NO: 285785
  chr8:27449881-27450062
  hyper

SEQ ID NO: 388549 - DNA, 31 bp, Homo sapiens; identical to SEQ ID NO: 233555
  chr8:27950284-27950315
  hyper

SEQ ID NO: 388550 - DNA, 126 bp, Homo sapiens; identical to SEQ ID NO: 201369
  chr8:28560085-28560211
  hyper

SEQ ID NO: 388551 - DNA, 84 bp, Homo sapiens; identical to SEQ ID NO: 201375
  chr8:30241417-30241501
  hyper

SEQ ID NO: 388552 - DNA, 240 bp, Homo sapiens
  chr8:30241612-30241852
  hyper
tagggccaggggtgcaaatccctcggtaaaagccggcaaactaaaagtcgcacacatcccaggtcccggtccaggccccggcggggcagggtccccgaagtcccggggcgcgcagacgccggggcccccgggggccaagggaacggcgggacccgacctccctgccctcggcctcccgggccctcgccctccgaccagccgctgagtcgggggctggggtcgccgcttccgcccgcggcc

SEQ ID NO: 388553 - DNA, 598 bp, Homo sapiens
  chr8:30242032-30242630
  hyper
agctgcttccatcccggacttcccagagcctgcctggagcgcgtactcagcggctctcgggtcccagcgtcccagccgcggcccgcgctcctccgccccgctcctcctcctcctcttcctcctcctcctcctctctaggcacccccgtcccctccttccagcggctgcagcccccagccccaactctccgcgcttactcctgggacgcgcgtcctcgccccatcctttgcttccttccttccttccttcttccttcctcccctggctcccgccctccctctccaggtcgccctcccggggcccgattgtctcggtgccccgctcccggcccgcgccctgccccgtctctcccttgcacttcctgagtcgcccgccgccgccgtcgcagactcgccgcgggagccccagcccaacccgagcccgacagccactgccccggctccagctccagccccacagcccgcggcgcccgcccgagggagccccggcgcccggggaaggctccagtgggctagcgcgccctcgcccagccccgcgccccagccctgcccggcccggcgaggaaggaccgggaagatgaacaacggcggcaaagccg

SEQ ID NO: 388554 - DNA, 152 bp, Homo sapiens
  chr8:30242697-30242849
  hyper
gcgggggcgacgcgggacccagtgcgggcggccggcggggcgcgggcccggggcgcggcggtggaagaaggttcaggcatggcccgtgccccggacgcagccccacagtgtggcccggggagggtggatctcgggagcgtgtgtttttgtgt

SEQ ID NO: 388555 - DNA, 385 bp, Homo sapiens; identical to SEQ ID NO: 233572
  chr8:30601508-30601893
  hyper

SEQ ID NO: 388556 - DNA, 157 bp, Homo sapiens; identical to SEQ ID NO: 285818
  chr8:37552160-37552317
  hyper

SEQ ID NO: 388557 - DNA, 42 bp, Homo sapiens; identical to SEQ ID NO: 233596
  chr8:38034153-38034195
  hyper

SEQ ID NO: 388558 - DNA, 39 bp, Homo sapiens; identical to SEQ ID NO: 233613
  chr8:41347781-41347820
  hyper

SEQ ID NO: 388559 - DNA, 34 bp, Homo sapiens; identical to SEQ ID NO: 201399
  chr8:42040329-42040363
  hyper

SEQ ID NO: 388560 - DNA, 60 bp, Homo sapiens; identical to SEQ ID NO: 285853
  chr8:48100697-48100757
  hyper

SEQ ID NO: 388561 - DNA, 96 bp, Homo sapiens; identical to SEQ ID NO: 116566
  chr8:48100826-48100922
  hyper

SEQ ID NO: 388562 - DNA, 240 bp, Homo sapiens; identical to SEQ ID NO: 223372
  chr8:48650853-48651093
  hyper

SEQ ID NO: 388563 - DNA, 50 bp, Homo sapiens; identical to SEQ ID NO: 201403
  chr8:48872787-48872837
  hyper

SEQ ID NO: 388564 - DNA, 50 bp, Homo sapiens; identical to SEQ ID NO: 233631
  chr8:49292489-49292539
  hyper

SEQ ID NO: 388565 - DNA, 68 bp, Homo sapiens; identical to SEQ ID NO: 285862
  chr8:49647749-49647817
  hyper

SEQ ID NO: 388566 - DNA, 68 bp, Homo sapiens; identical to SEQ ID NO: 285863
  chr8:49647853-49647921
  hyper

SEQ ID NO: 388567 - DNA, 75 bp, Homo sapiens; identical to SEQ ID NO: 201410
  chr8:54754915-54754990
  hyper

SEQ ID NO: 388568 - DNA, 124 bp, Homo sapiens; identical to SEQ ID NO: 233664
  chr8:56987181-56987305
  hyper

SEQ ID NO: 388569 - DNA, 39 bp, Homo sapiens; identical to SEQ ID NO: 285882
  chr8:57025552-57025591
  hyper

SEQ ID NO: 388570 - DNA, 1119 bp, Homo sapiens; identical to SEQ ID NO: 223399
  chr8:62626314-62627433
  hyper

SEQ ID NO: 388571 - DNA, 255 bp, Homo sapiens; identical to SEQ ID NO: 233682
  chr8:63951628-63951883
  hyper

SEQ ID NO: 388572 - DNA, 185 bp, Homo sapiens; identical to SEQ ID NO: 201430
  chr8:63998150-63998335
  hyper

SEQ ID NO: 388573 - DNA, 314 bp, Homo sapiens; identical to SEQ ID NO: 285901
  chr8:63998568-63998882
  hyper

SEQ ID NO: 388574 - DNA, 72 bp, Homo sapiens; identical to SEQ ID NO: 384250
  chr8:65283690-65283762
  hyper

SEQ ID NO: 388575 - DNA, 157 bp, Homo sapiens; identical to SEQ ID NO: 285903
  chr8:65285899-65286056
  hyper

SEQ ID NO: 388576 - DNA, 93 bp, Homo sapiens
  chr8:65490370-65490463
  hyper
ggccttttcccaaagcaaagttttcagcgactattaagcagccacctcctccgggaagactagggggattttcttgaattacaaaaggaagag

SEQ ID NO: 388577 - DNA, 216 bp, Homo sapiens; identical to SEQ ID NO: 285907
  chr8:65490493-65490709
  hyper

SEQ ID NO: 388578 - DNA, 67 bp, Homo sapiens; identical to SEQ ID NO: 45459
  chr8:65490762-65490829
  hyper

SEQ ID NO: 388579 - DNA, 183 bp, Homo sapiens; identical to SEQ ID NO: 233703
  chr8:66546065-66546248
  hyper

SEQ ID NO: 388580 - DNA, 42 bp, Homo sapiens; identical to SEQ ID NO: 285925
  chr8:67090411-67090453
  hyper

SEQ ID NO: 388581 - DNA, 43 bp, Homo sapiens; identical to SEQ ID NO: 201442
  chr8:67837266-67837309
  hyper

SEQ ID NO: 388582 - DNA, 221 bp, Homo sapiens; identical to SEQ ID NO: 116746
  chr8:67974225-67974446
  hyper

SEQ ID NO: 388583 - DNA, 271 bp, Homo sapiens; identical to SEQ ID NO: 384254
  chr8:68864200-68864471
  hyper

SEQ ID NO: 388584 - DNA, 38 bp, Homo sapiens; identical to SEQ ID NO: 384255
  chr8:68864942-68864980
  hyper

SEQ ID NO: 388585 - DNA, 73 bp, Homo sapiens; identical to SEQ ID NO: 285943
  chr8:70945214-70945287
  hyper

SEQ ID NO: 388586 - DNA, 77 bp, Homo sapiens; identical to SEQ ID NO: 201455
  chr8:72470259-72470336
  hyper

SEQ ID NO: 388587 - DNA, 218 bp, Homo sapiens; identical to SEQ ID NO: 285950
  chr8:72470835-72471053
  hyper

SEQ ID NO: 388588 - DNA, 33 bp, Homo sapiens; identical to SEQ ID NO: 285951
  chr8:72471083-72471116
  hyper

SEQ ID NO: 388589 - DNA, 37 bp, Homo sapiens; identical to SEQ ID NO: 285952
  chr8:72471195-72471232
  hyper

SEQ ID NO: 388590 - DNA, 209 bp, Homo sapiens; identical to SEQ ID NO: 201458
  chr8:72917126-72917335
  hyper

SEQ ID NO: 388591 - DNA, 164 bp, Homo sapiens; identical to SEQ ID NO: 201459
  chr8:72917515-72917679
  hyper

SEQ ID NO: 388592 - DNA, 96 bp, Homo sapiens; identical to SEQ ID NO: 201460
  chr8:72917709-72917805
  hyper

SEQ ID NO: 388593 - DNA, 93 bp, Homo sapiens; identical to SEQ ID NO: 285963
  chr8:73450590-73450683
  hyper

SEQ ID NO: 388594 - DNA, 244 bp, Homo sapiens; identical to SEQ ID NO: 233747
  chr8:74888248-74888492
  hyper

SEQ ID NO: 388595 - DNA, 280 bp, Homo sapiens; identical to SEQ ID NO: 233752
  chr8:76318950-76319230
  hyper

SEQ ID NO: 388596 - DNA, 44 bp, Homo sapiens; identical to SEQ ID NO: 285984
  chr8:77586691-77586735
  hyper

SEQ ID NO: 388597 - DNA, 231 bp, Homo sapiens; identical to SEQ ID NO: 285989
  chr8:80677512-80677743
  hyper

SEQ ID NO: 388598 - DNA, 235 bp, Homo sapiens; identical to SEQ ID NO: 285990
  chr8:80677781-80678016
  hyper

SEQ ID NO: 388599 - DNA, 47 bp, Homo sapiens; identical to SEQ ID NO: 233769
  chr8:81490259-81490306
  hyper

SEQ ID NO: 388600 - DNA, 102 bp, Homo sapiens; identical to SEQ ID NO: 233785
  chr8:86132907-86133009
  hyper

SEQ ID NO: 388601 - DNA, 57 bp, Homo sapiens; identical to SEQ ID NO: 116870
  chr8:86350926-86350983
  hyper

SEQ ID NO: 388602 - DNA, 82 bp, Homo sapiens; identical to SEQ ID NO: 286028
  chr8:93113864-93113946
  hyper

SEQ ID NO: 388603 - DNA, 242 bp, Homo sapiens; identical to SEQ ID NO: 201502
  chr8:93115140-93115382
  hyper

SEQ ID NO: 388604 - DNA, 209 bp, Homo sapiens; identical to SEQ ID NO: 201506
  chr8:94929137-94929346
  hyper

SEQ ID NO: 388605 - DNA, 163 bp, Homo sapiens; identical to SEQ ID NO: 201513
  chr8:95653853-95654016
  hyper

SEQ ID NO: 388606 - DNA, 416 bp, Homo sapiens; identical to SEQ ID NO: 286045
  chr8:95654337-95654753
  hyper

SEQ ID NO: 388607 - DNA, 454 bp, Homo sapiens; identical to SEQ ID NO: 233812
  chr8:96146528-96146982
  hyper

SEQ ID NO: 388608 - DNA, 191 bp, Homo sapiens; identical to SEQ ID NO: 233828
  chr8:98657023-98657214
  hyper

SEQ ID NO: 388609 - DNA, 43 bp, Homo sapiens; identical to SEQ ID NO: 201539
  chr8:101920619-101920662
  hyper

SEQ ID NO: 388610 - DNA, 231 bp, Homo sapiens; identical to SEQ ID NO: 233865
  chr8:103424261-103424492
  hyper

SEQ ID NO: 388611 - DNA, 42 bp, Homo sapiens
  chr8:106331801-106331843
  hyper
gtgcgtctctgccctgcgggcgcgggctggtggctggcaggt

SEQ ID NO: 388612 - DNA, 218 bp, Homo sapiens; identical to SEQ ID NO: 233898
  chr8:116680622-116680840
  hyper

SEQ ID NO: 388613 - DNA, 84 bp, Homo sapiens; identical to SEQ ID NO: 201572
  chr8:117861184-117861268
  hyper

SEQ ID NO: 388614 - DNA, 123 bp, Homo sapiens; identical to SEQ ID NO: 201577
  chr8:117868404-117868527
  hyper

SEQ ID NO: 388615 - DNA, 107 bp, Homo sapiens; identical to SEQ ID NO: 201580
  chr8:117870590-117870697
  hyper

SEQ ID NO: 388616 - DNA, 261 bp, Homo sapiens; identical to SEQ ID NO: 201593
  chr8:122651465-122651726
  hyper

SEQ ID NO: 388617 - DNA, 224 bp, Homo sapiens; identical to SEQ ID NO: 233944
  chr8:134308718-134308942
  hyper

SEQ ID NO: 388618 - DNA, 37 bp, Homo sapiens; identical to SEQ ID NO: 233950
  chr8:135844538-135844575
  hyper

SEQ ID NO: 388619 - DNA, 622 bp, Homo sapiens
  chr8:142010302-142010924
  hyper
caccgcggcagagtcgggggctgggggcggggaagaggagaaaacttgggaagcacaatgactccagtgaggacttcagtgagggctccagggctcccgccaagaagcccacggggctctaccaaacttgagggtttgcgttcggggacacggcgggcttggggctcgggcaccggcaggccgctcggagcccacccttggctgcccgcgaggccgcgcccgggggacggaggtcgggccgtcgcgagcctccctctcgcgtccgggcgaaccctgccgacgtccctgcgatttccctcttcctcctcctgcctctccccttttgtttttcaggcattgggtccgctccggcggaggccggcccgtcctccccgcgcctctgtccgccctgcgcgcccccagagccccggcctcctcgtcttcctcaggcccctcggcctctccgcgcgcccggccttttcgaaagccgccccccccttcctcctcacgtctcccggactccccacgtcccccagcctttctgtcttccccgaaccccttggcctccccgcgcgcccccaaaacccccgacctcctcgagctcccggcctccccacgtccctcagcctcccagtcttcccca

SEQ ID NO: 388620 - DNA, 63 bp, Homo sapiens; identical to SEQ ID NO: 233960
  chr8:142012004-142012067
  hyper

SEQ ID NO: 388621 - DNA, 96 bp, Homo sapiens; identical to SEQ ID NO: 286245
  chr8:144503284-144503380
  hyper

SEQ ID NO: 388622 - DNA, 96 bp, Homo sapiens; identical to SEQ ID NO: 286246
  chr8:144503726-144503822
  hyper

SEQ ID NO: 388623 - DNA, 303 bp, Homo sapiens; identical to SEQ ID NO: 384271
  chr8:144512510-144512813
  hyper

SEQ ID NO: 388624 - DNA, 65 bp, Homo sapiens; identical to SEQ ID NO: 201628
  chr8:144594949-144595014
  hyper

SEQ ID NO: 388625 - DNA, 170 bp, Homo sapiens; identical to SEQ ID NO: 201629
  chr8:144614411-144614581
  hyper

SEQ ID NO: 388626 - DNA, 477 bp, Homo sapiens; identical to SEQ ID NO: 223529
  chr8:145726121-145726598
  hyper

SEQ ID NO: 388627 - DNA, 95 bp, Homo sapiens; identical to SEQ ID NO: 201639
  chr8:145910220-145910315
  hyper

SEQ ID NO: 388628 - DNA, 87 bp, Homo sapiens; identical to SEQ ID NO: 286289
  chr9:974427-974514
  hyper

SEQ ID NO: 388629 - DNA, 47 bp, Homo sapiens; identical to SEQ ID NO: 286290
  chr9:975070-975117
  hyper

SEQ ID NO: 388630 - DNA, 114 bp, Homo sapiens
  chr9:975167-975281
  hyper
tgggcagagggttggctgctagaacgcctggaggtgcttcccttgaattcatggcaaacaccagaggaaagttttcaggttgcttgcttacttccagggcagtacagagaaaag

SEQ ID NO: 388631 - DNA, 150 bp, Homo sapiens
  chr9:12776013-12776163
  hyper
caggcaagagatggtgagtgtggtgcgccagccgcgggggctgggacctgggctgggccaaaagatggggcgatctgagaatggggctgggagagaggacggcaggggctgcagagcggagcgctgggcgcgtgggaaatgctgggtgga

SEQ ID NO: 388632 - DNA, 369 bp, Homo sapiens; identical to SEQ ID NO: 286321
  chr9:12776216-12776585
  hyper

SEQ ID NO: 388633 - DNA, 50 bp, Homo sapiens; identical to SEQ ID NO: 234051
  chr9:14322293-14322343
  hyper

SEQ ID NO: 388634 - DNA, 77 bp, Homo sapiens; identical to SEQ ID NO: 234052
  chr9:14347274-14347351
  hyper

SEQ ID NO: 388635 - DNA, 301 bp, Homo sapiens; identical to SEQ ID NO: 234064
  chr9:18473916-18474217
  hyper

SEQ ID NO: 388636 - DNA, 149 bp, Homo sapiens; identical to SEQ ID NO: 234069
  chr9:20621410-20621559
  hyper

SEQ ID NO: 388637 - DNA, 35 bp, Homo sapiens; identical to SEQ ID NO: 223568
  chr9:21032003-21032038
  hyper

SEQ ID NO: 388638 - DNA, 90 bp, Homo sapiens; identical to SEQ ID NO: 286361
  chr9:22005969-22006059
  hyper

SEQ ID NO: 388639 - DNA, 59 bp, Homo sapiens
  chr9:22447429-22447488
  hyper
gtgtgccaagtgcaccctgatcgccgagcgccagcgcgtcatggccgcccaggtggcgc

SEQ ID NO: 388640 - DNA, 92 bp, Homo sapiens; identical to SEQ ID NO: 286373
  chr9:25677513-25677605
  hyper

SEQ ID NO: 388641 - DNA, 206 bp, Homo sapiens
  chr9:25677627-25677833
  hyper
cggaggaggaggggcccgctcgaggctccgcctctcaccggctgcggcctcggctacagccagggcccagagggctccgagtcccgggagcggaggccggagtcgggttcctgtagaggctgctcctccttgtccccgctcggacgtggtccccgctgctcgaggtgcagctgcagcagggcccggcggtacatggcttccagctt

SEQ ID NO: 388642 - DNA, 150 bp, Homo sapiens; identical to SEQ ID NO: 384275
  chr9:25677903-25678053
  hyper

SEQ ID NO: 388643 - DNA, 256 bp, Homo sapiens; identical to SEQ ID NO: 384276
  chr9:25678127-25678383
  hyper

SEQ ID NO: 388644 - DNA, 225 bp, Homo sapiens; identical to SEQ ID NO: 234100
  chr9:33166527-33166752
  hyper

SEQ ID NO: 388645 - DNA, 60 bp, Homo sapiens; identical to SEQ ID NO: 286384
  chr9:33524278-33524338
  hyper

SEQ ID NO: 388646 - DNA, 51 bp, Homo sapiens; identical to SEQ ID NO: 201695
  chr9:34377388-34377439
  hyper

SEQ ID NO: 388647 - DNA, 77 bp, Homo sapiens; identical to SEQ ID NO: 201697
  chr9:34646925-34647002
  hyper

SEQ ID NO: 388648 - DNA, 36 bp, Homo sapiens; identical to SEQ ID NO: 234116
  chr9:34989007-34989043
  hyper

SEQ ID NO: 388649 - DNA, 228 bp, Homo sapiens; identical to SEQ ID NO: 234117
  chr9:35096044-35096272
  hyper

SEQ ID NO: 388650 - DNA, 179 bp, Homo sapiens; identical to SEQ ID NO: 201700
  chr9:35116361-35116540
  hyper

SEQ ID NO: 388651 - DNA, 220 bp, Homo sapiens; identical to SEQ ID NO: 234132
  chr9:36572867-36573087
  hyper

SEQ ID NO: 388652 - DNA, 104 bp, Homo sapiens; identical to SEQ ID NO: 234149
  chr9:37485788-37485892
  hyper

SEQ ID NO: 388653 - DNA, 333 bp, Homo sapiens; identical to SEQ ID NO: 384281
  chr9:38067788-38068121
  hyper

SEQ ID NO: 388654 - DNA, 749 bp, Homo sapiens; identical to SEQ ID NO: 201714
  chr9:38068158-38068907
  hyper

SEQ ID NO: 388655 - DNA, 477 bp, Homo sapiens; identical to SEQ ID NO: 234161
  chr9:71319341-71319818
  hyper

SEQ ID NO: 388656 - DNA, 73 bp, Homo sapiens; identical to SEQ ID NO: 234171
  chr9:72874193-72874266
  hyper

SEQ ID NO: 388657 - DNA, 49 bp, Homo sapiens; identical to SEQ ID NO: 201730
  chr9:74979547-74979596
  hyper

SEQ ID NO: 388658 - DNA, 32 bp, Homo sapiens; identical to SEQ ID NO: 234178
  chr9:74980723-74980755
  hyper

SEQ ID NO: 388659 - DNA, 387 bp, Homo sapiens
  chr9:82187860-82188247
  hyper
aaatcggcgccccgcgccgggagcagcccgcccgccatcacccccaccccccggcgcggtggccctcggagggggtgcggagaggcaattgagttgtagccattttcttattgttgtctttgaagcccctggaagccgcgccgagccgtttgcggtccccgcgccgcgactcctcgagggggggtggcgagcgatgaaggaggcgcgactccgcgcccgggcggggagggcgccctcggcagcggcgctgctgggctggctgcggtttggaagtgcggggcgccggcccctcgcgccgcgggccgccggggcgagcgggcgaacgaacgagccgagagggtggcggccgcctccctcctcccccggcctgaccgcagcccgacgcca

SEQ ID NO: 388660 - DNA, 196 bp, Homo sapiens; identical to SEQ ID NO: 234211
  chr9:84304433-84304629
  hyper

SEQ ID NO: 388661 - DNA, 346 bp, Homo sapiens
  chr9:85677094-85677440
  hyper
tcctgtaatgaacacgccgccctttgcaggctcaggattcagcacgtaaaactttctccccaaacgctgactctctgactcctttttcttaactctagcggatcttggaaaagtcaaagcgagtaggtgaaggaagacaagcaactcacagagaagactaggggggggggccattgggtctgcacacctgcaagtaagtgggaagaagcaagcaggaagcgccagaataacctcccgcccccagctcacactcgcacctgggaatgaacttggcttcgtccccaagtcgcgcctggaaatcctgccaagcccggccgggactcgccgggccgcacgaggtggccag

SEQ ID NO: 388662 - DNA, 163 bp, Homo sapiens; identical to SEQ ID NO: 234215
  chr9:86238482-86238645
  hyper

SEQ ID NO: 388663 - DNA, 275 bp, Homo sapiens; identical to SEQ ID NO: 286539
  chr9:93564135-93564410
  hyper

SEQ ID NO: 388664 - DNA, 130 bp, Homo sapiens; identical to SEQ ID NO: 234244
  chr9:95056116-95056246
  hyper

SEQ ID NO: 388665 - DNA, 405 bp, Homo sapiens; identical to SEQ ID NO: 223634
  chr9:97810932-97811337
  hyper

SEQ ID NO: 388666 - DNA, 60 bp, Homo sapiens; identical to SEQ ID NO: 223636
  chr9:98189305-98189365
  hyper

SEQ ID NO: 388667 - DNA, 238 bp, Homo sapiens; identical to SEQ ID NO: 117890
  chr9:99181499-99181737
  hyper

SEQ ID NO: 388668 - DNA, 155 bp, Homo sapiens; identical to SEQ ID NO: 286580
  chr9:99380838-99380993
  hyper

SEQ ID NO: 388669 - DNA, 426 bp, Homo sapiens; identical to SEQ ID NO: 286581
  chr9:99381077-99381503
  hyper

SEQ ID NO: 388670 - DNA, 629 bp, Homo sapiens; identical to SEQ ID NO: 201802
  chr9:99381680-99382309
  hyper

SEQ ID NO: 388671 - DNA, 204 bp, Homo sapiens; identical to SEQ ID NO: 223644
  chr9:99417397-99417601
  hyper

SEQ ID NO: 388672 - DNA, 74 bp, Homo sapiens; identical to SEQ ID NO: 286585
  chr9:99449021-99449095
  hyper

SEQ ID NO: 388673 - DNA, 121 bp, Homo sapiens; identical to SEQ ID NO: 201805
  chr9:99539844-99539965
  hyper

SEQ ID NO: 388674 - DNA, 646 bp, Homo sapiens; identical to SEQ ID NO: 286587
  chr9:99540006-99540652
  hyper

SEQ ID NO: 388675 - DNA, 74 bp, Homo sapiens; identical to SEQ ID NO: 201819
  chr9:103190036-103190110
  hyper

SEQ ID NO: 388676 - DNA, 330 bp, Homo sapiens; identical to SEQ ID NO: 234315
  chr9:108455719-108456049
  hyper

SEQ ID NO: 388677 - DNA, 127 bp, Homo sapiens; identical to SEQ ID NO: 286705
  chr9:126775917-126776044
  hyper

SEQ ID NO: 388678 - DNA, 45 bp, Homo sapiens; identical to SEQ ID NO: 286706
  chr9:126776386-126776431
  hyper

SEQ ID NO: 388679 - DNA, 94 bp, Homo sapiens; identical to SEQ ID NO: 286717
  chr9:126794701-126794795
  hyper

SEQ ID NO: 388680 - DNA, 96 bp, Homo sapiens; identical to SEQ ID NO: 234395
  chr9:127905903-127905999
  hyper

SEQ ID NO: 388681 - DNA, 33 bp, Homo sapiens; identical to SEQ ID NO: 384294
  chr9:129373385-129373418
  hyper

SEQ ID NO: 388682 - DNA, 166 bp, Homo sapiens; identical to SEQ ID NO: 234406
  chr9:129384573-129384739
  hyper

SEQ ID NO: 388683 - DNA, 361 bp, Homo sapiens; identical to SEQ ID NO: 234410
  chr9:129439099-129439460
  hyper

SEQ ID NO: 388684 - DNA, 209 bp, Homo sapiens; identical to SEQ ID NO: 234414
  chr9:130308066-130308275
  hyper

SEQ ID NO: 388685 - DNA, 203 bp, Homo sapiens; identical to SEQ ID NO: 234417
  chr9:130477657-130477860
  hyper

SEQ ID NO: 388686 - DNA, 376 bp, Homo sapiens; identical to SEQ ID NO: 201890
  chr9:130679368-130679744
  hyper

SEQ ID NO: 388687 - DNA, 80 bp, Homo sapiens; identical to SEQ ID NO: 234423
  chr9:131183174-131183254
  hyper

SEQ ID NO: 388688 - DNA, 251 bp, Homo sapiens; identical to SEQ ID NO: 234426
  chr9:131486506-131486757
  hyper

SEQ ID NO: 388689 - DNA, 34 bp, Homo sapiens; identical to SEQ ID NO: 223691
  chr9:132222864-132222898
  hyper

SEQ ID NO: 388690 - DNA, 551 bp, Homo sapiens; identical to SEQ ID NO: 286787
  chr9:132330680-132331231
  hyper

SEQ ID NO: 388691 - DNA, 217 bp, Homo sapiens
  chr9:132331336-132331553
  hyper
ggcagctgcgagcaaggcccccagcccggcgcgcagccccgcccgcgcgcgatcaattgacaccgccaccgggcggcaggaaaactcatttttctctccctccccggctccgggtgggcgcgggctgagctctgccaagggccgggggctacgcggggccggggccggggccggggccggggccaggccagggagggagggcagggcccgaggaggg

SEQ ID NO: 388692 - DNA, 162 bp, Homo sapiens; identical to SEQ ID NO: 234443
  chr9:132387303-132387465
  hyper

SEQ ID NO: 388693 - DNA, 65 bp, Homo sapiens; identical to SEQ ID NO: 286791
  chr9:132427556-132427621
  hyper

SEQ ID NO: 388694 - DNA, 181 bp, Homo sapiens; identical to SEQ ID NO: 286805
  chr9:133319785-133319966
  hyper

SEQ ID NO: 388695 - DNA, 55 bp, Homo sapiens; identical to SEQ ID NO: 286806
  chr9:133320002-133320057
  hyper

SEQ ID NO: 388696 - DNA, 331 bp, Homo sapiens; identical to SEQ ID NO: 286807
  chr9:133540728-133541059
  hyper

SEQ ID NO: 388697 - DNA, 274 bp, Homo sapiens; identical to SEQ ID NO: 234461
  chr9:133568977-133569251
  hyper

SEQ ID NO: 388698 - DNA, 496 bp, Homo sapiens; identical to SEQ ID NO: 286814
  chr9:133972138-133972634
  hyper

SEQ ID NO: 388699 - DNA, 98 bp, Homo sapiens; identical to SEQ ID NO: 234501
  chr9:139334408-139334506
  hyper

SEQ ID NO: 388700 - DNA, 102 bp, Homo sapiens; identical to SEQ ID NO: 234507
  chr9:139621210-139621312
  hyper

SEQ ID NO: 388701 - DNA, 155 bp, Homo sapiens; identical to SEQ ID NO: 201937
  chr9:139838241-139838396
  hyper

SEQ ID NO: 388702 - DNA, 258 bp, Homo sapiens
  chr9:140196228-140196486
  hyper
ccctcgggcccgaacgagttcacgttgaactcgcagttggtcatgttctgcagcagcgactgcagctcctgcgtgttgcccttgcgcacagcctcctggaagatgcgctgcgtctgcggcgcggagcaggtggacagctcggcctggctcatgctgccgccgggcgcgggccgcgggccgggccggggctcagcgcgggcggcggctgcggcgcgggcccccggctgtctcggggcgcgcctcggcgcatggagggcg

SEQ ID NO: 388703 - DNA, 99 bp, Homo sapiens; identical to SEQ ID NO: 201958
  chr10:3239495-3239594
  hyper

SEQ ID NO: 388704 - DNA, 202 bp, Homo sapiens; identical to SEQ ID NO: 234559
  chr10:7829457-7829659
  hyper

SEQ ID NO: 388705 - DNA, 75 bp, Homo sapiens; identical to SEQ ID NO: 286922
  chr10:8079315-8079390
  hyper

SEQ ID NO: 388706 - DNA, 298 bp, Homo sapiens; identical to SEQ ID NO: 234579
  chr10:11865127-11865425
  hyper

SEQ ID NO: 388707 - DNA, 82 bp, Homo sapiens; identical to SEQ ID NO: 234587
  chr10:13141818-13141900
  hyper

SEQ ID NO: 388708 - DNA, 241 bp, Homo sapiens; identical to SEQ ID NO: 201985
  chr10:13341387-13341628
  hyper

SEQ ID NO: 388709 - DNA, 277 bp, Homo sapiens; identical to SEQ ID NO: 286957
  chr10:14215913-14216190
  hyper

SEQ ID NO: 388710 - DNA, 114 bp, Homo sapiens; identical to SEQ ID NO: 234593
  chr10:14879967-14880081
  hyper

SEQ ID NO: 388711 - DNA, 52 bp, Homo sapiens; identical to SEQ ID NO: 201992
  chr10:17243812-17243864
  hyper

SEQ ID NO: 388712 - DNA, 282 bp, Homo sapiens; identical to SEQ ID NO: 384306
  chr10:21463291-21463573
  hyper

SEQ ID NO: 388713 - DNA, 421 bp, Homo sapiens; identical to SEQ ID NO: 286982
  chr10:21783758-21784179
  hyper

SEQ ID NO: 388714 - DNA, 334 bp, Homo sapiens; identical to SEQ ID NO: 286983
  chr10:21784246-21784580
  hyper

SEQ ID NO: 388715 - DNA, 129 bp, Homo sapiens; identical to SEQ ID NO: 234615
  chr10:21822289-21822418
  hyper

SEQ ID NO: 388716 - DNA, 104 bp, Homo sapiens; identical to SEQ ID NO: 223779
  chr10:22032852-22032956
  hyper

SEQ ID NO: 388717 - DNA, 266 bp, Homo sapiens; identical to SEQ ID NO: 234620
  chr10:22519355-22519621
  hyper

SEQ ID NO: 388718 - DNA, 96 bp, Homo sapiens; identical to SEQ ID NO: 287007
  chr10:23460471-23460567
  hyper

SEQ ID NO: 388719 - DNA, 71 bp, Homo sapiens; identical to SEQ ID NO: 287008
  chr10:23491090-23491161
  hyper

SEQ ID NO: 388720 - DNA, 92 bp, Homo sapiens; identical to SEQ ID NO: 287009
  chr10:23491237-23491329
  hyper

SEQ ID NO: 388721 - DNA, 49 bp, Homo sapiens; identical to SEQ ID NO: 234649
  chr10:25305303-25305352
  hyper

SEQ ID NO: 388722 - DNA, 35 bp, Homo sapiens; identical to SEQ ID NO: 287036
  chr10:28957388-28957423
  hyper

SEQ ID NO: 388723 - DNA, 268 bp, Homo sapiens
  chr10:28965881-28966149
  hyper
gagggggtggggggcgaaggctgaatgcagaccccagcgctgggccgcctcccccgggctcccacccgaaccctcctccgccacctgcacaggccggggcattgtcactcgcccctgggggttccagaaaacgcagtgcggccggggaggacgaccacacggaccccctgcgtgtttcggggggcacccaaaagaagccccgcgctggggaacgctgaccacccgaggctgagccgtcagggtctcggaggcgggttcccgagccggt

SEQ ID NO: 388724 - DNA, 51 bp, Homo sapiens; identical to SEQ ID NO: 234674
  chr10:28966786-28966837
  hyper

SEQ ID NO: 388725 - DNA, 61 bp, Homo sapiens; identical to SEQ ID NO: 223802
  chr10:29738072-29738133
  hyper

SEQ ID NO: 388726 - DNA, 106 bp, Homo sapiens; identical to SEQ ID NO: 234690
  chr10:32345462-32345568
  hyper

SEQ ID NO: 388727 - DNA, 35 bp, Homo sapiens; identical to SEQ ID NO: 384311
  chr10:35105213-35105248
  hyper

SEQ ID NO: 388728 - DNA, 225 bp, Homo sapiens; identical to SEQ ID NO: 287076
  chr10:38299277-38299502
  hyper

SEQ ID NO: 388729 - DNA, 307 bp, Homo sapiens; identical to SEQ ID NO: 234702
  chr10:43133483-43133790
  hyper

SEQ ID NO: 388730 - DNA, 33 bp, Homo sapiens; identical to SEQ ID NO: 287105
  chr10:49731361-49731394
  hyper

SEQ ID NO: 388731 - DNA, 280 bp, Homo sapiens; identical to SEQ ID NO: 202079
  chr10:52834081-52834361
  hyper

SEQ ID NO: 388732 - DNA, 109 bp, Homo sapiens; identical to SEQ ID NO: 202080
  chr10:52834756-52834865
  hyper

SEQ ID NO: 388733 - DNA, 339 bp, Homo sapiens
  chr10:54073859-54074198
  hyper
gactaagcaagggaggggcggggtgaagagtgtcaaaggccccccttcatgtacacaaacacaccccctcccagcccctcccagcgctttgaaatcccatcccggctttgttgtctccctcccaaggggccggaatgctccgggcccgcggtataaaggcagccgcggtggcggtggcggcgcagagctctgtgctccctgcagtcaggactctgggaccgcagggggctcccggaccctgactctgcagccgaaccggcacggtttcgtggggacccaggcttgcaaagtgacggtcattttctctttctttctccctcttgagtccttctgagatga

SEQ ID NO: 388734 - DNA, 296 bp, Homo sapiens; identical to SEQ ID NO: 287128
  chr10:54074418-54074714
  hyper

SEQ ID NO: 388735 - DNA, 57 bp, Homo sapiens; identical to SEQ ID NO: 234750
  chr10:58121111-58121168
  hyper

SEQ ID NO: 388736 - DNA, 496 bp, Homo sapiens; identical to SEQ ID NO: 287137
  chr10:61121994-61122490
  hyper

SEQ ID NO: 388737 - DNA, 95 bp, Homo sapiens; identical to SEQ ID NO: 287138
  chr10:61122636-61122731
  hyper

SEQ ID NO: 388738 - DNA, 238 bp, Homo sapiens; identical to SEQ ID NO: 234766
  chr10:64576165-64576403
  hyper

SEQ ID NO: 388739 - DNA, 139 bp, Homo sapiens; identical to SEQ ID NO: 234780
  chr10:70166193-70166332
  hyper

SEQ ID NO: 388740 - DNA, 352 bp, Homo sapiens; identical to SEQ ID NO: 234786
  chr10:70748247-70748599
  hyper

SEQ ID NO: 388741 - DNA, 493 bp, Homo sapiens; identical to SEQ ID NO: 287187
  chr10:71336491-71336984
  hyper

SEQ ID NO: 388742 - DNA, 35 bp, Homo sapiens; identical to SEQ ID NO: 384318
  chr10:71892801-71892836
  hyper

SEQ ID NO: 388743 - DNA, 89 bp, Homo sapiens; identical to SEQ ID NO: 287206
  chr10:72972345-72972434
  hyper

SEQ ID NO: 388744 - DNA, 271 bp, Homo sapiens; identical to SEQ ID NO: 287207
  chr10:72972543-72972814
  hyper

SEQ ID NO: 388745 - DNA, 180 bp, Homo sapiens; identical to SEQ ID NO: 287208
  chr10:72972950-72973130
  hyper

SEQ ID NO: 388746 - DNA, 43 bp, Homo sapiens; identical to SEQ ID NO: 202114
  chr10:72973180-72973223
  hyper

SEQ ID NO: 388747 - DNA, 217 bp, Homo sapiens; identical to SEQ ID NO: 287210
  chr10:72973382-72973599
  hyper

SEQ ID NO: 388748 - DNA, 100 bp, Homo sapiens; identical to SEQ ID NO: 384319
  chr10:73848222-73848322
  hyper

SEQ ID NO: 388749 - DNA, 294 bp, Homo sapiens; identical to SEQ ID NO: 223842
  chr10:74032607-74032901
  hyper

SEQ ID NO: 388750 - DNA, 69 bp, Homo sapiens; identical to SEQ ID NO: 234825
  chr10:74386146-74386215
  hyper

SEQ ID NO: 388751 - DNA, 84 bp, Homo sapiens; identical to SEQ ID NO: 234830
  chr10:75012575-75012659
  hyper

SEQ ID NO: 388752 - DNA, 141 bp, Homo sapiens; identical to SEQ ID NO: 223844
  chr10:75408169-75408310
  hyper

SEQ ID NO: 388753 - DNA, 113 bp, Homo sapiens; identical to SEQ ID NO: 202134
  chr10:75671364-75671477
  hyper

SEQ ID NO: 388754 - DNA, 253 bp, Homo sapiens; identical to SEQ ID NO: 287259
  chr10:79471071-79471324
  hyper

SEQ ID NO: 388755 - DNA, 469 bp, Homo sapiens; identical to SEQ ID NO: 223850
  chr10:79686575-79687044
  hyper

SEQ ID NO: 388756 - DNA, 197 bp, Homo sapiens; identical to SEQ ID NO: 234857
  chr10:80828742-80828939
  hyper

SEQ ID NO: 388757 - DNA, 84 bp, Homo sapiens; identical to SEQ ID NO: 234858
  chr10:80830851-80830935
  hyper

SEQ ID NO: 388758 - DNA, 57 bp, Homo sapiens; identical to SEQ ID NO: 234859
  chr10:81107046-81107103
  hyper

SEQ ID NO: 388759 - DNA, 62 bp, Homo sapiens; identical to SEQ ID NO: 287273
  chr10:81664375-81664437
  hyper

SEQ ID NO: 388760 - DNA, 107 bp, Homo sapiens; identical to SEQ ID NO: 287274
  chr10:81741259-81741366
  hyper

SEQ ID NO: 388761 - DNA, 349 bp, Homo sapiens; identical to SEQ ID NO: 202154
  chr10:81741931-81742280
  hyper

SEQ ID NO: 388762 - DNA, 56 bp, Homo sapiens; identical to SEQ ID NO: 223859
  chr10:87493570-87493626
  hyper

SEQ ID NO: 388763 - DNA, 469 bp, Homo sapiens; identical to SEQ ID NO: 234881
  chr10:89577722-89578191
  hyper

SEQ ID NO: 388764 - DNA, 156 bp, Homo sapiens; identical to SEQ ID NO: 234887
  chr10:90749778-90749934
  hyper

SEQ ID NO: 388765 - DNA, 155 bp, Homo sapiens; identical to SEQ ID NO: 234911
  chr10:94459542-94459697
  hyper

SEQ ID NO: 388766 - DNA, 1124 bp, Homo sapiens; identical to SEQ ID NO: 223877
  chr10:96162479-96163603
  hyper

SEQ ID NO: 388767 - DNA, 42 bp, Homo sapiens; identical to SEQ ID NO: 234927
  chr10:97321201-97321243
  hyper

SEQ ID NO: 388768 - DNA, 214 bp, Homo sapiens; identical to SEQ ID NO: 234939
  chr10:99052454-99052668
  hyper

SEQ ID NO: 388769 - DNA, 34 bp, Homo sapiens; identical to SEQ ID NO: 234942
  chr10:99093445-99093479
  hyper

SEQ ID NO: 388770 - DNA, 49 bp, Homo sapiens; identical to SEQ ID NO: 234943
  chr10:99185972-99186021
  hyper

SEQ ID NO: 388771 - DNA, 228 bp, Homo sapiens; identical to SEQ ID NO: 234944
  chr10:99258429-99258657
  hyper

SEQ ID NO: 388772 - DNA, 336 bp, Homo sapiens; identical to SEQ ID NO: 223881
  chr10:99259373-99259709
  hyper

SEQ ID NO: 388773 - DNA, 176 bp, Homo sapiens; identical to SEQ ID NO: 287376
  chr10:100991731-100991907
  hyper

SEQ ID NO: 388774 - DNA, 501 bp, Homo sapiens; identical to SEQ ID NO: 234971
  chr10:101945663-101946164
  hyper

SEQ ID NO: 388775 - DNA, 388 bp, Homo sapiens; identical to SEQ ID NO: 234972
  chr10:102046129-102046517
  hyper

SEQ ID NO: 388776 - DNA, 112 bp, Homo sapiens; identical to SEQ ID NO: 234995
  chr10:102505252-102505364
  hyper

SEQ ID NO: 388777 - DNA, 113 bp, Homo sapiens; identical to SEQ ID NO: 235006
  chr10:102802620-102802733
  hyper

SEQ ID NO: 388778 - DNA, 88 bp, Homo sapiens; identical to SEQ ID NO: 235007
  chr10:102802913-102803001
  hyper

SEQ ID NO: 388779 - DNA, 403 bp, Homo sapiens; identical to SEQ ID NO: 235008
  chr10:102809890-102810293
  hyper

SEQ ID NO: 388780 - DNA, 120 bp, Homo sapiens; identical to SEQ ID NO: 202233
  chr10:102973524-102973644
  hyper

SEQ ID NO: 388781 - DNA, 71 bp, Homo sapiens; identical to SEQ ID NO: 287433
  chr10:102984234-102984305
  hyper

SEQ ID NO: 388782 - DNA, 244 bp, Homo sapiens; identical to SEQ ID NO: 287434
  chr10:102984541-102984785
  hyper

SEQ ID NO: 388783 - DNA, 439 bp, Homo sapiens; identical to SEQ ID NO: 235035
  chr10:103347719-103348158
  hyper

SEQ ID NO: 388784 - DNA, 198 bp, Homo sapiens; identical to SEQ ID NO: 287452
  chr10:103824903-103825101
  hyper

SEQ ID NO: 388785 - DNA, 116 bp, Homo sapiens; identical to SEQ ID NO: 235046
  chr10:103880250-103880366
  hyper

SEQ ID NO: 388786 - DNA, 217 bp, Homo sapiens; identical to SEQ ID NO: 202243
  chr10:104178852-104179069
  hyper

SEQ ID NO: 388787 - DNA, 99 bp, Homo sapiens; identical to SEQ ID NO: 235053
  chr10:104179457-104179556
  hyper

SEQ ID NO: 388788 - DNA, 142 bp, Homo sapiens; identical to SEQ ID NO: 235059
  chr10:104262487-104262629
  hyper

SEQ ID NO: 388789 - DNA, 31 bp, Homo sapiens; identical to SEQ ID NO: 287483
  chr10:106014281-106014312
  hyper

SEQ ID NO: 388790 - DNA, 343 bp, Homo sapiens; identical to SEQ ID NO: 287484
  chr10:106014356-106014699
  hyper

SEQ ID NO: 388791 - DNA, 88 bp, Homo sapiens; identical to SEQ ID NO: 287486
  chr10:106034508-106034596
  hyper

SEQ ID NO: 388792 - DNA, 110 bp, Homo sapiens; identical to SEQ ID NO: 287487
  chr10:106034651-106034761
  hyper

SEQ ID NO: 388793 - DNA, 173 bp, Homo sapiens; identical to SEQ ID NO: 202252
  chr10:109674972-109675145
  hyper

SEQ ID NO: 388794 - DNA, 149 bp, Homo sapiens; identical to SEQ ID NO: 235090
  chr10:111683213-111683362
  hyper

SEQ ID NO: 388795 - DNA, 76 bp, Homo sapiens; identical to SEQ ID NO: 202262
  chr10:112328695-112328771
  hyper

SEQ ID NO: 388796 - DNA, 214 bp, Homo sapiens; identical to SEQ ID NO: 202273
  chr10:112343940-112344154
  hyper

SEQ ID NO: 388797 - DNA, 387 bp, Homo sapiens; identical to SEQ ID NO: 202274
  chr10:112349362-112349749
  hyper

SEQ ID NO: 388798 - DNA, 151 bp, Homo sapiens; identical to SEQ ID NO: 202277
  chr10:112352830-112352981
  hyper

SEQ ID NO: 388799 - DNA, 404 bp, Homo sapiens; identical to SEQ ID NO: 202285
  chr10:112363988-112364392
  hyper

SEQ ID NO: 388800 - DNA, 106 bp, Homo sapiens; identical to SEQ ID NO: 202289
  chr10:112631244-112631350
  hyper

SEQ ID NO: 388801 - DNA, 69 bp, Homo sapiens; identical to SEQ ID NO: 235101
  chr10:112678715-112678784
  hyper

SEQ ID NO: 388802 - DNA, 136 bp, Homo sapiens; identical to SEQ ID NO: 235102
  chr10:112678992-112679128
  hyper

SEQ ID NO: 388803 - DNA, 112 bp, Homo sapiens
  chr10:115804427-115804539
  hyper
gtgcaccgtgtgggccatctcggccctggtgtccttcctgcccatcctcatgcactggtggcgggcggagagcgacgaggcgcgccgctgctacaacgaccccaagtgctgc

SEQ ID NO: 388804 - DNA, 40 bp, Homo sapiens
  chr10:115805287-115805327
  hyper
cgtgccgccccggcttcgcctcggaatccaaggtgtaggg

SEQ ID NO: 388805 - DNA, 161 bp, Homo sapiens; identical to SEQ ID NO: 235116
  chr10:115933903-115934064
  hyper

SEQ ID NO: 388806 - DNA, 175 bp, Homo sapiens; identical to SEQ ID NO: 287567
  chr10:116391551-116391726
  hyper

SEQ ID NO: 388807 - DNA, 204 bp, Homo sapiens; identical to SEQ ID NO: 287568
  chr10:116391813-116392017
  hyper

SEQ ID NO: 388808 - DNA, 43 bp, Homo sapiens; identical to SEQ ID NO: 235123
  chr10:116581330-116581373
  hyper

SEQ ID NO: 388809 - DNA, 295 bp, Homo sapiens
  chr10:118764187-118764482
  hyper
ccacccgcttctccggcaaggaaggtggcactgtgcaacctcgtccgcactgaatcctcgtcccttcccccagcccccgatcgccagcaaacgcaaccagcgggcagcgggtctcgagctgcggggcctgactagccccgacactccgcgttatcctcggtccagagctttcccaggcgcgccggccacggaggacgcttctctgcgggtgacggagctactgcggtgaccacggcggccgccacgtctcccgcccggcttccaactgccctggccccagcgccctggggccgtc

SEQ ID NO: 388810 - DNA, 308 bp, Homo sapiens; identical to SEQ ID NO: 202311
  chr10:119256046-119256354
  hyper

SEQ ID NO: 388811 - DNA, 87 bp, Homo sapiens; identical to SEQ ID NO: 202314
  chr10:119295683-119295770
  hyper

SEQ ID NO: 388812 - DNA, 31 bp, Homo sapiens; identical to SEQ ID NO: 202315
  chr10:119295809-119295840
  hyper

SEQ ID NO: 388813 - DNA, 37 bp, Homo sapiens; identical to SEQ ID NO: 202316
  chr10:119295872-119295909
  hyper

SEQ ID NO: 388814 - DNA, 41 bp, Homo sapiens; identical to SEQ ID NO: 202317
  chr10:119295951-119295992
  hyper

SEQ ID NO: 388815 - DNA, 39 bp, Homo sapiens; identical to SEQ ID NO: 202318
  chr10:119296131-119296170
  hyper

SEQ ID NO: 388816 - DNA, 141 bp, Homo sapiens; identical to SEQ ID NO: 202328
  chr10:119305975-119306116
  hyper

SEQ ID NO: 388817 - DNA, 57 bp, Homo sapiens; identical to SEQ ID NO: 287604
  chr10:119306372-119306429
  hyper

SEQ ID NO: 388818 - DNA, 141 bp, Homo sapiens; identical to SEQ ID NO: 235153
  chr10:119309782-119309923
  hyper

SEQ ID NO: 388819 - DNA, 223 bp, Homo sapiens; identical to SEQ ID NO: 235158
  chr10:119805618-119805841
  hyper

SEQ ID NO: 388820 - DNA, 106 bp, Homo sapiens; identical to SEQ ID NO: 202335
  chr10:121632626-121632732
  hyper

SEQ ID NO: 388821 - DNA, 819 bp, Homo sapiens; identical to SEQ ID NO: 202342
  chr10:123872187-123873006
  hyper

SEQ ID NO: 388822 - DNA, 442 bp, Homo sapiens; identical to SEQ ID NO: 287633
  chr10:123873040-123873482
  hyper

SEQ ID NO: 388823 - DNA, 118 bp, Homo sapiens; identical to SEQ ID NO: 287654
  chr10:126847239-126847357
  hyper

SEQ ID NO: 388824 - DNA, 153 bp, Homo sapiens; identical to SEQ ID NO: 202363
  chr10:128593608-128593761
  hyper

SEQ ID NO: 388825 - DNA, 98 bp, Homo sapiens; identical to SEQ ID NO: 384355
  chr10:128593793-128593891
  hyper

SEQ ID NO: 388826 - DNA, 160 bp, Homo sapiens; identical to SEQ ID NO: 287681
  chr10:133999363-133999523
  hyper

SEQ ID NO: 388827 - DNA, 116 bp, Homo sapiens; identical to SEQ ID NO: 287691
  chr10:134597971-134598087
  hyper

SEQ ID NO: 388828 - DNA, 97 bp, Homo sapiens; identical to SEQ ID NO: 47990
  chr10:135071117-135071214
  hyper

SEQ ID NO: 388829 - DNA, 107 bp, Homo sapiens; identical to SEQ ID NO: 224010
  chr11:450172-450279
  hyper

SEQ ID NO: 388830 - DNA, 182 bp, Homo sapiens; identical to SEQ ID NO: 202391
  chr11:518712-518894
  hyper

SEQ ID NO: 388831 - DNA, 61 bp, Homo sapiens; identical to SEQ ID NO: 287725
  chr11:518933-518994
  hyper

SEQ ID NO: 388832 - DNA, 106 bp, Homo sapiens; identical to SEQ ID NO: 235270
  chr11:568188-568294
  hyper

SEQ ID NO: 388833 - DNA, 473 bp, Homo sapiens; identical to SEQ ID NO: 287743
  chr11:1357818-1358291
  hyper

SEQ ID NO: 388834 - DNA, 52 bp, Homo sapiens; identical to SEQ ID NO: 287744
  chr11:1358332-1358384
  hyper

SEQ ID NO: 388835 - DNA, 216 bp, Homo sapiens; identical to SEQ ID NO: 235288
  chr11:1968629-1968845
  hyper

SEQ ID NO: 388836 - DNA, 64 bp, Homo sapiens; identical to SEQ ID NO: 202409
  chr11:2554454-2554518
  hyper

SEQ ID NO: 388837 - DNA, 433 bp, Homo sapiens; identical to SEQ ID NO: 224029
  chr11:2951691-2952124
  hyper

SEQ ID NO: 388838 - DNA, 140 bp, Homo sapiens; identical to SEQ ID NO: 202415
  chr11:3014088-3014228
  hyper

SEQ ID NO: 388839 - DNA, 235 bp, Homo sapiens; identical to SEQ ID NO: 235308
  chr11:3224437-3224672
  hyper

SEQ ID NO: 388840 - DNA, 74 bp, Homo sapiens; identical to SEQ ID NO: 287785
  chr11:6281090-6281164
  hyper

SEQ ID NO: 388841 - DNA, 157 bp, Homo sapiens; identical to SEQ ID NO: 287786
  chr11:6341237-6341394
  hyper

SEQ ID NO: 388842 - DNA, 285 bp, Homo sapiens; identical to SEQ ID NO: 287787
  chr11:6341484-6341769
  hyper

SEQ ID NO: 388843 - DNA, 41 bp, Homo sapiens; identical to SEQ ID NO: 202420
  chr11:6440456-6440497
  hyper

SEQ ID NO: 388844 - DNA, 105 bp, Homo sapiens; identical to SEQ ID NO: 202421
  chr11:6502787-6502892
  hyper

SEQ ID NO: 388845 - DNA, 349 bp, Homo sapiens; identical to SEQ ID NO: 235321
  chr11:6704608-6704957
  hyper

SEQ ID NO: 388846 - DNA, 40 bp, Homo sapiens; identical to SEQ ID NO: 202425
  chr11:8103155-8103195
  hyper

SEQ ID NO: 388847 - DNA, 49 bp, Homo sapiens; identical to SEQ ID NO: 235335
  chr11:8704467-8704516
  hyper

SEQ ID NO: 388848 - DNA, 577 bp, Homo sapiens; identical to SEQ ID NO: 224046
  chr11:9685464-9686041
  hyper

SEQ ID NO: 388849 - DNA, 123 bp, Homo sapiens; identical to SEQ ID NO: 202436
  chr11:10316353-10316476
  hyper

SEQ ID NO: 388850 - DNA, 137 bp, Homo sapiens; identical to SEQ ID NO: 235373
  chr11:14542171-14542308
  hyper

SEQ ID NO: 388851 - DNA, 105 bp, Homo sapiens; identical to SEQ ID NO: 224055
  chr11:15671822-15671927
  hyper

SEQ ID NO: 388852 - DNA, 180 bp, Homo sapiens; identical to SEQ ID NO: 287868
  chr11:16632670-16632850
  hyper

SEQ ID NO: 388853 - DNA, 260 bp, Homo sapiens; identical to SEQ ID NO: 224059
  chr11:17498486-17498746
  hyper

SEQ ID NO: 388854 - DNA, 156 bp, Homo sapiens; identical to SEQ ID NO: 287892
  chr11:18034650-18034806
  hyper

SEQ ID NO: 388855 - DNA, 114 bp, Homo sapiens; identical to SEQ ID NO: 48214
  chr11:18034821-18034935
  hyper

SEQ ID NO: 388856 - DNA, 240 bp, Homo sapiens; identical to SEQ ID NO: 235405
  chr11:18548581-18548821
  hyper

SEQ ID NO: 388857 - DNA, 32 bp, Homo sapiens; identical to SEQ ID NO: 235407
  chr11:18656064-18656096
  hyper

SEQ ID NO: 388858 - DNA, 110 bp, Homo sapiens; identical to SEQ ID NO: 287925
  chr11:22363209-22363319
  hyper

SEQ ID NO: 388859 - DNA, 233 bp, Homo sapiens; identical to SEQ ID NO: 235468
  chr11:31391279-31391512
  hyper

SEQ ID NO: 388860 - DNA, 88 bp, Homo sapiens; identical to SEQ ID NO: 287981
  chr11:35441758-35441846
  hyper

SEQ ID NO: 388861 - DNA, 70 bp, Homo sapiens
  chr11:35640429-35640499
  hyper
gctgctcaccctggcggccggcgcggacggcccgccccggcagtcccggagcgagcccaggtggcacgtg

SEQ ID NO: 388862 - DNA, 199 bp, Homo sapiens; identical to SEQ ID NO: 235526
  chr11:36531740-36531939
  hyper

SEQ ID NO: 388863 - DNA, 131 bp, Homo sapiens
  chr11:40315285-40315416
  hyper
gttgggtacattttggagccacaagttggttcccgttggcgcagaccttcccgatgtctgctagtcctctgcgaggagacgcgttctcgggagcgcagctgctccgcgccgcccttagcgccatcgccctg

SEQ ID NO: 388864 - DNA, 214 bp, Homo sapiens; identical to SEQ ID NO: 235529
  chr11:43333313-43333527
  hyper

SEQ ID NO: 388865 - DNA, 77 bp, Homo sapiens; identical to SEQ ID NO: 288023
  chr11:45686160-45686237
  hyper

SEQ ID NO: 388866 - DNA, 152 bp, Homo sapiens; identical to SEQ ID NO: 288024
  chr11:45687045-45687197
  hyper

SEQ ID NO: 388867 - DNA, 62 bp, Homo sapiens; identical to SEQ ID NO: 202540
  chr11:46264958-46265020
  hyper

SEQ ID NO: 388868 - DNA, 182 bp, Homo sapiens; identical to SEQ ID NO: 224103
  chr11:46848281-46848463
  hyper

SEQ ID NO: 388869 - DNA, 246 bp, Homo sapiens; identical to SEQ ID NO: 235580
  chr11:47279142-47279388
  hyper

SEQ ID NO: 388870 - DNA, 78 bp, Homo sapiens; identical to SEQ ID NO: 235593
  chr11:57298238-57298316
  hyper

SEQ ID NO: 388871 - DNA, 136 bp, Homo sapiens; identical to SEQ ID NO: 288065
  chr11:57414486-57414622
  hyper

SEQ ID NO: 388872 - DNA, 109 bp, Homo sapiens; identical to SEQ ID NO: 202550
  chr11:57425067-57425176
  hyper

SEQ ID NO: 388873 - DNA, 240 bp, Homo sapiens; identical to SEQ ID NO: 224116
  chr11:61520025-61520265
  hyper

SEQ ID NO: 388874 - DNA, 35 bp, Homo sapiens; identical to SEQ ID NO: 235631
  chr11:61735124-61735159
  hyper

SEQ ID NO: 388875 - DNA, 42 bp, Homo sapiens; identical to SEQ ID NO: 235633
  chr11:62313927-62313969
  hyper

SEQ ID NO: 388876 - DNA, 395 bp, Homo sapiens; identical to SEQ ID NO: 235641
  chr11:62420564-62420959
  hyper

SEQ ID NO: 388877 - DNA, 410 bp, Homo sapiens; identical to SEQ ID NO: 235649
  chr11:62572860-62573270
  hyper

SEQ ID NO: 388878 - DNA, 209 bp, Homo sapiens; identical to SEQ ID NO: 235654
  chr11:63580539-63580748
  hyper

SEQ ID NO: 388879 - DNA, 166 bp, Homo sapiens; identical to SEQ ID NO: 235672
  chr11:64084952-64085118
  hyper

SEQ ID NO: 388880 - DNA, 246 bp, Homo sapiens; identical to SEQ ID NO: 235681
  chr11:64578117-64578363
  hyper

SEQ ID NO: 388881 - DNA, 263 bp, Homo sapiens; identical to SEQ ID NO: 235684
  chr11:64863597-64863860
  hyper

SEQ ID NO: 388882 - DNA, 215 bp, Homo sapiens; identical to SEQ ID NO: 235685
  chr11:64885145-64885360
  hyper

SEQ ID NO: 388883 - DNA, 76 bp, Homo sapiens; identical to SEQ ID NO: 235686
  chr11:64889776-64889852
  hyper

SEQ ID NO: 388884 - DNA, 73 bp, Homo sapiens; identical to SEQ ID NO: 235692
  chr11:65121847-65121920
  hyper

SEQ ID NO: 388885 - DNA, 98 bp, Homo sapiens; identical to SEQ ID NO: 202592
  chr11:65189906-65190004
  hyper

SEQ ID NO: 388886 - DNA, 82 bp, Homo sapiens; identical to SEQ ID NO: 288190
  chr11:65197599-65197681
  hyper

SEQ ID NO: 388887 - DNA, 241 bp, Homo sapiens; identical to SEQ ID NO: 235702
  chr11:65266934-65267175
  hyper

SEQ ID NO: 388888 - DNA, 105 bp, Homo sapiens; identical to SEQ ID NO: 202597
  chr11:65339689-65339794
  hyper

SEQ ID NO: 388889 - DNA, 173 bp, Homo sapiens; identical to SEQ ID NO: 202598
  chr11:65342125-65342298
  hyper

SEQ ID NO: 388890 - DNA, 57 bp, Homo sapiens; identical to SEQ ID NO: 235717
  chr11:65667910-65667967
  hyper

SEQ ID NO: 388891 - DNA, 777 bp, Homo sapiens; identical to SEQ ID NO: 235721
  chr11:66035253-66036030
  hyper

SEQ ID NO: 388892 - DNA, 270 bp, Homo sapiens; identical to SEQ ID NO: 235733
  chr11:66335704-66335974
  hyper

SEQ ID NO: 388893 - DNA, 351 bp, Homo sapiens; identical to SEQ ID NO: 235735
  chr11:66445298-66445649
  hyper

SEQ ID NO: 388894 - DNA, 89 bp, Homo sapiens; identical to SEQ ID NO: 235742
  chr11:67007554-67007643
  hyper

SEQ ID NO: 388895 - DNA, 105 bp, Homo sapiens; identical to SEQ ID NO: 224150
  chr11:67141093-67141198
  hyper

SEQ ID NO: 388896 - DNA, 234 bp, Homo sapiens; identical to SEQ ID NO: 202629
  chr11:67210770-67211004
  hyper

SEQ ID NO: 388897 - DNA, 102 bp, Homo sapiens; identical to SEQ ID NO: 235748
  chr11:67211231-67211333
  hyper

SEQ ID NO: 388898 - DNA, 115 bp, Homo sapiens; identical to SEQ ID NO: 235750
  chr11:67236852-67236967
  hyper

SEQ ID NO: 388899 - DNA, 110 bp, Homo sapiens; identical to SEQ ID NO: 224156
  chr11:68080104-68080214
  hyper

SEQ ID NO: 388900 - DNA, 289 bp, Homo sapiens; identical to SEQ ID NO: 235766
  chr11:68816177-68816466
  hyper

SEQ ID NO: 388901 - DNA, 114 bp, Homo sapiens; identical to SEQ ID NO: 202653
  chr11:72929153-72929267
  hyper

SEQ ID NO: 388902 - DNA, 280 bp, Homo sapiens; identical to SEQ ID NO: 235802
  chr11:73372054-73372334
  hyper

SEQ ID NO: 388903 - DNA, 209 bp, Homo sapiens; identical to SEQ ID NO: 235803
  chr11:73472197-73472406
  hyper

SEQ ID NO: 388904 - DNA, 58 bp, Homo sapiens; identical to SEQ ID NO: 235815
  chr11:74851768-74851826
  hyper

SEQ ID NO: 388905 - DNA, 256 bp, Homo sapiens; identical to SEQ ID NO: 235817
  chr11:75062273-75062529
  hyper

SEQ ID NO: 388906 - DNA, 82 bp, Homo sapiens; identical to SEQ ID NO: 235830
  chr11:77300373-77300455
  hyper

SEQ ID NO: 388907 - DNA, 240 bp, Homo sapiens; identical to SEQ ID NO: 235831
  chr11:77348586-77348826
  hyper

SEQ ID NO: 388908 - DNA, 374 bp, Homo sapiens; identical to SEQ ID NO: 235834
  chr11:77899551-77899925
  hyper

SEQ ID NO: 388909 - DNA, 230 bp, Homo sapiens; identical to SEQ ID NO: 235853
  chr11:85359003-85359233
  hyper

SEQ ID NO: 388910 - DNA, 182 bp, Homo sapiens; identical to SEQ ID NO: 235854
  chr11:85521825-85522007
  hyper

SEQ ID NO: 388911 - DNA, 160 bp, Homo sapiens; identical to SEQ ID NO: 202676
  chr11:85780826-85780986
  hyper

SEQ ID NO: 388912 - DNA, 221 bp, Homo sapiens; identical to SEQ ID NO: 202677
  chr11:85955560-85955781
  hyper

SEQ ID NO: 388913 - DNA, 662 bp, Homo sapiens; identical to SEQ ID NO: 224180
  chr11:86511379-86512041
  hyper

SEQ ID NO: 388914 - DNA, 283 bp, Homo sapiens; identical to SEQ ID NO: 224181
  chr11:86513414-86513697
  hyper

SEQ ID NO: 388915 - DNA, 148 bp, Homo sapiens; identical to SEQ ID NO: 235863
  chr11:88070647-88070795
  hyper

SEQ ID NO: 388916 - DNA, 429 bp, Homo sapiens
  chr11:96123256-96123685
  hyper
gggttttgagggactgggaggactgtcccggctaaagctggcgcgggaaactggggctgcgcggcgggagggccctgctgctggggaaggaatctaatatatccgttcccctgaggaagggtgccagtccttgactcctaggctcttcggctctctgtcgtaactttggggtgtggcaggggttagtgacgcgcggttacccgggatctggacgtgcaggaggttcgtggccacaatgggggtatagtctttctcacggctgctggggtaataaaacacatgcttttaatccggattatccgcggtgacatggggcctccgctactgcccgtataagttaaagaaaggcctgttctctcaaacttcctcctctttcaccttcttctgcagtctatttgccagccaaccccagcccgggaggggatcagg

SEQ ID NO: 388917 - DNA, 33 bp, Homo sapiens; identical to SEQ ID NO: 235885
  chr11:100557940-100557973
  hyper

SEQ ID NO: 388918 - DNA, 206 bp, Homo sapiens; identical to SEQ ID NO: 384396
  chr11:101453848-101454054
  hyper

SEQ ID NO: 388919 - DNA, 39 bp, Homo sapiens; identical to SEQ ID NO: 288410
  chr11:101454747-101454786
  hyper

SEQ ID NO: 388920 - DNA, 38 bp, Homo sapiens; identical to SEQ ID NO: 235889
  chr11:101785493-101785531
  hyper

SEQ ID NO: 388921 - DNA, 31 bp, Homo sapiens; identical to SEQ ID NO: 202708
  chr11:102323923-102323954
  hyper

SEQ ID NO: 388922 - DNA, 35 bp, Homo sapiens; identical to SEQ ID NO: 202710
  chr11:102980488-102980523
  hyper

SEQ ID NO: 388923 - DNA, 127 bp, Homo sapiens; identical to SEQ ID NO: 235901
  chr11:107328545-107328672
  hyper

SEQ ID NO: 388924 - DNA, 127 bp, Homo sapiens; identical to SEQ ID NO: 235904
  chr11:107992141-107992268
  hyper

SEQ ID NO: 388925 - DNA, 90 bp, Homo sapiens; identical to SEQ ID NO: 235909
  chr11:108535765-108535855
  hyper

SEQ ID NO: 388926 - DNA, 251 bp, Homo sapiens; identical to SEQ ID NO: 235926
  chr11:113644420-113644671
  hyper

SEQ ID NO: 388927 - DNA, 211 bp, Homo sapiens; identical to SEQ ID NO: 235932
  chr11:115372960-115373171
  hyper

SEQ ID NO: 388928 - DNA, 288 bp, Homo sapiens; identical to SEQ ID NO: 288458
  chr11:116450735-116451023
  hyper

SEQ ID NO: 388929 - DNA, 123 bp, Homo sapiens; identical to SEQ ID NO: 288459
  chr11:116451190-116451313
  hyper

SEQ ID NO: 388930 - DNA, 88 bp, Homo sapiens; identical to SEQ ID NO: 288462
  chr11:116706882-116706970
  hyper

SEQ ID NO: 388931 - DNA, 505 bp, Homo sapiens; identical to SEQ ID NO: 235942
  chr11:117014686-117015191
  hyper

SEQ ID NO: 388932 - DNA, 65 bp, Homo sapiens; identical to SEQ ID NO: 235947
  chr11:117198410-117198475
  hyper

SEQ ID NO: 388933 - DNA, 250 bp, Homo sapiens; identical to SEQ ID NO: 224203
  chr11:117352704-117352954
  hyper

SEQ ID NO: 388934 - DNA, 46 bp, Homo sapiens; identical to SEQ ID NO: 235954
  chr11:118230310-118230356
  hyper

SEQ ID NO: 388935 - DNA, 86 bp, Homo sapiens; identical to SEQ ID NO: 202746
  chr11:119168098-119168184
  hyper

SEQ ID NO: 388936 - DNA, 142 bp, Homo sapiens; identical to SEQ ID NO: 202758
  chr11:120206447-120206589
  hyper

SEQ ID NO: 388937 - DNA, 271 bp, Homo sapiens; identical to SEQ ID NO: 288522
  chr11:120382097-120382368
  hyper

SEQ ID NO: 388938 - DNA, 206 bp, Homo sapiens; identical to SEQ ID NO: 288523
  chr11:120382448-120382654
  hyper

SEQ ID NO: 388939 - DNA, 189 bp, Homo sapiens; identical to SEQ ID NO: 235981
  chr11:121163483-121163672
  hyper

SEQ ID NO: 388940 - DNA, 206 bp, Homo sapiens; identical to SEQ ID NO: 235985
  chr11:122526547-122526753
  hyper

SEQ ID NO: 388941 - DNA, 203 bp, Homo sapiens; identical to SEQ ID NO: 288540
  chr11:123066197-123066400
  hyper

SEQ ID NO: 388942 - DNA, 244 bp, Homo sapiens; identical to SEQ ID NO: 288541
  chr11:123066463-123066707
  hyper

SEQ ID NO: 388943 - DNA, 42 bp, Homo sapiens; identical to SEQ ID NO: 384411
  chr11:124709075-124709117
  hyper

SEQ ID NO: 388944 - DNA, 249 bp, Homo sapiens; identical to SEQ ID NO: 202775
  chr11:124709233-124709482
  hyper

SEQ ID NO: 388945 - DNA, 210 bp, Homo sapiens; identical to SEQ ID NO: 202776
  chr11:124709856-124710066
  hyper

SEQ ID NO: 388946 - DNA, 56 bp, Homo sapiens; identical to SEQ ID NO: 202779
  chr11:125932494-125932550
  hyper

SEQ ID NO: 388947 - DNA, 436 bp, Homo sapiens; identical to SEQ ID NO: 8456
  chr11:125932556-125932992
  hyper

SEQ ID NO: 388948 - DNA, 105 bp, Homo sapiens; identical to SEQ ID NO: 224241
  chr11:125933223-125933328
  hyper

SEQ ID NO: 388949 - DNA, 207 bp, Homo sapiens; identical to SEQ ID NO: 236017
  chr11:126081471-126081678
  hyper

SEQ ID NO: 388950 - DNA, 506 bp, Homo sapiens; identical to SEQ ID NO: 236020
  chr11:126225361-126225867
  hyper

SEQ ID NO: 388951 - DNA, 226 bp, Homo sapiens; identical to SEQ ID NO: 288583
  chr11:129685680-129685906
  hyper

SEQ ID NO: 388952 - DNA, 286 bp, Homo sapiens; identical to SEQ ID NO: 288584
  chr11:129685938-129686224
  hyper

SEQ ID NO: 388953 - DNA, 172 bp, Homo sapiens; identical to SEQ ID NO: 288600
  chr11:132813317-132813489
  hyper

SEQ ID NO: 388954 - DNA, 36 bp, Homo sapiens; identical to SEQ ID NO: 236058
  chr11:134094348-134094384
  hyper

SEQ ID NO: 388955 - DNA, 73 bp, Homo sapiens; identical to SEQ ID NO: 202820
  chr12:2163510-2163583
  hyper

SEQ ID NO: 388956 - DNA, 52 bp, Homo sapiens; identical to SEQ ID NO: 236088
  chr12:3068385-3068437
  hyper

SEQ ID NO: 388957 - DNA, 142 bp, Homo sapiens; identical to SEQ ID NO: 202827
  chr12:3129463-3129605
  hyper

SEQ ID NO: 388958 - DNA, 72 bp, Homo sapiens; identical to SEQ ID NO: 384418
  chr12:3601270-3601342
  hyper

SEQ ID NO: 388959 - DNA, 101 bp, Homo sapiens; identical to SEQ ID NO: 202831
  chr12:3601377-3601478
  hyper

SEQ ID NO: 388960 - DNA, 70 bp, Homo sapiens; identical to SEQ ID NO: 288662
  chr12:3862298-3862368
  hyper

SEQ ID NO: 388961 - DNA, 97 bp, Homo sapiens; identical to SEQ ID NO: 288683
  chr12:5152818-5152915
  hyper

SEQ ID NO: 388962 - DNA, 224 bp, Homo sapiens; identical to SEQ ID NO: 236123
  chr12:6561338-6561562
  hyper

SEQ ID NO: 388963 - DNA, 259 bp, Homo sapiens; identical to SEQ ID NO: 236126
  chr12:6772303-6772562
  hyper

SEQ ID NO: 388964 - DNA, 155 bp, Homo sapiens; identical to SEQ ID NO: 236140
  chr12:10517555-10517710
  hyper

SEQ ID NO: 388965 - DNA, 33 bp, Homo sapiens; identical to SEQ ID NO: 236144
  chr12:11803181-11803214
  hyper

SEQ ID NO: 388966 - DNA, 217 bp, Homo sapiens; identical to SEQ ID NO: 224295
  chr12:12006278-12006495
  hyper

SEQ ID NO: 388967 - DNA, 2801 bp, Homo sapiens; identical to SEQ ID NO: 202878
  chr12:12043874-12046675
  hyper

SEQ ID NO: 388968 - DNA, 1481 bp, Homo sapiens; identical to SEQ ID NO: 202879
  chr12:12046855-12048336
  hyper

SEQ ID NO: 388969 - DNA, 206 bp, Homo sapiens; identical to SEQ ID NO: 236147
  chr12:12510050-12510256
  hyper

SEQ ID NO: 388970 - DNA, 59 bp, Homo sapiens; identical to SEQ ID NO: 288740
  chr12:12869129-12869188
  hyper

SEQ ID NO: 388971 - DNA, 103 bp, Homo sapiens; identical to SEQ ID NO: 236151
  chr12:12876593-12876696
  hyper

SEQ ID NO: 388972 - DNA, 443 bp, Homo sapiens; identical to SEQ ID NO: 236154
  chr12:13044060-13044503
  hyper

SEQ ID NO: 388973 - DNA, 93 bp, Homo sapiens; identical to SEQ ID NO: 224308
  chr12:13154241-13154334
  hyper

SEQ ID NO: 388974 - DNA, 41 bp, Homo sapiens; identical to SEQ ID NO: 202891
  chr12:15475222-15475263
  hyper

SEQ ID NO: 388975 - DNA, 354 bp, Homo sapiens; identical to SEQ ID NO: 202892
  chr12:15475336-15475690
  hyper

SEQ ID NO: 388976 - DNA, 60 bp, Homo sapiens; identical to SEQ ID NO: 202893
  chr12:15475691-15475751
  hyper

SEQ ID NO: 388977 - DNA, 308 bp, Homo sapiens; identical to SEQ ID NO: 202916
  chr12:25347959-25348267
  hyper

SEQ ID NO: 388978 - DNA, 232 bp, Homo sapiens; identical to SEQ ID NO: 236201
  chr12:26277911-26278143
  hyper

SEQ ID NO: 388979 - DNA, 88 bp, Homo sapiens; identical to SEQ ID NO: 202920
  chr12:26986791-26986879
  hyper

SEQ ID NO: 388980 - DNA, 33 bp, Homo sapiens; identical to SEQ ID NO: 202931
  chr12:33048899-33048932
  hyper

SEQ ID NO: 388981 - DNA, 86 bp, Homo sapiens; identical to SEQ ID NO: 202949
  chr12:41087106-41087192
  hyper

SEQ ID NO: 388982 - DNA, 120 bp, Homo sapiens; identical to SEQ ID NO: 236243
  chr12:44200419-44200539
  hyper

SEQ ID NO: 388983 - DNA, 150 bp, Homo sapiens; identical to SEQ ID NO: 236249
  chr12:46120764-46120914
  hyper

SEQ ID NO: 388984 - DNA, 48 bp, Homo sapiens; identical to SEQ ID NO: 202970
  chr12:49524764-49524812
  hyper

SEQ ID NO: 388985 - DNA, 97 bp, Homo sapiens; identical to SEQ ID NO: 236278
  chr12:49525460-49525557
  hyper

SEQ ID NO: 388986 - DNA, 66 bp, Homo sapiens; identical to SEQ ID NO: 288902
  chr12:49689031-49689097
  hyper

SEQ ID NO: 388987 - DNA, 151 bp, Homo sapiens; identical to SEQ ID NO: 122218
  chr12:49689134-49689285
  hyper

SEQ ID NO: 388988 - DNA, 171 bp, Homo sapiens; identical to SEQ ID NO: 288904
  chr12:49690392-49690563
  hyper

SEQ ID NO: 388989 - DNA, 61 bp, Homo sapiens
  chr12:49690601-49690662
  hyper
ctgtgcacgaactgcgtggcccgcgtggaatttgcgccgctgtccatcctctgcctgctcc

SEQ ID NO: 388990 - DNA, 544 bp, Homo sapiens; identical to SEQ ID NO: 236291
  chr12:49961430-49961974
  hyper

SEQ ID NO: 388991 - DNA, 201 bp, Homo sapiens; identical to SEQ ID NO: 236298
  chr12:50361387-50361588
  hyper

SEQ ID NO: 388992 - DNA, 122 bp, Homo sapiens; identical to SEQ ID NO: 236301
  chr12:50505850-50505972
  hyper

SEQ ID NO: 388993 - DNA, 149 bp, Homo sapiens; identical to SEQ ID NO: 288943
  chr12:52416804-52416953
  hyper

SEQ ID NO: 388994 - DNA, 179 bp, Homo sapiens; identical to SEQ ID NO: 288944
  chr12:52416985-52417164
  hyper

SEQ ID NO: 388995 - DNA, 192 bp, Homo sapiens; identical to SEQ ID NO: 236318
  chr12:52464067-52464259
  hyper

SEQ ID NO: 388996 - DNA, 51 bp, Homo sapiens; identical to SEQ ID NO: 236321
  chr12:52627539-52627590
  hyper

SEQ ID NO: 388997 - DNA, 373 bp, Homo sapiens; identical to SEQ ID NO: 236334
  chr12:53472778-53473151
  hyper

SEQ ID NO: 388998 - DNA, 236 bp, Homo sapiens; identical to SEQ ID NO: 236335
  chr12:53574316-53574552
  hyper

SEQ ID NO: 388999 - DNA, 66 bp, Homo sapiens; identical to SEQ ID NO: 236336
  chr12:53607267-53607333
  hyper

SEQ ID NO: 389000 - DNA, 216 bp, Homo sapiens; identical to SEQ ID NO: 236340
  chr12:53718312-53718528
  hyper

SEQ ID NO: 389001 - DNA, 145 bp, Homo sapiens; identical to SEQ ID NO: 236343
  chr12:53835282-53835427
  hyper

SEQ ID NO: 389002 - DNA, 45 bp, Homo sapiens; identical to SEQ ID NO: 236369
  chr12:54347924-54347969
  hyper

SEQ ID NO: 389003 - DNA, 107 bp, Homo sapiens; identical to SEQ ID NO: 236371
  chr12:54350138-54350245
  hyper

SEQ ID NO: 389004 - DNA, 256 bp, Homo sapiens; identical to SEQ ID NO: 203011
  chr12:54388855-54389111
  hyper

SEQ ID NO: 389005 - DNA, 63 bp, Homo sapiens; identical to SEQ ID NO: 203016
  chr12:54408253-54408316
  hyper

SEQ ID NO: 389006 - DNA, 101 bp, Homo sapiens; identical to SEQ ID NO: 236405
  chr12:54582781-54582882
  hyper

SEQ ID NO: 389007 - DNA, 88 bp, Homo sapiens; identical to SEQ ID NO: 236407
  chr12:54674339-54674427
  hyper

SEQ ID NO: 389008 - DNA, 277 bp, Homo sapiens; identical to SEQ ID NO: 289049
  chr12:54812879-54813156
  hyper

SEQ ID NO: 389009 - DNA, 78 bp, Homo sapiens; identical to SEQ ID NO: 236411
  chr12:55413596-55413674
  hyper

SEQ ID NO: 389010 - DNA, 96 bp, Homo sapiens; identical to SEQ ID NO: 236416
  chr12:56211700-56211796
  hyper

SEQ ID NO: 389011 - DNA, 151 bp, Homo sapiens; identical to SEQ ID NO: 203036
  chr12:56390556-56390707
  hyper

SEQ ID NO: 389012 - DNA, 226 bp, Homo sapiens; identical to SEQ ID NO: 236420
  chr12:56401112-56401338
  hyper

SEQ ID NO: 389013 - DNA, 64 bp, Homo sapiens; identical to SEQ ID NO: 236426
  chr12:56522028-56522092
  hyper

SEQ ID NO: 389014 - DNA, 236 bp, Homo sapiens; identical to SEQ ID NO: 236431
  chr12:56652044-56652280
  hyper

SEQ ID NO: 389015 - DNA, 167 bp, Homo sapiens; identical to SEQ ID NO: 236451
  chr12:57855186-57855353
  hyper

SEQ ID NO: 389016 - DNA, 36 bp, Homo sapiens; identical to SEQ ID NO: 289108
  chr12:58158676-58158712
  hyper

SEQ ID NO: 389017 - DNA, 173 bp, Homo sapiens; identical to SEQ ID NO: 203053
  chr12:58158778-58158951
  hyper

SEQ ID NO: 389018 - DNA, 251 bp, Homo sapiens; identical to SEQ ID NO: 203054
  chr12:58159038-58159289
  hyper

SEQ ID NO: 389019 - DNA, 85 bp, Homo sapiens
  chr12:58159346-58159431
  hyper
tgaaggagcgcgttcggctgcggtggccaggagagggattgcgtctgcccccttggggtacggaaacctgcaccggcctgcgcct

SEQ ID NO: 389020 - DNA, 31 bp, Homo sapiens; identical to SEQ ID NO: 289112
  chr12:58159870-58159901
  hyper

SEQ ID NO: 389021 - DNA, 217 bp, Homo sapiens; identical to SEQ ID NO: 236467
  chr12:58239310-58239527
  hyper

SEQ ID NO: 389022 - DNA, 137 bp, Homo sapiens; identical to SEQ ID NO: 384444
  chr12:59313525-59313662
  hyper

SEQ ID NO: 389023 - DNA, 318 bp, Homo sapiens; identical to SEQ ID NO: 384445
  chr12:63328404-63328722
  hyper

SEQ ID NO: 389024 - DNA, 110 bp, Homo sapiens; identical to SEQ ID NO: 203073
  chr12:64238195-64238305
  hyper

SEQ ID NO: 389025 - DNA, 314 bp, Homo sapiens; identical to SEQ ID NO: 236489
  chr12:65174361-65174675
  hyper

SEQ ID NO: 389026 - DNA, 53 bp, Homo sapiens; identical to SEQ ID NO: 289144
  chr12:65514782-65514835
  hyper

SEQ ID NO: 389027 - DNA, 50 bp, Homo sapiens; identical to SEQ ID NO: 49821
  chr12:65564722-65564772
  hyper

SEQ ID NO: 389028 - DNA, 302 bp, Homo sapiens; identical to SEQ ID NO: 289149
  chr12:66216562-66216864
  hyper

SEQ ID NO: 389029 - DNA, 85 bp, Homo sapiens; identical to SEQ ID NO: 203082
  chr12:66216924-66217009
  hyper

SEQ ID NO: 389030 - DNA, 362 bp, Homo sapiens
  chr12:66218128-66218490
  hyper
gattagaggtgggcactccccccaccaccaccccctccccaagcgcaagcgcgtgcacgcacacacaccacacacactcacactcacacacactcacacacactcatcccacttgaatcttggggcaggaactcagaaaacttccagcccgggcagcgcgcgcttggtgcaagactcaggagctagcagcccgtccccctccgactctccggtgccgccgctgcctgctcccgccaccctaggaggcgcggtgccacccactactctgtcctctgcctgtgctccgtgcccgaccctatcccggcggagtctccccatcctcctttgctttccgactgcccaaggcactttcaatctcaatc

SEQ ID NO: 389031 - DNA, 34 bp, Homo sapiens; identical to SEQ ID NO: 203089
  chr12:68617124-68617158
  hyper

SEQ ID NO: 389032 - DNA, 64 bp, Homo sapiens; identical to SEQ ID NO: 224404
  chr12:69080591-69080655
  hyper

SEQ ID NO: 389033 - DNA, 165 bp, Homo sapiens; identical to SEQ ID NO: 236508
  chr12:69550940-69551105
  hyper

SEQ ID NO: 389034 - DNA, 207 bp, Homo sapiens; identical to SEQ ID NO: 236510
  chr12:70133407-70133614
  hyper

SEQ ID NO: 389035 - DNA, 97 bp, Homo sapiens; identical to SEQ ID NO: 203097
  chr12:71004045-71004142
  hyper

SEQ ID NO: 389036 - DNA, 116 bp, Homo sapiens; identical to SEQ ID NO: 203102
  chr12:72332525-72332641
  hyper

SEQ ID NO: 389037 - DNA, 77 bp, Homo sapiens; identical to SEQ ID NO: 203103
  chr12:72332696-72332773
  hyper

SEQ ID NO: 389038 - DNA, 276 bp, Homo sapiens; identical to SEQ ID NO: 236552
  chr12:89746244-89746520
  hyper

SEQ ID NO: 389039 - DNA, 237 bp, Homo sapiens; identical to SEQ ID NO: 236554
  chr12:89919819-89920056
  hyper

SEQ ID NO: 389040 - DNA, 91 bp, Homo sapiens; identical to SEQ ID NO: 49909
  chr12:91775751-91775842
  hyper

SEQ ID NO: 389041 - DNA, 255 bp, Homo sapiens; identical to SEQ ID NO: 236559
  chr12:93835925-93836180
  hyper

SEQ ID NO: 389042 - DNA, 153 bp, Homo sapiens; identical to SEQ ID NO: 203136
  chr12:95397472-95397625
  hyper

SEQ ID NO: 389043 - DNA, 33 bp, Homo sapiens; identical to SEQ ID NO: 224420
  chr12:96618052-96618085
  hyper

SEQ ID NO: 389044 - DNA, 79 bp, Homo sapiens; identical to SEQ ID NO: 236578
  chr12:97300789-97300868
  hyper

SEQ ID NO: 389045 - DNA, 84 bp, Homo sapiens; identical to SEQ ID NO: 236583
  chr12:99038221-99038305
  hyper

SEQ ID NO: 389046 - DNA, 212 bp, Homo sapiens; identical to SEQ ID NO: 203151
  chr12:103355123-103355335
  hyper

SEQ ID NO: 389047 - DNA, 105 bp, Homo sapiens; identical to SEQ ID NO: 224430
  chr12:106641151-106641256
  hyper

SEQ ID NO: 389048 - DNA, 142 bp, Homo sapiens; identical to SEQ ID NO: 224433
  chr12:107167936-107168078
  hyper

SEQ ID NO: 389049 - DNA, 38 bp, Homo sapiens; identical to SEQ ID NO: 289316
  chr12:108079429-108079467
  hyper

SEQ ID NO: 389050 - DNA, 115 bp, Homo sapiens; identical to SEQ ID NO: 122946
  chr12:108079515-108079630
  hyper

SEQ ID NO: 389051 - DNA, 41 bp, Homo sapiens; identical to SEQ ID NO: 226552
  chr12:108298348-108298389
  hyper

SEQ ID NO: 389052 - DNA, 98 bp, Homo sapiens; identical to SEQ ID NO: 203176
  chr12:109535377-109535475
  hyper

SEQ ID NO: 389053 - DNA, 295 bp, Homo sapiens; identical to SEQ ID NO: 384461
  chr12:109746919-109747214
  hyper

SEQ ID NO: 389054 - DNA, 85 bp, Homo sapiens; identical to SEQ ID NO: 236652
  chr12:109747423-109747508
  hyper

SEQ ID NO: 389055 - DNA, 136 bp, Homo sapiens; identical to SEQ ID NO: 236653
  chr12:109747913-109748049
  hyper

SEQ ID NO: 389056 - DNA, 175 bp, Homo sapiens; identical to SEQ ID NO: 236654
  chr12:109915370-109915545
  hyper

SEQ ID NO: 389057 - DNA, 48 bp, Homo sapiens; identical to SEQ ID NO: 289339
  chr12:110939787-110939835
  hyper

SEQ ID NO: 389058 - DNA, 102 bp, Homo sapiens; identical to SEQ ID NO: 122993
  chr12:110939888-110939990
  hyper

SEQ ID NO: 389059 - DNA, 181 bp, Homo sapiens; identical to SEQ ID NO: 236671
  chr12:112123544-112123725
  hyper

SEQ ID NO: 389060 - DNA, 35 bp, Homo sapiens; identical to SEQ ID NO: 203186
  chr12:112884177-112884212
  hyper

SEQ ID NO: 389061 - DNA, 58 bp, Homo sapiens; identical to SEQ ID NO: 203187
  chr12:112915451-112915509
  hyper

SEQ ID NO: 389062 - DNA, 165 bp, Homo sapiens; identical to SEQ ID NO: 236698
  chr12:114404167-114404332
  hyper

SEQ ID NO: 389063 - DNA, 34 bp, Homo sapiens; identical to SEQ ID NO: 203200
  chr12:114841183-114841217
  hyper

SEQ ID NO: 389064 - DNA, 147 bp, Homo sapiens; identical to SEQ ID NO: 203201
  chr12:114841493-114841640
  hyper

SEQ ID NO: 389065 - DNA, 142 bp, Homo sapiens; identical to SEQ ID NO: 289387
  chr12:114843805-114843947
  hyper

SEQ ID NO: 389066 - DNA, 109 bp, Homo sapiens; identical to SEQ ID NO: 203209
  chr12:114883302-114883411
  hyper

SEQ ID NO: 389067 - DNA, 203 bp, Homo sapiens; identical to SEQ ID NO: 236725
  chr12:116713913-116714116
  hyper

SEQ ID NO: 389068 - DNA, 170 bp, Homo sapiens; identical to SEQ ID NO: 289434
  chr12:119418346-119418516
  hyper

SEQ ID NO: 389069 - DNA, 59 bp, Homo sapiens; identical to SEQ ID NO: 203227
  chr12:119419899-119419958
  hyper

SEQ ID NO: 389070 - DNA, 253 bp, Homo sapiens; identical to SEQ ID NO: 236751
  chr12:120315130-120315383
  hyper

SEQ ID NO: 389071 - DNA, 76 bp, Homo sapiens; identical to SEQ ID NO: 236756
  chr12:120739996-120740072
  hyper

SEQ ID NO: 389072 - DNA, 42 bp, Homo sapiens; identical to SEQ ID NO: 236759
  chr12:120884034-120884076
  hyper

SEQ ID NO: 389073 - DNA, 90 bp, Homo sapiens; identical to SEQ ID NO: 236775
  chr12:122710555-122710645
  hyper

SEQ ID NO: 389074 - DNA, 178 bp, Homo sapiens; identical to SEQ ID NO: 203244
  chr12:123451028-123451206
  hyper

SEQ ID NO: 389075 - DNA, 274 bp, Homo sapiens; identical to SEQ ID NO: 224479
  chr12:124017709-124017983
  hyper

SEQ ID NO: 389076 - DNA, 192 bp, Homo sapiens; identical to SEQ ID NO: 289502
  chr12:127211385-127211577
  hyper

SEQ ID NO: 389077 - DNA, 86 bp, Homo sapiens; identical to SEQ ID NO: 203256
  chr12:130387117-130387203
  hyper

SEQ ID NO: 389078 - DNA, 36 bp, Homo sapiens; identical to SEQ ID NO: 384475
  chr12:130498862-130498898
  hyper

SEQ ID NO: 389079 - DNA, 442 bp, Homo sapiens; identical to SEQ ID NO: 226553
  chr12:133443618-133444060
  hyper

SEQ ID NO: 389080 - DNA, 41 bp, Homo sapiens; identical to SEQ ID NO: 289539
  chr13:20532066-20532107
  hyper

SEQ ID NO: 389081 - DNA, 147 bp, Homo sapiens
  chr13:20766940-20767087
  hyper
ggcggggccggggcgggggtctcggcgttggggtctctgcgctggggctcctgcgctcctaggcgggtcctgggccgggcgccgccgaggggctccgagtcggggagaggagcgcgcgggcgctgcggggccgcaacacctgtctcc

SEQ ID NO: 389082 - DNA, 105 bp, Homo sapiens; identical to SEQ ID NO: 224501
  chr13:21141668-21141773
  hyper

SEQ ID NO: 389083 - DNA, 122 bp, Homo sapiens; identical to SEQ ID NO: 236864
  chr13:21635883-21636005
  hyper

SEQ ID NO: 389084 - DNA, 178 bp, Homo sapiens; identical to SEQ ID NO: 236869
  chr13:21872501-21872679
  hyper

SEQ ID NO: 389085 - DNA, 132 bp, Homo sapiens; identical to SEQ ID NO: 236875
  chr13:22248800-22248932
  hyper

SEQ ID NO: 389086 - DNA, 223 bp, Homo sapiens; identical to SEQ ID NO: 203284
  chr13:23949731-23949954
  hyper

SEQ ID NO: 389087 - DNA, 132 bp, Homo sapiens; identical to SEQ ID NO: 203285
  chr13:24553697-24553829
  hyper

SEQ ID NO: 389088 - DNA, 190 bp, Homo sapiens; identical to SEQ ID NO: 203287
  chr13:25497658-25497848
  hyper

SEQ ID NO: 389089 - DNA, 48 bp, Homo sapiens; identical to SEQ ID NO: 203289
  chr13:25861519-25861567
  hyper

SEQ ID NO: 389090 - DNA, 94 bp, Homo sapiens; identical to SEQ ID NO: 289582
  chr13:26624294-26624388
  hyper

SEQ ID NO: 389091 - DNA, 178 bp, Homo sapiens; identical to SEQ ID NO: 236908
  chr13:27335041-27335219
  hyper

SEQ ID NO: 389092 - DNA, 275 bp, Homo sapiens; identical to SEQ ID NO: 203294
  chr13:27744759-27745034
  hyper

SEQ ID NO: 389093 - DNA, 203 bp, Homo sapiens; identical to SEQ ID NO: 236911
  chr13:28194643-28194846
  hyper

SEQ ID NO: 389094 - DNA, 58 bp, Homo sapiens; identical to SEQ ID NO: 289593
  chr13:28364282-28364340
  hyper

SEQ ID NO: 389095 - DNA, 236 bp, Homo sapiens; identical to SEQ ID NO: 203297
  chr13:28371461-28371697
  hyper

SEQ ID NO: 389096 - DNA, 120 bp, Homo sapiens
  chr13:28494087-28494207
  hyper
atggtgcggcggccggcccgccggtccgcgctggctgtgggttccctctgagatcagtgcggagctgtcaaagcgagcaggggtggcgccgggagtgggaacgccacacagtgccaaatc

SEQ ID NO: 389097 - DNA, 508 bp, Homo sapiens; identical to SEQ ID NO: 289601
  chr13:28494265-28494773
  hyper

SEQ ID NO: 389098 - DNA, 263 bp, Homo sapiens; identical to SEQ ID NO: 289602
  chr13:28495754-28496017
  hyper

SEQ ID NO: 389099 - DNA, 106 bp, Homo sapiens; identical to SEQ ID NO: 203314
  chr13:28636040-28636146
  hyper

SEQ ID NO: 389100 - DNA, 94 bp, Homo sapiens; identical to SEQ ID NO: 236951
  chr13:30982774-30982868
  hyper

SEQ ID NO: 389101 - DNA, 236 bp, Homo sapiens; identical to SEQ ID NO: 236952
  chr13:31039902-31040138
  hyper

SEQ ID NO: 389102 - DNA, 146 bp, Homo sapiens; identical to SEQ ID NO: 224540
  chr13:32905055-32905201
  hyper

SEQ ID NO: 389103 - DNA, 96 bp, Homo sapiens; identical to SEQ ID NO: 224543
  chr13:32918694-32918790
  hyper

SEQ ID NO: 389104 - DNA, 188 bp, Homo sapiens; identical to SEQ ID NO: 224547
  chr13:32931878-32932066
  hyper

SEQ ID NO: 389105 - DNA, 74 bp, Homo sapiens; identical to SEQ ID NO: 236957
  chr13:33590393-33590467
  hyper

SEQ ID NO: 389106 - DNA, 218 bp, Homo sapiens; identical to SEQ ID NO: 203322
  chr13:33924391-33924609
  hyper

SEQ ID NO: 389107 - DNA, 130 bp, Homo sapiens; identical to SEQ ID NO: 203323
  chr13:33924790-33924920
  hyper

SEQ ID NO: 389108 - DNA, 38 bp, Homo sapiens; identical to SEQ ID NO: 289671
  chr13:37247935-37247973
  hyper

SEQ ID NO: 389109 - DNA, 193 bp, Homo sapiens; identical to SEQ ID NO: 203331
  chr13:37248319-37248512
  hyper

SEQ ID NO: 389110 - DNA, 1233 bp, Homo sapiens; identical to SEQ ID NO: 236979
  chr13:40176535-40177768
  hyper

SEQ ID NO: 389111 - DNA, 88 bp, Homo sapiens; identical to SEQ ID NO: 236982
  chr13:41345169-41345257
  hyper

SEQ ID NO: 389112 - DNA, 172 bp, Homo sapiens; identical to SEQ ID NO: 236987
  chr13:41885138-41885310
  hyper

SEQ ID NO: 389113 - DNA, 162 bp, Homo sapiens; identical to SEQ ID NO: 224571
  chr13:42615145-42615307
  hyper

SEQ ID NO: 389114 - DNA, 174 bp, Homo sapiens; identical to SEQ ID NO: 203345
  chr13:43148495-43148669
  hyper

SEQ ID NO: 389115 - DNA, 473 bp, Homo sapiens; identical to SEQ ID NO: 203346
  chr13:43148698-43149171
  hyper

SEQ ID NO: 389116 - DNA, 43 bp, Homo sapiens; identical to SEQ ID NO: 203347
  chr13:43149172-43149215
  hyper

SEQ ID NO: 389117 - DNA, 34 bp, Homo sapiens; identical to SEQ ID NO: 289709
  chr13:43149333-43149367
  hyper

SEQ ID NO: 389118 - DNA, 205 bp, Homo sapiens; identical to SEQ ID NO: 224576
  chr13:44991619-44991824
  hyper

SEQ ID NO: 389119 - DNA, 31 bp, Homo sapiens; identical to SEQ ID NO: 237002
  chr13:45694566-45694597
  hyper

SEQ ID NO: 389120 - DNA, 37 bp, Homo sapiens; identical to SEQ ID NO: 237010
  chr13:46756059-46756096
  hyper

SEQ ID NO: 389121 - DNA, 47 bp, Homo sapiens; identical to SEQ ID NO: 203366
  chr13:51086772-51086819
  hyper

SEQ ID NO: 389122 - DNA, 124 bp, Homo sapiens; identical to SEQ ID NO: 237033
  chr13:52377716-52377840
  hyper

SEQ ID NO: 389123 - DNA, 291 bp, Homo sapiens; identical to SEQ ID NO: 224578
  chr13:52585269-52585560
  hyper

SEQ ID NO: 389124 - DNA, 223 bp, Homo sapiens; identical to SEQ ID NO: 237034
  chr13:52586275-52586498
  hyper

SEQ ID NO: 389125 - DNA, 280 bp, Homo sapiens; identical to SEQ ID NO: 224580
  chr13:52702767-52703047
  hyper

SEQ ID NO: 389126 - DNA, 649 bp, Homo sapiens; identical to SEQ ID NO: 237036
  chr13:52733271-52733920
  hyper

SEQ ID NO: 389127 - DNA, 256 bp, Homo sapiens; identical to SEQ ID NO: 237039
  chr13:53029197-53029453
  hyper

SEQ ID NO: 389128 - DNA, 352 bp, Homo sapiens; identical to SEQ ID NO: 203379
  chr13:58205443-58205795
  hyper

SEQ ID NO: 389129 - DNA, 117 bp, Homo sapiens; identical to SEQ ID NO: 289798
  chr13:73632748-73632865
  hyper

SEQ ID NO: 389130 - DNA, 69 bp, Homo sapiens; identical to SEQ ID NO: 123880
  chr13:73632890-73632959
  hyper

SEQ ID NO: 389131 - DNA, 101 bp, Homo sapiens; identical to SEQ ID NO: 237072
  chr13:76123767-76123868
  hyper

SEQ ID NO: 389132 - DNA, 171 bp, Homo sapiens; identical to SEQ ID NO: 203393
  chr13:77901202-77901373
  hyper

SEQ ID NO: 389133 - DNA, 724 bp, Homo sapiens; identical to SEQ ID NO: 237090
  chr13:80913011-80913735
  hyper

SEQ ID NO: 389134 - DNA, 79 bp, Homo sapiens; identical to SEQ ID NO: 203397
  chr13:80914000-80914079
  hyper

SEQ ID NO: 389135 - DNA, 437 bp, Homo sapiens; identical to SEQ ID NO: 289830
  chr13:80914144-80914581
  hyper

SEQ ID NO: 389136 - DNA, 928 bp, Homo sapiens; identical to SEQ ID NO: 289831
  chr13:80914613-80915541
  hyper

SEQ ID NO: 389137 - DNA, 93 bp, Homo sapiens; identical to SEQ ID NO: 203401
  chr13:80915582-80915675
  hyper

SEQ ID NO: 389138 - DNA, 251 bp, Homo sapiens; identical to SEQ ID NO: 289837
  chr13:88326061-88326312
  hyper

SEQ ID NO: 389139 - DNA, 166 bp, Homo sapiens; identical to SEQ ID NO: 237107
  chr13:95354380-95354546
  hyper

SEQ ID NO: 389140 - DNA, 186 bp, Homo sapiens; identical to SEQ ID NO: 237180
  chr13:110790766-110790952
  hyper

SEQ ID NO: 389141 - DNA, 240 bp, Homo sapiens; identical to SEQ ID NO: 224638
  chr13:111213793-111214033
  hyper

SEQ ID NO: 389142 - DNA, 58 bp, Homo sapiens; identical to SEQ ID NO: 237187
  chr13:111268659-111268717
  hyper

SEQ ID NO: 389143 - DNA, 150 bp, Homo sapiens; identical to SEQ ID NO: 203457
  chr13:111358789-111358939
  hyper

SEQ ID NO: 389144 - DNA, 87 bp, Homo sapiens; identical to SEQ ID NO: 203465
  chr13:113951225-113951312
  hyper

SEQ ID NO: 389145 - DNA, 76 bp, Homo sapiens
  chr13:114285627-114285703
  hyper
ttgggggtcacgctctgccctgtcctgttcttgcttgcttgggtcgtccgaagtttcttgttgcttttgtctaatt

SEQ ID NO: 389146 - DNA, 138 bp, Homo sapiens; identical to SEQ ID NO: 237222
  chr13:114566904-114567042
  hyper

SEQ ID NO: 389147 - DNA, 88 bp, Homo sapiens; identical to SEQ ID NO: 203481
  chr14:21101235-21101323
  hyper

SEQ ID NO: 389148 - DNA, 165 bp, Homo sapiens; identical to SEQ ID NO: 224663
  chr14:21150255-21150420
  hyper

SEQ ID NO: 389149 - DNA, 153 bp, Homo sapiens; identical to SEQ ID NO: 203486
  chr14:21493030-21493183
  hyper

SEQ ID NO: 389150 - DNA, 301 bp, Homo sapiens; identical to SEQ ID NO: 237250
  chr14:21905266-21905567
  hyper

SEQ ID NO: 389151 - DNA, 240 bp, Homo sapiens; identical to SEQ ID NO: 237253
  chr14:21979450-21979690
  hyper

SEQ ID NO: 389152 - DNA, 381 bp, Homo sapiens; identical to SEQ ID NO: 289985
  chr14:21994388-21994769
  hyper

SEQ ID NO: 389153 - DNA, 162 bp, Homo sapiens; identical to SEQ ID NO: 237256
  chr14:23057965-23058127
  hyper

SEQ ID NO: 389154 - DNA, 223 bp, Homo sapiens; identical to SEQ ID NO: 289994
  chr14:23355821-23356044
  hyper

SEQ ID NO: 389155 - DNA, 38 bp, Homo sapiens; identical to SEQ ID NO: 237263
  chr14:23388823-23388861
  hyper

SEQ ID NO: 389156 - DNA, 204 bp, Homo sapiens; identical to SEQ ID NO: 289998
  chr14:23450224-23450428
  hyper

SEQ ID NO: 389157 - DNA, 107 bp, Homo sapiens; identical to SEQ ID NO: 203495
  chr14:23450746-23450853
  hyper

SEQ ID NO: 389158 - DNA, 35 bp, Homo sapiens; identical to SEQ ID NO: 237270
  chr14:23540715-23540750
  hyper

SEQ ID NO: 389159 - DNA, 244 bp, Homo sapiens; identical to SEQ ID NO: 237271
  chr14:23755249-23755493
  hyper

SEQ ID NO: 389160 - DNA, 188 bp, Homo sapiens; identical to SEQ ID NO: 203499
  chr14:23776071-23776259
  hyper

SEQ ID NO: 389161 - DNA, 285 bp, Homo sapiens; identical to SEQ ID NO: 290016
  chr14:24024866-24025151
  hyper

SEQ ID NO: 389162 - DNA, 105 bp, Homo sapiens; identical to SEQ ID NO: 124289
  chr14:24025214-24025319
  hyper

SEQ ID NO: 389163 - DNA, 36 bp, Homo sapiens; identical to SEQ ID NO: 237281
  chr14:24025555-24025591
  hyper

SEQ ID NO: 389164 - DNA, 223 bp, Homo sapiens; identical to SEQ ID NO: 237286
  chr14:24605551-24605774
  hyper

SEQ ID NO: 389165 - DNA, 72 bp, Homo sapiens; identical to SEQ ID NO: 237289
  chr14:24658235-24658307
  hyper

SEQ ID NO: 389166 - DNA, 143 bp, Homo sapiens; identical to SEQ ID NO: 237294
  chr14:24711905-24712048
  hyper

SEQ ID NO: 389167 - DNA, 194 bp, Homo sapiens; identical to SEQ ID NO: 290037
  chr14:24837550-24837744
  hyper

SEQ ID NO: 389168 - DNA, 82 bp, Homo sapiens; identical to SEQ ID NO: 290038
  chr14:24837824-24837906
  hyper

SEQ ID NO: 389169 - DNA, 71 bp, Homo sapiens; identical to SEQ ID NO: 290054
  chr14:29242908-29242979
  hyper

SEQ ID NO: 389170 - DNA, 183 bp, Homo sapiens; identical to SEQ ID NO: 203514
  chr14:31027986-31028169
  hyper

SEQ ID NO: 389171 - DNA, 106 bp, Homo sapiens; identical to SEQ ID NO: 290070
  chr14:32670851-32670957
  hyper

SEQ ID NO: 389172 - DNA, 298 bp, Homo sapiens; identical to SEQ ID NO: 124376
  chr14:32670996-32671294
  hyper

SEQ ID NO: 389173 - DNA, 52 bp, Homo sapiens; identical to SEQ ID NO: 237345
  chr14:35874140-35874192
  hyper

SEQ ID NO: 389174 - DNA, 51 bp, Homo sapiens; identical to SEQ ID NO: 290100
  chr14:36981788-36981839
  hyper

SEQ ID NO: 389175 - DNA, 590 bp, Homo sapiens; identical to SEQ ID NO: 290117
  chr14:37641120-37641710
  hyper

SEQ ID NO: 389176 - DNA, 200 bp, Homo sapiens; identical to SEQ ID NO: 203537
  chr14:37641762-37641962
  hyper

SEQ ID NO: 389177 - DNA, 34 bp, Homo sapiens; identical to SEQ ID NO: 237397
  chr14:45722603-45722637
  hyper

SEQ ID NO: 389178 - DNA, 1012 bp, Homo sapiens
  chr14:52118494-52119506
  hyper
cggccagttggggcgggtcgggggcggggtctcagggggcggggattcgggggggcgggtcgggtcgggaggcgtgggtggggggcggggcggacgcggagcgcccctctggctggcggggccaaggggctgagaggagtggggcaggctcggcgccggtaggaagagtcagaggggtgaccagagagcccaacgcctggtgctcaagactttctccgaggtatgaacaagaaccaggcgtctgggccctttccgctcgccccatcgctcagccgccgcgccccggacgcccgctgtgccccctgccggcggggcggcggcgggactgggtttcgggagggtttctggaagtcgcgagtcccagcgaaggcagtgcaccgctctccgcctctttcttcgccttcttctcgctcccttagctctgggtgtcgggcaccggtggtaaggtcgcttctccgtgagtcggaggtcgctcactctgggacgggcggacgaggccctagggcagccgagcccggcagcgggggaggcgtggagctcggggcggcttcagcggcgggggcgggaggctggtcctggctgcagactgcgcgcctgggctccgtgcgcggtccctggttctctgcatcgcggaggtccccggatcacagggctccctggcgggccccggcacccaggtctgtgtcgctgtggctgggcgccgggactagcacccgagtcccgcgctcccgggggctgcgccgtgccgcctgttgtgcgcgcgcagaggccggacagcccggctgcgggaagggacccgagcgcagggtctgccccgcgtcccggaaagtgcctagtctgcggagccggaggttgagctggggcagatcggcgccagacgggggcctgggtgagatacgagttgggggtgcggcctgcagaatttgggtttctggaggagcttacggcgcgctggcggagccccaggcgaacaggagcaccggattcggctccgggagggccaggcactgtc

SEQ ID NO: 389179 - DNA, 39 bp, Homo sapiens; identical to SEQ ID NO: 290169
  chr14:52119545-52119584
  hyper

SEQ ID NO: 389180 - DNA, 40 bp, Homo sapiens; identical to SEQ ID NO: 203584
  chr14:53161604-53161644
  hyper

SEQ ID NO: 389181 - DNA, 544 bp, Homo sapiens; identical to SEQ ID NO: 237428
  chr14:53257754-53258298
  hyper

SEQ ID NO: 389182 - DNA, 71 bp, Homo sapiens; identical to SEQ ID NO: 237431
  chr14:53619544-53619615
  hyper

SEQ ID NO: 389183 - DNA, 290 bp, Homo sapiens; identical to SEQ ID NO: 237436
  chr14:54908014-54908304
  hyper

SEQ ID NO: 389184 - DNA, 38 bp, Homo sapiens; identical to SEQ ID NO: 224692
  chr14:55032358-55032396
  hyper

SEQ ID NO: 389185 - DNA, 39 bp, Homo sapiens; identical to SEQ ID NO: 237453
  chr14:57281266-57281305
  hyper

SEQ ID NO: 389186 - DNA, 40 bp, Homo sapiens; identical to SEQ ID NO: 237471
  chr14:60972828-60972868
  hyper

SEQ ID NO: 389187 - DNA, 188 bp, Homo sapiens; identical to SEQ ID NO: 237499
  chr14:62229157-62229345
  hyper

SEQ ID NO: 389188 - DNA, 31 bp, Homo sapiens; identical to SEQ ID NO: 203629
  chr14:63511825-63511856
  hyper

SEQ ID NO: 389189 - DNA, 533 bp, Homo sapiens; identical to SEQ ID NO: 237504
  chr14:64108074-64108607
  hyper

SEQ ID NO: 389190 - DNA, 221 bp, Homo sapiens; identical to SEQ ID NO: 290271
  chr14:64760852-64761073
  hyper

SEQ ID NO: 389191 - DNA, 61 bp, Homo sapiens
  chr14:64761254-64761315
  hyper
ccacaaggatagtggcgcacagatggcgctccccgcagccccagtctcagatttaagaggt

SEQ ID NO: 389192 - DNA, 138 bp, Homo sapiens; identical to SEQ ID NO: 237510
  chr14:65008388-65008526
  hyper

SEQ ID NO: 389193 - DNA, 37 bp, Homo sapiens; identical to SEQ ID NO: 237529
  chr14:68067076-68067113
  hyper

SEQ ID NO: 389194 - DNA, 126 bp, Homo sapiens; identical to SEQ ID NO: 203647
  chr14:68141650-68141776
  hyper

SEQ ID NO: 389195 - DNA, 56 bp, Homo sapiens; identical to SEQ ID NO: 237535
  chr14:69260259-69260315
  hyper

SEQ ID NO: 389196 - DNA, 143 bp, Homo sapiens; identical to SEQ ID NO: 290320
  chr14:69950636-69950779
  hyper

SEQ ID NO: 389197 - DNA, 365 bp, Homo sapiens; identical to SEQ ID NO: 203656
  chr14:70193443-70193808
  hyper

SEQ ID NO: 389198 - DNA, 60 bp, Homo sapiens; identical to SEQ ID NO: 224724
  chr14:71108798-71108858
  hyper

SEQ ID NO: 389199 - DNA, 129 bp, Homo sapiens; identical to SEQ ID NO: 237557
  chr14:71786797-71786926
  hyper

SEQ ID NO: 389200 - DNA, 47 bp, Homo sapiens; identical to SEQ ID NO: 237558
  chr14:71787538-71787585
  hyper

SEQ ID NO: 389201 - DNA, 107 bp, Homo sapiens; identical to SEQ ID NO: 237563
  chr14:73361733-73361840
  hyper

SEQ ID NO: 389202 - DNA, 137 bp, Homo sapiens; identical to SEQ ID NO: 237569
  chr14:74180761-74180898
  hyper

SEQ ID NO: 389203 - DNA, 44 bp, Homo sapiens; identical to SEQ ID NO: 203664
  chr14:74225613-74225657
  hyper

SEQ ID NO: 389204 - DNA, 58 bp, Homo sapiens; identical to SEQ ID NO: 203670
  chr14:74709107-74709165
  hyper

SEQ ID NO: 389205 - DNA, 222 bp, Homo sapiens; identical to SEQ ID NO: 237584
  chr14:74724285-74724507
  hyper

SEQ ID NO: 389206 - DNA, 44 bp, Homo sapiens; identical to SEQ ID NO: 237586
  chr14:74959041-74959085
  hyper

SEQ ID NO: 389207 - DNA, 259 bp, Homo sapiens; identical to SEQ ID NO: 290364
  chr14:74960116-74960375
  hyper

SEQ ID NO: 389208 - DNA, 145 bp, Homo sapiens; identical to SEQ ID NO: 203673
  chr14:75230400-75230545
  hyper

SEQ ID NO: 389209 - DNA, 124 bp, Homo sapiens; identical to SEQ ID NO: 237594
  chr14:75349046-75349170
  hyper

SEQ ID NO: 389210 - DNA, 734 bp, Homo sapiens; identical to SEQ ID NO: 237595
  chr14:75469162-75469896
  hyper

SEQ ID NO: 389211 - DNA, 196 bp, Homo sapiens; identical to SEQ ID NO: 203675
  chr14:75743668-75743864
  hyper

SEQ ID NO: 389212 - DNA, 88 bp, Homo sapiens; identical to SEQ ID NO: 384533
  chr14:77736779-77736867
  hyper

SEQ ID NO: 389213 - DNA, 97 bp, Homo sapiens; identical to SEQ ID NO: 290401
  chr14:77736883-77736980
  hyper

SEQ ID NO: 389214 - DNA, 55 bp, Homo sapiens; identical to SEQ ID NO: 203688
  chr14:78266694-78266749
  hyper

SEQ ID NO: 389215 - DNA, 233 bp, Homo sapiens; identical to SEQ ID NO: 290409
  chr14:79745242-79745475
  hyper

SEQ ID NO: 389216 - DNA, 223 bp, Homo sapiens; identical to SEQ ID NO: 290410
  chr14:79745557-79745780
  hyper

SEQ ID NO: 389217 - DNA, 148 bp, Homo sapiens; identical to SEQ ID NO: 237634
  chr14:82000298-82000446
  hyper

SEQ ID NO: 389218 - DNA, 154 bp, Homo sapiens; identical to SEQ ID NO: 237640
  chr14:88851824-88851978
  hyper

SEQ ID NO: 389219 - DNA, 503 bp, Homo sapiens; identical to SEQ ID NO: 224745
  chr14:89020910-89021413
  hyper

SEQ ID NO: 389220 - DNA, 352 bp, Homo sapiens; identical to SEQ ID NO: 237642
  chr14:89029588-89029940
  hyper

SEQ ID NO: 389221 - DNA, 725 bp, Homo sapiens; identical to SEQ ID NO: 290430
  chr14:89290490-89291215
  hyper

SEQ ID NO: 389222 - DNA, 134 bp, Homo sapiens; identical to SEQ ID NO: 237646
  chr14:89506861-89506995
  hyper

SEQ ID NO: 389223 - DNA, 182 bp, Homo sapiens; identical to SEQ ID NO: 224749
  chr14:90167708-90167890
  hyper

SEQ ID NO: 389224 - DNA, 147 bp, Homo sapiens; identical to SEQ ID NO: 203725
  chr14:93582647-93582794
  hyper

SEQ ID NO: 389225 - DNA, 192 bp, Homo sapiens; identical to SEQ ID NO: 290470
  chr14:93896833-93897025
  hyper

SEQ ID NO: 389226 - DNA, 47 bp, Homo sapiens; identical to SEQ ID NO: 203727
  chr14:93897078-93897125
  hyper

SEQ ID NO: 389227 - DNA, 144 bp, Homo sapiens; identical to SEQ ID NO: 290473
  chr14:94254150-94254294
  hyper

SEQ ID NO: 389228 - DNA, 46 bp, Homo sapiens; identical to SEQ ID NO: 290486
  chr14:95237576-95237622
  hyper

SEQ ID NO: 389229 - DNA, 85 bp, Homo sapiens; identical to SEQ ID NO: 290487
  chr14:95237782-95237867
  hyper

SEQ ID NO: 389230 - DNA, 302 bp, Homo sapiens; identical to SEQ ID NO: 290488
  chr14:95237922-95238224
  hyper

SEQ ID NO: 389231 - DNA, 643 bp, Homo sapiens
  chr14:100069898-100070541
  hyper
cgcgcctcgagctcgcgcagcttctgctgcgagcgggccacctcgtgccacacggcgccggccgcgtggcgcccgaagcgctgccactcgcgcgccagcttgcgccccttctgccggtcgtcgtcgaggaagcagcagagctcgcgcagctcctggttgtcgtcctgcagccgctggttcacgtccttgaggccgcggatctccagcaggtgctgctgcagccgccggttcacgtcgcgcatcaggccgccgtgctccagcatgaggcccaccttctcgccctcggcgcgccgcagccgccgcgccagctcctccttgctccagcgcagcagctcctcgtccggcacctggctcagctcctccgacgccgccgccgccgtcgccgcgggcttagccatggcggggccgtcaccgcggcatcgccctcgccctcgcccggccggcgcttccccgcgccggggctccgctgggccggtccgcgcgcgggcggggggcggccgggggcgcgtgcggcccgccccgcgccgcctggcgcgtcctctcgccgcgcccgccggggccgcccgggagcccgcgcgcctcggggttgacgagcggaggcggctgctgcgtcggcggccgcggtgccgggcgctctcagggt

SEQ ID NO: 389232 - DNA, 94 bp, Homo sapiens; identical to SEQ ID NO: 237728
  chr14:100772216-100772310
  hyper

SEQ ID NO: 389233 - DNA, 52 bp, Homo sapiens; identical to SEQ ID NO: 290544
  chr14:101923286-101923338
  hyper

SEQ ID NO: 389234 - DNA, 141 bp, Homo sapiens; identical to SEQ ID NO: 237743
  chr14:102605815-102605956
  hyper

SEQ ID NO: 389235 - DNA, 241 bp, Homo sapiens; identical to SEQ ID NO: 237745
  chr14:102771431-102771672
  hyper

SEQ ID NO: 389236 - DNA, 55 bp, Homo sapiens; identical to SEQ ID NO: 384547
  chr14:103430379-103430434
  hyper

SEQ ID NO: 389237 - DNA, 38 bp, Homo sapiens; identical to SEQ ID NO: 237757
  chr14:103571012-103571050
  hyper

SEQ ID NO: 389238 - DNA, 219 bp, Homo sapiens; identical to SEQ ID NO: 290575
  chr14:103593755-103593974
  hyper

SEQ ID NO: 389239 - DNA, 140 bp, Homo sapiens; identical to SEQ ID NO: 203773
  chr14:103594004-103594144
  hyper

SEQ ID NO: 389240 - DNA, 361 bp, Homo sapiens; identical to SEQ ID NO: 237769
  chr14:104029513-104029874
  hyper

SEQ ID NO: 389241 - DNA, 119 bp, Homo sapiens; identical to SEQ ID NO: 290588
  chr14:104094604-104094723
  hyper

SEQ ID NO: 389242 - DNA, 212 bp, Homo sapiens
  chr14:105195591-105195803
  hyper
gtcaatggacagcccccaagccaggcagatggcaggtggcatcccaaggatttagggacggggtggacaggagcaggacgatggctgcagggcaaggctgggacccgcacgggtgacaagctcagtgcaggggcagggcatgcgccatctgggcagtgtggaggtgaggagcaaggacaaagcctgtgtgtggagacgccttgcacgtgtca

SEQ ID NO: 389243 - DNA, 144 bp, Homo sapiens; identical to SEQ ID NO: 224807
  chr14:105647609-105647753
  hyper

SEQ ID NO: 389244 - DNA, 677 bp, Homo sapiens; identical to SEQ ID NO: 203796
  chr15:22893131-22893808
  hyper

SEQ ID NO: 389245 - DNA, 119 bp, Homo sapiens; identical to SEQ ID NO: 125411
  chr15:29033933-29034052
  hyper

SEQ ID NO: 389246 - DNA, 58 bp, Homo sapiens; identical to SEQ ID NO: 203807
  chr15:29864126-29864184
  hyper

SEQ ID NO: 389247 - DNA, 99 bp, Homo sapiens
  chr15:33603879-33603978
  hyper
cgccggcaactgctgctggagcctgacttgactgactgcctgtcgtgtgttcgagagctgtggcttctgctcctggctcccgcgagccccgcaggacag

SEQ ID NO: 389248 - DNA, 257 bp, Homo sapiens; identical to SEQ ID NO: 237830
  chr15:34394021-34394278
  hyper

SEQ ID NO: 389249 - DNA, 65 bp, Homo sapiens; identical to SEQ ID NO: 203827
  chr15:35280590-35280655
  hyper

SEQ ID NO: 389250 - DNA, 42 bp, Homo sapiens; identical to SEQ ID NO: 237840
  chr15:35280893-35280935
  hyper

SEQ ID NO: 389251 - DNA, 63 bp, Homo sapiens; identical to SEQ ID NO: 237851
  chr15:38746261-38746324
  hyper

SEQ ID NO: 389252 - DNA, 213 bp, Homo sapiens; identical to SEQ ID NO: 237854
  chr15:40075102-40075315
  hyper

SEQ ID NO: 389253 - DNA, 357 bp, Homo sapiens; identical to SEQ ID NO: 290701
  chr15:40212244-40212601
  hyper

SEQ ID NO: 389254 - DNA, 470 bp, Homo sapiens; identical to SEQ ID NO: 290702
  chr15:40212954-40213424
  hyper

SEQ ID NO: 389255 - DNA, 36 bp, Homo sapiens; identical to SEQ ID NO: 203836
  chr15:40559555-40559591
  hyper

SEQ ID NO: 389256 - DNA, 54 bp, Homo sapiens; identical to SEQ ID NO: 237860
  chr15:40698353-40698407
  hyper

SEQ ID NO: 389257 - DNA, 156 bp, Homo sapiens; identical to SEQ ID NO: 224840
  chr15:41136285-41136441
  hyper

SEQ ID NO: 389258 - DNA, 200 bp, Homo sapiens; identical to SEQ ID NO: 224842
  chr15:42112223-42112423
  hyper

SEQ ID NO: 389259 - DNA, 71 bp, Homo sapiens; identical to SEQ ID NO: 237877
  chr15:42349322-42349393
  hyper

SEQ ID NO: 389260 - DNA, 97 bp, Homo sapiens; identical to SEQ ID NO: 203849
  chr15:42841085-42841182
  hyper

SEQ ID NO: 389261 - DNA, 92 bp, Homo sapiens; identical to SEQ ID NO: 203856
  chr15:45459390-45459482
  hyper

SEQ ID NO: 389262 - DNA, 165 bp, Homo sapiens; identical to SEQ ID NO: 237912
  chr15:45815255-45815420
  hyper

SEQ ID NO: 389263 - DNA, 31 bp, Homo sapiens; identical to SEQ ID NO: 237913
  chr15:45879207-45879238
  hyper

SEQ ID NO: 389264 - DNA, 50 bp, Homo sapiens; identical to SEQ ID NO: 290790
  chr15:48483906-48483956
  hyper

SEQ ID NO: 389265 - DNA, 156 bp, Homo sapiens; identical to SEQ ID NO: 237920
  chr15:48623408-48623564
  hyper

SEQ ID NO: 389266 - DNA, 135 bp, Homo sapiens; identical to SEQ ID NO: 237924
  chr15:49255861-49255996
  hyper

SEQ ID NO: 389267 - DNA, 76 bp, Homo sapiens
  chr15:51633890-51633966
  hyper
ggcgctgagggaggccgtggggacgcgggttggggcctgcgtggcgccctggcggccgtggcgctgctctcggcgc

SEQ ID NO: 389268 - DNA, 153 bp, Homo sapiens; identical to SEQ ID NO: 290808
  chr15:51634175-51634328
  hyper

SEQ ID NO: 389269 - DNA, 126 bp, Homo sapiens; identical to SEQ ID NO: 203875
  chr15:51973520-51973646
  hyper

SEQ ID NO: 389270 - DNA, 47 bp, Homo sapiens; identical to SEQ ID NO: 290811
  chr15:51974094-51974141
  hyper

SEQ ID NO: 389271 - DNA, 264 bp, Homo sapiens; identical to SEQ ID NO: 203876
  chr15:52028982-52029246
  hyper

SEQ ID NO: 389272 - DNA, 510 bp, Homo sapiens
  chr15:52820415-52820925
  hyper
gcagcatctttccccggggctcgccacccccagcgcagctaaactggggagctaaaggtgatacggccaccgtttgcaggattcaaaataacctcacagaaaggctagctggcggtagaagcggcactgcataccaacacaagacgttattttaagcgcgtgtccccacgagagaacccatccgatctactggagcaagcatctcccacccgccgggaattttccaaagccaagcaggaggggaggcacgcccgccctgctaaatccacatgggccccctttccactccgaagcccgctctgcccccagctcgagcagcgcggcaggggcctgggagacccccgaggcgggccaccttccgccgccttcaccatctcgcccgaaagaggaaggtgccgcagcgggcgaccggctggtagggccgagggttctgaggcgctgaaggggatggcgctggtggggctcgcctgggcccggcgctcccgccccctccccagcctgacagctggc

SEQ ID NO: 389273 - DNA, 126 bp, Homo sapiens; identical to SEQ ID NO: 203883
  chr15:53091078-53091204
  hyper

SEQ ID NO: 389274 - DNA, 486 bp, Homo sapiens; identical to SEQ ID NO: 237955
  chr15:55489070-55489556
  hyper

SEQ ID NO: 389275 - DNA, 79 bp, Homo sapiens; identical to SEQ ID NO: 290832
  chr15:56035510-56035589
  hyper

SEQ ID NO: 389276 - DNA, 82 bp, Homo sapiens; identical to SEQ ID NO: 125767
  chr15:56035677-56035759
  hyper

SEQ ID NO: 389277 - DNA, 404 bp, Homo sapiens; identical to SEQ ID NO: 237959
  chr15:56657423-56657827
  hyper

SEQ ID NO: 389278 - DNA, 151 bp, Homo sapiens; identical to SEQ ID NO: 203890
  chr15:57883948-57884099
  hyper

SEQ ID NO: 389279 - DNA, 255 bp, Homo sapiens; identical to SEQ ID NO: 237968
  chr15:59225884-59226139
  hyper

SEQ ID NO: 389280 - DNA, 453 bp, Homo sapiens; identical to SEQ ID NO: 203893
  chr15:59397170-59397623
  hyper

SEQ ID NO: 389281 - DNA, 170 bp, Homo sapiens; identical to SEQ ID NO: 237971
  chr15:59664777-59664947
  hyper

SEQ ID NO: 389282 - DNA, 97 bp, Homo sapiens; identical to SEQ ID NO: 203912
  chr15:62456139-62456236
  hyper

SEQ ID NO: 389283 - DNA, 204 bp, Homo sapiens
  chr15:62456395-62456599
  hyper
cgggttcccggacagtactcagcagccaggcgcagggcgtcgccggcgcggcccagagccacggtgcccttggcctccaggcgctcaggaagcggggccctggatgacagcgggctcgaggagggggcccgggccggggactcggatcccgcgcggcgctcctcgtcctcgttcccgctggagacggagcggacgcgggccagg

SEQ ID NO: 389284 - DNA, 98 bp, Homo sapiens; identical to SEQ ID NO: 237997
  chr15:64126646-64126744
  hyper

SEQ ID NO: 389285 - DNA, 336 bp, Homo sapiens; identical to SEQ ID NO: 238000
  chr15:64455663-64455999
  hyper

SEQ ID NO: 389286 - DNA, 79 bp, Homo sapiens; identical to SEQ ID NO: 203923
  chr15:65281790-65281869
  hyper

SEQ ID NO: 389287 - DNA, 39 bp, Homo sapiens; identical to SEQ ID NO: 290902
  chr15:65477569-65477608
  hyper

SEQ ID NO: 389288 - DNA, 188 bp, Homo sapiens; identical to SEQ ID NO: 238012
  chr15:65578946-65579134
  hyper

SEQ ID NO: 389289 - DNA, 89 bp, Homo sapiens; identical to SEQ ID NO: 290904
  chr15:65647775-65647864
  hyper

SEQ ID NO: 389290 - DNA, 241 bp, Homo sapiens; identical to SEQ ID NO: 290905
  chr15:65648151-65648392
  hyper

SEQ ID NO: 389291 - DNA, 390 bp, Homo sapiens; identical to SEQ ID NO: 203925
  chr15:65670244-65670634
  hyper

SEQ ID NO: 389292 - DNA, 210 bp, Homo sapiens
  chr15:65714831-65715041
  hyper
ctgcggacacgacaggagcactcccaacacacacacacacacacacacacacacacacacacacgactccagactctgcgaaccaaaggcacacacccactgcggacaagcacgccccacaaacgccccccggccgcagctcgcagacccccgcgcaggcatcgcgggcacctggacgcgcagcccccgcacttgctcgggactccggct

SEQ ID NO: 389293 - DNA, 65 bp, Homo sapiens; identical to SEQ ID NO: 203928
  chr15:66586477-66586542
  hyper

SEQ ID NO: 389294 - DNA, 108 bp, Homo sapiens; identical to SEQ ID NO: 238027
  chr15:66797136-66797244
  hyper

SEQ ID NO: 389295 - DNA, 102 bp, Homo sapiens; identical to SEQ ID NO: 238032
  chr15:67058139-67058241
  hyper

SEQ ID NO: 389296 - DNA, 46 bp, Homo sapiens; identical to SEQ ID NO: 238052
  chr15:68598773-68598819
  hyper

SEQ ID NO: 389297 - DNA, 173 bp, Homo sapiens; identical to SEQ ID NO: 238057
  chr15:69111353-69111526
  hyper

SEQ ID NO: 389298 - DNA, 82 bp, Homo sapiens; identical to SEQ ID NO: 238066
  chr15:69706605-69706687
  hyper

SEQ ID NO: 389299 - DNA, 180 bp, Homo sapiens; identical to SEQ ID NO: 238068
  chr15:70388517-70388697
  hyper

SEQ ID NO: 389300 - DNA, 76 bp, Homo sapiens; identical to SEQ ID NO: 203948
  chr15:70391279-70391355
  hyper

SEQ ID NO: 389301 - DNA, 101 bp, Homo sapiens; identical to SEQ ID NO: 203965
  chr15:72978671-72978772
  hyper

SEQ ID NO: 389302 - DNA, 164 bp, Homo sapiens; identical to SEQ ID NO: 224892
  chr15:73344008-73344172
  hyper

SEQ ID NO: 389303 - DNA, 283 bp, Homo sapiens; identical to SEQ ID NO: 290986
  chr15:73611203-73611486
  hyper

SEQ ID NO: 389304 - DNA, 158 bp, Homo sapiens; identical to SEQ ID NO: 238111
  chr15:75316097-75316255
  hyper

SEQ ID NO: 389305 - DNA, 58 bp, Homo sapiens; identical to SEQ ID NO: 238121
  chr15:76136832-76136890
  hyper

SEQ ID NO: 389306 - DNA, 115 bp, Homo sapiens; identical to SEQ ID NO: 238133
  chr15:77924998-77925113
  hyper

SEQ ID NO: 389307 - DNA, 53 bp, Homo sapiens; identical to SEQ ID NO: 291046
  chr15:77925412-77925465
  hyper

SEQ ID NO: 389308 - DNA, 67 bp, Homo sapiens; identical to SEQ ID NO: 291047
  chr15:77925725-77925792
  hyper

SEQ ID NO: 389309 - DNA, 162 bp, Homo sapiens; identical to SEQ ID NO: 238160
  chr15:81616530-81616692
  hyper

SEQ ID NO: 389310 - DNA, 60 bp, Homo sapiens; identical to SEQ ID NO: 291094
  chr15:84322262-84322322
  hyper

SEQ ID NO: 389311 - DNA, 328 bp, Homo sapiens; identical to SEQ ID NO: 224922
  chr15:85143661-85143989
  hyper

SEQ ID NO: 389312 - DNA, 56 bp, Homo sapiens; identical to SEQ ID NO: 126306
  chr15:85923617-85923673
  hyper

SEQ ID NO: 389313 - DNA, 98 bp, Homo sapiens; identical to SEQ ID NO: 238185
  chr15:86126184-86126282
  hyper

SEQ ID NO: 389314 - DNA, 265 bp, Homo sapiens; identical to SEQ ID NO: 238190
  chr15:89010954-89011219
  hyper

SEQ ID NO: 389315 - DNA, 251 bp, Homo sapiens; identical to SEQ ID NO: 238199
  chr15:89878847-89879098
  hyper

SEQ ID NO: 389316 - DNA, 60 bp, Homo sapiens; identical to SEQ ID NO: 291143
  chr15:90891947-90892007
  hyper

SEQ ID NO: 389317 - DNA, 72 bp, Homo sapiens; identical to SEQ ID NO: 204036
  chr15:91414358-91414430
  hyper

SEQ ID NO: 389318 - DNA, 974 bp, Homo sapiens; identical to SEQ ID NO: 238238
  chr15:93443566-93444540
  hyper

SEQ ID NO: 389319 - DNA, 210 bp, Homo sapiens; identical to SEQ ID NO: 291159
  chr15:93615691-93615901
  hyper

SEQ ID NO: 389320 - DNA, 300 bp, Homo sapiens; identical to SEQ ID NO: 384586
  chr15:94774274-94774574
  hyper

SEQ ID NO: 389321 - DNA, 377 bp, Homo sapiens
  chr15:96873421-96873798
  hyper
gggtggtgcgcgagcggcggaattcgtgacatcgccaagttgcgagaggcaaactccccgattccatccaaagcctctcgcggagcctttaagagacgttgtgtgtgcgcgctgcgctagtctccccgccggggcggaaacctcgggtgcgggatgtggggagagcagaggcagcgctcgcagggccagcacgggcccatccccctctcggcggcggcggcggcggcggcgcggccaccccgtccccgcccccccaacccccggtcccccgcgtgccccgcgccgcgccggcgacgccgctcgcgctaggaccgggctgcgcccgcggccgccatggcggggccgccgcagtccggccaatgacggcgagggggcgg

SEQ ID NO: 389322 - DNA, 89 bp, Homo sapiens; identical to SEQ ID NO: 291169
  chr15:96876448-96876537
  hyper

SEQ ID NO: 389323 - DNA, 199 bp, Homo sapiens; identical to SEQ ID NO: 204047
  chr15:96876621-96876820
  hyper

SEQ ID NO: 389324 - DNA, 570 bp, Homo sapiens; identical to SEQ ID NO: 224952
  chr15:99192162-99192732
  hyper

SEQ ID NO: 389325 - DNA, 52 bp, Homo sapiens; identical to SEQ ID NO: 238266
  chr15:99791471-99791523
  hyper

SEQ ID NO: 389326 - DNA, 42 bp, Homo sapiens; identical to SEQ ID NO: 204068
  chr15:100273862-100273904
  hyper

SEQ ID NO: 389327 - DNA, 48 bp, Homo sapiens; identical to SEQ ID NO: 224955
  chr15:100273946-100273994
  hyper

SEQ ID NO: 389328 - DNA, 246 bp, Homo sapiens; identical to SEQ ID NO: 238271
  chr15:101142345-101142591
  hyper

SEQ ID NO: 389329 - DNA, 270 bp, Homo sapiens; identical to SEQ ID NO: 238273
  chr15:101419539-101419809
  hyper

SEQ ID NO: 389330 - DNA, 126 bp, Homo sapiens; identical to SEQ ID NO: 238287
  chr16:231282-231408
  hyper

SEQ ID NO: 389331 - DNA, 50 bp, Homo sapiens; identical to SEQ ID NO: 204077
  chr16:717960-718010
  hyper

SEQ ID NO: 389332 - DNA, 105 bp, Homo sapiens; identical to SEQ ID NO: 224977
  chr16:778111-778216
  hyper

SEQ ID NO: 389333 - DNA, 434 bp, Homo sapiens; identical to SEQ ID NO: 224987
  chr16:1660449-1660883
  hyper

SEQ ID NO: 389334 - DNA, 153 bp, Homo sapiens; identical to SEQ ID NO: 291253
  chr16:1877136-1877289
  hyper

SEQ ID NO: 389335 - DNA, 171 bp, Homo sapiens; identical to SEQ ID NO: 238316
  chr16:2054057-2054228
  hyper

SEQ ID NO: 389336 - DNA, 239 bp, Homo sapiens; identical to SEQ ID NO: 238336
  chr16:3086764-3087003
  hyper

SEQ ID NO: 389337 - DNA, 37 bp, Homo sapiens; identical to SEQ ID NO: 291287
  chr16:3097009-3097046
  hyper

SEQ ID NO: 389338 - DNA, 219 bp, Homo sapiens; identical to SEQ ID NO: 238360
  chr16:4475918-4476137
  hyper

SEQ ID NO: 389339 - DNA, 156 bp, Homo sapiens; identical to SEQ ID NO: 238361
  chr16:4526213-4526369
  hyper

SEQ ID NO: 389340 - DNA, 215 bp, Homo sapiens; identical to SEQ ID NO: 225008
  chr16:4852975-4853190
  hyper

SEQ ID NO: 389341 - DNA, 91 bp, Homo sapiens; identical to SEQ ID NO: 291342
  chr16:9229669-9229760
  hyper

SEQ ID NO: 389342 - DNA, 78 bp, Homo sapiens; identical to SEQ ID NO: 291351
  chr16:11439013-11439091
  hyper

SEQ ID NO: 389343 - DNA, 147 bp, Homo sapiens; identical to SEQ ID NO: 126824
  chr16:11439156-11439303
  hyper

SEQ ID NO: 389344 - DNA, 110 bp, Homo sapiens; identical to SEQ ID NO: 238395
  chr16:11944971-11945081
  hyper

SEQ ID NO: 389345 - DNA, 91 bp, Homo sapiens; identical to SEQ ID NO: 238404
  chr16:14727905-14727996
  hyper

SEQ ID NO: 389346 - DNA, 115 bp, Homo sapiens; identical to SEQ ID NO: 238407
  chr16:15737214-15737329
  hyper

SEQ ID NO: 389347 - DNA, 33 bp, Homo sapiens; identical to SEQ ID NO: 238409
  chr16:15982613-15982646
  hyper

SEQ ID NO: 389348 - DNA, 103 bp, Homo sapiens; identical to SEQ ID NO: 204127
  chr16:16155950-16156053
  hyper

SEQ ID NO: 389349 - DNA, 57 bp, Homo sapiens; identical to SEQ ID NO: 238431
  chr16:22308550-22308607
  hyper

SEQ ID NO: 389350 - DNA, 191 bp, Homo sapiens; identical to SEQ ID NO: 238446
  chr16:24550403-24550594
  hyper

SEQ ID NO: 389351 - DNA, 83 bp, Homo sapiens; identical to SEQ ID NO: 238451
  chr16:25123186-25123269
  hyper

SEQ ID NO: 389352 - DNA, 142 bp, Homo sapiens; identical to SEQ ID NO: 225038
  chr16:27121251-27121393
  hyper

SEQ ID NO: 389353 - DNA, 290 bp, Homo sapiens; identical to SEQ ID NO: 204145
  chr16:27413511-27413801
  hyper

SEQ ID NO: 389354 - DNA, 307 bp, Homo sapiens; identical to SEQ ID NO: 238462
  chr16:28874813-28875120
  hyper

SEQ ID NO: 389355 - DNA, 93 bp, Homo sapiens; identical to SEQ ID NO: 204149
  chr16:28936699-28936792
  hyper

SEQ ID NO: 389356 - DNA, 79 bp, Homo sapiens; identical to SEQ ID NO: 204150
  chr16:29606232-29606311
  hyper

SEQ ID NO: 389357 - DNA, 206 bp, Homo sapiens; identical to SEQ ID NO: 238480
  chr16:30007370-30007576
  hyper

SEQ ID NO: 389358 - DNA, 379 bp, Homo sapiens; identical to SEQ ID NO: 238496
  chr16:30670364-30670743
  hyper

SEQ ID NO: 389359 - DNA, 76 bp, Homo sapiens; identical to SEQ ID NO: 204164
  chr16:30786651-30786727
  hyper

SEQ ID NO: 389360 - DNA, 212 bp, Homo sapiens; identical to SEQ ID NO: 238507
  chr16:31085565-31085777
  hyper

SEQ ID NO: 389361 - DNA, 402 bp, Homo sapiens; identical to SEQ ID NO: 225055
  chr16:31453960-31454362
  hyper

SEQ ID NO: 389362 - DNA, 175 bp, Homo sapiens; identical to SEQ ID NO: 384603
  chr16:31498818-31498993
  hyper

SEQ ID NO: 389363 - DNA, 603 bp, Homo sapiens; identical to SEQ ID NO: 238520
  chr16:31885057-31885660
  hyper

SEQ ID NO: 389364 - DNA, 90 bp, Homo sapiens; identical to SEQ ID NO: 238552
  chr16:53738159-53738249
  hyper

SEQ ID NO: 389365 - DNA, 61 bp, Homo sapiens; identical to SEQ ID NO: 238556
  chr16:54404674-54404735
  hyper

SEQ ID NO: 389366 - DNA, 138 bp, Homo sapiens; identical to SEQ ID NO: 204211
  chr16:55499096-55499234
  hyper

SEQ ID NO: 389367 - DNA, 145 bp, Homo sapiens; identical to SEQ ID NO: 238590
  chr16:57570647-57570792
  hyper

SEQ ID NO: 389368 - DNA, 241 bp, Homo sapiens; identical to SEQ ID NO: 238592
  chr16:58035172-58035413
  hyper

SEQ ID NO: 389369 - DNA, 212 bp, Homo sapiens; identical to SEQ ID NO: 291593
  chr16:58548939-58549151
  hyper

SEQ ID NO: 389370 - DNA, 876 bp, Homo sapiens; identical to SEQ ID NO: 291594
  chr16:58549238-58550114
  hyper

SEQ ID NO: 389371 - DNA, 152 bp, Homo sapiens; identical to SEQ ID NO: 238618
  chr16:67218041-67218193
  hyper

SEQ ID NO: 389372 - DNA, 74 bp, Homo sapiens; identical to SEQ ID NO: 204250
  chr16:67280819-67280893
  hyper

SEQ ID NO: 389373 - DNA, 76 bp, Homo sapiens; identical to SEQ ID NO: 238638
  chr16:68057151-68057227
  hyper

SEQ ID NO: 389374 - DNA, 660 bp, Homo sapiens; identical to SEQ ID NO: 225107
  chr16:69139815-69140475
  hyper

SEQ ID NO: 389375 - DNA, 255 bp, Homo sapiens; identical to SEQ ID NO: 238653
  chr16:69458315-69458570
  hyper

SEQ ID NO: 389376 - DNA, 94 bp, Homo sapiens; identical to SEQ ID NO: 238655
  chr16:70333388-70333482
  hyper

SEQ ID NO: 389377 - DNA, 457 bp, Homo sapiens; identical to SEQ ID NO: 238657
  chr16:70415351-70415808
  hyper

SEQ ID NO: 389378 - DNA, 105 bp, Homo sapiens; identical to SEQ ID NO: 225109
  chr16:70472498-70472603
  hyper

SEQ ID NO: 389379 - DNA, 33 bp, Homo sapiens; identical to SEQ ID NO: 238662
  chr16:70835271-70835304
  hyper

SEQ ID NO: 389380 - DNA, 141 bp, Homo sapiens; identical to SEQ ID NO: 238669
  chr16:71842652-71842793
  hyper

SEQ ID NO: 389381 - DNA, 249 bp, Homo sapiens; identical to SEQ ID NO: 238671
  chr16:72127405-72127654
  hyper

SEQ ID NO: 389382 - DNA, 149 bp, Homo sapiens; identical to SEQ ID NO: 225111
  chr16:72699010-72699159
  hyper

SEQ ID NO: 389383 - DNA, 334 bp, Homo sapiens; identical to SEQ ID NO: 291692
  chr16:73091551-73091885
  hyper

SEQ ID NO: 389384 - DNA, 217 bp, Homo sapiens; identical to SEQ ID NO: 53263
  chr16:73091900-73092117
  hyper

SEQ ID NO: 389385 - DNA, 161 bp, Homo sapiens; identical to SEQ ID NO: 238676
  chr16:74640802-74640963
  hyper

SEQ ID NO: 389386 - DNA, 40 bp, Homo sapiens; identical to SEQ ID NO: 204287
  chr16:75018963-75019003
  hyper

SEQ ID NO: 389387 - DNA, 165 bp, Homo sapiens; identical to SEQ ID NO: 204293
  chr16:75529727-75529892
  hyper

SEQ ID NO: 389388 - DNA, 161 bp, Homo sapiens; identical to SEQ ID NO: 204316
  chr16:81812592-81812753
  hyper

SEQ ID NO: 389389 - DNA, 95 bp, Homo sapiens; identical to SEQ ID NO: 291775
  chr16:86320170-86320265
  hyper

SEQ ID NO: 389390 - DNA, 49 bp, Homo sapiens; identical to SEQ ID NO: 204327
  chr16:86321068-86321117
  hyper

SEQ ID NO: 389391 - DNA, 439 bp, Homo sapiens; identical to SEQ ID NO: 291777
  chr16:86334431-86334870
  hyper

SEQ ID NO: 389392 - DNA, 76 bp, Homo sapiens
  chr16:87635461-87635537
  hyper
caagatacacgcgtgtgtcccgactctcactcaatttataggggagagggactcgccaaatccctgttttctgggg

SEQ ID NO: 389393 - DNA, 182 bp, Homo sapiens; identical to SEQ ID NO: 291810
  chr16:88752793-88752975
  hyper

SEQ ID NO: 389394 - DNA, 133 bp, Homo sapiens; identical to SEQ ID NO: 225167
  chr16:88764923-88765056
  hyper

SEQ ID NO: 389395 - DNA, 114 bp, Homo sapiens; identical to SEQ ID NO: 204339
  chr16:88851818-88851932
  hyper

SEQ ID NO: 389396 - DNA, 507 bp, Homo sapiens; identical to SEQ ID NO: 204340
  chr16:88878527-88879034
  hyper

SEQ ID NO: 389397 - DNA, 32 bp, Homo sapiens; identical to SEQ ID NO: 238772
  chr16:89787466-89787498
  hyper

SEQ ID NO: 389398 - DNA, 50 bp, Homo sapiens; identical to SEQ ID NO: 238777
  chr16:89984233-89984283
  hyper

SEQ ID NO: 389399 - DNA, 253 bp, Homo sapiens; identical to SEQ ID NO: 238780
  chr16:89990062-89990315
  hyper

SEQ ID NO: 389400 - DNA, 72 bp, Homo sapiens; identical to SEQ ID NO: 53511
  chr16:90086126-90086198
  hyper

SEQ ID NO: 389401 - DNA, 59 bp, Homo sapiens
  chr17:523856-523915
  hyper
gtgggtcaccaagtggatgttcaaagcatgacagctatgggtgtttcagattctacatt

SEQ ID NO: 389402 - DNA, 91 bp, Homo sapiens; identical to SEQ ID NO: 291848
  chr17:655679-655770
  hyper

SEQ ID NO: 389403 - DNA, 90 bp, Homo sapiens; identical to SEQ ID NO: 127827
  chr17:655880-655970
  hyper

SEQ ID NO: 389404 - DNA, 84 bp, Homo sapiens; identical to SEQ ID NO: 225185
  chr17:883202-883286
  hyper

SEQ ID NO: 389405 - DNA, 72 bp, Homo sapiens; identical to SEQ ID NO: 238807
  chr17:2627362-2627434
  hyper

SEQ ID NO: 389406 - DNA, 98 bp, Homo sapiens; identical to SEQ ID NO: 238823
  chr17:4607657-4607755
  hyper

SEQ ID NO: 389407 - DNA, 172 bp, Homo sapiens; identical to SEQ ID NO: 238826
  chr17:4843519-4843691
  hyper

SEQ ID NO: 389408 - DNA, 105 bp, Homo sapiens; identical to SEQ ID NO: 238828
  chr17:4871286-4871391
  hyper

SEQ ID NO: 389409 - DNA, 394 bp, Homo sapiens; identical to SEQ ID NO: 238834
  chr17:5322761-5323155
  hyper

SEQ ID NO: 389410 - DNA, 106 bp, Homo sapiens; identical to SEQ ID NO: 204384
  chr17:5389578-5389684
  hyper

SEQ ID NO: 389411 - DNA, 317 bp, Homo sapiens; identical to SEQ ID NO: 238843
  chr17:6459172-6459489
  hyper

SEQ ID NO: 389412 - DNA, 67 bp, Homo sapiens; identical to SEQ ID NO: 204392
  chr17:7146588-7146655
  hyper

SEQ ID NO: 389413 - DNA, 491 bp, Homo sapiens; identical to SEQ ID NO: 238868
  chr17:7284208-7284699
  hyper

SEQ ID NO: 389414 - DNA, 274 bp, Homo sapiens; identical to SEQ ID NO: 225215
  chr17:7340607-7340881
  hyper

SEQ ID NO: 389415 - DNA, 385 bp, Homo sapiens; identical to SEQ ID NO: 291954
  chr17:7486279-7486664
  hyper

SEQ ID NO: 389416 - DNA, 329 bp, Homo sapiens; identical to SEQ ID NO: 204409
  chr17:7590625-7590954
  hyper

SEQ ID NO: 389417 - DNA, 41 bp, Homo sapiens; identical to SEQ ID NO: 238883
  chr17:7791235-7791276
  hyper

SEQ ID NO: 389418 - DNA, 199 bp, Homo sapiens; identical to SEQ ID NO: 238885
  chr17:7905914-7906113
  hyper

SEQ ID NO: 389419 - DNA, 433 bp, Homo sapiens; identical to SEQ ID NO: 291977
  chr17:7975836-7976269
  hyper

SEQ ID NO: 389420 - DNA, 320 bp, Homo sapiens; identical to SEQ ID NO: 291978
  chr17:7976318-7976638
  hyper

SEQ ID NO: 389421 - DNA, 211 bp, Homo sapiens; identical to SEQ ID NO: 238891
  chr17:8026217-8026428
  hyper

SEQ ID NO: 389422 - DNA, 43 bp, Homo sapiens; identical to SEQ ID NO: 204418
  chr17:8280080-8280123
  hyper

SEQ ID NO: 389423 - DNA, 213 bp, Homo sapiens; identical to SEQ ID NO: 291992
  chr17:8532948-8533161
  hyper

SEQ ID NO: 389424 - DNA, 192 bp, Homo sapiens; identical to SEQ ID NO: 204420
  chr17:8533199-8533391
  hyper

SEQ ID NO: 389425 - DNA, 168 bp, Homo sapiens; identical to SEQ ID NO: 291994
  chr17:8533392-8533560
  hyper

SEQ ID NO: 389426 - DNA, 109 bp, Homo sapiens; identical to SEQ ID NO: 204434
  chr17:13505656-13505765
  hyper

SEQ ID NO: 389427 - DNA, 57 bp, Homo sapiens; identical to SEQ ID NO: 225243
  chr17:16395229-16395286
  hyper

SEQ ID NO: 389428 - DNA, 271 bp, Homo sapiens; identical to SEQ ID NO: 292051
  chr17:16440043-16440314
  hyper

SEQ ID NO: 389429 - DNA, 113 bp, Homo sapiens; identical to SEQ ID NO: 238941
  chr17:17184594-17184707
  hyper

SEQ ID NO: 389430 - DNA, 75 bp, Homo sapiens; identical to SEQ ID NO: 292056
  chr17:17204069-17204144
  hyper

SEQ ID NO: 389431 - DNA, 38 bp, Homo sapiens; identical to SEQ ID NO: 292057
  chr17:17204211-17204249
  hyper

SEQ ID NO: 389432 - DNA, 66 bp, Homo sapiens; identical to SEQ ID NO: 384641
  chr17:18908242-18908308
  hyper

SEQ ID NO: 389433 - DNA, 111 bp, Homo sapiens; identical to SEQ ID NO: 238959
  chr17:19141268-19141379
  hyper

SEQ ID NO: 389434 - DNA, 265 bp, Homo sapiens; identical to SEQ ID NO: 292083
  chr17:19770124-19770389
  hyper

SEQ ID NO: 389435 - DNA, 42 bp, Homo sapiens; identical to SEQ ID NO: 238970
  chr17:20059384-20059426
  hyper

SEQ ID NO: 389436 - DNA, 132 bp, Homo sapiens; identical to SEQ ID NO: 204464
  chr17:21030040-21030172
  hyper

SEQ ID NO: 389437 - DNA, 111 bp, Homo sapiens; identical to SEQ ID NO: 238977
  chr17:21187754-21187865
  hyper

SEQ ID NO: 389438 - DNA, 202 bp, Homo sapiens; identical to SEQ ID NO: 204466
  chr17:25659906-25660108
  hyper

SEQ ID NO: 389439 - DNA, 60 bp, Homo sapiens; identical to SEQ ID NO: 238983
  chr17:26879852-26879912
  hyper

SEQ ID NO: 389440 - DNA, 72 bp, Homo sapiens; identical to SEQ ID NO: 238989
  chr17:27039397-27039469
  hyper

SEQ ID NO: 389441 - DNA, 304 bp, Homo sapiens; identical to SEQ ID NO: 238994
  chr17:27230104-27230408
  hyper

SEQ ID NO: 389442 - DNA, 74 bp, Homo sapiens; identical to SEQ ID NO: 384646
  chr17:27333201-27333275
  hyper

SEQ ID NO: 389443 - DNA, 360 bp, Homo sapiens; identical to SEQ ID NO: 225260
  chr17:27942986-27943346
  hyper

SEQ ID NO: 389444 - DNA, 174 bp, Homo sapiens; identical to SEQ ID NO: 204493
  chr17:29527439-29527613
  hyper

SEQ ID NO: 389445 - DNA, 136 bp, Homo sapiens; identical to SEQ ID NO: 204499
  chr17:29546009-29546145
  hyper

SEQ ID NO: 389446 - DNA, 156 bp, Homo sapiens; identical to SEQ ID NO: 204502
  chr17:29552112-29552268
  hyper

SEQ ID NO: 389447 - DNA, 250 bp, Homo sapiens; identical to SEQ ID NO: 204503
  chr17:29553452-29553702
  hyper

SEQ ID NO: 389448 - DNA, 117 bp, Homo sapiens; identical to SEQ ID NO: 204510
  chr17:29559090-29559207
  hyper

SEQ ID NO: 389449 - DNA, 136 bp, Homo sapiens; identical to SEQ ID NO: 204514
  chr17:29576001-29576137
  hyper

SEQ ID NO: 389450 - DNA, 203 bp, Homo sapiens; identical to SEQ ID NO: 204523
  chr17:29657313-29657516
  hyper

SEQ ID NO: 389451 - DNA, 410 bp, Homo sapiens; identical to SEQ ID NO: 204535
  chr17:29683977-29684387
  hyper

SEQ ID NO: 389452 - DNA, 143 bp, Homo sapiens; identical to SEQ ID NO: 204536
  chr17:29685497-29685640
  hyper

SEQ ID NO: 389453 - DNA, 217 bp, Homo sapiens; identical to SEQ ID NO: 204538
  chr17:29687504-29687721
  hyper

SEQ ID NO: 389454 - DNA, 89 bp, Homo sapiens; identical to SEQ ID NO: 204542
  chr17:30813422-30813511
  hyper

SEQ ID NO: 389455 - DNA, 105 bp, Homo sapiens; identical to SEQ ID NO: 225322
  chr17:31203740-31203845
  hyper

SEQ ID NO: 389456 - DNA, 387 bp, Homo sapiens; identical to SEQ ID NO: 239039
  chr17:33787454-33787841
  hyper

SEQ ID NO: 389457 - DNA, 252 bp, Homo sapiens; identical to SEQ ID NO: 239041
  chr17:33905430-33905682
  hyper

SEQ ID NO: 389458 - DNA, 106 bp, Homo sapiens; identical to SEQ ID NO: 239060
  chr17:35716404-35716510
  hyper

SEQ ID NO: 389459 - DNA, 64 bp, Homo sapiens; identical to SEQ ID NO: 239062
  chr17:35849757-35849821
  hyper

SEQ ID NO: 389460 - DNA, 424 bp, Homo sapiens; identical to SEQ ID NO: 239063
  chr17:35969347-35969771
  hyper

SEQ ID NO: 389461 - DNA, 239 bp, Homo sapiens; identical to SEQ ID NO: 292253
  chr17:37307753-37307992
  hyper

SEQ ID NO: 389462 - DNA, 83 bp, Homo sapiens; identical to SEQ ID NO: 292285
  chr17:38255680-38255763
  hyper

SEQ ID NO: 389463 - DNA, 56 bp, Homo sapiens; identical to SEQ ID NO: 128592
  chr17:38255830-38255886
  hyper

SEQ ID NO: 389464 - DNA, 89 bp, Homo sapiens; identical to SEQ ID NO: 239113
  chr17:38296368-38296457
  hyper

SEQ ID NO: 389465 - DNA, 165 bp, Homo sapiens; identical to SEQ ID NO: 239116
  chr17:38443942-38444107
  hyper

SEQ ID NO: 389466 - DNA, 89 bp, Homo sapiens; identical to SEQ ID NO: 239121
  chr17:38574211-38574300
  hyper

SEQ ID NO: 389467 - DNA, 159 bp, Homo sapiens; identical to SEQ ID NO: 204600
  chr17:38604453-38604612
  hyper

SEQ ID NO: 389468 - DNA, 137 bp, Homo sapiens; identical to SEQ ID NO: 239124
  chr17:38739098-38739235
  hyper

SEQ ID NO: 389469 - DNA, 565 bp, Homo sapiens; identical to SEQ ID NO: 239127
  chr17:40306686-40307251
  hyper

SEQ ID NO: 389470 - DNA, 173 bp, Homo sapiens; identical to SEQ ID NO: 239129
  chr17:40428745-40428918
  hyper

SEQ ID NO: 389471 - DNA, 56 bp, Homo sapiens; identical to SEQ ID NO: 292312
  chr17:40441311-40441367
  hyper

SEQ ID NO: 389472 - DNA, 38 bp, Homo sapiens; identical to SEQ ID NO: 292338
  chr17:41209114-41209152
  hyper

SEQ ID NO: 389473 - DNA, 172 bp, Homo sapiens; identical to SEQ ID NO: 225368
  chr17:41234420-41234592
  hyper

SEQ ID NO: 389474 - DNA, 89 bp, Homo sapiens; identical to SEQ ID NO: 225369
  chr17:41242960-41243049
  hyper

SEQ ID NO: 389475 - DNA, 77 bp, Homo sapiens; identical to SEQ ID NO: 225371
  chr17:41247862-41247939
  hyper

SEQ ID NO: 389476 - DNA, 120 bp, Homo sapiens; identical to SEQ ID NO: 239151
  chr17:41393018-41393138
  hyper

SEQ ID NO: 389477 - DNA, 330 bp, Homo sapiens; identical to SEQ ID NO: 239152
  chr17:41446506-41446836
  hyper

SEQ ID NO: 389478 - DNA, 125 bp, Homo sapiens; identical to SEQ ID NO: 239166
  chr17:42072190-42072315
  hyper

SEQ ID NO: 389479 - DNA, 111 bp, Homo sapiens; identical to SEQ ID NO: 204627
  chr17:42264411-42264522
  hyper

SEQ ID NO: 389480 - DNA, 614 bp, Homo sapiens; identical to SEQ ID NO: 292390
  chr17:42298856-42299470
  hyper

SEQ ID NO: 389481 - DNA, 232 bp, Homo sapiens; identical to SEQ ID NO: 204628
  chr17:42386109-42386341
  hyper

SEQ ID NO: 389482 - DNA, 100 bp, Homo sapiens; identical to SEQ ID NO: 204635
  chr17:42635760-42635860
  hyper

SEQ ID NO: 389483 - DNA, 201 bp, Homo sapiens; identical to SEQ ID NO: 239190
  chr17:42766993-42767194
  hyper

SEQ ID NO: 389484 - DNA, 119 bp, Homo sapiens; identical to SEQ ID NO: 292409
  chr17:43044389-43044508
  hyper

SEQ ID NO: 389485 - DNA, 37 bp, Homo sapiens; identical to SEQ ID NO: 239211
  chr17:45401134-45401171
  hyper

SEQ ID NO: 389486 - DNA, 39 bp, Homo sapiens; identical to SEQ ID NO: 204651
  chr17:45609732-45609771
  hyper

SEQ ID NO: 389487 - DNA, 199 bp, Homo sapiens; identical to SEQ ID NO: 239222
  chr17:46178731-46178930
  hyper

SEQ ID NO: 389488 - DNA, 151 bp, Homo sapiens; identical to SEQ ID NO: 204668
  chr17:46689520-46689671
  hyper

SEQ ID NO: 389489 - DNA, 66 bp, Homo sapiens
  chr17:46696472-46696538
  hyper
ggagaaacagttgggctttttgtcgggggagaggaggcctgagaggataggatgagactgtaaaag

SEQ ID NO: 389490 - DNA, 269 bp, Homo sapiens; identical to SEQ ID NO: 292463
  chr17:46702260-46702529
  hyper

SEQ ID NO: 389491 - DNA, 1174 bp, Homo sapiens; identical to SEQ ID NO: 204672
  chr17:46702755-46703929
  hyper

SEQ ID NO: 389492 - DNA, 109 bp, Homo sapiens; identical to SEQ ID NO: 204673
  chr17:46703959-46704068
  hyper

SEQ ID NO: 389493 - DNA, 85 bp, Homo sapiens; identical to SEQ ID NO: 239251
  chr17:46805459-46805544
  hyper

SEQ ID NO: 389494 - DNA, 204 bp, Homo sapiens; identical to SEQ ID NO: 204680
  chr17:46816036-46816240
  hyper

SEQ ID NO: 389495 - DNA, 43 bp, Homo sapiens; identical to SEQ ID NO: 239263
  chr17:46891977-46892020
  hyper

SEQ ID NO: 389496 - DNA, 53 bp, Homo sapiens; identical to SEQ ID NO: 292495
  chr17:47547746-47547799
  hyper

SEQ ID NO: 389497 - DNA, 154 bp, Homo sapiens; identical to SEQ ID NO: 204695
  chr17:47865600-47865754
  hyper

SEQ ID NO: 389498 - DNA, 85 bp, Homo sapiens; identical to SEQ ID NO: 384670
  chr17:47928527-47928612
  hyper

SEQ ID NO: 389499 - DNA, 173 bp, Homo sapiens; identical to SEQ ID NO: 225421
  chr17:47929093-47929266
  hyper

SEQ ID NO: 389500 - DNA, 282 bp, Homo sapiens; identical to SEQ ID NO: 225427
  chr17:48072333-48072615
  hyper

SEQ ID NO: 389501 - DNA, 177 bp, Homo sapiens; identical to SEQ ID NO: 204703
  chr17:48278764-48278941
  hyper

SEQ ID NO: 389502 - DNA, 39 bp, Homo sapiens; identical to SEQ ID NO: 204705
  chr17:48585621-48585660
  hyper

SEQ ID NO: 389503 - DNA, 437 bp, Homo sapiens; identical to SEQ ID NO: 292527
  chr17:48637269-48637706
  hyper

SEQ ID NO: 389504 - DNA, 96 bp, Homo sapiens; identical to SEQ ID NO: 292528
  chr17:48637777-48637873
  hyper

SEQ ID NO: 389505 - DNA, 45 bp, Homo sapiens; identical to SEQ ID NO: 239315
  chr17:48796758-48796803
  hyper

SEQ ID NO: 389506 - DNA, 37 bp, Homo sapiens; identical to SEQ ID NO: 204709
  chr17:48997201-48997238
  hyper

SEQ ID NO: 389507 - DNA, 115 bp, Homo sapiens; identical to SEQ ID NO: 204711
  chr17:49028000-49028115
  hyper

SEQ ID NO: 389508 - DNA, 39 bp, Homo sapiens; identical to SEQ ID NO: 239328
  chr17:54670214-54670253
  hyper

SEQ ID NO: 389509 - DNA, 119 bp, Homo sapiens; identical to SEQ ID NO: 239340
  chr17:55927364-55927483
  hyper

SEQ ID NO: 389510 - DNA, 167 bp, Homo sapiens; identical to SEQ ID NO: 239342
  chr17:56084355-56084522
  hyper

SEQ ID NO: 389511 - DNA, 75 bp, Homo sapiens; identical to SEQ ID NO: 239343
  chr17:56084800-56084875
  hyper

SEQ ID NO: 389512 - DNA, 125 bp, Homo sapiens; identical to SEQ ID NO: 204731
  chr17:58711213-58711338
  hyper

SEQ ID NO: 389513 - DNA, 33 bp, Homo sapiens; identical to SEQ ID NO: 384678
  chr17:59475183-59475216
  hyper

SEQ ID NO: 389514 - DNA, 192 bp, Homo sapiens; identical to SEQ ID NO: 292604
  chr17:60781450-60781642
  hyper

SEQ ID NO: 389515 - DNA, 54 bp, Homo sapiens; identical to SEQ ID NO: 239385
  chr17:61043210-61043264
  hyper

SEQ ID NO: 389516 - DNA, 224 bp, Homo sapiens; identical to SEQ ID NO: 239396
  chr17:61920536-61920760
  hyper

SEQ ID NO: 389517 - DNA, 164 bp, Homo sapiens; identical to SEQ ID NO: 239399
  chr17:62075060-62075224
  hyper

SEQ ID NO: 389518 - DNA, 75 bp, Homo sapiens; identical to SEQ ID NO: 239404
  chr17:62971851-62971926
  hyper

SEQ ID NO: 389519 - DNA, 366 bp, Homo sapiens
  chr17:63556529-63556895
  hyper
ggaggagaggcggggggcgggggagggcaagcggggggcgccgctaccctttcatcccacctcccaaaggcactcccgcgcgcactcacacgccgactcacatccataaccgcgacagcgacgcgacccccggggggtatctgccccctctccgcccccgccactgccgccactcggataagtctcctctctgggccccccgccaacccggtcaccgcgctggggagggggctccggcgcagggcgcgcaaggctgcccggccaagccccccggaacgctgggcgccgggtccgccgctcccctccgcgccggcccctagcgcgccccgaaatagccggcctgccaacttcaaagggccgccccgc

SEQ ID NO: 389520 - DNA, 165 bp, Homo sapiens; identical to SEQ ID NO: 239411
  chr17:65713844-65714009
  hyper

SEQ ID NO: 389521 - DNA, 271 bp, Homo sapiens; identical to SEQ ID NO: 292656
  chr17:70587739-70588010
  hyper

SEQ ID NO: 389522 - DNA, 41 bp, Homo sapiens; identical to SEQ ID NO: 384684
  chr17:70588131-70588172
  hyper

SEQ ID NO: 389523 - DNA, 253 bp, Homo sapiens; identical to SEQ ID NO: 239430
  chr17:71228588-71228841
  hyper

SEQ ID NO: 389524 - DNA, 449 bp, Homo sapiens
  chr17:72208668-72209117
  hyper
ctcctgcttgtcctgcagcctgggctcctccctccgctggccaagtcacgccaagcagtttgcggttacaggacgggtgggggcctctgcatatgtgcagagtacggagggcccagggacgcgaggctccccgatgggcaacctcccctgcctttgcttttccccagagccccctcctggcctgcgttcggcatcttctcgggtcgtcatcgccctctgcggtgcctgcgctcggggtgagggtttttgtcggcttttgttacatcaccgatgtaacagtgcctggacgtagtaggtgctcaataaatatgttgttgaatgcgcttcagtctccccgaatgcttgtcccttccgggcgctctcatcgctctcctaccttccccgctacacagctcgaaggtcccctcctccgggaagctcaccctgtcccacttgccaggaagaatcaa

SEQ ID NO: 389525 - DNA, 532 bp, Homo sapiens; identical to SEQ ID NO: 239449
  chr17:72733408-72733940
  hyper

SEQ ID NO: 389526 - DNA, 252 bp, Homo sapiens; identical to SEQ ID NO: 239466
  chr17:73127892-73128144
  hyper

SEQ ID NO: 389527 - DNA, 248 bp, Homo sapiens; identical to SEQ ID NO: 239467
  chr17:73150719-73150967
  hyper

SEQ ID NO: 389528 - DNA, 33 bp, Homo sapiens; identical to SEQ ID NO: 204792
  chr17:73521010-73521043
  hyper

SEQ ID NO: 389529 - DNA, 45 bp, Homo sapiens; identical to SEQ ID NO: 225503
  chr17:73874667-73874712
  hyper

SEQ ID NO: 389530 - DNA, 38 bp, Homo sapiens; identical to SEQ ID NO: 239479
  chr17:73937163-73937201
  hyper

SEQ ID NO: 389531 - DNA, 150 bp, Homo sapiens; identical to SEQ ID NO: 239488
  chr17:74261114-74261264
  hyper

SEQ ID NO: 389532 - DNA, 232 bp, Homo sapiens; identical to SEQ ID NO: 204805
  chr17:74732973-74733205
  hyper

SEQ ID NO: 389533 - DNA, 189 bp, Homo sapiens; identical to SEQ ID NO: 239498
  chr17:74734106-74734295
  hyper

SEQ ID NO: 389534 - DNA, 157 bp, Homo sapiens; identical to SEQ ID NO: 225520
  chr17:76349231-76349388
  hyper

SEQ ID NO: 389535 - DNA, 386 bp, Homo sapiens; identical to SEQ ID NO: 225527
  chr17:77774854-77775240
  hyper

SEQ ID NO: 389536 - DNA, 443 bp, Homo sapiens; identical to SEQ ID NO: 225536
  chr17:78010060-78010503
  hyper

SEQ ID NO: 389537 - DNA, 90 bp, Homo sapiens; identical to SEQ ID NO: 225538
  chr17:78389461-78389551
  hyper

SEQ ID NO: 389538 - DNA, 75 bp, Homo sapiens; identical to SEQ ID NO: 239554
  chr17:79319124-79319199
  hyper

SEQ ID NO: 389539 - DNA, 47 bp, Homo sapiens; identical to SEQ ID NO: 239560
  chr17:79884793-79884840
  hyper

SEQ ID NO: 389540 - DNA, 138 bp, Homo sapiens; identical to SEQ ID NO: 225549
  chr17:79885939-79886077
  hyper

SEQ ID NO: 389541 - DNA, 40 bp, Homo sapiens; identical to SEQ ID NO: 204847
  chr17:79989900-79989940
  hyper

SEQ ID NO: 389542 - DNA, 62 bp, Homo sapiens; identical to SEQ ID NO: 292833
  chr17:80291597-80291659
  hyper

SEQ ID NO: 389543 - DNA, 246 bp, Homo sapiens; identical to SEQ ID NO: 292834
  chr17:80291702-80291948
  hyper

SEQ ID NO: 389544 - DNA, 100 bp, Homo sapiens; identical to SEQ ID NO: 204851
  chr17:80657094-80657194
  hyper

SEQ ID NO: 389545 - DNA, 31 bp, Homo sapiens; identical to SEQ ID NO: 239582
  chr18:658431-658462
  hyper

SEQ ID NO: 389546 - DNA, 140 bp, Homo sapiens; identical to SEQ ID NO: 239589
  chr18:2571523-2571663
  hyper

SEQ ID NO: 389547 - DNA, 631 bp, Homo sapiens; identical to SEQ ID NO: 204865
  chr18:3447898-3448529
  hyper

SEQ ID NO: 389548 - DNA, 90 bp, Homo sapiens; identical to SEQ ID NO: 292875
  chr18:4455561-4455651
  hyper

SEQ ID NO: 389549 - DNA, 47 bp, Homo sapiens; identical to SEQ ID NO: 292876
  chr18:4455681-4455728
  hyper

SEQ ID NO: 389550 - DNA, 200 bp, Homo sapiens; identical to SEQ ID NO: 292896
  chr18:8367259-8367459
  hyper

SEQ ID NO: 389551 - DNA, 95 bp, Homo sapiens; identical to SEQ ID NO: 292908
  chr18:10032590-10032685
  hyper

SEQ ID NO: 389552 - DNA, 36 bp, Homo sapiens; identical to SEQ ID NO: 129750
  chr18:10032841-10032877
  hyper

SEQ ID NO: 389553 - DNA, 123 bp, Homo sapiens; identical to SEQ ID NO: 292914
  chr18:11689067-11689190
  hyper

SEQ ID NO: 389554 - DNA, 575 bp, Homo sapiens; identical to SEQ ID NO: 292915
  chr18:11689220-11689795
  hyper

SEQ ID NO: 389555 - DNA, 269 bp, Homo sapiens; identical to SEQ ID NO: 292916
  chr18:11689834-11690103
  hyper

SEQ ID NO: 389556 - DNA, 681 bp, Homo sapiens; identical to SEQ ID NO: 384702
  chr18:12308216-12308897
  hyper

SEQ ID NO: 389557 - DNA, 125 bp, Homo sapiens; identical to SEQ ID NO: 384703
  chr18:12308927-12309052
  hyper

SEQ ID NO: 389558 - DNA, 383 bp, Homo sapiens; identical to SEQ ID NO: 239668
  chr18:21033058-21033441
  hyper

SEQ ID NO: 389559 - DNA, 389 bp, Homo sapiens
  chr18:21242427-21242816
  hyper
cgatccacagccatgagtgcgaagcctctcaggcagggcaggcaggcaaaccgcaaacccacagggcgcacccagccccgccgcttcctcccgggcctcgcccgcagctggaggagagaggaaggaggaggcggcgggcagcgggcagcgcccaccccatcccaccccatcccaccccacccgaccccgcgggcccggccgcccgagcccggccccagccctgaccccggagtcccggtcgctcaccttgaaggacatcctgcacatgtccgcggccgcccgagcgggagccggcgcgctttgggcccggggcgccttgtcctccccggcccttcactctcccggggctctcggcgttccgcagaggggcggcctccgacgccgcgcgc

SEQ ID NO: 389560 - DNA, 138 bp, Homo sapiens; identical to SEQ ID NO: 204920
  chr18:21242871-21243009
  hyper

SEQ ID NO: 389561 - DNA, 211 bp, Homo sapiens; identical to SEQ ID NO: 239673
  chr18:21594007-21594218
  hyper

SEQ ID NO: 389562 - DNA, 325 bp, Homo sapiens; identical to SEQ ID NO: 292972
  chr18:21977677-21978002
  hyper

SEQ ID NO: 389563 - DNA, 90 bp, Homo sapiens; identical to SEQ ID NO: 292973
  chr18:21978034-21978124
  hyper

SEQ ID NO: 389564 - DNA, 105 bp, Homo sapiens; identical to SEQ ID NO: 225614
  chr18:22653839-22653944
  hyper

SEQ ID NO: 389565 - DNA, 268 bp, Homo sapiens; identical to SEQ ID NO: 239685
  chr18:24129548-24129816
  hyper

SEQ ID NO: 389566 - DNA, 59 bp, Homo sapiens; identical to SEQ ID NO: 239689
  chr18:24236254-24236313
  hyper

SEQ ID NO: 389567 - DNA, 177 bp, Homo sapiens; identical to SEQ ID NO: 292992
  chr18:28680887-28681064
  hyper

SEQ ID NO: 389568 - DNA, 781 bp, Homo sapiens; identical to SEQ ID NO: 204934
  chr18:28681213-28681994
  hyper

SEQ ID NO: 389569 - DNA, 217 bp, Homo sapiens; identical to SEQ ID NO: 204935
  chr18:28682029-28682246
  hyper

SEQ ID NO: 389570 - DNA, 73 bp, Homo sapiens; identical to SEQ ID NO: 54990
  chr18:28682286-28682359
  hyper

SEQ ID NO: 389571 - DNA, 36 bp, Homo sapiens; identical to SEQ ID NO: 204939
  chr18:29265160-29265196
  hyper

SEQ ID NO: 389572 - DNA, 118 bp, Homo sapiens; identical to SEQ ID NO: 239699
  chr18:30050221-30050339
  hyper

SEQ ID NO: 389573 - DNA, 467 bp, Homo sapiens; identical to SEQ ID NO: 239700
  chr18:30051179-30051646
  hyper

SEQ ID NO: 389574 - DNA, 263 bp, Homo sapiens; identical to SEQ ID NO: 293007
  chr18:30352257-30352520
  hyper

SEQ ID NO: 389575 - DNA, 178 bp, Homo sapiens; identical to SEQ ID NO: 55008
  chr18:31803673-31803851
  hyper

SEQ ID NO: 389576 - DNA, 40 bp, Homo sapiens; identical to SEQ ID NO: 239715
  chr18:33709430-33709470
  hyper

SEQ ID NO: 389577 - DNA, 240 bp, Homo sapiens; identical to SEQ ID NO: 225630
  chr18:33766971-33767211
  hyper

SEQ ID NO: 389578 - DNA, 52 bp, Homo sapiens; identical to SEQ ID NO: 293038
  chr18:35104466-35104518
  hyper

SEQ ID NO: 389579 - DNA, 68 bp, Homo sapiens; identical to SEQ ID NO: 204963
  chr18:39172188-39172256
  hyper

SEQ ID NO: 389580 - DNA, 67 bp, Homo sapiens; identical to SEQ ID NO: 204969
  chr18:42531892-42531959
  hyper

SEQ ID NO: 389581 - DNA, 53 bp, Homo sapiens; identical to SEQ ID NO: 293057
  chr18:44676978-44677031
  hyper

SEQ ID NO: 389582 - DNA, 196 bp, Homo sapiens; identical to SEQ ID NO: 129980
  chr18:44677055-44677251
  hyper

SEQ ID NO: 389583 - DNA, 76 bp, Homo sapiens; identical to SEQ ID NO: 293066
  chr18:44790495-44790571
  hyper

SEQ ID NO: 389584 - DNA, 179 bp, Homo sapiens; identical to SEQ ID NO: 239766
  chr18:46065664-46065843
  hyper

SEQ ID NO: 389585 - DNA, 671 bp, Homo sapiens; identical to SEQ ID NO: 239767
  chr18:46066503-46067174
  hyper

SEQ ID NO: 389586 - DNA, 296 bp, Homo sapiens; identical to SEQ ID NO: 239777
  chr18:48723995-48724291
  hyper

SEQ ID NO: 389587 - DNA, 79 bp, Homo sapiens; identical to SEQ ID NO: 239781
  chr18:51795698-51795777
  hyper

SEQ ID NO: 389588 - DNA, 40 bp, Homo sapiens; identical to SEQ ID NO: 205004
  chr18:53257761-53257801
  hyper

SEQ ID NO: 389589 - DNA, 245 bp, Homo sapiens; identical to SEQ ID NO: 239800
  chr18:55710765-55711010
  hyper

SEQ ID NO: 389590 - DNA, 235 bp, Homo sapiens; identical to SEQ ID NO: 239801
  chr18:56807204-56807439
  hyper

SEQ ID NO: 389591 - DNA, 80 bp, Homo sapiens; identical to SEQ ID NO: 293134
  chr18:56934820-56934900
  hyper

SEQ ID NO: 389592 - DNA, 163 bp, Homo sapiens; identical to SEQ ID NO: 239813
  chr18:57567942-57568105
  hyper

SEQ ID NO: 389593 - DNA, 60 bp, Homo sapiens; identical to SEQ ID NO: 293143
  chr18:59000631-59000691
  hyper

SEQ ID NO: 389594 - DNA, 53 bp, Homo sapiens; identical to SEQ ID NO: 239822
  chr18:60382505-60382558
  hyper

SEQ ID NO: 389595 - DNA, 1435 bp, Homo sapiens; identical to SEQ ID NO: 205030
  chr18:60382939-60384374
  hyper

SEQ ID NO: 389596 - DNA, 150 bp, Homo sapiens; identical to SEQ ID NO: 239823
  chr18:60805530-60805680
  hyper

SEQ ID NO: 389597 - DNA, 84 bp, Homo sapiens; identical to SEQ ID NO: 293170
  chr18:70208929-70209013
  hyper

SEQ ID NO: 389598 - DNA, 442 bp, Homo sapiens; identical to SEQ ID NO: 293177
  chr18:72124285-72124727
  hyper

SEQ ID NO: 389599 - DNA, 33 bp, Homo sapiens; identical to SEQ ID NO: 239846
  chr18:72265004-72265037
  hyper

SEQ ID NO: 389600 - DNA, 356 bp, Homo sapiens; identical to SEQ ID NO: 293196
  chr18:77193428-77193784
  hyper

SEQ ID NO: 389601 - DNA, 41 bp, Homo sapiens; identical to SEQ ID NO: 205062
  chr19:507106-507147
  hyper

SEQ ID NO: 389602 - DNA, 159 bp, Homo sapiens; identical to SEQ ID NO: 239877
  chr19:633641-633800
  hyper

SEQ ID NO: 389603 - DNA, 36 bp, Homo sapiens; identical to SEQ ID NO: 239888
  chr19:1041004-1041040
  hyper

SEQ ID NO: 389604 - DNA, 33 bp, Homo sapiens; identical to SEQ ID NO: 225706
  chr19:1173617-1173650
  hyper

SEQ ID NO: 389605 - DNA, 242 bp, Homo sapiens; identical to SEQ ID NO: 205074
  chr19:1438211-1438453
  hyper

SEQ ID NO: 389606 - DNA, 126 bp, Homo sapiens; identical to SEQ ID NO: 205077
  chr19:1469945-1470071
  hyper

SEQ ID NO: 389607 - DNA, 92 bp, Homo sapiens; identical to SEQ ID NO: 55315
  chr19:1470383-1470475
  hyper

SEQ ID NO: 389608 - DNA, 202 bp, Homo sapiens; identical to SEQ ID NO: 239904
  chr19:1507917-1508119
  hyper

SEQ ID NO: 389609 - DNA, 89 bp, Homo sapiens; identical to SEQ ID NO: 239906
  chr19:1605604-1605693
  hyper

SEQ ID NO: 389610 - DNA, 295 bp, Homo sapiens; identical to SEQ ID NO: 239923
  chr19:1812452-1812747
  hyper

SEQ ID NO: 389611 - DNA, 34 bp, Homo sapiens; identical to SEQ ID NO: 239924
  chr19:1848728-1848762
  hyper

SEQ ID NO: 389612 - DNA, 206 bp, Homo sapiens
  chr19:2168903-2169109
  hyper
tgcctggccctgcgtggtatttctagggcaggatggccctgcccttcttctagtgggaagggcacaagtggcattattggttgtttgctcggaaagaaccttcaaaggccacagaacgggaccttccccctggtgactcacaggctgtgggcgggcaggggcggcctccactggccaagggtccggactctctgactctcattaat

SEQ ID NO: 389613 - DNA, 300 bp, Homo sapiens; identical to SEQ ID NO: 225727
  chr19:2944752-2945052
  hyper

SEQ ID NO: 389614 - DNA, 141 bp, Homo sapiens; identical to SEQ ID NO: 205110
  chr19:2977372-2977513
  hyper

SEQ ID NO: 389615 - DNA, 143 bp, Homo sapiens; identical to SEQ ID NO: 225731
  chr19:3094777-3094920
  hyper

SEQ ID NO: 389616 - DNA, 217 bp, Homo sapiens; identical to SEQ ID NO: 239961
  chr19:3098866-3099083
  hyper

SEQ ID NO: 389617 - DNA, 489 bp, Homo sapiens; identical to SEQ ID NO: 225737
  chr19:3606743-3607232
  hyper

SEQ ID NO: 389618 - DNA, 188 bp, Homo sapiens; identical to SEQ ID NO: 239973
  chr19:3762567-3762755
  hyper

SEQ ID NO: 389619 - DNA, 178 bp, Homo sapiens; identical to SEQ ID NO: 205118
  chr19:3970722-3970900
  hyper

SEQ ID NO: 389620 - DNA, 124 bp, Homo sapiens; identical to SEQ ID NO: 239984
  chr19:4278961-4279085
  hyper

SEQ ID NO: 389621 - DNA, 105 bp, Homo sapiens; identical to SEQ ID NO: 225752
  chr19:4580776-4580881
  hyper

SEQ ID NO: 389622 - DNA, 179 bp, Homo sapiens; identical to SEQ ID NO: 239993
  chr19:4669764-4669943
  hyper

SEQ ID NO: 389623 - DNA, 77 bp, Homo sapiens; identical to SEQ ID NO: 205131
  chr19:4769517-4769594
  hyper

SEQ ID NO: 389624 - DNA, 199 bp, Homo sapiens; identical to SEQ ID NO: 205142
  chr19:6464135-6464334
  hyper

SEQ ID NO: 389625 - DNA, 75 bp, Homo sapiens; identical to SEQ ID NO: 205143
  chr19:6464628-6464703
  hyper

SEQ ID NO: 389626 - DNA, 213 bp, Homo sapiens; identical to SEQ ID NO: 240023
  chr19:6739799-6740012
  hyper

SEQ ID NO: 389627 - DNA, 253 bp, Homo sapiens; identical to SEQ ID NO: 240026
  chr19:7069469-7069722
  hyper

SEQ ID NO: 389628 - DNA, 74 bp, Homo sapiens; identical to SEQ ID NO: 293432
  chr19:7197429-7197503
  hyper

SEQ ID NO: 389629 - DNA, 137 bp, Homo sapiens; identical to SEQ ID NO: 240031
  chr19:7553947-7554084
  hyper

SEQ ID NO: 389630 - DNA, 186 bp, Homo sapiens; identical to SEQ ID NO: 240034
  chr19:7598773-7598959
  hyper

SEQ ID NO: 389631 - DNA, 160 bp, Homo sapiens; identical to SEQ ID NO: 225768
  chr19:7990126-7990286
  hyper

SEQ ID NO: 389632 - DNA, 182 bp, Homo sapiens; identical to SEQ ID NO: 240053
  chr19:8432388-8432570
  hyper

SEQ ID NO: 389633 - DNA, 160 bp, Homo sapiens; identical to SEQ ID NO: 293471
  chr19:9434651-9434811
  hyper

SEQ ID NO: 389634 - DNA, 237 bp, Homo sapiens; identical to SEQ ID NO: 293472
  chr19:9434969-9435206
  hyper

SEQ ID NO: 389635 - DNA, 50 bp, Homo sapiens; identical to SEQ ID NO: 240071
  chr19:10216840-10216890
  hyper

SEQ ID NO: 389636 - DNA, 166 bp, Homo sapiens; identical to SEQ ID NO: 240072
  chr19:10305760-10305926
  hyper

SEQ ID NO: 389637 - DNA, 251 bp, Homo sapiens; identical to SEQ ID NO: 240094
  chr19:10654404-10654655
  hyper

SEQ ID NO: 389638 - DNA, 369 bp, Homo sapiens; identical to SEQ ID NO: 240096
  chr19:10679763-10680132
  hyper

SEQ ID NO: 389639 - DNA, 139 bp, Homo sapiens; identical to SEQ ID NO: 240102
  chr19:11039290-11039429
  hyper

SEQ ID NO: 389640 - DNA, 266 bp, Homo sapiens; identical to SEQ ID NO: 225793
  chr19:11308102-11308368
  hyper

SEQ ID NO: 389641 - DNA, 40 bp, Homo sapiens; identical to SEQ ID NO: 293534
  chr19:11532654-11532694
  hyper

SEQ ID NO: 389642 - DNA, 179 bp, Homo sapiens; identical to SEQ ID NO: 240115
  chr19:11545952-11546131
  hyper

SEQ ID NO: 389643 - DNA, 358 bp, Homo sapiens; identical to SEQ ID NO: 240117
  chr19:11639727-11640085
  hyper

SEQ ID NO: 389644 - DNA, 132 bp, Homo sapiens; identical to SEQ ID NO: 240121
  chr19:11849763-11849895
  hyper

SEQ ID NO: 389645 - DNA, 79 bp, Homo sapiens; identical to SEQ ID NO: 293563
  chr19:12305760-12305839
  hyper

SEQ ID NO: 389646 - DNA, 204 bp, Homo sapiens; identical to SEQ ID NO: 293574
  chr19:12605963-12606167
  hyper

SEQ ID NO: 389647 - DNA, 135 bp, Homo sapiens; identical to SEQ ID NO: 293575
  chr19:12606511-12606646
  hyper

SEQ ID NO: 389648 - DNA, 86 bp, Homo sapiens; identical to SEQ ID NO: 205211
  chr19:12885894-12885980
  hyper

SEQ ID NO: 389649 - DNA, 36 bp, Homo sapiens; identical to SEQ ID NO: 240152
  chr19:12917228-12917264
  hyper

SEQ ID NO: 389650 - DNA, 40 bp, Homo sapiens; identical to SEQ ID NO: 240160
  chr19:13002468-13002508
  hyper

SEQ ID NO: 389651 - DNA, 98 bp, Homo sapiens; identical to SEQ ID NO: 205217
  chr19:13029775-13029873
  hyper

SEQ ID NO: 389652 - DNA, 51 bp, Homo sapiens; identical to SEQ ID NO: 384755
  chr19:13030316-13030367
  hyper

SEQ ID NO: 389653 - DNA, 54 bp, Homo sapiens; identical to SEQ ID NO: 240163
  chr19:13068137-13068191
  hyper

SEQ ID NO: 389654 - DNA, 144 bp, Homo sapiens; identical to SEQ ID NO: 384757
  chr19:13106028-13106172
  hyper

SEQ ID NO: 389655 - DNA, 194 bp, Homo sapiens; identical to SEQ ID NO: 240168
  chr19:13260761-13260955
  hyper

SEQ ID NO: 389656 - DNA, 326 bp, Homo sapiens; identical to SEQ ID NO: 240171
  chr19:13264660-13264986
  hyper

SEQ ID NO: 389657 - DNA, 62 bp, Homo sapiens; identical to SEQ ID NO: 205232
  chr19:13274019-13274081
  hyper

SEQ ID NO: 389658 - DNA, 195 bp, Homo sapiens; identical to SEQ ID NO: 205233
  chr19:13954425-13954620
  hyper

SEQ ID NO: 389659 - DNA, 174 bp, Homo sapiens; identical to SEQ ID NO: 205236
  chr19:14202317-14202491
  hyper

SEQ ID NO: 389660 - DNA, 81 bp, Homo sapiens; identical to SEQ ID NO: 205237
  chr19:14583720-14583801
  hyper

SEQ ID NO: 389661 - DNA, 140 bp, Homo sapiens; identical to SEQ ID NO: 240189
  chr19:14682852-14682992
  hyper

SEQ ID NO: 389662 - DNA, 32 bp, Homo sapiens; identical to SEQ ID NO: 384763
  chr19:14887561-14887593
  hyper

SEQ ID NO: 389663 - DNA, 223 bp, Homo sapiens; identical to SEQ ID NO: 240216
  chr19:17356102-17356325
  hyper

SEQ ID NO: 389664 - DNA, 171 bp, Homo sapiens; identical to SEQ ID NO: 240235
  chr19:17970699-17970870
  hyper

SEQ ID NO: 389665 - DNA, 303 bp, Homo sapiens; identical to SEQ ID NO: 240238
  chr19:18043467-18043770
  hyper

SEQ ID NO: 389666 - DNA, 89 bp, Homo sapiens; identical to SEQ ID NO: 205272
  chr19:18062904-18062993
  hyper

SEQ ID NO: 389667 - DNA, 209 bp, Homo sapiens; identical to SEQ ID NO: 240251
  chr19:18335915-18336124
  hyper

SEQ ID NO: 389668 - DNA, 112 bp, Homo sapiens; identical to SEQ ID NO: 240253
  chr19:18343303-18343415
  hyper

SEQ ID NO: 389669 - DNA, 330 bp, Homo sapiens; identical to SEQ ID NO: 205279
  chr19:18420497-18420827
  hyper

SEQ ID NO: 389670 - DNA, 374 bp, Homo sapiens; identical to SEQ ID NO: 240265
  chr19:18717411-18717785
  hyper

SEQ ID NO: 389671 - DNA, 117 bp, Homo sapiens; identical to SEQ ID NO: 293789
  chr19:22817085-22817202
  hyper

SEQ ID NO: 389672 - DNA, 221 bp, Homo sapiens; identical to SEQ ID NO: 293801
  chr19:23653859-23654080
  hyper

SEQ ID NO: 389673 - DNA, 75 bp, Homo sapiens; identical to SEQ ID NO: 205336
  chr19:28284060-28284135
  hyper

SEQ ID NO: 389674 - DNA, 33 bp, Homo sapiens; identical to SEQ ID NO: 293816
  chr19:31210819-31210852
  hyper

SEQ ID NO: 389675 - DNA, 46 bp, Homo sapiens; identical to SEQ ID NO: 293820
  chr19:32532872-32532918
  hyper

SEQ ID NO: 389676 - DNA, 41 bp, Homo sapiens; identical to SEQ ID NO: 293821
  chr19:32533002-32533043
  hyper

SEQ ID NO: 389677 - DNA, 1022 bp, Homo sapiens; identical to SEQ ID NO: 384772
  chr19:33790839-33791861
  hyper

SEQ ID NO: 389678 - DNA, 112 bp, Homo sapiens; identical to SEQ ID NO: 205359
  chr19:34175322-34175434
  hyper

SEQ ID NO: 389679 - DNA, 85 bp, Homo sapiens; identical to SEQ ID NO: 240386
  chr19:34919058-34919143
  hyper

SEQ ID NO: 389680 - DNA, 405 bp, Homo sapiens; identical to SEQ ID NO: 240404
  chr19:36164097-36164502
  hyper

SEQ ID NO: 389681 - DNA, 188 bp, Homo sapiens; identical to SEQ ID NO: 240421
  chr19:36485952-36486140
  hyper

SEQ ID NO: 389682 - DNA, 214 bp, Homo sapiens; identical to SEQ ID NO: 240423
  chr19:36705178-36705392
  hyper

SEQ ID NO: 389683 - DNA, 113 bp, Homo sapiens; identical to SEQ ID NO: 225912
  chr19:37262887-37263000
  hyper

SEQ ID NO: 389684 - DNA, 427 bp, Homo sapiens; identical to SEQ ID NO: 240468
  chr19:38865006-38865433
  hyper

SEQ ID NO: 389685 - DNA, 676 bp, Homo sapiens; identical to SEQ ID NO: 240475
  chr19:39322018-39322694
  hyper

SEQ ID NO: 389686 - DNA, 32 bp, Homo sapiens; identical to SEQ ID NO: 205407
  chr19:39898001-39898033
  hyper

SEQ ID NO: 389687 - DNA, 72 bp, Homo sapiens; identical to SEQ ID NO: 131504
  chr19:39898533-39898605
  hyper

SEQ ID NO: 389688 - DNA, 39 bp, Homo sapiens; identical to SEQ ID NO: 205410
  chr19:40022937-40022976
  hyper

SEQ ID NO: 389689 - DNA, 409 bp, Homo sapiens; identical to SEQ ID NO: 240503
  chr19:40791307-40791716
  hyper

SEQ ID NO: 389690 - DNA, 36 bp, Homo sapiens; identical to SEQ ID NO: 240517
  chr19:41082735-41082771
  hyper

SEQ ID NO: 389691 - DNA, 46 bp, Homo sapiens; identical to SEQ ID NO: 240524
  chr19:41120296-41120342
  hyper

SEQ ID NO: 389692 - DNA, 73 bp, Homo sapiens; identical to SEQ ID NO: 205430
  chr19:41222270-41222343
  hyper

SEQ ID NO: 389693 - DNA, 106 bp, Homo sapiens; identical to SEQ ID NO: 205431
  chr19:41223422-41223528
  hyper

SEQ ID NO: 389694 - DNA, 370 bp, Homo sapiens; identical to SEQ ID NO: 205446
  chr19:42680242-42680612
  hyper

SEQ ID NO: 389695 - DNA, 194 bp, Homo sapiens; identical to SEQ ID NO: 240553
  chr19:42806829-42807023
  hyper

SEQ ID NO: 389696 - DNA, 344 bp, Homo sapiens; identical to SEQ ID NO: 240554
  chr19:42830248-42830592
  hyper

SEQ ID NO: 389697 - DNA, 272 bp, Homo sapiens; identical to SEQ ID NO: 205451
  chr19:44029739-44030011
  hyper

SEQ ID NO: 389698 - DNA, 233 bp, Homo sapiens; identical to SEQ ID NO: 240563
  chr19:44031371-44031604
  hyper

SEQ ID NO: 389699 - DNA, 222 bp, Homo sapiens; identical to SEQ ID NO: 240565
  chr19:44100424-44100646
  hyper

SEQ ID NO: 389700 - DNA, 172 bp, Homo sapiens; identical to SEQ ID NO: 240567
  chr19:44144236-44144408
  hyper

SEQ ID NO: 389701 - DNA, 129 bp, Homo sapiens; identical to SEQ ID NO: 240571
  chr19:44439732-44439861
  hyper

SEQ ID NO: 389702 - DNA, 72 bp, Homo sapiens; identical to SEQ ID NO: 205458
  chr19:44507929-44508001
  hyper

SEQ ID NO: 389703 - DNA, 250 bp, Homo sapiens; identical to SEQ ID NO: 205461
  chr19:44617149-44617399
  hyper

SEQ ID NO: 389704 - DNA, 368 bp, Homo sapiens; identical to SEQ ID NO: 294084
  chr19:45347906-45348274
  hyper

SEQ ID NO: 389705 - DNA, 77 bp, Homo sapiens; identical to SEQ ID NO: 294092
  chr19:45681393-45681470
  hyper

SEQ ID NO: 389706 - DNA, 465 bp, Homo sapiens; identical to SEQ ID NO: 240601
  chr19:45873582-45874047
  hyper

SEQ ID NO: 389707 - DNA, 38 bp, Homo sapiens; identical to SEQ ID NO: 240605
  chr19:45927243-45927281
  hyper

SEQ ID NO: 389708 - DNA, 35 bp, Homo sapiens; identical to SEQ ID NO: 240620
  chr19:46295860-46295895
  hyper

SEQ ID NO: 389709 - DNA, 136 bp, Homo sapiens; identical to SEQ ID NO: 240625
  chr19:46405055-46405191
  hyper

SEQ ID NO: 389710 - DNA, 192 bp, Homo sapiens; identical to SEQ ID NO: 240638
  chr19:46991213-46991405
  hyper

SEQ ID NO: 389711 - DNA, 364 bp, Homo sapiens; identical to SEQ ID NO: 240645
  chr19:47217682-47218046
  hyper

SEQ ID NO: 389712 - DNA, 685 bp, Homo sapiens; identical to SEQ ID NO: 225964
  chr19:47258852-47259537
  hyper

SEQ ID NO: 389713 - DNA, 75 bp, Homo sapiens; identical to SEQ ID NO: 384794
  chr19:47363328-47363403
  hyper

SEQ ID NO: 389714 - DNA, 142 bp, Homo sapiens; identical to SEQ ID NO: 294169
  chr19:47925411-47925553
  hyper

SEQ ID NO: 389715 - DNA, 41 bp, Homo sapiens; identical to SEQ ID NO: 294170
  chr19:47925592-47925633
  hyper

SEQ ID NO: 389716 - DNA, 96 bp, Homo sapiens; identical to SEQ ID NO: 240665
  chr19:47951397-47951493
  hyper

SEQ ID NO: 389717 - DNA, 169 bp, Homo sapiens; identical to SEQ ID NO: 205511
  chr19:48613936-48614105
  hyper

SEQ ID NO: 389718 - DNA, 105 bp, Homo sapiens; identical to SEQ ID NO: 225979
  chr19:48823631-48823736
  hyper

SEQ ID NO: 389719 - DNA, 250 bp, Homo sapiens; identical to SEQ ID NO: 294187
  chr19:48867042-48867292
  hyper

SEQ ID NO: 389720 - DNA, 142 bp, Homo sapiens; identical to SEQ ID NO: 131903
  chr19:48867354-48867496
  hyper

SEQ ID NO: 389721 - DNA, 183 bp, Homo sapiens; identical to SEQ ID NO: 294193
  chr19:48994398-48994581
  hyper

SEQ ID NO: 389722 - DNA, 216 bp, Homo sapiens; identical to SEQ ID NO: 205516
  chr19:49141163-49141379
  hyper

SEQ ID NO: 389723 - DNA, 97 bp, Homo sapiens; identical to SEQ ID NO: 240691
  chr19:49217819-49217916
  hyper

SEQ ID NO: 389724 - DNA, 153 bp, Homo sapiens; identical to SEQ ID NO: 205522
  chr19:49314168-49314321
  hyper

SEQ ID NO: 389725 - DNA, 210 bp, Homo sapiens; identical to SEQ ID NO: 205523
  chr19:49436772-49436982
  hyper

SEQ ID NO: 389726 - DNA, 222 bp, Homo sapiens; identical to SEQ ID NO: 240705
  chr19:49654220-49654442
  hyper

SEQ ID NO: 389727 - DNA, 108 bp, Homo sapiens; identical to SEQ ID NO: 205530
  chr19:49926734-49926842
  hyper

SEQ ID NO: 389728 - DNA, 32 bp, Homo sapiens; identical to SEQ ID NO: 240743
  chr19:51142309-51142341
  hyper

SEQ ID NO: 389729 - DNA, 31 bp, Homo sapiens; identical to SEQ ID NO: 240750
  chr19:51221589-51221620
  hyper

SEQ ID NO: 389730 - DNA, 384 bp, Homo sapiens; identical to SEQ ID NO: 294293
  chr19:52407644-52408028
  hyper

SEQ ID NO: 389731 - DNA, 144 bp, Homo sapiens; identical to SEQ ID NO: 294294
  chr19:52408242-52408386
  hyper

SEQ ID NO: 389732 - DNA, 97 bp, Homo sapiens; identical to SEQ ID NO: 294297
  chr19:52489406-52489503
  hyper

SEQ ID NO: 389733 - DNA, 177 bp, Homo sapiens; identical to SEQ ID NO: 294298
  chr19:52489533-52489710
  hyper

SEQ ID NO: 389734 - DNA, 367 bp, Homo sapiens; identical to SEQ ID NO: 294299
  chr19:52489782-52490149
  hyper

SEQ ID NO: 389735 - DNA, 92 bp, Homo sapiens; identical to SEQ ID NO: 294300
  chr19:52490237-52490329
  hyper

SEQ ID NO: 389736 - DNA, 58 bp, Homo sapiens; identical to SEQ ID NO: 240778
  chr19:52693145-52693203
  hyper

SEQ ID NO: 389737 - DNA, 325 bp, Homo sapiens; identical to SEQ ID NO: 294367
  chr19:54382389-54382714
  hyper

SEQ ID NO: 389738 - DNA, 194 bp, Homo sapiens; identical to SEQ ID NO: 294368
  chr19:54382804-54382998
  hyper

SEQ ID NO: 389739 - DNA, 189 bp, Homo sapiens; identical to SEQ ID NO: 240833
  chr19:55770718-55770907
  hyper

SEQ ID NO: 389740 - DNA, 249 bp, Homo sapiens; identical to SEQ ID NO: 240834
  chr19:55851026-55851275
  hyper

SEQ ID NO: 389741 - DNA, 204 bp, Homo sapiens; identical to SEQ ID NO: 240837
  chr19:55919626-55919830
  hyper

SEQ ID NO: 389742 - DNA, 82 bp, Homo sapiens; identical to SEQ ID NO: 294387
  chr19:55951859-55951941
  hyper

SEQ ID NO: 389743 - DNA, 81 bp, Homo sapiens; identical to SEQ ID NO: 294388
  chr19:55951980-55952061
  hyper

SEQ ID NO: 389744 - DNA, 276 bp, Homo sapiens; identical to SEQ ID NO: 240847
  chr19:56111238-56111514
  hyper

SEQ ID NO: 389745 - DNA, 102 bp, Homo sapiens; identical to SEQ ID NO: 294410
  chr19:57050186-57050288
  hyper

SEQ ID NO: 389746 - DNA, 35 bp, Homo sapiens; identical to SEQ ID NO: 294411
  chr19:57050428-57050463
  hyper

SEQ ID NO: 389747 - DNA, 141 bp, Homo sapiens; identical to SEQ ID NO: 294412
  chr19:57050493-57050634
  hyper

SEQ ID NO: 389748 - DNA, 223 bp, Homo sapiens; identical to SEQ ID NO: 205635
  chr19:58175983-58176206
  hyper

SEQ ID NO: 389749 - DNA, 77 bp, Homo sapiens; identical to SEQ ID NO: 205642
  chr19:58331143-58331220
  hyper

SEQ ID NO: 389750 - DNA, 34 bp, Homo sapiens; identical to SEQ ID NO: 240904
  chr19:58789724-58789758
  hyper

SEQ ID NO: 389751 - DNA, 69 bp, Homo sapiens; identical to SEQ ID NO: 240907
  chr19:58874447-58874516
  hyper

SEQ ID NO: 389752 - DNA, 398 bp, Homo sapiens; identical to SEQ ID NO: 240909
  chr19:58898386-58898784
  hyper

SEQ ID NO: 389753 - DNA, 71 bp, Homo sapiens; identical to SEQ ID NO: 226057
  chr19:58920316-58920387
  hyper

SEQ ID NO: 389754 - DNA, 284 bp, Homo sapiens; identical to SEQ ID NO: 240912
  chr19:58987608-58987892
  hyper

SEQ ID NO: 389755 - DNA, 165 bp, Homo sapiens; identical to SEQ ID NO: 240943
  chr20:2723863-2724028
  hyper

SEQ ID NO: 389756 - DNA, 152 bp, Homo sapiens; identical to SEQ ID NO: 240949
  chr20:2821253-2821405
  hyper

SEQ ID NO: 389757 - DNA, 66 bp, Homo sapiens; identical to SEQ ID NO: 294519
  chr20:3063059-3063125
  hyper

SEQ ID NO: 389758 - DNA, 94 bp, Homo sapiens; identical to SEQ ID NO: 294520
  chr20:3063391-3063485
  hyper

SEQ ID NO: 389759 - DNA, 57 bp, Homo sapiens; identical to SEQ ID NO: 205681
  chr20:3766679-3766736
  hyper

SEQ ID NO: 389760 - DNA, 1019 bp, Homo sapiens; identical to SEQ ID NO: 205705
  chr20:10654669-10655688
  hyper

SEQ ID NO: 389761 - DNA, 453 bp, Homo sapiens
  chr20:11871901-11872354
  hyper
tcagccgaaagaccgcggggaggggcgcacgagcccgcctggccgtgcggacgcccgcggggtgcgcgaccccggaggtggcggaggtccaggcagggggcgcggtcgggaagcctcggcgcctagcaggtggcgggggccgcgcccctctcccggggaggcgcgcggtgggaagcggagcaaacttcccctaagtaactttcctgaggcgctgccggcggggactccggggaccgacgctccgggtttgcgcggcctcaggcgccgcgggaacccagcgagtggcggcgggcgatggcgggggcggcttcctcctgaggctggactagtcctccgagttctgagtggcatttgtggcccgtttgctctaaaaatagacgtacaagtttggtgttcgggaagaaggatgtttgctctcttgggaagaaaaggcttttacctcctggccttttc

SEQ ID NO: 389762 - DNA, 440 bp, Homo sapiens; identical to SEQ ID NO: 294585
  chr20:11872384-11872824
  hyper

SEQ ID NO: 389763 - DNA, 295 bp, Homo sapiens; identical to SEQ ID NO: 241026
  chr20:18268964-18269259
  hyper

SEQ ID NO: 389764 - DNA, 105 bp, Homo sapiens; identical to SEQ ID NO: 384811
  chr20:21495255-21495360
  hyper

SEQ ID NO: 389765 - DNA, 347 bp, Homo sapiens; identical to SEQ ID NO: 294642
  chr20:21681908-21682255
  hyper

SEQ ID NO: 389766 - DNA, 113 bp, Homo sapiens; identical to SEQ ID NO: 294680
  chr20:26188699-26188812
  hyper

SEQ ID NO: 389767 - DNA, 60 bp, Homo sapiens; identical to SEQ ID NO: 294681
  chr20:26189532-26189592
  hyper

SEQ ID NO: 389768 - DNA, 43 bp, Homo sapiens; identical to SEQ ID NO: 294694
  chr20:30583025-30583068
  hyper

SEQ ID NO: 389769 - DNA, 359 bp, Homo sapiens; identical to SEQ ID NO: 205772
  chr20:31019123-31019482
  hyper

SEQ ID NO: 389770 - DNA, 634 bp, Homo sapiens; identical to SEQ ID NO: 205774
  chr20:31021086-31021720
  hyper

SEQ ID NO: 389771 - DNA, 116 bp, Homo sapiens; identical to SEQ ID NO: 241116
  chr20:31072615-31072731
  hyper

SEQ ID NO: 389772 - DNA, 349 bp, Homo sapiens; identical to SEQ ID NO: 241122
  chr20:32262417-32262766
  hyper

SEQ ID NO: 389773 - DNA, 101 bp, Homo sapiens; identical to SEQ ID NO: 241145
  chr20:35374567-35374668
  hyper

SEQ ID NO: 389774 - DNA, 251 bp, Homo sapiens; identical to SEQ ID NO: 241149
  chr20:35724155-35724406
  hyper

SEQ ID NO: 389775 - DNA, 126 bp, Homo sapiens; identical to SEQ ID NO: 241162
  chr20:37101359-37101485
  hyper

SEQ ID NO: 389776 - DNA, 170 bp, Homo sapiens; identical to SEQ ID NO: 205809
  chr20:39968625-39968795
  hyper

SEQ ID NO: 389777 - DNA, 35 bp, Homo sapiens; identical to SEQ ID NO: 241181
  chr20:39969365-39969400
  hyper

SEQ ID NO: 389778 - DNA, 204 bp, Homo sapiens; identical to SEQ ID NO: 205810
  chr20:40247056-40247260
  hyper

SEQ ID NO: 389779 - DNA, 46 bp, Homo sapiens; identical to SEQ ID NO: 241199
  chr20:43514296-43514342
  hyper

SEQ ID NO: 389780 - DNA, 119 bp, Homo sapiens; identical to SEQ ID NO: 241200
  chr20:43538513-43538632
  hyper

SEQ ID NO: 389781 - DNA, 81 bp, Homo sapiens; identical to SEQ ID NO: 241202
  chr20:43594829-43594910
  hyper

SEQ ID NO: 389782 - DNA, 73 bp, Homo sapiens; identical to SEQ ID NO: 226157
  chr20:44462767-44462840
  hyper

SEQ ID NO: 389783 - DNA, 45 bp, Homo sapiens; identical to SEQ ID NO: 205820
  chr20:44639093-44639138
  hyper

SEQ ID NO: 389784 - DNA, 169 bp, Homo sapiens; identical to SEQ ID NO: 241221
  chr20:44651084-44651253
  hyper

SEQ ID NO: 389785 - DNA, 268 bp, Homo sapiens; identical to SEQ ID NO: 294820
  chr20:44660337-44660605
  hyper

SEQ ID NO: 389786 - DNA, 319 bp, Homo sapiens; identical to SEQ ID NO: 241228
  chr20:44718496-44718815
  hyper

SEQ ID NO: 389787 - DNA, 131 bp, Homo sapiens; identical to SEQ ID NO: 205840
  chr20:48729833-48729964
  hyper

SEQ ID NO: 389788 - DNA, 166 bp, Homo sapiens; identical to SEQ ID NO: 294856
  chr20:49410874-49411040
  hyper

SEQ ID NO: 389789 - DNA, 67 bp, Homo sapiens; identical to SEQ ID NO: 294858
  chr20:49575842-49575909
  hyper

SEQ ID NO: 389790 - DNA, 143 bp, Homo sapiens; identical to SEQ ID NO: 294859
  chr20:49575939-49576082
  hyper

SEQ ID NO: 389791 - DNA, 382 bp, Homo sapiens; identical to SEQ ID NO: 241268
  chr20:50179176-50179558
  hyper

SEQ ID NO: 389792 - DNA, 266 bp, Homo sapiens; identical to SEQ ID NO: 241277
  chr20:51588707-51588973
  hyper

SEQ ID NO: 389793 - DNA, 402 bp, Homo sapiens; identical to SEQ ID NO: 294878
  chr20:52790210-52790612
  hyper

SEQ ID NO: 389794 - DNA, 871 bp, Homo sapiens; identical to SEQ ID NO: 241287
  chr20:54966815-54967686
  hyper

SEQ ID NO: 389795 - DNA, 457 bp, Homo sapiens; identical to SEQ ID NO: 241297
  chr20:55926142-55926599
  hyper

SEQ ID NO: 389796 - DNA, 208 bp, Homo sapiens; identical to SEQ ID NO: 226190
  chr20:57414593-57414801
  hyper

SEQ ID NO: 389797 - DNA, 100 bp, Homo sapiens; identical to SEQ ID NO: 205878
  chr20:57466877-57466977
  hyper

SEQ ID NO: 389798 - DNA, 90 bp, Homo sapiens; identical to SEQ ID NO: 294933
  chr20:58152282-58152372
  hyper

SEQ ID NO: 389799 - DNA, 75 bp, Homo sapiens; identical to SEQ ID NO: 294934
  chr20:58152388-58152463
  hyper

SEQ ID NO: 389800 - DNA, 285 bp, Homo sapiens; identical to SEQ ID NO: 294939
  chr20:58514845-58515130
  hyper

SEQ ID NO: 389801 - DNA, 93 bp, Homo sapiens; identical to SEQ ID NO: 241330
  chr20:60813107-60813200
  hyper

SEQ ID NO: 389802 - DNA, 117 bp, Homo sapiens; identical to SEQ ID NO: 133295
  chr20:60981936-60982053
  hyper

SEQ ID NO: 389803 - DNA, 61 bp, Homo sapiens; identical to SEQ ID NO: 241335
  chr20:61274240-61274301
  hyper

SEQ ID NO: 389804 - DNA, 148 bp, Homo sapiens; identical to SEQ ID NO: 241340
  chr20:61557990-61558138
  hyper

SEQ ID NO: 389805 - DNA, 103 bp, Homo sapiens; identical to SEQ ID NO: 294961
  chr20:61583882-61583985
  hyper

SEQ ID NO: 389806 - DNA, 316 bp, Homo sapiens; identical to SEQ ID NO: 294962
  chr20:61584015-61584331
  hyper

SEQ ID NO: 389807 - DNA, 93 bp, Homo sapiens; identical to SEQ ID NO: 205900
  chr20:61733167-61733260
  hyper

SEQ ID NO: 389808 - DNA, 42 bp, Homo sapiens; identical to SEQ ID NO: 226226
  chr20:62152087-62152129
  hyper

SEQ ID NO: 389809 - DNA, 651 bp, Homo sapiens; identical to SEQ ID NO: 294982
  chr20:62283836-62284487
  hyper

SEQ ID NO: 389810 - DNA, 69 bp, Homo sapiens; identical to SEQ ID NO: 294983
  chr20:62284615-62284684
  hyper

SEQ ID NO: 389811 - DNA, 419 bp, Homo sapiens; identical to SEQ ID NO: 241369
  chr20:62496242-62496661
  hyper

SEQ ID NO: 389812 - DNA, 361 bp, Homo sapiens; identical to SEQ ID NO: 226233
  chr20:62525784-62526145
  hyper

SEQ ID NO: 389813 - DNA, 205 bp, Homo sapiens; identical to SEQ ID NO: 294999
  chr20:62673632-62673837
  hyper

SEQ ID NO: 389814 - DNA, 322 bp, Homo sapiens; identical to SEQ ID NO: 295000
  chr20:62679894-62680216
  hyper

SEQ ID NO: 389815 - DNA, 57 bp, Homo sapiens; identical to SEQ ID NO: 241382
  chr21:16437726-16437783
  hyper

SEQ ID NO: 389816 - DNA, 486 bp, Homo sapiens; identical to SEQ ID NO: 241384
  chr21:18885047-18885533
  hyper

SEQ ID NO: 389817 - DNA, 695 bp, Homo sapiens; identical to SEQ ID NO: 241385
  chr21:18885713-18886408
  hyper

SEQ ID NO: 389818 - DNA, 154 bp, Homo sapiens; identical to SEQ ID NO: 205949
  chr21:31312503-31312657
  hyper

SEQ ID NO: 389819 - DNA, 105 bp, Homo sapiens; identical to SEQ ID NO: 226254
  chr21:32932326-32932431
  hyper

SEQ ID NO: 389820 - DNA, 111 bp, Homo sapiens; identical to SEQ ID NO: 241404
  chr21:33031744-33031855
  hyper

SEQ ID NO: 389821 - DNA, 49 bp, Homo sapiens; identical to SEQ ID NO: 241406
  chr21:33651478-33651527
  hyper

SEQ ID NO: 389822 - DNA, 110 bp, Homo sapiens; identical to SEQ ID NO: 241409
  chr21:33984700-33984810
  hyper

SEQ ID NO: 389823 - DNA, 131 bp, Homo sapiens; identical to SEQ ID NO: 241421
  chr21:34776086-34776217
  hyper

SEQ ID NO: 389824 - DNA, 131 bp, Homo sapiens; identical to SEQ ID NO: 205982
  chr21:36421464-36421595
  hyper

SEQ ID NO: 389825 - DNA, 199 bp, Homo sapiens; identical to SEQ ID NO: 295105
  chr21:38362192-38362391
  hyper

SEQ ID NO: 389826 - DNA, 99 bp, Homo sapiens; identical to SEQ ID NO: 206011
  chr21:40752032-40752131
  hyper

SEQ ID NO: 389827 - DNA, 173 bp, Homo sapiens; identical to SEQ ID NO: 241476
  chr21:43373823-43373996
  hyper

SEQ ID NO: 389828 - DNA, 397 bp, Homo sapiens; identical to SEQ ID NO: 226297
  chr21:45381212-45381609
  hyper

SEQ ID NO: 389829 - DNA, 144 bp, Homo sapiens; identical to SEQ ID NO: 226299
  chr21:45660255-45660399
  hyper

SEQ ID NO: 389830 - DNA, 211 bp, Homo sapiens; identical to SEQ ID NO: 384837
  chr21:45662515-45662726
  hyper

SEQ ID NO: 389831 - DNA, 275 bp, Homo sapiens; identical to SEQ ID NO: 241500
  chr21:46293549-46293824
  hyper

SEQ ID NO: 389832 - DNA, 79 bp, Homo sapiens; identical to SEQ ID NO: 241502
  chr21:46359652-46359731
  hyper

SEQ ID NO: 389833 - DNA, 106 bp, Homo sapiens; identical to SEQ ID NO: 206044
  chr21:47394340-47394446
  hyper

SEQ ID NO: 389834 - DNA, 165 bp, Homo sapiens; identical to SEQ ID NO: 241512
  chr21:47744098-47744263
  hyper

SEQ ID NO: 389835 - DNA, 44 bp, Homo sapiens; identical to SEQ ID NO: 206048
  chr21:47799137-47799181
  hyper

SEQ ID NO: 389836 - DNA, 52 bp, Homo sapiens; identical to SEQ ID NO: 206049
  chr21:47799225-47799277
  hyper

SEQ ID NO: 389837 - DNA, 139 bp, Homo sapiens; identical to SEQ ID NO: 295210
  chr22:17602027-17602166
  hyper

SEQ ID NO: 389838 - DNA, 50 bp, Homo sapiens; identical to SEQ ID NO: 241521
  chr22:18257398-18257448
  hyper

SEQ ID NO: 389839 - DNA, 31 bp, Homo sapiens; identical to SEQ ID NO: 206054
  chr22:18593348-18593379
  hyper

SEQ ID NO: 389840 - DNA, 288 bp, Homo sapiens; identical to SEQ ID NO: 295228
  chr22:19748301-19748589
  hyper

SEQ ID NO: 389841 - DNA, 40 bp, Homo sapiens; identical to SEQ ID NO: 133782
  chr22:19749084-19749124
  hyper

SEQ ID NO: 389842 - DNA, 38 bp, Homo sapiens; identical to SEQ ID NO: 241536
  chr22:19754288-19754326
  hyper

SEQ ID NO: 389843 - DNA, 156 bp, Homo sapiens; identical to SEQ ID NO: 226322
  chr22:20255237-20255393
  hyper

SEQ ID NO: 389844 - DNA, 116 bp, Homo sapiens; identical to SEQ ID NO: 241546
  chr22:21336323-21336439
  hyper

SEQ ID NO: 389845 - DNA, 195 bp, Homo sapiens; identical to SEQ ID NO: 241551
  chr22:21922624-21922819
  hyper

SEQ ID NO: 389846 - DNA, 96 bp, Homo sapiens; identical to SEQ ID NO: 241555
  chr22:22020155-22020251
  hyper

SEQ ID NO: 389847 - DNA, 226 bp, Homo sapiens; identical to SEQ ID NO: 241556
  chr22:22220990-22221216
  hyper

SEQ ID NO: 389848 - DNA, 206 bp, Homo sapiens; identical to SEQ ID NO: 241557
  chr22:22307056-22307262
  hyper

SEQ ID NO: 389849 - DNA, 166 bp, Homo sapiens; identical to SEQ ID NO: 241561
  chr22:23484157-23484323
  hyper

SEQ ID NO: 389850 - DNA, 80 bp, Homo sapiens; identical to SEQ ID NO: 241562
  chr22:23522446-23522526
  hyper

SEQ ID NO: 389851 - DNA, 458 bp, Homo sapiens; identical to SEQ ID NO: 226339
  chr22:24110419-24110877
  hyper

SEQ ID NO: 389852 - DNA, 89 bp, Homo sapiens; identical to SEQ ID NO: 206070
  chr22:24236849-24236938
  hyper

SEQ ID NO: 389853 - DNA, 91 bp, Homo sapiens; identical to SEQ ID NO: 206073
  chr22:24989196-24989287
  hyper

SEQ ID NO: 389854 - DNA, 215 bp, Homo sapiens; identical to SEQ ID NO: 241580
  chr22:26773510-26773725
  hyper

SEQ ID NO: 389855 - DNA, 139 bp, Homo sapiens; identical to SEQ ID NO: 206084
  chr22:26880366-26880505
  hyper

SEQ ID NO: 389856 - DNA, 210 bp, Homo sapiens; identical to SEQ ID NO: 295301
  chr22:28197049-28197259
  hyper

SEQ ID NO: 389857 - DNA, 66 bp, Homo sapiens; identical to SEQ ID NO: 206089
  chr22:28198503-28198569
  hyper

SEQ ID NO: 389858 - DNA, 48 bp, Homo sapiens; identical to SEQ ID NO: 206090
  chr22:28198605-28198653
  hyper

SEQ ID NO: 389859 - DNA, 88 bp, Homo sapiens; identical to SEQ ID NO: 241596
  chr22:28839653-28839741
  hyper

SEQ ID NO: 389860 - DNA, 95 bp, Homo sapiens; identical to SEQ ID NO: 241598
  chr22:29137894-29137989
  hyper

SEQ ID NO: 389861 - DNA, 44 bp, Homo sapiens; identical to SEQ ID NO: 384852
  chr22:29469129-29469173
  hyper

SEQ ID NO: 389862 - DNA, 202 bp, Homo sapiens; identical to SEQ ID NO: 206096
  chr22:29469213-29469415
  hyper

SEQ ID NO: 389863 - DNA, 45 bp, Homo sapiens; identical to SEQ ID NO: 13392
  chr22:29469460-29469505
  hyper

SEQ ID NO: 389864 - DNA, 676 bp, Homo sapiens; identical to SEQ ID NO: 384855
  chr22:29702500-29703176
  hyper

SEQ ID NO: 389865 - DNA, 112 bp, Homo sapiens; identical to SEQ ID NO: 206100
  chr22:30642966-30643078
  hyper

SEQ ID NO: 389866 - DNA, 211 bp, Homo sapiens; identical to SEQ ID NO: 241624
  chr22:31031671-31031882
  hyper

SEQ ID NO: 389867 - DNA, 120 bp, Homo sapiens; identical to SEQ ID NO: 206107
  chr22:31477077-31477197
  hyper

SEQ ID NO: 389868 - DNA, 348 bp, Homo sapiens; identical to SEQ ID NO: 241649
  chr22:35695611-35695959
  hyper

SEQ ID NO: 389869 - DNA, 82 bp, Homo sapiens; identical to SEQ ID NO: 241650
  chr22:35776987-35777069
  hyper

SEQ ID NO: 389870 - DNA, 333 bp, Homo sapiens; identical to SEQ ID NO: 241656
  chr22:36784309-36784642
  hyper

SEQ ID NO: 389871 - DNA, 234 bp, Homo sapiens; identical to SEQ ID NO: 295389
  chr22:37212906-37213140
  hyper

SEQ ID NO: 389872 - DNA, 290 bp, Homo sapiens; identical to SEQ ID NO: 241672
  chr22:37882383-37882673
  hyper

SEQ ID NO: 389873 - DNA, 83 bp, Homo sapiens; identical to SEQ ID NO: 241675
  chr22:38054576-38054659
  hyper

SEQ ID NO: 389874 - DNA, 47 bp, Homo sapiens; identical to SEQ ID NO: 241678
  chr22:38082317-38082364
  hyper

SEQ ID NO: 389875 - DNA, 114 bp, Homo sapiens; identical to SEQ ID NO: 241680
  chr22:38200880-38200994
  hyper

SEQ ID NO: 389876 - DNA, 390 bp, Homo sapiens
  chr22:38577754-38578144
  hyper
gacccccaggccccgcccacccgcgaggtcactcacctcggcttactcagcacttctacttcctcctacttccgcaaacaaacgggcctcgggccacgtgatggcctgaccaccgctctccgccaatcactggtggccctgtcccaggcctcctctaggctccgcccccgcgcccgaggacggcgggaggcggggtccgccattttttttaactgcccaatggaaggggctcccttagccaggaggacgagctttcggcgggagccaatcctcggcggcgaggcgcggccatgtttgtgcggggcagaaggtgcccggcttcttggcagtcctgttgatgagggccaggagtcctaccctagtccgccttccgcctcctaaagcgaccag

SEQ ID NO: 389877 - DNA, 155 bp, Homo sapiens; identical to SEQ ID NO: 241691
  chr22:38597888-38598043
  hyper

SEQ ID NO: 389878 - DNA, 31 bp, Homo sapiens; identical to SEQ ID NO: 206133
  chr22:38713592-38713623
  hyper

SEQ ID NO: 389879 - DNA, 95 bp, Homo sapiens; identical to SEQ ID NO: 206134
  chr22:38863833-38863928
  hyper

SEQ ID NO: 389880 - DNA, 72 bp, Homo sapiens; identical to SEQ ID NO: 241698
  chr22:38864201-38864273
  hyper

SEQ ID NO: 389881 - DNA, 95 bp, Homo sapiens; identical to SEQ ID NO: 295436
  chr22:39150552-39150647
  hyper

SEQ ID NO: 389882 - DNA, 253 bp, Homo sapiens; identical to SEQ ID NO: 295439
  chr22:39239093-39239346
  hyper

SEQ ID NO: 389883 - DNA, 32 bp, Homo sapiens; identical to SEQ ID NO: 206137
  chr22:39239412-39239444
  hyper

SEQ ID NO: 389884 - DNA, 189 bp, Homo sapiens; identical to SEQ ID NO: 295441
  chr22:39239935-39240124
  hyper

SEQ ID NO: 389885 - DNA, 47 bp, Homo sapiens; identical to SEQ ID NO: 206139
  chr22:39638593-39638640
  hyper

SEQ ID NO: 389886 - DNA, 89 bp, Homo sapiens; identical to SEQ ID NO: 241713
  chr22:39715082-39715171
  hyper

SEQ ID NO: 389887 - DNA, 189 bp, Homo sapiens; identical to SEQ ID NO: 206140
  chr22:39715621-39715810
  hyper

SEQ ID NO: 389888 - DNA, 131 bp, Homo sapiens; identical to SEQ ID NO: 295452
  chr22:39745646-39745777
  hyper

SEQ ID NO: 389889 - DNA, 278 bp, Homo sapiens; identical to SEQ ID NO: 295453
  chr22:39746119-39746397
  hyper

SEQ ID NO: 389890 - DNA, 40 bp, Homo sapiens; identical to SEQ ID NO: 241718
  chr22:39928913-39928953
  hyper

SEQ ID NO: 389891 - DNA, 94 bp, Homo sapiens; identical to SEQ ID NO: 241725
  chr22:41215480-41215574
  hyper

SEQ ID NO: 389892 - DNA, 104 bp, Homo sapiens; identical to SEQ ID NO: 241729
  chr22:41593898-41594002
  hyper

SEQ ID NO: 389893 - DNA, 204 bp, Homo sapiens; identical to SEQ ID NO: 241737
  chr22:41940462-41940666
  hyper

SEQ ID NO: 389894 - DNA, 78 bp, Homo sapiens; identical to SEQ ID NO: 241738
  chr22:41985628-41985706
  hyper

SEQ ID NO: 389895 - DNA, 105 bp, Homo sapiens; identical to SEQ ID NO: 226389
  chr22:42670075-42670180
  hyper

SEQ ID NO: 389896 - DNA, 296 bp, Homo sapiens; identical to SEQ ID NO: 241755
  chr22:43506224-43506520
  hyper

SEQ ID NO: 389897 - DNA, 98 bp, Homo sapiens
  chr22:44287922-44288020
  hyper
tcacctgcgccccagccaatgaagtccccgggtcgcgatcagcccccactccagttgtgcgccaggtgtgccccagaagtgcccgcgcgctgtgtata

SEQ ID NO: 389898 - DNA, 112 bp, Homo sapiens; identical to SEQ ID NO: 241777
  chr22:45559225-45559337
  hyper

SEQ ID NO: 389899 - DNA, 101 bp, Homo sapiens; identical to SEQ ID NO: 241784
  chr22:46274465-46274566
  hyper

SEQ ID NO: 389900 - DNA, 115 bp, Homo sapiens; identical to SEQ ID NO: 241797
  chr22:47158139-47158254
  hyper

SEQ ID NO: 389901 - DNA, 127 bp, Homo sapiens; identical to SEQ ID NO: 241798
  chr22:47158507-47158634
  hyper

SEQ ID NO: 389902 - DNA, 343 bp, Homo sapiens; identical to SEQ ID NO: 226407
  chr22:50246433-50246776
  hyper

SEQ ID NO: 389903 - DNA, 84 bp, Homo sapiens; identical to SEQ ID NO: 206187
  chr22:50745645-50745729
  hyper

SEQ ID NO: 389904 - DNA, 183 bp, Homo sapiens; identical to SEQ ID NO: 206188
  chr22:50765110-50765293
  hyper

SEQ ID NO: 389905 - DNA, 265 bp, Homo sapiens; identical to SEQ ID NO: 206190
  chr22:50964979-50965244
  hyper

SEQ ID NO: 389906 - DNA, 101 bp, Homo sapiens; identical to SEQ ID NO: 241820
  chrX:2747435-2747536
  hyper

SEQ ID NO: 389907 - DNA, 282 bp, Homo sapiens; identical to SEQ ID NO: 241823
  chrX:3630855-3631137
  hyper

SEQ ID NO: 389908 - DNA, 327 bp, Homo sapiens; identical to SEQ ID NO: 206200
  chrX:7065514-7065841
  hyper

SEQ ID NO: 389909 - DNA, 373 bp, Homo sapiens; identical to SEQ ID NO: 206201
  chrX:7066303-7066676
  hyper

SEQ ID NO: 389910 - DNA, 161 bp, Homo sapiens; identical to SEQ ID NO: 226428
  chrX:11776190-11776351
  hyper

SEQ ID NO: 389911 - DNA, 82 bp, Homo sapiens; identical to SEQ ID NO: 206215
  chrX:15817994-15818076
  hyper

SEQ ID NO: 389912 - DNA, 70 bp, Homo sapiens; identical to SEQ ID NO: 206227
  chrX:27999798-27999868
  hyper

SEQ ID NO: 389913 - DNA, 46 bp, Homo sapiens; identical to SEQ ID NO: 295657
  chrX:39868176-39868222
  hyper

SEQ ID NO: 389914 - DNA, 82 bp, Homo sapiens; identical to SEQ ID NO: 295658
  chrX:39868252-39868334
  hyper

SEQ ID NO: 389915 - DNA, 157 bp, Homo sapiens; identical to SEQ ID NO: 206231
  chrX:39913138-39913295
  hyper

SEQ ID NO: 389916 - DNA, 167 bp, Homo sapiens; identical to SEQ ID NO: 206234
  chrX:39916407-39916574
  hyper

SEQ ID NO: 389917 - DNA, 1059 bp, Homo sapiens; identical to SEQ ID NO: 384879
  chrX:39932474-39933533
  hyper

SEQ ID NO: 389918 - DNA, 79 bp, Homo sapiens; identical to SEQ ID NO: 206242
  chrX:39935706-39935785
  hyper

SEQ ID NO: 389919 - DNA, 118 bp, Homo sapiens; identical to SEQ ID NO: 241868
  chrX:40506870-40506988
  hyper

SEQ ID NO: 389920 - DNA, 359 bp, Homo sapiens; identical to SEQ ID NO: 226464
  chrX:73163983-73164342
  hyper

SEQ ID NO: 389921 - DNA, 41 bp, Homo sapiens; identical to SEQ ID NO: 206274
  chrX:107003164-107003205
  hyper

SEQ ID NO: 389922 - DNA, 97 bp, Homo sapiens; identical to SEQ ID NO: 206283
  chrX:123171376-123171473
  hyper

SEQ ID NO: 389923 - DNA, 77 bp, Homo sapiens; identical to SEQ ID NO: 206284
  chrX:123176418-123176495
  hyper

SEQ ID NO: 389924 - DNA, 135 bp, Homo sapiens; identical to SEQ ID NO: 206288
  chrX:123184024-123184159
  hyper

SEQ ID NO: 389925 - DNA, 71 bp, Homo sapiens; identical to SEQ ID NO: 206296
  chrX:123199725-123199796
  hyper

SEQ ID NO: 389926 - DNA, 102 bp, Homo sapiens; identical to SEQ ID NO: 206301
  chrX:123211806-123211908
  hyper

SEQ ID NO: 389927 - DNA, 133 bp, Homo sapiens; identical to SEQ ID NO: 206303
  chrX:123217270-123217403
  hyper

SEQ ID NO: 389928 - DNA, 127 bp, Homo sapiens; identical to SEQ ID NO: 206306
  chrX:123227867-123227994
  hyper

SEQ ID NO: 389929 - DNA, 2398 bp, Homo sapiens; identical to SEQ ID NO: 384886
  chrX:129147791-129150189
  hyper

SEQ ID NO: 389930 - DNA, 227 bp, Homo sapiens; identical to SEQ ID NO: 206315
  chrX:129162609-129162836
  hyper

SEQ ID NO: 389931 - DNA, 44 bp, Homo sapiens; identical to SEQ ID NO: 206327
  chrX:133527938-133527982
  hyper

SEQ ID NO: 389932 - DNA, 61 bp, Homo sapiens; identical to SEQ ID NO: 206346
  chrY:21729023-21729084
  hyper

SEQ ID NO: 389933 - DNA, 45 bp, Homo sapiens; identical to SEQ ID NO: 206352
  FP325318.4_87426-89530:1058-1103
  hyper

SEQ ID NO: 389934 - DNA, 96 bp, Homo sapiens; identical to SEQ ID NO: 241915
  JH636052.4:1376242-1376338
  hyper

SEQ ID NO: 389935 - DNA, 33 bp, Homo sapiens; identical to SEQ ID NO: 247270
  chr1:809313-809346
  hypo

SEQ ID NO: 389936 - DNA, 1005 bp, Homo sapiens; identical to SEQ ID NO: 247283
  chr1:915023-916028
  hypo

SEQ ID NO: 389937 - DNA, 392 bp, Homo sapiens; identical to SEQ ID NO: 197235
  chr1:955508-955900
  hypo

SEQ ID NO: 389938 - DNA, 207 bp, Homo sapiens; identical to SEQ ID NO: 247292
  chr1:990294-990501
  hypo

SEQ ID NO: 389939 - DNA, 130 bp, Homo sapiens; identical to SEQ ID NO: 221177
  chr1:1052182-1052312
  hypo

SEQ ID NO: 389940 - DNA, 670 bp, Homo sapiens; identical to SEQ ID NO: 247302
  chr1:1062954-1063624
  hypo

SEQ ID NO: 389941 - DNA, 316 bp, Homo sapiens; identical to SEQ ID NO: 206382
  chr1:1069739-1070055
  hypo

SEQ ID NO: 389942 - DNA, 57 bp, Homo sapiens; identical to SEQ ID NO: 206383
  chr1:1079129-1079186
  hypo

SEQ ID NO: 389943 - DNA, 67 bp, Homo sapiens; identical to SEQ ID NO: 206393
  chr1:1221510-1221577
  hypo

SEQ ID NO: 389944 - DNA, 33 bp, Homo sapiens; identical to SEQ ID NO: 247343
  chr1:1258113-1258146
  hypo

SEQ ID NO: 389945 - DNA, 148 bp, Homo sapiens; identical to SEQ ID NO: 247345
  chr1:1265340-1265488
  hypo

SEQ ID NO: 389946 - DNA, 108 bp, Homo sapiens; identical to SEQ ID NO: 206401
  chr1:1272384-1272492
  hypo

SEQ ID NO: 389947 - DNA, 112 bp, Homo sapiens; identical to SEQ ID NO: 247351
  chr1:1277898-1278010
  hypo

SEQ ID NO: 389948 - DNA, 123 bp, Homo sapiens; identical to SEQ ID NO: 247366
  chr1:1496748-1496871
  hypo

SEQ ID NO: 389949 - DNA, 122 bp, Homo sapiens; identical to SEQ ID NO: 247368
  chr1:1519092-1519214
  hypo

SEQ ID NO: 389950 - DNA, 342 bp, Homo sapiens; identical to SEQ ID NO: 247375
  chr1:1611923-1612265
  hypo

SEQ ID NO: 389951 - DNA, 280 bp, Homo sapiens; identical to SEQ ID NO: 247389
  chr1:1724694-1724974
  hypo

SEQ ID NO: 389952 - DNA, 44 bp, Homo sapiens; identical to SEQ ID NO: 197244
  chr1:1747214-1747258
  hypo

SEQ ID NO: 389953 - DNA, 154 bp, Homo sapiens; identical to SEQ ID NO: 295965
  chr1:1861661-1861815
  hypo

SEQ ID NO: 389954 - DNA, 35 bp, Homo sapiens
  chr1:1974742-1974777
  hypo
tgggggcccaccacccagcagcaactgttggaccc

SEQ ID NO: 389955 - DNA, 101 bp, Homo sapiens; identical to SEQ ID NO: 247409
  chr1:2025268-2025369
  hypo

SEQ ID NO: 389956 - DNA, 218 bp, Homo sapiens; identical to SEQ ID NO: 206430
  chr1:2065387-2065605
  hypo

SEQ ID NO: 389957 - DNA, 167 bp, Homo sapiens; identical to SEQ ID NO: 247417
  chr1:2069360-2069527
  hypo

SEQ ID NO: 389958 - DNA, 521 bp, Homo sapiens; identical to SEQ ID NO: 247420
  chr1:2107353-2107874
  hypo

SEQ ID NO: 389959 - DNA, 472 bp, Homo sapiens; identical to SEQ ID NO: 247438
  chr1:2234639-2235111
  hypo

SEQ ID NO: 389960 - DNA, 324 bp, Homo sapiens; identical to SEQ ID NO: 247455
  chr1:2288153-2288477
  hypo

SEQ ID NO: 389961 - DNA, 31 bp, Homo sapiens; identical to SEQ ID NO: 296043
  chr1:2307894-2307925
  hypo

SEQ ID NO: 389962 - DNA, 150 bp, Homo sapiens; identical to SEQ ID NO: 296044
  chr1:2307955-2308105
  hypo

SEQ ID NO: 389963 - DNA, 195 bp, Homo sapiens; identical to SEQ ID NO: 296045
  chr1:2309953-2310148
  hypo

SEQ ID NO: 389964 - DNA, 162 bp, Homo sapiens; identical to SEQ ID NO: 296046
  chr1:2310244-2310406
  hypo

SEQ ID NO: 389965 - DNA, 54 bp, Homo sapiens; identical to SEQ ID NO: 206475
  chr1:2411364-2411418
  hypo

SEQ ID NO: 389966 - DNA, 114 bp, Homo sapiens; identical to SEQ ID NO: 247479
  chr1:2430550-2430664
  hypo

SEQ ID NO: 389967 - DNA, 177 bp, Homo sapiens; identical to SEQ ID NO: 206481
  chr1:2463122-2463299
  hypo

SEQ ID NO: 389968 - DNA, 68 bp, Homo sapiens; identical to SEQ ID NO: 247501
  chr1:2798429-2798497
  hypo

SEQ ID NO: 389969 - DNA, 143 bp, Homo sapiens; identical to SEQ ID NO: 206489
  chr1:2833979-2834122
  hypo

SEQ ID NO: 389970 - DNA, 276 bp, Homo sapiens; identical to SEQ ID NO: 247511
  chr1:2878440-2878716
  hypo

SEQ ID NO: 389971 - DNA, 269 bp, Homo sapiens; identical to SEQ ID NO: 296127
  chr1:3035176-3035445
  hypo

SEQ ID NO: 389972 - DNA, 50 bp, Homo sapiens; identical to SEQ ID NO: 247537
  chr1:3106931-3106981
  hypo

SEQ ID NO: 389973 - DNA, 122 bp, Homo sapiens; identical to SEQ ID NO: 247548
  chr1:3130375-3130497
  hypo

SEQ ID NO: 389974 - DNA, 133 bp, Homo sapiens; identical to SEQ ID NO: 247555
  chr1:3194281-3194414
  hypo

SEQ ID NO: 389975 - DNA, 238 bp, Homo sapiens; identical to SEQ ID NO: 206519
  chr1:3327630-3327868
  hypo

SEQ ID NO: 389976 - DNA, 152 bp, Homo sapiens; identical to SEQ ID NO: 247581
  chr1:3384392-3384544
  hypo

SEQ ID NO: 389977 - DNA, 379 bp, Homo sapiens; identical to SEQ ID NO: 247586
  chr1:3406736-3407115
  hypo

SEQ ID NO: 389978 - DNA, 517 bp, Homo sapiens; identical to SEQ ID NO: 296201
  chr1:3410515-3411032
  hypo

SEQ ID NO: 389979 - DNA, 493 bp, Homo sapiens; identical to SEQ ID NO: 247590
  chr1:3422675-3423168
  hypo

SEQ ID NO: 389980 - DNA, 187 bp, Homo sapiens; identical to SEQ ID NO: 247593
  chr1:3436853-3437040
  hypo

SEQ ID NO: 389981 - DNA, 365 bp, Homo sapiens; identical to SEQ ID NO: 247607
  chr1:3559616-3559981
  hypo

SEQ ID NO: 389982 - DNA, 211 bp, Homo sapiens; identical to SEQ ID NO: 206542
  chr1:3655597-3655808
  hypo

SEQ ID NO: 389983 - DNA, 35 bp, Homo sapiens; identical to SEQ ID NO: 296234
  chr1:3664741-3664776
  hypo

SEQ ID NO: 389984 - DNA, 64 bp, Homo sapiens; identical to SEQ ID NO: 247631
  chr1:3781806-3781870
  hypo

SEQ ID NO: 389985 - DNA, 283 bp, Homo sapiens; identical to SEQ ID NO: 247636
  chr1:4057085-4057368
  hypo

SEQ ID NO: 389986 - DNA, 35 bp, Homo sapiens; identical to SEQ ID NO: 247639
  chr1:4391727-4391762
  hypo

SEQ ID NO: 389987 - DNA, 34 bp, Homo sapiens; identical to SEQ ID NO: 247640
  chr1:4392062-4392096
  hypo

SEQ ID NO: 389988 - DNA, 53 bp, Homo sapiens; identical to SEQ ID NO: 247647
  chr1:4696907-4696960
  hypo

SEQ ID NO: 389989 - DNA, 98 bp, Homo sapiens; identical to SEQ ID NO: 247649
  chr1:4794016-4794114
  hypo

SEQ ID NO: 389990 - DNA, 95 bp, Homo sapiens; identical to SEQ ID NO: 247651
  chr1:5587302-5587397
  hypo

SEQ ID NO: 389991 - DNA, 235 bp, Homo sapiens; identical to SEQ ID NO: 247655
  chr1:5922581-5922816
  hypo

SEQ ID NO: 389992 - DNA, 121 bp, Homo sapiens; identical to SEQ ID NO: 247659
  chr1:5931724-5931845
  hypo

SEQ ID NO: 389993 - DNA, 87 bp, Homo sapiens; identical to SEQ ID NO: 296277
  chr1:5932999-5933086
  hypo

SEQ ID NO: 389994 - DNA, 229 bp, Homo sapiens; identical to SEQ ID NO: 206558
  chr1:5933144-5933373
  hypo

SEQ ID NO: 389995 - DNA, 145 bp, Homo sapiens; identical to SEQ ID NO: 206565
  chr1:5958567-5958712
  hypo

SEQ ID NO: 389996 - DNA, 78 bp, Homo sapiens; identical to SEQ ID NO: 247672
  chr1:5977997-5978075
  hypo

SEQ ID NO: 389997 - DNA, 104 bp, Homo sapiens; identical to SEQ ID NO: 296298
  chr1:6056053-6056157
  hypo

SEQ ID NO: 389998 - DNA, 68 bp, Homo sapiens; identical to SEQ ID NO: 247681
  chr1:6111618-6111686
  hypo

SEQ ID NO: 389999 - DNA, 82 bp, Homo sapiens; identical to SEQ ID NO: 247698
  chr1:6297113-6297195
  hypo

SEQ ID NO: 390000 - DNA, 138 bp, Homo sapiens; identical to SEQ ID NO: 206587
  chr1:6382126-6382264
  hypo

SEQ ID NO: 390001 - DNA, 53 bp, Homo sapiens; identical to SEQ ID NO: 296351
  chr1:6445425-6445478
  hypo

SEQ ID NO: 390002 - DNA, 205 bp, Homo sapiens; identical to SEQ ID NO: 59004
  chr1:6445510-6445715
  hypo

SEQ ID NO: 390003 - DNA, 87 bp, Homo sapiens; identical to SEQ ID NO: 383686
  chr1:6526181-6526268
  hypo

SEQ ID NO: 390004 - DNA, 372 bp, Homo sapiens; identical to SEQ ID NO: 247732
  chr1:6534593-6534965
  hypo

SEQ ID NO: 390005 - DNA, 62 bp, Homo sapiens; identical to SEQ ID NO: 206593
  chr1:6537439-6537501
  hypo

SEQ ID NO: 390006 - DNA, 190 bp, Homo sapiens; identical to SEQ ID NO: 206594
  chr1:6537537-6537727
  hypo

SEQ ID NO: 390007 - DNA, 89 bp, Homo sapiens; identical to SEQ ID NO: 247739
  chr1:6653433-6653522
  hypo

SEQ ID NO: 390008 - DNA, 40 bp, Homo sapiens; identical to SEQ ID NO: 206596
  chr1:6672155-6672195
  hypo

SEQ ID NO: 390009 - DNA, 141 bp, Homo sapiens; identical to SEQ ID NO: 206597
  chr1:6675989-6676130
  hypo

SEQ ID NO: 390010 - DNA, 83 bp, Homo sapiens; identical to SEQ ID NO: 206603
  chr1:6871010-6871093
  hypo

SEQ ID NO: 390011 - DNA, 135 bp, Homo sapiens; identical to SEQ ID NO: 247752
  chr1:7279268-7279403
  hypo

SEQ ID NO: 390012 - DNA, 125 bp, Homo sapiens; identical to SEQ ID NO: 247758
  chr1:7567307-7567432
  hypo

SEQ ID NO: 390013 - DNA, 162 bp, Homo sapiens; identical to SEQ ID NO: 247764
  chr1:7742818-7742980
  hypo

SEQ ID NO: 390014 - DNA, 267 bp, Homo sapiens; identical to SEQ ID NO: 247765
  chr1:7777934-7778201
  hypo

SEQ ID NO: 390015 - DNA, 40 bp, Homo sapiens; identical to SEQ ID NO: 197291
  chr1:7843653-7843693
  hypo

SEQ ID NO: 390016 - DNA, 34 bp, Homo sapiens; identical to SEQ ID NO: 247769
  chr1:8106657-8106691
  hypo

SEQ ID NO: 390017 - DNA, 69 bp, Homo sapiens; identical to SEQ ID NO: 247775
  chr1:8395503-8395572
  hypo

SEQ ID NO: 390018 - DNA, 213 bp, Homo sapiens; identical to SEQ ID NO: 247776
  chr1:8399490-8399703
  hypo

SEQ ID NO: 390019 - DNA, 152 bp, Homo sapiens; identical to SEQ ID NO: 206624
  chr1:9027898-9028050
  hypo

SEQ ID NO: 390020 - DNA, 81 bp, Homo sapiens; identical to SEQ ID NO: 206626
  chr1:9084938-9085019
  hypo

SEQ ID NO: 390021 - DNA, 268 bp, Homo sapiens; identical to SEQ ID NO: 221223
  chr1:9188954-9189222
  hypo

SEQ ID NO: 390022 - DNA, 48 bp, Homo sapiens; identical to SEQ ID NO: 247797
  chr1:9332433-9332481
  hypo

SEQ ID NO: 390023 - DNA, 87 bp, Homo sapiens; identical to SEQ ID NO: 247798
  chr1:9357986-9358073
  hypo

SEQ ID NO: 390024 - DNA, 425 bp, Homo sapiens; identical to SEQ ID NO: 247807
  chr1:9427427-9427852
  hypo

SEQ ID NO: 390025 - DNA, 127 bp, Homo sapiens; identical to SEQ ID NO: 206642
  chr1:9666790-9666917
  hypo

SEQ ID NO: 390026 - DNA, 177 bp, Homo sapiens; identical to SEQ ID NO: 206645
  chr1:9780744-9780921
  hypo

SEQ ID NO: 390027 - DNA, 149 bp, Homo sapiens; identical to SEQ ID NO: 206646
  chr1:9781134-9781283
  hypo

SEQ ID NO: 390028 - DNA, 143 bp, Homo sapiens; identical to SEQ ID NO: 247823
  chr1:9787397-9787540
  hypo

SEQ ID NO: 390029 - DNA, 360 bp, Homo sapiens; identical to SEQ ID NO: 206653
  chr1:10174923-10175283
  hypo

SEQ ID NO: 390030 - DNA, 120 bp, Homo sapiens; identical to SEQ ID NO: 247838
  chr1:10190000-10190120
  hypo

SEQ ID NO: 390031 - DNA, 213 bp, Homo sapiens; identical to SEQ ID NO: 247841
  chr1:10238658-10238871
  hypo

SEQ ID NO: 390032 - DNA, 52 bp, Homo sapiens; identical to SEQ ID NO: 247844
  chr1:10355725-10355777
  hypo

SEQ ID NO: 390033 - DNA, 263 bp, Homo sapiens; identical to SEQ ID NO: 206663
  chr1:10703773-10704036
  hypo

SEQ ID NO: 390034 - DNA, 227 bp, Homo sapiens; identical to SEQ ID NO: 247857
  chr1:10706750-10706977
  hypo

SEQ ID NO: 390035 - DNA, 250 bp, Homo sapiens; identical to SEQ ID NO: 247869
  chr1:10741779-10742029
  hypo

SEQ ID NO: 390036 - DNA, 365 bp, Homo sapiens; identical to SEQ ID NO: 247870
  chr1:10757887-10758252
  hypo

SEQ ID NO: 390037 - DNA, 216 bp, Homo sapiens; identical to SEQ ID NO: 247871
  chr1:10765349-10765565
  hypo

SEQ ID NO: 390038 - DNA, 51 bp, Homo sapiens; identical to SEQ ID NO: 247880
  chr1:10819916-10819967
  hypo

SEQ ID NO: 390039 - DNA, 211 bp, Homo sapiens; identical to SEQ ID NO: 206680
  chr1:10997239-10997450
  hypo

SEQ ID NO: 390040 - DNA, 90 bp, Homo sapiens; identical to SEQ ID NO: 247898
  chr1:11236360-11236450
  hypo

SEQ ID NO: 390041 - DNA, 262 bp, Homo sapiens; identical to SEQ ID NO: 206687
  chr1:11315988-11316250
  hypo

SEQ ID NO: 390042 - DNA, 148 bp, Homo sapiens; identical to SEQ ID NO: 247906
  chr1:11825794-11825942
  hypo

SEQ ID NO: 390043 - DNA, 136 bp, Homo sapiens; identical to SEQ ID NO: 247908
  chr1:11852475-11852611
  hypo

SEQ ID NO: 390044 - DNA, 142 bp, Homo sapiens; identical to SEQ ID NO: 247923
  chr1:12218910-12219052
  hypo

SEQ ID NO: 390045 - DNA, 215 bp, Homo sapiens; identical to SEQ ID NO: 247926
  chr1:12252961-12253176
  hypo

SEQ ID NO: 390046 - DNA, 37 bp, Homo sapiens; identical to SEQ ID NO: 206703
  chr1:12267963-12268000
  hypo

SEQ ID NO: 390047 - DNA, 65 bp, Homo sapiens; identical to SEQ ID NO: 247938
  chr1:12567168-12567233
  hypo

SEQ ID NO: 390048 - DNA, 165 bp, Homo sapiens; identical to SEQ ID NO: 206707
  chr1:12607962-12608127
  hypo

SEQ ID NO: 390049 - DNA, 35 bp, Homo sapiens; identical to SEQ ID NO: 247945
  chr1:12639822-12639857
  hypo

SEQ ID NO: 390050 - DNA, 120 bp, Homo sapiens; identical to SEQ ID NO: 247954
  chr1:14025409-14025529
  hypo

SEQ ID NO: 390051 - DNA, 130 bp, Homo sapiens; identical to SEQ ID NO: 247956
  chr1:14105492-14105622
  hypo

SEQ ID NO: 390052 - DNA, 236 bp, Homo sapiens; identical to SEQ ID NO: 247984
  chr1:15556611-15556847
  hypo

SEQ ID NO: 390053 - DNA, 35 bp, Homo sapiens; identical to SEQ ID NO: 247985
  chr1:15751733-15751768
  hypo

SEQ ID NO: 390054 - DNA, 92 bp, Homo sapiens; identical to SEQ ID NO: 247989
  chr1:15885334-15885426
  hypo

SEQ ID NO: 390055 - DNA, 155 bp, Homo sapiens; identical to SEQ ID NO: 206725
  chr1:15892452-15892607
  hypo

SEQ ID NO: 390056 - DNA, 62 bp, Homo sapiens; identical to SEQ ID NO: 387522
  chr1:15928927-15928989
  hypo

SEQ ID NO: 390057 - DNA, 75 bp, Homo sapiens; identical to SEQ ID NO: 387523
  chr1:15929019-15929094
  hypo

SEQ ID NO: 390058 - DNA, 124 bp, Homo sapiens; identical to SEQ ID NO: 248001
  chr1:16092326-16092450
  hypo

SEQ ID NO: 390059 - DNA, 329 bp, Homo sapiens; identical to SEQ ID NO: 248033
  chr1:16943749-16944078
  hypo

SEQ ID NO: 390060 - DNA, 37 bp, Homo sapiens; identical to SEQ ID NO: 206747
  chr1:17330879-17330916
  hypo

SEQ ID NO: 390061 - DNA, 208 bp, Homo sapiens; identical to SEQ ID NO: 197347
  chr1:17591036-17591244
  hypo

SEQ ID NO: 390062 - DNA, 200 bp, Homo sapiens; identical to SEQ ID NO: 248049
  chr1:17702234-17702434
  hypo

SEQ ID NO: 390063 - DNA, 35 bp, Homo sapiens; identical to SEQ ID NO: 206757
  chr1:17997213-17997248
  hypo

SEQ ID NO: 390064 - DNA, 56 bp, Homo sapiens; identical to SEQ ID NO: 206758
  chr1:18021388-18021444
  hypo

SEQ ID NO: 390065 - DNA, 137 bp, Homo sapiens; identical to SEQ ID NO: 248074
  chr1:19217051-19217188
  hypo

SEQ ID NO: 390066 - DNA, 143 bp, Homo sapiens; identical to SEQ ID NO: 206764
  chr1:19245955-19246098
  hypo

SEQ ID NO: 390067 - DNA, 57 bp, Homo sapiens; identical to SEQ ID NO: 248078
  chr1:19403632-19403689
  hypo

SEQ ID NO: 390068 - DNA, 232 bp, Homo sapiens; identical to SEQ ID NO: 248082
  chr1:19491254-19491486
  hypo

SEQ ID NO: 390069 - DNA, 388 bp, Homo sapiens; identical to SEQ ID NO: 206770
  chr1:20060808-20061196
  hypo

SEQ ID NO: 390070 - DNA, 116 bp, Homo sapiens; identical to SEQ ID NO: 296765
  chr1:20205178-20205294
  hypo

SEQ ID NO: 390071 - DNA, 274 bp, Homo sapiens; identical to SEQ ID NO: 296766
  chr1:20205324-20205598
  hypo

SEQ ID NO: 390072 - DNA, 136 bp, Homo sapiens; identical to SEQ ID NO: 206780
  chr1:20983634-20983770
  hypo

SEQ ID NO: 390073 - DNA, 256 bp, Homo sapiens; identical to SEQ ID NO: 248116
  chr1:21037714-21037970
  hypo

SEQ ID NO: 390074 - DNA, 157 bp, Homo sapiens; identical to SEQ ID NO: 206781
  chr1:21062548-21062705
  hypo

SEQ ID NO: 390075 - DNA, 42 bp, Homo sapiens; identical to SEQ ID NO: 248127
  chr1:21786548-21786590
  hypo

SEQ ID NO: 390076 - DNA, 166 bp, Homo sapiens; identical to SEQ ID NO: 206786
  chr1:21944017-21944183
  hypo

SEQ ID NO: 390077 - DNA, 187 bp, Homo sapiens; identical to SEQ ID NO: 248154
  chr1:22566065-22566252
  hypo

SEQ ID NO: 390078 - DNA, 68 bp, Homo sapiens; identical to SEQ ID NO: 384966
  chr1:22777322-22777390
  hypo

SEQ ID NO: 390079 - DNA, 134 bp, Homo sapiens; identical to SEQ ID NO: 248159
  chr1:22852708-22852842
  hypo

SEQ ID NO: 390080 - DNA, 133 bp, Homo sapiens; identical to SEQ ID NO: 206801
  chr1:23063031-23063164
  hypo

SEQ ID NO: 390081 - DNA, 85 bp, Homo sapiens; identical to SEQ ID NO: 206803
  chr1:23091396-23091481
  hypo

SEQ ID NO: 390082 - DNA, 82 bp, Homo sapiens; identical to SEQ ID NO: 248179
  chr1:23566833-23566915
  hypo

SEQ ID NO: 390083 - DNA, 120 bp, Homo sapiens; identical to SEQ ID NO: 206810
  chr1:23567755-23567875
  hypo

SEQ ID NO: 390084 - DNA, 168 bp, Homo sapiens; identical to SEQ ID NO: 296852
  chr1:23693910-23694078
  hypo

SEQ ID NO: 390085 - DNA, 137 bp, Homo sapiens; identical to SEQ ID NO: 248183
  chr1:23698583-23698720
  hypo

SEQ ID NO: 390086 - DNA, 105 bp, Homo sapiens; identical to SEQ ID NO: 221265
  chr1:23857853-23857958
  hypo

SEQ ID NO: 390087 - DNA, 143 bp, Homo sapiens; identical to SEQ ID NO: 206814
  chr1:23963133-23963276
  hypo

SEQ ID NO: 390088 - DNA, 34 bp, Homo sapiens; identical to SEQ ID NO: 248189
  chr1:24016636-24016670
  hypo

SEQ ID NO: 390089 - DNA, 105 bp, Homo sapiens; identical to SEQ ID NO: 248200
  chr1:24620325-24620430
  hypo

SEQ ID NO: 390090 - DNA, 142 bp, Homo sapiens; identical to SEQ ID NO: 206822
  chr1:24701524-24701666
  hypo

SEQ ID NO: 390091 - DNA, 88 bp, Homo sapiens; identical to SEQ ID NO: 206823
  chr1:24706236-24706324
  hypo

SEQ ID NO: 390092 - DNA, 33 bp, Homo sapiens; identical to SEQ ID NO: 248205
  chr1:24708666-24708699
  hypo

SEQ ID NO: 390093 - DNA, 287 bp, Homo sapiens; identical to SEQ ID NO: 248209
  chr1:24976291-24976578
  hypo

SEQ ID NO: 390094 - DNA, 133 bp, Homo sapiens; identical to SEQ ID NO: 206829
  chr1:25396320-25396453
  hypo

SEQ ID NO: 390095 - DNA, 192 bp, Homo sapiens; identical to SEQ ID NO: 248220
  chr1:25510193-25510385
  hypo

SEQ ID NO: 390096 - DNA, 151 bp, Homo sapiens; identical to SEQ ID NO: 221270
  chr1:25870618-25870769
  hypo

SEQ ID NO: 390097 - DNA, 158 bp, Homo sapiens; identical to SEQ ID NO: 206831
  chr1:25890394-25890552
  hypo

SEQ ID NO: 390098 - DNA, 76 bp, Homo sapiens; identical to SEQ ID NO: 248230
  chr1:25895704-25895780
  hypo

SEQ ID NO: 390099 - DNA, 97 bp, Homo sapiens; identical to SEQ ID NO: 206838
  chr1:26807958-26808055
  hypo

SEQ ID NO: 390100 - DNA, 39 bp, Homo sapiens; identical to SEQ ID NO: 248247
  chr1:26969659-26969698
  hypo

SEQ ID NO: 390101 - DNA, 102 bp, Homo sapiens; identical to SEQ ID NO: 248262
  chr1:27694479-27694581
  hypo

SEQ ID NO: 390102 - DNA, 52 bp, Homo sapiens; identical to SEQ ID NO: 248264
  chr1:27750893-27750945
  hypo

SEQ ID NO: 390103 - DNA, 76 bp, Homo sapiens; identical to SEQ ID NO: 248268
  chr1:27862696-27862772
  hypo

SEQ ID NO: 390104 - DNA, 190 bp, Homo sapiens; identical to SEQ ID NO: 221281
  chr1:27929167-27929357
  hypo

SEQ ID NO: 390105 - DNA, 33 bp, Homo sapiens; identical to SEQ ID NO: 206857
  chr1:28148833-28148866
  hypo

SEQ ID NO: 390106 - DNA, 37 bp, Homo sapiens; identical to SEQ ID NO: 206858
  chr1:28364954-28364991
  hypo

SEQ ID NO: 390107 - DNA, 185 bp, Homo sapiens; identical to SEQ ID NO: 248279
  chr1:28447726-28447911
  hypo

SEQ ID NO: 390108 - DNA, 52 bp, Homo sapiens; identical to SEQ ID NO: 206861
  chr1:28853770-28853822
  hypo

SEQ ID NO: 390109 - DNA, 97 bp, Homo sapiens; identical to SEQ ID NO: 248300
  chr1:29273976-29274073
  hypo

SEQ ID NO: 390110 - DNA, 79 bp, Homo sapiens; identical to SEQ ID NO: 248304
  chr1:29473803-29473882
  hypo

SEQ ID NO: 390111 - DNA, 54 bp, Homo sapiens; identical to SEQ ID NO: 206870
  chr1:29605969-29606023
  hypo

SEQ ID NO: 390112 - DNA, 140 bp, Homo sapiens; identical to SEQ ID NO: 197428
  chr1:31192212-31192352
  hypo

SEQ ID NO: 390113 - DNA, 88 bp, Homo sapiens; identical to SEQ ID NO: 206875
  chr1:31260793-31260881
  hypo

SEQ ID NO: 390114 - DNA, 64 bp, Homo sapiens; identical to SEQ ID NO: 206877
  chr1:31478716-31478780
  hypo

SEQ ID NO: 390115 - DNA, 36 bp, Homo sapiens; identical to SEQ ID NO: 206879
  chr1:31732224-31732260
  hypo

SEQ ID NO: 390116 - DNA, 121 bp, Homo sapiens; identical to SEQ ID NO: 221290
  chr1:32666272-32666393
  hypo

SEQ ID NO: 390117 - DNA, 39 bp, Homo sapiens; identical to SEQ ID NO: 248337
  chr1:32674989-32675028
  hypo

SEQ ID NO: 390118 - DNA, 113 bp, Homo sapiens; identical to SEQ ID NO: 297028
  chr1:32705375-32705488
  hypo

SEQ ID NO: 390119 - DNA, 82 bp, Homo sapiens; identical to SEQ ID NO: 297029
  chr1:32705579-32705661
  hypo

SEQ ID NO: 390120 - DNA, 137 bp, Homo sapiens; identical to SEQ ID NO: 221291
  chr1:32757550-32757687
  hypo

SEQ ID NO: 390121 - DNA, 76 bp, Homo sapiens; identical to SEQ ID NO: 248344
  chr1:32804501-32804577
  hypo

SEQ ID NO: 390122 - DNA, 140 bp, Homo sapiens; identical to SEQ ID NO: 248347
  chr1:32950770-32950910
  hypo

SEQ ID NO: 390123 - DNA, 33 bp, Homo sapiens; identical to SEQ ID NO: 248350
  chr1:33154203-33154236
  hypo

SEQ ID NO: 390124 - DNA, 93 bp, Homo sapiens; identical to SEQ ID NO: 248354
  chr1:33226462-33226555
  hypo

SEQ ID NO: 390125 - DNA, 502 bp, Homo sapiens; identical to SEQ ID NO: 248357
  chr1:33237281-33237783
  hypo

SEQ ID NO: 390126 - DNA, 37 bp, Homo sapiens; identical to SEQ ID NO: 206895
  chr1:33432070-33432107
  hypo

SEQ ID NO: 390127 - DNA, 498 bp, Homo sapiens; identical to SEQ ID NO: 197450
  chr1:33721208-33721706
  hypo

SEQ ID NO: 390128 - DNA, 39 bp, Homo sapiens; identical to SEQ ID NO: 206905
  chr1:36056553-36056592
  hypo

SEQ ID NO: 390129 - DNA, 201 bp, Homo sapiens; identical to SEQ ID NO: 248382
  chr1:36549011-36549212
  hypo

SEQ ID NO: 390130 - DNA, 88 bp, Homo sapiens; identical to SEQ ID NO: 248387
  chr1:36637143-36637231
  hypo

SEQ ID NO: 390131 - DNA, 62 bp, Homo sapiens; identical to SEQ ID NO: 248388
  chr1:36638185-36638247
  hypo

SEQ ID NO: 390132 - DNA, 116 bp, Homo sapiens; identical to SEQ ID NO: 248393
  chr1:36807404-36807520
  hypo

SEQ ID NO: 390133 - DNA, 218 bp, Homo sapiens; identical to SEQ ID NO: 197463
  chr1:36933230-36933448
  hypo

SEQ ID NO: 390134 - DNA, 150 bp, Homo sapiens; identical to SEQ ID NO: 206915
  chr1:36979463-36979613
  hypo

SEQ ID NO: 390135 - DNA, 142 bp, Homo sapiens; identical to SEQ ID NO: 248401
  chr1:37324710-37324852
  hypo

SEQ ID NO: 390136 - DNA, 98 bp, Homo sapiens; identical to SEQ ID NO: 221316
  chr1:38580185-38580283
  hypo

SEQ ID NO: 390137 - DNA, 31 bp, Homo sapiens; identical to SEQ ID NO: 206921
  chr1:39739272-39739303
  hypo

SEQ ID NO: 390138 - DNA, 31 bp, Homo sapiens; identical to SEQ ID NO: 221329
  chr1:40420568-40420599
  hypo

SEQ ID NO: 390139 - DNA, 79 bp, Homo sapiens; identical to SEQ ID NO: 248438
  chr1:41295714-41295793
  hypo

SEQ ID NO: 390140 - DNA, 394 bp, Homo sapiens; identical to SEQ ID NO: 248440
  chr1:41472915-41473309
  hypo

SEQ ID NO: 390141 - DNA, 51 bp, Homo sapiens; identical to SEQ ID NO: 248443
  chr1:41488287-41488338
  hypo

SEQ ID NO: 390142 - DNA, 211 bp, Homo sapiens; identical to SEQ ID NO: 248448
  chr1:41970958-41971169
  hypo

SEQ ID NO: 390143 - DNA, 319 bp, Homo sapiens; identical to SEQ ID NO: 297183
  chr1:43400386-43400705
  hypo

SEQ ID NO: 390144 - DNA, 35 bp, Homo sapiens; identical to SEQ ID NO: 248472
  chr1:43626939-43626974
  hypo

SEQ ID NO: 390145 - DNA, 70 bp, Homo sapiens; identical to SEQ ID NO: 297193
  chr1:43750607-43750677
  hypo

SEQ ID NO: 390146 - DNA, 151 bp, Homo sapiens; identical to SEQ ID NO: 297194
  chr1:43750707-43750858
  hypo

SEQ ID NO: 390147 - DNA, 119 bp, Homo sapiens; identical to SEQ ID NO: 391
  chr1:43919541-43919660
  hypo

SEQ ID NO: 390148 - DNA, 45 bp, Homo sapiens; identical to SEQ ID NO: 248488
  chr1:44030403-44030448
  hypo

SEQ ID NO: 390149 - DNA, 238 bp, Homo sapiens; identical to SEQ ID NO: 248495
  chr1:44072459-44072697
  hypo

SEQ ID NO: 390150 - DNA, 73 bp, Homo sapiens; identical to SEQ ID NO: 248500
  chr1:44138998-44139071
  hypo

SEQ ID NO: 390151 - DNA, 112 bp, Homo sapiens; identical to SEQ ID NO: 278338
  chr1:44402260-44402372
  hypo

SEQ ID NO: 390152 - DNA, 194 bp, Homo sapiens; identical to SEQ ID NO: 248520
  chr1:45090554-45090748
  hypo

SEQ ID NO: 390153 - DNA, 43 bp, Homo sapiens; identical to SEQ ID NO: 248528
  chr1:45190571-45190614
  hypo

SEQ ID NO: 390154 - DNA, 132 bp, Homo sapiens; identical to SEQ ID NO: 248529
  chr1:45190897-45191029
  hypo

SEQ ID NO: 390155 - DNA, 83 bp, Homo sapiens; identical to SEQ ID NO: 206973
  chr1:45454356-45454439
  hypo

SEQ ID NO: 390156 - DNA, 105 bp, Homo sapiens; identical to SEQ ID NO: 248539
  chr1:45529304-45529409
  hypo

SEQ ID NO: 390157 - DNA, 79 bp, Homo sapiens; identical to SEQ ID NO: 206975
  chr1:46131435-46131514
  hypo

SEQ ID NO: 390158 - DNA, 97 bp, Homo sapiens; identical to SEQ ID NO: 248554
  chr1:46751628-46751725
  hypo

SEQ ID NO: 390159 - DNA, 59 bp, Homo sapiens; identical to SEQ ID NO: 206977
  chr1:46752071-46752130
  hypo

SEQ ID NO: 390160 - DNA, 66 bp, Homo sapiens; identical to SEQ ID NO: 248566
  chr1:47974505-47974571
  hypo

SEQ ID NO: 390161 - DNA, 102 bp, Homo sapiens; identical to SEQ ID NO: 248567
  chr1:48187539-48187641
  hypo

SEQ ID NO: 390162 - DNA, 188 bp, Homo sapiens; identical to SEQ ID NO: 248569
  chr1:48257294-48257482
  hypo

SEQ ID NO: 390163 - DNA, 355 bp, Homo sapiens; identical to SEQ ID NO: 248574
  chr1:51165682-51166037
  hypo

SEQ ID NO: 390164 - DNA, 74 bp, Homo sapiens; identical to SEQ ID NO: 206993
  chr1:51761677-51761751
  hypo

SEQ ID NO: 390165 - DNA, 83 bp, Homo sapiens; identical to SEQ ID NO: 248579
  chr1:51848399-51848482
  hypo

SEQ ID NO: 390166 - DNA, 38 bp, Homo sapiens; identical to SEQ ID NO: 206997
  chr1:52089596-52089634
  hypo

SEQ ID NO: 390167 - DNA, 42 bp, Homo sapiens; identical to SEQ ID NO: 248584
  chr1:52284963-52285005
  hypo

SEQ ID NO: 390168 - DNA, 77 bp, Homo sapiens; identical to SEQ ID NO: 248607
  chr1:54009675-54009752
  hypo

SEQ ID NO: 390169 - DNA, 204 bp, Homo sapiens; identical to SEQ ID NO: 207009
  chr1:54605374-54605578
  hypo

SEQ ID NO: 390170 - DNA, 207 bp, Homo sapiens; identical to SEQ ID NO: 207012
  chr1:54746227-54746434
  hypo

SEQ ID NO: 390171 - DNA, 92 bp, Homo sapiens; identical to SEQ ID NO: 248628
  chr1:54757486-54757578
  hypo

SEQ ID NO: 390172 - DNA, 138 bp, Homo sapiens; identical to SEQ ID NO: 248635
  chr1:54880303-54880441
  hypo

SEQ ID NO: 390173 - DNA, 36 bp, Homo sapiens; identical to SEQ ID NO: 248636
  chr1:54944840-54944876
  hypo

SEQ ID NO: 390174 - DNA, 94 bp, Homo sapiens; identical to SEQ ID NO: 207015
  chr1:55033218-55033312
  hypo

SEQ ID NO: 390175 - DNA, 198 bp, Homo sapiens; identical to SEQ ID NO: 207022
  chr1:55517831-55518029
  hypo

SEQ ID NO: 390176 - DNA, 118 bp, Homo sapiens; identical to SEQ ID NO: 248651
  chr1:55560944-55561062
  hypo

SEQ ID NO: 390177 - DNA, 331 bp, Homo sapiens; identical to SEQ ID NO: 221363
  chr1:56943370-56943701
  hypo

SEQ ID NO: 390178 - DNA, 171 bp, Homo sapiens; identical to SEQ ID NO: 221369
  chr1:59369797-59369968
  hypo

SEQ ID NO: 390179 - DNA, 34 bp, Homo sapiens; identical to SEQ ID NO: 248656
  chr1:59500703-59500737
  hypo

SEQ ID NO: 390180 - DNA, 46 bp, Homo sapiens; identical to SEQ ID NO: 248657
  chr1:59500767-59500813
  hypo

SEQ ID NO: 390181 - DNA, 198 bp, Homo sapiens; identical to SEQ ID NO: 248661
  chr1:60382733-60382931
  hypo

SEQ ID NO: 390182 - DNA, 40 bp, Homo sapiens; identical to SEQ ID NO: 197558
  chr1:61516034-61516074
  hypo

SEQ ID NO: 390183 - DNA, 36 bp, Homo sapiens; identical to SEQ ID NO: 248673
  chr1:62213623-62213659
  hypo

SEQ ID NO: 390184 - DNA, 130 bp, Homo sapiens; identical to SEQ ID NO: 207044
  chr1:64383872-64384002
  hypo

SEQ ID NO: 390185 - DNA, 91 bp, Homo sapiens; identical to SEQ ID NO: 248683
  chr1:65513412-65513503
  hypo

SEQ ID NO: 390186 - DNA, 39 bp, Homo sapiens; identical to SEQ ID NO: 197579
  chr1:65720329-65720368
  hypo

SEQ ID NO: 390187 - DNA, 74 bp, Homo sapiens; identical to SEQ ID NO: 383730
  chr1:66259003-66259077
  hypo

SEQ ID NO: 390188 - DNA, 35 bp, Homo sapiens; identical to SEQ ID NO: 248690
  chr1:69982630-69982665
  hypo

SEQ ID NO: 390189 - DNA, 73 bp, Homo sapiens; identical to SEQ ID NO: 248701
  chr1:77165571-77165644
  hypo

SEQ ID NO: 390190 - DNA, 35 bp, Homo sapiens; identical to SEQ ID NO: 248707
  chr1:78510240-78510275
  hypo

SEQ ID NO: 390191 - DNA, 168 bp, Homo sapiens; identical to SEQ ID NO: 248719
  chr1:87607280-87607448
  hypo

SEQ ID NO: 390192 - DNA, 36 bp, Homo sapiens; identical to SEQ ID NO: 248722
  chr1:89451827-89451863
  hypo

SEQ ID NO: 390193 - DNA, 143 bp, Homo sapiens; identical to SEQ ID NO: 221399
  chr1:90228347-90228490
  hypo

SEQ ID NO: 390194 - DNA, 34 bp, Homo sapiens; identical to SEQ ID NO: 248729
  chr1:91072761-91072795
  hypo

SEQ ID NO: 390195 - DNA, 44 bp, Homo sapiens; identical to SEQ ID NO: 248734
  chr1:92371564-92371608
  hypo

SEQ ID NO: 390196 - DNA, 190 bp, Homo sapiens; identical to SEQ ID NO: 248736
  chr1:92683500-92683690
  hypo

SEQ ID NO: 390197 - DNA, 35 bp, Homo sapiens; identical to SEQ ID NO: 221405
  chr1:92946278-92946313
  hypo

SEQ ID NO: 390198 - DNA, 324 bp, Homo sapiens; identical to SEQ ID NO: 387616
  chr1:93914141-93914465
  hypo

SEQ ID NO: 390199 - DNA, 44 bp, Homo sapiens; identical to SEQ ID NO: 248738
  chr1:93973207-93973251
  hypo

SEQ ID NO: 390200 - DNA, 43 bp, Homo sapiens; identical to SEQ ID NO: 207073
  chr1:94507308-94507351
  hypo

SEQ ID NO: 390201 - DNA, 102 bp, Homo sapiens; identical to SEQ ID NO: 207075
  chr1:94546400-94546502
  hypo

SEQ ID NO: 390202 - DNA, 240 bp, Homo sapiens; identical to SEQ ID NO: 221415
  chr1:95007280-95007520
  hypo

SEQ ID NO: 390203 - DNA, 31 bp, Homo sapiens; identical to SEQ ID NO: 248753
  chr1:95222491-95222522
  hypo

SEQ ID NO: 390204 - DNA, 151 bp, Homo sapiens; identical to SEQ ID NO: 248756
  chr1:95343781-95343932
  hypo

SEQ ID NO: 390205 - DNA, 168 bp, Homo sapiens; identical to SEQ ID NO: 207088
  chr1:99667088-99667256
  hypo

SEQ ID NO: 390206 - DNA, 90 bp, Homo sapiens; identical to SEQ ID NO: 248768
  chr1:101721807-101721897
  hypo

SEQ ID NO: 390207 - DNA, 32 bp, Homo sapiens; identical to SEQ ID NO: 248769
  chr1:102292873-102292905
  hypo

SEQ ID NO: 390208 - DNA, 294 bp, Homo sapiens; identical to SEQ ID NO: 297563
  chr1:109646918-109647212
  hypo

SEQ ID NO: 390209 - DNA, 287 bp, Homo sapiens; identical to SEQ ID NO: 297569
  chr1:109797580-109797867
  hypo

SEQ ID NO: 390210 - DNA, 40 bp, Homo sapiens; identical to SEQ ID NO: 297570
  chr1:109797897-109797937
  hypo

SEQ ID NO: 390211 - DNA, 31 bp, Homo sapiens; identical to SEQ ID NO: 248788
  chr1:109805822-109805853
  hypo

SEQ ID NO: 390212 - DNA, 151 bp, Homo sapiens; identical to SEQ ID NO: 248801
  chr1:110471934-110472085
  hypo

SEQ ID NO: 390213 - DNA, 177 bp, Homo sapiens; identical to SEQ ID NO: 248807
  chr1:110771215-110771392
  hypo

SEQ ID NO: 390214 - DNA, 33 bp, Homo sapiens; identical to SEQ ID NO: 207116
  chr1:110947365-110947398
  hypo

SEQ ID NO: 390215 - DNA, 120 bp, Homo sapiens; identical to SEQ ID NO: 207117
  chr1:110947698-110947818
  hypo

SEQ ID NO: 390216 - DNA, 151 bp, Homo sapiens; identical to SEQ ID NO: 207118
  chr1:111022638-111022789
  hypo

SEQ ID NO: 390217 - DNA, 227 bp, Homo sapiens; identical to SEQ ID NO: 248815
  chr1:111216247-111216474
  hypo

SEQ ID NO: 390218 - DNA, 426 bp, Homo sapiens; identical to SEQ ID NO: 278753
  chr1:113051157-113051583
  hypo

SEQ ID NO: 390219 - DNA, 205 bp, Homo sapiens; identical to SEQ ID NO: 207124
  chr1:113244294-113244499
  hypo

SEQ ID NO: 390220 - DNA, 91 bp, Homo sapiens; identical to SEQ ID NO: 248829
  chr1:113412275-113412366
  hypo

SEQ ID NO: 390221 - DNA, 105 bp, Homo sapiens; identical to SEQ ID NO: 221451
  chr1:114697920-114698025
  hypo

SEQ ID NO: 390222 - DNA, 279 bp, Homo sapiens; identical to SEQ ID NO: 248840
  chr1:115829155-115829434
  hypo

SEQ ID NO: 390223 - DNA, 143 bp, Homo sapiens; identical to SEQ ID NO: 248851
  chr1:116935455-116935598
  hypo

SEQ ID NO: 390224 - DNA, 56 bp, Homo sapiens; identical to SEQ ID NO: 248852
  chr1:116952565-116952621
  hypo

SEQ ID NO: 390225 - DNA, 203 bp, Homo sapiens; identical to SEQ ID NO: 207137
  chr1:117076615-117076818
  hypo

SEQ ID NO: 390226 - DNA, 37 bp, Homo sapiens; identical to SEQ ID NO: 248859
  chr1:117250043-117250080
  hypo

SEQ ID NO: 390227 - DNA, 52 bp, Homo sapiens; identical to SEQ ID NO: 248872
  chr1:118114932-118114984
  hypo

SEQ ID NO: 390228 - DNA, 186 bp, Homo sapiens; identical to SEQ ID NO: 248886
  chr1:150484152-150484338
  hypo

SEQ ID NO: 390229 - DNA, 87 bp, Homo sapiens; identical to SEQ ID NO: 207156
  chr1:150579404-150579491
  hypo

SEQ ID NO: 390230 - DNA, 43 bp, Homo sapiens; identical to SEQ ID NO: 207157
  chr1:150581803-150581846
  hypo

SEQ ID NO: 390231 - DNA, 37 bp, Homo sapiens; identical to SEQ ID NO: 248903
  chr1:150858612-150858649
  hypo

SEQ ID NO: 390232 - DNA, 123 bp, Homo sapiens; identical to SEQ ID NO: 297722
  chr1:151345676-151345799
  hypo

SEQ ID NO: 390233 - DNA, 237 bp, Homo sapiens; identical to SEQ ID NO: 297723
  chr1:151345829-151346066
  hypo

SEQ ID NO: 390234 - DNA, 149 bp, Homo sapiens; identical to SEQ ID NO: 207170
  chr1:151481647-151481796
  hypo

SEQ ID NO: 390235 - DNA, 256 bp, Homo sapiens; identical to SEQ ID NO: 221464
  chr1:151763859-151764115
  hypo

SEQ ID NO: 390236 - DNA, 90 bp, Homo sapiens; identical to SEQ ID NO: 278845
  chr1:152084599-152084689
  hypo

SEQ ID NO: 390237 - DNA, 180 bp, Homo sapiens; identical to SEQ ID NO: 207183
  chr1:153937388-153937568
  hypo

SEQ ID NO: 390238 - DNA, 95 bp, Homo sapiens; identical to SEQ ID NO: 207192
  chr1:154343720-154343815
  hypo

SEQ ID NO: 390239 - DNA, 39 bp, Homo sapiens; identical to SEQ ID NO: 248961
  chr1:154933540-154933579
  hypo

SEQ ID NO: 390240 - DNA, 154 bp, Homo sapiens; identical to SEQ ID NO: 248965
  chr1:154965405-154965559
  hypo

SEQ ID NO: 390241 - DNA, 180 bp, Homo sapiens; identical to SEQ ID NO: 221475
  chr1:155099753-155099933
  hypo

SEQ ID NO: 390242 - DNA, 81 bp, Homo sapiens; identical to SEQ ID NO: 248974
  chr1:155152431-155152512
  hypo

SEQ ID NO: 390243 - DNA, 183 bp, Homo sapiens; identical to SEQ ID NO: 207206
  chr1:155403643-155403826
  hypo

SEQ ID NO: 390244 - DNA, 34 bp, Homo sapiens; identical to SEQ ID NO: 248982
  chr1:155412080-155412114
  hypo

SEQ ID NO: 390245 - DNA, 82 bp, Homo sapiens; identical to SEQ ID NO: 207207
  chr1:155466712-155466794
  hypo

SEQ ID NO: 390246 - DNA, 82 bp, Homo sapiens; identical to SEQ ID NO: 248992
  chr1:155862237-155862319
  hypo

SEQ ID NO: 390247 - DNA, 36 bp, Homo sapiens; identical to SEQ ID NO: 248999
  chr1:155972836-155972872
  hypo

SEQ ID NO: 390248 - DNA, 105 bp, Homo sapiens; identical to SEQ ID NO: 221480
  chr1:156084256-156084361
  hypo

SEQ ID NO: 390249 - DNA, 48 bp, Homo sapiens; identical to SEQ ID NO: 297817
  chr1:156111314-156111362
  hypo

SEQ ID NO: 390250 - DNA, 201 bp, Homo sapiens; identical to SEQ ID NO: 138312
  chr1:156111379-156111580
  hypo

SEQ ID NO: 390251 - DNA, 190 bp, Homo sapiens; identical to SEQ ID NO: 207221
  chr1:156256080-156256270
  hypo

SEQ ID NO: 390252 - DNA, 144 bp, Homo sapiens; identical to SEQ ID NO: 207225
  chr1:156432942-156433086
  hypo

SEQ ID NO: 390253 - DNA, 288 bp, Homo sapiens; identical to SEQ ID NO: 249019
  chr1:156445328-156445616
  hypo

SEQ ID NO: 390254 - DNA, 39 bp, Homo sapiens; identical to SEQ ID NO: 207229
  chr1:156664565-156664604
  hypo

SEQ ID NO: 390255 - DNA, 101 bp, Homo sapiens; identical to SEQ ID NO: 249023
  chr1:156667364-156667465
  hypo

SEQ ID NO: 390256 - DNA, 42 bp, Homo sapiens; identical to SEQ ID NO: 249025
  chr1:156768640-156768682
  hypo

SEQ ID NO: 390257 - DNA, 132 bp, Homo sapiens; identical to SEQ ID NO: 249026
  chr1:156785630-156785762
  hypo

SEQ ID NO: 390258 - DNA, 203 bp, Homo sapiens; identical to SEQ ID NO: 297847
  chr1:156823676-156823879
  hypo

SEQ ID NO: 390259 - DNA, 132 bp, Homo sapiens; identical to SEQ ID NO: 297848
  chr1:156823935-156824067
  hypo

SEQ ID NO: 390260 - DNA, 41 bp, Homo sapiens; identical to SEQ ID NO: 297850
  chr1:156849661-156849702
  hypo

SEQ ID NO: 390261 - DNA, 45 bp, Homo sapiens; identical to SEQ ID NO: 207241
  chr1:159229596-159229641
  hypo

SEQ ID NO: 390262 - DNA, 32 bp, Homo sapiens; identical to SEQ ID NO: 278940
  chr1:159750347-159750379
  hypo

SEQ ID NO: 390263 - DNA, 145 bp, Homo sapiens; identical to SEQ ID NO: 383759
  chr1:159750772-159750917
  hypo

SEQ ID NO: 390264 - DNA, 60 bp, Homo sapiens; identical to SEQ ID NO: 207247
  chr1:160063720-160063780
  hypo

SEQ ID NO: 390265 - DNA, 104 bp, Homo sapiens; identical to SEQ ID NO: 249053
  chr1:160155212-160155316
  hypo

SEQ ID NO: 390266 - DNA, 156 bp, Homo sapiens; identical to SEQ ID NO: 249056
  chr1:160385715-160385871
  hypo

SEQ ID NO: 390267 - DNA, 104 bp, Homo sapiens; identical to SEQ ID NO: 207273
  chr1:164590520-164590624
  hypo

SEQ ID NO: 390268 - DNA, 189 bp, Homo sapiens; identical to SEQ ID NO: 279005
  chr1:165345284-165345473
  hypo

SEQ ID NO: 390269 - DNA, 32 bp, Homo sapiens; identical to SEQ ID NO: 249113
  chr1:165495513-165495545
  hypo

SEQ ID NO: 390270 - DNA, 31 bp, Homo sapiens; identical to SEQ ID NO: 249119
  chr1:166958567-166958598
  hypo

SEQ ID NO: 390271 - DNA, 150 bp, Homo sapiens; identical to SEQ ID NO: 221513
  chr1:167423964-167424114
  hypo

SEQ ID NO: 390272 - DNA, 65 bp, Homo sapiens; identical to SEQ ID NO: 207290
  chr1:168058062-168058127
  hypo

SEQ ID NO: 390273 - DNA, 41 bp, Homo sapiens; identical to SEQ ID NO: 249136
  chr1:168062078-168062119
  hypo

SEQ ID NO: 390274 - DNA, 159 bp, Homo sapiens; identical to SEQ ID NO: 207300
  chr1:171707391-171707550
  hypo

SEQ ID NO: 390275 - DNA, 36 bp, Homo sapiens; identical to SEQ ID NO: 249170
  chr1:174048026-174048062
  hypo

SEQ ID NO: 390276 - DNA, 148 bp, Homo sapiens; identical to SEQ ID NO: 249173
  chr1:175014791-175014939
  hypo

SEQ ID NO: 390277 - DNA, 37 bp, Homo sapiens; identical to SEQ ID NO: 249183
  chr1:176695195-176695232
  hypo

SEQ ID NO: 390278 - DNA, 150 bp, Homo sapiens; identical to SEQ ID NO: 207312
  chr1:178271749-178271899
  hypo

SEQ ID NO: 390279 - DNA, 131 bp, Homo sapiens; identical to SEQ ID NO: 249188
  chr1:178469645-178469776
  hypo

SEQ ID NO: 390280 - DNA, 229 bp, Homo sapiens; identical to SEQ ID NO: 207315
  chr1:178928477-178928706
  hypo

SEQ ID NO: 390281 - DNA, 43 bp, Homo sapiens; identical to SEQ ID NO: 207318
  chr1:179229272-179229315
  hypo

SEQ ID NO: 390282 - DNA, 299 bp, Homo sapiens; identical to SEQ ID NO: 249204
  chr1:180097383-180097682
  hypo

SEQ ID NO: 390283 - DNA, 291 bp, Homo sapiens; identical to SEQ ID NO: 249205
  chr1:180134709-180135000
  hypo

SEQ ID NO: 390284 - DNA, 96 bp, Homo sapiens; identical to SEQ ID NO: 249208
  chr1:180223403-180223499
  hypo

SEQ ID NO: 390285 - DNA, 120 bp, Homo sapiens; identical to SEQ ID NO: 207324
  chr1:180497354-180497474
  hypo

SEQ ID NO: 390286 - DNA, 94 bp, Homo sapiens; identical to SEQ ID NO: 207329
  chr1:180885147-180885241
  hypo

SEQ ID NO: 390287 - DNA, 40 bp, Homo sapiens; identical to SEQ ID NO: 249232
  chr1:182148663-182148703
  hypo

SEQ ID NO: 390288 - DNA, 33 bp, Homo sapiens; identical to SEQ ID NO: 249233
  chr1:182230564-182230597
  hypo

SEQ ID NO: 390289 - DNA, 69 bp, Homo sapiens; identical to SEQ ID NO: 249234
  chr1:182637878-182637947
  hypo

SEQ ID NO: 390290 - DNA, 39 bp, Homo sapiens; identical to SEQ ID NO: 207340
  chr1:182767636-182767675
  hypo

SEQ ID NO: 390291 - DNA, 165 bp, Homo sapiens; identical to SEQ ID NO: 249246
  chr1:184333001-184333166
  hypo

SEQ ID NO: 390292 - DNA, 60 bp, Homo sapiens; identical to SEQ ID NO: 383773
  chr1:184722970-184723030
  hypo

SEQ ID NO: 390293 - DNA, 176 bp, Homo sapiens; identical to SEQ ID NO: 207355
  chr1:188612098-188612274
  hypo

SEQ ID NO: 390294 - DNA, 33 bp, Homo sapiens; identical to SEQ ID NO: 249262
  chr1:195578617-195578650
  hypo

SEQ ID NO: 390295 - DNA, 53 bp, Homo sapiens; identical to SEQ ID NO: 207358
  chr1:197091652-197091705
  hypo

SEQ ID NO: 390296 - DNA, 32 bp, Homo sapiens; identical to SEQ ID NO: 207359
  chr1:197116742-197116774
  hypo

SEQ ID NO: 390297 - DNA, 92 bp, Homo sapiens; identical to SEQ ID NO: 207362
  chr1:197704760-197704852
  hypo

SEQ ID NO: 390298 - DNA, 181 bp, Homo sapiens; identical to SEQ ID NO: 207363
  chr1:198828046-198828227
  hypo

SEQ ID NO: 390299 - DNA, 78 bp, Homo sapiens; identical to SEQ ID NO: 207372
  chr1:201055718-201055796
  hypo

SEQ ID NO: 390300 - DNA, 152 bp, Homo sapiens; identical to SEQ ID NO: 249295
  chr1:201244944-201245096
  hypo

SEQ ID NO: 390301 - DNA, 42 bp, Homo sapiens; identical to SEQ ID NO: 249298
  chr1:201325776-201325818
  hypo

SEQ ID NO: 390302 - DNA, 96 bp, Homo sapiens; identical to SEQ ID NO: 249300
  chr1:201351265-201351361
  hypo

SEQ ID NO: 390303 - DNA, 169 bp, Homo sapiens; identical to SEQ ID NO: 207379
  chr1:201355458-201355627
  hypo

SEQ ID NO: 390304 - DNA, 120 bp, Homo sapiens; identical to SEQ ID NO: 249304
  chr1:201432876-201432996
  hypo

SEQ ID NO: 390305 - DNA, 59 bp, Homo sapiens; identical to SEQ ID NO: 249308
  chr1:201981829-201981888
  hypo

SEQ ID NO: 390306 - DNA, 42 bp, Homo sapiens; identical to SEQ ID NO: 249315
  chr1:202022787-202022829
  hypo

SEQ ID NO: 390307 - DNA, 42 bp, Homo sapiens; identical to SEQ ID NO: 249320
  chr1:202058380-202058422
  hypo

SEQ ID NO: 390308 - DNA, 189 bp, Homo sapiens; identical to SEQ ID NO: 249324
  chr1:202218132-202218321
  hypo

SEQ ID NO: 390309 - DNA, 297 bp, Homo sapiens; identical to SEQ ID NO: 221543
  chr1:202830569-202830866
  hypo

SEQ ID NO: 390310 - DNA, 136 bp, Homo sapiens; identical to SEQ ID NO: 207391
  chr1:202934401-202934537
  hypo

SEQ ID NO: 390311 - DNA, 163 bp, Homo sapiens; identical to SEQ ID NO: 249337
  chr1:203014550-203014713
  hypo

SEQ ID NO: 390312 - DNA, 231 bp, Homo sapiens; identical to SEQ ID NO: 249343
  chr1:203192503-203192734
  hypo

SEQ ID NO: 390313 - DNA, 153 bp, Homo sapiens; identical to SEQ ID NO: 249346
  chr1:203455859-203456012
  hypo

SEQ ID NO: 390314 - DNA, 114 bp, Homo sapiens; identical to SEQ ID NO: 385105
  chr1:203690678-203690792
  hypo

SEQ ID NO: 390315 - DNA, 161 bp, Homo sapiens; identical to SEQ ID NO: 249351
  chr1:204003761-204003922
  hypo

SEQ ID NO: 390316 - DNA, 103 bp, Homo sapiens; identical to SEQ ID NO: 207399
  chr1:204217170-204217273
  hypo

SEQ ID NO: 390317 - DNA, 100 bp, Homo sapiens; identical to SEQ ID NO: 249366
  chr1:204299942-204300042
  hypo

SEQ ID NO: 390318 - DNA, 43 bp, Homo sapiens; identical to SEQ ID NO: 207405
  chr1:204487138-204487181
  hypo

SEQ ID NO: 390319 - DNA, 120 bp, Homo sapiens; identical to SEQ ID NO: 249372
  chr1:204493508-204493628
  hypo

SEQ ID NO: 390320 - DNA, 200 bp, Homo sapiens; identical to SEQ ID NO: 279200
  chr1:204518656-204518856
  hypo

SEQ ID NO: 390321 - DNA, 101 bp, Homo sapiens; identical to SEQ ID NO: 249390
  chr1:205210756-205210857
  hypo

SEQ ID NO: 390322 - DNA, 70 bp, Homo sapiens; identical to SEQ ID NO: 249391
  chr1:205238244-205238314
  hypo

SEQ ID NO: 390323 - DNA, 98 bp, Homo sapiens; identical to SEQ ID NO: 249404
  chr1:207105076-207105174
  hypo

SEQ ID NO: 390324 - DNA, 183 bp, Homo sapiens; identical to SEQ ID NO: 249405
  chr1:207130059-207130242
  hypo

SEQ ID NO: 390325 - DNA, 36 bp, Homo sapiens; identical to SEQ ID NO: 249417
  chr1:207880637-207880673
  hypo

SEQ ID NO: 390326 - DNA, 282 bp, Homo sapiens; identical to SEQ ID NO: 249425
  chr1:207994389-207994671
  hypo

SEQ ID NO: 390327 - DNA, 105 bp, Homo sapiens; identical to SEQ ID NO: 197930
  chr1:207995292-207995397
  hypo

SEQ ID NO: 390328 - DNA, 165 bp, Homo sapiens; identical to SEQ ID NO: 249430
  chr1:208328464-208328629
  hypo

SEQ ID NO: 390329 - DNA, 751 bp, Homo sapiens; identical to SEQ ID NO: 249431
  chr1:208404328-208405079
  hypo

SEQ ID NO: 390330 - DNA, 257 bp, Homo sapiens; identical to SEQ ID NO: 221561
  chr1:208416772-208417029
  hypo

SEQ ID NO: 390331 - DNA, 105 bp, Homo sapiens; identical to SEQ ID NO: 249450
  chr1:211430456-211430561
  hypo

SEQ ID NO: 390332 - DNA, 209 bp, Homo sapiens; identical to SEQ ID NO: 249463
  chr1:212647420-212647629
  hypo

SEQ ID NO: 390333 - DNA, 38 bp, Homo sapiens; identical to SEQ ID NO: 249472
  chr1:214557876-214557914
  hypo

SEQ ID NO: 390334 - DNA, 32 bp, Homo sapiens
  chr1:214638124-214638156
  hypo
ggagcttcagaccaaaaggcatggctatgtgg

SEQ ID NO: 390335 - DNA, 51 bp, Homo sapiens; identical to SEQ ID NO: 207454
  chr1:214638186-214638237
  hypo

SEQ ID NO: 390336 - DNA, 44 bp, Homo sapiens; identical to SEQ ID NO: 207469
  chr1:223003690-223003734
  hypo

SEQ ID NO: 390337 - DNA, 405 bp, Homo sapiens; identical to SEQ ID NO: 249495
  chr1:223210752-223211157
  hypo

SEQ ID NO: 390338 - DNA, 164 bp, Homo sapiens; identical to SEQ ID NO: 207474
  chr1:223813496-223813660
  hypo

SEQ ID NO: 390339 - DNA, 42 bp, Homo sapiens; identical to SEQ ID NO: 249504
  chr1:223908289-223908331
  hypo

SEQ ID NO: 390340 - DNA, 63 bp, Homo sapiens; identical to SEQ ID NO: 298372
  chr1:223927891-223927954
  hypo

SEQ ID NO: 390341 - DNA, 61 bp, Homo sapiens; identical to SEQ ID NO: 249507
  chr1:223953251-223953312
  hypo

SEQ ID NO: 390342 - DNA, 33 bp, Homo sapiens; identical to SEQ ID NO: 207491
  chr1:225608023-225608056
  hypo

SEQ ID NO: 390343 - DNA, 243 bp, Homo sapiens; identical to SEQ ID NO: 207493
  chr1:225637174-225637417
  hypo

SEQ ID NO: 390344 - DNA, 45 bp, Homo sapiens; identical to SEQ ID NO: 249523
  chr1:225696995-225697040
  hypo

SEQ ID NO: 390345 - DNA, 130 bp, Homo sapiens; identical to SEQ ID NO: 249532
  chr1:226059446-226059576
  hypo

SEQ ID NO: 390346 - DNA, 35 bp, Homo sapiens; identical to SEQ ID NO: 249539
  chr1:226304036-226304071
  hypo

SEQ ID NO: 390347 - DNA, 56 bp, Homo sapiens; identical to SEQ ID NO: 221594
  chr1:226497394-226497450
  hypo

SEQ ID NO: 390348 - DNA, 342 bp, Homo sapiens; identical to SEQ ID NO: 207503
  chr1:226789939-226790281
  hypo

SEQ ID NO: 390349 - DNA, 69 bp, Homo sapiens; identical to SEQ ID NO: 249549
  chr1:226834885-226834954
  hypo

SEQ ID NO: 390350 - DNA, 82 bp, Homo sapiens; identical to SEQ ID NO: 207508
  chr1:227248038-227248120
  hypo

SEQ ID NO: 390351 - DNA, 204 bp, Homo sapiens; identical to SEQ ID NO: 207514
  chr1:227948693-227948897
  hypo

SEQ ID NO: 390352 - DNA, 78 bp, Homo sapiens; identical to SEQ ID NO: 207516
  chr1:228003875-228003953
  hypo

SEQ ID NO: 390353 - DNA, 42 bp, Homo sapiens; identical to SEQ ID NO: 249590
  chr1:228406668-228406710
  hypo

SEQ ID NO: 390354 - DNA, 76 bp, Homo sapiens; identical to SEQ ID NO: 298475
  chr1:228461082-228461158
  hypo

SEQ ID NO: 390355 - DNA, 330 bp, Homo sapiens; identical to SEQ ID NO: 207530
  chr1:228465319-228465649
  hypo

SEQ ID NO: 390356 - DNA, 60 bp, Homo sapiens; identical to SEQ ID NO: 249609
  chr1:228529845-228529905
  hypo

SEQ ID NO: 390357 - DNA, 38 bp, Homo sapiens; identical to SEQ ID NO: 249615
  chr1:228613059-228613097
  hypo

SEQ ID NO: 390358 - DNA, 37 bp, Homo sapiens; identical to SEQ ID NO: 249616
  chr1:228614003-228614040
  hypo

SEQ ID NO: 390359 - DNA, 143 bp, Homo sapiens; identical to SEQ ID NO: 207549
  chr1:229462409-229462552
  hypo

SEQ ID NO: 390360 - DNA, 35 bp, Homo sapiens; identical to SEQ ID NO: 207552
  chr1:229678578-229678613
  hypo

SEQ ID NO: 390361 - DNA, 219 bp, Homo sapiens; identical to SEQ ID NO: 198009
  chr1:230223230-230223449
  hypo

SEQ ID NO: 390362 - DNA, 99 bp, Homo sapiens; identical to SEQ ID NO: 249640
  chr1:230250129-230250228
  hypo

SEQ ID NO: 390363 - DNA, 219 bp, Homo sapiens; identical to SEQ ID NO: 249646
  chr1:230378964-230379183
  hypo

SEQ ID NO: 390364 - DNA, 312 bp, Homo sapiens; identical to SEQ ID NO: 249650
  chr1:230398099-230398411
  hypo

SEQ ID NO: 390365 - DNA, 103 bp, Homo sapiens; identical to SEQ ID NO: 298549
  chr1:230453705-230453808
  hypo

SEQ ID NO: 390366 - DNA, 42 bp, Homo sapiens; identical to SEQ ID NO: 249659
  chr1:230841595-230841637
  hypo

SEQ ID NO: 390367 - DNA, 61 bp, Homo sapiens; identical to SEQ ID NO: 207581
  chr1:232909165-232909226
  hypo

SEQ ID NO: 390368 - DNA, 127 bp, Homo sapiens; identical to SEQ ID NO: 249703
  chr1:234452341-234452468
  hypo

SEQ ID NO: 390369 - DNA, 277 bp, Homo sapiens; identical to SEQ ID NO: 249706
  chr1:234587511-234587788
  hypo

SEQ ID NO: 390370 - DNA, 92 bp, Homo sapiens; identical to SEQ ID NO: 298606
  chr1:234621343-234621435
  hypo

SEQ ID NO: 390371 - DNA, 45 bp, Homo sapiens; identical to SEQ ID NO: 249709
  chr1:234690619-234690664
  hypo

SEQ ID NO: 390372 - DNA, 181 bp, Homo sapiens; identical to SEQ ID NO: 207588
  chr1:234691150-234691331
  hypo

SEQ ID NO: 390373 - DNA, 207 bp, Homo sapiens; identical to SEQ ID NO: 249713
  chr1:234797012-234797219
  hypo

SEQ ID NO: 390374 - DNA, 35 bp, Homo sapiens; identical to SEQ ID NO: 249717
  chr1:234863731-234863766
  hypo

SEQ ID NO: 390375 - DNA, 284 bp, Homo sapiens; identical to SEQ ID NO: 207597
  chr1:234871741-234872025
  hypo

SEQ ID NO: 390376 - DNA, 169 bp, Homo sapiens; identical to SEQ ID NO: 207601
  chr1:235037109-235037278
  hypo

SEQ ID NO: 390377 - DNA, 79 bp, Homo sapiens; identical to SEQ ID NO: 207602
  chr1:235042107-235042186
  hypo

SEQ ID NO: 390378 - DNA, 99 bp, Homo sapiens; identical to SEQ ID NO: 249740
  chr1:235542866-235542965
  hypo

SEQ ID NO: 390379 - DNA, 242 bp, Homo sapiens; identical to SEQ ID NO: 207607
  chr1:235613456-235613698
  hypo

SEQ ID NO: 390380 - DNA, 70 bp, Homo sapiens; identical to SEQ ID NO: 207608
  chr1:235665736-235665806
  hypo

SEQ ID NO: 390381 - DNA, 31 bp, Homo sapiens; identical to SEQ ID NO: 207610
  chr1:235855354-235855385
  hypo

SEQ ID NO: 390382 - DNA, 39 bp, Homo sapiens; identical to SEQ ID NO: 249748
  chr1:236069953-236069992
  hypo

SEQ ID NO: 390383 - DNA, 185 bp, Homo sapiens; identical to SEQ ID NO: 249751
  chr1:236143072-236143257
  hypo

SEQ ID NO: 390384 - DNA, 180 bp, Homo sapiens; identical to SEQ ID NO: 249761
  chr1:236281071-236281251
  hypo

SEQ ID NO: 390385 - DNA, 33 bp, Homo sapiens; identical to SEQ ID NO: 249763
  chr1:236318110-236318143
  hypo

SEQ ID NO: 390386 - DNA, 44 bp, Homo sapiens; identical to SEQ ID NO: 249767
  chr1:236514730-236514774
  hypo

SEQ ID NO: 390387 - DNA, 56 bp, Homo sapiens; identical to SEQ ID NO: 207622
  chr1:236561305-236561361
  hypo

SEQ ID NO: 390388 - DNA, 121 bp, Homo sapiens; identical to SEQ ID NO: 249785
  chr1:240048929-240049050
  hypo

SEQ ID NO: 390389 - DNA, 80 bp, Homo sapiens; identical to SEQ ID NO: 207635
  chr1:241753331-241753411
  hypo

SEQ ID NO: 390390 - DNA, 77 bp, Homo sapiens; identical to SEQ ID NO: 249803
  chr1:243432191-243432268
  hypo

SEQ ID NO: 390391 - DNA, 39 bp, Homo sapiens; identical to SEQ ID NO: 207640
  chr1:243750610-243750649
  hypo

SEQ ID NO: 390392 - DNA, 73 bp, Homo sapiens; identical to SEQ ID NO: 298718
  chr1:244243852-244243925
  hypo

SEQ ID NO: 390393 - DNA, 216 bp, Homo sapiens; identical to SEQ ID NO: 207642
  chr1:244345254-244345470
  hypo

SEQ ID NO: 390394 - DNA, 95 bp, Homo sapiens; identical to SEQ ID NO: 249822
  chr1:244896511-244896606
  hypo

SEQ ID NO: 390395 - DNA, 157 bp, Homo sapiens; identical to SEQ ID NO: 249832
  chr1:245370678-245370835
  hypo

SEQ ID NO: 390396 - DNA, 95 bp, Homo sapiens; identical to SEQ ID NO: 249834
  chr1:245446511-245446606
  hypo

SEQ ID NO: 390397 - DNA, 175 bp, Homo sapiens; identical to SEQ ID NO: 249846
  chr1:245548882-245549057
  hypo

SEQ ID NO: 390398 - DNA, 192 bp, Homo sapiens; identical to SEQ ID NO: 207653
  chr1:245576466-245576658
  hypo

SEQ ID NO: 390399 - DNA, 37 bp, Homo sapiens; identical to SEQ ID NO: 249855
  chr1:245722717-245722754
  hypo

SEQ ID NO: 390400 - DNA, 112 bp, Homo sapiens; identical to SEQ ID NO: 249856
  chr1:245752683-245752795
  hypo

SEQ ID NO: 390401 - DNA, 211 bp, Homo sapiens; identical to SEQ ID NO: 249859
  chr1:245765879-245766090
  hypo

SEQ ID NO: 390402 - DNA, 183 bp, Homo sapiens; identical to SEQ ID NO: 249869
  chr1:246019929-246020112
  hypo

SEQ ID NO: 390403 - DNA, 78 bp, Homo sapiens; identical to SEQ ID NO: 249871
  chr1:246032887-246032965
  hypo

SEQ ID NO: 390404 - DNA, 330 bp, Homo sapiens; identical to SEQ ID NO: 221641
  chr1:246887311-246887641
  hypo

SEQ ID NO: 390405 - DNA, 149 bp, Homo sapiens; identical to SEQ ID NO: 249891
  chr1:246899321-246899470
  hypo

SEQ ID NO: 390406 - DNA, 91 bp, Homo sapiens; identical to SEQ ID NO: 249895
  chr1:246944244-246944335
  hypo

SEQ ID NO: 390407 - DNA, 155 bp, Homo sapiens; identical to SEQ ID NO: 249900
  chr1:247109075-247109230
  hypo

SEQ ID NO: 390408 - DNA, 181 bp, Homo sapiens; identical to SEQ ID NO: 249902
  chr1:247253910-247254091
  hypo

SEQ ID NO: 390409 - DNA, 180 bp, Homo sapiens; identical to SEQ ID NO: 249905
  chr1:247527170-247527350
  hypo

SEQ ID NO: 390410 - DNA, 142 bp, Homo sapiens; identical to SEQ ID NO: 298820
  chr1:247590117-247590259
  hypo

SEQ ID NO: 390411 - DNA, 180 bp, Homo sapiens; identical to SEQ ID NO: 249912
  chr1:248003051-248003231
  hypo

SEQ ID NO: 390412 - DNA, 87 bp, Homo sapiens; identical to SEQ ID NO: 249917
  chr1:248047953-248048040
  hypo

SEQ ID NO: 390413 - DNA, 123 bp, Homo sapiens; identical to SEQ ID NO: 207682
  chr1:249212002-249212125
  hypo

SEQ ID NO: 390414 - DNA, 136 bp, Homo sapiens; identical to SEQ ID NO: 249935
  chr2:249730-249866
  hypo

SEQ ID NO: 390415 - DNA, 117 bp, Homo sapiens; identical to SEQ ID NO: 249946
  chr2:465771-465888
  hypo

SEQ ID NO: 390416 - DNA, 232 bp, Homo sapiens; identical to SEQ ID NO: 298859
  chr2:495958-496190
  hypo

SEQ ID NO: 390417 - DNA, 361 bp, Homo sapiens; identical to SEQ ID NO: 249948
  chr2:497070-497431
  hypo

SEQ ID NO: 390418 - DNA, 32 bp, Homo sapiens; identical to SEQ ID NO: 298866
  chr2:720804-720836
  hypo

SEQ ID NO: 390419 - DNA, 99 bp, Homo sapiens; identical to SEQ ID NO: 298867
  chr2:720897-720996
  hypo

SEQ ID NO: 390420 - DNA, 183 bp, Homo sapiens; identical to SEQ ID NO: 207695
  chr2:817146-817329
  hypo

SEQ ID NO: 390421 - DNA, 42 bp, Homo sapiens; identical to SEQ ID NO: 249965
  chr2:911370-911412
  hypo

SEQ ID NO: 390422 - DNA, 269 bp, Homo sapiens; identical to SEQ ID NO: 249970
  chr2:1204032-1204301
  hypo

SEQ ID NO: 390423 - DNA, 197 bp, Homo sapiens; identical to SEQ ID NO: 298902
  chr2:1669971-1670168
  hypo

SEQ ID NO: 390424 - DNA, 84 bp, Homo sapiens; identical to SEQ ID NO: 249995
  chr2:1828326-1828410
  hypo

SEQ ID NO: 390425 - DNA, 167 bp, Homo sapiens; identical to SEQ ID NO: 207714
  chr2:1932938-1933105
  hypo

SEQ ID NO: 390426 - DNA, 135 bp, Homo sapiens; identical to SEQ ID NO: 250007
  chr2:2142636-2142771
  hypo

SEQ ID NO: 390427 - DNA, 336 bp, Homo sapiens; identical to SEQ ID NO: 385162
  chr2:2189143-2189479
  hypo

SEQ ID NO: 390428 - DNA, 64 bp, Homo sapiens; identical to SEQ ID NO: 250012
  chr2:2325021-2325085
  hypo

SEQ ID NO: 390429 - DNA, 260 bp, Homo sapiens; identical to SEQ ID NO: 250016
  chr2:2584324-2584584
  hypo

SEQ ID NO: 390430 - DNA, 49 bp, Homo sapiens; identical to SEQ ID NO: 250021
  chr2:2672247-2672296
  hypo

SEQ ID NO: 390431 - DNA, 168 bp, Homo sapiens; identical to SEQ ID NO: 250035
  chr2:2795035-2795203
  hypo

SEQ ID NO: 390432 - DNA, 159 bp, Homo sapiens; identical to SEQ ID NO: 250038
  chr2:2800085-2800244
  hypo

SEQ ID NO: 390433 - DNA, 167 bp, Homo sapiens; identical to SEQ ID NO: 250053
  chr2:3113370-3113537
  hypo

SEQ ID NO: 390434 - DNA, 65 bp, Homo sapiens; identical to SEQ ID NO: 250054
  chr2:3118887-3118952
  hypo

SEQ ID NO: 390435 - DNA, 101 bp, Homo sapiens; identical to SEQ ID NO: 207726
  chr2:3173339-3173440
  hypo

SEQ ID NO: 390436 - DNA, 72 bp, Homo sapiens; identical to SEQ ID NO: 207728
  chr2:3201717-3201789
  hypo

SEQ ID NO: 390437 - DNA, 286 bp, Homo sapiens; identical to SEQ ID NO: 250058
  chr2:3214976-3215262
  hypo

SEQ ID NO: 390438 - DNA, 360 bp, Homo sapiens; identical to SEQ ID NO: 250088
  chr2:3452857-3453217
  hypo

SEQ ID NO: 390439 - DNA, 192 bp, Homo sapiens; identical to SEQ ID NO: 250089
  chr2:3456147-3456339
  hypo

SEQ ID NO: 390440 - DNA, 80 bp, Homo sapiens; identical to SEQ ID NO: 250090
  chr2:3458785-3458865
  hypo

SEQ ID NO: 390441 - DNA, 42 bp, Homo sapiens; identical to SEQ ID NO: 250093
  chr2:3498265-3498307
  hypo

SEQ ID NO: 390442 - DNA, 71 bp, Homo sapiens; identical to SEQ ID NO: 207750
  chr2:3593598-3593669
  hypo

SEQ ID NO: 390443 - DNA, 198 bp, Homo sapiens; identical to SEQ ID NO: 299033
  chr2:3990922-3991120
  hypo

SEQ ID NO: 390444 - DNA, 57 bp, Homo sapiens; identical to SEQ ID NO: 207755
  chr2:6402889-6402946
  hypo

SEQ ID NO: 390445 - DNA, 98 bp, Homo sapiens; identical to SEQ ID NO: 207758
  chr2:7109819-7109917
  hypo

SEQ ID NO: 390446 - DNA, 33 bp, Homo sapiens; identical to SEQ ID NO: 250123
  chr2:7180010-7180043
  hypo

SEQ ID NO: 390447 - DNA, 102 bp, Homo sapiens; identical to SEQ ID NO: 207760
  chr2:7237053-7237155
  hypo

SEQ ID NO: 390448 - DNA, 120 bp, Homo sapiens; identical to SEQ ID NO: 207762
  chr2:8647532-8647652
  hypo

SEQ ID NO: 390449 - DNA, 665 bp, Homo sapiens; identical to SEQ ID NO: 221657
  chr2:8818829-8819494
  hypo

SEQ ID NO: 390450 - DNA, 208 bp, Homo sapiens; identical to SEQ ID NO: 198064
  chr2:8825635-8825843
  hypo

SEQ ID NO: 390451 - DNA, 75 bp, Homo sapiens; identical to SEQ ID NO: 299092
  chr2:9244226-9244301
  hypo

SEQ ID NO: 390452 - DNA, 165 bp, Homo sapiens; identical to SEQ ID NO: 299093
  chr2:9244331-9244496
  hypo

SEQ ID NO: 390453 - DNA, 174 bp, Homo sapiens; identical to SEQ ID NO: 250164
  chr2:9250674-9250848
  hypo

SEQ ID NO: 390454 - DNA, 59 bp, Homo sapiens; identical to SEQ ID NO: 207785
  chr2:9251105-9251164
  hypo

SEQ ID NO: 390455 - DNA, 95 bp, Homo sapiens; identical to SEQ ID NO: 250170
  chr2:9427258-9427353
  hypo

SEQ ID NO: 390456 - DNA, 470 bp, Homo sapiens; identical to SEQ ID NO: 207790
  chr2:9455454-9455924
  hypo

SEQ ID NO: 390457 - DNA, 175 bp, Homo sapiens; identical to SEQ ID NO: 250192
  chr2:9952204-9952379
  hypo

SEQ ID NO: 390458 - DNA, 134 bp, Homo sapiens; identical to SEQ ID NO: 250195
  chr2:10008084-10008218
  hypo

SEQ ID NO: 390459 - DNA, 42 bp, Homo sapiens; identical to SEQ ID NO: 250210
  chr2:10226144-10226186
  hypo

SEQ ID NO: 390460 - DNA, 180 bp, Homo sapiens; identical to SEQ ID NO: 221667
  chr2:10443826-10444006
  hypo

SEQ ID NO: 390461 - DNA, 40 bp, Homo sapiens; identical to SEQ ID NO: 250229
  chr2:10519315-10519355
  hypo

SEQ ID NO: 390462 - DNA, 540 bp, Homo sapiens; identical to SEQ ID NO: 299170
  chr2:10525735-10526275
  hypo

SEQ ID NO: 390463 - DNA, 42 bp, Homo sapiens; identical to SEQ ID NO: 250231
  chr2:10536068-10536110
  hypo

SEQ ID NO: 390464 - DNA, 100 bp, Homo sapiens; identical to SEQ ID NO: 207820
  chr2:10601535-10601635
  hypo

SEQ ID NO: 390465 - DNA, 79 bp, Homo sapiens; identical to SEQ ID NO: 207821
  chr2:10615284-10615363
  hypo

SEQ ID NO: 390466 - DNA, 461 bp, Homo sapiens; identical to SEQ ID NO: 250252
  chr2:10686607-10687068
  hypo

SEQ ID NO: 390467 - DNA, 691 bp, Homo sapiens; identical to SEQ ID NO: 250258
  chr2:10917385-10918076
  hypo

SEQ ID NO: 390468 - DNA, 241 bp, Homo sapiens; identical to SEQ ID NO: 250265
  chr2:11238183-11238424
  hypo

SEQ ID NO: 390469 - DNA, 260 bp, Homo sapiens; identical to SEQ ID NO: 207831
  chr2:12005882-12006142
  hypo

SEQ ID NO: 390470 - DNA, 157 bp, Homo sapiens; identical to SEQ ID NO: 250276
  chr2:12078414-12078571
  hypo

SEQ ID NO: 390471 - DNA, 37 bp, Homo sapiens; identical to SEQ ID NO: 207835
  chr2:14961328-14961365
  hypo

SEQ ID NO: 390472 - DNA, 87 bp, Homo sapiens; identical to SEQ ID NO: 105506
  chr2:16080304-16080391
  hypo

SEQ ID NO: 390473 - DNA, 39 bp, Homo sapiens; identical to SEQ ID NO: 250300
  chr2:17090481-17090520
  hypo

SEQ ID NO: 390474 - DNA, 284 bp, Homo sapiens; identical to SEQ ID NO: 250303
  chr2:18112741-18113025
  hypo

SEQ ID NO: 390475 - DNA, 81 bp, Homo sapiens; identical to SEQ ID NO: 250308
  chr2:20521041-20521122
  hypo

SEQ ID NO: 390476 - DNA, 163 bp, Homo sapiens; identical to SEQ ID NO: 207848
  chr2:20594843-20595006
  hypo

SEQ ID NO: 390477 - DNA, 101 bp, Homo sapiens; identical to SEQ ID NO: 250318
  chr2:21079879-21079980
  hypo

SEQ ID NO: 390478 - DNA, 150 bp, Homo sapiens; identical to SEQ ID NO: 250328
  chr2:23798774-23798924
  hypo

SEQ ID NO: 390479 - DNA, 210 bp, Homo sapiens; identical to SEQ ID NO: 207857
  chr2:23842953-23843163
  hypo

SEQ ID NO: 390480 - DNA, 179 bp, Homo sapiens; identical to SEQ ID NO: 250332
  chr2:23850377-23850556
  hypo

SEQ ID NO: 390481 - DNA, 174 bp, Homo sapiens; identical to SEQ ID NO: 207859
  chr2:24060295-24060469
  hypo

SEQ ID NO: 390482 - DNA, 39 bp, Homo sapiens; identical to SEQ ID NO: 207861
  chr2:24279835-24279874
  hypo

SEQ ID NO: 390483 - DNA, 43 bp, Homo sapiens; identical to SEQ ID NO: 250348
  chr2:24844611-24844654
  hypo

SEQ ID NO: 390484 - DNA, 155 bp, Homo sapiens; identical to SEQ ID NO: 250349
  chr2:25034777-25034932
  hypo

SEQ ID NO: 390485 - DNA, 120 bp, Homo sapiens; identical to SEQ ID NO: 198121
  chr2:25440006-25440126
  hypo

SEQ ID NO: 390486 - DNA, 139 bp, Homo sapiens; identical to SEQ ID NO: 198123
  chr2:25458563-25458702
  hypo

SEQ ID NO: 390487 - DNA, 52 bp, Homo sapiens; identical to SEQ ID NO: 387734
  chr2:25464537-25464589
  hypo

SEQ ID NO: 390488 - DNA, 162 bp, Homo sapiens; identical to SEQ ID NO: 198133
  chr2:25470449-25470611
  hypo

SEQ ID NO: 390489 - DNA, 237 bp, Homo sapiens; identical to SEQ ID NO: 198136
  chr2:25505304-25505541
  hypo

SEQ ID NO: 390490 - DNA, 188 bp, Homo sapiens; identical to SEQ ID NO: 250358
  chr2:25533430-25533618
  hypo

SEQ ID NO: 390491 - DNA, 161 bp, Homo sapiens; identical to SEQ ID NO: 250360
  chr2:25536307-25536468
  hypo

SEQ ID NO: 390492 - DNA, 37 bp, Homo sapiens; identical to SEQ ID NO: 250374
  chr2:26320144-26320181
  hypo

SEQ ID NO: 390493 - DNA, 131 bp, Homo sapiens; identical to SEQ ID NO: 207896
  chr2:26706036-26706167
  hypo

SEQ ID NO: 390494 - DNA, 92 bp, Homo sapiens; identical to SEQ ID NO: 250389
  chr2:26788281-26788373
  hypo

SEQ ID NO: 390495 - DNA, 203 bp, Homo sapiens; identical to SEQ ID NO: 250390
  chr2:26800292-26800495
  hypo

SEQ ID NO: 390496 - DNA, 94 bp, Homo sapiens; identical to SEQ ID NO: 207897
  chr2:26832824-26832918
  hypo

SEQ ID NO: 390497 - DNA, 35 bp, Homo sapiens; identical to SEQ ID NO: 250407
  chr2:27764227-27764262
  hypo

SEQ ID NO: 390498 - DNA, 210 bp, Homo sapiens; identical to SEQ ID NO: 250419
  chr2:30480379-30480589
  hypo

SEQ ID NO: 390499 - DNA, 399 bp, Homo sapiens; identical to SEQ ID NO: 250420
  chr2:30481975-30482374
  hypo

SEQ ID NO: 390500 - DNA, 161 bp, Homo sapiens; identical to SEQ ID NO: 250426
  chr2:30863077-30863238
  hypo

SEQ ID NO: 390501 - DNA, 46 bp, Homo sapiens; identical to SEQ ID NO: 250430
  chr2:31480289-31480335
  hypo

SEQ ID NO: 390502 - DNA, 111 bp, Homo sapiens; identical to SEQ ID NO: 250431
  chr2:31480365-31480476
  hypo

SEQ ID NO: 390503 - DNA, 40 bp, Homo sapiens; identical to SEQ ID NO: 250439
  chr2:32315098-32315138
  hypo

SEQ ID NO: 390504 - DNA, 34 bp, Homo sapiens; identical to SEQ ID NO: 250452
  chr2:33513604-33513638
  hypo

SEQ ID NO: 390505 - DNA, 156 bp, Homo sapiens; identical to SEQ ID NO: 250453
  chr2:33534845-33535001
  hypo

SEQ ID NO: 390506 - DNA, 181 bp, Homo sapiens; identical to SEQ ID NO: 250458
  chr2:36668406-36668587
  hypo

SEQ ID NO: 390507 - DNA, 99 bp, Homo sapiens; identical to SEQ ID NO: 250461
  chr2:37027667-37027766
  hypo

SEQ ID NO: 390508 - DNA, 38 bp, Homo sapiens; identical to SEQ ID NO: 207927
  chr2:37149992-37150030
  hypo

SEQ ID NO: 390509 - DNA, 221 bp, Homo sapiens; identical to SEQ ID NO: 250473
  chr2:38489624-38489845
  hypo

SEQ ID NO: 390510 - DNA, 82 bp, Homo sapiens; identical to SEQ ID NO: 250478
  chr2:38610902-38610984
  hypo

SEQ ID NO: 390511 - DNA, 120 bp, Homo sapiens; identical to SEQ ID NO: 207936
  chr2:39016315-39016435
  hypo

SEQ ID NO: 390512 - DNA, 162 bp, Homo sapiens; identical to SEQ ID NO: 250487
  chr2:39406776-39406938
  hypo

SEQ ID NO: 390513 - DNA, 102 bp, Homo sapiens; identical to SEQ ID NO: 250489
  chr2:40560220-40560322
  hypo

SEQ ID NO: 390514 - DNA, 141 bp, Homo sapiens; identical to SEQ ID NO: 250494
  chr2:42282412-42282553
  hypo

SEQ ID NO: 390515 - DNA, 146 bp, Homo sapiens; identical to SEQ ID NO: 250509
  chr2:43266043-43266189
  hypo

SEQ ID NO: 390516 - DNA, 189 bp, Homo sapiens; identical to SEQ ID NO: 207951
  chr2:43373136-43373325
  hypo

SEQ ID NO: 390517 - DNA, 35 bp, Homo sapiens; identical to SEQ ID NO: 250534
  chr2:44469274-44469309
  hypo

SEQ ID NO: 390518 - DNA, 149 bp, Homo sapiens; identical to SEQ ID NO: 250536
  chr2:44502842-44502991
  hypo

SEQ ID NO: 390519 - DNA, 96 bp, Homo sapiens; identical to SEQ ID NO: 250543
  chr2:44999266-44999362
  hypo

SEQ ID NO: 390520 - DNA, 205 bp, Homo sapiens; identical to SEQ ID NO: 207962
  chr2:45927198-45927403
  hypo

SEQ ID NO: 390521 - DNA, 223 bp, Homo sapiens; identical to SEQ ID NO: 250551
  chr2:47095093-47095316
  hypo

SEQ ID NO: 390522 - DNA, 96 bp, Homo sapiens; identical to SEQ ID NO: 141542
  chr2:47234721-47234817
  hypo

SEQ ID NO: 390523 - DNA, 80 bp, Homo sapiens; identical to SEQ ID NO: 250560
  chr2:47370888-47370968
  hypo

SEQ ID NO: 390524 - DNA, 438 bp, Homo sapiens; identical to SEQ ID NO: 221743
  chr2:47630103-47630541
  hypo

SEQ ID NO: 390525 - DNA, 450 bp, Homo sapiens; identical to SEQ ID NO: 221758
  chr2:47709917-47710367
  hypo

SEQ ID NO: 390526 - DNA, 2545 bp, Homo sapiens; identical to SEQ ID NO: 221764
  chr2:48025749-48028294
  hypo

SEQ ID NO: 390527 - DNA, 266 bp, Homo sapiens; identical to SEQ ID NO: 221765
  chr2:48030558-48030824
  hypo

SEQ ID NO: 390528 - DNA, 90 bp, Homo sapiens; identical to SEQ ID NO: 221767
  chr2:48032756-48032846
  hypo

SEQ ID NO: 390529 - DNA, 107 bp, Homo sapiens; identical to SEQ ID NO: 250572
  chr2:48742859-48742966
  hypo

SEQ ID NO: 390530 - DNA, 91 bp, Homo sapiens; identical to SEQ ID NO: 207980
  chr2:49621663-49621754
  hypo

SEQ ID NO: 390531 - DNA, 292 bp, Homo sapiens; identical to SEQ ID NO: 250580
  chr2:54312128-54312420
  hypo

SEQ ID NO: 390532 - DNA, 140 bp, Homo sapiens; identical to SEQ ID NO: 221769
  chr2:54683032-54683172
  hypo

SEQ ID NO: 390533 - DNA, 31 bp, Homo sapiens; identical to SEQ ID NO: 250584
  chr2:55098810-55098841
  hypo

SEQ ID NO: 390534 - DNA, 101 bp, Homo sapiens; identical to SEQ ID NO: 279798
  chr2:55646327-55646428
  hypo

SEQ ID NO: 390535 - DNA, 680 bp, Homo sapiens; identical to SEQ ID NO: 279799
  chr2:55646458-55647138
  hypo

SEQ ID NO: 390536 - DNA, 42 bp, Homo sapiens; identical to SEQ ID NO: 250596
  chr2:55825329-55825371
  hypo

SEQ ID NO: 390537 - DNA, 34 bp, Homo sapiens; identical to SEQ ID NO: 250600
  chr2:58788931-58788965
  hypo

SEQ ID NO: 390538 - DNA, 38 bp, Homo sapiens; identical to SEQ ID NO: 250601
  chr2:59382731-59382769
  hypo

SEQ ID NO: 390539 - DNA, 36 bp, Homo sapiens; identical to SEQ ID NO: 207990
  chr2:60705871-60705907
  hypo

SEQ ID NO: 390540 - DNA, 53 bp, Homo sapiens; identical to SEQ ID NO: 207995
  chr2:61175238-61175291
  hypo

SEQ ID NO: 390541 - DNA, 40 bp, Homo sapiens; identical to SEQ ID NO: 250618
  chr2:61186779-61186819
  hypo

SEQ ID NO: 390542 - DNA, 139 bp, Homo sapiens; identical to SEQ ID NO: 207998
  chr2:61448896-61449035
  hypo

SEQ ID NO: 390543 - DNA, 342 bp, Homo sapiens; identical to SEQ ID NO: 221777
  chr2:61990960-61991302
  hypo

SEQ ID NO: 390544 - DNA, 250 bp, Homo sapiens; identical to SEQ ID NO: 250634
  chr2:62406299-62406549
  hypo

SEQ ID NO: 390545 - DNA, 169 bp, Homo sapiens; identical to SEQ ID NO: 208009
  chr2:63118747-63118916
  hypo

SEQ ID NO: 390546 - DNA, 237 bp, Homo sapiens; identical to SEQ ID NO: 208010
  chr2:63123375-63123612
  hypo

SEQ ID NO: 390547 - DNA, 34 bp, Homo sapiens; identical to SEQ ID NO: 250663
  chr2:67721499-67721533
  hypo

SEQ ID NO: 390548 - DNA, 79 bp, Homo sapiens; identical to SEQ ID NO: 208020
  chr2:68433262-68433341
  hypo

SEQ ID NO: 390549 - DNA, 64 bp, Homo sapiens; identical to SEQ ID NO: 250670
  chr2:69612624-69612688
  hypo

SEQ ID NO: 390550 - DNA, 48 bp, Homo sapiens; identical to SEQ ID NO: 208026
  chr2:70204037-70204085
  hypo

SEQ ID NO: 390551 - DNA, 180 bp, Homo sapiens; identical to SEQ ID NO: 198265
  chr2:70418116-70418296
  hypo

SEQ ID NO: 390552 - DNA, 53 bp, Homo sapiens; identical to SEQ ID NO: 221793
  chr2:71502836-71502889
  hypo

SEQ ID NO: 390553 - DNA, 86 bp, Homo sapiens; identical to SEQ ID NO: 250721
  chr2:74679101-74679187
  hypo

SEQ ID NO: 390554 - DNA, 151 bp, Homo sapiens; identical to SEQ ID NO: 250730
  chr2:75825236-75825387
  hypo

SEQ ID NO: 390555 - DNA, 138 bp, Homo sapiens; identical to SEQ ID NO: 250731
  chr2:76642426-76642564
  hypo

SEQ ID NO: 390556 - DNA, 38 bp, Homo sapiens; identical to SEQ ID NO: 250733
  chr2:79824567-79824605
  hypo

SEQ ID NO: 390557 - DNA, 89 bp, Homo sapiens; identical to SEQ ID NO: 208063
  chr2:79933147-79933236
  hypo

SEQ ID NO: 390558 - DNA, 499 bp, Homo sapiens; identical to SEQ ID NO: 250736
  chr2:81422010-81422509
  hypo

SEQ ID NO: 390559 - DNA, 37 bp, Homo sapiens; identical to SEQ ID NO: 208064
  chr2:85227244-85227281
  hypo

SEQ ID NO: 390560 - DNA, 155 bp, Homo sapiens; identical to SEQ ID NO: 250745
  chr2:85596563-85596718
  hypo

SEQ ID NO: 390561 - DNA, 224 bp, Homo sapiens; identical to SEQ ID NO: 221813
  chr2:85829251-85829475
  hypo

SEQ ID NO: 390562 - DNA, 88 bp, Homo sapiens; identical to SEQ ID NO: 250754
  chr2:85836532-85836620
  hypo

SEQ ID NO: 390563 - DNA, 47 bp, Homo sapiens; identical to SEQ ID NO: 385228
  chr2:85878798-85878845
  hypo

SEQ ID NO: 390564 - DNA, 60 bp, Homo sapiens; identical to SEQ ID NO: 208082
  chr2:86425628-86425688
  hypo

SEQ ID NO: 390565 - DNA, 76 bp, Homo sapiens; identical to SEQ ID NO: 208087
  chr2:87569214-87569290
  hypo

SEQ ID NO: 390566 - DNA, 196 bp, Homo sapiens; identical to SEQ ID NO: 250773
  chr2:88559425-88559621
  hypo

SEQ ID NO: 390567 - DNA, 34 bp, Homo sapiens; identical to SEQ ID NO: 250779
  chr2:95715631-95715665
  hypo

SEQ ID NO: 390568 - DNA, 345 bp, Homo sapiens; identical to SEQ ID NO: 280001
  chr2:95825283-95825628
  hypo

SEQ ID NO: 390569 - DNA, 37 bp, Homo sapiens; identical to SEQ ID NO: 250792
  chr2:96839116-96839153
  hypo

SEQ ID NO: 390570 - DNA, 33 bp, Homo sapiens; identical to SEQ ID NO: 250793
  chr2:96993131-96993164
  hypo

SEQ ID NO: 390571 - DNA, 189 bp, Homo sapiens; identical to SEQ ID NO: 250794
  chr2:97068616-97068805
  hypo

SEQ ID NO: 390572 - DNA, 77 bp, Homo sapiens; identical to SEQ ID NO: 208100
  chr2:97361031-97361108
  hypo

SEQ ID NO: 390573 - DNA, 129 bp, Homo sapiens; identical to SEQ ID NO: 250807
  chr2:97436177-97436306
  hypo

SEQ ID NO: 390574 - DNA, 156 bp, Homo sapiens; identical to SEQ ID NO: 221833
  chr2:97482863-97483019
  hypo

SEQ ID NO: 390575 - DNA, 36 bp, Homo sapiens; identical to SEQ ID NO: 208108
  chr2:97485727-97485763
  hypo

SEQ ID NO: 390576 - DNA, 86 bp, Homo sapiens; identical to SEQ ID NO: 250824
  chr2:97568145-97568231
  hypo

SEQ ID NO: 390577 - DNA, 32 bp, Homo sapiens; identical to SEQ ID NO: 250827
  chr2:97578424-97578456
  hypo

SEQ ID NO: 390578 - DNA, 68 bp, Homo sapiens
  chr2:97588990-97589058
  hypo
tgagccaccatgcctggccccaattctttcttgtacaagaactctctcttggggcctagatcaggacc

SEQ ID NO: 390579 - DNA, 146 bp, Homo sapiens; identical to SEQ ID NO: 250833
  chr2:98330282-98330428
  hypo

SEQ ID NO: 390580 - DNA, 47 bp, Homo sapiens; identical to SEQ ID NO: 250840
  chr2:98674829-98674876
  hypo

SEQ ID NO: 390581 - DNA, 90 bp, Homo sapiens; identical to SEQ ID NO: 208121
  chr2:99386853-99386943
  hypo

SEQ ID NO: 390582 - DNA, 177 bp, Homo sapiens; identical to SEQ ID NO: 208128
  chr2:101520349-101520526
  hypo

SEQ ID NO: 390583 - DNA, 93 bp, Homo sapiens; identical to SEQ ID NO: 250875
  chr2:101638838-101638931
  hypo

SEQ ID NO: 390584 - DNA, 248 bp, Homo sapiens; identical to SEQ ID NO: 250879
  chr2:101882441-101882689
  hypo

SEQ ID NO: 390585 - DNA, 163 bp, Homo sapiens; identical to SEQ ID NO: 250883
  chr2:102232955-102233118
  hypo

SEQ ID NO: 390586 - DNA, 82 bp, Homo sapiens; identical to SEQ ID NO: 250884
  chr2:102320123-102320205
  hypo

SEQ ID NO: 390587 - DNA, 64 bp, Homo sapiens; identical to SEQ ID NO: 250893
  chr2:102866731-102866795
  hypo

SEQ ID NO: 390588 - DNA, 120 bp, Homo sapiens; identical to SEQ ID NO: 250899
  chr2:105695482-105695602
  hypo

SEQ ID NO: 390589 - DNA, 55 bp, Homo sapiens; identical to SEQ ID NO: 250902
  chr2:105859043-105859098
  hypo

SEQ ID NO: 390590 - DNA, 244 bp, Homo sapiens; identical to SEQ ID NO: 250905
  chr2:105910432-105910676
  hypo

SEQ ID NO: 390591 - DNA, 36 bp, Homo sapiens; identical to SEQ ID NO: 208155
  chr2:106081974-106082010
  hypo

SEQ ID NO: 390592 - DNA, 241 bp, Homo sapiens; identical to SEQ ID NO: 250913
  chr2:106227199-106227440
  hypo

SEQ ID NO: 390593 - DNA, 162 bp, Homo sapiens; identical to SEQ ID NO: 221851
  chr2:106362018-106362180
  hypo

SEQ ID NO: 390594 - DNA, 167 bp, Homo sapiens; identical to SEQ ID NO: 250917
  chr2:106499100-106499267
  hypo

SEQ ID NO: 390595 - DNA, 240 bp, Homo sapiens; identical to SEQ ID NO: 250918
  chr2:106713428-106713668
  hypo

SEQ ID NO: 390596 - DNA, 61 bp, Homo sapiens; identical to SEQ ID NO: 250919
  chr2:106722162-106722223
  hypo

SEQ ID NO: 390597 - DNA, 299 bp, Homo sapiens; identical to SEQ ID NO: 250924
  chr2:106927123-106927422
  hypo

SEQ ID NO: 390598 - DNA, 78 bp, Homo sapiens; identical to SEQ ID NO: 250928
  chr2:107204235-107204313
  hypo

SEQ ID NO: 390599 - DNA, 87 bp, Homo sapiens; identical to SEQ ID NO: 208166
  chr2:108918020-108918107
  hypo

SEQ ID NO: 390600 - DNA, 40 bp, Homo sapiens; identical to SEQ ID NO: 208173
  chr2:110008967-110009007
  hypo

SEQ ID NO: 390601 - DNA, 72 bp, Homo sapiens; identical to SEQ ID NO: 250957
  chr2:110021041-110021113
  hypo

SEQ ID NO: 390602 - DNA, 194 bp, Homo sapiens; identical to SEQ ID NO: 208182
  chr2:110259063-110259257
  hypo

SEQ ID NO: 390603 - DNA, 37 bp, Homo sapiens; identical to SEQ ID NO: 208183
  chr2:110352252-110352289
  hypo

SEQ ID NO: 390604 - DNA, 145 bp, Homo sapiens; identical to SEQ ID NO: 250972
  chr2:110855514-110855659
  hypo

SEQ ID NO: 390605 - DNA, 175 bp, Homo sapiens; identical to SEQ ID NO: 250973
  chr2:110861845-110862020
  hypo

SEQ ID NO: 390606 - DNA, 32 bp, Homo sapiens; identical to SEQ ID NO: 300044
  chr2:111438523-111438555
  hypo

SEQ ID NO: 390607 - DNA, 142 bp, Homo sapiens; identical to SEQ ID NO: 250985
  chr2:112810885-112811027
  hypo

SEQ ID NO: 390608 - DNA, 188 bp, Homo sapiens; identical to SEQ ID NO: 208196
  chr2:113973331-113973519
  hypo

SEQ ID NO: 390609 - DNA, 82 bp, Homo sapiens; identical to SEQ ID NO: 208201
  chr2:120069741-120069823
  hypo

SEQ ID NO: 390610 - DNA, 172 bp, Homo sapiens; identical to SEQ ID NO: 251026
  chr2:120987006-120987178
  hypo

SEQ ID NO: 390611 - DNA, 134 bp, Homo sapiens; identical to SEQ ID NO: 208210
  chr2:121243025-121243159
  hypo

SEQ ID NO: 390612 - DNA, 33 bp, Homo sapiens; identical to SEQ ID NO: 251039
  chr2:121436963-121436996
  hypo

SEQ ID NO: 390613 - DNA, 94 bp, Homo sapiens; identical to SEQ ID NO: 251056
  chr2:121962011-121962105
  hypo

SEQ ID NO: 390614 - DNA, 332 bp, Homo sapiens; identical to SEQ ID NO: 251057
  chr2:121970083-121970415
  hypo

SEQ ID NO: 390615 - DNA, 88 bp, Homo sapiens; identical to SEQ ID NO: 208219
  chr2:122102164-122102252
  hypo

SEQ ID NO: 390616 - DNA, 103 bp, Homo sapiens; identical to SEQ ID NO: 251068
  chr2:122118646-122118749
  hypo

SEQ ID NO: 390617 - DNA, 46 bp, Homo sapiens; identical to SEQ ID NO: 251070
  chr2:122260203-122260249
  hypo

SEQ ID NO: 390618 - DNA, 31 bp, Homo sapiens; identical to SEQ ID NO: 208222
  chr2:122497730-122497761
  hypo

SEQ ID NO: 390619 - DNA, 314 bp, Homo sapiens; identical to SEQ ID NO: 251085
  chr2:127734331-127734645
  hypo

SEQ ID NO: 390620 - DNA, 215 bp, Homo sapiens; identical to SEQ ID NO: 251090
  chr2:127933496-127933711
  hypo

SEQ ID NO: 390621 - DNA, 78 bp, Homo sapiens; identical to SEQ ID NO: 208229
  chr2:128273731-128273809
  hypo

SEQ ID NO: 390622 - DNA, 77 bp, Homo sapiens; identical to SEQ ID NO: 208230
  chr2:128273869-128273946
  hypo

SEQ ID NO: 390623 - DNA, 200 bp, Homo sapiens; identical to SEQ ID NO: 251113
  chr2:129021514-129021714
  hypo

SEQ ID NO: 390624 - DNA, 170 bp, Homo sapiens; identical to SEQ ID NO: 208239
  chr2:129250623-129250793
  hypo

SEQ ID NO: 390625 - DNA, 152 bp, Homo sapiens; identical to SEQ ID NO: 251119
  chr2:129539249-129539401
  hypo

SEQ ID NO: 390626 - DNA, 128 bp, Homo sapiens; identical to SEQ ID NO: 251131
  chr2:131116461-131116589
  hypo

SEQ ID NO: 390627 - DNA, 138 bp, Homo sapiens; identical to SEQ ID NO: 208245
  chr2:131639163-131639301
  hypo

SEQ ID NO: 390628 - DNA, 39 bp, Homo sapiens; identical to SEQ ID NO: 208246
  chr2:131639331-131639370
  hypo

SEQ ID NO: 390629 - DNA, 159 bp, Homo sapiens; identical to SEQ ID NO: 208251
  chr2:132348675-132348834
  hypo

SEQ ID NO: 390630 - DNA, 99 bp, Homo sapiens; identical to SEQ ID NO: 198434
  chr2:132767530-132767629
  hypo

SEQ ID NO: 390631 - DNA, 180 bp, Homo sapiens; identical to SEQ ID NO: 251157
  chr2:135718101-135718281
  hypo

SEQ ID NO: 390632 - DNA, 217 bp, Homo sapiens; identical to SEQ ID NO: 251158
  chr2:135926165-135926382
  hypo

SEQ ID NO: 390633 - DNA, 164 bp, Homo sapiens; identical to SEQ ID NO: 251161
  chr2:136721521-136721685
  hypo

SEQ ID NO: 390634 - DNA, 33 bp, Homo sapiens; identical to SEQ ID NO: 251164
  chr2:136911820-136911853
  hypo

SEQ ID NO: 390635 - DNA, 74 bp, Homo sapiens; identical to SEQ ID NO: 251169
  chr2:144227051-144227125
  hypo

SEQ ID NO: 390636 - DNA, 37 bp, Homo sapiens; identical to SEQ ID NO: 208271
  chr2:149045675-149045712
  hypo

SEQ ID NO: 390637 - DNA, 194 bp, Homo sapiens; identical to SEQ ID NO: 208272
  chr2:149227323-149227517
  hypo

SEQ ID NO: 390638 - DNA, 237 bp, Homo sapiens; identical to SEQ ID NO: 383864
  chr2:150186614-150186851
  hypo

SEQ ID NO: 390639 - DNA, 33 bp, Homo sapiens; identical to SEQ ID NO: 251187
  chr2:152265327-152265360
  hypo

SEQ ID NO: 390640 - DNA, 148 bp, Homo sapiens; identical to SEQ ID NO: 221906
  chr2:157189365-157189513
  hypo

SEQ ID NO: 390641 - DNA, 34 bp, Homo sapiens; identical to SEQ ID NO: 251195
  chr2:157340915-157340949
  hypo

SEQ ID NO: 390642 - DNA, 119 bp, Homo sapiens; identical to SEQ ID NO: 251201
  chr2:159638827-159638946
  hypo

SEQ ID NO: 390643 - DNA, 39 bp, Homo sapiens; identical to SEQ ID NO: 251203
  chr2:159964843-159964882
  hypo

SEQ ID NO: 390644 - DNA, 115 bp, Homo sapiens; identical to SEQ ID NO: 208298
  chr2:161113756-161113871
  hypo

SEQ ID NO: 390645 - DNA, 138 bp, Homo sapiens; identical to SEQ ID NO: 251220
  chr2:164966392-164966530
  hypo

SEQ ID NO: 390646 - DNA, 214 bp, Homo sapiens; identical to SEQ ID NO: 208307
  chr2:165637158-165637372
  hypo

SEQ ID NO: 390647 - DNA, 31 bp, Homo sapiens; identical to SEQ ID NO: 251231
  chr2:169561397-169561428
  hypo

SEQ ID NO: 390648 - DNA, 268 bp, Homo sapiens; identical to SEQ ID NO: 198518
  chr2:170218861-170219129
  hypo

SEQ ID NO: 390649 - DNA, 180 bp, Homo sapiens; identical to SEQ ID NO: 208329
  chr2:170620609-170620789
  hypo

SEQ ID NO: 390650 - DNA, 54 bp, Homo sapiens; identical to SEQ ID NO: 208330
  chr2:170682331-170682385
  hypo

SEQ ID NO: 390651 - DNA, 240 bp, Homo sapiens; identical to SEQ ID NO: 221934
  chr2:172379834-172380074
  hypo

SEQ ID NO: 390652 - DNA, 152 bp, Homo sapiens; identical to SEQ ID NO: 251255
  chr2:172424323-172424475
  hypo

SEQ ID NO: 390653 - DNA, 103 bp, Homo sapiens; identical to SEQ ID NO: 221936
  chr2:174147823-174147926
  hypo

SEQ ID NO: 390654 - DNA, 72 bp, Homo sapiens; identical to SEQ ID NO: 251268
  chr2:175113858-175113930
  hypo

SEQ ID NO: 390655 - DNA, 35 bp, Homo sapiens; identical to SEQ ID NO: 208343
  chr2:175384180-175384215
  hypo

SEQ ID NO: 390656 - DNA, 32 bp, Homo sapiens; identical to SEQ ID NO: 208345
  chr2:176569574-176569606
  hypo

SEQ ID NO: 390657 - DNA, 136 bp, Homo sapiens; identical to SEQ ID NO: 251277
  chr2:178090224-178090360
  hypo

SEQ ID NO: 390658 - DNA, 85 bp, Homo sapiens; identical to SEQ ID NO: 198592
  chr2:180129611-180129696
  hypo

SEQ ID NO: 390659 - DNA, 163 bp, Homo sapiens; identical to SEQ ID NO: 251290
  chr2:182413425-182413588
  hypo

SEQ ID NO: 390660 - DNA, 82 bp, Homo sapiens; identical to SEQ ID NO: 251296
  chr2:190369341-190369423
  hypo

SEQ ID NO: 390661 - DNA, 120 bp, Homo sapiens; identical to SEQ ID NO: 208367
  chr2:191794489-191794609
  hypo

SEQ ID NO: 390662 - DNA, 84 bp, Homo sapiens; identical to SEQ ID NO: 208371
  chr2:192342592-192342676
  hypo

SEQ ID NO: 390663 - DNA, 42 bp, Homo sapiens; identical to SEQ ID NO: 251306
  chr2:196362209-196362251
  hypo

SEQ ID NO: 390664 - DNA, 44 bp, Homo sapiens; identical to SEQ ID NO: 208374
  chr2:196402553-196402597
  hypo

SEQ ID NO: 390665 - DNA, 31 bp, Homo sapiens; identical to SEQ ID NO: 251312
  chr2:197003966-197003997
  hypo

SEQ ID NO: 390666 - DNA, 178 bp, Homo sapiens; identical to SEQ ID NO: 198634
  chr2:198265429-198265607
  hypo

SEQ ID NO: 390667 - DNA, 70 bp, Homo sapiens; identical to SEQ ID NO: 198637
  chr2:198268366-198268436
  hypo

SEQ ID NO: 390668 - DNA, 93 bp, Homo sapiens; identical to SEQ ID NO: 198638
  chr2:198269812-198269905
  hypo

SEQ ID NO: 390669 - DNA, 323 bp, Homo sapiens; identical to SEQ ID NO: 208394
  chr2:201354840-201355163
  hypo

SEQ ID NO: 390670 - DNA, 339 bp, Homo sapiens; identical to SEQ ID NO: 251325
  chr2:201652446-201652785
  hypo

SEQ ID NO: 390671 - DNA, 43 bp, Homo sapiens; identical to SEQ ID NO: 251334
  chr2:202893412-202893455
  hypo

SEQ ID NO: 390672 - DNA, 209 bp, Homo sapiens; identical to SEQ ID NO: 208402
  chr2:203484399-203484608
  hypo

SEQ ID NO: 390673 - DNA, 45 bp, Homo sapiens; identical to SEQ ID NO: 208404
  chr2:204055398-204055443
  hypo

SEQ ID NO: 390674 - DNA, 31 bp, Homo sapiens; identical to SEQ ID NO: 251347
  chr2:204206113-204206144
  hypo

SEQ ID NO: 390675 - DNA, 44 bp, Homo sapiens; identical to SEQ ID NO: 208407
  chr2:206166494-206166538
  hypo

SEQ ID NO: 390676 - DNA, 153 bp, Homo sapiens; identical to SEQ ID NO: 208409
  chr2:206826960-206827113
  hypo

SEQ ID NO: 390677 - DNA, 43 bp, Homo sapiens; identical to SEQ ID NO: 208415
  chr2:207021944-207021987
  hypo

SEQ ID NO: 390678 - DNA, 300 bp, Homo sapiens; identical to SEQ ID NO: 251387
  chr2:210673260-210673560
  hypo

SEQ ID NO: 390679 - DNA, 41 bp, Homo sapiens; identical to SEQ ID NO: 208430
  chr2:211055940-211055981
  hypo

SEQ ID NO: 390680 - DNA, 44 bp, Homo sapiens; identical to SEQ ID NO: 251392
  chr2:215581840-215581884
  hypo

SEQ ID NO: 390681 - DNA, 58 bp, Homo sapiens; identical to SEQ ID NO: 251394
  chr2:216195106-216195164
  hypo

SEQ ID NO: 390682 - DNA, 45 bp, Homo sapiens; identical to SEQ ID NO: 208432
  chr2:216852232-216852277
  hypo

SEQ ID NO: 390683 - DNA, 183 bp, Homo sapiens; identical to SEQ ID NO: 208433
  chr2:216885426-216885609
  hypo

SEQ ID NO: 390684 - DNA, 310 bp, Homo sapiens; identical to SEQ ID NO: 280618
  chr2:217236253-217236563
  hypo

SEQ ID NO: 390685 - DNA, 75 bp, Homo sapiens; identical to SEQ ID NO: 251406
  chr2:217750176-217750251
  hypo

SEQ ID NO: 390686 - DNA, 202 bp, Homo sapiens; identical to SEQ ID NO: 208448
  chr2:218757381-218757583
  hypo

SEQ ID NO: 390687 - DNA, 37 bp, Homo sapiens; identical to SEQ ID NO: 251428
  chr2:219180148-219180185
  hypo

SEQ ID NO: 390688 - DNA, 89 bp, Homo sapiens; identical to SEQ ID NO: 251429
  chr2:219204242-219204331
  hypo

SEQ ID NO: 390689 - DNA, 177 bp, Homo sapiens; identical to SEQ ID NO: 208461
  chr2:219892664-219892841
  hypo

SEQ ID NO: 390690 - DNA, 130 bp, Homo sapiens; identical to SEQ ID NO: 251452
  chr2:220161581-220161711
  hypo

SEQ ID NO: 390691 - DNA, 234 bp, Homo sapiens; identical to SEQ ID NO: 251458
  chr2:220419207-220419441
  hypo

SEQ ID NO: 390692 - DNA, 119 bp, Homo sapiens; identical to SEQ ID NO: 251469
  chr2:220505456-220505575
  hypo

SEQ ID NO: 390693 - DNA, 230 bp, Homo sapiens; identical to SEQ ID NO: 251472
  chr2:222389989-222390219
  hypo

SEQ ID NO: 390694 - DNA, 265 bp, Homo sapiens; identical to SEQ ID NO: 222020
  chr2:224904376-224904641
  hypo

SEQ ID NO: 390695 - DNA, 40 bp, Homo sapiens; identical to SEQ ID NO: 251489
  chr2:227818767-227818807
  hypo

SEQ ID NO: 390696 - DNA, 37 bp, Homo sapiens; identical to SEQ ID NO: 208490
  chr2:228638407-228638444
  hypo

SEQ ID NO: 390697 - DNA, 120 bp, Homo sapiens; identical to SEQ ID NO: 208491
  chr2:230743170-230743290
  hypo

SEQ ID NO: 390698 - DNA, 268 bp, Homo sapiens; identical to SEQ ID NO: 251505
  chr2:231530668-231530936
  hypo

SEQ ID NO: 390699 - DNA, 78 bp, Homo sapiens; identical to SEQ ID NO: 208499
  chr2:232458617-232458695
  hypo

SEQ ID NO: 390700 - DNA, 82 bp, Homo sapiens; identical to SEQ ID NO: 222033
  chr2:233284387-233284469
  hypo

SEQ ID NO: 390701 - DNA, 42 bp, Homo sapiens; identical to SEQ ID NO: 251531
  chr2:233357813-233357855
  hypo

SEQ ID NO: 390702 - DNA, 116 bp, Homo sapiens; identical to SEQ ID NO: 251537
  chr2:233750024-233750140
  hypo

SEQ ID NO: 390703 - DNA, 165 bp, Homo sapiens; identical to SEQ ID NO: 251539
  chr2:233753188-233753353
  hypo

SEQ ID NO: 390704 - DNA, 49 bp, Homo sapiens
  chr2:234206623-234206672
  hypo
ggcccatctgcttcagcactgcctgccacaccaggcccacagggacagg

SEQ ID NO: 390705 - DNA, 291 bp, Homo sapiens; identical to SEQ ID NO: 251557
  chr2:234394404-234394695
  hypo

SEQ ID NO: 390706 - DNA, 103 bp, Homo sapiens; identical to SEQ ID NO: 251558
  chr2:234396520-234396623
  hypo

SEQ ID NO: 390707 - DNA, 283 bp, Homo sapiens; identical to SEQ ID NO: 251559
  chr2:234399624-234399907
  hypo

SEQ ID NO: 390708 - DNA, 154 bp, Homo sapiens; identical to SEQ ID NO: 251560
  chr2:234545055-234545209
  hypo

SEQ ID NO: 390709 - DNA, 46 bp, Homo sapiens; identical to SEQ ID NO: 251561
  chr2:234545415-234545461
  hypo

SEQ ID NO: 390710 - DNA, 186 bp, Homo sapiens; identical to SEQ ID NO: 251582
  chr2:236015360-236015546
  hypo

SEQ ID NO: 390711 - DNA, 199 bp, Homo sapiens; identical to SEQ ID NO: 208524
  chr2:236024875-236025074
  hypo

SEQ ID NO: 390712 - DNA, 94 bp, Homo sapiens; identical to SEQ ID NO: 208530
  chr2:236553452-236553546
  hypo

SEQ ID NO: 390713 - DNA, 421 bp, Homo sapiens; identical to SEQ ID NO: 251607
  chr2:236663445-236663866
  hypo

SEQ ID NO: 390714 - DNA, 328 bp, Homo sapiens; identical to SEQ ID NO: 251615
  chr2:236716147-236716475
  hypo

SEQ ID NO: 390715 - DNA, 59 bp, Homo sapiens; identical to SEQ ID NO: 208549
  chr2:236727033-236727092
  hypo

SEQ ID NO: 390716 - DNA, 192 bp, Homo sapiens; identical to SEQ ID NO: 208552
  chr2:236739767-236739959
  hypo

SEQ ID NO: 390717 - DNA, 188 bp, Homo sapiens; identical to SEQ ID NO: 208553
  chr2:236741689-236741877
  hypo

SEQ ID NO: 390718 - DNA, 127 bp, Homo sapiens; identical to SEQ ID NO: 251628
  chr2:236777009-236777136
  hypo

SEQ ID NO: 390719 - DNA, 35 bp, Homo sapiens; identical to SEQ ID NO: 208564
  chr2:236853751-236853786
  hypo

SEQ ID NO: 390720 - DNA, 216 bp, Homo sapiens; identical to SEQ ID NO: 251650
  chr2:236901340-236901556
  hypo

SEQ ID NO: 390721 - DNA, 176 bp, Homo sapiens; identical to SEQ ID NO: 251654
  chr2:236950837-236951013
  hypo

SEQ ID NO: 390722 - DNA, 45 bp, Homo sapiens; identical to SEQ ID NO: 251656
  chr2:236970389-236970434
  hypo

SEQ ID NO: 390723 - DNA, 161 bp, Homo sapiens; identical to SEQ ID NO: 208586
  chr2:237037749-237037910
  hypo

SEQ ID NO: 390724 - DNA, 54 bp, Homo sapiens; identical to SEQ ID NO: 251677
  chr2:237925352-237925406
  hypo

SEQ ID NO: 390725 - DNA, 159 bp, Homo sapiens; identical to SEQ ID NO: 251680
  chr2:238249170-238249329
  hypo

SEQ ID NO: 390726 - DNA, 41 bp, Homo sapiens; identical to SEQ ID NO: 251686
  chr2:238392737-238392778
  hypo

SEQ ID NO: 390727 - DNA, 332 bp, Homo sapiens; identical to SEQ ID NO: 251694
  chr2:238706995-238707327
  hypo

SEQ ID NO: 390728 - DNA, 33 bp, Homo sapiens; identical to SEQ ID NO: 208601
  chr2:238793664-238793697
  hypo

SEQ ID NO: 390729 - DNA, 185 bp, Homo sapiens; identical to SEQ ID NO: 251699
  chr2:238794726-238794911
  hypo

SEQ ID NO: 390730 - DNA, 32 bp, Homo sapiens; identical to SEQ ID NO: 208602
  chr2:238820428-238820460
  hypo

SEQ ID NO: 390731 - DNA, 71 bp, Homo sapiens; identical to SEQ ID NO: 208606
  chr2:239011437-239011508
  hypo

SEQ ID NO: 390732 - DNA, 316 bp, Homo sapiens; identical to SEQ ID NO: 251721
  chr2:239133161-239133477
  hypo

SEQ ID NO: 390733 - DNA, 241 bp, Homo sapiens; identical to SEQ ID NO: 208620
  chr2:239306052-239306293
  hypo

SEQ ID NO: 390734 - DNA, 56 bp, Homo sapiens; identical to SEQ ID NO: 251736
  chr2:239467687-239467743
  hypo

SEQ ID NO: 390735 - DNA, 152 bp, Homo sapiens; identical to SEQ ID NO: 251748
  chr2:239971451-239971603
  hypo

SEQ ID NO: 390736 - DNA, 205 bp, Homo sapiens; identical to SEQ ID NO: 251750
  chr2:239986521-239986726
  hypo

SEQ ID NO: 390737 - DNA, 1132 bp, Homo sapiens; identical to SEQ ID NO: 300974
  chr2:240002664-240003796
  hypo

SEQ ID NO: 390738 - DNA, 258 bp, Homo sapiens; identical to SEQ ID NO: 300975
  chr2:240003826-240004084
  hypo

SEQ ID NO: 390739 - DNA, 169 bp, Homo sapiens; identical to SEQ ID NO: 251754
  chr2:240014779-240014948
  hypo

SEQ ID NO: 390740 - DNA, 552 bp, Homo sapiens; identical to SEQ ID NO: 251761
  chr2:240054228-240054780
  hypo

SEQ ID NO: 390741 - DNA, 40 bp, Homo sapiens; identical to SEQ ID NO: 208629
  chr2:240064716-240064756
  hypo

SEQ ID NO: 390742 - DNA, 274 bp, Homo sapiens; identical to SEQ ID NO: 300992
  chr2:240103304-240103578
  hypo

SEQ ID NO: 390743 - DNA, 131 bp, Homo sapiens; identical to SEQ ID NO: 208641
  chr2:240172542-240172673
  hypo

SEQ ID NO: 390744 - DNA, 312 bp, Homo sapiens; identical to SEQ ID NO: 251785
  chr2:240232940-240233252
  hypo

SEQ ID NO: 390745 - DNA, 43 bp, Homo sapiens; identical to SEQ ID NO: 208648
  chr2:240312832-240312875
  hypo

SEQ ID NO: 390746 - DNA, 42 bp, Homo sapiens; identical to SEQ ID NO: 251797
  chr2:240342330-240342372
  hypo

SEQ ID NO: 390747 - DNA, 110 bp, Homo sapiens; identical to SEQ ID NO: 251807
  chr2:240618673-240618783
  hypo

SEQ ID NO: 390748 - DNA, 225 bp, Homo sapiens; identical to SEQ ID NO: 251808
  chr2:240639523-240639748
  hypo

SEQ ID NO: 390749 - DNA, 151 bp, Homo sapiens; identical to SEQ ID NO: 251809
  chr2:240643423-240643574
  hypo

SEQ ID NO: 390750 - DNA, 206 bp, Homo sapiens; identical to SEQ ID NO: 208654
  chr2:240733615-240733821
  hypo

SEQ ID NO: 390751 - DNA, 187 bp, Homo sapiens; identical to SEQ ID NO: 251820
  chr2:240747276-240747463
  hypo

SEQ ID NO: 390752 - DNA, 138 bp, Homo sapiens; identical to SEQ ID NO: 251822
  chr2:240756517-240756655
  hypo

SEQ ID NO: 390753 - DNA, 195 bp, Homo sapiens; identical to SEQ ID NO: 251835
  chr2:241130457-241130652
  hypo

SEQ ID NO: 390754 - DNA, 72 bp, Homo sapiens; identical to SEQ ID NO: 251839
  chr2:241196970-241197042
  hypo

SEQ ID NO: 390755 - DNA, 194 bp, Homo sapiens; identical to SEQ ID NO: 208660
  chr2:241328246-241328440
  hypo

SEQ ID NO: 390756 - DNA, 264 bp, Homo sapiens; identical to SEQ ID NO: 222056
  chr2:241375298-241375562
  hypo

SEQ ID NO: 390757 - DNA, 114 bp, Homo sapiens; identical to SEQ ID NO: 251855
  chr2:241381612-241381726
  hypo

SEQ ID NO: 390758 - DNA, 48 bp, Homo sapiens; identical to SEQ ID NO: 208665
  chr2:241543042-241543090
  hypo

SEQ ID NO: 390759 - DNA, 229 bp, Homo sapiens; identical to SEQ ID NO: 208671
  chr2:241721305-241721534
  hypo

SEQ ID NO: 390760 - DNA, 61 bp, Homo sapiens; identical to SEQ ID NO: 385323
  chr2:241721587-241721648
  hypo

SEQ ID NO: 390761 - DNA, 156 bp, Homo sapiens; identical to SEQ ID NO: 208675
  chr2:241750153-241750309
  hypo

SEQ ID NO: 390762 - DNA, 112 bp, Homo sapiens; identical to SEQ ID NO: 251876
  chr2:241776236-241776348
  hypo

SEQ ID NO: 390763 - DNA, 250 bp, Homo sapiens; identical to SEQ ID NO: 251889
  chr2:241992477-241992727
  hypo

SEQ ID NO: 390764 - DNA, 110 bp, Homo sapiens; identical to SEQ ID NO: 251896
  chr2:242102770-242102880
  hypo

SEQ ID NO: 390765 - DNA, 52 bp, Homo sapiens; identical to SEQ ID NO: 251900
  chr2:242142973-242143025
  hypo

SEQ ID NO: 390766 - DNA, 120 bp, Homo sapiens; identical to SEQ ID NO: 208688
  chr2:242268832-242268952
  hypo

SEQ ID NO: 390767 - DNA, 255 bp, Homo sapiens; identical to SEQ ID NO: 251908
  chr2:242277632-242277887
  hypo

SEQ ID NO: 390768 - DNA, 42 bp, Homo sapiens; identical to SEQ ID NO: 251911
  chr2:242354475-242354517
  hypo

SEQ ID NO: 390769 - DNA, 413 bp, Homo sapiens; identical to SEQ ID NO: 251917
  chr2:242438422-242438835
  hypo

SEQ ID NO: 390770 - DNA, 162 bp, Homo sapiens; identical to SEQ ID NO: 208693
  chr2:242439377-242439539
  hypo

SEQ ID NO: 390771 - DNA, 95 bp, Homo sapiens; identical to SEQ ID NO: 208694
  chr2:242439569-242439664
  hypo

SEQ ID NO: 390772 - DNA, 252 bp, Homo sapiens; identical to SEQ ID NO: 251928
  chr2:242600213-242600465
  hypo

SEQ ID NO: 390773 - DNA, 107 bp, Homo sapiens; identical to SEQ ID NO: 251947
  chr2:242712093-242712200
  hypo

SEQ ID NO: 390774 - DNA, 171 bp, Homo sapiens; identical to SEQ ID NO: 208715
  chr2:242755673-242755844
  hypo

SEQ ID NO: 390775 - DNA, 104 bp, Homo sapiens; identical to SEQ ID NO: 208716
  chr2:242762674-242762778
  hypo

SEQ ID NO: 390776 - DNA, 253 bp, Homo sapiens; identical to SEQ ID NO: 208717
  chr2:242762831-242763084
  hypo

SEQ ID NO: 390777 - DNA, 85 bp, Homo sapiens; identical to SEQ ID NO: 251963
  chr2:242845592-242845677
  hypo

SEQ ID NO: 390778 - DNA, 189 bp, Homo sapiens; identical to SEQ ID NO: 208720
  chr2:242887764-242887953
  hypo

SEQ ID NO: 390779 - DNA, 113 bp, Homo sapiens; identical to SEQ ID NO: 251970
  chr2:242948202-242948315
  hypo

SEQ ID NO: 390780 - DNA, 61 bp, Homo sapiens; identical to SEQ ID NO: 301213
  chr3:3167927-3167988
  hypo

SEQ ID NO: 390781 - DNA, 37 bp, Homo sapiens; identical to SEQ ID NO: 208728
  chr3:4993606-4993643
  hypo

SEQ ID NO: 390782 - DNA, 35 bp, Homo sapiens; identical to SEQ ID NO: 251992
  chr3:6110078-6110113
  hypo

SEQ ID NO: 390783 - DNA, 148 bp, Homo sapiens; identical to SEQ ID NO: 252001
  chr3:9553508-9553656
  hypo

SEQ ID NO: 390784 - DNA, 42 bp, Homo sapiens; identical to SEQ ID NO: 208747
  chr3:11300932-11300974
  hypo

SEQ ID NO: 390785 - DNA, 88 bp, Homo sapiens; identical to SEQ ID NO: 252032
  chr3:11595081-11595169
  hypo

SEQ ID NO: 390786 - DNA, 357 bp, Homo sapiens; identical to SEQ ID NO: 252033
  chr3:11600065-11600422
  hypo

SEQ ID NO: 390787 - DNA, 32 bp, Homo sapiens; identical to SEQ ID NO: 252035
  chr3:11607101-11607133
  hypo

SEQ ID NO: 390788 - DNA, 39 bp, Homo sapiens; identical to SEQ ID NO: 252042
  chr3:12558547-12558586
  hypo

SEQ ID NO: 390789 - DNA, 43 bp, Homo sapiens; identical to SEQ ID NO: 208761
  chr3:12940404-12940447
  hypo

SEQ ID NO: 390790 - DNA, 439 bp, Homo sapiens; identical to SEQ ID NO: 252060
  chr3:12984507-12984946
  hypo

SEQ ID NO: 390791 - DNA, 57 bp, Homo sapiens; identical to SEQ ID NO: 252062
  chr3:13028240-13028297
  hypo

SEQ ID NO: 390792 - DNA, 94 bp, Homo sapiens; identical to SEQ ID NO: 208769
  chr3:13205534-13205628
  hypo

SEQ ID NO: 390793 - DNA, 44 bp, Homo sapiens; identical to SEQ ID NO: 252073
  chr3:14208688-14208732
  hypo

SEQ ID NO: 390794 - DNA, 265 bp, Homo sapiens; identical to SEQ ID NO: 208774
  chr3:14384852-14385117
  hypo

SEQ ID NO: 390795 - DNA, 92 bp, Homo sapiens; identical to SEQ ID NO: 252094
  chr3:15432501-15432593
  hypo

SEQ ID NO: 390796 - DNA, 215 bp, Homo sapiens; identical to SEQ ID NO: 208783
  chr3:16439262-16439477
  hypo

SEQ ID NO: 390797 - DNA, 44 bp, Homo sapiens; identical to SEQ ID NO: 208791
  chr3:20070404-20070448
  hypo

SEQ ID NO: 390798 - DNA, 38 bp, Homo sapiens; identical to SEQ ID NO: 252114
  chr3:20630727-20630765
  hypo

SEQ ID NO: 390799 - DNA, 57 bp, Homo sapiens; identical to SEQ ID NO: 252116
  chr3:23521987-23522044
  hypo

SEQ ID NO: 390800 - DNA, 152 bp, Homo sapiens; identical to SEQ ID NO: 222085
  chr3:23986746-23986898
  hypo

SEQ ID NO: 390801 - DNA, 86 bp, Homo sapiens; identical to SEQ ID NO: 387901
  chr3:24535595-24535681
  hypo

SEQ ID NO: 390802 - DNA, 36 bp, Homo sapiens; identical to SEQ ID NO: 252128
  chr3:27563872-27563908
  hypo

SEQ ID NO: 390803 - DNA, 37 bp, Homo sapiens; identical to SEQ ID NO: 208809
  chr3:31717147-31717184
  hypo

SEQ ID NO: 390804 - DNA, 139 bp, Homo sapiens; identical to SEQ ID NO: 252137
  chr3:31786601-31786740
  hypo

SEQ ID NO: 390805 - DNA, 41 bp, Homo sapiens; identical to SEQ ID NO: 252140
  chr3:32886051-32886092
  hypo

SEQ ID NO: 390806 - DNA, 280 bp, Homo sapiens; identical to SEQ ID NO: 222107
  chr3:37053310-37053590
  hypo

SEQ ID NO: 390807 - DNA, 154 bp, Homo sapiens; identical to SEQ ID NO: 222110
  chr3:37061800-37061954
  hypo

SEQ ID NO: 390808 - DNA, 165 bp, Homo sapiens; identical to SEQ ID NO: 222115
  chr3:37089009-37089174
  hypo

SEQ ID NO: 390809 - DNA, 38 bp, Homo sapiens; identical to SEQ ID NO: 252153
  chr3:37214389-37214427
  hypo

SEQ ID NO: 390810 - DNA, 128 bp, Homo sapiens; identical to SEQ ID NO: 301448
  chr3:38030490-38030618
  hypo

SEQ ID NO: 390811 - DNA, 90 bp, Homo sapiens; identical to SEQ ID NO: 208822
  chr3:38030782-38030872
  hypo

SEQ ID NO: 390812 - DNA, 100 bp, Homo sapiens; identical to SEQ ID NO: 252164
  chr3:38413411-38413511
  hypo

SEQ ID NO: 390813 - DNA, 91 bp, Homo sapiens; identical to SEQ ID NO: 252167
  chr3:38755471-38755562
  hypo

SEQ ID NO: 390814 - DNA, 57 bp, Homo sapiens; identical to SEQ ID NO: 252168
  chr3:38984804-38984861
  hypo

SEQ ID NO: 390815 - DNA, 96 bp, Homo sapiens; identical to SEQ ID NO: 252183
  chr3:42223003-42223099
  hypo

SEQ ID NO: 390816 - DNA, 110 bp, Homo sapiens; identical to SEQ ID NO: 208844
  chr3:43121573-43121683
  hypo

SEQ ID NO: 390817 - DNA, 214 bp, Homo sapiens; identical to SEQ ID NO: 198903
  chr3:43663334-43663548
  hypo

SEQ ID NO: 390818 - DNA, 153 bp, Homo sapiens; identical to SEQ ID NO: 252203
  chr3:44461798-44461951
  hypo

SEQ ID NO: 390819 - DNA, 291 bp, Homo sapiens; identical to SEQ ID NO: 252204
  chr3:44752300-44752591
  hypo

SEQ ID NO: 390820 - DNA, 42 bp, Homo sapiens; identical to SEQ ID NO: 208858
  chr3:45968717-45968759
  hypo

SEQ ID NO: 390821 - DNA, 35 bp, Homo sapiens; identical to SEQ ID NO: 252223
  chr3:46769817-46769852
  hypo

SEQ ID NO: 390822 - DNA, 182 bp, Homo sapiens; identical to SEQ ID NO: 252227
  chr3:46944572-46944754
  hypo

SEQ ID NO: 390823 - DNA, 38 bp, Homo sapiens; identical to SEQ ID NO: 208862
  chr3:47007698-47007736
  hypo

SEQ ID NO: 390824 - DNA, 78 bp, Homo sapiens; identical to SEQ ID NO: 222142
  chr3:47050739-47050817
  hypo

SEQ ID NO: 390825 - DNA, 138 bp, Homo sapiens; identical to SEQ ID NO: 252237
  chr3:47373436-47373574
  hypo

SEQ ID NO: 390826 - DNA, 35 bp, Homo sapiens; identical to SEQ ID NO: 252245
  chr3:48316727-48316762
  hypo

SEQ ID NO: 390827 - DNA, 76 bp, Homo sapiens; identical to SEQ ID NO: 252246
  chr3:48456672-48456748
  hypo

SEQ ID NO: 390828 - DNA, 70 bp, Homo sapiens; identical to SEQ ID NO: 252248
  chr3:48461257-48461327
  hypo

SEQ ID NO: 390829 - DNA, 76 bp, Homo sapiens; identical to SEQ ID NO: 252255
  chr3:48659179-48659255
  hypo

SEQ ID NO: 390830 - DNA, 40 bp, Homo sapiens; identical to SEQ ID NO: 252257
  chr3:48702183-48702223
  hypo

SEQ ID NO: 390831 - DNA, 120 bp, Homo sapiens; identical to SEQ ID NO: 252268
  chr3:49014624-49014744
  hypo

SEQ ID NO: 390832 - DNA, 323 bp, Homo sapiens; identical to SEQ ID NO: 208879
  chr3:49035605-49035928
  hypo

SEQ ID NO: 390833 - DNA, 32 bp, Homo sapiens; identical to SEQ ID NO: 208882
  chr3:49145906-49145938
  hypo

SEQ ID NO: 390834 - DNA, 31 bp, Homo sapiens; identical to SEQ ID NO: 208883
  chr3:49433706-49433737
  hypo

SEQ ID NO: 390835 - DNA, 32 bp, Homo sapiens; identical to SEQ ID NO: 252277
  chr3:49522230-49522262
  hypo

SEQ ID NO: 390836 - DNA, 97 bp, Homo sapiens; identical to SEQ ID NO: 252279
  chr3:49636112-49636209
  hypo

SEQ ID NO: 390837 - DNA, 57 bp, Homo sapiens; identical to SEQ ID NO: 208887
  chr3:49690212-49690269
  hypo

SEQ ID NO: 390838 - DNA, 210 bp, Homo sapiens; identical to SEQ ID NO: 252285
  chr3:49699563-49699773
  hypo

SEQ ID NO: 390839 - DNA, 100 bp, Homo sapiens; identical to SEQ ID NO: 252293
  chr3:50140300-50140400
  hypo

SEQ ID NO: 390840 - DNA, 126 bp, Homo sapiens; identical to SEQ ID NO: 252297
  chr3:50214171-50214297
  hypo

SEQ ID NO: 390841 - DNA, 31 bp, Homo sapiens; identical to SEQ ID NO: 301615
  chr3:50575571-50575602
  hypo

SEQ ID NO: 390842 - DNA, 119 bp, Homo sapiens; identical to SEQ ID NO: 252311
  chr3:51680379-51680498
  hypo

SEQ ID NO: 390843 - DNA, 166 bp, Homo sapiens; identical to SEQ ID NO: 208898
  chr3:52088124-52088290
  hypo

SEQ ID NO: 390844 - DNA, 202 bp, Homo sapiens; identical to SEQ ID NO: 252318
  chr3:52255938-52256140
  hypo

SEQ ID NO: 390845 - DNA, 282 bp, Homo sapiens; identical to SEQ ID NO: 208899
  chr3:52257379-52257661
  hypo

SEQ ID NO: 390846 - DNA, 303 bp, Homo sapiens; identical to SEQ ID NO: 252326
  chr3:52537789-52538092
  hypo

SEQ ID NO: 390847 - DNA, 147 bp, Homo sapiens; identical to SEQ ID NO: 222158
  chr3:53190592-53190739
  hypo

SEQ ID NO: 390848 - DNA, 154 bp, Homo sapiens; identical to SEQ ID NO: 222161
  chr3:53528643-53528797
  hypo

SEQ ID NO: 390849 - DNA, 227 bp, Homo sapiens; identical to SEQ ID NO: 252346
  chr3:53845189-53845416
  hypo

SEQ ID NO: 390850 - DNA, 59 bp, Homo sapiens; identical to SEQ ID NO: 208914
  chr3:53857419-53857478
  hypo

SEQ ID NO: 390851 - DNA, 107 bp, Homo sapiens; identical to SEQ ID NO: 252356
  chr3:56840408-56840515
  hypo

SEQ ID NO: 390852 - DNA, 256 bp, Homo sapiens; identical to SEQ ID NO: 252361
  chr3:57131629-57131885
  hypo

SEQ ID NO: 390853 - DNA, 180 bp, Homo sapiens; identical to SEQ ID NO: 252366
  chr3:57544507-57544687
  hypo

SEQ ID NO: 390854 - DNA, 39 bp, Homo sapiens; identical to SEQ ID NO: 252368
  chr3:57674950-57674989
  hypo

SEQ ID NO: 390855 - DNA, 84 bp, Homo sapiens; identical to SEQ ID NO: 252376
  chr3:58652283-58652367
  hypo

SEQ ID NO: 390856 - DNA, 337 bp, Homo sapiens; identical to SEQ ID NO: 208932
  chr3:64547143-64547480
  hypo

SEQ ID NO: 390857 - DNA, 51 bp, Homo sapiens; identical to SEQ ID NO: 252390
  chr3:66460441-66460492
  hypo

SEQ ID NO: 390858 - DNA, 196 bp, Homo sapiens; identical to SEQ ID NO: 208940
  chr3:66482908-66483104
  hypo

SEQ ID NO: 390859 - DNA, 156 bp, Homo sapiens; identical to SEQ ID NO: 222173
  chr3:69062098-69062254
  hypo

SEQ ID NO: 390860 - DNA, 118 bp, Homo sapiens; identical to SEQ ID NO: 252407
  chr3:71019767-71019885
  hypo

SEQ ID NO: 390861 - DNA, 77 bp, Homo sapiens; identical to SEQ ID NO: 252411
  chr3:71120998-71121075
  hypo

SEQ ID NO: 390862 - DNA, 80 bp, Homo sapiens; identical to SEQ ID NO: 252419
  chr3:71408816-71408896
  hypo

SEQ ID NO: 390863 - DNA, 65 bp, Homo sapiens; identical to SEQ ID NO: 252422
  chr3:71496761-71496826
  hypo

SEQ ID NO: 390864 - DNA, 43 bp, Homo sapiens; identical to SEQ ID NO: 252425
  chr3:71581510-71581553
  hypo

SEQ ID NO: 390865 - DNA, 84 bp, Homo sapiens; identical to SEQ ID NO: 252434
  chr3:72795276-72795360
  hypo

SEQ ID NO: 390866 - DNA, 42 bp, Homo sapiens; identical to SEQ ID NO: 252445
  chr3:87652052-87652094
  hypo

SEQ ID NO: 390867 - DNA, 37 bp, Homo sapiens; identical to SEQ ID NO: 252456
  chr3:97473826-97473863
  hypo

SEQ ID NO: 390868 - DNA, 45 bp, Homo sapiens; identical to SEQ ID NO: 252458
  chr3:98290224-98290269
  hypo

SEQ ID NO: 390869 - DNA, 154 bp, Homo sapiens; identical to SEQ ID NO: 252491
  chr3:112357813-112357967
  hypo

SEQ ID NO: 390870 - DNA, 96 bp, Homo sapiens; identical to SEQ ID NO: 252498
  chr3:119342487-119342583
  hypo

SEQ ID NO: 390871 - DNA, 158 bp, Homo sapiens; identical to SEQ ID NO: 252504
  chr3:120064577-120064735
  hypo

SEQ ID NO: 390872 - DNA, 38 bp, Homo sapiens; identical to SEQ ID NO: 252507
  chr3:120313290-120313328
  hypo

SEQ ID NO: 390873 - DNA, 57 bp, Homo sapiens; identical to SEQ ID NO: 252519
  chr3:122355300-122355357
  hypo

SEQ ID NO: 390874 - DNA, 455 bp, Homo sapiens; identical to SEQ ID NO: 209007
  chr3:123166198-123166653
  hypo

SEQ ID NO: 390875 - DNA, 42 bp, Homo sapiens; identical to SEQ ID NO: 252525
  chr3:123200212-123200254
  hypo

SEQ ID NO: 390876 - DNA, 253 bp, Homo sapiens; identical to SEQ ID NO: 252529
  chr3:123813450-123813703
  hypo

SEQ ID NO: 390877 - DNA, 84 bp, Homo sapiens; identical to SEQ ID NO: 252534
  chr3:124465924-124466008
  hypo

SEQ ID NO: 390878 - DNA, 39 bp, Homo sapiens; identical to SEQ ID NO: 252542
  chr3:125210665-125210704
  hypo

SEQ ID NO: 390879 - DNA, 170 bp, Homo sapiens; identical to SEQ ID NO: 252549
  chr3:125679708-125679878
  hypo

SEQ ID NO: 390880 - DNA, 189 bp, Homo sapiens; identical to SEQ ID NO: 252555
  chr3:125977272-125977461
  hypo

SEQ ID NO: 390881 - DNA, 361 bp, Homo sapiens; identical to SEQ ID NO: 281430
  chr3:126074822-126075183
  hypo

SEQ ID NO: 390882 - DNA, 36 bp, Homo sapiens; identical to SEQ ID NO: 252557
  chr3:126137173-126137209
  hypo

SEQ ID NO: 390883 - DNA, 38 bp, Homo sapiens; identical to SEQ ID NO: 252559
  chr3:126195713-126195751
  hypo

SEQ ID NO: 390884 - DNA, 158 bp, Homo sapiens; identical to SEQ ID NO: 252564
  chr3:126274128-126274286
  hypo

SEQ ID NO: 390885 - DNA, 402 bp, Homo sapiens; identical to SEQ ID NO: 209027
  chr3:126724696-126725098
  hypo

SEQ ID NO: 390886 - DNA, 64 bp, Homo sapiens; identical to SEQ ID NO: 252575
  chr3:126736637-126736701
  hypo

SEQ ID NO: 390887 - DNA, 181 bp, Homo sapiens; identical to SEQ ID NO: 252576
  chr3:126747049-126747230
  hypo

SEQ ID NO: 390888 - DNA, 284 bp, Homo sapiens; identical to SEQ ID NO: 252583
  chr3:127325614-127325898
  hypo

SEQ ID NO: 390889 - DNA, 207 bp, Homo sapiens; identical to SEQ ID NO: 199079
  chr3:127348123-127348330
  hypo

SEQ ID NO: 390890 - DNA, 203 bp, Homo sapiens; identical to SEQ ID NO: 252585
  chr3:127349664-127349867
  hypo

SEQ ID NO: 390891 - DNA, 143 bp, Homo sapiens; identical to SEQ ID NO: 252591
  chr3:127439917-127440060
  hypo

SEQ ID NO: 390892 - DNA, 72 bp, Homo sapiens; identical to SEQ ID NO: 252593
  chr3:127515530-127515602
  hypo

SEQ ID NO: 390893 - DNA, 120 bp, Homo sapiens; identical to SEQ ID NO: 252619
  chr3:128526383-128526503
  hypo

SEQ ID NO: 390894 - DNA, 271 bp, Homo sapiens; identical to SEQ ID NO: 252623
  chr3:128782774-128783045
  hypo

SEQ ID NO: 390895 - DNA, 163 bp, Homo sapiens; identical to SEQ ID NO: 209046
  chr3:128785014-128785177
  hypo

SEQ ID NO: 390896 - DNA, 181 bp, Homo sapiens; identical to SEQ ID NO: 252637
  chr3:129284111-129284292
  hypo

SEQ ID NO: 390897 - DNA, 157 bp, Homo sapiens; identical to SEQ ID NO: 252653
  chr3:130464453-130464610
  hypo

SEQ ID NO: 390898 - DNA, 120 bp, Homo sapiens; identical to SEQ ID NO: 252654
  chr3:131595102-131595222
  hypo

SEQ ID NO: 390899 - DNA, 151 bp, Homo sapiens; identical to SEQ ID NO: 209058
  chr3:132034534-132034685
  hypo

SEQ ID NO: 390900 - DNA, 36 bp, Homo sapiens; identical to SEQ ID NO: 209060
  chr3:132399371-132399407
  hypo

SEQ ID NO: 390901 - DNA, 49 bp, Homo sapiens; identical to SEQ ID NO: 199099
  chr3:133276458-133276507
  hypo

SEQ ID NO: 390902 - DNA, 227 bp, Homo sapiens; identical to SEQ ID NO: 209063
  chr3:133648404-133648631
  hypo

SEQ ID NO: 390903 - DNA, 52 bp, Homo sapiens; identical to SEQ ID NO: 199100
  chr3:133969907-133969959
  hypo

SEQ ID NO: 390904 - DNA, 195 bp, Homo sapiens; identical to SEQ ID NO: 252683
  chr3:137783021-137783216
  hypo

SEQ ID NO: 390905 - DNA, 34 bp, Homo sapiens; identical to SEQ ID NO: 209076
  chr3:138001202-138001236
  hypo

SEQ ID NO: 390906 - DNA, 42 bp, Homo sapiens; identical to SEQ ID NO: 302077
  chr3:140434249-140434291
  hypo

SEQ ID NO: 390907 - DNA, 143 bp, Homo sapiens; identical to SEQ ID NO: 252709
  chr3:141495874-141496017
  hypo

SEQ ID NO: 390908 - DNA, 35 bp, Homo sapiens; identical to SEQ ID NO: 209094
  chr3:141954424-141954459
  hypo

SEQ ID NO: 390909 - DNA, 78 bp, Homo sapiens; identical to SEQ ID NO: 252739
  chr3:143316755-143316833
  hypo

SEQ ID NO: 390910 - DNA, 72 bp, Homo sapiens; identical to SEQ ID NO: 252740
  chr3:143317071-143317143
  hypo

SEQ ID NO: 390911 - DNA, 39 bp, Homo sapiens; identical to SEQ ID NO: 252743
  chr3:148472162-148472201
  hypo

SEQ ID NO: 390912 - DNA, 54 bp, Homo sapiens; identical to SEQ ID NO: 252747
  chr3:148802384-148802438
  hypo

SEQ ID NO: 390913 - DNA, 288 bp, Homo sapiens; identical to SEQ ID NO: 252756
  chr3:149700884-149701172
  hypo

SEQ ID NO: 390914 - DNA, 159 bp, Homo sapiens; identical to SEQ ID NO: 252765
  chr3:150379955-150380114
  hypo

SEQ ID NO: 390915 - DNA, 186 bp, Homo sapiens; identical to SEQ ID NO: 209118
  chr3:150497417-150497603
  hypo

SEQ ID NO: 390916 - DNA, 37 bp, Homo sapiens; identical to SEQ ID NO: 252779
  chr3:153404031-153404068
  hypo

SEQ ID NO: 390917 - DNA, 42 bp, Homo sapiens; identical to SEQ ID NO: 252782
  chr3:155315612-155315654
  hypo

SEQ ID NO: 390918 - DNA, 65 bp, Homo sapiens; identical to SEQ ID NO: 209130
  chr3:156543100-156543165
  hypo

SEQ ID NO: 390919 - DNA, 97 bp, Homo sapiens; identical to SEQ ID NO: 252794
  chr3:158361237-158361334
  hypo

SEQ ID NO: 390920 - DNA, 211 bp, Homo sapiens; identical to SEQ ID NO: 222257
  chr3:159706814-159707025
  hypo

SEQ ID NO: 390921 - DNA, 38 bp, Homo sapiens; identical to SEQ ID NO: 252801
  chr3:160328305-160328343
  hypo

SEQ ID NO: 390922 - DNA, 35 bp, Homo sapiens; identical to SEQ ID NO: 252803
  chr3:160863217-160863252
  hypo

SEQ ID NO: 390923 - DNA, 112 bp, Homo sapiens; identical to SEQ ID NO: 252805
  chr3:166834368-166834480
  hypo

SEQ ID NO: 390924 - DNA, 37 bp, Homo sapiens; identical to SEQ ID NO: 252808
  chr3:168197107-168197144
  hypo

SEQ ID NO: 390925 - DNA, 87 bp, Homo sapiens; identical to SEQ ID NO: 222261
  chr3:169380983-169381070
  hypo

SEQ ID NO: 390926 - DNA, 60 bp, Homo sapiens; identical to SEQ ID NO: 252819
  chr3:169796500-169796560
  hypo

SEQ ID NO: 390927 - DNA, 39 bp, Homo sapiens; identical to SEQ ID NO: 252822
  chr3:169916138-169916177
  hypo

SEQ ID NO: 390928 - DNA, 40 bp, Homo sapiens; identical to SEQ ID NO: 252825
  chr3:170154037-170154077
  hypo

SEQ ID NO: 390929 - DNA, 74 bp, Homo sapiens; identical to SEQ ID NO: 209145
  chr3:170179927-170180001
  hypo

SEQ ID NO: 390930 - DNA, 45 bp, Homo sapiens; identical to SEQ ID NO: 252833
  chr3:170870834-170870879
  hypo

SEQ ID NO: 390931 - DNA, 193 bp, Homo sapiens; identical to SEQ ID NO: 302235
  chr3:172033319-172033512
  hypo

SEQ ID NO: 390932 - DNA, 80 bp, Homo sapiens; identical to SEQ ID NO: 209159
  chr3:172395702-172395782
  hypo

SEQ ID NO: 390933 - DNA, 32 bp, Homo sapiens; identical to SEQ ID NO: 209167
  chr3:175307701-175307733
  hypo

SEQ ID NO: 390934 - DNA, 43 bp, Homo sapiens; identical to SEQ ID NO: 302255
  chr3:175338091-175338134
  hypo

SEQ ID NO: 390935 - DNA, 466 bp, Homo sapiens; identical to SEQ ID NO: 302256
  chr3:175338171-175338637
  hypo

SEQ ID NO: 390936 - DNA, 34 bp, Homo sapiens; identical to SEQ ID NO: 252875
  chr3:176893551-176893585
  hypo

SEQ ID NO: 390937 - DNA, 103 bp, Homo sapiens; identical to SEQ ID NO: 252882
  chr3:177085605-177085708
  hypo

SEQ ID NO: 390938 - DNA, 230 bp, Homo sapiens; identical to SEQ ID NO: 252883
  chr3:177094901-177095131
  hypo

SEQ ID NO: 390939 - DNA, 89 bp, Homo sapiens; identical to SEQ ID NO: 209173
  chr3:177158385-177158474
  hypo

SEQ ID NO: 390940 - DNA, 33 bp, Homo sapiens; identical to SEQ ID NO: 252888
  chr3:177269266-177269299
  hypo

SEQ ID NO: 390941 - DNA, 43 bp, Homo sapiens; identical to SEQ ID NO: 252890
  chr3:177829173-177829216
  hypo

SEQ ID NO: 390942 - DNA, 373 bp, Homo sapiens; identical to SEQ ID NO: 252902
  chr3:179449287-179449660
  hypo

SEQ ID NO: 390943 - DNA, 163 bp, Homo sapiens; identical to SEQ ID NO: 252920
  chr3:182935983-182936146
  hypo

SEQ ID NO: 390944 - DNA, 171 bp, Homo sapiens; identical to SEQ ID NO: 209200
  chr3:183381135-183381306
  hypo

SEQ ID NO: 390945 - DNA, 220 bp, Homo sapiens; identical to SEQ ID NO: 209202
  chr3:183479752-183479972
  hypo

SEQ ID NO: 390946 - DNA, 55 bp, Homo sapiens; identical to SEQ ID NO: 209203
  chr3:183525222-183525277
  hypo

SEQ ID NO: 390947 - DNA, 48 bp, Homo sapiens; identical to SEQ ID NO: 252941
  chr3:183529223-183529271
  hypo

SEQ ID NO: 390948 - DNA, 231 bp, Homo sapiens; identical to SEQ ID NO: 222281
  chr3:183602814-183603045
  hypo

SEQ ID NO: 390949 - DNA, 84 bp, Homo sapiens; identical to SEQ ID NO: 252944
  chr3:183639003-183639087
  hypo

SEQ ID NO: 390950 - DNA, 194 bp, Homo sapiens; identical to SEQ ID NO: 252954
  chr3:183688726-183688920
  hypo

SEQ ID NO: 390951 - DNA, 199 bp, Homo sapiens; identical to SEQ ID NO: 252958
  chr3:183720218-183720417
  hypo

SEQ ID NO: 390952 - DNA, 127 bp, Homo sapiens; identical to SEQ ID NO: 302348
  chr3:183801859-183801986
  hypo

SEQ ID NO: 390953 - DNA, 186 bp, Homo sapiens; identical to SEQ ID NO: 302349
  chr3:183802021-183802207
  hypo

SEQ ID NO: 390954 - DNA, 86 bp, Homo sapiens; identical to SEQ ID NO: 199238
  chr3:183851915-183852001
  hypo

SEQ ID NO: 390955 - DNA, 143 bp, Homo sapiens; identical to SEQ ID NO: 252973
  chr3:184043272-184043415
  hypo

SEQ ID NO: 390956 - DNA, 105 bp, Homo sapiens; identical to SEQ ID NO: 222283
  chr3:184097688-184097793
  hypo

SEQ ID NO: 390957 - DNA, 171 bp, Homo sapiens; identical to SEQ ID NO: 209227
  chr3:184273717-184273888
  hypo

SEQ ID NO: 390958 - DNA, 31 bp, Homo sapiens; identical to SEQ ID NO: 252990
  chr3:184294858-184294889
  hypo

SEQ ID NO: 390959 - DNA, 63 bp, Homo sapiens; identical to SEQ ID NO: 209239
  chr3:184800818-184800881
  hypo

SEQ ID NO: 390960 - DNA, 92 bp, Homo sapiens; identical to SEQ ID NO: 209241
  chr3:184833749-184833841
  hypo

SEQ ID NO: 390961 - DNA, 119 bp, Homo sapiens; identical to SEQ ID NO: 209245
  chr3:185277645-185277764
  hypo

SEQ ID NO: 390962 - DNA, 161 bp, Homo sapiens; identical to SEQ ID NO: 209246
  chr3:185277844-185278005
  hypo

SEQ ID NO: 390963 - DNA, 67 bp, Homo sapiens; identical to SEQ ID NO: 209247
  chr3:185303180-185303247
  hypo

SEQ ID NO: 390964 - DNA, 104 bp, Homo sapiens; identical to SEQ ID NO: 209253
  chr3:185363652-185363756
  hypo

SEQ ID NO: 390965 - DNA, 73 bp, Homo sapiens; identical to SEQ ID NO: 253028
  chr3:185373822-185373895
  hypo

SEQ ID NO: 390966 - DNA, 166 bp, Homo sapiens; identical to SEQ ID NO: 209259
  chr3:185551759-185551925
  hypo

SEQ ID NO: 390967 - DNA, 43 bp, Homo sapiens; identical to SEQ ID NO: 209268
  chr3:186142830-186142873
  hypo

SEQ ID NO: 390968 - DNA, 144 bp, Homo sapiens; identical to SEQ ID NO: 222300
  chr3:187462668-187462812
  hypo

SEQ ID NO: 390969 - DNA, 164 bp, Homo sapiens; identical to SEQ ID NO: 209280
  chr3:188070251-188070415
  hypo

SEQ ID NO: 390970 - DNA, 94 bp, Homo sapiens; identical to SEQ ID NO: 209281
  chr3:188353741-188353835
  hypo

SEQ ID NO: 390971 - DNA, 87 bp, Homo sapiens; identical to SEQ ID NO: 209285
  chr3:193235538-193235625
  hypo

SEQ ID NO: 390972 - DNA, 99 bp, Homo sapiens; identical to SEQ ID NO: 253086
  chr3:193489691-193489790
  hypo

SEQ ID NO: 390973 - DNA, 35 bp, Homo sapiens; identical to SEQ ID NO: 209295
  chr3:193503310-193503345
  hypo

SEQ ID NO: 390974 - DNA, 208 bp, Homo sapiens; identical to SEQ ID NO: 209296
  chr3:193505272-193505480
  hypo

SEQ ID NO: 390975 - DNA, 160 bp, Homo sapiens; identical to SEQ ID NO: 253091
  chr3:193513920-193514080
  hypo

SEQ ID NO: 390976 - DNA, 441 bp, Homo sapiens; identical to SEQ ID NO: 222307
  chr3:193721033-193721474
  hypo

SEQ ID NO: 390977 - DNA, 104 bp, Homo sapiens; identical to SEQ ID NO: 222308
  chr3:193721577-193721681
  hypo

SEQ ID NO: 390978 - DNA, 180 bp, Homo sapiens; identical to SEQ ID NO: 222310
  chr3:193853887-193854067
  hypo

SEQ ID NO: 390979 - DNA, 93 bp, Homo sapiens; identical to SEQ ID NO: 253106
  chr3:194058380-194058473
  hypo

SEQ ID NO: 390980 - DNA, 82 bp, Homo sapiens; identical to SEQ ID NO: 253109
  chr3:194078512-194078594
  hypo

SEQ ID NO: 390981 - DNA, 34 bp, Homo sapiens; identical to SEQ ID NO: 253120
  chr3:194341460-194341494
  hypo

SEQ ID NO: 390982 - DNA, 184 bp, Homo sapiens; identical to SEQ ID NO: 253125
  chr3:194669150-194669334
  hypo

SEQ ID NO: 390983 - DNA, 52 bp, Homo sapiens; identical to SEQ ID NO: 253132
  chr3:194793570-194793622
  hypo

SEQ ID NO: 390984 - DNA, 38 bp, Homo sapiens; identical to SEQ ID NO: 209323
  chr3:194799662-194799700
  hypo

SEQ ID NO: 390985 - DNA, 166 bp, Homo sapiens; identical to SEQ ID NO: 209326
  chr3:194866034-194866200
  hypo

SEQ ID NO: 390986 - DNA, 77 bp, Homo sapiens; identical to SEQ ID NO: 253146
  chr3:195139467-195139544
  hypo

SEQ ID NO: 390987 - DNA, 181 bp, Homo sapiens; identical to SEQ ID NO: 253156
  chr3:195573453-195573634
  hypo

SEQ ID NO: 390988 - DNA, 87 bp, Homo sapiens; identical to SEQ ID NO: 253158
  chr3:195591689-195591776
  hypo

SEQ ID NO: 390989 - DNA, 169 bp, Homo sapiens; identical to SEQ ID NO: 253188
  chr3:195923150-195923319
  hypo

SEQ ID NO: 390990 - DNA, 44 bp, Homo sapiens; identical to SEQ ID NO: 209357
  chr3:195990771-195990815
  hypo

SEQ ID NO: 390991 - DNA, 291 bp, Homo sapiens; identical to SEQ ID NO: 209368
  chr3:196723696-196723987
  hypo

SEQ ID NO: 390992 - DNA, 112 bp, Homo sapiens; identical to SEQ ID NO: 209373
  chr3:196766007-196766119
  hypo

SEQ ID NO: 390993 - DNA, 86 bp, Homo sapiens; identical to SEQ ID NO: 209374
  chr3:196766195-196766281
  hypo

SEQ ID NO: 390994 - DNA, 192 bp, Homo sapiens; identical to SEQ ID NO: 209375
  chr3:196817782-196817974
  hypo

SEQ ID NO: 390995 - DNA, 147 bp, Homo sapiens; identical to SEQ ID NO: 253229
  chr3:196907217-196907364
  hypo

SEQ ID NO: 390996 - DNA, 156 bp, Homo sapiens; identical to SEQ ID NO: 253231
  chr3:197027476-197027632
  hypo

SEQ ID NO: 390997 - DNA, 141 bp, Homo sapiens; identical to SEQ ID NO: 253242
  chr3:197231739-197231880
  hypo

SEQ ID NO: 390998 - DNA, 300 bp, Homo sapiens; identical to SEQ ID NO: 253243
  chr3:197238899-197239199
  hypo

SEQ ID NO: 390999 - DNA, 99 bp, Homo sapiens; identical to SEQ ID NO: 253252
  chr3:197401910-197402009
  hypo

SEQ ID NO: 391000 - DNA, 155 bp, Homo sapiens; identical to SEQ ID NO: 253258
  chr3:197640193-197640348
  hypo

SEQ ID NO: 391001 - DNA, 111 bp, Homo sapiens; identical to SEQ ID NO: 253268
  chr4:610967-611078
  hypo

SEQ ID NO: 391002 - DNA, 253 bp, Homo sapiens; identical to SEQ ID NO: 209396
  chr4:616352-616605
  hypo

SEQ ID NO: 391003 - DNA, 236 bp, Homo sapiens; identical to SEQ ID NO: 209403
  chr4:655879-656115
  hypo

SEQ ID NO: 391004 - DNA, 147 bp, Homo sapiens; identical to SEQ ID NO: 222329
  chr4:667619-667766
  hypo

SEQ ID NO: 391005 - DNA, 44 bp, Homo sapiens; identical to SEQ ID NO: 253278
  chr4:708090-708134
  hypo

SEQ ID NO: 391006 - DNA, 167 bp, Homo sapiens; identical to SEQ ID NO: 302705
  chr4:741787-741954
  hypo

SEQ ID NO: 391007 - DNA, 139 bp, Homo sapiens; identical to SEQ ID NO: 253290
  chr4:793648-793787
  hypo

SEQ ID NO: 391008 - DNA, 97 bp, Homo sapiens; identical to SEQ ID NO: 253292
  chr4:815186-815283
  hypo

SEQ ID NO: 391009 - DNA, 378 bp, Homo sapiens; identical to SEQ ID NO: 253298
  chr4:860587-860965
  hypo

SEQ ID NO: 391010 - DNA, 149 bp, Homo sapiens; identical to SEQ ID NO: 253302
  chr4:873652-873801
  hypo

SEQ ID NO: 391011 - DNA, 309 bp, Homo sapiens; identical to SEQ ID NO: 222331
  chr4:966933-967242
  hypo

SEQ ID NO: 391012 - DNA, 32 bp, Homo sapiens; identical to SEQ ID NO: 209424
  chr4:982809-982841
  hypo

SEQ ID NO: 391013 - DNA, 133 bp, Homo sapiens; identical to SEQ ID NO: 253321
  chr4:1012455-1012588
  hypo

SEQ ID NO: 391014 - DNA, 365 bp, Homo sapiens; identical to SEQ ID NO: 209443
  chr4:1222883-1223248
  hypo

SEQ ID NO: 391015 - DNA, 140 bp, Homo sapiens; identical to SEQ ID NO: 199293
  chr4:1243421-1243561
  hypo

SEQ ID NO: 391016 - DNA, 256 bp, Homo sapiens; identical to SEQ ID NO: 253366
  chr4:1324847-1325103
  hypo

SEQ ID NO: 391017 - DNA, 68 bp, Homo sapiens; identical to SEQ ID NO: 253373
  chr4:1334471-1334539
  hypo

SEQ ID NO: 391018 - DNA, 248 bp, Homo sapiens; identical to SEQ ID NO: 253378
  chr4:1354334-1354582
  hypo

SEQ ID NO: 391019 - DNA, 137 bp, Homo sapiens; identical to SEQ ID NO: 253381
  chr4:1411719-1411856
  hypo

SEQ ID NO: 391020 - DNA, 265 bp, Homo sapiens; identical to SEQ ID NO: 253395
  chr4:1626395-1626660
  hypo

SEQ ID NO: 391021 - DNA, 45 bp, Homo sapiens; identical to SEQ ID NO: 253397
  chr4:1642970-1643015
  hypo

SEQ ID NO: 391022 - DNA, 162 bp, Homo sapiens; identical to SEQ ID NO: 209471
  chr4:1656589-1656751
  hypo

SEQ ID NO: 391023 - DNA, 43 bp, Homo sapiens
  chr4:1738656-1738699
  hypo
gctctgagctgtgaacagccccctgatgaggcagcactggctc

SEQ ID NO: 391024 - DNA, 97 bp, Homo sapiens; identical to SEQ ID NO: 209478
  chr4:1782913-1783010
  hypo

SEQ ID NO: 391025 - DNA, 174 bp, Homo sapiens; identical to SEQ ID NO: 383989
  chr4:1794972-1795146
  hypo

SEQ ID NO: 391026 - DNA, 104 bp, Homo sapiens; identical to SEQ ID NO: 222346
  chr4:1828625-1828729
  hypo

SEQ ID NO: 391027 - DNA, 140 bp, Homo sapiens; identical to SEQ ID NO: 209491
  chr4:1835054-1835194
  hypo

SEQ ID NO: 391028 - DNA, 74 bp, Homo sapiens; identical to SEQ ID NO: 302894
  chr4:2251591-2251665
  hypo

SEQ ID NO: 391029 - DNA, 186 bp, Homo sapiens; identical to SEQ ID NO: 253451
  chr4:2303623-2303809
  hypo

SEQ ID NO: 391030 - DNA, 120 bp, Homo sapiens; identical to SEQ ID NO: 209505
  chr4:2568040-2568160
  hypo

SEQ ID NO: 391031 - DNA, 220 bp, Homo sapiens; identical to SEQ ID NO: 253478
  chr4:2687342-2687562
  hypo

SEQ ID NO: 391032 - DNA, 54 bp, Homo sapiens; identical to SEQ ID NO: 253482
  chr4:2745778-2745832
  hypo

SEQ ID NO: 391033 - DNA, 104 bp, Homo sapiens; identical to SEQ ID NO: 253484
  chr4:2806952-2807056
  hypo

SEQ ID NO: 391034 - DNA, 119 bp, Homo sapiens; identical to SEQ ID NO: 253501
  chr4:3265175-3265294
  hypo

SEQ ID NO: 391035 - DNA, 121 bp, Homo sapiens; identical to SEQ ID NO: 209523
  chr4:3292280-3292401
  hypo

SEQ ID NO: 391036 - DNA, 203 bp, Homo sapiens; identical to SEQ ID NO: 253505
  chr4:3310030-3310233
  hypo

SEQ ID NO: 391037 - DNA, 99 bp, Homo sapiens; identical to SEQ ID NO: 253513
  chr4:3375344-3375443
  hypo

SEQ ID NO: 391038 - DNA, 108 bp, Homo sapiens; identical to SEQ ID NO: 209526
  chr4:3413102-3413210
  hypo

SEQ ID NO: 391039 - DNA, 242 bp, Homo sapiens; identical to SEQ ID NO: 253518
  chr4:3416700-3416942
  hypo

SEQ ID NO: 391040 - DNA, 199 bp, Homo sapiens; identical to SEQ ID NO: 209531
  chr4:3425119-3425318
  hypo

SEQ ID NO: 391041 - DNA, 252 bp, Homo sapiens; identical to SEQ ID NO: 253537
  chr4:3515543-3515795
  hypo

SEQ ID NO: 391042 - DNA, 92 bp, Homo sapiens; identical to SEQ ID NO: 253539
  chr4:3576258-3576350
  hypo

SEQ ID NO: 391043 - DNA, 96 bp, Homo sapiens; identical to SEQ ID NO: 302984
  chr4:3616196-3616292
  hypo

SEQ ID NO: 391044 - DNA, 89 bp, Homo sapiens; identical to SEQ ID NO: 302985
  chr4:3616322-3616411
  hypo

SEQ ID NO: 391045 - DNA, 65 bp, Homo sapiens; identical to SEQ ID NO: 253553
  chr4:4498752-4498817
  hypo

SEQ ID NO: 391046 - DNA, 123 bp, Homo sapiens; identical to SEQ ID NO: 383992
  chr4:4861657-4861780
  hypo

SEQ ID NO: 391047 - DNA, 56 bp, Homo sapiens; identical to SEQ ID NO: 253556
  chr4:4921831-4921887
  hypo

SEQ ID NO: 391048 - DNA, 312 bp, Homo sapiens; identical to SEQ ID NO: 209545
  chr4:5024029-5024341
  hypo

SEQ ID NO: 391049 - DNA, 236 bp, Homo sapiens; identical to SEQ ID NO: 209549
  chr4:5970096-5970332
  hypo

SEQ ID NO: 391050 - DNA, 92 bp, Homo sapiens; identical to SEQ ID NO: 253564
  chr4:6540026-6540118
  hypo

SEQ ID NO: 391051 - DNA, 304 bp, Homo sapiens; identical to SEQ ID NO: 209554
  chr4:6600488-6600792
  hypo

SEQ ID NO: 391052 - DNA, 41 bp, Homo sapiens; identical to SEQ ID NO: 253571
  chr4:6658784-6658825
  hypo

SEQ ID NO: 391053 - DNA, 233 bp, Homo sapiens; identical to SEQ ID NO: 303025
  chr4:6669888-6670121
  hypo

SEQ ID NO: 391054 - DNA, 53 bp, Homo sapiens; identical to SEQ ID NO: 303026
  chr4:6670214-6670267
  hypo

SEQ ID NO: 391055 - DNA, 101 bp, Homo sapiens; identical to SEQ ID NO: 253575
  chr4:6699159-6699260
  hypo

SEQ ID NO: 391056 - DNA, 57 bp, Homo sapiens; identical to SEQ ID NO: 253576
  chr4:6726065-6726122
  hypo

SEQ ID NO: 391057 - DNA, 41 bp, Homo sapiens; identical to SEQ ID NO: 253578
  chr4:6735826-6735867
  hypo

SEQ ID NO: 391058 - DNA, 114 bp, Homo sapiens; identical to SEQ ID NO: 253592
  chr4:6958171-6958285
  hypo

SEQ ID NO: 391059 - DNA, 217 bp, Homo sapiens; identical to SEQ ID NO: 209568
  chr4:7432357-7432574
  hypo

SEQ ID NO: 391060 - DNA, 118 bp, Homo sapiens; identical to SEQ ID NO: 253609
  chr4:7472895-7473013
  hypo

SEQ ID NO: 391061 - DNA, 482 bp, Homo sapiens; identical to SEQ ID NO: 253610
  chr4:7600670-7601152
  hypo

SEQ ID NO: 391062 - DNA, 74 bp, Homo sapiens; identical to SEQ ID NO: 209571
  chr4:7789549-7789623
  hypo

SEQ ID NO: 391063 - DNA, 44 bp, Homo sapiens; identical to SEQ ID NO: 253618
  chr4:7791292-7791336
  hypo

SEQ ID NO: 391064 - DNA, 306 bp, Homo sapiens; identical to SEQ ID NO: 209572
  chr4:7813251-7813557
  hypo

SEQ ID NO: 391065 - DNA, 49 bp, Homo sapiens; identical to SEQ ID NO: 209573
  chr4:7967943-7967992
  hypo

SEQ ID NO: 391066 - DNA, 271 bp, Homo sapiens; identical to SEQ ID NO: 253638
  chr4:8285419-8285690
  hypo

SEQ ID NO: 391067 - DNA, 154 bp, Homo sapiens; identical to SEQ ID NO: 253646
  chr4:8411915-8412069
  hypo

SEQ ID NO: 391068 - DNA, 262 bp, Homo sapiens; identical to SEQ ID NO: 253651
  chr4:8474998-8475260
  hypo

SEQ ID NO: 391069 - DNA, 142 bp, Homo sapiens; identical to SEQ ID NO: 303109
  chr4:8483724-8483866
  hypo

SEQ ID NO: 391070 - DNA, 146 bp, Homo sapiens; identical to SEQ ID NO: 303110
  chr4:8483963-8484109
  hypo

SEQ ID NO: 391071 - DNA, 279 bp, Homo sapiens; identical to SEQ ID NO: 253654
  chr4:8514257-8514536
  hypo

SEQ ID NO: 391072 - DNA, 35 bp, Homo sapiens; identical to SEQ ID NO: 253668
  chr4:9602117-9602152
  hypo

SEQ ID NO: 391073 - DNA, 209 bp, Homo sapiens; identical to SEQ ID NO: 199346
  chr4:9684933-9685142
  hypo

SEQ ID NO: 391074 - DNA, 58 bp, Homo sapiens; identical to SEQ ID NO: 199347
  chr4:10089890-10089948
  hypo

SEQ ID NO: 391075 - DNA, 120 bp, Homo sapiens; identical to SEQ ID NO: 253678
  chr4:10447425-10447545
  hypo

SEQ ID NO: 391076 - DNA, 120 bp, Homo sapiens; identical to SEQ ID NO: 253689
  chr4:17438427-17438547
  hypo

SEQ ID NO: 391077 - DNA, 75 bp, Homo sapiens; identical to SEQ ID NO: 253694
  chr4:22601450-22601525
  hypo

SEQ ID NO: 391078 - DNA, 53 bp, Homo sapiens; identical to SEQ ID NO: 253713
  chr4:27570054-27570107
  hypo

SEQ ID NO: 391079 - DNA, 156 bp, Homo sapiens; identical to SEQ ID NO: 253714
  chr4:35039895-35040051
  hypo

SEQ ID NO: 391080 - DNA, 49 bp, Homo sapiens; identical to SEQ ID NO: 253718
  chr4:38016579-38016628
  hypo

SEQ ID NO: 391081 - DNA, 130 bp, Homo sapiens; identical to SEQ ID NO: 253720
  chr4:38313304-38313434
  hypo

SEQ ID NO: 391082 - DNA, 153 bp, Homo sapiens; identical to SEQ ID NO: 209622
  chr4:39481996-39482149
  hypo

SEQ ID NO: 391083 - DNA, 38 bp, Homo sapiens; identical to SEQ ID NO: 209629
  chr4:39964135-39964173
  hypo

SEQ ID NO: 391084 - DNA, 188 bp, Homo sapiens; identical to SEQ ID NO: 209635
  chr4:41012740-41012928
  hypo

SEQ ID NO: 391085 - DNA, 35 bp, Homo sapiens; identical to SEQ ID NO: 253751
  chr4:41317297-41317332
  hypo

SEQ ID NO: 391086 - DNA, 34 bp, Homo sapiens; identical to SEQ ID NO: 253757
  chr4:44679263-44679297
  hypo

SEQ ID NO: 391087 - DNA, 150 bp, Homo sapiens; identical to SEQ ID NO: 209641
  chr4:48017182-48017332
  hypo

SEQ ID NO: 391088 - DNA, 394 bp, Homo sapiens; identical to SEQ ID NO: 253772
  chr4:53739882-53740276
  hypo

SEQ ID NO: 391089 - DNA, 75 bp, Homo sapiens; identical to SEQ ID NO: 199422
  chr4:55569950-55570025
  hypo

SEQ ID NO: 391090 - DNA, 204 bp, Homo sapiens; identical to SEQ ID NO: 253780
  chr4:56205291-56205495
  hypo

SEQ ID NO: 391091 - DNA, 38 bp, Homo sapiens; identical to SEQ ID NO: 209660
  chr4:57051388-57051426
  hypo

SEQ ID NO: 391092 - DNA, 92 bp, Homo sapiens; identical to SEQ ID NO: 253792
  chr4:57178241-57178333
  hypo

SEQ ID NO: 391093 - DNA, 114 bp, Homo sapiens; identical to SEQ ID NO: 253797
  chr4:57812272-57812386
  hypo

SEQ ID NO: 391094 - DNA, 342 bp, Homo sapiens; identical to SEQ ID NO: 303294
  chr4:57921794-57922136
  hypo

SEQ ID NO: 391095 - DNA, 43 bp, Homo sapiens; identical to SEQ ID NO: 253802
  chr4:66107503-66107546
  hypo

SEQ ID NO: 391096 - DNA, 37 bp, Homo sapiens; identical to SEQ ID NO: 209674
  chr4:71756389-71756426
  hypo

SEQ ID NO: 391097 - DNA, 38 bp, Homo sapiens; identical to SEQ ID NO: 253809
  chr4:71774023-71774061
  hypo

SEQ ID NO: 391098 - DNA, 209 bp, Homo sapiens; identical to SEQ ID NO: 209678
  chr4:75137755-75137964
  hypo

SEQ ID NO: 391099 - DNA, 98 bp, Homo sapiens; identical to SEQ ID NO: 253818
  chr4:75260920-75261018
  hypo

SEQ ID NO: 391100 - DNA, 37 bp, Homo sapiens; identical to SEQ ID NO: 253822
  chr4:76553578-76553615
  hypo

SEQ ID NO: 391101 - DNA, 98 bp, Homo sapiens; identical to SEQ ID NO: 253829
  chr4:77596032-77596130
  hypo

SEQ ID NO: 391102 - DNA, 121 bp, Homo sapiens; identical to SEQ ID NO: 253831
  chr4:77662882-77663003
  hypo

SEQ ID NO: 391103 - DNA, 133 bp, Homo sapiens; identical to SEQ ID NO: 253837
  chr4:79345199-79345332
  hypo

SEQ ID NO: 391104 - DNA, 83 bp, Homo sapiens; identical to SEQ ID NO: 209704
  chr4:87993507-87993590
  hypo

SEQ ID NO: 391105 - DNA, 145 bp, Homo sapiens; identical to SEQ ID NO: 209708
  chr4:88957314-88957459
  hypo

SEQ ID NO: 391106 - DNA, 36 bp, Homo sapiens; identical to SEQ ID NO: 209712
  chr4:91052428-91052464
  hypo

SEQ ID NO: 391107 - DNA, 49 bp, Homo sapiens; identical to SEQ ID NO: 253892
  chr4:99982329-99982378
  hypo

SEQ ID NO: 391108 - DNA, 80 bp, Homo sapiens; identical to SEQ ID NO: 253895
  chr4:100866007-100866087
  hypo

SEQ ID NO: 391109 - DNA, 323 bp, Homo sapiens; identical to SEQ ID NO: 209721
  chr4:103941524-103941847
  hypo

SEQ ID NO: 391110 - DNA, 105 bp, Homo sapiens; identical to SEQ ID NO: 222450
  chr4:106068588-106068693
  hypo

SEQ ID NO: 391111 - DNA, 107 bp, Homo sapiens; identical to SEQ ID NO: 199528
  chr4:106182911-106183018
  hypo

SEQ ID NO: 391112 - DNA, 3101 bp, Homo sapiens; identical to SEQ ID NO: 199531
  chr4:106196198-106199299
  hypo

SEQ ID NO: 391113 - DNA, 40 bp, Homo sapiens; identical to SEQ ID NO: 253917
  chr4:110314768-110314808
  hypo

SEQ ID NO: 391114 - DNA, 36 bp, Homo sapiens; identical to SEQ ID NO: 209752
  chr4:111383532-111383568
  hypo

SEQ ID NO: 391115 - DNA, 101 bp, Homo sapiens; identical to SEQ ID NO: 209759
  chr4:114528566-114528667
  hypo

SEQ ID NO: 391116 - DNA, 38 bp, Homo sapiens; identical to SEQ ID NO: 209761
  chr4:119501591-119501629
  hypo

SEQ ID NO: 391117 - DNA, 211 bp, Homo sapiens; identical to SEQ ID NO: 253935
  chr4:119951552-119951763
  hypo

SEQ ID NO: 391118 - DNA, 209 bp, Homo sapiens; identical to SEQ ID NO: 282491
  chr4:124426861-124427070
  hypo

SEQ ID NO: 391119 - DNA, 79 bp, Homo sapiens; identical to SEQ ID NO: 282492
  chr4:124427137-124427216
  hypo

SEQ ID NO: 391120 - DNA, 137 bp, Homo sapiens; identical to SEQ ID NO: 199594
  chr4:128703235-128703372
  hypo

SEQ ID NO: 391121 - DNA, 102 bp, Homo sapiens; identical to SEQ ID NO: 199600
  chr4:140097254-140097356
  hypo

SEQ ID NO: 391122 - DNA, 286 bp, Homo sapiens; identical to SEQ ID NO: 253966
  chr4:140357386-140357672
  hypo

SEQ ID NO: 391123 - DNA, 180 bp, Homo sapiens; identical to SEQ ID NO: 222492
  chr4:140587058-140587238
  hypo

SEQ ID NO: 391124 - DNA, 90 bp, Homo sapiens; identical to SEQ ID NO: 253971
  chr4:140701211-140701301
  hypo

SEQ ID NO: 391125 - DNA, 37 bp, Homo sapiens; identical to SEQ ID NO: 209787
  chr4:141014855-141014892
  hypo

SEQ ID NO: 391126 - DNA, 469 bp, Homo sapiens; identical to SEQ ID NO: 222495
  chr4:141074043-141074512
  hypo

SEQ ID NO: 391127 - DNA, 38 bp, Homo sapiens; identical to SEQ ID NO: 253986
  chr4:143073506-143073544
  hypo

SEQ ID NO: 391128 - DNA, 117 bp, Homo sapiens; identical to SEQ ID NO: 253989
  chr4:144265400-144265517
  hypo

SEQ ID NO: 391129 - DNA, 124 bp, Homo sapiens; identical to SEQ ID NO: 253990
  chr4:144507008-144507132
  hypo

SEQ ID NO: 391130 - DNA, 41 bp, Homo sapiens; identical to SEQ ID NO: 253991
  chr4:146047172-146047213
  hypo

SEQ ID NO: 391131 - DNA, 63 bp, Homo sapiens; identical to SEQ ID NO: 253993
  chr4:146694922-146694985
  hypo

SEQ ID NO: 391132 - DNA, 33 bp, Homo sapiens; identical to SEQ ID NO: 199629
  chr4:148538935-148538968
  hypo

SEQ ID NO: 391133 - DNA, 33 bp, Homo sapiens; identical to SEQ ID NO: 253998
  chr4:151020124-151020157
  hypo

SEQ ID NO: 391134 - DNA, 75 bp, Homo sapiens; identical to SEQ ID NO: 253999
  chr4:151435900-151435975
  hypo

SEQ ID NO: 391135 - DNA, 62 bp, Homo sapiens; identical to SEQ ID NO: 254008
  chr4:153460846-153460908
  hypo

SEQ ID NO: 391136 - DNA, 233 bp, Homo sapiens; identical to SEQ ID NO: 254017
  chr4:153985892-153986125
  hypo

SEQ ID NO: 391137 - DNA, 103 bp, Homo sapiens; identical to SEQ ID NO: 209829
  chr4:154469359-154469462
  hypo

SEQ ID NO: 391138 - DNA, 143 bp, Homo sapiens; identical to SEQ ID NO: 209830
  chr4:154520339-154520482
  hypo

SEQ ID NO: 391139 - DNA, 45 bp, Homo sapiens; identical to SEQ ID NO: 254037
  chr4:159680339-159680384
  hypo

SEQ ID NO: 391140 - DNA, 41 bp, Homo sapiens; identical to SEQ ID NO: 254038
  chr4:159749469-159749510
  hypo

SEQ ID NO: 391141 - DNA, 161 bp, Homo sapiens; identical to SEQ ID NO: 254046
  chr4:166035044-166035205
  hypo

SEQ ID NO: 391142 - DNA, 180 bp, Homo sapiens; identical to SEQ ID NO: 254047
  chr4:166337214-166337394
  hypo

SEQ ID NO: 391143 - DNA, 33 bp, Homo sapiens; identical to SEQ ID NO: 209839
  chr4:169358978-169359011
  hypo

SEQ ID NO: 391144 - DNA, 33 bp, Homo sapiens; identical to SEQ ID NO: 209841
  chr4:169562060-169562093
  hypo

SEQ ID NO: 391145 - DNA, 205 bp, Homo sapiens; identical to SEQ ID NO: 254056
  chr4:169667598-169667803
  hypo

SEQ ID NO: 391146 - DNA, 124 bp, Homo sapiens; identical to SEQ ID NO: 254058
  chr4:169751969-169752093
  hypo

SEQ ID NO: 391147 - DNA, 209 bp, Homo sapiens; identical to SEQ ID NO: 254062
  chr4:170037586-170037795
  hypo

SEQ ID NO: 391148 - DNA, 215 bp, Homo sapiens; identical to SEQ ID NO: 209848
  chr4:170652116-170652331
  hypo

SEQ ID NO: 391149 - DNA, 41 bp, Homo sapiens; identical to SEQ ID NO: 254072
  chr4:170845921-170845962
  hypo

SEQ ID NO: 391150 - DNA, 52 bp, Homo sapiens; identical to SEQ ID NO: 209852
  chr4:175940748-175940800
  hypo

SEQ ID NO: 391151 - DNA, 274 bp, Homo sapiens; identical to SEQ ID NO: 254082
  chr4:183768991-183769265
  hypo

SEQ ID NO: 391152 - DNA, 32 bp, Homo sapiens; identical to SEQ ID NO: 209858
  chr4:184051481-184051513
  hypo

SEQ ID NO: 391153 - DNA, 321 bp, Homo sapiens; identical to SEQ ID NO: 282688
  chr4:184328290-184328611
  hypo

SEQ ID NO: 391154 - DNA, 223 bp, Homo sapiens; identical to SEQ ID NO: 254096
  chr4:184343147-184343370
  hypo

SEQ ID NO: 391155 - DNA, 124 bp, Homo sapiens; identical to SEQ ID NO: 209865
  chr4:185239992-185240116
  hypo

SEQ ID NO: 391156 - DNA, 280 bp, Homo sapiens; identical to SEQ ID NO: 209869
  chr4:185353277-185353557
  hypo

SEQ ID NO: 391157 - DNA, 47 bp, Homo sapiens; identical to SEQ ID NO: 209872
  chr4:185480839-185480886
  hypo

SEQ ID NO: 391158 - DNA, 196 bp, Homo sapiens; identical to SEQ ID NO: 254122
  chr4:185491195-185491391
  hypo

SEQ ID NO: 391159 - DNA, 78 bp, Homo sapiens; identical to SEQ ID NO: 254131
  chr4:186066016-186066094
  hypo

SEQ ID NO: 391160 - DNA, 95 bp, Homo sapiens; identical to SEQ ID NO: 209878
  chr4:186319410-186319505
  hypo

SEQ ID NO: 391161 - DNA, 36 bp, Homo sapiens; identical to SEQ ID NO: 254145
  chr4:187509900-187509936
  hypo

SEQ ID NO: 391162 - DNA, 149 bp, Homo sapiens; identical to SEQ ID NO: 254160
  chr4:190509469-190509618
  hypo

SEQ ID NO: 391163 - DNA, 115 bp, Homo sapiens; identical to SEQ ID NO: 254172
  chr5:230941-231056
  hypo

SEQ ID NO: 391164 - DNA, 97 bp, Homo sapiens; identical to SEQ ID NO: 254178
  chr5:286140-286237
  hypo

SEQ ID NO: 391165 - DNA, 285 bp, Homo sapiens; identical to SEQ ID NO: 199726
  chr5:374579-374864
  hypo

SEQ ID NO: 391166 - DNA, 319 bp, Homo sapiens; identical to SEQ ID NO: 254228
  chr5:628859-629178
  hypo

SEQ ID NO: 391167 - DNA, 89 bp, Homo sapiens; identical to SEQ ID NO: 209924
  chr5:633969-634058
  hypo

SEQ ID NO: 391168 - DNA, 120 bp, Homo sapiens; identical to SEQ ID NO: 254243
  chr5:855237-855357
  hypo

SEQ ID NO: 391169 - DNA, 155 bp, Homo sapiens; identical to SEQ ID NO: 254264
  chr5:993134-993289
  hypo

SEQ ID NO: 391170 - DNA, 403 bp, Homo sapiens; identical to SEQ ID NO: 254278
  chr5:1036739-1037142
  hypo

SEQ ID NO: 391171 - DNA, 78 bp, Homo sapiens; identical to SEQ ID NO: 209955
  chr5:1046857-1046935
  hypo

SEQ ID NO: 391172 - DNA, 32 bp, Homo sapiens; identical to SEQ ID NO: 385522
  chr5:1056006-1056038
  hypo

SEQ ID NO: 391173 - DNA, 40 bp, Homo sapiens
  chr5:1056068-1056108
  hypo
caccaggcactgcctgcccacaaggaaaacatggcccagg

SEQ ID NO: 391174 - DNA, 182 bp, Homo sapiens; identical to SEQ ID NO: 209969
  chr5:1060413-1060595
  hypo

SEQ ID NO: 391175 - DNA, 46 bp, Homo sapiens; identical to SEQ ID NO: 385524
  chr5:1060818-1060864
  hypo

SEQ ID NO: 391176 - DNA, 370 bp, Homo sapiens; identical to SEQ ID NO: 388174
  chr5:1064042-1064412
  hypo

SEQ ID NO: 391177 - DNA, 218 bp, Homo sapiens; identical to SEQ ID NO: 209977
  chr5:1068045-1068263
  hypo

SEQ ID NO: 391178 - DNA, 166 bp, Homo sapiens; identical to SEQ ID NO: 209988
  chr5:1091065-1091231
  hypo

SEQ ID NO: 391179 - DNA, 813 bp, Homo sapiens; identical to SEQ ID NO: 254334
  chr5:1128888-1129701
  hypo

SEQ ID NO: 391180 - DNA, 322 bp, Homo sapiens; identical to SEQ ID NO: 254337
  chr5:1154638-1154960
  hypo

SEQ ID NO: 391181 - DNA, 86 bp, Homo sapiens; identical to SEQ ID NO: 210001
  chr5:1177291-1177377
  hypo

SEQ ID NO: 391182 - DNA, 287 bp, Homo sapiens; identical to SEQ ID NO: 210002
  chr5:1215723-1216010
  hypo

SEQ ID NO: 391183 - DNA, 266 bp, Homo sapiens; identical to SEQ ID NO: 303931
  chr5:1218542-1218808
  hypo

SEQ ID NO: 391184 - DNA, 462 bp, Homo sapiens; identical to SEQ ID NO: 303932
  chr5:1218838-1219300
  hypo

SEQ ID NO: 391185 - DNA, 399 bp, Homo sapiens; identical to SEQ ID NO: 254361
  chr5:1269045-1269444
  hypo

SEQ ID NO: 391186 - DNA, 105 bp, Homo sapiens; identical to SEQ ID NO: 222563
  chr5:1294071-1294176
  hypo

SEQ ID NO: 391187 - DNA, 242 bp, Homo sapiens; identical to SEQ ID NO: 254386
  chr5:1463474-1463716
  hypo

SEQ ID NO: 391188 - DNA, 95 bp, Homo sapiens; identical to SEQ ID NO: 210016
  chr5:1490331-1490426
  hypo

SEQ ID NO: 391189 - DNA, 114 bp, Homo sapiens; identical to SEQ ID NO: 254397
  chr5:1550654-1550768
  hypo

SEQ ID NO: 391190 - DNA, 243 bp, Homo sapiens; identical to SEQ ID NO: 254417
  chr5:1809726-1809969
  hypo

SEQ ID NO: 391191 - DNA, 116 bp, Homo sapiens; identical to SEQ ID NO: 254418
  chr5:1813758-1813874
  hypo

SEQ ID NO: 391192 - DNA, 164 bp, Homo sapiens; identical to SEQ ID NO: 254419
  chr5:1814740-1814904
  hypo

SEQ ID NO: 391193 - DNA, 154 bp, Homo sapiens; identical to SEQ ID NO: 254430
  chr5:1923520-1923674
  hypo

SEQ ID NO: 391194 - DNA, 328 bp, Homo sapiens; identical to SEQ ID NO: 254437
  chr5:2052998-2053326
  hypo

SEQ ID NO: 391195 - DNA, 77 bp, Homo sapiens; identical to SEQ ID NO: 304034
  chr5:2369537-2369614
  hypo

SEQ ID NO: 391196 - DNA, 112 bp, Homo sapiens; identical to SEQ ID NO: 304035
  chr5:2369682-2369794
  hypo

SEQ ID NO: 391197 - DNA, 48 bp, Homo sapiens; identical to SEQ ID NO: 254455
  chr5:2542212-2542260
  hypo

SEQ ID NO: 391198 - DNA, 68 bp, Homo sapiens; identical to SEQ ID NO: 254458
  chr5:2561183-2561251
  hypo

SEQ ID NO: 391199 - DNA, 113 bp, Homo sapiens; identical to SEQ ID NO: 254460
  chr5:2579041-2579154
  hypo

SEQ ID NO: 391200 - DNA, 118 bp, Homo sapiens; identical to SEQ ID NO: 254461
  chr5:2634150-2634268
  hypo

SEQ ID NO: 391201 - DNA, 200 bp, Homo sapiens; identical to SEQ ID NO: 254464
  chr5:2708350-2708550
  hypo

SEQ ID NO: 391202 - DNA, 109 bp, Homo sapiens; identical to SEQ ID NO: 254466
  chr5:2808978-2809087
  hypo

SEQ ID NO: 391203 - DNA, 38 bp, Homo sapiens; identical to SEQ ID NO: 254476
  chr5:3028123-3028161
  hypo

SEQ ID NO: 391204 - DNA, 45 bp, Homo sapiens; identical to SEQ ID NO: 254478
  chr5:3029916-3029961
  hypo

SEQ ID NO: 391205 - DNA, 82 bp, Homo sapiens; identical to SEQ ID NO: 254481
  chr5:3042022-3042104
  hypo

SEQ ID NO: 391206 - DNA, 190 bp, Homo sapiens; identical to SEQ ID NO: 254486
  chr5:3143537-3143727
  hypo

SEQ ID NO: 391207 - DNA, 55 bp, Homo sapiens; identical to SEQ ID NO: 254490
  chr5:3203778-3203833
  hypo

SEQ ID NO: 391208 - DNA, 208 bp, Homo sapiens; identical to SEQ ID NO: 282771
  chr5:3590903-3591111
  hypo

SEQ ID NO: 391209 - DNA, 94 bp, Homo sapiens; identical to SEQ ID NO: 199747
  chr5:3591458-3591552
  hypo

SEQ ID NO: 391210 - DNA, 237 bp, Homo sapiens; identical to SEQ ID NO: 254514
  chr5:4886500-4886737
  hypo

SEQ ID NO: 391211 - DNA, 71 bp, Homo sapiens; identical to SEQ ID NO: 254516
  chr5:5652238-5652309
  hypo

SEQ ID NO: 391212 - DNA, 76 bp, Homo sapiens; identical to SEQ ID NO: 254524
  chr5:6760002-6760078
  hypo

SEQ ID NO: 391213 - DNA, 34 bp, Homo sapiens; identical to SEQ ID NO: 254527
  chr5:6846845-6846879
  hypo

SEQ ID NO: 391214 - DNA, 42 bp, Homo sapiens; identical to SEQ ID NO: 254529
  chr5:6906771-6906813
  hypo

SEQ ID NO: 391215 - DNA, 42 bp, Homo sapiens; identical to SEQ ID NO: 254539
  chr5:9044652-9044694
  hypo

SEQ ID NO: 391216 - DNA, 166 bp, Homo sapiens; identical to SEQ ID NO: 254541
  chr5:9054171-9054337
  hypo

SEQ ID NO: 391217 - DNA, 41 bp, Homo sapiens; identical to SEQ ID NO: 254548
  chr5:9330247-9330288
  hypo

SEQ ID NO: 391218 - DNA, 42 bp, Homo sapiens; identical to SEQ ID NO: 254551
  chr5:9498629-9498671
  hypo

SEQ ID NO: 391219 - DNA, 144 bp, Homo sapiens; identical to SEQ ID NO: 254553
  chr5:9725136-9725280
  hypo

SEQ ID NO: 391220 - DNA, 498 bp, Homo sapiens; identical to SEQ ID NO: 254562
  chr5:10453378-10453876
  hypo

SEQ ID NO: 391221 - DNA, 100 bp, Homo sapiens; identical to SEQ ID NO: 210070
  chr5:10936742-10936842
  hypo

SEQ ID NO: 391222 - DNA, 191 bp, Homo sapiens; identical to SEQ ID NO: 210077
  chr5:14319946-14320137
  hypo

SEQ ID NO: 391223 - DNA, 175 bp, Homo sapiens; identical to SEQ ID NO: 210083
  chr5:14378048-14378223
  hypo

SEQ ID NO: 391224 - DNA, 263 bp, Homo sapiens; identical to SEQ ID NO: 254595
  chr5:14390712-14390975
  hypo

SEQ ID NO: 391225 - DNA, 136 bp, Homo sapiens; identical to SEQ ID NO: 254604
  chr5:14441380-14441516
  hypo

SEQ ID NO: 391226 - DNA, 160 bp, Homo sapiens; identical to SEQ ID NO: 210089
  chr5:14454341-14454501
  hypo

SEQ ID NO: 391227 - DNA, 175 bp, Homo sapiens; identical to SEQ ID NO: 210096
  chr5:14493321-14493496
  hypo

SEQ ID NO: 391228 - DNA, 321 bp, Homo sapiens; identical to SEQ ID NO: 254623
  chr5:14725552-14725873
  hypo

SEQ ID NO: 391229 - DNA, 222 bp, Homo sapiens; identical to SEQ ID NO: 254625
  chr5:14734656-14734878
  hypo

SEQ ID NO: 391230 - DNA, 132 bp, Homo sapiens; identical to SEQ ID NO: 254630
  chr5:14780932-14781064
  hypo

SEQ ID NO: 391231 - DNA, 85 bp, Homo sapiens; identical to SEQ ID NO: 254631
  chr5:14789325-14789410
  hypo

SEQ ID NO: 391232 - DNA, 212 bp, Homo sapiens; identical to SEQ ID NO: 254633
  chr5:14846242-14846454
  hypo

SEQ ID NO: 391233 - DNA, 110 bp, Homo sapiens; identical to SEQ ID NO: 210101
  chr5:14849840-14849950
  hypo

SEQ ID NO: 391234 - DNA, 872 bp, Homo sapiens; identical to SEQ ID NO: 254638
  chr5:15936621-15937493
  hypo

SEQ ID NO: 391235 - DNA, 204 bp, Homo sapiens; identical to SEQ ID NO: 254643
  chr5:16668250-16668454
  hypo

SEQ ID NO: 391236 - DNA, 34 bp, Homo sapiens; identical to SEQ ID NO: 254647
  chr5:16680075-16680109
  hypo

SEQ ID NO: 391237 - DNA, 35 bp, Homo sapiens; identical to SEQ ID NO: 254666
  chr5:17159691-17159726
  hypo

SEQ ID NO: 391238 - DNA, 35 bp, Homo sapiens; identical to SEQ ID NO: 210118
  chr5:17161190-17161225
  hypo

SEQ ID NO: 391239 - DNA, 183 bp, Homo sapiens; identical to SEQ ID NO: 254671
  chr5:17491366-17491549
  hypo

SEQ ID NO: 391240 - DNA, 76 bp, Homo sapiens; identical to SEQ ID NO: 199779
  chr5:17987028-17987104
  hypo

SEQ ID NO: 391241 - DNA, 36 bp, Homo sapiens; identical to SEQ ID NO: 254681
  chr5:18380066-18380102
  hypo

SEQ ID NO: 391242 - DNA, 33 bp, Homo sapiens; identical to SEQ ID NO: 210126
  chr5:27121727-27121760
  hypo

SEQ ID NO: 391243 - DNA, 33 bp, Homo sapiens; identical to SEQ ID NO: 210127
  chr5:27121940-27121973
  hypo

SEQ ID NO: 391244 - DNA, 46 bp, Homo sapiens; identical to SEQ ID NO: 254697
  chr5:31599717-31599763
  hypo

SEQ ID NO: 391245 - DNA, 41 bp, Homo sapiens; identical to SEQ ID NO: 254704
  chr5:31797711-31797752
  hypo

SEQ ID NO: 391246 - DNA, 57 bp, Homo sapiens; identical to SEQ ID NO: 210133
  chr5:31908394-31908451
  hypo

SEQ ID NO: 391247 - DNA, 37 bp, Homo sapiens; identical to SEQ ID NO: 254718
  chr5:32755245-32755282
  hypo

SEQ ID NO: 391248 - DNA, 38 bp, Homo sapiens; identical to SEQ ID NO: 210143
  chr5:33311279-33311317
  hypo

SEQ ID NO: 391249 - DNA, 119 bp, Homo sapiens; identical to SEQ ID NO: 254732
  chr5:33530561-33530680
  hypo

SEQ ID NO: 391250 - DNA, 33 bp, Homo sapiens; identical to SEQ ID NO: 254742
  chr5:34736210-34736243
  hypo

SEQ ID NO: 391251 - DNA, 79 bp, Homo sapiens; identical to SEQ ID NO: 254747
  chr5:37042504-37042583
  hypo

SEQ ID NO: 391252 - DNA, 106 bp, Homo sapiens; identical to SEQ ID NO: 254748
  chr5:37052539-37052645
  hypo

SEQ ID NO: 391253 - DNA, 36 bp, Homo sapiens; identical to SEQ ID NO: 254750
  chr5:37082175-37082211
  hypo

SEQ ID NO: 391254 - DNA, 37 bp, Homo sapiens; identical to SEQ ID NO: 254754
  chr5:37338790-37338827
  hypo

SEQ ID NO: 391255 - DNA, 223 bp, Homo sapiens; identical to SEQ ID NO: 210153
  chr5:39808822-39809045
  hypo

SEQ ID NO: 391256 - DNA, 81 bp, Homo sapiens; identical to SEQ ID NO: 254777
  chr5:42140523-42140604
  hypo

SEQ ID NO: 391257 - DNA, 34 bp, Homo sapiens; identical to SEQ ID NO: 254783
  chr5:42760113-42760147
  hypo

SEQ ID NO: 391258 - DNA, 89 bp, Homo sapiens; identical to SEQ ID NO: 254791
  chr5:43387666-43387755
  hypo

SEQ ID NO: 391259 - DNA, 34 bp, Homo sapiens; identical to SEQ ID NO: 254792
  chr5:43850518-43850552
  hypo

SEQ ID NO: 391260 - DNA, 44 bp, Homo sapiens; identical to SEQ ID NO: 210167
  chr5:45225672-45225716
  hypo

SEQ ID NO: 391261 - DNA, 40 bp, Homo sapiens; identical to SEQ ID NO: 254810
  chr5:54952935-54952975
  hypo

SEQ ID NO: 391262 - DNA, 95 bp, Homo sapiens; identical to SEQ ID NO: 304429
  chr5:55309217-55309312
  hypo

SEQ ID NO: 391263 - DNA, 94 bp, Homo sapiens; identical to SEQ ID NO: 254816
  chr5:55379300-55379394
  hypo

SEQ ID NO: 391264 - DNA, 480 bp, Homo sapiens; identical to SEQ ID NO: 222613
  chr5:57755480-57755960
  hypo

SEQ ID NO: 391265 - DNA, 45 bp, Homo sapiens; identical to SEQ ID NO: 210181
  chr5:60676638-60676683
  hypo

SEQ ID NO: 391266 - DNA, 42 bp, Homo sapiens; identical to SEQ ID NO: 254832
  chr5:62080933-62080975
  hypo

SEQ ID NO: 391267 - DNA, 359 bp, Homo sapiens; identical to SEQ ID NO: 388208
  chr5:63255343-63255702
  hypo

SEQ ID NO: 391268 - DNA, 205 bp, Homo sapiens; identical to SEQ ID NO: 210188
  chr5:65988337-65988542
  hypo

SEQ ID NO: 391269 - DNA, 186 bp, Homo sapiens; identical to SEQ ID NO: 210189
  chr5:66441263-66441449
  hypo

SEQ ID NO: 391270 - DNA, 119 bp, Homo sapiens; identical to SEQ ID NO: 254843
  chr5:66448539-66448658
  hypo

SEQ ID NO: 391271 - DNA, 34 bp, Homo sapiens; identical to SEQ ID NO: 210190
  chr5:66911431-66911465
  hypo

SEQ ID NO: 391272 - DNA, 252 bp, Homo sapiens; identical to SEQ ID NO: 254877
  chr5:72292520-72292772
  hypo

SEQ ID NO: 391273 - DNA, 31 bp, Homo sapiens; identical to SEQ ID NO: 254889
  chr5:73687766-73687797
  hypo

SEQ ID NO: 391274 - DNA, 123 bp, Homo sapiens; identical to SEQ ID NO: 222625
  chr5:73936774-73936897
  hypo

SEQ ID NO: 391275 - DNA, 103 bp, Homo sapiens; identical to SEQ ID NO: 199897
  chr5:74162616-74162719
  hypo

SEQ ID NO: 391276 - DNA, 39 bp, Homo sapiens; identical to SEQ ID NO: 254892
  chr5:74628696-74628735
  hypo

SEQ ID NO: 391277 - DNA, 37 bp, Homo sapiens; identical to SEQ ID NO: 210213
  chr5:74652649-74652686
  hypo

SEQ ID NO: 391278 - DNA, 118 bp, Homo sapiens; identical to SEQ ID NO: 254903
  chr5:77288993-77289111
  hypo

SEQ ID NO: 391279 - DNA, 85 bp, Homo sapiens; identical to SEQ ID NO: 254912
  chr5:77912255-77912340
  hypo

SEQ ID NO: 391280 - DNA, 36 bp, Homo sapiens; identical to SEQ ID NO: 210229
  chr5:78882208-78882244
  hypo

SEQ ID NO: 391281 - DNA, 214 bp, Homo sapiens; identical to SEQ ID NO: 254925
  chr5:78986242-78986456
  hypo

SEQ ID NO: 391282 - DNA, 86 bp, Homo sapiens; identical to SEQ ID NO: 254928
  chr5:79438045-79438131
  hypo

SEQ ID NO: 391283 - DNA, 163 bp, Homo sapiens; identical to SEQ ID NO: 210236
  chr5:79986401-79986564
  hypo

SEQ ID NO: 391284 - DNA, 183 bp, Homo sapiens; identical to SEQ ID NO: 210239
  chr5:80652824-80653007
  hypo

SEQ ID NO: 391285 - DNA, 34 bp, Homo sapiens; identical to SEQ ID NO: 254943
  chr5:80728272-80728306
  hypo

SEQ ID NO: 391286 - DNA, 152 bp, Homo sapiens; identical to SEQ ID NO: 254944
  chr5:81058593-81058745
  hypo

SEQ ID NO: 391287 - DNA, 75 bp, Homo sapiens; identical to SEQ ID NO: 254947
  chr5:82808025-82808100
  hypo

SEQ ID NO: 391288 - DNA, 38 bp, Homo sapiens; identical to SEQ ID NO: 254953
  chr5:88161980-88162018
  hypo

SEQ ID NO: 391289 - DNA, 34 bp, Homo sapiens; identical to SEQ ID NO: 210242
  chr5:90257315-90257349
  hypo

SEQ ID NO: 391290 - DNA, 35 bp, Homo sapiens; identical to SEQ ID NO: 254958
  chr5:93032774-93032809
  hypo

SEQ ID NO: 391291 - DNA, 100 bp, Homo sapiens; identical to SEQ ID NO: 254959
  chr5:93076896-93076996
  hypo

SEQ ID NO: 391292 - DNA, 94 bp, Homo sapiens; identical to SEQ ID NO: 210246
  chr5:94981773-94981867
  hypo

SEQ ID NO: 391293 - DNA, 55 bp, Homo sapiens; identical to SEQ ID NO: 254976
  chr5:96397786-96397841
  hypo

SEQ ID NO: 391294 - DNA, 82 bp, Homo sapiens; identical to SEQ ID NO: 254978
  chr5:97912104-97912186
  hypo

SEQ ID NO: 391295 - DNA, 263 bp, Homo sapiens; identical to SEQ ID NO: 222648
  chr5:98109927-98110190
  hypo

SEQ ID NO: 391296 - DNA, 102 bp, Homo sapiens; identical to SEQ ID NO: 199971
  chr5:107007963-107008065
  hypo

SEQ ID NO: 391297 - DNA, 215 bp, Homo sapiens; identical to SEQ ID NO: 254985
  chr5:108586386-108586601
  hypo

SEQ ID NO: 391298 - DNA, 42 bp, Homo sapiens; identical to SEQ ID NO: 254989
  chr5:109040408-109040450
  hypo

SEQ ID NO: 391299 - DNA, 289 bp, Homo sapiens; identical to SEQ ID NO: 210267
  chr5:109162076-109162365
  hypo

SEQ ID NO: 391300 - DNA, 110 bp, Homo sapiens; identical to SEQ ID NO: 388238
  chr5:110848376-110848486
  hypo

SEQ ID NO: 391301 - DNA, 123 bp, Homo sapiens; identical to SEQ ID NO: 254992
  chr5:111675709-111675832
  hypo

SEQ ID NO: 391302 - DNA, 163 bp, Homo sapiens; identical to SEQ ID NO: 222664
  chr5:114938164-114938327
  hypo

SEQ ID NO: 391303 - DNA, 42 bp, Homo sapiens
  chr5:115783684-115783726
  hypo
gtgtgcagtatgtaaatggactccatttgtagccttctttgt

SEQ ID NO: 391304 - DNA, 41 bp, Homo sapiens; identical to SEQ ID NO: 255002
  chr5:119517817-119517858
  hypo

SEQ ID NO: 391305 - DNA, 131 bp, Homo sapiens; identical to SEQ ID NO: 255003
  chr5:121187431-121187562
  hypo

SEQ ID NO: 391306 - DNA, 41 bp, Homo sapiens; identical to SEQ ID NO: 255007
  chr5:122150760-122150801
  hypo

SEQ ID NO: 391307 - DNA, 38 bp, Homo sapiens; identical to SEQ ID NO: 255010
  chr5:122189087-122189125
  hypo

SEQ ID NO: 391308 - DNA, 152 bp, Homo sapiens; identical to SEQ ID NO: 210285
  chr5:126193333-126193485
  hypo

SEQ ID NO: 391309 - DNA, 42 bp, Homo sapiens; identical to SEQ ID NO: 255020
  chr5:127808517-127808559
  hypo

SEQ ID NO: 391310 - DNA, 52 bp, Homo sapiens; identical to SEQ ID NO: 255035
  chr5:131629083-131629135
  hypo

SEQ ID NO: 391311 - DNA, 136 bp, Homo sapiens; identical to SEQ ID NO: 255036
  chr5:131701219-131701355
  hypo

SEQ ID NO: 391312 - DNA, 131 bp, Homo sapiens; identical to SEQ ID NO: 210301
  chr5:131725264-131725395
  hypo

SEQ ID NO: 391313 - DNA, 56 bp, Homo sapiens; identical to SEQ ID NO: 304706
  chr5:131787118-131787174
  hypo

SEQ ID NO: 391314 - DNA, 91 bp, Homo sapiens; identical to SEQ ID NO: 304707
  chr5:131787204-131787295
  hypo

SEQ ID NO: 391315 - DNA, 42 bp, Homo sapiens; identical to SEQ ID NO: 255055
  chr5:133280965-133281007
  hypo

SEQ ID NO: 391316 - DNA, 207 bp, Homo sapiens; identical to SEQ ID NO: 210315
  chr5:133465710-133465917
  hypo

SEQ ID NO: 391317 - DNA, 379 bp, Homo sapiens; identical to SEQ ID NO: 255065
  chr5:133703366-133703745
  hypo

SEQ ID NO: 391318 - DNA, 32 bp, Homo sapiens; identical to SEQ ID NO: 255066
  chr5:133730848-133730880
  hypo

SEQ ID NO: 391319 - DNA, 240 bp, Homo sapiens; identical to SEQ ID NO: 255067
  chr5:133819200-133819440
  hypo

SEQ ID NO: 391320 - DNA, 266 bp, Homo sapiens; identical to SEQ ID NO: 255069
  chr5:133845348-133845614
  hypo

SEQ ID NO: 391321 - DNA, 61 bp, Homo sapiens; identical to SEQ ID NO: 255070
  chr5:133887785-133887846
  hypo

SEQ ID NO: 391322 - DNA, 318 bp, Homo sapiens; identical to SEQ ID NO: 210319
  chr5:133907414-133907732
  hypo

SEQ ID NO: 391323 - DNA, 135 bp, Homo sapiens; identical to SEQ ID NO: 255072
  chr5:133914459-133914594
  hypo

SEQ ID NO: 391324 - DNA, 91 bp, Homo sapiens; identical to SEQ ID NO: 255074
  chr5:134202026-134202117
  hypo

SEQ ID NO: 391325 - DNA, 81 bp, Homo sapiens; identical to SEQ ID NO: 255082
  chr5:134411890-134411971
  hypo

SEQ ID NO: 391326 - DNA, 223 bp, Homo sapiens; identical to SEQ ID NO: 210324
  chr5:134436703-134436926
  hypo

SEQ ID NO: 391327 - DNA, 216 bp, Homo sapiens; identical to SEQ ID NO: 222687
  chr5:134463608-134463824
  hypo

SEQ ID NO: 391328 - DNA, 154 bp, Homo sapiens; identical to SEQ ID NO: 210327
  chr5:134513710-134513864
  hypo

SEQ ID NO: 391329 - DNA, 38 bp, Homo sapiens; identical to SEQ ID NO: 210331
  chr5:134673488-134673526
  hypo

SEQ ID NO: 391330 - DNA, 237 bp, Homo sapiens; identical to SEQ ID NO: 255096
  chr5:135120902-135121139
  hypo

SEQ ID NO: 391331 - DNA, 466 bp, Homo sapiens; identical to SEQ ID NO: 210339
  chr5:137803075-137803541
  hypo

SEQ ID NO: 391332 - DNA, 42 bp, Homo sapiens; identical to SEQ ID NO: 255109
  chr5:137824665-137824707
  hypo

SEQ ID NO: 391333 - DNA, 1077 bp, Homo sapiens; identical to SEQ ID NO: 388254
  chr5:139016945-139018022
  hypo

SEQ ID NO: 391334 - DNA, 64 bp, Homo sapiens; identical to SEQ ID NO: 200058
  chr5:139039951-139040015
  hypo

SEQ ID NO: 391335 - DNA, 164 bp, Homo sapiens; identical to SEQ ID NO: 255138
  chr5:139633303-139633467
  hypo

SEQ ID NO: 391336 - DNA, 63 bp, Homo sapiens; identical to SEQ ID NO: 222706
  chr5:139725675-139725738
  hypo

SEQ ID NO: 391337 - DNA, 134 bp, Homo sapiens; identical to SEQ ID NO: 388260
  chr5:141030966-141031100
  hypo

SEQ ID NO: 391338 - DNA, 80 bp, Homo sapiens; identical to SEQ ID NO: 200078
  chr5:141031150-141031230
  hypo

SEQ ID NO: 391339 - DNA, 93 bp, Homo sapiens; identical to SEQ ID NO: 210367
  chr5:141052407-141052500
  hypo

SEQ ID NO: 391340 - DNA, 881 bp, Homo sapiens; identical to SEQ ID NO: 283402
  chr5:141257149-141258030
  hypo

SEQ ID NO: 391341 - DNA, 244 bp, Homo sapiens; identical to SEQ ID NO: 255156
  chr5:141663282-141663526
  hypo

SEQ ID NO: 391342 - DNA, 39 bp, Homo sapiens; identical to SEQ ID NO: 255169
  chr5:143182536-143182575
  hypo

SEQ ID NO: 391343 - DNA, 158 bp, Homo sapiens; identical to SEQ ID NO: 210380
  chr5:145379611-145379769
  hypo

SEQ ID NO: 391344 - DNA, 202 bp, Homo sapiens; identical to SEQ ID NO: 231499
  chr5:145718089-145718291
  hypo

SEQ ID NO: 391345 - DNA, 346 bp, Homo sapiens; identical to SEQ ID NO: 255175
  chr5:147040615-147040961
  hypo

SEQ ID NO: 391346 - DNA, 49 bp, Homo sapiens; identical to SEQ ID NO: 255187
  chr5:148754033-148754082
  hypo

SEQ ID NO: 391347 - DNA, 61 bp, Homo sapiens; identical to SEQ ID NO: 210389
  chr5:148980120-148980181
  hypo

SEQ ID NO: 391348 - DNA, 43 bp, Homo sapiens; identical to SEQ ID NO: 210393
  chr5:149006876-149006919
  hypo

SEQ ID NO: 391349 - DNA, 42 bp, Homo sapiens; identical to SEQ ID NO: 255207
  chr5:149405660-149405702
  hypo

SEQ ID NO: 391350 - DNA, 185 bp, Homo sapiens; identical to SEQ ID NO: 255209
  chr5:149497194-149497379
  hypo

SEQ ID NO: 391351 - DNA, 133 bp, Homo sapiens; identical to SEQ ID NO: 255215
  chr5:149637115-149637248
  hypo

SEQ ID NO: 391352 - DNA, 77 bp, Homo sapiens; identical to SEQ ID NO: 255220
  chr5:150014717-150014794
  hypo

SEQ ID NO: 391353 - DNA, 479 bp, Homo sapiens; identical to SEQ ID NO: 255228
  chr5:150945538-150946017
  hypo

SEQ ID NO: 391354 - DNA, 43 bp, Homo sapiens; identical to SEQ ID NO: 255239
  chr5:155438698-155438741
  hypo

SEQ ID NO: 391355 - DNA, 48 bp, Homo sapiens; identical to SEQ ID NO: 210422
  chr5:167671586-167671634
  hypo

SEQ ID NO: 391356 - DNA, 236 bp, Homo sapiens; identical to SEQ ID NO: 222740
  chr5:167718952-167719188
  hypo

SEQ ID NO: 391357 - DNA, 305 bp, Homo sapiens; identical to SEQ ID NO: 210434
  chr5:168199738-168200043
  hypo

SEQ ID NO: 391358 - DNA, 185 bp, Homo sapiens; identical to SEQ ID NO: 210441
  chr5:170883647-170883832
  hypo

SEQ ID NO: 391359 - DNA, 206 bp, Homo sapiens; identical to SEQ ID NO: 255295
  chr5:170972877-170973083
  hypo

SEQ ID NO: 391360 - DNA, 461 bp, Homo sapiens; identical to SEQ ID NO: 255298
  chr5:171351590-171352051
  hypo

SEQ ID NO: 391361 - DNA, 72 bp, Homo sapiens; identical to SEQ ID NO: 210447
  chr5:171769329-171769401
  hypo

SEQ ID NO: 391362 - DNA, 92 bp, Homo sapiens; identical to SEQ ID NO: 210448
  chr5:171777275-171777367
  hypo

SEQ ID NO: 391363 - DNA, 110 bp, Homo sapiens; identical to SEQ ID NO: 70538
  chr5:171808699-171808809
  hypo

SEQ ID NO: 391364 - DNA, 187 bp, Homo sapiens; identical to SEQ ID NO: 255317
  chr5:171867143-171867330
  hypo

SEQ ID NO: 391365 - DNA, 56 bp, Homo sapiens; identical to SEQ ID NO: 255318
  chr5:171890094-171890150
  hypo

SEQ ID NO: 391366 - DNA, 32 bp, Homo sapiens; identical to SEQ ID NO: 210452
  chr5:172062315-172062347
  hypo

SEQ ID NO: 391367 - DNA, 132 bp, Homo sapiens; identical to SEQ ID NO: 210459
  chr5:172367589-172367721
  hypo

SEQ ID NO: 391368 - DNA, 92 bp, Homo sapiens; identical to SEQ ID NO: 222749
  chr5:172444179-172444271
  hypo

SEQ ID NO: 391369 - DNA, 34 bp, Homo sapiens; identical to SEQ ID NO: 210461
  chr5:172454588-172454622
  hypo

SEQ ID NO: 391370 - DNA, 196 bp, Homo sapiens; identical to SEQ ID NO: 255342
  chr5:172765671-172765867
  hypo

SEQ ID NO: 391371 - DNA, 279 bp, Homo sapiens; identical to SEQ ID NO: 255343
  chr5:173180489-173180768
  hypo

SEQ ID NO: 391372 - DNA, 137 bp, Homo sapiens; identical to SEQ ID NO: 255344
  chr5:173383099-173383236
  hypo

SEQ ID NO: 391373 - DNA, 149 bp, Homo sapiens; identical to SEQ ID NO: 255352
  chr5:174350058-174350207
  hypo

SEQ ID NO: 391374 - DNA, 43 bp, Homo sapiens; identical to SEQ ID NO: 255353
  chr5:174667550-174667593
  hypo

SEQ ID NO: 391375 - DNA, 190 bp, Homo sapiens; identical to SEQ ID NO: 255358
  chr5:175387362-175387552
  hypo

SEQ ID NO: 391376 - DNA, 53 bp, Homo sapiens; identical to SEQ ID NO: 255359
  chr5:175559713-175559766
  hypo

SEQ ID NO: 391377 - DNA, 97 bp, Homo sapiens; identical to SEQ ID NO: 210478
  chr5:176066073-176066170
  hypo

SEQ ID NO: 391378 - DNA, 92 bp, Homo sapiens; identical to SEQ ID NO: 255388
  chr5:176613630-176613722
  hypo

SEQ ID NO: 391379 - DNA, 32 bp, Homo sapiens
  chr5:176663949-176663981
  hypo
gtctcagcctcctgagtagttgggaccaaagg

SEQ ID NO: 391380 - DNA, 162 bp, Homo sapiens; identical to SEQ ID NO: 210486
  chr5:176694903-176695065
  hypo

SEQ ID NO: 391381 - DNA, 31 bp, Homo sapiens; identical to SEQ ID NO: 255397
  chr5:176865066-176865097
  hypo

SEQ ID NO: 391382 - DNA, 130 bp, Homo sapiens; identical to SEQ ID NO: 210499
  chr5:177548899-177549029
  hypo

SEQ ID NO: 391383 - DNA, 48 bp, Homo sapiens; identical to SEQ ID NO: 210500
  chr5:177637070-177637118
  hypo

SEQ ID NO: 391384 - DNA, 34 bp, Homo sapiens
  chr5:177653975-177654009
  hypo
aaaaaagaagaagtgatcatttttctaagtgcta

SEQ ID NO: 391385 - DNA, 160 bp, Homo sapiens; identical to SEQ ID NO: 255424
  chr5:177778269-177778429
  hypo

SEQ ID NO: 391386 - DNA, 189 bp, Homo sapiens; identical to SEQ ID NO: 255425
  chr5:177794189-177794378
  hypo

SEQ ID NO: 391387 - DNA, 461 bp, Homo sapiens; identical to SEQ ID NO: 255431
  chr5:177862607-177863068
  hypo

SEQ ID NO: 391388 - DNA, 40 bp, Homo sapiens; identical to SEQ ID NO: 255441
  chr5:177969295-177969335
  hypo

SEQ ID NO: 391389 - DNA, 34 bp, Homo sapiens; identical to SEQ ID NO: 255448
  chr5:178113590-178113624
  hypo

SEQ ID NO: 391390 - DNA, 37 bp, Homo sapiens; identical to SEQ ID NO: 255453
  chr5:178226974-178227011
  hypo

SEQ ID NO: 391391 - DNA, 45 bp, Homo sapiens; identical to SEQ ID NO: 210510
  chr5:178295550-178295595
  hypo

SEQ ID NO: 391392 - DNA, 102 bp, Homo sapiens; identical to SEQ ID NO: 255467
  chr5:178540329-178540431
  hypo

SEQ ID NO: 391393 - DNA, 75 bp, Homo sapiens; identical to SEQ ID NO: 210516
  chr5:178576526-178576601
  hypo

SEQ ID NO: 391394 - DNA, 46 bp, Homo sapiens; identical to SEQ ID NO: 210524
  chr5:179030602-179030648
  hypo

SEQ ID NO: 391395 - DNA, 120 bp, Homo sapiens; identical to SEQ ID NO: 255492
  chr5:179064356-179064476
  hypo

SEQ ID NO: 391396 - DNA, 147 bp, Homo sapiens; identical to SEQ ID NO: 222772
  chr5:179234473-179234620
  hypo

SEQ ID NO: 391397 - DNA, 150 bp, Homo sapiens; identical to SEQ ID NO: 255500
  chr5:179358103-179358253
  hypo

SEQ ID NO: 391398 - DNA, 193 bp, Homo sapiens; identical to SEQ ID NO: 255517
  chr5:179731619-179731812
  hypo

SEQ ID NO: 391399 - DNA, 31 bp, Homo sapiens; identical to SEQ ID NO: 255518
  chr5:179742137-179742168
  hypo

SEQ ID NO: 391400 - DNA, 311 bp, Homo sapiens; identical to SEQ ID NO: 255520
  chr5:179762746-179763057
  hypo

SEQ ID NO: 391401 - DNA, 152 bp, Homo sapiens; identical to SEQ ID NO: 305275
  chr5:179824636-179824788
  hypo

SEQ ID NO: 391402 - DNA, 160 bp, Homo sapiens; identical to SEQ ID NO: 255525
  chr5:179855729-179855889
  hypo

SEQ ID NO: 391403 - DNA, 70 bp, Homo sapiens; identical to SEQ ID NO: 305287
  chr5:180047650-180047720
  hypo

SEQ ID NO: 391404 - DNA, 221 bp, Homo sapiens; identical to SEQ ID NO: 305288
  chr5:180047750-180047971
  hypo

SEQ ID NO: 391405 - DNA, 104 bp, Homo sapiens; identical to SEQ ID NO: 210549
  chr5:180657110-180657214
  hypo

SEQ ID NO: 391406 - DNA, 60 bp, Homo sapiens; identical to SEQ ID NO: 255554
  chr6:356759-356819
  hypo

SEQ ID NO: 391407 - DNA, 136 bp, Homo sapiens; identical to SEQ ID NO: 210556
  chr6:736613-736749
  hypo

SEQ ID NO: 391408 - DNA, 74 bp, Homo sapiens; identical to SEQ ID NO: 255573
  chr6:1574420-1574494
  hypo

SEQ ID NO: 391409 - DNA, 152 bp, Homo sapiens; identical to SEQ ID NO: 384116
  chr6:1610664-1610816
  hypo

SEQ ID NO: 391410 - DNA, 334 bp, Homo sapiens; identical to SEQ ID NO: 200232
  chr6:1610864-1611198
  hypo

SEQ ID NO: 391411 - DNA, 159 bp, Homo sapiens; identical to SEQ ID NO: 255577
  chr6:1679665-1679824
  hypo

SEQ ID NO: 391412 - DNA, 96 bp, Homo sapiens; identical to SEQ ID NO: 210568
  chr6:2233026-2233122
  hypo

SEQ ID NO: 391413 - DNA, 92 bp, Homo sapiens; identical to SEQ ID NO: 210571
  chr6:2907135-2907227
  hypo

SEQ ID NO: 391414 - DNA, 383 bp, Homo sapiens; identical to SEQ ID NO: 210574
  chr6:3115566-3115949
  hypo

SEQ ID NO: 391415 - DNA, 215 bp, Homo sapiens; identical to SEQ ID NO: 255611
  chr6:3193808-3194023
  hypo

SEQ ID NO: 391416 - DNA, 44 bp, Homo sapiens; identical to SEQ ID NO: 255612
  chr6:3194436-3194480
  hypo

SEQ ID NO: 391417 - DNA, 149 bp, Homo sapiens; identical to SEQ ID NO: 255615
  chr6:3250843-3250992
  hypo

SEQ ID NO: 391418 - DNA, 90 bp, Homo sapiens; identical to SEQ ID NO: 255618
  chr6:3267969-3268059
  hypo

SEQ ID NO: 391419 - DNA, 69 bp, Homo sapiens; identical to SEQ ID NO: 255627
  chr6:3312767-3312836
  hypo

SEQ ID NO: 391420 - DNA, 69 bp, Homo sapiens; identical to SEQ ID NO: 255628
  chr6:3315028-3315097
  hypo

SEQ ID NO: 391421 - DNA, 157 bp, Homo sapiens; identical to SEQ ID NO: 255629
  chr6:3315694-3315851
  hypo

SEQ ID NO: 391422 - DNA, 216 bp, Homo sapiens; identical to SEQ ID NO: 255641
  chr6:3468953-3469169
  hypo

SEQ ID NO: 391423 - DNA, 139 bp, Homo sapiens; identical to SEQ ID NO: 255644
  chr6:3540898-3541037
  hypo

SEQ ID NO: 391424 - DNA, 100 bp, Homo sapiens; identical to SEQ ID NO: 255645
  chr6:3543266-3543366
  hypo

SEQ ID NO: 391425 - DNA, 43 bp, Homo sapiens; identical to SEQ ID NO: 255652
  chr6:3633705-3633748
  hypo

SEQ ID NO: 391426 - DNA, 101 bp, Homo sapiens; identical to SEQ ID NO: 385642
  chr6:3880267-3880368
  hypo

SEQ ID NO: 391427 - DNA, 67 bp, Homo sapiens; identical to SEQ ID NO: 255666
  chr6:3900289-3900356
  hypo

SEQ ID NO: 391428 - DNA, 61 bp, Homo sapiens; identical to SEQ ID NO: 255678
  chr6:4782240-4782301
  hypo

SEQ ID NO: 391429 - DNA, 91 bp, Homo sapiens; identical to SEQ ID NO: 305457
  chr6:4858682-4858773
  hypo

SEQ ID NO: 391430 - DNA, 91 bp, Homo sapiens; identical to SEQ ID NO: 210610
  chr6:4909755-4909846
  hypo

SEQ ID NO: 391431 - DNA, 440 bp, Homo sapiens; identical to SEQ ID NO: 255708
  chr6:5783577-5784017
  hypo

SEQ ID NO: 391432 - DNA, 73 bp, Homo sapiens; identical to SEQ ID NO: 255710
  chr6:5839914-5839987
  hypo

SEQ ID NO: 391433 - DNA, 57 bp, Homo sapiens; identical to SEQ ID NO: 255714
  chr6:6250343-6250400
  hypo

SEQ ID NO: 391434 - DNA, 193 bp, Homo sapiens; identical to SEQ ID NO: 255720
  chr6:6824564-6824757
  hypo

SEQ ID NO: 391435 - DNA, 85 bp, Homo sapiens; identical to SEQ ID NO: 210624
  chr6:6971301-6971386
  hypo

SEQ ID NO: 391436 - DNA, 98 bp, Homo sapiens; identical to SEQ ID NO: 255729
  chr6:7132660-7132758
  hypo

SEQ ID NO: 391437 - DNA, 180 bp, Homo sapiens; identical to SEQ ID NO: 255737
  chr6:7268060-7268240
  hypo

SEQ ID NO: 391438 - DNA, 559 bp, Homo sapiens; identical to SEQ ID NO: 210634
  chr6:7883236-7883795
  hypo

SEQ ID NO: 391439 - DNA, 90 bp, Homo sapiens; identical to SEQ ID NO: 210643
  chr6:7976897-7976987
  hypo

SEQ ID NO: 391440 - DNA, 46 bp, Homo sapiens; identical to SEQ ID NO: 210644
  chr6:7986658-7986704
  hypo

SEQ ID NO: 391441 - DNA, 43 bp, Homo sapiens; identical to SEQ ID NO: 255766
  chr6:10491329-10491372
  hypo

SEQ ID NO: 391442 - DNA, 73 bp, Homo sapiens; identical to SEQ ID NO: 255787
  chr6:11789823-11789896
  hypo

SEQ ID NO: 391443 - DNA, 296 bp, Homo sapiens; identical to SEQ ID NO: 255797
  chr6:13295931-13296227
  hypo

SEQ ID NO: 391444 - DNA, 83 bp, Homo sapiens; identical to SEQ ID NO: 210655
  chr6:13397453-13397536
  hypo

SEQ ID NO: 391445 - DNA, 126 bp, Homo sapiens; identical to SEQ ID NO: 210659
  chr6:14002319-14002445
  hypo

SEQ ID NO: 391446 - DNA, 54 bp, Homo sapiens; identical to SEQ ID NO: 210660
  chr6:14002475-14002529
  hypo

SEQ ID NO: 391447 - DNA, 136 bp, Homo sapiens; identical to SEQ ID NO: 255820
  chr6:14772274-14772410
  hypo

SEQ ID NO: 391448 - DNA, 36 bp, Homo sapiens; identical to SEQ ID NO: 255821
  chr6:14777340-14777376
  hypo

SEQ ID NO: 391449 - DNA, 36 bp, Homo sapiens; identical to SEQ ID NO: 255822
  chr6:14916087-14916123
  hypo

SEQ ID NO: 391450 - DNA, 31 bp, Homo sapiens; identical to SEQ ID NO: 255823
  chr6:14930077-14930108
  hypo

SEQ ID NO: 391451 - DNA, 43 bp, Homo sapiens; identical to SEQ ID NO: 210671
  chr6:15282481-15282524
  hypo

SEQ ID NO: 391452 - DNA, 31 bp, Homo sapiens; identical to SEQ ID NO: 210678
  chr6:15907074-15907105
  hypo

SEQ ID NO: 391453 - DNA, 329 bp, Homo sapiens; identical to SEQ ID NO: 210687
  chr6:17940369-17940698
  hypo

SEQ ID NO: 391454 - DNA, 120 bp, Homo sapiens; identical to SEQ ID NO: 210688
  chr6:18030874-18030994
  hypo

SEQ ID NO: 391455 - DNA, 104 bp, Homo sapiens; identical to SEQ ID NO: 255866
  chr6:18129286-18129390
  hypo

SEQ ID NO: 391456 - DNA, 33 bp, Homo sapiens; identical to SEQ ID NO: 210692
  chr6:18275933-18275966
  hypo

SEQ ID NO: 391457 - DNA, 43 bp, Homo sapiens; identical to SEQ ID NO: 210695
  chr6:18458440-18458483
  hypo

SEQ ID NO: 391458 - DNA, 32 bp, Homo sapiens; identical to SEQ ID NO: 255885
  chr6:20239105-20239137
  hypo

SEQ ID NO: 391459 - DNA, 181 bp, Homo sapiens; identical to SEQ ID NO: 210701
  chr6:21277794-21277975
  hypo

SEQ ID NO: 391460 - DNA, 95 bp, Homo sapiens; identical to SEQ ID NO: 255896
  chr6:21406919-21407014
  hypo

SEQ ID NO: 391461 - DNA, 32 bp, Homo sapiens; identical to SEQ ID NO: 255910
  chr6:24035312-24035344
  hypo

SEQ ID NO: 391462 - DNA, 161 bp, Homo sapiens; identical to SEQ ID NO: 210709
  chr6:24425299-24425460
  hypo

SEQ ID NO: 391463 - DNA, 230 bp, Homo sapiens; identical to SEQ ID NO: 255913
  chr6:24432978-24433208
  hypo

SEQ ID NO: 391464 - DNA, 72 bp, Homo sapiens; identical to SEQ ID NO: 210720
  chr6:26970361-26970433
  hypo

SEQ ID NO: 391465 - DNA, 159 bp, Homo sapiens; identical to SEQ ID NO: 210724
  chr6:27441962-27442121
  hypo

SEQ ID NO: 391466 - DNA, 266 bp, Homo sapiens; identical to SEQ ID NO: 210733
  chr6:33638299-33638565
  hypo

SEQ ID NO: 391467 - DNA, 130 bp, Homo sapiens; identical to SEQ ID NO: 210737
  chr6:33748502-33748632
  hypo

SEQ ID NO: 391468 - DNA, 78 bp, Homo sapiens; identical to SEQ ID NO: 255966
  chr6:33871408-33871486
  hypo

SEQ ID NO: 391469 - DNA, 107 bp, Homo sapiens; identical to SEQ ID NO: 210739
  chr6:33907853-33907960
  hypo

SEQ ID NO: 391470 - DNA, 65 bp, Homo sapiens; identical to SEQ ID NO: 305765
  chr6:33955752-33955817
  hypo

SEQ ID NO: 391471 - DNA, 215 bp, Homo sapiens; identical to SEQ ID NO: 222843
  chr6:34359521-34359736
  hypo

SEQ ID NO: 391472 - DNA, 213 bp, Homo sapiens; identical to SEQ ID NO: 255982
  chr6:34503446-34503659
  hypo

SEQ ID NO: 391473 - DNA, 243 bp, Homo sapiens; identical to SEQ ID NO: 255983
  chr6:34507099-34507342
  hypo

SEQ ID NO: 391474 - DNA, 243 bp, Homo sapiens; identical to SEQ ID NO: 210750
  chr6:34512043-34512286
  hypo

SEQ ID NO: 391475 - DNA, 201 bp, Homo sapiens; identical to SEQ ID NO: 256004
  chr6:35044731-35044932
  hypo

SEQ ID NO: 391476 - DNA, 95 bp, Homo sapiens; identical to SEQ ID NO: 256005
  chr6:35045149-35045244
  hypo

SEQ ID NO: 391477 - DNA, 324 bp, Homo sapiens; identical to SEQ ID NO: 256008
  chr6:35048591-35048915
  hypo

SEQ ID NO: 391478 - DNA, 148 bp, Homo sapiens; identical to SEQ ID NO: 256038
  chr6:36926814-36926962
  hypo

SEQ ID NO: 391479 - DNA, 177 bp, Homo sapiens; identical to SEQ ID NO: 256039
  chr6:36936701-36936878
  hypo

SEQ ID NO: 391480 - DNA, 97 bp, Homo sapiens; identical to SEQ ID NO: 256042
  chr6:36992805-36992902
  hypo

SEQ ID NO: 391481 - DNA, 40 bp, Homo sapiens; identical to SEQ ID NO: 210772
  chr6:37100545-37100585
  hypo

SEQ ID NO: 391482 - DNA, 597 bp, Homo sapiens; identical to SEQ ID NO: 256055
  chr6:37460887-37461484
  hypo

SEQ ID NO: 391483 - DNA, 153 bp, Homo sapiens; identical to SEQ ID NO: 256056
  chr6:37605017-37605170
  hypo

SEQ ID NO: 391484 - DNA, 197 bp, Homo sapiens; identical to SEQ ID NO: 256062
  chr6:37841059-37841256
  hypo

SEQ ID NO: 391485 - DNA, 232 bp, Homo sapiens; identical to SEQ ID NO: 388332
  chr6:41340475-41340707
  hypo

SEQ ID NO: 391486 - DNA, 158 bp, Homo sapiens; identical to SEQ ID NO: 210796
  chr6:41511550-41511708
  hypo

SEQ ID NO: 391487 - DNA, 203 bp, Homo sapiens; identical to SEQ ID NO: 210799
  chr6:42047606-42047809
  hypo

SEQ ID NO: 391488 - DNA, 85 bp, Homo sapiens; identical to SEQ ID NO: 210801
  chr6:43057813-43057898
  hypo

SEQ ID NO: 391489 - DNA, 125 bp, Homo sapiens; identical to SEQ ID NO: 222857
  chr6:43081636-43081761
  hypo

SEQ ID NO: 391490 - DNA, 215 bp, Homo sapiens; identical to SEQ ID NO: 256117
  chr6:43230737-43230952
  hypo

SEQ ID NO: 391491 - DNA, 83 bp, Homo sapiens; identical to SEQ ID NO: 256132
  chr6:43753108-43753191
  hypo

SEQ ID NO: 391492 - DNA, 76 bp, Homo sapiens; identical to SEQ ID NO: 210811
  chr6:43755593-43755669
  hypo

SEQ ID NO: 391493 - DNA, 33 bp, Homo sapiens; identical to SEQ ID NO: 256136
  chr6:43857893-43857926
  hypo

SEQ ID NO: 391494 - DNA, 192 bp, Homo sapiens; identical to SEQ ID NO: 256144
  chr6:43990914-43991106
  hypo

SEQ ID NO: 391495 - DNA, 34 bp, Homo sapiens; identical to SEQ ID NO: 256149
  chr6:44090098-44090132
  hypo

SEQ ID NO: 391496 - DNA, 75 bp, Homo sapiens; identical to SEQ ID NO: 305960
  chr6:44250124-44250199
  hypo

SEQ ID NO: 391497 - DNA, 127 bp, Homo sapiens; identical to SEQ ID NO: 256159
  chr6:44449535-44449662
  hypo

SEQ ID NO: 391498 - DNA, 39 bp, Homo sapiens; identical to SEQ ID NO: 256163
  chr6:45492176-45492215
  hypo

SEQ ID NO: 391499 - DNA, 264 bp, Homo sapiens; identical to SEQ ID NO: 305972
  chr6:45608783-45609047
  hypo

SEQ ID NO: 391500 - DNA, 152 bp, Homo sapiens; identical to SEQ ID NO: 256169
  chr6:47084373-47084525
  hypo

SEQ ID NO: 391501 - DNA, 41 bp, Homo sapiens; identical to SEQ ID NO: 210827
  chr6:47412331-47412372
  hypo

SEQ ID NO: 391502 - DNA, 144 bp, Homo sapiens; identical to SEQ ID NO: 256175
  chr6:49453725-49453869
  hypo

SEQ ID NO: 391503 - DNA, 142 bp, Homo sapiens; identical to SEQ ID NO: 256178
  chr6:52171805-52171947
  hypo

SEQ ID NO: 391504 - DNA, 43 bp, Homo sapiens; identical to SEQ ID NO: 256183
  chr6:52856825-52856868
  hypo

SEQ ID NO: 391505 - DNA, 80 bp, Homo sapiens; identical to SEQ ID NO: 256192
  chr6:53406020-53406100
  hypo

SEQ ID NO: 391506 - DNA, 282 bp, Homo sapiens; identical to SEQ ID NO: 222871
  chr6:53409809-53410091
  hypo

SEQ ID NO: 391507 - DNA, 74 bp, Homo sapiens; identical to SEQ ID NO: 256196
  chr6:56297181-56297255
  hypo

SEQ ID NO: 391508 - DNA, 144 bp, Homo sapiens; identical to SEQ ID NO: 256202
  chr6:57726146-57726290
  hypo

SEQ ID NO: 391509 - DNA, 96 bp, Homo sapiens; identical to SEQ ID NO: 256205
  chr6:64151088-64151184
  hypo

SEQ ID NO: 391510 - DNA, 62 bp, Homo sapiens; identical to SEQ ID NO: 256211
  chr6:71521663-71521725
  hypo

SEQ ID NO: 391511 - DNA, 42 bp, Homo sapiens; identical to SEQ ID NO: 256233
  chr6:82936653-82936695
  hypo

SEQ ID NO: 391512 - DNA, 145 bp, Homo sapiens; identical to SEQ ID NO: 222892
  chr6:87832386-87832531
  hypo

SEQ ID NO: 391513 - DNA, 101 bp, Homo sapiens; identical to SEQ ID NO: 210862
  chr6:88280033-88280134
  hypo

SEQ ID NO: 391514 - DNA, 120 bp, Homo sapiens; identical to SEQ ID NO: 256245
  chr6:88553999-88554119
  hypo

SEQ ID NO: 391515 - DNA, 120 bp, Homo sapiens; identical to SEQ ID NO: 210863
  chr6:89376382-89376502
  hypo

SEQ ID NO: 391516 - DNA, 332 bp, Homo sapiens; identical to SEQ ID NO: 284237
  chr6:89827121-89827453
  hypo

SEQ ID NO: 391517 - DNA, 319 bp, Homo sapiens; identical to SEQ ID NO: 222896
  chr6:90062632-90062951
  hypo

SEQ ID NO: 391518 - DNA, 34 bp, Homo sapiens; identical to SEQ ID NO: 256263
  chr6:96552675-96552709
  hypo

SEQ ID NO: 391519 - DNA, 32 bp, Homo sapiens; identical to SEQ ID NO: 256268
  chr6:106582673-106582705
  hypo

SEQ ID NO: 391520 - DNA, 36 bp, Homo sapiens; identical to SEQ ID NO: 210881
  chr6:107563806-107563842
  hypo

SEQ ID NO: 391521 - DNA, 429 bp, Homo sapiens; identical to SEQ ID NO: 200619
  chr6:109777177-109777606
  hypo

SEQ ID NO: 391522 - DNA, 45 bp, Homo sapiens; identical to SEQ ID NO: 210894
  chr6:111085015-111085060
  hypo

SEQ ID NO: 391523 - DNA, 177 bp, Homo sapiens; identical to SEQ ID NO: 256299
  chr6:111244972-111245149
  hypo

SEQ ID NO: 391524 - DNA, 195 bp, Homo sapiens; identical to SEQ ID NO: 210897
  chr6:111673961-111674156
  hypo

SEQ ID NO: 391525 - DNA, 102 bp, Homo sapiens; identical to SEQ ID NO: 256312
  chr6:111955506-111955608
  hypo

SEQ ID NO: 391526 - DNA, 40 bp, Homo sapiens; identical to SEQ ID NO: 256318
  chr6:116873934-116873974
  hypo

SEQ ID NO: 391527 - DNA, 130 bp, Homo sapiens; identical to SEQ ID NO: 256319
  chr6:116905294-116905424
  hypo

SEQ ID NO: 391528 - DNA, 703 bp, Homo sapiens; identical to SEQ ID NO: 222918
  chr6:117803613-117804316
  hypo

SEQ ID NO: 391529 - DNA, 40 bp, Homo sapiens; identical to SEQ ID NO: 222921
  chr6:119762016-119762056
  hypo

SEQ ID NO: 391530 - DNA, 92 bp, Homo sapiens; identical to SEQ ID NO: 256335
  chr6:119834901-119834993
  hypo

SEQ ID NO: 391531 - DNA, 105 bp, Homo sapiens; identical to SEQ ID NO: 222922
  chr6:123110275-123110380
  hypo

SEQ ID NO: 391532 - DNA, 210 bp, Homo sapiens; identical to SEQ ID NO: 256340
  chr6:125299462-125299672
  hypo

SEQ ID NO: 391533 - DNA, 151 bp, Homo sapiens; identical to SEQ ID NO: 210907
  chr6:126242092-126242243
  hypo

SEQ ID NO: 391534 - DNA, 74 bp, Homo sapiens; identical to SEQ ID NO: 256357
  chr6:134749836-134749910
  hypo

SEQ ID NO: 391535 - DNA, 535 bp, Homo sapiens; identical to SEQ ID NO: 222937
  chr6:136870742-136871277
  hypo

SEQ ID NO: 391536 - DNA, 212 bp, Homo sapiens; identical to SEQ ID NO: 256371
  chr6:137147517-137147729
  hypo

SEQ ID NO: 391537 - DNA, 161 bp, Homo sapiens; identical to SEQ ID NO: 210924
  chr6:138883861-138884022
  hypo

SEQ ID NO: 391538 - DNA, 35 bp, Homo sapiens; identical to SEQ ID NO: 256389
  chr6:141150320-141150355
  hypo

SEQ ID NO: 391539 - DNA, 86 bp, Homo sapiens; identical to SEQ ID NO: 256391
  chr6:142509608-142509694
  hypo

SEQ ID NO: 391540 - DNA, 38 bp, Homo sapiens; identical to SEQ ID NO: 256395
  chr6:143239181-143239219
  hypo

SEQ ID NO: 391541 - DNA, 250 bp, Homo sapiens; identical to SEQ ID NO: 256400
  chr6:144271186-144271436
  hypo

SEQ ID NO: 391542 - DNA, 72 bp, Homo sapiens; identical to SEQ ID NO: 210933
  chr6:144330175-144330247
  hypo

SEQ ID NO: 391543 - DNA, 69 bp, Homo sapiens; identical to SEQ ID NO: 256406
  chr6:147519322-147519391
  hypo

SEQ ID NO: 391544 - DNA, 42 bp, Homo sapiens; identical to SEQ ID NO: 256408
  chr6:148062632-148062674
  hypo

SEQ ID NO: 391545 - DNA, 137 bp, Homo sapiens; identical to SEQ ID NO: 210942
  chr6:148200360-148200497
  hypo

SEQ ID NO: 391546 - DNA, 92 bp, Homo sapiens; identical to SEQ ID NO: 256415
  chr6:149198424-149198516
  hypo

SEQ ID NO: 391547 - DNA, 110 bp, Homo sapiens; identical to SEQ ID NO: 256418
  chr6:149721362-149721472
  hypo

SEQ ID NO: 391548 - DNA, 84 bp, Homo sapiens; identical to SEQ ID NO: 210945
  chr6:150081971-150082055
  hypo

SEQ ID NO: 391549 - DNA, 122 bp, Homo sapiens; identical to SEQ ID NO: 256425
  chr6:150174429-150174551
  hypo

SEQ ID NO: 391550 - DNA, 210 bp, Homo sapiens; identical to SEQ ID NO: 256426
  chr6:150209155-150209365
  hypo

SEQ ID NO: 391551 - DNA, 39 bp, Homo sapiens; identical to SEQ ID NO: 256428
  chr6:150420186-150420225
  hypo

SEQ ID NO: 391552 - DNA, 43 bp, Homo sapiens; identical to SEQ ID NO: 256431
  chr6:150437286-150437329
  hypo

SEQ ID NO: 391553 - DNA, 118 bp, Homo sapiens; identical to SEQ ID NO: 256433
  chr6:150498913-150499031
  hypo

SEQ ID NO: 391554 - DNA, 169 bp, Homo sapiens; identical to SEQ ID NO: 256435
  chr6:150518591-150518760
  hypo

SEQ ID NO: 391555 - DNA, 66 bp, Homo sapiens; identical to SEQ ID NO: 256438
  chr6:151125834-151125900
  hypo

SEQ ID NO: 391556 - DNA, 125 bp, Homo sapiens; identical to SEQ ID NO: 256439
  chr6:151306909-151307034
  hypo

SEQ ID NO: 391557 - DNA, 369 bp, Homo sapiens; identical to SEQ ID NO: 256443
  chr6:151662637-151663006
  hypo

SEQ ID NO: 391558 - DNA, 40 bp, Homo sapiens; identical to SEQ ID NO: 256477
  chr6:155991045-155991085
  hypo

SEQ ID NO: 391559 - DNA, 65 bp, Homo sapiens; identical to SEQ ID NO: 256478
  chr6:156030251-156030316
  hypo

SEQ ID NO: 391560 - DNA, 139 bp, Homo sapiens; identical to SEQ ID NO: 256482
  chr6:156710186-156710325
  hypo

SEQ ID NO: 391561 - DNA, 244 bp, Homo sapiens; identical to SEQ ID NO: 256485
  chr6:156883161-156883405
  hypo

SEQ ID NO: 391562 - DNA, 45 bp, Homo sapiens; identical to SEQ ID NO: 306372
  chr6:157431600-157431645
  hypo

SEQ ID NO: 391563 - DNA, 98 bp, Homo sapiens; identical to SEQ ID NO: 306373
  chr6:157431675-157431773
  hypo

SEQ ID NO: 391564 - DNA, 86 bp, Homo sapiens; identical to SEQ ID NO: 256495
  chr6:157447664-157447750
  hypo

SEQ ID NO: 391565 - DNA, 166 bp, Homo sapiens; identical to SEQ ID NO: 256496
  chr6:157472013-157472179
  hypo

SEQ ID NO: 391566 - DNA, 59 bp, Homo sapiens; identical to SEQ ID NO: 200718
  chr6:157802884-157802943
  hypo

SEQ ID NO: 391567 - DNA, 275 bp, Homo sapiens; identical to SEQ ID NO: 256514
  chr6:158070271-158070546
  hypo

SEQ ID NO: 391568 - DNA, 302 bp, Homo sapiens; identical to SEQ ID NO: 256518
  chr6:158296042-158296344
  hypo

SEQ ID NO: 391569 - DNA, 199 bp, Homo sapiens; identical to SEQ ID NO: 210981
  chr6:158328733-158328932
  hypo

SEQ ID NO: 391570 - DNA, 35 bp, Homo sapiens; identical to SEQ ID NO: 256525
  chr6:158567710-158567745
  hypo

SEQ ID NO: 391571 - DNA, 55 bp, Homo sapiens; identical to SEQ ID NO: 256534
  chr6:158925050-158925105
  hypo

SEQ ID NO: 391572 - DNA, 162 bp, Homo sapiens; identical to SEQ ID NO: 256545
  chr6:159180413-159180575
  hypo

SEQ ID NO: 391573 - DNA, 114 bp, Homo sapiens; identical to SEQ ID NO: 256547
  chr6:159188289-159188403
  hypo

SEQ ID NO: 391574 - DNA, 178 bp, Homo sapiens; identical to SEQ ID NO: 256549
  chr6:159193321-159193499
  hypo

SEQ ID NO: 391575 - DNA, 35 bp, Homo sapiens; identical to SEQ ID NO: 256554
  chr6:159213572-159213607
  hypo

SEQ ID NO: 391576 - DNA, 37 bp, Homo sapiens; identical to SEQ ID NO: 256558
  chr6:159223841-159223878
  hypo

SEQ ID NO: 391577 - DNA, 71 bp, Homo sapiens; identical to SEQ ID NO: 256577
  chr6:160509961-160510032
  hypo

SEQ ID NO: 391578 - DNA, 128 bp, Homo sapiens; identical to SEQ ID NO: 256589
  chr6:161559035-161559163
  hypo

SEQ ID NO: 391579 - DNA, 362 bp, Homo sapiens; identical to SEQ ID NO: 256590
  chr6:161559597-161559959
  hypo

SEQ ID NO: 391580 - DNA, 221 bp, Homo sapiens; identical to SEQ ID NO: 306491
  chr6:162253713-162253934
  hypo

SEQ ID NO: 391581 - DNA, 290 bp, Homo sapiens; identical to SEQ ID NO: 256604
  chr6:163321044-163321334
  hypo

SEQ ID NO: 391582 - DNA, 153 bp, Homo sapiens; identical to SEQ ID NO: 256607
  chr6:163607798-163607951
  hypo

SEQ ID NO: 391583 - DNA, 96 bp, Homo sapiens; identical to SEQ ID NO: 211014
  chr6:167051700-167051796
  hypo

SEQ ID NO: 391584 - DNA, 115 bp, Homo sapiens; identical to SEQ ID NO: 211015
  chr6:167136191-167136306
  hypo

SEQ ID NO: 391585 - DNA, 90 bp, Homo sapiens; identical to SEQ ID NO: 306533
  chr6:167136408-167136498
  hypo

SEQ ID NO: 391586 - DNA, 65 bp, Homo sapiens; identical to SEQ ID NO: 211017
  chr6:167384339-167384404
  hypo

SEQ ID NO: 391587 - DNA, 86 bp, Homo sapiens; identical to SEQ ID NO: 256654
  chr6:167707449-167707535
  hypo

SEQ ID NO: 391588 - DNA, 36 bp, Homo sapiens; identical to SEQ ID NO: 211022
  chr6:168131201-168131237
  hypo

SEQ ID NO: 391589 - DNA, 33 bp, Homo sapiens; identical to SEQ ID NO: 200752
  chr6:168227910-168227943
  hypo

SEQ ID NO: 391590 - DNA, 103 bp, Homo sapiens; identical to SEQ ID NO: 256691
  chr6:168490178-168490281
  hypo

SEQ ID NO: 391591 - DNA, 209 bp, Homo sapiens; identical to SEQ ID NO: 256695
  chr6:168591119-168591328
  hypo

SEQ ID NO: 391592 - DNA, 108 bp, Homo sapiens; identical to SEQ ID NO: 211038
  chr6:168613294-168613402
  hypo

SEQ ID NO: 391593 - DNA, 252 bp, Homo sapiens; identical to SEQ ID NO: 256697
  chr6:168633686-168633938
  hypo

SEQ ID NO: 391594 - DNA, 354 bp, Homo sapiens; identical to SEQ ID NO: 211044
  chr6:168936432-168936786
  hypo

SEQ ID NO: 391595 - DNA, 87 bp, Homo sapiens; identical to SEQ ID NO: 256707
  chr6:169013509-169013596
  hypo

SEQ ID NO: 391596 - DNA, 185 bp, Homo sapiens; identical to SEQ ID NO: 211045
  chr6:169106757-169106942
  hypo

SEQ ID NO: 391597 - DNA, 177 bp, Homo sapiens; identical to SEQ ID NO: 256710
  chr6:169465183-169465360
  hypo

SEQ ID NO: 391598 - DNA, 745 bp, Homo sapiens; identical to SEQ ID NO: 211055
  chr6:169648464-169649209
  hypo

SEQ ID NO: 391599 - DNA, 193 bp, Homo sapiens; identical to SEQ ID NO: 256721
  chr6:169803235-169803428
  hypo

SEQ ID NO: 391600 - DNA, 47 bp, Homo sapiens; identical to SEQ ID NO: 256732
  chr6:170413530-170413577
  hypo

SEQ ID NO: 391601 - DNA, 120 bp, Homo sapiens; identical to SEQ ID NO: 211065
  chr6:170500862-170500982
  hypo

SEQ ID NO: 391602 - DNA, 74 bp, Homo sapiens; identical to SEQ ID NO: 256742
  chr6:170578858-170578932
  hypo

SEQ ID NO: 391603 - DNA, 112 bp, Homo sapiens; identical to SEQ ID NO: 256746
  chr6:170713941-170714053
  hypo

SEQ ID NO: 391604 - DNA, 120 bp, Homo sapiens; identical to SEQ ID NO: 211068
  chr6:170894913-170895033
  hypo

SEQ ID NO: 391605 - DNA, 139 bp, Homo sapiens; identical to SEQ ID NO: 211069
  chr7:85450-85589
  hypo

SEQ ID NO: 391606 - DNA, 155 bp, Homo sapiens; identical to SEQ ID NO: 256754
  chr7:153660-153815
  hypo

SEQ ID NO: 391607 - DNA, 529 bp, Homo sapiens; identical to SEQ ID NO: 256761
  chr7:175273-175802
  hypo

SEQ ID NO: 391608 - DNA, 334 bp, Homo sapiens; identical to SEQ ID NO: 256763
  chr7:181259-181593
  hypo

SEQ ID NO: 391609 - DNA, 148 bp, Homo sapiens; identical to SEQ ID NO: 256764
  chr7:199426-199574
  hypo

SEQ ID NO: 391610 - DNA, 155 bp, Homo sapiens; identical to SEQ ID NO: 256768
  chr7:217102-217257
  hypo

SEQ ID NO: 391611 - DNA, 166 bp, Homo sapiens; identical to SEQ ID NO: 256772
  chr7:228056-228222
  hypo

SEQ ID NO: 391612 - DNA, 113 bp, Homo sapiens; identical to SEQ ID NO: 256778
  chr7:289727-289840
  hypo

SEQ ID NO: 391613 - DNA, 233 bp, Homo sapiens; identical to SEQ ID NO: 256780
  chr7:291025-291258
  hypo

SEQ ID NO: 391614 - DNA, 224 bp, Homo sapiens; identical to SEQ ID NO: 306704
  chr7:322815-323039
  hypo

SEQ ID NO: 391615 - DNA, 45 bp, Homo sapiens; identical to SEQ ID NO: 211085
  chr7:328541-328586
  hypo

SEQ ID NO: 391616 - DNA, 55 bp, Homo sapiens; identical to SEQ ID NO: 211086
  chr7:328625-328680
  hypo

SEQ ID NO: 391617 - DNA, 180 bp, Homo sapiens; identical to SEQ ID NO: 256799
  chr7:367650-367830
  hypo

SEQ ID NO: 391618 - DNA, 428 bp, Homo sapiens; identical to SEQ ID NO: 256807
  chr7:418417-418845
  hypo

SEQ ID NO: 391619 - DNA, 190 bp, Homo sapiens; identical to SEQ ID NO: 256811
  chr7:438533-438723
  hypo

SEQ ID NO: 391620 - DNA, 60 bp, Homo sapiens; identical to SEQ ID NO: 256827
  chr7:531100-531160
  hypo

SEQ ID NO: 391621 - DNA, 36 bp, Homo sapiens; identical to SEQ ID NO: 211111
  chr7:636569-636605
  hypo

SEQ ID NO: 391622 - DNA, 31 bp, Homo sapiens; identical to SEQ ID NO: 256861
  chr7:744080-744111
  hypo

SEQ ID NO: 391623 - DNA, 266 bp, Homo sapiens; identical to SEQ ID NO: 256867
  chr7:807795-808061
  hypo

SEQ ID NO: 391624 - DNA, 463 bp, Homo sapiens; identical to SEQ ID NO: 256879
  chr7:899731-900194
  hypo

SEQ ID NO: 391625 - DNA, 382 bp, Homo sapiens; identical to SEQ ID NO: 256880
  chr7:902843-903225
  hypo

SEQ ID NO: 391626 - DNA, 133 bp, Homo sapiens; identical to SEQ ID NO: 211134
  chr7:920785-920918
  hypo

SEQ ID NO: 391627 - DNA, 44 bp, Homo sapiens; identical to SEQ ID NO: 211136
  chr7:921709-921753
  hypo

SEQ ID NO: 391628 - DNA, 221 bp, Homo sapiens; identical to SEQ ID NO: 256886
  chr7:923637-923858
  hypo

SEQ ID NO: 391629 - DNA, 66 bp, Homo sapiens; identical to SEQ ID NO: 256889
  chr7:931798-931864
  hypo

SEQ ID NO: 391630 - DNA, 152 bp, Homo sapiens; identical to SEQ ID NO: 211141
  chr7:955105-955257
  hypo

SEQ ID NO: 391631 - DNA, 301 bp, Homo sapiens; identical to SEQ ID NO: 256894
  chr7:955484-955785
  hypo

SEQ ID NO: 391632 - DNA, 110 bp, Homo sapiens; identical to SEQ ID NO: 211146
  chr7:986124-986234
  hypo

SEQ ID NO: 391633 - DNA, 186 bp, Homo sapiens; identical to SEQ ID NO: 211147
  chr7:986336-986522
  hypo

SEQ ID NO: 391634 - DNA, 324 bp, Homo sapiens; identical to SEQ ID NO: 256908
  chr7:1007358-1007682
  hypo

SEQ ID NO: 391635 - DNA, 440 bp, Homo sapiens; identical to SEQ ID NO: 256917
  chr7:1059664-1060104
  hypo

SEQ ID NO: 391636 - DNA, 274 bp, Homo sapiens; identical to SEQ ID NO: 222996
  chr7:1069695-1069969
  hypo

SEQ ID NO: 391637 - DNA, 188 bp, Homo sapiens; identical to SEQ ID NO: 256926
  chr7:1103862-1104050
  hypo

SEQ ID NO: 391638 - DNA, 63 bp, Homo sapiens
  chr7:1115545-1115608
  hypo
ttattaaaaaaaaaaaccctcctgacctcaggtaggaacagcagagtctgagtcaccaaagcc

SEQ ID NO: 391639 - DNA, 93 bp, Homo sapiens; identical to SEQ ID NO: 256936
  chr7:1184625-1184718
  hypo

SEQ ID NO: 391640 - DNA, 154 bp, Homo sapiens; identical to SEQ ID NO: 256953
  chr7:1357986-1358140
  hypo

SEQ ID NO: 391641 - DNA, 265 bp, Homo sapiens; identical to SEQ ID NO: 256954
  chr7:1358498-1358763
  hypo

SEQ ID NO: 391642 - DNA, 95 bp, Homo sapiens; identical to SEQ ID NO: 256969
  chr7:1493403-1493498
  hypo

SEQ ID NO: 391643 - DNA, 95 bp, Homo sapiens; identical to SEQ ID NO: 256970
  chr7:1496414-1496509
  hypo

SEQ ID NO: 391644 - DNA, 144 bp, Homo sapiens; identical to SEQ ID NO: 211187
  chr7:1534752-1534896
  hypo

SEQ ID NO: 391645 - DNA, 590 bp, Homo sapiens; identical to SEQ ID NO: 256995
  chr7:1589281-1589871
  hypo

SEQ ID NO: 391646 - DNA, 254 bp, Homo sapiens; identical to SEQ ID NO: 306940
  chr7:1627150-1627404
  hypo

SEQ ID NO: 391647 - DNA, 123 bp, Homo sapiens; identical to SEQ ID NO: 306941
  chr7:1627434-1627557
  hypo

SEQ ID NO: 391648 - DNA, 72 bp, Homo sapiens; identical to SEQ ID NO: 211203
  chr7:1681117-1681189
  hypo

SEQ ID NO: 391649 - DNA, 38 bp, Homo sapiens; identical to SEQ ID NO: 211204
  chr7:1681239-1681277
  hypo

SEQ ID NO: 391650 - DNA, 160 bp, Homo sapiens; identical to SEQ ID NO: 257023
  chr7:1785930-1786090
  hypo

SEQ ID NO: 391651 - DNA, 289 bp, Homo sapiens; identical to SEQ ID NO: 211213
  chr7:1865909-1866198
  hypo

SEQ ID NO: 391652 - DNA, 72 bp, Homo sapiens; identical to SEQ ID NO: 306980
  chr7:1888787-1888859
  hypo

SEQ ID NO: 391653 - DNA, 166 bp, Homo sapiens; identical to SEQ ID NO: 306981
  chr7:1888889-1889055
  hypo

SEQ ID NO: 391654 - DNA, 152 bp, Homo sapiens; identical to SEQ ID NO: 211219
  chr7:1950266-1950418
  hypo

SEQ ID NO: 391655 - DNA, 180 bp, Homo sapiens; identical to SEQ ID NO: 211220
  chr7:1950693-1950873
  hypo

SEQ ID NO: 391656 - DNA, 147 bp, Homo sapiens; identical to SEQ ID NO: 211222
  chr7:1969179-1969326
  hypo

SEQ ID NO: 391657 - DNA, 107 bp, Homo sapiens; identical to SEQ ID NO: 257053
  chr7:1999009-1999116
  hypo

SEQ ID NO: 391658 - DNA, 217 bp, Homo sapiens; identical to SEQ ID NO: 257061
  chr7:2035958-2036175
  hypo

SEQ ID NO: 391659 - DNA, 300 bp, Homo sapiens; identical to SEQ ID NO: 257066
  chr7:2053261-2053561
  hypo

SEQ ID NO: 391660 - DNA, 203 bp, Homo sapiens; identical to SEQ ID NO: 257076
  chr7:2091644-2091847
  hypo

SEQ ID NO: 391661 - DNA, 640 bp, Homo sapiens; identical to SEQ ID NO: 72943
  chr7:2094462-2095102
  hypo

SEQ ID NO: 391662 - DNA, 47 bp, Homo sapiens; identical to SEQ ID NO: 257089
  chr7:2130636-2130683
  hypo

SEQ ID NO: 391663 - DNA, 490 bp, Homo sapiens; identical to SEQ ID NO: 257118
  chr7:2294448-2294938
  hypo

SEQ ID NO: 391664 - DNA, 149 bp, Homo sapiens; identical to SEQ ID NO: 211264
  chr7:2300173-2300322
  hypo

SEQ ID NO: 391665 - DNA, 152 bp, Homo sapiens; identical to SEQ ID NO: 257126
  chr7:2360917-2361069
  hypo

SEQ ID NO: 391666 - DNA, 77 bp, Homo sapiens; identical to SEQ ID NO: 223010
  chr7:2555344-2555421
  hypo

SEQ ID NO: 391667 - DNA, 52 bp, Homo sapiens; identical to SEQ ID NO: 257156
  chr7:2680524-2680576
  hypo

SEQ ID NO: 391668 - DNA, 101 bp, Homo sapiens; identical to SEQ ID NO: 257179
  chr7:2884994-2885095
  hypo

SEQ ID NO: 391669 - DNA, 216 bp, Homo sapiens; identical to SEQ ID NO: 211297
  chr7:2976623-2976839
  hypo

SEQ ID NO: 391670 - DNA, 125 bp, Homo sapiens; identical to SEQ ID NO: 257198
  chr7:3054280-3054405
  hypo

SEQ ID NO: 391671 - DNA, 42 bp, Homo sapiens; identical to SEQ ID NO: 257200
  chr7:3150400-3150442
  hypo

SEQ ID NO: 391672 - DNA, 42 bp, Homo sapiens; identical to SEQ ID NO: 257217
  chr7:4047169-4047211
  hypo

SEQ ID NO: 391673 - DNA, 257 bp, Homo sapiens; identical to SEQ ID NO: 211309
  chr7:4152827-4153084
  hypo

SEQ ID NO: 391674 - DNA, 85 bp, Homo sapiens; identical to SEQ ID NO: 307206
  chr7:4265508-4265593
  hypo

SEQ ID NO: 391675 - DNA, 316 bp, Homo sapiens; identical to SEQ ID NO: 211321
  chr7:4272745-4273061
  hypo

SEQ ID NO: 391676 - DNA, 139 bp, Homo sapiens; identical to SEQ ID NO: 257250
  chr7:4275903-4276042
  hypo

SEQ ID NO: 391677 - DNA, 183 bp, Homo sapiens; identical to SEQ ID NO: 211324
  chr7:4285297-4285480
  hypo

SEQ ID NO: 391678 - DNA, 42 bp, Homo sapiens; identical to SEQ ID NO: 257254
  chr7:4299321-4299363
  hypo

SEQ ID NO: 391679 - DNA, 289 bp, Homo sapiens; identical to SEQ ID NO: 307216
  chr7:4308194-4308483
  hypo

SEQ ID NO: 391680 - DNA, 155 bp, Homo sapiens; identical to SEQ ID NO: 257259
  chr7:4348038-4348193
  hypo

SEQ ID NO: 391681 - DNA, 81 bp, Homo sapiens; identical to SEQ ID NO: 211326
  chr7:4540651-4540732
  hypo

SEQ ID NO: 391682 - DNA, 48 bp, Homo sapiens; identical to SEQ ID NO: 257270
  chr7:4770224-4770272
  hypo

SEQ ID NO: 391683 - DNA, 831 bp, Homo sapiens; identical to SEQ ID NO: 257277
  chr7:4806263-4807094
  hypo

SEQ ID NO: 391684 - DNA, 127 bp, Homo sapiens; identical to SEQ ID NO: 257280
  chr7:4823843-4823970
  hypo

SEQ ID NO: 391685 - DNA, 225 bp, Homo sapiens; identical to SEQ ID NO: 257282
  chr7:4825103-4825328
  hypo

SEQ ID NO: 391686 - DNA, 34 bp, Homo sapiens; identical to SEQ ID NO: 211341
  chr7:4867284-4867318
  hypo

SEQ ID NO: 391687 - DNA, 281 bp, Homo sapiens; identical to SEQ ID NO: 257298
  chr7:4916207-4916488
  hypo

SEQ ID NO: 391688 - DNA, 55 bp, Homo sapiens; identical to SEQ ID NO: 257323
  chr7:5391379-5391434
  hypo

SEQ ID NO: 391689 - DNA, 81 bp, Homo sapiens; identical to SEQ ID NO: 211360
  chr7:5449226-5449307
  hypo

SEQ ID NO: 391690 - DNA, 74 bp, Homo sapiens; identical to SEQ ID NO: 211364
  chr7:5521784-5521858
  hypo

SEQ ID NO: 391691 - DNA, 189 bp, Homo sapiens; identical to SEQ ID NO: 257338
  chr7:5530811-5531000
  hypo

SEQ ID NO: 391692 - DNA, 301 bp, Homo sapiens; identical to SEQ ID NO: 257346
  chr7:5870805-5871106
  hypo

SEQ ID NO: 391693 - DNA, 41 bp, Homo sapiens; identical to SEQ ID NO: 211369
  chr7:6059658-6059699
  hypo

SEQ ID NO: 391694 - DNA, 177 bp, Homo sapiens; identical to SEQ ID NO: 211384
  chr7:6500829-6501006
  hypo

SEQ ID NO: 391695 - DNA, 126 bp, Homo sapiens; identical to SEQ ID NO: 257387
  chr7:6597055-6597181
  hypo

SEQ ID NO: 391696 - DNA, 133 bp, Homo sapiens; identical to SEQ ID NO: 257395
  chr7:6662671-6662804
  hypo

SEQ ID NO: 391697 - DNA, 89 bp, Homo sapiens; identical to SEQ ID NO: 257416
  chr7:7666892-7666981
  hypo

SEQ ID NO: 391698 - DNA, 86 bp, Homo sapiens; identical to SEQ ID NO: 257417
  chr7:7799055-7799141
  hypo

SEQ ID NO: 391699 - DNA, 90 bp, Homo sapiens; identical to SEQ ID NO: 257423
  chr7:7998934-7999024
  hypo

SEQ ID NO: 391700 - DNA, 42 bp, Homo sapiens; identical to SEQ ID NO: 257425
  chr7:9707913-9707955
  hypo

SEQ ID NO: 391701 - DNA, 136 bp, Homo sapiens; identical to SEQ ID NO: 257429
  chr7:12510651-12510787
  hypo

SEQ ID NO: 391702 - DNA, 37 bp, Homo sapiens; identical to SEQ ID NO: 257437
  chr7:16256011-16256048
  hypo

SEQ ID NO: 391703 - DNA, 88 bp, Homo sapiens; identical to SEQ ID NO: 257438
  chr7:16313198-16313286
  hypo

SEQ ID NO: 391704 - DNA, 135 bp, Homo sapiens; identical to SEQ ID NO: 211404
  chr7:16438008-16438143
  hypo

SEQ ID NO: 391705 - DNA, 337 bp, Homo sapiens; identical to SEQ ID NO: 257445
  chr7:17214726-17215063
  hypo

SEQ ID NO: 391706 - DNA, 33 bp, Homo sapiens; identical to SEQ ID NO: 257447
  chr7:18041863-18041896
  hypo

SEQ ID NO: 391707 - DNA, 49 bp, Homo sapiens; identical to SEQ ID NO: 388430
  chr7:20826049-20826098
  hypo

SEQ ID NO: 391708 - DNA, 37 bp, Homo sapiens; identical to SEQ ID NO: 257459
  chr7:22083773-22083810
  hypo

SEQ ID NO: 391709 - DNA, 138 bp, Homo sapiens; identical to SEQ ID NO: 211446
  chr7:26439682-26439820
  hypo

SEQ ID NO: 391710 - DNA, 151 bp, Homo sapiens; identical to SEQ ID NO: 211447
  chr7:26439850-26440001
  hypo

SEQ ID NO: 391711 - DNA, 95 bp, Homo sapiens; identical to SEQ ID NO: 257491
  chr7:26687816-26687911
  hypo

SEQ ID NO: 391712 - DNA, 477 bp, Homo sapiens; identical to SEQ ID NO: 284901
  chr7:27191584-27192061
  hypo

SEQ ID NO: 391713 - DNA, 45 bp, Homo sapiens; identical to SEQ ID NO: 388439
  chr7:27192098-27192143
  hypo

SEQ ID NO: 391714 - DNA, 56 bp, Homo sapiens; identical to SEQ ID NO: 257524
  chr7:29689982-29690038
  hypo

SEQ ID NO: 391715 - DNA, 115 bp, Homo sapiens; identical to SEQ ID NO: 257542
  chr7:30946539-30946654
  hypo

SEQ ID NO: 391716 - DNA, 163 bp, Homo sapiens; identical to SEQ ID NO: 257547
  chr7:31068265-31068428
  hypo

SEQ ID NO: 391717 - DNA, 207 bp, Homo sapiens; identical to SEQ ID NO: 257556
  chr7:33542772-33542979
  hypo

SEQ ID NO: 391718 - DNA, 31 bp, Homo sapiens; identical to SEQ ID NO: 257565
  chr7:35066801-35066832
  hypo

SEQ ID NO: 391719 - DNA, 43 bp, Homo sapiens; identical to SEQ ID NO: 257579
  chr7:36823504-36823547
  hypo

SEQ ID NO: 391720 - DNA, 54 bp, Homo sapiens; identical to SEQ ID NO: 257585
  chr7:36985067-36985121
  hypo

SEQ ID NO: 391721 - DNA, 104 bp, Homo sapiens; identical to SEQ ID NO: 211497
  chr7:37250876-37250980
  hypo

SEQ ID NO: 391722 - DNA, 32 bp, Homo sapiens; identical to SEQ ID NO: 257599
  chr7:40156753-40156785
  hypo

SEQ ID NO: 391723 - DNA, 38 bp, Homo sapiens; identical to SEQ ID NO: 257602
  chr7:40840156-40840194
  hypo

SEQ ID NO: 391724 - DNA, 57 bp, Homo sapiens; identical to SEQ ID NO: 257609
  chr7:42142438-42142495
  hypo

SEQ ID NO: 391725 - DNA, 36 bp, Homo sapiens; identical to SEQ ID NO: 257631
  chr7:44250466-44250502
  hypo

SEQ ID NO: 391726 - DNA, 144 bp, Homo sapiens; identical to SEQ ID NO: 211511
  chr7:44582326-44582470
  hypo

SEQ ID NO: 391727 - DNA, 272 bp, Homo sapiens; identical to SEQ ID NO: 307655
  chr7:44582529-44582801
  hypo

SEQ ID NO: 391728 - DNA, 428 bp, Homo sapiens; identical to SEQ ID NO: 307664
  chr7:44801215-44801643
  hypo

SEQ ID NO: 391729 - DNA, 32 bp, Homo sapiens; identical to SEQ ID NO: 257649
  chr7:44844994-44845026
  hypo

SEQ ID NO: 391730 - DNA, 623 bp, Homo sapiens; identical to SEQ ID NO: 223093
  chr7:45026005-45026628
  hypo

SEQ ID NO: 391731 - DNA, 166 bp, Homo sapiens; identical to SEQ ID NO: 211522
  chr7:45125709-45125875
  hypo

SEQ ID NO: 391732 - DNA, 45 bp, Homo sapiens; identical to SEQ ID NO: 257662
  chr7:45809383-45809428
  hypo

SEQ ID NO: 391733 - DNA, 282 bp, Homo sapiens; identical to SEQ ID NO: 257664
  chr7:47338286-47338568
  hypo

SEQ ID NO: 391734 - DNA, 44 bp, Homo sapiens; identical to SEQ ID NO: 257668
  chr7:47384308-47384352
  hypo

SEQ ID NO: 391735 - DNA, 87 bp, Homo sapiens; identical to SEQ ID NO: 257673
  chr7:47446856-47446943
  hypo

SEQ ID NO: 391736 - DNA, 71 bp, Homo sapiens; identical to SEQ ID NO: 211533
  chr7:47581607-47581678
  hypo

SEQ ID NO: 391737 - DNA, 69 bp, Homo sapiens; identical to SEQ ID NO: 257680
  chr7:47612934-47613003
  hypo

SEQ ID NO: 391738 - DNA, 349 bp, Homo sapiens; identical to SEQ ID NO: 307715
  chr7:50341935-50342284
  hypo

SEQ ID NO: 391739 - DNA, 348 bp, Homo sapiens; identical to SEQ ID NO: 307716
  chr7:50342314-50342662
  hypo

SEQ ID NO: 391740 - DNA, 56 bp, Homo sapiens; identical to SEQ ID NO: 211543
  chr7:50447754-50447810
  hypo

SEQ ID NO: 391741 - DNA, 108 bp, Homo sapiens; identical to SEQ ID NO: 257703
  chr7:50460166-50460274
  hypo

SEQ ID NO: 391742 - DNA, 355 bp, Homo sapiens; identical to SEQ ID NO: 257708
  chr7:50654699-50655054
  hypo

SEQ ID NO: 391743 - DNA, 103 bp, Homo sapiens; identical to SEQ ID NO: 211550
  chr7:50659743-50659846
  hypo

SEQ ID NO: 391744 - DNA, 81 bp, Homo sapiens; identical to SEQ ID NO: 257723
  chr7:50821773-50821854
  hypo

SEQ ID NO: 391745 - DNA, 42 bp, Homo sapiens; identical to SEQ ID NO: 257727
  chr7:50905759-50905801
  hypo

SEQ ID NO: 391746 - DNA, 159 bp, Homo sapiens; identical to SEQ ID NO: 211555
  chr7:51083468-51083627
  hypo

SEQ ID NO: 391747 - DNA, 167 bp, Homo sapiens; identical to SEQ ID NO: 257734
  chr7:51126558-51126725
  hypo

SEQ ID NO: 391748 - DNA, 173 bp, Homo sapiens; identical to SEQ ID NO: 257735
  chr7:51130438-51130611
  hypo

SEQ ID NO: 391749 - DNA, 94 bp, Homo sapiens; identical to SEQ ID NO: 257740
  chr7:53071290-53071384
  hypo

SEQ ID NO: 391750 - DNA, 61 bp, Homo sapiens; identical to SEQ ID NO: 257753
  chr7:55468907-55468968
  hypo

SEQ ID NO: 391751 - DNA, 116 bp, Homo sapiens; identical to SEQ ID NO: 257758
  chr7:55541146-55541262
  hypo

SEQ ID NO: 391752 - DNA, 135 bp, Homo sapiens; identical to SEQ ID NO: 307801
  chr7:56144536-56144671
  hypo

SEQ ID NO: 391753 - DNA, 104 bp, Homo sapiens; identical to SEQ ID NO: 211570
  chr7:56636909-56637013
  hypo

SEQ ID NO: 391754 - DNA, 39 bp, Homo sapiens; identical to SEQ ID NO: 257792
  chr7:57712631-57712670
  hypo

SEQ ID NO: 391755 - DNA, 68 bp, Homo sapiens; identical to SEQ ID NO: 211575
  chr7:57878613-57878681
  hypo

SEQ ID NO: 391756 - DNA, 42 bp, Homo sapiens; identical to SEQ ID NO: 257804
  chr7:63867873-63867915
  hypo

SEQ ID NO: 391757 - DNA, 35 bp, Homo sapiens; identical to SEQ ID NO: 257810
  chr7:64358373-64358408
  hypo

SEQ ID NO: 391758 - DNA, 138 bp, Homo sapiens; identical to SEQ ID NO: 257815
  chr7:64478038-64478176
  hypo

SEQ ID NO: 391759 - DNA, 411 bp, Homo sapiens; identical to SEQ ID NO: 257818
  chr7:64895203-64895614
  hypo

SEQ ID NO: 391760 - DNA, 99 bp, Homo sapiens; identical to SEQ ID NO: 257820
  chr7:65442036-65442135
  hypo

SEQ ID NO: 391761 - DNA, 46 bp, Homo sapiens; identical to SEQ ID NO: 385809
  chr7:65562643-65562689
  hypo

SEQ ID NO: 391762 - DNA, 160 bp, Homo sapiens; identical to SEQ ID NO: 307864
  chr7:66105998-66106158
  hypo

SEQ ID NO: 391763 - DNA, 129 bp, Homo sapiens; identical to SEQ ID NO: 211600
  chr7:66369062-66369191
  hypo

SEQ ID NO: 391764 - DNA, 33 bp, Homo sapiens; identical to SEQ ID NO: 257864
  chr7:67388760-67388793
  hypo

SEQ ID NO: 391765 - DNA, 140 bp, Homo sapiens; identical to SEQ ID NO: 257872
  chr7:67563070-67563210
  hypo

SEQ ID NO: 391766 - DNA, 81 bp, Homo sapiens; identical to SEQ ID NO: 257885
  chr7:68008895-68008976
  hypo

SEQ ID NO: 391767 - DNA, 95 bp, Homo sapiens; identical to SEQ ID NO: 257896
  chr7:68960050-68960145
  hypo

SEQ ID NO: 391768 - DNA, 88 bp, Homo sapiens; identical to SEQ ID NO: 307935
  chr7:70311133-70311221
  hypo

SEQ ID NO: 391769 - DNA, 187 bp, Homo sapiens; identical to SEQ ID NO: 257905
  chr7:70378264-70378451
  hypo

SEQ ID NO: 391770 - DNA, 162 bp, Homo sapiens; identical to SEQ ID NO: 257911
  chr7:71251956-71252118
  hypo

SEQ ID NO: 391771 - DNA, 85 bp, Homo sapiens; identical to SEQ ID NO: 257912
  chr7:71276627-71276712
  hypo

SEQ ID NO: 391772 - DNA, 42 bp, Homo sapiens; identical to SEQ ID NO: 257915
  chr7:71396557-71396599
  hypo

SEQ ID NO: 391773 - DNA, 93 bp, Homo sapiens; identical to SEQ ID NO: 257921
  chr7:71913527-71913620
  hypo

SEQ ID NO: 391774 - DNA, 159 bp, Homo sapiens; identical to SEQ ID NO: 211621
  chr7:76632095-76632254
  hypo

SEQ ID NO: 391775 - DNA, 39 bp, Homo sapiens; identical to SEQ ID NO: 211622
  chr7:77184920-77184959
  hypo

SEQ ID NO: 391776 - DNA, 97 bp, Homo sapiens; identical to SEQ ID NO: 257944
  chr7:80572493-80572590
  hypo

SEQ ID NO: 391777 - DNA, 92 bp, Homo sapiens; identical to SEQ ID NO: 307984
  chr7:80790225-80790317
  hypo

SEQ ID NO: 391778 - DNA, 36 bp, Homo sapiens; identical to SEQ ID NO: 211630
  chr7:80917900-80917936
  hypo

SEQ ID NO: 391779 - DNA, 83 bp, Homo sapiens; identical to SEQ ID NO: 257951
  chr7:82176346-82176429
  hypo

SEQ ID NO: 391780 - DNA, 80 bp, Homo sapiens; identical to SEQ ID NO: 257956
  chr7:91655605-91655685
  hypo

SEQ ID NO: 391781 - DNA, 40 bp, Homo sapiens; identical to SEQ ID NO: 211641
  chr7:92075854-92075894
  hypo

SEQ ID NO: 391782 - DNA, 247 bp, Homo sapiens; identical to SEQ ID NO: 201045
  chr7:92463701-92463948
  hypo

SEQ ID NO: 391783 - DNA, 205 bp, Homo sapiens; identical to SEQ ID NO: 223143
  chr7:92464934-92465139
  hypo

SEQ ID NO: 391784 - DNA, 129 bp, Homo sapiens; identical to SEQ ID NO: 211647
  chr7:92939972-92940101
  hypo

SEQ ID NO: 391785 - DNA, 63 bp, Homo sapiens; identical to SEQ ID NO: 211649
  chr7:94293684-94293747
  hypo

SEQ ID NO: 391786 - DNA, 180 bp, Homo sapiens; identical to SEQ ID NO: 223145
  chr7:95064267-95064447
  hypo

SEQ ID NO: 391787 - DNA, 186 bp, Homo sapiens; identical to SEQ ID NO: 257970
  chr7:97670351-97670537
  hypo

SEQ ID NO: 391788 - DNA, 111 bp, Homo sapiens; identical to SEQ ID NO: 257982
  chr7:97844377-97844488
  hypo

SEQ ID NO: 391789 - DNA, 165 bp, Homo sapiens; identical to SEQ ID NO: 211657
  chr7:97857342-97857507
  hypo

SEQ ID NO: 391790 - DNA, 343 bp, Homo sapiens; identical to SEQ ID NO: 211661
  chr7:98115911-98116254
  hypo

SEQ ID NO: 391791 - DNA, 530 bp, Homo sapiens; identical to SEQ ID NO: 257997
  chr7:98586157-98586687
  hypo

SEQ ID NO: 391792 - DNA, 397 bp, Homo sapiens; identical to SEQ ID NO: 258002
  chr7:98602532-98602929
  hypo

SEQ ID NO: 391793 - DNA, 162 bp, Homo sapiens; identical to SEQ ID NO: 211665
  chr7:98704341-98704503
  hypo

SEQ ID NO: 391794 - DNA, 70 bp, Homo sapiens; identical to SEQ ID NO: 258035
  chr7:99065118-99065188
  hypo

SEQ ID NO: 391795 - DNA, 38 bp, Homo sapiens; identical to SEQ ID NO: 258045
  chr7:99391324-99391362
  hypo

SEQ ID NO: 391796 - DNA, 74 bp, Homo sapiens; identical to SEQ ID NO: 223155
  chr7:99613133-99613207
  hypo

SEQ ID NO: 391797 - DNA, 169 bp, Homo sapiens; identical to SEQ ID NO: 285215
  chr7:99725637-99725806
  hypo

SEQ ID NO: 391798 - DNA, 92 bp, Homo sapiens; identical to SEQ ID NO: 258058
  chr7:99849463-99849555
  hypo

SEQ ID NO: 391799 - DNA, 115 bp, Homo sapiens; identical to SEQ ID NO: 211686
  chr7:100025340-100025455
  hypo

SEQ ID NO: 391800 - DNA, 180 bp, Homo sapiens; identical to SEQ ID NO: 258068
  chr7:100098054-100098234
  hypo

SEQ ID NO: 391801 - DNA, 36 bp, Homo sapiens; identical to SEQ ID NO: 258073
  chr7:100189309-100189345
  hypo

SEQ ID NO: 391802 - DNA, 95 bp, Homo sapiens; identical to SEQ ID NO: 258076
  chr7:100246355-100246450
  hypo

SEQ ID NO: 391803 - DNA, 32 bp, Homo sapiens; identical to SEQ ID NO: 258077
  chr7:100258217-100258249
  hypo

SEQ ID NO: 391804 - DNA, 38 bp, Homo sapiens
  chr7:100405249-100405287
  hypo
gttccccctcccatccacatcttttttttttagagaca

SEQ ID NO: 391805 - DNA, 91 bp, Homo sapiens; identical to SEQ ID NO: 258096
  chr7:100514709-100514800
  hypo

SEQ ID NO: 391806 - DNA, 38 bp, Homo sapiens; identical to SEQ ID NO: 258097
  chr7:100650571-100650609
  hypo

SEQ ID NO: 391807 - DNA, 36 bp, Homo sapiens; identical to SEQ ID NO: 258100
  chr7:100834973-100835009
  hypo

SEQ ID NO: 391808 - DNA, 159 bp, Homo sapiens; identical to SEQ ID NO: 223164
  chr7:101457610-101457769
  hypo

SEQ ID NO: 391809 - DNA, 283 bp, Homo sapiens; identical to SEQ ID NO: 211720
  chr7:101583547-101583830
  hypo

SEQ ID NO: 391810 - DNA, 121 bp, Homo sapiens; identical to SEQ ID NO: 308204
  chr7:101586046-101586167
  hypo

SEQ ID NO: 391811 - DNA, 215 bp, Homo sapiens; identical to SEQ ID NO: 258140
  chr7:101653175-101653390
  hypo

SEQ ID NO: 391812 - DNA, 66 bp, Homo sapiens; identical to SEQ ID NO: 201105
  chr7:101842081-101842147
  hypo

SEQ ID NO: 391813 - DNA, 845 bp, Homo sapiens; identical to SEQ ID NO: 201107
  chr7:101844639-101845484
  hypo

SEQ ID NO: 391814 - DNA, 303 bp, Homo sapiens; identical to SEQ ID NO: 201110
  chr7:101870646-101870949
  hypo

SEQ ID NO: 391815 - DNA, 65 bp, Homo sapiens; identical to SEQ ID NO: 201121
  chr7:101926003-101926068
  hypo

SEQ ID NO: 391816 - DNA, 120 bp, Homo sapiens; identical to SEQ ID NO: 258168
  chr7:105278913-105279033
  hypo

SEQ ID NO: 391817 - DNA, 189 bp, Homo sapiens; identical to SEQ ID NO: 258171
  chr7:105399236-105399425
  hypo

SEQ ID NO: 391818 - DNA, 85 bp, Homo sapiens; identical to SEQ ID NO: 258177
  chr7:106574561-106574646
  hypo

SEQ ID NO: 391819 - DNA, 115 bp, Homo sapiens; identical to SEQ ID NO: 258189
  chr7:107430184-107430299
  hypo

SEQ ID NO: 391820 - DNA, 57 bp, Homo sapiens; identical to SEQ ID NO: 258193
  chr7:107773016-107773073
  hypo

SEQ ID NO: 391821 - DNA, 81 bp, Homo sapiens; identical to SEQ ID NO: 258197
  chr7:110471985-110472066
  hypo

SEQ ID NO: 391822 - DNA, 102 bp, Homo sapiens; identical to SEQ ID NO: 258204
  chr7:116914129-116914231
  hypo

SEQ ID NO: 391823 - DNA, 38 bp, Homo sapiens; identical to SEQ ID NO: 258208
  chr7:125532056-125532094
  hypo

SEQ ID NO: 391824 - DNA, 32 bp, Homo sapiens; identical to SEQ ID NO: 258209
  chr7:126013969-126014001
  hypo

SEQ ID NO: 391825 - DNA, 245 bp, Homo sapiens; identical to SEQ ID NO: 258212
  chr7:127235457-127235702
  hypo

SEQ ID NO: 391826 - DNA, 172 bp, Homo sapiens; identical to SEQ ID NO: 258219
  chr7:127583867-127584039
  hypo

SEQ ID NO: 391827 - DNA, 83 bp, Homo sapiens; identical to SEQ ID NO: 308344
  chr7:127615838-127615921
  hypo

SEQ ID NO: 391828 - DNA, 215 bp, Homo sapiens; identical to SEQ ID NO: 258229
  chr7:128441280-128441495
  hypo

SEQ ID NO: 391829 - DNA, 104 bp, Homo sapiens; identical to SEQ ID NO: 223223
  chr7:128509606-128509710
  hypo

SEQ ID NO: 391830 - DNA, 42 bp, Homo sapiens; identical to SEQ ID NO: 258240
  chr7:128534159-128534201
  hypo

SEQ ID NO: 391831 - DNA, 39 bp, Homo sapiens; identical to SEQ ID NO: 258259
  chr7:129483110-129483149
  hypo

SEQ ID NO: 391832 - DNA, 31 bp, Homo sapiens; identical to SEQ ID NO: 258265
  chr7:129665425-129665456
  hypo

SEQ ID NO: 391833 - DNA, 147 bp, Homo sapiens; identical to SEQ ID NO: 211815
  chr7:129778855-129779002
  hypo

SEQ ID NO: 391834 - DNA, 74 bp, Homo sapiens; identical to SEQ ID NO: 258269
  chr7:129780114-129780188
  hypo

SEQ ID NO: 391835 - DNA, 31 bp, Homo sapiens; identical to SEQ ID NO: 385849
  chr7:132419108-132419139
  hypo

SEQ ID NO: 391836 - DNA, 45 bp, Homo sapiens; identical to SEQ ID NO: 211823
  chr7:132527948-132527993
  hypo

SEQ ID NO: 391837 - DNA, 203 bp, Homo sapiens; identical to SEQ ID NO: 211824
  chr7:132637910-132638113
  hypo

SEQ ID NO: 391838 - DNA, 92 bp, Homo sapiens; identical to SEQ ID NO: 211825
  chr7:133234086-133234178
  hypo

SEQ ID NO: 391839 - DNA, 42 bp, Homo sapiens; identical to SEQ ID NO: 258292
  chr7:134135183-134135225
  hypo

SEQ ID NO: 391840 - DNA, 32 bp, Homo sapiens; identical to SEQ ID NO: 385851
  chr7:134880722-134880754
  hypo

SEQ ID NO: 391841 - DNA, 238 bp, Homo sapiens; identical to SEQ ID NO: 211833
  chr7:134890670-134890908
  hypo

SEQ ID NO: 391842 - DNA, 197 bp, Homo sapiens; identical to SEQ ID NO: 258307
  chr7:135390900-135391097
  hypo

SEQ ID NO: 391843 - DNA, 96 bp, Homo sapiens; identical to SEQ ID NO: 211839
  chr7:136437909-136438005
  hypo

SEQ ID NO: 391844 - DNA, 40 bp, Homo sapiens; identical to SEQ ID NO: 258321
  chr7:137658137-137658177
  hypo

SEQ ID NO: 391845 - DNA, 37 bp, Homo sapiens; identical to SEQ ID NO: 258325
  chr7:137742304-137742341
  hypo

SEQ ID NO: 391846 - DNA, 152 bp, Homo sapiens; identical to SEQ ID NO: 258331
  chr7:138125641-138125793
  hypo

SEQ ID NO: 391847 - DNA, 37 bp, Homo sapiens; identical to SEQ ID NO: 258334
  chr7:138588489-138588526
  hypo

SEQ ID NO: 391848 - DNA, 437 bp, Homo sapiens; identical to SEQ ID NO: 223234
  chr7:139478051-139478488
  hypo

SEQ ID NO: 391849 - DNA, 346 bp, Homo sapiens; identical to SEQ ID NO: 211856
  chr7:139733611-139733957
  hypo

SEQ ID NO: 391850 - DNA, 142 bp, Homo sapiens; identical to SEQ ID NO: 258357
  chr7:139763645-139763787
  hypo

SEQ ID NO: 391851 - DNA, 44 bp, Homo sapiens; identical to SEQ ID NO: 258359
  chr7:139866424-139866468
  hypo

SEQ ID NO: 391852 - DNA, 160 bp, Homo sapiens; identical to SEQ ID NO: 211857
  chr7:139992308-139992468
  hypo

SEQ ID NO: 391853 - DNA, 169 bp, Homo sapiens; identical to SEQ ID NO: 258368
  chr7:140048397-140048566
  hypo

SEQ ID NO: 391854 - DNA, 190 bp, Homo sapiens; identical to SEQ ID NO: 258369
  chr7:140050012-140050202
  hypo

SEQ ID NO: 391855 - DNA, 92 bp, Homo sapiens; identical to SEQ ID NO: 211861
  chr7:140063543-140063635
  hypo

SEQ ID NO: 391856 - DNA, 77 bp, Homo sapiens; identical to SEQ ID NO: 258378
  chr7:140217363-140217440
  hypo

SEQ ID NO: 391857 - DNA, 280 bp, Homo sapiens; identical to SEQ ID NO: 211866
  chr7:140221611-140221891
  hypo

SEQ ID NO: 391858 - DNA, 180 bp, Homo sapiens; identical to SEQ ID NO: 258389
  chr7:142906905-142907085
  hypo

SEQ ID NO: 391859 - DNA, 144 bp, Homo sapiens; identical to SEQ ID NO: 258391
  chr7:143013314-143013458
  hypo

SEQ ID NO: 391860 - DNA, 257 bp, Homo sapiens; identical to SEQ ID NO: 223241
  chr7:144100839-144101096
  hypo

SEQ ID NO: 391861 - DNA, 76 bp, Homo sapiens; identical to SEQ ID NO: 258394
  chr7:145021289-145021365
  hypo

SEQ ID NO: 391862 - DNA, 152 bp, Homo sapiens; identical to SEQ ID NO: 201215
  chr7:145981901-145982053
  hypo

SEQ ID NO: 391863 - DNA, 42 bp, Homo sapiens; identical to SEQ ID NO: 258399
  chr7:146656356-146656398
  hypo

SEQ ID NO: 391864 - DNA, 67 bp, Homo sapiens; identical to SEQ ID NO: 258403
  chr7:147954381-147954448
  hypo

SEQ ID NO: 391865 - DNA, 115 bp, Homo sapiens; identical to SEQ ID NO: 258405
  chr7:148077004-148077119
  hypo

SEQ ID NO: 391866 - DNA, 128 bp, Homo sapiens; identical to SEQ ID NO: 258409
  chr7:148296995-148297123
  hypo

SEQ ID NO: 391867 - DNA, 71 bp, Homo sapiens; identical to SEQ ID NO: 201219
  chr7:148508741-148508812
  hypo

SEQ ID NO: 391868 - DNA, 184 bp, Homo sapiens; identical to SEQ ID NO: 201220
  chr7:148511050-148511234
  hypo

SEQ ID NO: 391869 - DNA, 34 bp, Homo sapiens; identical to SEQ ID NO: 201222
  chr7:148513818-148513852
  hypo

SEQ ID NO: 391870 - DNA, 76 bp, Homo sapiens; identical to SEQ ID NO: 201224
  chr7:148515086-148515162
  hypo

SEQ ID NO: 391871 - DNA, 319 bp, Homo sapiens; identical to SEQ ID NO: 258428
  chr7:148992084-148992403
  hypo

SEQ ID NO: 391872 - DNA, 32 bp, Homo sapiens; identical to SEQ ID NO: 211900
  chr7:149114320-149114352
  hypo

SEQ ID NO: 391873 - DNA, 430 bp, Homo sapiens; identical to SEQ ID NO: 258433
  chr7:149171587-149172017
  hypo

SEQ ID NO: 391874 - DNA, 131 bp, Homo sapiens; identical to SEQ ID NO: 258442
  chr7:149516460-149516591
  hypo

SEQ ID NO: 391875 - DNA, 154 bp, Homo sapiens; identical to SEQ ID NO: 211911
  chr7:150104947-150105101
  hypo

SEQ ID NO: 391876 - DNA, 53 bp, Homo sapiens; identical to SEQ ID NO: 211912
  chr7:150105548-150105601
  hypo

SEQ ID NO: 391877 - DNA, 50 bp, Homo sapiens; identical to SEQ ID NO: 258460
  chr7:150745459-150745509
  hypo

SEQ ID NO: 391878 - DNA, 51 bp, Homo sapiens; identical to SEQ ID NO: 258479
  chr7:151074139-151074190
  hypo

SEQ ID NO: 391879 - DNA, 33 bp, Homo sapiens; identical to SEQ ID NO: 211932
  chr7:151134320-151134353
  hypo

SEQ ID NO: 391880 - DNA, 304 bp, Homo sapiens; identical to SEQ ID NO: 211935
  chr7:151358568-151358872
  hypo

SEQ ID NO: 391881 - DNA, 207 bp, Homo sapiens; identical to SEQ ID NO: 258492
  chr7:151412757-151412964
  hypo

SEQ ID NO: 391882 - DNA, 86 bp, Homo sapiens; identical to SEQ ID NO: 211940
  chr7:151712356-151712442
  hypo

SEQ ID NO: 391883 - DNA, 131 bp, Homo sapiens; identical to SEQ ID NO: 258509
  chr7:151781606-151781737
  hypo

SEQ ID NO: 391884 - DNA, 205 bp, Homo sapiens; identical to SEQ ID NO: 258513
  chr7:151826350-151826555
  hypo

SEQ ID NO: 391885 - DNA, 80 bp, Homo sapiens; identical to SEQ ID NO: 258517
  chr7:152159225-152159305
  hypo

SEQ ID NO: 391886 - DNA, 173 bp, Homo sapiens; identical to SEQ ID NO: 211954
  chr7:152555646-152555819
  hypo

SEQ ID NO: 391887 - DNA, 39 bp, Homo sapiens; identical to SEQ ID NO: 211955
  chr7:152647711-152647750
  hypo

SEQ ID NO: 391888 - DNA, 86 bp, Homo sapiens; identical to SEQ ID NO: 258540
  chr7:153111045-153111131
  hypo

SEQ ID NO: 391889 - DNA, 233 bp, Homo sapiens; identical to SEQ ID NO: 258550
  chr7:154646528-154646761
  hypo

SEQ ID NO: 391890 - DNA, 211 bp, Homo sapiens; identical to SEQ ID NO: 258552
  chr7:154875881-154876092
  hypo

SEQ ID NO: 391891 - DNA, 68 bp, Homo sapiens; identical to SEQ ID NO: 258553
  chr7:154922371-154922439
  hypo

SEQ ID NO: 391892 - DNA, 95 bp, Homo sapiens; identical to SEQ ID NO: 258555
  chr7:155016945-155017040
  hypo

SEQ ID NO: 391893 - DNA, 359 bp, Homo sapiens; identical to SEQ ID NO: 211959
  chr7:155130273-155130632
  hypo

SEQ ID NO: 391894 - DNA, 83 bp, Homo sapiens; identical to SEQ ID NO: 308729
  chr7:155130794-155130877
  hypo

SEQ ID NO: 391895 - DNA, 94 bp, Homo sapiens; identical to SEQ ID NO: 258560
  chr7:155274563-155274657
  hypo

SEQ ID NO: 391896 - DNA, 79 bp, Homo sapiens; identical to SEQ ID NO: 211962
  chr7:155352613-155352692
  hypo

SEQ ID NO: 391897 - DNA, 195 bp, Homo sapiens; identical to SEQ ID NO: 211966
  chr7:155532479-155532674
  hypo

SEQ ID NO: 391898 - DNA, 256 bp, Homo sapiens; identical to SEQ ID NO: 258574
  chr7:155582651-155582907
  hypo

SEQ ID NO: 391899 - DNA, 169 bp, Homo sapiens; identical to SEQ ID NO: 258579
  chr7:155706980-155707149
  hypo

SEQ ID NO: 391900 - DNA, 97 bp, Homo sapiens; identical to SEQ ID NO: 211974
  chr7:155828366-155828463
  hypo

SEQ ID NO: 391901 - DNA, 311 bp, Homo sapiens; identical to SEQ ID NO: 258586
  chr7:155868045-155868356
  hypo

SEQ ID NO: 391902 - DNA, 206 bp, Homo sapiens; identical to SEQ ID NO: 211976
  chr7:155900805-155901011
  hypo

SEQ ID NO: 391903 - DNA, 50 bp, Homo sapiens; identical to SEQ ID NO: 308774
  chr7:156290627-156290677
  hypo

SEQ ID NO: 391904 - DNA, 187 bp, Homo sapiens; identical to SEQ ID NO: 258610
  chr7:156613330-156613517
  hypo

SEQ ID NO: 391905 - DNA, 163 bp, Homo sapiens; identical to SEQ ID NO: 258611
  chr7:156733207-156733370
  hypo

SEQ ID NO: 391906 - DNA, 120 bp, Homo sapiens; identical to SEQ ID NO: 211986
  chr7:156733810-156733930
  hypo

SEQ ID NO: 391907 - DNA, 37 bp, Homo sapiens; identical to SEQ ID NO: 211987
  chr7:156733990-156734027
  hypo

SEQ ID NO: 391908 - DNA, 197 bp, Homo sapiens; identical to SEQ ID NO: 258622
  chr7:156918515-156918712
  hypo

SEQ ID NO: 391909 - DNA, 86 bp, Homo sapiens; identical to SEQ ID NO: 211992
  chr7:156937634-156937720
  hypo

SEQ ID NO: 391910 - DNA, 222 bp, Homo sapiens; identical to SEQ ID NO: 258628
  chr7:157072934-157073156
  hypo

SEQ ID NO: 391911 - DNA, 149 bp, Homo sapiens; identical to SEQ ID NO: 258639
  chr7:157122530-157122679
  hypo

SEQ ID NO: 391912 - DNA, 123 bp, Homo sapiens; identical to SEQ ID NO: 308829
  chr7:157332825-157332948
  hypo

SEQ ID NO: 391913 - DNA, 115 bp, Homo sapiens; identical to SEQ ID NO: 308830
  chr7:157332978-157333093
  hypo

SEQ ID NO: 391914 - DNA, 109 bp, Homo sapiens; identical to SEQ ID NO: 258664
  chr7:157364282-157364391
  hypo

SEQ ID NO: 391915 - DNA, 134 bp, Homo sapiens; identical to SEQ ID NO: 258668
  chr7:157372651-157372785
  hypo

SEQ ID NO: 391916 - DNA, 378 bp, Homo sapiens; identical to SEQ ID NO: 308850
  chr7:157402241-157402619
  hypo

SEQ ID NO: 391917 - DNA, 83 bp, Homo sapiens; identical to SEQ ID NO: 308851
  chr7:157402654-157402737
  hypo

SEQ ID NO: 391918 - DNA, 249 bp, Homo sapiens; identical to SEQ ID NO: 258678
  chr7:157413023-157413272
  hypo

SEQ ID NO: 391919 - DNA, 216 bp, Homo sapiens; identical to SEQ ID NO: 212018
  chr7:157448958-157449174
  hypo

SEQ ID NO: 391920 - DNA, 50 bp, Homo sapiens; identical to SEQ ID NO: 212019
  chr7:157449405-157449455
  hypo

SEQ ID NO: 391921 - DNA, 452 bp, Homo sapiens; identical to SEQ ID NO: 258690
  chr7:157467102-157467554
  hypo

SEQ ID NO: 391922 - DNA, 342 bp, Homo sapiens; identical to SEQ ID NO: 212026
  chr7:157549923-157550265
  hypo

SEQ ID NO: 391923 - DNA, 155 bp, Homo sapiens; identical to SEQ ID NO: 212027
  chr7:157567209-157567364
  hypo

SEQ ID NO: 391924 - DNA, 47 bp, Homo sapiens; identical to SEQ ID NO: 212028
  chr7:157568321-157568368
  hypo

SEQ ID NO: 391925 - DNA, 138 bp, Homo sapiens; identical to SEQ ID NO: 258704
  chr7:157570973-157571111
  hypo

SEQ ID NO: 391926 - DNA, 123 bp, Homo sapiens; identical to SEQ ID NO: 258714
  chr7:157620461-157620584
  hypo

SEQ ID NO: 391927 - DNA, 40 bp, Homo sapiens; identical to SEQ ID NO: 308913
  chr7:157660158-157660198
  hypo

SEQ ID NO: 391928 - DNA, 259 bp, Homo sapiens; identical to SEQ ID NO: 258731
  chr7:157660637-157660896
  hypo

SEQ ID NO: 391929 - DNA, 65 bp, Homo sapiens; identical to SEQ ID NO: 258737
  chr7:157731890-157731955
  hypo

SEQ ID NO: 391930 - DNA, 239 bp, Homo sapiens; identical to SEQ ID NO: 212045
  chr7:157794264-157794503
  hypo

SEQ ID NO: 391931 - DNA, 456 bp, Homo sapiens; identical to SEQ ID NO: 308928
  chr7:157794648-157795104
  hypo

SEQ ID NO: 391932 - DNA, 50 bp, Homo sapiens; identical to SEQ ID NO: 258754
  chr7:157903545-157903595
  hypo

SEQ ID NO: 391933 - DNA, 104 bp, Homo sapiens; identical to SEQ ID NO: 258755
  chr7:157903815-157903919
  hypo

SEQ ID NO: 391934 - DNA, 151 bp, Homo sapiens; identical to SEQ ID NO: 212062
  chr7:157981292-157981443
  hypo

SEQ ID NO: 391935 - DNA, 290 bp, Homo sapiens; identical to SEQ ID NO: 258778
  chr7:158044818-158045108
  hypo

SEQ ID NO: 391936 - DNA, 127 bp, Homo sapiens; identical to SEQ ID NO: 258780
  chr7:158060880-158061007
  hypo

SEQ ID NO: 391937 - DNA, 96 bp, Homo sapiens; identical to SEQ ID NO: 212071
  chr7:158109478-158109574
  hypo

SEQ ID NO: 391938 - DNA, 482 bp, Homo sapiens; identical to SEQ ID NO: 258799
  chr7:158240243-158240725
  hypo

SEQ ID NO: 391939 - DNA, 117 bp, Homo sapiens; identical to SEQ ID NO: 258807
  chr7:158307739-158307856
  hypo

SEQ ID NO: 391940 - DNA, 196 bp, Homo sapiens; identical to SEQ ID NO: 212098
  chr7:158792183-158792379
  hypo

SEQ ID NO: 391941 - DNA, 186 bp, Homo sapiens; identical to SEQ ID NO: 258831
  chr7:158820419-158820605
  hypo

SEQ ID NO: 391942 - DNA, 114 bp, Homo sapiens; identical to SEQ ID NO: 258836
  chr7:158940025-158940139
  hypo

SEQ ID NO: 391943 - DNA, 187 bp, Homo sapiens; identical to SEQ ID NO: 258838
  chr7:158951178-158951365
  hypo

SEQ ID NO: 391944 - DNA, 106 bp, Homo sapiens; identical to SEQ ID NO: 258840
  chr8:287940-288046
  hypo

SEQ ID NO: 391945 - DNA, 93 bp, Homo sapiens; identical to SEQ ID NO: 285610
  chr8:495072-495165
  hypo

SEQ ID NO: 391946 - DNA, 33 bp, Homo sapiens; identical to SEQ ID NO: 309040
  chr8:566474-566507
  hypo

SEQ ID NO: 391947 - DNA, 324 bp, Homo sapiens; identical to SEQ ID NO: 212105
  chr8:893356-893680
  hypo

SEQ ID NO: 391948 - DNA, 76 bp, Homo sapiens; identical to SEQ ID NO: 258857
  chr8:978468-978544
  hypo

SEQ ID NO: 391949 - DNA, 74 bp, Homo sapiens; identical to SEQ ID NO: 212108
  chr8:1048772-1048846
  hypo

SEQ ID NO: 391950 - DNA, 298 bp, Homo sapiens; identical to SEQ ID NO: 258882
  chr8:1475085-1475383
  hypo

SEQ ID NO: 391951 - DNA, 213 bp, Homo sapiens; identical to SEQ ID NO: 309084
  chr8:1501387-1501600
  hypo

SEQ ID NO: 391952 - DNA, 235 bp, Homo sapiens; identical to SEQ ID NO: 212119
  chr8:1777141-1777376
  hypo

SEQ ID NO: 391953 - DNA, 382 bp, Homo sapiens; identical to SEQ ID NO: 258896
  chr8:1791891-1792273
  hypo

SEQ ID NO: 391954 - DNA, 201 bp, Homo sapiens; identical to SEQ ID NO: 258901
  chr8:1801273-1801474
  hypo

SEQ ID NO: 391955 - DNA, 727 bp, Homo sapiens; identical to SEQ ID NO: 258910
  chr8:1877722-1878449
  hypo

SEQ ID NO: 391956 - DNA, 151 bp, Homo sapiens; identical to SEQ ID NO: 258913
  chr8:1902126-1902277
  hypo

SEQ ID NO: 391957 - DNA, 33 bp, Homo sapiens; identical to SEQ ID NO: 212126
  chr8:1926963-1926996
  hypo

SEQ ID NO: 391958 - DNA, 31 bp, Homo sapiens; identical to SEQ ID NO: 258922
  chr8:4218294-4218325
  hypo

SEQ ID NO: 391959 - DNA, 253 bp, Homo sapiens; identical to SEQ ID NO: 258924
  chr8:5829440-5829693
  hypo

SEQ ID NO: 391960 - DNA, 134 bp, Homo sapiens; identical to SEQ ID NO: 258925
  chr8:5909951-5910085
  hypo

SEQ ID NO: 391961 - DNA, 272 bp, Homo sapiens; identical to SEQ ID NO: 258929
  chr8:6323187-6323459
  hypo

SEQ ID NO: 391962 - DNA, 209 bp, Homo sapiens; identical to SEQ ID NO: 212135
  chr8:6756662-6756871
  hypo

SEQ ID NO: 391963 - DNA, 328 bp, Homo sapiens; identical to SEQ ID NO: 258951
  chr8:8471121-8471449
  hypo

SEQ ID NO: 391964 - DNA, 155 bp, Homo sapiens; identical to SEQ ID NO: 258958
  chr8:8642145-8642300
  hypo

SEQ ID NO: 391965 - DNA, 159 bp, Homo sapiens; identical to SEQ ID NO: 212146
  chr8:8690237-8690396
  hypo

SEQ ID NO: 391966 - DNA, 105 bp, Homo sapiens; identical to SEQ ID NO: 212148
  chr8:8698610-8698715
  hypo

SEQ ID NO: 391967 - DNA, 120 bp, Homo sapiens; identical to SEQ ID NO: 212150
  chr8:8712566-8712686
  hypo

SEQ ID NO: 391968 - DNA, 167 bp, Homo sapiens; identical to SEQ ID NO: 223304
  chr8:8750284-8750451
  hypo

SEQ ID NO: 391969 - DNA, 139 bp, Homo sapiens; identical to SEQ ID NO: 223305
  chr8:8750520-8750659
  hypo

SEQ ID NO: 391970 - DNA, 39 bp, Homo sapiens; identical to SEQ ID NO: 258977
  chr8:8803669-8803708
  hypo

SEQ ID NO: 391971 - DNA, 141 bp, Homo sapiens; identical to SEQ ID NO: 309189
  chr8:10192957-10193098
  hypo

SEQ ID NO: 391972 - DNA, 176 bp, Homo sapiens; identical to SEQ ID NO: 212161
  chr8:10261662-10261838
  hypo

SEQ ID NO: 391973 - DNA, 188 bp, Homo sapiens; identical to SEQ ID NO: 212162
  chr8:10261986-10262174
  hypo

SEQ ID NO: 391974 - DNA, 141 bp, Homo sapiens; identical to SEQ ID NO: 258984
  chr8:10283196-10283337
  hypo

SEQ ID NO: 391975 - DNA, 202 bp, Homo sapiens; identical to SEQ ID NO: 212164
  chr8:10683500-10683702
  hypo

SEQ ID NO: 391976 - DNA, 66 bp, Homo sapiens; identical to SEQ ID NO: 212167
  chr8:11612347-11612413
  hypo

SEQ ID NO: 391977 - DNA, 75 bp, Homo sapiens; identical to SEQ ID NO: 258998
  chr8:11646750-11646825
  hypo

SEQ ID NO: 391978 - DNA, 225 bp, Homo sapiens; identical to SEQ ID NO: 212171
  chr8:12623675-12623900
  hypo

SEQ ID NO: 391979 - DNA, 101 bp, Homo sapiens; identical to SEQ ID NO: 259018
  chr8:17360874-17360975
  hypo

SEQ ID NO: 391980 - DNA, 363 bp, Homo sapiens; identical to SEQ ID NO: 388527
  chr8:17434563-17434926
  hypo

SEQ ID NO: 391981 - DNA, 210 bp, Homo sapiens; identical to SEQ ID NO: 259022
  chr8:17767556-17767766
  hypo

SEQ ID NO: 391982 - DNA, 64 bp, Homo sapiens; identical to SEQ ID NO: 259034
  chr8:19715650-19715714
  hypo

SEQ ID NO: 391983 - DNA, 195 bp, Homo sapiens; identical to SEQ ID NO: 259038
  chr8:21590921-21591116
  hypo

SEQ ID NO: 391984 - DNA, 124 bp, Homo sapiens; identical to SEQ ID NO: 201326
  chr8:21906319-21906443
  hypo

SEQ ID NO: 391985 - DNA, 297 bp, Homo sapiens; identical to SEQ ID NO: 259061
  chr8:22255560-22255857
  hypo

SEQ ID NO: 391986 - DNA, 78 bp, Homo sapiens; identical to SEQ ID NO: 384230
  chr8:22408681-22408759
  hypo

SEQ ID NO: 391987 - DNA, 44 bp, Homo sapiens; identical to SEQ ID NO: 388535
  chr8:22409076-22409120
  hypo

SEQ ID NO: 391988 - DNA, 75 bp, Homo sapiens; identical to SEQ ID NO: 259066
  chr8:22477223-22477298
  hypo

SEQ ID NO: 391989 - DNA, 145 bp, Homo sapiens; identical to SEQ ID NO: 212196
  chr8:22485267-22485412
  hypo

SEQ ID NO: 391990 - DNA, 217 bp, Homo sapiens; identical to SEQ ID NO: 223331
  chr8:22550331-22550548
  hypo

SEQ ID NO: 391991 - DNA, 54 bp, Homo sapiens; identical to SEQ ID NO: 259072
  chr8:22773287-22773341
  hypo

SEQ ID NO: 391992 - DNA, 309 bp, Homo sapiens; identical to SEQ ID NO: 223333
  chr8:22925472-22925781
  hypo

SEQ ID NO: 391993 - DNA, 41 bp, Homo sapiens; identical to SEQ ID NO: 159495
  chr8:23201725-23201766
  hypo

SEQ ID NO: 391994 - DNA, 202 bp, Homo sapiens; identical to SEQ ID NO: 259088
  chr8:25107887-25108089
  hypo

SEQ ID NO: 391995 - DNA, 257 bp, Homo sapiens; identical to SEQ ID NO: 259093
  chr8:25336999-25337256
  hypo

SEQ ID NO: 391996 - DNA, 144 bp, Homo sapiens; identical to SEQ ID NO: 285758
  chr8:25902185-25902329
  hypo

SEQ ID NO: 391997 - DNA, 43 bp, Homo sapiens; identical to SEQ ID NO: 384236
  chr8:26372150-26372193
  hypo

SEQ ID NO: 391998 - DNA, 64 bp, Homo sapiens; identical to SEQ ID NO: 223345
  chr8:26435020-26435084
  hypo

SEQ ID NO: 391999 - DNA, 54 bp, Homo sapiens; identical to SEQ ID NO: 259107
  chr8:27279918-27279972
  hypo

SEQ ID NO: 392000 - DNA, 33 bp, Homo sapiens; identical to SEQ ID NO: 259109
  chr8:27327202-27327235
  hypo

SEQ ID NO: 392001 - DNA, 124 bp, Homo sapiens; identical to SEQ ID NO: 212220
  chr8:27845168-27845292
  hypo

SEQ ID NO: 392002 - DNA, 612 bp, Homo sapiens; identical to SEQ ID NO: 259120
  chr8:28208626-28209238
  hypo

SEQ ID NO: 392003 - DNA, 61 bp, Homo sapiens; identical to SEQ ID NO: 259124
  chr8:28269021-28269082
  hypo

SEQ ID NO: 392004 - DNA, 208 bp, Homo sapiens; identical to SEQ ID NO: 259126
  chr8:28610787-28610995
  hypo

SEQ ID NO: 392005 - DNA, 149 bp, Homo sapiens; identical to SEQ ID NO: 259136
  chr8:29212822-29212971
  hypo

SEQ ID NO: 392006 - DNA, 41 bp, Homo sapiens; identical to SEQ ID NO: 212233
  chr8:29951802-29951843
  hypo

SEQ ID NO: 392007 - DNA, 99 bp, Homo sapiens; identical to SEQ ID NO: 212234
  chr8:29958255-29958354
  hypo

SEQ ID NO: 392008 - DNA, 49 bp, Homo sapiens; identical to SEQ ID NO: 259144
  chr8:30432995-30433044
  hypo

SEQ ID NO: 392009 - DNA, 32 bp, Homo sapiens; identical to SEQ ID NO: 259150
  chr8:36636712-36636744
  hypo

SEQ ID NO: 392010 - DNA, 120 bp, Homo sapiens; identical to SEQ ID NO: 259151
  chr8:36636804-36636924
  hypo

SEQ ID NO: 392011 - DNA, 70 bp, Homo sapiens; identical to SEQ ID NO: 259169
  chr8:38280652-38280722
  hypo

SEQ ID NO: 392012 - DNA, 135 bp, Homo sapiens; identical to SEQ ID NO: 259170
  chr8:38282093-38282228
  hypo

SEQ ID NO: 392013 - DNA, 42 bp, Homo sapiens; identical to SEQ ID NO: 259171
  chr8:38361680-38361722
  hypo

SEQ ID NO: 392014 - DNA, 104 bp, Homo sapiens; identical to SEQ ID NO: 259179
  chr8:38859453-38859557
  hypo

SEQ ID NO: 392015 - DNA, 86 bp, Homo sapiens; identical to SEQ ID NO: 259181
  chr8:39978288-39978374
  hypo

SEQ ID NO: 392016 - DNA, 275 bp, Homo sapiens; identical to SEQ ID NO: 259192
  chr8:41590545-41590820
  hypo

SEQ ID NO: 392017 - DNA, 34 bp, Homo sapiens; identical to SEQ ID NO: 201399
  chr8:42040329-42040363
  hypo

SEQ ID NO: 392018 - DNA, 42 bp, Homo sapiens; identical to SEQ ID NO: 212262
  chr8:42256016-42256058
  hypo

SEQ ID NO: 392019 - DNA, 297 bp, Homo sapiens; identical to SEQ ID NO: 259212
  chr8:42293859-42294156
  hypo

SEQ ID NO: 392020 - DNA, 240 bp, Homo sapiens; identical to SEQ ID NO: 223372
  chr8:48650853-48651093
  hypo

SEQ ID NO: 392021 - DNA, 116 bp, Homo sapiens; identical to SEQ ID NO: 259239
  chr8:48694944-48695060
  hypo

SEQ ID NO: 392022 - DNA, 180 bp, Homo sapiens; identical to SEQ ID NO: 212277
  chr8:48711778-48711958
  hypo

SEQ ID NO: 392023 - DNA, 179 bp, Homo sapiens; identical to SEQ ID NO: 259242
  chr8:48793718-48793897
  hypo

SEQ ID NO: 392024 - DNA, 161 bp, Homo sapiens; identical to SEQ ID NO: 259244
  chr8:48854509-48854670
  hypo

SEQ ID NO: 392025 - DNA, 75 bp, Homo sapiens; identical to SEQ ID NO: 212279
  chr8:48854908-48854983
  hypo

SEQ ID NO: 392026 - DNA, 83 bp, Homo sapiens; identical to SEQ ID NO: 259246
  chr8:48985104-48985187
  hypo

SEQ ID NO: 392027 - DNA, 162 bp, Homo sapiens; identical to SEQ ID NO: 309493
  chr8:49172622-49172784
  hypo

SEQ ID NO: 392028 - DNA, 509 bp, Homo sapiens; identical to SEQ ID NO: 309494
  chr8:49172814-49173323
  hypo

SEQ ID NO: 392029 - DNA, 160 bp, Homo sapiens; identical to SEQ ID NO: 259267
  chr8:49803111-49803271
  hypo

SEQ ID NO: 392030 - DNA, 31 bp, Homo sapiens; identical to SEQ ID NO: 259275
  chr8:50053019-50053050
  hypo

SEQ ID NO: 392031 - DNA, 82 bp, Homo sapiens; identical to SEQ ID NO: 259281
  chr8:50740531-50740613
  hypo

SEQ ID NO: 392032 - DNA, 250 bp, Homo sapiens; identical to SEQ ID NO: 259297
  chr8:54507104-54507354
  hypo

SEQ ID NO: 392033 - DNA, 257 bp, Homo sapiens; identical to SEQ ID NO: 259299
  chr8:54645359-54645616
  hypo

SEQ ID NO: 392034 - DNA, 98 bp, Homo sapiens; identical to SEQ ID NO: 259301
  chr8:54647243-54647341
  hypo

SEQ ID NO: 392035 - DNA, 68 bp, Homo sapiens; identical to SEQ ID NO: 212306
  chr8:56361773-56361841
  hypo

SEQ ID NO: 392036 - DNA, 225 bp, Homo sapiens; identical to SEQ ID NO: 309565
  chr8:56362075-56362300
  hypo

SEQ ID NO: 392037 - DNA, 398 bp, Homo sapiens; identical to SEQ ID NO: 259321
  chr8:57079620-57080018
  hypo

SEQ ID NO: 392038 - DNA, 65 bp, Homo sapiens; identical to SEQ ID NO: 212311
  chr8:57390711-57390776
  hypo

SEQ ID NO: 392039 - DNA, 48 bp, Homo sapiens; identical to SEQ ID NO: 309583
  chr8:58117079-58117127
  hypo

SEQ ID NO: 392040 - DNA, 250 bp, Homo sapiens; identical to SEQ ID NO: 259326
  chr8:58117447-58117697
  hypo

SEQ ID NO: 392041 - DNA, 87 bp, Homo sapiens; identical to SEQ ID NO: 212314
  chr8:58991411-58991498
  hypo

SEQ ID NO: 392042 - DNA, 152 bp, Homo sapiens; identical to SEQ ID NO: 212317
  chr8:60506003-60506155
  hypo

SEQ ID NO: 392043 - DNA, 54 bp, Homo sapiens; identical to SEQ ID NO: 212318
  chr8:60506185-60506239
  hypo

SEQ ID NO: 392044 - DNA, 59 bp, Homo sapiens; identical to SEQ ID NO: 259341
  chr8:61590513-61590572
  hypo

SEQ ID NO: 392045 - DNA, 85 bp, Homo sapiens; identical to SEQ ID NO: 259342
  chr8:61627786-61627871
  hypo

SEQ ID NO: 392046 - DNA, 154 bp, Homo sapiens; identical to SEQ ID NO: 309604
  chr8:61789712-61789866
  hypo

SEQ ID NO: 392047 - DNA, 105 bp, Homo sapiens; identical to SEQ ID NO: 259345
  chr8:62221611-62221716
  hypo

SEQ ID NO: 392048 - DNA, 1119 bp, Homo sapiens; identical to SEQ ID NO: 223399
  chr8:62626314-62627433
  hypo

SEQ ID NO: 392049 - DNA, 82 bp, Homo sapiens; identical to SEQ ID NO: 259346
  chr8:62745086-62745168
  hypo

SEQ ID NO: 392050 - DNA, 33 bp, Homo sapiens; identical to SEQ ID NO: 259348
  chr8:64642939-64642972
  hypo

SEQ ID NO: 392051 - DNA, 38 bp, Homo sapiens; identical to SEQ ID NO: 212325
  chr8:65757970-65758008
  hypo

SEQ ID NO: 392052 - DNA, 213 bp, Homo sapiens; identical to SEQ ID NO: 212327
  chr8:66548504-66548717
  hypo

SEQ ID NO: 392053 - DNA, 154 bp, Homo sapiens; identical to SEQ ID NO: 259367
  chr8:68236303-68236457
  hypo

SEQ ID NO: 392054 - DNA, 271 bp, Homo sapiens; identical to SEQ ID NO: 384254
  chr8:68864200-68864471
  hypo

SEQ ID NO: 392055 - DNA, 38 bp, Homo sapiens; identical to SEQ ID NO: 384255
  chr8:68864942-68864980
  hypo

SEQ ID NO: 392056 - DNA, 37 bp, Homo sapiens; identical to SEQ ID NO: 259376
  chr8:73922264-73922301
  hypo

SEQ ID NO: 392057 - DNA, 141 bp, Homo sapiens; identical to SEQ ID NO: 212346
  chr8:75737615-75737756
  hypo

SEQ ID NO: 392058 - DNA, 37 bp, Homo sapiens; identical to SEQ ID NO: 212350
  chr8:80998635-80998672
  hypo

SEQ ID NO: 392059 - DNA, 85 bp, Homo sapiens; identical to SEQ ID NO: 259401
  chr8:81785030-81785115
  hypo

SEQ ID NO: 392060 - DNA, 38 bp, Homo sapiens; identical to SEQ ID NO: 259402
  chr8:81820451-81820489
  hypo

SEQ ID NO: 392061 - DNA, 161 bp, Homo sapiens; identical to SEQ ID NO: 259414
  chr8:87425719-87425880
  hypo

SEQ ID NO: 392062 - DNA, 32 bp, Homo sapiens; identical to SEQ ID NO: 212365
  chr8:92433536-92433568
  hypo

SEQ ID NO: 392063 - DNA, 209 bp, Homo sapiens; identical to SEQ ID NO: 201506
  chr8:94929137-94929346
  hypo

SEQ ID NO: 392064 - DNA, 163 bp, Homo sapiens; identical to SEQ ID NO: 201513
  chr8:95653853-95654016
  hypo

SEQ ID NO: 392065 - DNA, 416 bp, Homo sapiens; identical to SEQ ID NO: 286045
  chr8:95654337-95654753
  hypo

SEQ ID NO: 392066 - DNA, 38 bp, Homo sapiens; identical to SEQ ID NO: 212379
  chr8:96229505-96229543
  hypo

SEQ ID NO: 392067 - DNA, 120 bp, Homo sapiens; identical to SEQ ID NO: 259448
  chr8:97128826-97128946
  hypo

SEQ ID NO: 392068 - DNA, 159 bp, Homo sapiens; identical to SEQ ID NO: 259449
  chr8:97265370-97265529
  hypo

SEQ ID NO: 392069 - DNA, 258 bp, Homo sapiens; identical to SEQ ID NO: 259450
  chr8:97333717-97333975
  hypo

SEQ ID NO: 392070 - DNA, 35 bp, Homo sapiens; identical to SEQ ID NO: 212383
  chr8:98798908-98798943
  hypo

SEQ ID NO: 392071 - DNA, 92 bp, Homo sapiens; identical to SEQ ID NO: 309765
  chr8:100904089-100904181
  hypo

SEQ ID NO: 392072 - DNA, 379 bp, Homo sapiens; identical to SEQ ID NO: 259476
  chr8:101730421-101730800
  hypo

SEQ ID NO: 392073 - DNA, 39 bp, Homo sapiens; identical to SEQ ID NO: 259488
  chr8:102524933-102524972
  hypo

SEQ ID NO: 392074 - DNA, 38 bp, Homo sapiens; identical to SEQ ID NO: 259495
  chr8:103588277-103588315
  hypo

SEQ ID NO: 392075 - DNA, 33 bp, Homo sapiens; identical to SEQ ID NO: 212403
  chr8:103629516-103629549
  hypo

SEQ ID NO: 392076 - DNA, 156 bp, Homo sapiens; identical to SEQ ID NO: 259498
  chr8:103728517-103728673
  hypo

SEQ ID NO: 392077 - DNA, 33 bp, Homo sapiens; identical to SEQ ID NO: 212404
  chr8:103878119-103878152
  hypo

SEQ ID NO: 392078 - DNA, 37 bp, Homo sapiens; identical to SEQ ID NO: 212405
  chr8:103916556-103916593
  hypo

SEQ ID NO: 392079 - DNA, 79 bp, Homo sapiens; identical to SEQ ID NO: 259513
  chr8:105645133-105645212
  hypo

SEQ ID NO: 392080 - DNA, 59 bp, Homo sapiens; identical to SEQ ID NO: 309822
  chr8:110274931-110274990
  hypo

SEQ ID NO: 392081 - DNA, 161 bp, Homo sapiens; identical to SEQ ID NO: 259523
  chr8:110643645-110643806
  hypo

SEQ ID NO: 392082 - DNA, 31 bp, Homo sapiens; identical to SEQ ID NO: 259529
  chr8:115222084-115222115
  hypo

SEQ ID NO: 392083 - DNA, 84 bp, Homo sapiens; identical to SEQ ID NO: 201572
  chr8:117861184-117861268
  hypo

SEQ ID NO: 392084 - DNA, 123 bp, Homo sapiens; identical to SEQ ID NO: 201577
  chr8:117868404-117868527
  hypo

SEQ ID NO: 392085 - DNA, 107 bp, Homo sapiens; identical to SEQ ID NO: 201580
  chr8:117870590-117870697
  hypo

SEQ ID NO: 392086 - DNA, 170 bp, Homo sapiens; identical to SEQ ID NO: 259545
  chr8:119611614-119611784
  hypo

SEQ ID NO: 392087 - DNA, 67 bp, Homo sapiens; identical to SEQ ID NO: 259548
  chr8:121624349-121624416
  hypo

SEQ ID NO: 392088 - DNA, 259 bp, Homo sapiens; identical to SEQ ID NO: 259552
  chr8:122731385-122731644
  hypo

SEQ ID NO: 392089 - DNA, 76 bp, Homo sapiens; identical to SEQ ID NO: 212446
  chr8:123508181-123508257
  hypo

SEQ ID NO: 392090 - DNA, 35 bp, Homo sapiens; identical to SEQ ID NO: 259558
  chr8:123872985-123873020
  hypo

SEQ ID NO: 392091 - DNA, 331 bp, Homo sapiens; identical to SEQ ID NO: 259560
  chr8:123874762-123875093
  hypo

SEQ ID NO: 392092 - DNA, 78 bp, Homo sapiens; identical to SEQ ID NO: 259567
  chr8:124161306-124161384
  hypo

SEQ ID NO: 392093 - DNA, 61 bp, Homo sapiens; identical to SEQ ID NO: 385975
  chr8:124187226-124187287
  hypo

SEQ ID NO: 392094 - DNA, 31 bp, Homo sapiens; identical to SEQ ID NO: 385976
  chr8:124238850-124238881
  hypo

SEQ ID NO: 392095 - DNA, 141 bp, Homo sapiens; identical to SEQ ID NO: 259575
  chr8:124247665-124247806
  hypo

SEQ ID NO: 392096 - DNA, 82 bp, Homo sapiens; identical to SEQ ID NO: 212453
  chr8:124254706-124254788
  hypo

SEQ ID NO: 392097 - DNA, 60 bp, Homo sapiens; identical to SEQ ID NO: 259583
  chr8:124453586-124453646
  hypo

SEQ ID NO: 392098 - DNA, 51 bp, Homo sapiens; identical to SEQ ID NO: 309900
  chr8:124552151-124552202
  hypo

SEQ ID NO: 392099 - DNA, 58 bp, Homo sapiens; identical to SEQ ID NO: 160621
  chr8:124552287-124552345
  hypo

SEQ ID NO: 392100 - DNA, 366 bp, Homo sapiens; identical to SEQ ID NO: 259590
  chr8:124965500-124965866
  hypo

SEQ ID NO: 392101 - DNA, 106 bp, Homo sapiens; identical to SEQ ID NO: 259604
  chr8:125682590-125682696
  hypo

SEQ ID NO: 392102 - DNA, 38 bp, Homo sapiens; identical to SEQ ID NO: 259607
  chr8:125992005-125992043
  hypo

SEQ ID NO: 392103 - DNA, 40 bp, Homo sapiens; identical to SEQ ID NO: 259614
  chr8:126321193-126321233
  hypo

SEQ ID NO: 392104 - DNA, 44 bp, Homo sapiens; identical to SEQ ID NO: 212469
  chr8:127465002-127465046
  hypo

SEQ ID NO: 392105 - DNA, 125 bp, Homo sapiens; identical to SEQ ID NO: 259625
  chr8:128735792-128735917
  hypo

SEQ ID NO: 392106 - DNA, 41 bp, Homo sapiens; identical to SEQ ID NO: 212477
  chr8:128896287-128896328
  hypo

SEQ ID NO: 392107 - DNA, 34 bp, Homo sapiens; identical to SEQ ID NO: 259645
  chr8:129996835-129996869
  hypo

SEQ ID NO: 392108 - DNA, 211 bp, Homo sapiens; identical to SEQ ID NO: 259651
  chr8:131098481-131098692
  hypo

SEQ ID NO: 392109 - DNA, 483 bp, Homo sapiens; identical to SEQ ID NO: 259661
  chr8:134278414-134278897
  hypo

SEQ ID NO: 392110 - DNA, 92 bp, Homo sapiens; identical to SEQ ID NO: 212510
  chr8:140834749-140834841
  hypo

SEQ ID NO: 392111 - DNA, 164 bp, Homo sapiens; identical to SEQ ID NO: 259718
  chr8:140871034-140871198
  hypo

SEQ ID NO: 392112 - DNA, 69 bp, Homo sapiens; identical to SEQ ID NO: 259725
  chr8:140968327-140968396
  hypo

SEQ ID NO: 392113 - DNA, 76 bp, Homo sapiens; identical to SEQ ID NO: 310057
  chr8:141054769-141054845
  hypo

SEQ ID NO: 392114 - DNA, 141 bp, Homo sapiens; identical to SEQ ID NO: 310058
  chr8:141054875-141055016
  hypo

SEQ ID NO: 392115 - DNA, 135 bp, Homo sapiens; identical to SEQ ID NO: 259744
  chr8:141267397-141267532
  hypo

SEQ ID NO: 392116 - DNA, 35 bp, Homo sapiens; identical to SEQ ID NO: 310080
  chr8:141347684-141347719
  hypo

SEQ ID NO: 392117 - DNA, 77 bp, Homo sapiens; identical to SEQ ID NO: 259750
  chr8:141436007-141436084
  hypo

SEQ ID NO: 392118 - DNA, 198 bp, Homo sapiens; identical to SEQ ID NO: 259751
  chr8:141455583-141455781
  hypo

SEQ ID NO: 392119 - DNA, 501 bp, Homo sapiens; identical to SEQ ID NO: 259758
  chr8:141543887-141544388
  hypo

SEQ ID NO: 392120 - DNA, 66 bp, Homo sapiens; identical to SEQ ID NO: 212529
  chr8:141587942-141588008
  hypo

SEQ ID NO: 392121 - DNA, 102 bp, Homo sapiens; identical to SEQ ID NO: 212532
  chr8:141594755-141594857
  hypo

SEQ ID NO: 392122 - DNA, 50 bp, Homo sapiens; identical to SEQ ID NO: 212533
  chr8:141594912-141594962
  hypo

SEQ ID NO: 392123 - DNA, 152 bp, Homo sapiens; identical to SEQ ID NO: 212539
  chr8:141636160-141636312
  hypo

SEQ ID NO: 392124 - DNA, 622 bp, Homo sapiens; identical to SEQ ID NO: 388619
  chr8:142010302-142010924
  hypo

SEQ ID NO: 392125 - DNA, 76 bp, Homo sapiens; identical to SEQ ID NO: 259791
  chr8:142188438-142188514
  hypo

SEQ ID NO: 392126 - DNA, 235 bp, Homo sapiens; identical to SEQ ID NO: 259792
  chr8:142190007-142190242
  hypo

SEQ ID NO: 392127 - DNA, 86 bp, Homo sapiens; identical to SEQ ID NO: 212554
  chr8:142226699-142226785
  hypo

SEQ ID NO: 392128 - DNA, 381 bp, Homo sapiens
  chr8:142241020-142241401
  hypo
ggatgctggggcagagcacctcctgctccggggacgctgtgctggcggcggcaacagcgtgtgacacccagtgaggcatttcccccaccccgcccggcctctctcttctcccctgtaaaatggagggaaagaccagcacctgacaggccctctctgcaaagaacactagtgtgggagaagccacattcggtcacgtttctagggcttaaggtcaccccggaagagaaaggacctggcaggtcccaggatgggtgcggagggtgggatgaagggcacagtgtgggaaggagcgccggagacagggcagggacagccaggccgggaaggccttggctctgggctgagagtgtggcccctcgcgccagaggcagcagggacccc

SEQ ID NO: 392129 - DNA, 77 bp, Homo sapiens; identical to SEQ ID NO: 259807
  chr8:142247722-142247799
  hypo

SEQ ID NO: 392130 - DNA, 117 bp, Homo sapiens; identical to SEQ ID NO: 259817
  chr8:142278840-142278957
  hypo

SEQ ID NO: 392131 - DNA, 174 bp, Homo sapiens; identical to SEQ ID NO: 259836
  chr8:142383101-142383275
  hypo

SEQ ID NO: 392132 - DNA, 94 bp, Homo sapiens; identical to SEQ ID NO: 310187
  chr8:142452392-142452486
  hypo

SEQ ID NO: 392133 - DNA, 239 bp, Homo sapiens; identical to SEQ ID NO: 212584
  chr8:142537302-142537541
  hypo

SEQ ID NO: 392134 - DNA, 148 bp, Homo sapiens; identical to SEQ ID NO: 259846
  chr8:142544218-142544366
  hypo

SEQ ID NO: 392135 - DNA, 184 bp, Homo sapiens; identical to SEQ ID NO: 259854
  chr8:142863058-142863242
  hypo

SEQ ID NO: 392136 - DNA, 563 bp, Homo sapiens; identical to SEQ ID NO: 212591
  chr8:143152592-143153155
  hypo

SEQ ID NO: 392137 - DNA, 59 bp, Homo sapiens; identical to SEQ ID NO: 212595
  chr8:143270070-143270129
  hypo

SEQ ID NO: 392138 - DNA, 159 bp, Homo sapiens; identical to SEQ ID NO: 259877
  chr8:143373004-143373163
  hypo

SEQ ID NO: 392139 - DNA, 168 bp, Homo sapiens; identical to SEQ ID NO: 259879
  chr8:143379124-143379292
  hypo

SEQ ID NO: 392140 - DNA, 315 bp, Homo sapiens; identical to SEQ ID NO: 259885
  chr8:143406189-143406504
  hypo

SEQ ID NO: 392141 - DNA, 307 bp, Homo sapiens; identical to SEQ ID NO: 259886
  chr8:143410616-143410923
  hypo

SEQ ID NO: 392142 - DNA, 45 bp, Homo sapiens; identical to SEQ ID NO: 259890
  chr8:143421174-143421219
  hypo

SEQ ID NO: 392143 - DNA, 221 bp, Homo sapiens; identical to SEQ ID NO: 212603
  chr8:143424645-143424866
  hypo

SEQ ID NO: 392144 - DNA, 43 bp, Homo sapiens; identical to SEQ ID NO: 259899
  chr8:143550866-143550909
  hypo

SEQ ID NO: 392145 - DNA, 174 bp, Homo sapiens; identical to SEQ ID NO: 259912
  chr8:143667142-143667316
  hypo

SEQ ID NO: 392146 - DNA, 688 bp, Homo sapiens; identical to SEQ ID NO: 259915
  chr8:143868761-143869449
  hypo

SEQ ID NO: 392147 - DNA, 185 bp, Homo sapiens; identical to SEQ ID NO: 212620
  chr8:144203468-144203653
  hypo

SEQ ID NO: 392148 - DNA, 35 bp, Homo sapiens; identical to SEQ ID NO: 212621
  chr8:144203942-144203977
  hypo

SEQ ID NO: 392149 - DNA, 418 bp, Homo sapiens; identical to SEQ ID NO: 212622
  chr8:144204021-144204439
  hypo

SEQ ID NO: 392150 - DNA, 67 bp, Homo sapiens; identical to SEQ ID NO: 310296
  chr8:144330418-144330485
  hypo

SEQ ID NO: 392151 - DNA, 105 bp, Homo sapiens; identical to SEQ ID NO: 212627
  chr8:144347176-144347281
  hypo

SEQ ID NO: 392152 - DNA, 79 bp, Homo sapiens; identical to SEQ ID NO: 259960
  chr8:144387632-144387711
  hypo

SEQ ID NO: 392153 - DNA, 95 bp, Homo sapiens; identical to SEQ ID NO: 259961
  chr8:144390545-144390640
  hypo

SEQ ID NO: 392154 - DNA, 303 bp, Homo sapiens; identical to SEQ ID NO: 384271
  chr8:144512510-144512813
  hypo

SEQ ID NO: 392155 - DNA, 37 bp, Homo sapiens; identical to SEQ ID NO: 259982
  chr8:144567459-144567496
  hypo

SEQ ID NO: 392156 - DNA, 147 bp, Homo sapiens; identical to SEQ ID NO: 259984
  chr8:144577123-144577270
  hypo

SEQ ID NO: 392157 - DNA, 33 bp, Homo sapiens; identical to SEQ ID NO: 212646
  chr8:144589672-144589705
  hypo

SEQ ID NO: 392158 - DNA, 60 bp, Homo sapiens; identical to SEQ ID NO: 260001
  chr8:145163871-145163931
  hypo

SEQ ID NO: 392159 - DNA, 83 bp, Homo sapiens; identical to SEQ ID NO: 260002
  chr8:145214941-145215024
  hypo

SEQ ID NO: 392160 - DNA, 64 bp, Homo sapiens; identical to SEQ ID NO: 212660
  chr8:145680955-145681019
  hypo

SEQ ID NO: 392161 - DNA, 477 bp, Homo sapiens; identical to SEQ ID NO: 223529
  chr8:145726121-145726598
  hypo

SEQ ID NO: 392162 - DNA, 211 bp, Homo sapiens; identical to SEQ ID NO: 260014
  chr8:145736700-145736911
  hypo

SEQ ID NO: 392163 - DNA, 566 bp, Homo sapiens; identical to SEQ ID NO: 260025
  chr8:145772641-145773207
  hypo

SEQ ID NO: 392164 - DNA, 188 bp, Homo sapiens; identical to SEQ ID NO: 260028
  chr8:145804872-145805060
  hypo

SEQ ID NO: 392165 - DNA, 36 bp, Homo sapiens; identical to SEQ ID NO: 212673
  chr8:145826579-145826615
  hypo

SEQ ID NO: 392166 - DNA, 64 bp, Homo sapiens; identical to SEQ ID NO: 212675
  chr8:145844223-145844287
  hypo

SEQ ID NO: 392167 - DNA, 167 bp, Homo sapiens; identical to SEQ ID NO: 212678
  chr8:145849042-145849209
  hypo

SEQ ID NO: 392168 - DNA, 42 bp, Homo sapiens; identical to SEQ ID NO: 260044
  chr8:145849872-145849914
  hypo

SEQ ID NO: 392169 - DNA, 93 bp, Homo sapiens; identical to SEQ ID NO: 260068
  chr9:2272286-2272379
  hypo

SEQ ID NO: 392170 - DNA, 133 bp, Homo sapiens; identical to SEQ ID NO: 212693
  chr9:2718724-2718857
  hypo

SEQ ID NO: 392171 - DNA, 78 bp, Homo sapiens; identical to SEQ ID NO: 212696
  chr9:4714888-4714966
  hypo

SEQ ID NO: 392172 - DNA, 160 bp, Homo sapiens; identical to SEQ ID NO: 260077
  chr9:4804634-4804794
  hypo

SEQ ID NO: 392173 - DNA, 41 bp, Homo sapiens; identical to SEQ ID NO: 260080
  chr9:5418576-5418617
  hypo

SEQ ID NO: 392174 - DNA, 113 bp, Homo sapiens; identical to SEQ ID NO: 260089
  chr9:7032961-7033074
  hypo

SEQ ID NO: 392175 - DNA, 150 bp, Homo sapiens; identical to SEQ ID NO: 388631
  chr9:12776013-12776163
  hypo

SEQ ID NO: 392176 - DNA, 369 bp, Homo sapiens; identical to SEQ ID NO: 286321
  chr9:12776216-12776585
  hypo

SEQ ID NO: 392177 - DNA, 50 bp, Homo sapiens; identical to SEQ ID NO: 234051
  chr9:14322293-14322343
  hypo

SEQ ID NO: 392178 - DNA, 96 bp, Homo sapiens; identical to SEQ ID NO: 260098
  chr9:14355600-14355696
  hypo

SEQ ID NO: 392179 - DNA, 206 bp, Homo sapiens; identical to SEQ ID NO: 212719
  chr9:14607839-14608045
  hypo

SEQ ID NO: 392180 - DNA, 35 bp, Homo sapiens; identical to SEQ ID NO: 223568
  chr9:21032003-21032038
  hypo

SEQ ID NO: 392181 - DNA, 92 bp, Homo sapiens; identical to SEQ ID NO: 286373
  chr9:25677513-25677605
  hypo

SEQ ID NO: 392182 - DNA, 206 bp, Homo sapiens; identical to SEQ ID NO: 388641
  chr9:25677627-25677833
  hypo

SEQ ID NO: 392183 - DNA, 150 bp, Homo sapiens; identical to SEQ ID NO: 384275
  chr9:25677903-25678053
  hypo

SEQ ID NO: 392184 - DNA, 256 bp, Homo sapiens; identical to SEQ ID NO: 384276
  chr9:25678127-25678383
  hypo

SEQ ID NO: 392185 - DNA, 84 bp, Homo sapiens; identical to SEQ ID NO: 260118
  chr9:26936774-26936858
  hypo

SEQ ID NO: 392186 - DNA, 44 bp, Homo sapiens; identical to SEQ ID NO: 212735
  chr9:32481580-32481624
  hypo

SEQ ID NO: 392187 - DNA, 120 bp, Homo sapiens; identical to SEQ ID NO: 260131
  chr9:33077545-33077665
  hypo

SEQ ID NO: 392188 - DNA, 123 bp, Homo sapiens; identical to SEQ ID NO: 212738
  chr9:33136435-33136558
  hypo

SEQ ID NO: 392189 - DNA, 56 bp, Homo sapiens; identical to SEQ ID NO: 212739
  chr9:33136588-33136644
  hypo

SEQ ID NO: 392190 - DNA, 32 bp, Homo sapiens; identical to SEQ ID NO: 212742
  chr9:33834158-33834190
  hypo

SEQ ID NO: 392191 - DNA, 81 bp, Homo sapiens; identical to SEQ ID NO: 212747
  chr9:34316317-34316398
  hypo

SEQ ID NO: 392192 - DNA, 77 bp, Homo sapiens; identical to SEQ ID NO: 201697
  chr9:34646925-34647002
  hypo

SEQ ID NO: 392193 - DNA, 112 bp, Homo sapiens; identical to SEQ ID NO: 260163
  chr9:36118828-36118940
  hypo

SEQ ID NO: 392194 - DNA, 81 bp, Homo sapiens; identical to SEQ ID NO: 260167
  chr9:36320468-36320549
  hypo

SEQ ID NO: 392195 - DNA, 142 bp, Homo sapiens; identical to SEQ ID NO: 260175
  chr9:37409148-37409290
  hypo

SEQ ID NO: 392196 - DNA, 98 bp, Homo sapiens; identical to SEQ ID NO: 212767
  chr9:37778484-37778582
  hypo

SEQ ID NO: 392197 - DNA, 258 bp, Homo sapiens; identical to SEQ ID NO: 260194
  chr9:38022309-38022567
  hypo

SEQ ID NO: 392198 - DNA, 80 bp, Homo sapiens; identical to SEQ ID NO: 260195
  chr9:38033536-38033616
  hypo

SEQ ID NO: 392199 - DNA, 333 bp, Homo sapiens; identical to SEQ ID NO: 384281
  chr9:38067788-38068121
  hypo

SEQ ID NO: 392200 - DNA, 749 bp, Homo sapiens; identical to SEQ ID NO: 201714
  chr9:38068158-38068907
  hypo

SEQ ID NO: 392201 - DNA, 92 bp, Homo sapiens; identical to SEQ ID NO: 260199
  chr9:38075105-38075197
  hypo

SEQ ID NO: 392202 - DNA, 102 bp, Homo sapiens; identical to SEQ ID NO: 260216
  chr9:71664072-71664174
  hypo

SEQ ID NO: 392203 - DNA, 35 bp, Homo sapiens; identical to SEQ ID NO: 260220
  chr9:71800810-71800845
  hypo

SEQ ID NO: 392204 - DNA, 60 bp, Homo sapiens; identical to SEQ ID NO: 260225
  chr9:73152153-73152213
  hypo

SEQ ID NO: 392205 - DNA, 100 bp, Homo sapiens; identical to SEQ ID NO: 260234
  chr9:75136042-75136142
  hypo

SEQ ID NO: 392206 - DNA, 135 bp, Homo sapiens; identical to SEQ ID NO: 212785
  chr9:78686691-78686826
  hypo

SEQ ID NO: 392207 - DNA, 41 bp, Homo sapiens; identical to SEQ ID NO: 212788
  chr9:79230962-79231003
  hypo

SEQ ID NO: 392208 - DNA, 87 bp, Homo sapiens; identical to SEQ ID NO: 260273
  chr9:80544725-80544812
  hypo

SEQ ID NO: 392209 - DNA, 203 bp, Homo sapiens; identical to SEQ ID NO: 260275
  chr9:80563224-80563427
  hypo

SEQ ID NO: 392210 - DNA, 387 bp, Homo sapiens; identical to SEQ ID NO: 388659
  chr9:82187860-82188247
  hypo

SEQ ID NO: 392211 - DNA, 33 bp, Homo sapiens; identical to SEQ ID NO: 260295
  chr9:87655019-87655052
  hypo

SEQ ID NO: 392212 - DNA, 185 bp, Homo sapiens; identical to SEQ ID NO: 260298
  chr9:88651536-88651721
  hypo

SEQ ID NO: 392213 - DNA, 248 bp, Homo sapiens; identical to SEQ ID NO: 212818
  chr9:88694097-88694345
  hypo

SEQ ID NO: 392214 - DNA, 108 bp, Homo sapiens; identical to SEQ ID NO: 212819
  chr9:88694438-88694546
  hypo

SEQ ID NO: 392215 - DNA, 51 bp, Homo sapiens; identical to SEQ ID NO: 260306
  chr9:90112283-90112334
  hypo

SEQ ID NO: 392216 - DNA, 137 bp, Homo sapiens; identical to SEQ ID NO: 260312
  chr9:90472237-90472374
  hypo

SEQ ID NO: 392217 - DNA, 224 bp, Homo sapiens; identical to SEQ ID NO: 260317
  chr9:90483167-90483391
  hypo

SEQ ID NO: 392218 - DNA, 36 bp, Homo sapiens; identical to SEQ ID NO: 260318
  chr9:90485107-90485143
  hypo

SEQ ID NO: 392219 - DNA, 203 bp, Homo sapiens; identical to SEQ ID NO: 260320
  chr9:90499879-90500082
  hypo

SEQ ID NO: 392220 - DNA, 169 bp, Homo sapiens; identical to SEQ ID NO: 260321
  chr9:90500553-90500722
  hypo

SEQ ID NO: 392221 - DNA, 47 bp, Homo sapiens; identical to SEQ ID NO: 260327
  chr9:91140238-91140285
  hypo

SEQ ID NO: 392222 - DNA, 321 bp, Homo sapiens; identical to SEQ ID NO: 260340
  chr9:92053270-92053591
  hypo

SEQ ID NO: 392223 - DNA, 51 bp, Homo sapiens; identical to SEQ ID NO: 212839
  chr9:92140641-92140692
  hypo

SEQ ID NO: 392224 - DNA, 40 bp, Homo sapiens; identical to SEQ ID NO: 260347
  chr9:92231503-92231543
  hypo

SEQ ID NO: 392225 - DNA, 167 bp, Homo sapiens; identical to SEQ ID NO: 212842
  chr9:92237959-92238126
  hypo

SEQ ID NO: 392226 - DNA, 158 bp, Homo sapiens; identical to SEQ ID NO: 260358
  chr9:93727466-93727624
  hypo

SEQ ID NO: 392227 - DNA, 223 bp, Homo sapiens; identical to SEQ ID NO: 212845
  chr9:94124707-94124930
  hypo

SEQ ID NO: 392228 - DNA, 75 bp, Homo sapiens; identical to SEQ ID NO: 260363
  chr9:94475885-94475960
  hypo

SEQ ID NO: 392229 - DNA, 100 bp, Homo sapiens; identical to SEQ ID NO: 212848
  chr9:95003570-95003670
  hypo

SEQ ID NO: 392230 - DNA, 38 bp, Homo sapiens; identical to SEQ ID NO: 212849
  chr9:95010672-95010710
  hypo

SEQ ID NO: 392231 - DNA, 96 bp, Homo sapiens; identical to SEQ ID NO: 260372
  chr9:95380371-95380467
  hypo

SEQ ID NO: 392232 - DNA, 231 bp, Homo sapiens; identical to SEQ ID NO: 260374
  chr9:95403858-95404089
  hypo

SEQ ID NO: 392233 - DNA, 203 bp, Homo sapiens; identical to SEQ ID NO: 260384
  chr9:95687862-95688065
  hypo

SEQ ID NO: 392234 - DNA, 36 bp, Homo sapiens; identical to SEQ ID NO: 212859
  chr9:96230446-96230482
  hypo

SEQ ID NO: 392235 - DNA, 410 bp, Homo sapiens; identical to SEQ ID NO: 212861
  chr9:96275710-96276120
  hypo

SEQ ID NO: 392236 - DNA, 171 bp, Homo sapiens; identical to SEQ ID NO: 260405
  chr9:96446747-96446918
  hypo

SEQ ID NO: 392237 - DNA, 120 bp, Homo sapiens; identical to SEQ ID NO: 212867
  chr9:96945448-96945568
  hypo

SEQ ID NO: 392238 - DNA, 36 bp, Homo sapiens; identical to SEQ ID NO: 260413
  chr9:97010560-97010596
  hypo

SEQ ID NO: 392239 - DNA, 41 bp, Homo sapiens; identical to SEQ ID NO: 260416
  chr9:97107980-97108021
  hypo

SEQ ID NO: 392240 - DNA, 168 bp, Homo sapiens; identical to SEQ ID NO: 310874
  chr9:97679314-97679482
  hypo

SEQ ID NO: 392241 - DNA, 39 bp, Homo sapiens; identical to SEQ ID NO: 260433
  chr9:97682280-97682319
  hypo

SEQ ID NO: 392242 - DNA, 405 bp, Homo sapiens; identical to SEQ ID NO: 223634
  chr9:97810932-97811337
  hypo

SEQ ID NO: 392243 - DNA, 216 bp, Homo sapiens; identical to SEQ ID NO: 260438
  chr9:97847400-97847616
  hypo

SEQ ID NO: 392244 - DNA, 77 bp, Homo sapiens; identical to SEQ ID NO: 260446
  chr9:97887433-97887510
  hypo

SEQ ID NO: 392245 - DNA, 206 bp, Homo sapiens; identical to SEQ ID NO: 212879
  chr9:97913297-97913503
  hypo

SEQ ID NO: 392246 - DNA, 60 bp, Homo sapiens; identical to SEQ ID NO: 223636
  chr9:98189305-98189365
  hypo

SEQ ID NO: 392247 - DNA, 207 bp, Homo sapiens; identical to SEQ ID NO: 260453
  chr9:98490544-98490751
  hypo

SEQ ID NO: 392248 - DNA, 196 bp, Homo sapiens; identical to SEQ ID NO: 260462
  chr9:99267708-99267904
  hypo

SEQ ID NO: 392249 - DNA, 204 bp, Homo sapiens; identical to SEQ ID NO: 223644
  chr9:99417397-99417601
  hypo

SEQ ID NO: 392250 - DNA, 76 bp, Homo sapiens; identical to SEQ ID NO: 260471
  chr9:100308892-100308968
  hypo

SEQ ID NO: 392251 - DNA, 128 bp, Homo sapiens; identical to SEQ ID NO: 212891
  chr9:100890703-100890831
  hypo

SEQ ID NO: 392252 - DNA, 79 bp, Homo sapiens
  chr9:101009639-101009718
  hypo
caaacaaaaaaaaaaacaagaaggatactctctaccttgtctccttcagagttaatgtatacaaaaatgtttaaaaagc

SEQ ID NO: 392253 - DNA, 156 bp, Homo sapiens; identical to SEQ ID NO: 212895
  chr9:101280572-101280728
  hypo

SEQ ID NO: 392254 - DNA, 224 bp, Homo sapiens; identical to SEQ ID NO: 260491
  chr9:101499001-101499225
  hypo

SEQ ID NO: 392255 - DNA, 74 bp, Homo sapiens; identical to SEQ ID NO: 201819
  chr9:103190036-103190110
  hypo

SEQ ID NO: 392256 - DNA, 35 bp, Homo sapiens; identical to SEQ ID NO: 260509
  chr9:107260232-107260267
  hypo

SEQ ID NO: 392257 - DNA, 153 bp, Homo sapiens; identical to SEQ ID NO: 212906
  chr9:107729489-107729642
  hypo

SEQ ID NO: 392258 - DNA, 120 bp, Homo sapiens; identical to SEQ ID NO: 260515
  chr9:108257889-108258009
  hypo

SEQ ID NO: 392259 - DNA, 265 bp, Homo sapiens; identical to SEQ ID NO: 212911
  chr9:110096156-110096421
  hypo

SEQ ID NO: 392260 - DNA, 34 bp, Homo sapiens; identical to SEQ ID NO: 212912
  chr9:110160588-110160622
  hypo

SEQ ID NO: 392261 - DNA, 44 bp, Homo sapiens; identical to SEQ ID NO: 260536
  chr9:110861945-110861989
  hypo

SEQ ID NO: 392262 - DNA, 32 bp, Homo sapiens; identical to SEQ ID NO: 260537
  chr9:111446306-111446338
  hypo

SEQ ID NO: 392263 - DNA, 78 bp, Homo sapiens; identical to SEQ ID NO: 260546
  chr9:112295751-112295829
  hypo

SEQ ID NO: 392264 - DNA, 84 bp, Homo sapiens; identical to SEQ ID NO: 260547
  chr9:112847321-112847405
  hypo

SEQ ID NO: 392265 - DNA, 240 bp, Homo sapiens; identical to SEQ ID NO: 212924
  chr9:114619240-114619480
  hypo

SEQ ID NO: 392266 - DNA, 157 bp, Homo sapiens; identical to SEQ ID NO: 212926
  chr9:114750309-114750466
  hypo

SEQ ID NO: 392267 - DNA, 181 bp, Homo sapiens; identical to SEQ ID NO: 260559
  chr9:114823149-114823330
  hypo

SEQ ID NO: 392268 - DNA, 137 bp, Homo sapiens; identical to SEQ ID NO: 212928
  chr9:114832553-114832690
  hypo

SEQ ID NO: 392269 - DNA, 82 bp, Homo sapiens; identical to SEQ ID NO: 260568
  chr9:115445176-115445258
  hypo

SEQ ID NO: 392270 - DNA, 78 bp, Homo sapiens; identical to SEQ ID NO: 260571
  chr9:115519017-115519095
  hypo

SEQ ID NO: 392271 - DNA, 199 bp, Homo sapiens; identical to SEQ ID NO: 260572
  chr9:115550632-115550831
  hypo

SEQ ID NO: 392272 - DNA, 273 bp, Homo sapiens; identical to SEQ ID NO: 260575
  chr9:115630952-115631225
  hypo

SEQ ID NO: 392273 - DNA, 233 bp, Homo sapiens; identical to SEQ ID NO: 212932
  chr9:116061763-116061996
  hypo

SEQ ID NO: 392274 - DNA, 71 bp, Homo sapiens; identical to SEQ ID NO: 386070
  chr9:116066129-116066200
  hypo

SEQ ID NO: 392275 - DNA, 233 bp, Homo sapiens; identical to SEQ ID NO: 260593
  chr9:116663446-116663679
  hypo

SEQ ID NO: 392276 - DNA, 137 bp, Homo sapiens; identical to SEQ ID NO: 212937
  chr9:116671888-116672025
  hypo

SEQ ID NO: 392277 - DNA, 150 bp, Homo sapiens; identical to SEQ ID NO: 260603
  chr9:116760431-116760581
  hypo

SEQ ID NO: 392278 - DNA, 43 bp, Homo sapiens; identical to SEQ ID NO: 260616
  chr9:116832918-116832961
  hypo

SEQ ID NO: 392279 - DNA, 175 bp, Homo sapiens; identical to SEQ ID NO: 212953
  chr9:116973314-116973489
  hypo

SEQ ID NO: 392280 - DNA, 49 bp, Homo sapiens; identical to SEQ ID NO: 260623
  chr9:117179587-117179636
  hypo

SEQ ID NO: 392281 - DNA, 203 bp, Homo sapiens; identical to SEQ ID NO: 260628
  chr9:123140239-123140442
  hypo

SEQ ID NO: 392282 - DNA, 104 bp, Homo sapiens; identical to SEQ ID NO: 212957
  chr9:123965022-123965126
  hypo

SEQ ID NO: 392283 - DNA, 42 bp, Homo sapiens; identical to SEQ ID NO: 260664
  chr9:125573936-125573978
  hypo

SEQ ID NO: 392284 - DNA, 42 bp, Homo sapiens; identical to SEQ ID NO: 260669
  chr9:125878079-125878121
  hypo

SEQ ID NO: 392285 - DNA, 195 bp, Homo sapiens; identical to SEQ ID NO: 212969
  chr9:126100875-126101070
  hypo

SEQ ID NO: 392286 - DNA, 78 bp, Homo sapiens; identical to SEQ ID NO: 260695
  chr9:126403904-126403982
  hypo

SEQ ID NO: 392287 - DNA, 260 bp, Homo sapiens; identical to SEQ ID NO: 260699
  chr9:126487964-126488224
  hypo

SEQ ID NO: 392288 - DNA, 291 bp, Homo sapiens; identical to SEQ ID NO: 260703
  chr9:127071988-127072279
  hypo

SEQ ID NO: 392289 - DNA, 39 bp, Homo sapiens; identical to SEQ ID NO: 260722
  chr9:127577754-127577793
  hypo

SEQ ID NO: 392290 - DNA, 37 bp, Homo sapiens; identical to SEQ ID NO: 260729
  chr9:128032923-128032960
  hypo

SEQ ID NO: 392291 - DNA, 138 bp, Homo sapiens; identical to SEQ ID NO: 212989
  chr9:128135749-128135887
  hypo

SEQ ID NO: 392292 - DNA, 245 bp, Homo sapiens; identical to SEQ ID NO: 260736
  chr9:128263221-128263466
  hypo

SEQ ID NO: 392293 - DNA, 93 bp, Homo sapiens; identical to SEQ ID NO: 212991
  chr9:128399989-128400082
  hypo

SEQ ID NO: 392294 - DNA, 159 bp, Homo sapiens; identical to SEQ ID NO: 212992
  chr9:128407606-128407765
  hypo

SEQ ID NO: 392295 - DNA, 105 bp, Homo sapiens; identical to SEQ ID NO: 260746
  chr9:128718758-128718863
  hypo

SEQ ID NO: 392296 - DNA, 295 bp, Homo sapiens; identical to SEQ ID NO: 260757
  chr9:129038608-129038903
  hypo

SEQ ID NO: 392297 - DNA, 119 bp, Homo sapiens; identical to SEQ ID NO: 260760
  chr9:129454751-129454870
  hypo

SEQ ID NO: 392298 - DNA, 38 bp, Homo sapiens; identical to SEQ ID NO: 260773
  chr9:129648781-129648819
  hypo

SEQ ID NO: 392299 - DNA, 36 bp, Homo sapiens; identical to SEQ ID NO: 260775
  chr9:130172835-130172871
  hypo

SEQ ID NO: 392300 - DNA, 317 bp, Homo sapiens; identical to SEQ ID NO: 260780
  chr9:130270528-130270845
  hypo

SEQ ID NO: 392301 - DNA, 198 bp, Homo sapiens; identical to SEQ ID NO: 213004
  chr9:130271243-130271441
  hypo

SEQ ID NO: 392302 - DNA, 69 bp, Homo sapiens; identical to SEQ ID NO: 213006
  chr9:130279231-130279300
  hypo

SEQ ID NO: 392303 - DNA, 203 bp, Homo sapiens; identical to SEQ ID NO: 260788
  chr9:130297782-130297985
  hypo

SEQ ID NO: 392304 - DNA, 185 bp, Homo sapiens; identical to SEQ ID NO: 213015
  chr9:130635124-130635309
  hypo

SEQ ID NO: 392305 - DNA, 107 bp, Homo sapiens; identical to SEQ ID NO: 260815
  chr9:130716085-130716192
  hypo

SEQ ID NO: 392306 - DNA, 31 bp, Homo sapiens; identical to SEQ ID NO: 260817
  chr9:130744755-130744786
  hypo

SEQ ID NO: 392307 - DNA, 317 bp, Homo sapiens; identical to SEQ ID NO: 260823
  chr9:130914350-130914667
  hypo

SEQ ID NO: 392308 - DNA, 40 bp, Homo sapiens; identical to SEQ ID NO: 213024
  chr9:131060967-131061007
  hypo

SEQ ID NO: 392309 - DNA, 147 bp, Homo sapiens; identical to SEQ ID NO: 213026
  chr9:131411426-131411573
  hypo

SEQ ID NO: 392310 - DNA, 112 bp, Homo sapiens; identical to SEQ ID NO: 213033
  chr9:131776674-131776786
  hypo

SEQ ID NO: 392311 - DNA, 227 bp, Homo sapiens; identical to SEQ ID NO: 260855
  chr9:132004480-132004707
  hypo

SEQ ID NO: 392312 - DNA, 34 bp, Homo sapiens; identical to SEQ ID NO: 223691
  chr9:132222864-132222898
  hypo

SEQ ID NO: 392313 - DNA, 36 bp, Homo sapiens; identical to SEQ ID NO: 260865
  chr9:132285635-132285671
  hypo

SEQ ID NO: 392314 - DNA, 551 bp, Homo sapiens; identical to SEQ ID NO: 286787
  chr9:132330680-132331231
  hypo

SEQ ID NO: 392315 - DNA, 217 bp, Homo sapiens; identical to SEQ ID NO: 388691
  chr9:132331336-132331553
  hypo

SEQ ID NO: 392316 - DNA, 42 bp, Homo sapiens; identical to SEQ ID NO: 260875
  chr9:132448117-132448159
  hypo

SEQ ID NO: 392317 - DNA, 84 bp, Homo sapiens; identical to SEQ ID NO: 260876
  chr9:132451960-132452044
  hypo

SEQ ID NO: 392318 - DNA, 58 bp, Homo sapiens; identical to SEQ ID NO: 213059
  chr9:132881756-132881814
  hypo

SEQ ID NO: 392319 - DNA, 104 bp, Homo sapiens; identical to SEQ ID NO: 260897
  chr9:133264434-133264538
  hypo

SEQ ID NO: 392320 - DNA, 251 bp, Homo sapiens; identical to SEQ ID NO: 260906
  chr9:133306770-133307021
  hypo

SEQ ID NO: 392321 - DNA, 33 bp, Homo sapiens; identical to SEQ ID NO: 260919
  chr9:133580976-133581009
  hypo

SEQ ID NO: 392322 - DNA, 69 bp, Homo sapiens; identical to SEQ ID NO: 386097
  chr9:133593031-133593100
  hypo

SEQ ID NO: 392323 - DNA, 40 bp, Homo sapiens; identical to SEQ ID NO: 213067
  chr9:133606663-133606703
  hypo

SEQ ID NO: 392324 - DNA, 211 bp, Homo sapiens; identical to SEQ ID NO: 260935
  chr9:133802158-133802369
  hypo

SEQ ID NO: 392325 - DNA, 107 bp, Homo sapiens; identical to SEQ ID NO: 213076
  chr9:133911551-133911658
  hypo

SEQ ID NO: 392326 - DNA, 85 bp, Homo sapiens; identical to SEQ ID NO: 311450
  chr9:133911723-133911808
  hypo

SEQ ID NO: 392327 - DNA, 113 bp, Homo sapiens; identical to SEQ ID NO: 260937
  chr9:133926312-133926425
  hypo

SEQ ID NO: 392328 - DNA, 154 bp, Homo sapiens; identical to SEQ ID NO: 260953
  chr9:134195896-134196050
  hypo

SEQ ID NO: 392329 - DNA, 112 bp, Homo sapiens; identical to SEQ ID NO: 260954
  chr9:134200644-134200756
  hypo

SEQ ID NO: 392330 - DNA, 184 bp, Homo sapiens; identical to SEQ ID NO: 213082
  chr9:134400291-134400475
  hypo

SEQ ID NO: 392331 - DNA, 45 bp, Homo sapiens; identical to SEQ ID NO: 260971
  chr9:135084416-135084461
  hypo

SEQ ID NO: 392332 - DNA, 157 bp, Homo sapiens; identical to SEQ ID NO: 260980
  chr9:135360968-135361125
  hypo

SEQ ID NO: 392333 - DNA, 83 bp, Homo sapiens; identical to SEQ ID NO: 260983
  chr9:135479250-135479333
  hypo

SEQ ID NO: 392334 - DNA, 236 bp, Homo sapiens; identical to SEQ ID NO: 260987
  chr9:135520063-135520299
  hypo

SEQ ID NO: 392335 - DNA, 112 bp, Homo sapiens; identical to SEQ ID NO: 260989
  chr9:135537995-135538107
  hypo

SEQ ID NO: 392336 - DNA, 203 bp, Homo sapiens; identical to SEQ ID NO: 213100
  chr9:135626043-135626246
  hypo

SEQ ID NO: 392337 - DNA, 176 bp, Homo sapiens; identical to SEQ ID NO: 213114
  chr9:136382777-136382953
  hypo

SEQ ID NO: 392338 - DNA, 81 bp, Homo sapiens; identical to SEQ ID NO: 261049
  chr9:136575502-136575583
  hypo

SEQ ID NO: 392339 - DNA, 155 bp, Homo sapiens; identical to SEQ ID NO: 261051
  chr9:136575776-136575931
  hypo

SEQ ID NO: 392340 - DNA, 103 bp, Homo sapiens; identical to SEQ ID NO: 261054
  chr9:136621773-136621876
  hypo

SEQ ID NO: 392341 - DNA, 74 bp, Homo sapiens; identical to SEQ ID NO: 213121
  chr9:136641169-136641243
  hypo

SEQ ID NO: 392342 - DNA, 344 bp, Homo sapiens; identical to SEQ ID NO: 261065
  chr9:136669406-136669750
  hypo

SEQ ID NO: 392343 - DNA, 153 bp, Homo sapiens; identical to SEQ ID NO: 261066
  chr9:136670534-136670687
  hypo

SEQ ID NO: 392344 - DNA, 179 bp, Homo sapiens; identical to SEQ ID NO: 261069
  chr9:136676092-136676271
  hypo

SEQ ID NO: 392345 - DNA, 174 bp, Homo sapiens; identical to SEQ ID NO: 213133
  chr9:136699684-136699858
  hypo

SEQ ID NO: 392346 - DNA, 434 bp, Homo sapiens; identical to SEQ ID NO: 261081
  chr9:136722069-136722503
  hypo

SEQ ID NO: 392347 - DNA, 179 bp, Homo sapiens; identical to SEQ ID NO: 213137
  chr9:136723290-136723469
  hypo

SEQ ID NO: 392348 - DNA, 39 bp, Homo sapiens; identical to SEQ ID NO: 261104
  chr9:136786010-136786049
  hypo

SEQ ID NO: 392349 - DNA, 138 bp, Homo sapiens; identical to SEQ ID NO: 261108
  chr9:136834267-136834405
  hypo

SEQ ID NO: 392350 - DNA, 196 bp, Homo sapiens; identical to SEQ ID NO: 261111
  chr9:136852629-136852825
  hypo

SEQ ID NO: 392351 - DNA, 230 bp, Homo sapiens; identical to SEQ ID NO: 261114
  chr9:136920306-136920536
  hypo

SEQ ID NO: 392352 - DNA, 82 bp, Homo sapiens; identical to SEQ ID NO: 261124
  chr9:137314810-137314892
  hypo

SEQ ID NO: 392353 - DNA, 250 bp, Homo sapiens; identical to SEQ ID NO: 261127
  chr9:137360364-137360614
  hypo

SEQ ID NO: 392354 - DNA, 140 bp, Homo sapiens; identical to SEQ ID NO: 261131
  chr9:137474607-137474747
  hypo

SEQ ID NO: 392355 - DNA, 99 bp, Homo sapiens; identical to SEQ ID NO: 261132
  chr9:137497208-137497307
  hypo

SEQ ID NO: 392356 - DNA, 81 bp, Homo sapiens; identical to SEQ ID NO: 311653
  chr9:137575945-137576026
  hypo

SEQ ID NO: 392357 - DNA, 90 bp, Homo sapiens; identical to SEQ ID NO: 261159
  chr9:137716485-137716575
  hypo

SEQ ID NO: 392358 - DNA, 82 bp, Homo sapiens; identical to SEQ ID NO: 261165
  chr9:137926909-137926991
  hypo

SEQ ID NO: 392359 - DNA, 186 bp, Homo sapiens; identical to SEQ ID NO: 261167
  chr9:138060951-138061137
  hypo

SEQ ID NO: 392360 - DNA, 43 bp, Homo sapiens; identical to SEQ ID NO: 261173
  chr9:138150429-138150472
  hypo

SEQ ID NO: 392361 - DNA, 89 bp, Homo sapiens; identical to SEQ ID NO: 213163
  chr9:138297097-138297186
  hypo

SEQ ID NO: 392362 - DNA, 42 bp, Homo sapiens; identical to SEQ ID NO: 261183
  chr9:138339188-138339230
  hypo

SEQ ID NO: 392363 - DNA, 56 bp, Homo sapiens; identical to SEQ ID NO: 311704
  chr9:138353991-138354047
  hypo

SEQ ID NO: 392364 - DNA, 42 bp, Homo sapiens; identical to SEQ ID NO: 261191
  chr9:138603672-138603714
  hypo

SEQ ID NO: 392365 - DNA, 37 bp, Homo sapiens; identical to SEQ ID NO: 213168
  chr9:138654778-138654815
  hypo

SEQ ID NO: 392366 - DNA, 203 bp, Homo sapiens; identical to SEQ ID NO: 213171
  chr9:138718007-138718210
  hypo

SEQ ID NO: 392367 - DNA, 77 bp, Homo sapiens; identical to SEQ ID NO: 213175
  chr9:138796808-138796885
  hypo

SEQ ID NO: 392368 - DNA, 154 bp, Homo sapiens; identical to SEQ ID NO: 261219
  chr9:138871837-138871991
  hypo

SEQ ID NO: 392369 - DNA, 690 bp, Homo sapiens; identical to SEQ ID NO: 261227
  chr9:138887921-138888611
  hypo

SEQ ID NO: 392370 - DNA, 55 bp, Homo sapiens; identical to SEQ ID NO: 213183
  chr9:138907131-138907186
  hypo

SEQ ID NO: 392371 - DNA, 184 bp, Homo sapiens; identical to SEQ ID NO: 213184
  chr9:138910983-138911167
  hypo

SEQ ID NO: 392372 - DNA, 432 bp, Homo sapiens; identical to SEQ ID NO: 261238
  chr9:138950492-138950924
  hypo

SEQ ID NO: 392373 - DNA, 36 bp, Homo sapiens; identical to SEQ ID NO: 213187
  chr9:138970475-138970511
  hypo

SEQ ID NO: 392374 - DNA, 212 bp, Homo sapiens; identical to SEQ ID NO: 261244
  chr9:138979354-138979566
  hypo

SEQ ID NO: 392375 - DNA, 52 bp, Homo sapiens; identical to SEQ ID NO: 311785
  chr9:139114399-139114451
  hypo

SEQ ID NO: 392376 - DNA, 848 bp, Homo sapiens; identical to SEQ ID NO: 311786
  chr9:139114481-139115329
  hypo

SEQ ID NO: 392377 - DNA, 138 bp, Homo sapiens; identical to SEQ ID NO: 261266
  chr9:139121427-139121565
  hypo

SEQ ID NO: 392378 - DNA, 34 bp, Homo sapiens; identical to SEQ ID NO: 213210
  chr9:139272165-139272199
  hypo

SEQ ID NO: 392379 - DNA, 148 bp, Homo sapiens; identical to SEQ ID NO: 213212
  chr9:139300480-139300628
  hypo

SEQ ID NO: 392380 - DNA, 489 bp, Homo sapiens; identical to SEQ ID NO: 261280
  chr9:139330350-139330839
  hypo

SEQ ID NO: 392381 - DNA, 365 bp, Homo sapiens; identical to SEQ ID NO: 213217
  chr9:139345460-139345825
  hypo

SEQ ID NO: 392382 - DNA, 80 bp, Homo sapiens; identical to SEQ ID NO: 311815
  chr9:139367958-139368038
  hypo

SEQ ID NO: 392383 - DNA, 321 bp, Homo sapiens; identical to SEQ ID NO: 213233
  chr9:139585994-139586315
  hypo

SEQ ID NO: 392384 - DNA, 60 bp, Homo sapiens; identical to SEQ ID NO: 311851
  chr9:139638538-139638598
  hypo

SEQ ID NO: 392385 - DNA, 434 bp, Homo sapiens; identical to SEQ ID NO: 311861
  chr9:139735098-139735532
  hypo

SEQ ID NO: 392386 - DNA, 712 bp, Homo sapiens; identical to SEQ ID NO: 213254
  chr9:139934675-139935387
  hypo

SEQ ID NO: 392387 - DNA, 347 bp, Homo sapiens; identical to SEQ ID NO: 261372
  chr9:140125871-140126218
  hypo

SEQ ID NO: 392388 - DNA, 258 bp, Homo sapiens; identical to SEQ ID NO: 388702
  chr9:140196228-140196486
  hypo

SEQ ID NO: 392389 - DNA, 208 bp, Homo sapiens; identical to SEQ ID NO: 261383
  chr9:140206332-140206540
  hypo

SEQ ID NO: 392390 - DNA, 32 bp, Homo sapiens; identical to SEQ ID NO: 261386
  chr9:140216846-140216878
  hypo

SEQ ID NO: 392391 - DNA, 259 bp, Homo sapiens; identical to SEQ ID NO: 311943
  chr9:140351846-140352105
  hypo

SEQ ID NO: 392392 - DNA, 180 bp, Homo sapiens; identical to SEQ ID NO: 213274
  chr9:140352153-140352333
  hypo

SEQ ID NO: 392393 - DNA, 37 bp, Homo sapiens; identical to SEQ ID NO: 261408
  chr9:140418788-140418825
  hypo

SEQ ID NO: 392394 - DNA, 42 bp, Homo sapiens; identical to SEQ ID NO: 213286
  chr9:140576167-140576209
  hypo

SEQ ID NO: 392395 - DNA, 700 bp, Homo sapiens; identical to SEQ ID NO: 213288
  chr9:140587006-140587706
  hypo

SEQ ID NO: 392396 - DNA, 151 bp, Homo sapiens; identical to SEQ ID NO: 261419
  chr9:140612587-140612738
  hypo

SEQ ID NO: 392397 - DNA, 381 bp, Homo sapiens; identical to SEQ ID NO: 213293
  chr9:140615063-140615444
  hypo

SEQ ID NO: 392398 - DNA, 79 bp, Homo sapiens; identical to SEQ ID NO: 213294
  chr9:140615492-140615571
  hypo

SEQ ID NO: 392399 - DNA, 861 bp, Homo sapiens; identical to SEQ ID NO: 261422
  chr9:140620043-140620904
  hypo

SEQ ID NO: 392400 - DNA, 40 bp, Homo sapiens; identical to SEQ ID NO: 213299
  chr9:140633524-140633564
  hypo

SEQ ID NO: 392401 - DNA, 106 bp, Homo sapiens; identical to SEQ ID NO: 261436
  chr9:140691709-140691815
  hypo

SEQ ID NO: 392402 - DNA, 123 bp, Homo sapiens; identical to SEQ ID NO: 261460
  chr10:415397-415520
  hypo

SEQ ID NO: 392403 - DNA, 92 bp, Homo sapiens; identical to SEQ ID NO: 312041
  chr10:673704-673796
  hypo

SEQ ID NO: 392404 - DNA, 213 bp, Homo sapiens; identical to SEQ ID NO: 213333
  chr10:679150-679363
  hypo

SEQ ID NO: 392405 - DNA, 105 bp, Homo sapiens; identical to SEQ ID NO: 213334
  chr10:679402-679507
  hypo

SEQ ID NO: 392406 - DNA, 40 bp, Homo sapiens; identical to SEQ ID NO: 213335
  chr10:685212-685252
  hypo

SEQ ID NO: 392407 - DNA, 79 bp, Homo sapiens; identical to SEQ ID NO: 261492
  chr10:818533-818612
  hypo

SEQ ID NO: 392408 - DNA, 90 bp, Homo sapiens; identical to SEQ ID NO: 213351
  chr10:1148461-1148551
  hypo

SEQ ID NO: 392409 - DNA, 55 bp, Homo sapiens; identical to SEQ ID NO: 261516
  chr10:1163782-1163837
  hypo

SEQ ID NO: 392410 - DNA, 235 bp, Homo sapiens; identical to SEQ ID NO: 213357
  chr10:1252355-1252590
  hypo

SEQ ID NO: 392411 - DNA, 128 bp, Homo sapiens; identical to SEQ ID NO: 213358
  chr10:1252620-1252748
  hypo

SEQ ID NO: 392412 - DNA, 724 bp, Homo sapiens; identical to SEQ ID NO: 261532
  chr10:1283790-1284514
  hypo

SEQ ID NO: 392413 - DNA, 211 bp, Homo sapiens; identical to SEQ ID NO: 261533
  chr10:1286699-1286910
  hypo

SEQ ID NO: 392414 - DNA, 389 bp, Homo sapiens; identical to SEQ ID NO: 261547
  chr10:1574918-1575307
  hypo

SEQ ID NO: 392415 - DNA, 79 bp, Homo sapiens; identical to SEQ ID NO: 261565
  chr10:2364622-2364701
  hypo

SEQ ID NO: 392416 - DNA, 64 bp, Homo sapiens; identical to SEQ ID NO: 213377
  chr10:2620526-2620590
  hypo

SEQ ID NO: 392417 - DNA, 42 bp, Homo sapiens; identical to SEQ ID NO: 261570
  chr10:2782246-2782288
  hypo

SEQ ID NO: 392418 - DNA, 54 bp, Homo sapiens; identical to SEQ ID NO: 261575
  chr10:3146043-3146097
  hypo

SEQ ID NO: 392419 - DNA, 55 bp, Homo sapiens; identical to SEQ ID NO: 261582
  chr10:3171106-3171161
  hypo

SEQ ID NO: 392420 - DNA, 39 bp, Homo sapiens; identical to SEQ ID NO: 213389
  chr10:3192934-3192973
  hypo

SEQ ID NO: 392421 - DNA, 52 bp, Homo sapiens; identical to SEQ ID NO: 261602
  chr10:3365239-3365291
  hypo

SEQ ID NO: 392422 - DNA, 50 bp, Homo sapiens; identical to SEQ ID NO: 261603
  chr10:3438497-3438547
  hypo

SEQ ID NO: 392423 - DNA, 230 bp, Homo sapiens; identical to SEQ ID NO: 261604
  chr10:3512565-3512795
  hypo

SEQ ID NO: 392424 - DNA, 122 bp, Homo sapiens; identical to SEQ ID NO: 261610
  chr10:3712903-3713025
  hypo

SEQ ID NO: 392425 - DNA, 197 bp, Homo sapiens; identical to SEQ ID NO: 261611
  chr10:3862733-3862930
  hypo

SEQ ID NO: 392426 - DNA, 182 bp, Homo sapiens; identical to SEQ ID NO: 261625
  chr10:5535380-5535562
  hypo

SEQ ID NO: 392427 - DNA, 78 bp, Homo sapiens; identical to SEQ ID NO: 261647
  chr10:5902471-5902549
  hypo

SEQ ID NO: 392428 - DNA, 256 bp, Homo sapiens; identical to SEQ ID NO: 261662
  chr10:6151972-6152228
  hypo

SEQ ID NO: 392429 - DNA, 264 bp, Homo sapiens; identical to SEQ ID NO: 261666
  chr10:6211184-6211448
  hypo

SEQ ID NO: 392430 - DNA, 207 bp, Homo sapiens; identical to SEQ ID NO: 213423
  chr10:6531176-6531383
  hypo

SEQ ID NO: 392431 - DNA, 195 bp, Homo sapiens; identical to SEQ ID NO: 261674
  chr10:6852535-6852730
  hypo

SEQ ID NO: 392432 - DNA, 70 bp, Homo sapiens; identical to SEQ ID NO: 261677
  chr10:6975463-6975533
  hypo

SEQ ID NO: 392433 - DNA, 42 bp, Homo sapiens; identical to SEQ ID NO: 261679
  chr10:7083317-7083359
  hypo

SEQ ID NO: 392434 - DNA, 138 bp, Homo sapiens; identical to SEQ ID NO: 261694
  chr10:7238964-7239102
  hypo

SEQ ID NO: 392435 - DNA, 78 bp, Homo sapiens; identical to SEQ ID NO: 261708
  chr10:7367242-7367320
  hypo

SEQ ID NO: 392436 - DNA, 138 bp, Homo sapiens; identical to SEQ ID NO: 261715
  chr10:7426168-7426306
  hypo

SEQ ID NO: 392437 - DNA, 41 bp, Homo sapiens; identical to SEQ ID NO: 213446
  chr10:11184680-11184721
  hypo

SEQ ID NO: 392438 - DNA, 78 bp, Homo sapiens; identical to SEQ ID NO: 261761
  chr10:11830180-11830258
  hypo

SEQ ID NO: 392439 - DNA, 75 bp, Homo sapiens; identical to SEQ ID NO: 261763
  chr10:11847448-11847523
  hypo

SEQ ID NO: 392440 - DNA, 193 bp, Homo sapiens; identical to SEQ ID NO: 213454
  chr10:11870932-11871125
  hypo

SEQ ID NO: 392441 - DNA, 78 bp, Homo sapiens; identical to SEQ ID NO: 261768
  chr10:11911399-11911477
  hypo

SEQ ID NO: 392442 - DNA, 32 bp, Homo sapiens; identical to SEQ ID NO: 261769
  chr10:11914996-11915028
  hypo

SEQ ID NO: 392443 - DNA, 50 bp, Homo sapiens; identical to SEQ ID NO: 261772
  chr10:11941266-11941316
  hypo

SEQ ID NO: 392444 - DNA, 158 bp, Homo sapiens; identical to SEQ ID NO: 261773
  chr10:11952452-11952610
  hypo

SEQ ID NO: 392445 - DNA, 177 bp, Homo sapiens; identical to SEQ ID NO: 213462
  chr10:12707812-12707989
  hypo

SEQ ID NO: 392446 - DNA, 181 bp, Homo sapiens; identical to SEQ ID NO: 261794
  chr10:12768863-12769044
  hypo

SEQ ID NO: 392447 - DNA, 241 bp, Homo sapiens; identical to SEQ ID NO: 201985
  chr10:13341387-13341628
  hypo

SEQ ID NO: 392448 - DNA, 35 bp, Homo sapiens; identical to SEQ ID NO: 261808
  chr10:13516622-13516657
  hypo

SEQ ID NO: 392449 - DNA, 78 bp, Homo sapiens; identical to SEQ ID NO: 261814
  chr10:13725168-13725246
  hypo

SEQ ID NO: 392450 - DNA, 333 bp, Homo sapiens; identical to SEQ ID NO: 261818
  chr10:13769492-13769825
  hypo

SEQ ID NO: 392451 - DNA, 32 bp, Homo sapiens; identical to SEQ ID NO: 261819
  chr10:13769885-13769917
  hypo

SEQ ID NO: 392452 - DNA, 81 bp, Homo sapiens; identical to SEQ ID NO: 261833
  chr10:15009625-15009706
  hypo

SEQ ID NO: 392453 - DNA, 101 bp, Homo sapiens; identical to SEQ ID NO: 261834
  chr10:15022595-15022696
  hypo

SEQ ID NO: 392454 - DNA, 97 bp, Homo sapiens; identical to SEQ ID NO: 261855
  chr10:16955825-16955922
  hypo

SEQ ID NO: 392455 - DNA, 39 bp, Homo sapiens; identical to SEQ ID NO: 386155
  chr10:17157575-17157614
  hypo

SEQ ID NO: 392456 - DNA, 32 bp, Homo sapiens; identical to SEQ ID NO: 261859
  chr10:17331810-17331842
  hypo

SEQ ID NO: 392457 - DNA, 39 bp, Homo sapiens; identical to SEQ ID NO: 261861
  chr10:17378259-17378298
  hypo

SEQ ID NO: 392458 - DNA, 44 bp, Homo sapiens; identical to SEQ ID NO: 261865
  chr10:17512861-17512905
  hypo

SEQ ID NO: 392459 - DNA, 190 bp, Homo sapiens; identical to SEQ ID NO: 261867
  chr10:18579867-18580057
  hypo

SEQ ID NO: 392460 - DNA, 146 bp, Homo sapiens; identical to SEQ ID NO: 261869
  chr10:20538375-20538521
  hypo

SEQ ID NO: 392461 - DNA, 104 bp, Homo sapiens; identical to SEQ ID NO: 223779
  chr10:22032852-22032956
  hypo

SEQ ID NO: 392462 - DNA, 37 bp, Homo sapiens; identical to SEQ ID NO: 261898
  chr10:24966120-24966157
  hypo

SEQ ID NO: 392463 - DNA, 96 bp, Homo sapiens; identical to SEQ ID NO: 213501
  chr10:24988619-24988715
  hypo

SEQ ID NO: 392464 - DNA, 33 bp, Homo sapiens; identical to SEQ ID NO: 261902
  chr10:26819343-26819376
  hypo

SEQ ID NO: 392465 - DNA, 89 bp, Homo sapiens; identical to SEQ ID NO: 213506
  chr10:27089296-27089385
  hypo

SEQ ID NO: 392466 - DNA, 36 bp, Homo sapiens; identical to SEQ ID NO: 213507
  chr10:27096989-27097025
  hypo

SEQ ID NO: 392467 - DNA, 42 bp, Homo sapiens; identical to SEQ ID NO: 261910
  chr10:27233078-27233120
  hypo

SEQ ID NO: 392468 - DNA, 281 bp, Homo sapiens; identical to SEQ ID NO: 261911
  chr10:27233410-27233691
  hypo

SEQ ID NO: 392469 - DNA, 86 bp, Homo sapiens; identical to SEQ ID NO: 213516
  chr10:29300155-29300241
  hypo

SEQ ID NO: 392470 - DNA, 61 bp, Homo sapiens; identical to SEQ ID NO: 223802
  chr10:29738072-29738133
  hypo

SEQ ID NO: 392471 - DNA, 158 bp, Homo sapiens; identical to SEQ ID NO: 261934
  chr10:29821666-29821824
  hypo

SEQ ID NO: 392472 - DNA, 207 bp, Homo sapiens; identical to SEQ ID NO: 261937
  chr10:29884472-29884679
  hypo

SEQ ID NO: 392473 - DNA, 43 bp, Homo sapiens; identical to SEQ ID NO: 261938
  chr10:30270177-30270220
  hypo

SEQ ID NO: 392474 - DNA, 47 bp, Homo sapiens; identical to SEQ ID NO: 261939
  chr10:30280769-30280816
  hypo

SEQ ID NO: 392475 - DNA, 240 bp, Homo sapiens; identical to SEQ ID NO: 261941
  chr10:30454426-30454666
  hypo

SEQ ID NO: 392476 - DNA, 34 bp, Homo sapiens; identical to SEQ ID NO: 261943
  chr10:30692599-30692633
  hypo

SEQ ID NO: 392477 - DNA, 81 bp, Homo sapiens; identical to SEQ ID NO: 261945
  chr10:30798127-30798208
  hypo

SEQ ID NO: 392478 - DNA, 186 bp, Homo sapiens; identical to SEQ ID NO: 261953
  chr10:32038297-32038483
  hypo

SEQ ID NO: 392479 - DNA, 36 bp, Homo sapiens; identical to SEQ ID NO: 213525
  chr10:32333609-32333645
  hypo

SEQ ID NO: 392480 - DNA, 47 bp, Homo sapiens; identical to SEQ ID NO: 261964
  chr10:34151694-34151741
  hypo

SEQ ID NO: 392481 - DNA, 160 bp, Homo sapiens; identical to SEQ ID NO: 261968
  chr10:34472412-34472572
  hypo

SEQ ID NO: 392482 - DNA, 167 bp, Homo sapiens; identical to SEQ ID NO: 261970
  chr10:34558597-34558764
  hypo

SEQ ID NO: 392483 - DNA, 35 bp, Homo sapiens; identical to SEQ ID NO: 384311
  chr10:35105213-35105248
  hypo

SEQ ID NO: 392484 - DNA, 31 bp, Homo sapiens; identical to SEQ ID NO: 261975
  chr10:35243813-35243844
  hypo

SEQ ID NO: 392485 - DNA, 198 bp, Homo sapiens; identical to SEQ ID NO: 213534
  chr10:36639323-36639521
  hypo

SEQ ID NO: 392486 - DNA, 326 bp, Homo sapiens; identical to SEQ ID NO: 261995
  chr10:43872976-43873302
  hypo

SEQ ID NO: 392487 - DNA, 118 bp, Homo sapiens; identical to SEQ ID NO: 262014
  chr10:50178208-50178326
  hypo

SEQ ID NO: 392488 - DNA, 52 bp, Homo sapiens; identical to SEQ ID NO: 262026
  chr10:61552788-61552840
  hypo

SEQ ID NO: 392489 - DNA, 41 bp, Homo sapiens; identical to SEQ ID NO: 213564
  chr10:63757869-63757910
  hypo

SEQ ID NO: 392490 - DNA, 82 bp, Homo sapiens; identical to SEQ ID NO: 262033
  chr10:64997098-64997180
  hypo

SEQ ID NO: 392491 - DNA, 120 bp, Homo sapiens; identical to SEQ ID NO: 213566
  chr10:69853849-69853969
  hypo

SEQ ID NO: 392492 - DNA, 35 bp, Homo sapiens; identical to SEQ ID NO: 262045
  chr10:70472770-70472805
  hypo

SEQ ID NO: 392493 - DNA, 51 bp, Homo sapiens; identical to SEQ ID NO: 262050
  chr10:70993020-70993071
  hypo

SEQ ID NO: 392494 - DNA, 42 bp, Homo sapiens; identical to SEQ ID NO: 262055
  chr10:71144262-71144304
  hypo

SEQ ID NO: 392495 - DNA, 48 bp, Homo sapiens; identical to SEQ ID NO: 262057
  chr10:71154729-71154777
  hypo

SEQ ID NO: 392496 - DNA, 53 bp, Homo sapiens; identical to SEQ ID NO: 213576
  chr10:71871350-71871403
  hypo

SEQ ID NO: 392497 - DNA, 35 bp, Homo sapiens; identical to SEQ ID NO: 384318
  chr10:71892801-71892836
  hypo

SEQ ID NO: 392498 - DNA, 99 bp, Homo sapiens; identical to SEQ ID NO: 262083
  chr10:73036106-73036205
  hypo

SEQ ID NO: 392499 - DNA, 53 bp, Homo sapiens; identical to SEQ ID NO: 213586
  chr10:73553163-73553216
  hypo

SEQ ID NO: 392500 - DNA, 92 bp, Homo sapiens; identical to SEQ ID NO: 213587
  chr10:73574841-73574933
  hypo

SEQ ID NO: 392501 - DNA, 100 bp, Homo sapiens; identical to SEQ ID NO: 384319
  chr10:73848222-73848322
  hypo

SEQ ID NO: 392502 - DNA, 38 bp, Homo sapiens; identical to SEQ ID NO: 262096
  chr10:73929856-73929894
  hypo

SEQ ID NO: 392503 - DNA, 294 bp, Homo sapiens; identical to SEQ ID NO: 223842
  chr10:74032607-74032901
  hypo

SEQ ID NO: 392504 - DNA, 33 bp, Homo sapiens; identical to SEQ ID NO: 262107
  chr10:75128352-75128385
  hypo

SEQ ID NO: 392505 - DNA, 141 bp, Homo sapiens; identical to SEQ ID NO: 223844
  chr10:75408169-75408310
  hypo

SEQ ID NO: 392506 - DNA, 96 bp, Homo sapiens; identical to SEQ ID NO: 312743
  chr10:75832593-75832689
  hypo

SEQ ID NO: 392507 - DNA, 146 bp, Homo sapiens; identical to SEQ ID NO: 262128
  chr10:76588593-76588739
  hypo

SEQ ID NO: 392508 - DNA, 366 bp, Homo sapiens; identical to SEQ ID NO: 262130
  chr10:76780147-76780513
  hypo

SEQ ID NO: 392509 - DNA, 173 bp, Homo sapiens; identical to SEQ ID NO: 213599
  chr10:76796613-76796786
  hypo

SEQ ID NO: 392510 - DNA, 31 bp, Homo sapiens; identical to SEQ ID NO: 262143
  chr10:77003406-77003437
  hypo

SEQ ID NO: 392511 - DNA, 469 bp, Homo sapiens; identical to SEQ ID NO: 223850
  chr10:79686575-79687044
  hypo

SEQ ID NO: 392512 - DNA, 101 bp, Homo sapiens; identical to SEQ ID NO: 262156
  chr10:80061832-80061933
  hypo

SEQ ID NO: 392513 - DNA, 63 bp, Homo sapiens; identical to SEQ ID NO: 213610
  chr10:80739956-80740019
  hypo

SEQ ID NO: 392514 - DNA, 75 bp, Homo sapiens; identical to SEQ ID NO: 213613
  chr10:80840369-80840444
  hypo

SEQ ID NO: 392515 - DNA, 316 bp, Homo sapiens; identical to SEQ ID NO: 262175
  chr10:80953306-80953622
  hypo

SEQ ID NO: 392516 - DNA, 50 bp, Homo sapiens; identical to SEQ ID NO: 262188
  chr10:81020970-81021020
  hypo

SEQ ID NO: 392517 - DNA, 47 bp, Homo sapiens; identical to SEQ ID NO: 262190
  chr10:81029634-81029681
  hypo

SEQ ID NO: 392518 - DNA, 433 bp, Homo sapiens; identical to SEQ ID NO: 213630
  chr10:81036657-81037090
  hypo

SEQ ID NO: 392519 - DNA, 42 bp, Homo sapiens; identical to SEQ ID NO: 262201
  chr10:81072192-81072234
  hypo

SEQ ID NO: 392520 - DNA, 181 bp, Homo sapiens; identical to SEQ ID NO: 213637
  chr10:81073340-81073521
  hypo

SEQ ID NO: 392521 - DNA, 263 bp, Homo sapiens; identical to SEQ ID NO: 213639
  chr10:81145945-81146208
  hypo

SEQ ID NO: 392522 - DNA, 162 bp, Homo sapiens; identical to SEQ ID NO: 262205
  chr10:81861006-81861168
  hypo

SEQ ID NO: 392523 - DNA, 162 bp, Homo sapiens; identical to SEQ ID NO: 213643
  chr10:84618971-84619133
  hypo

SEQ ID NO: 392524 - DNA, 266 bp, Homo sapiens; identical to SEQ ID NO: 262216
  chr10:86361898-86362164
  hypo

SEQ ID NO: 392525 - DNA, 56 bp, Homo sapiens; identical to SEQ ID NO: 223859
  chr10:87493570-87493626
  hypo

SEQ ID NO: 392526 - DNA, 33 bp, Homo sapiens; identical to SEQ ID NO: 262222
  chr10:88286949-88286982
  hypo

SEQ ID NO: 392527 - DNA, 224 bp, Homo sapiens; identical to SEQ ID NO: 262226
  chr10:88470510-88470734
  hypo

SEQ ID NO: 392528 - DNA, 277 bp, Homo sapiens; identical to SEQ ID NO: 213650
  chr10:90029772-90030049
  hypo

SEQ ID NO: 392529 - DNA, 1124 bp, Homo sapiens; identical to SEQ ID NO: 223877
  chr10:96162479-96163603
  hypo

SEQ ID NO: 392530 - DNA, 95 bp, Homo sapiens; identical to SEQ ID NO: 262263
  chr10:98482590-98482685
  hypo

SEQ ID NO: 392531 - DNA, 34 bp, Homo sapiens; identical to SEQ ID NO: 262266
  chr10:98676070-98676104
  hypo

SEQ ID NO: 392532 - DNA, 336 bp, Homo sapiens; identical to SEQ ID NO: 223881
  chr10:99259373-99259709
  hypo

SEQ ID NO: 392533 - DNA, 174 bp, Homo sapiens; identical to SEQ ID NO: 213671
  chr10:100170637-100170811
  hypo

SEQ ID NO: 392534 - DNA, 426 bp, Homo sapiens; identical to SEQ ID NO: 213673
  chr10:100178510-100178936
  hypo

SEQ ID NO: 392535 - DNA, 211 bp, Homo sapiens; identical to SEQ ID NO: 262281
  chr10:100194215-100194426
  hypo

SEQ ID NO: 392536 - DNA, 120 bp, Homo sapiens; identical to SEQ ID NO: 202233
  chr10:102973524-102973644
  hypo

SEQ ID NO: 392537 - DNA, 61 bp, Homo sapiens; identical to SEQ ID NO: 312968
  chr10:104161594-104161655
  hypo

SEQ ID NO: 392538 - DNA, 34 bp, Homo sapiens; identical to SEQ ID NO: 213685
  chr10:104230570-104230604
  hypo

SEQ ID NO: 392539 - DNA, 199 bp, Homo sapiens; identical to SEQ ID NO: 213686
  chr10:104239074-104239273
  hypo

SEQ ID NO: 392540 - DNA, 85 bp, Homo sapiens; identical to SEQ ID NO: 312981
  chr10:105127076-105127161
  hypo

SEQ ID NO: 392541 - DNA, 33 bp, Homo sapiens; identical to SEQ ID NO: 213691
  chr10:105238592-105238625
  hypo

SEQ ID NO: 392542 - DNA, 321 bp, Homo sapiens; identical to SEQ ID NO: 262320
  chr10:105345023-105345344
  hypo

SEQ ID NO: 392543 - DNA, 38 bp, Homo sapiens; identical to SEQ ID NO: 262325
  chr10:105487458-105487496
  hypo

SEQ ID NO: 392544 - DNA, 35 bp, Homo sapiens; identical to SEQ ID NO: 262330
  chr10:106032651-106032686
  hypo

SEQ ID NO: 392545 - DNA, 55 bp, Homo sapiens; identical to SEQ ID NO: 213693
  chr10:106075696-106075751
  hypo

SEQ ID NO: 392546 - DNA, 93 bp, Homo sapiens; identical to SEQ ID NO: 262332
  chr10:106094618-106094711
  hypo

SEQ ID NO: 392547 - DNA, 94 bp, Homo sapiens; identical to SEQ ID NO: 262333
  chr10:106174643-106174737
  hypo

SEQ ID NO: 392548 - DNA, 76 bp, Homo sapiens; identical to SEQ ID NO: 202262
  chr10:112328695-112328771
  hypo

SEQ ID NO: 392549 - DNA, 214 bp, Homo sapiens; identical to SEQ ID NO: 202273
  chr10:112343940-112344154
  hypo

SEQ ID NO: 392550 - DNA, 387 bp, Homo sapiens; identical to SEQ ID NO: 202274
  chr10:112349362-112349749
  hypo

SEQ ID NO: 392551 - DNA, 151 bp, Homo sapiens; identical to SEQ ID NO: 202277
  chr10:112352830-112352981
  hypo

SEQ ID NO: 392552 - DNA, 404 bp, Homo sapiens; identical to SEQ ID NO: 202285
  chr10:112363988-112364392
  hypo

SEQ ID NO: 392553 - DNA, 96 bp, Homo sapiens; identical to SEQ ID NO: 262353
  chr10:114410445-114410541
  hypo

SEQ ID NO: 392554 - DNA, 102 bp, Homo sapiens; identical to SEQ ID NO: 213730
  chr10:114867548-114867650
  hypo

SEQ ID NO: 392555 - DNA, 138 bp, Homo sapiens; identical to SEQ ID NO: 262364
  chr10:114868048-114868186
  hypo

SEQ ID NO: 392556 - DNA, 109 bp, Homo sapiens; identical to SEQ ID NO: 262365
  chr10:114868454-114868563
  hypo

SEQ ID NO: 392557 - DNA, 112 bp, Homo sapiens; identical to SEQ ID NO: 388803
  chr10:115804427-115804539
  hypo

SEQ ID NO: 392558 - DNA, 40 bp, Homo sapiens; identical to SEQ ID NO: 388804
  chr10:115805287-115805327
  hypo

SEQ ID NO: 392559 - DNA, 92 bp, Homo sapiens; identical to SEQ ID NO: 313075
  chr10:115844855-115844947
  hypo

SEQ ID NO: 392560 - DNA, 95 bp, Homo sapiens; identical to SEQ ID NO: 262378
  chr10:115940180-115940275
  hypo

SEQ ID NO: 392561 - DNA, 295 bp, Homo sapiens; identical to SEQ ID NO: 388809
  chr10:118764187-118764482
  hypo

SEQ ID NO: 392562 - DNA, 308 bp, Homo sapiens; identical to SEQ ID NO: 202311
  chr10:119256046-119256354
  hypo

SEQ ID NO: 392563 - DNA, 75 bp, Homo sapiens; identical to SEQ ID NO: 262396
  chr10:119680912-119680987
  hypo

SEQ ID NO: 392564 - DNA, 131 bp, Homo sapiens; identical to SEQ ID NO: 213750
  chr10:121265440-121265571
  hypo

SEQ ID NO: 392565 - DNA, 174 bp, Homo sapiens; identical to SEQ ID NO: 213756
  chr10:121550361-121550535
  hypo

SEQ ID NO: 392566 - DNA, 77 bp, Homo sapiens; identical to SEQ ID NO: 262427
  chr10:123335738-123335815
  hypo

SEQ ID NO: 392567 - DNA, 45 bp, Homo sapiens; identical to SEQ ID NO: 213766
  chr10:124712595-124712640
  hypo

SEQ ID NO: 392568 - DNA, 120 bp, Homo sapiens; identical to SEQ ID NO: 262442
  chr10:124738944-124739064
  hypo

SEQ ID NO: 392569 - DNA, 58 bp, Homo sapiens; identical to SEQ ID NO: 262448
  chr10:125769654-125769712
  hypo

SEQ ID NO: 392570 - DNA, 80 bp, Homo sapiens; identical to SEQ ID NO: 262449
  chr10:125984183-125984263
  hypo

SEQ ID NO: 392571 - DNA, 240 bp, Homo sapiens; identical to SEQ ID NO: 262466
  chr10:126309753-126309993
  hypo

SEQ ID NO: 392572 - DNA, 119 bp, Homo sapiens; identical to SEQ ID NO: 262467
  chr10:126311518-126311637
  hypo

SEQ ID NO: 392573 - DNA, 184 bp, Homo sapiens; identical to SEQ ID NO: 213776
  chr10:126312314-126312498
  hypo

SEQ ID NO: 392574 - DNA, 256 bp, Homo sapiens; identical to SEQ ID NO: 262480
  chr10:126386075-126386331
  hypo

SEQ ID NO: 392575 - DNA, 80 bp, Homo sapiens; identical to SEQ ID NO: 262487
  chr10:126701135-126701215
  hypo

SEQ ID NO: 392576 - DNA, 181 bp, Homo sapiens; identical to SEQ ID NO: 262499
  chr10:126763482-126763663
  hypo

SEQ ID NO: 392577 - DNA, 291 bp, Homo sapiens; identical to SEQ ID NO: 262508
  chr10:126789760-126790051
  hypo

SEQ ID NO: 392578 - DNA, 85 bp, Homo sapiens; identical to SEQ ID NO: 262526
  chr10:127659356-127659441
  hypo

SEQ ID NO: 392579 - DNA, 34 bp, Homo sapiens; identical to SEQ ID NO: 213800
  chr10:128767590-128767624
  hypo

SEQ ID NO: 392580 - DNA, 115 bp, Homo sapiens; identical to SEQ ID NO: 262537
  chr10:128819000-128819115
  hypo

SEQ ID NO: 392581 - DNA, 203 bp, Homo sapiens; identical to SEQ ID NO: 262545
  chr10:128904395-128904598
  hypo

SEQ ID NO: 392582 - DNA, 194 bp, Homo sapiens; identical to SEQ ID NO: 262547
  chr10:128936062-128936256
  hypo

SEQ ID NO: 392583 - DNA, 159 bp, Homo sapiens; identical to SEQ ID NO: 262560
  chr10:129218388-129218547
  hypo

SEQ ID NO: 392584 - DNA, 48 bp, Homo sapiens; identical to SEQ ID NO: 213814
  chr10:129245980-129246028
  hypo

SEQ ID NO: 392585 - DNA, 52 bp, Homo sapiens; identical to SEQ ID NO: 262577
  chr10:130259851-130259903
  hypo

SEQ ID NO: 392586 - DNA, 191 bp, Homo sapiens; identical to SEQ ID NO: 213820
  chr10:131577565-131577756
  hypo

SEQ ID NO: 392587 - DNA, 218 bp, Homo sapiens; identical to SEQ ID NO: 313309
  chr10:131592426-131592644
  hypo

SEQ ID NO: 392588 - DNA, 152 bp, Homo sapiens; identical to SEQ ID NO: 262605
  chr10:131826126-131826278
  hypo

SEQ ID NO: 392589 - DNA, 36 bp, Homo sapiens; identical to SEQ ID NO: 262613
  chr10:132284135-132284171
  hypo

SEQ ID NO: 392590 - DNA, 34 bp, Homo sapiens; identical to SEQ ID NO: 262624
  chr10:133146661-133146695
  hypo

SEQ ID NO: 392591 - DNA, 32 bp, Homo sapiens; identical to SEQ ID NO: 262626
  chr10:133229420-133229452
  hypo

SEQ ID NO: 392592 - DNA, 89 bp, Homo sapiens; identical to SEQ ID NO: 213826
  chr10:133557718-133557807
  hypo

SEQ ID NO: 392593 - DNA, 158 bp, Homo sapiens; identical to SEQ ID NO: 262629
  chr10:133572409-133572567
  hypo

SEQ ID NO: 392594 - DNA, 72 bp, Homo sapiens; identical to SEQ ID NO: 213831
  chr10:133955513-133955585
  hypo

SEQ ID NO: 392595 - DNA, 291 bp, Homo sapiens; identical to SEQ ID NO: 262640
  chr10:133981379-133981670
  hypo

SEQ ID NO: 392596 - DNA, 138 bp, Homo sapiens; identical to SEQ ID NO: 262644
  chr10:134013835-134013973
  hypo

SEQ ID NO: 392597 - DNA, 40 bp, Homo sapiens; identical to SEQ ID NO: 313361
  chr10:134019294-134019334
  hypo

SEQ ID NO: 392598 - DNA, 408 bp, Homo sapiens; identical to SEQ ID NO: 313362
  chr10:134019364-134019772
  hypo

SEQ ID NO: 392599 - DNA, 349 bp, Homo sapiens; identical to SEQ ID NO: 262650
  chr10:134035687-134036036
  hypo

SEQ ID NO: 392600 - DNA, 115 bp, Homo sapiens; identical to SEQ ID NO: 262658
  chr10:134058332-134058447
  hypo

SEQ ID NO: 392601 - DNA, 280 bp, Homo sapiens; identical to SEQ ID NO: 262663
  chr10:134106506-134106786
  hypo

SEQ ID NO: 392602 - DNA, 104 bp, Homo sapiens; identical to SEQ ID NO: 213840
  chr10:134164631-134164735
  hypo

SEQ ID NO: 392603 - DNA, 44 bp, Homo sapiens; identical to SEQ ID NO: 262667
  chr10:134171806-134171850
  hypo

SEQ ID NO: 392604 - DNA, 687 bp, Homo sapiens; identical to SEQ ID NO: 262670
  chr10:134217026-134217713
  hypo

SEQ ID NO: 392605 - DNA, 105 bp, Homo sapiens; identical to SEQ ID NO: 213847
  chr10:134279498-134279603
  hypo

SEQ ID NO: 392606 - DNA, 274 bp, Homo sapiens; identical to SEQ ID NO: 262683
  chr10:134370565-134370839
  hypo

SEQ ID NO: 392607 - DNA, 201 bp, Homo sapiens; identical to SEQ ID NO: 262688
  chr10:134459516-134459717
  hypo

SEQ ID NO: 392608 - DNA, 67 bp, Homo sapiens; identical to SEQ ID NO: 262705
  chr10:134546239-134546306
  hypo

SEQ ID NO: 392609 - DNA, 100 bp, Homo sapiens; identical to SEQ ID NO: 262714
  chr10:134583322-134583422
  hypo

SEQ ID NO: 392610 - DNA, 114 bp, Homo sapiens; identical to SEQ ID NO: 262733
  chr10:134680625-134680739
  hypo

SEQ ID NO: 392611 - DNA, 277 bp, Homo sapiens; identical to SEQ ID NO: 262739
  chr10:134698448-134698725
  hypo

SEQ ID NO: 392612 - DNA, 669 bp, Homo sapiens; identical to SEQ ID NO: 262742
  chr10:134722154-134722823
  hypo

SEQ ID NO: 392613 - DNA, 178 bp, Homo sapiens; identical to SEQ ID NO: 262744
  chr10:134724608-134724786
  hypo

SEQ ID NO: 392614 - DNA, 180 bp, Homo sapiens
  chr10:134738986-134739166
  hypo
ggcccctctgaggtcctcagcaggtgagtcggggaagcagccgcacaacccacagcgccacagccacaagcagcctctgttcactttcacaacaaagtgcaacagccaaagcgtctggaaatcattccttaaacgaacactcattaagcgcctaccacgtgtggcaccagcgcacagcag

SEQ ID NO: 392615 - DNA, 249 bp, Homo sapiens; identical to SEQ ID NO: 313504
  chr10:134894586-134894835
  hypo

SEQ ID NO: 392616 - DNA, 258 bp, Homo sapiens; identical to SEQ ID NO: 262778
  chr10:134920248-134920506
  hypo

SEQ ID NO: 392617 - DNA, 96 bp, Homo sapiens; identical to SEQ ID NO: 262779
  chr10:134926796-134926892
  hypo

SEQ ID NO: 392618 - DNA, 134 bp, Homo sapiens; identical to SEQ ID NO: 262804
  chr10:135067365-135067499
  hypo

SEQ ID NO: 392619 - DNA, 86 bp, Homo sapiens; identical to SEQ ID NO: 262827
  chr10:135381780-135381866
  hypo

SEQ ID NO: 392620 - DNA, 138 bp, Homo sapiens; identical to SEQ ID NO: 262829
  chr11:251677-251815
  hypo

SEQ ID NO: 392621 - DNA, 153 bp, Homo sapiens; identical to SEQ ID NO: 262843
  chr11:419276-419429
  hypo

SEQ ID NO: 392622 - DNA, 107 bp, Homo sapiens; identical to SEQ ID NO: 224010
  chr11:450172-450279
  hypo

SEQ ID NO: 392623 - DNA, 101 bp, Homo sapiens; identical to SEQ ID NO: 213925
  chr11:464468-464569
  hypo

SEQ ID NO: 392624 - DNA, 49 bp, Homo sapiens; identical to SEQ ID NO: 262855
  chr11:476445-476494
  hypo

SEQ ID NO: 392625 - DNA, 182 bp, Homo sapiens; identical to SEQ ID NO: 202391
  chr11:518712-518894
  hypo

SEQ ID NO: 392626 - DNA, 61 bp, Homo sapiens; identical to SEQ ID NO: 287725
  chr11:518933-518994
  hypo

SEQ ID NO: 392627 - DNA, 38 bp, Homo sapiens; identical to SEQ ID NO: 262862
  chr11:532700-532738
  hypo

SEQ ID NO: 392628 - DNA, 37 bp, Homo sapiens; identical to SEQ ID NO: 213934
  chr11:534210-534247
  hypo

SEQ ID NO: 392629 - DNA, 36 bp, Homo sapiens; identical to SEQ ID NO: 262865
  chr11:539725-539761
  hypo

SEQ ID NO: 392630 - DNA, 122 bp, Homo sapiens; identical to SEQ ID NO: 213944
  chr11:601646-601768
  hypo

SEQ ID NO: 392631 - DNA, 129 bp, Homo sapiens; identical to SEQ ID NO: 262875
  chr11:605030-605159
  hypo

SEQ ID NO: 392632 - DNA, 68 bp, Homo sapiens; identical to SEQ ID NO: 262882
  chr11:702894-702962
  hypo

SEQ ID NO: 392633 - DNA, 61 bp, Homo sapiens; identical to SEQ ID NO: 262904
  chr11:873724-873785
  hypo

SEQ ID NO: 392634 - DNA, 294 bp, Homo sapiens; identical to SEQ ID NO: 213957
  chr11:991642-991936
  hypo

SEQ ID NO: 392635 - DNA, 169 bp, Homo sapiens; identical to SEQ ID NO: 213964
  chr11:1006970-1007139
  hypo

SEQ ID NO: 392636 - DNA, 268 bp, Homo sapiens; identical to SEQ ID NO: 262930
  chr11:1035491-1035759
  hypo

SEQ ID NO: 392637 - DNA, 55 bp, Homo sapiens; identical to SEQ ID NO: 262967
  chr11:1312883-1312938
  hypo

SEQ ID NO: 392638 - DNA, 278 bp, Homo sapiens; identical to SEQ ID NO: 262968
  chr11:1360071-1360349
  hypo

SEQ ID NO: 392639 - DNA, 277 bp, Homo sapiens; identical to SEQ ID NO: 313727
  chr11:1374621-1374898
  hypo

SEQ ID NO: 392640 - DNA, 58 bp, Homo sapiens; identical to SEQ ID NO: 262971
  chr11:1390811-1390869
  hypo

SEQ ID NO: 392641 - DNA, 284 bp, Homo sapiens; identical to SEQ ID NO: 313733
  chr11:1431201-1431485
  hypo

SEQ ID NO: 392642 - DNA, 482 bp, Homo sapiens; identical to SEQ ID NO: 262993
  chr11:1509374-1509856
  hypo

SEQ ID NO: 392643 - DNA, 197 bp, Homo sapiens; identical to SEQ ID NO: 262997
  chr11:1553266-1553463
  hypo

SEQ ID NO: 392644 - DNA, 613 bp, Homo sapiens; identical to SEQ ID NO: 263002
  chr11:1602581-1603194
  hypo

SEQ ID NO: 392645 - DNA, 212 bp, Homo sapiens; identical to SEQ ID NO: 213999
  chr11:1749039-1749251
  hypo

SEQ ID NO: 392646 - DNA, 31 bp, Homo sapiens; identical to SEQ ID NO: 263010
  chr11:1811101-1811132
  hypo

SEQ ID NO: 392647 - DNA, 38 bp, Homo sapiens; identical to SEQ ID NO: 263011
  chr11:1819538-1819576
  hypo

SEQ ID NO: 392648 - DNA, 328 bp, Homo sapiens; identical to SEQ ID NO: 313785
  chr11:1857545-1857873
  hypo

SEQ ID NO: 392649 - DNA, 129 bp, Homo sapiens; identical to SEQ ID NO: 313786
  chr11:1857933-1858062
  hypo

SEQ ID NO: 392650 - DNA, 49 bp, Homo sapiens; identical to SEQ ID NO: 263022
  chr11:1858842-1858891
  hypo

SEQ ID NO: 392651 - DNA, 34 bp, Homo sapiens; identical to SEQ ID NO: 263035
  chr11:1975868-1975902
  hypo

SEQ ID NO: 392652 - DNA, 50 bp, Homo sapiens; identical to SEQ ID NO: 263037
  chr11:1980680-1980730
  hypo

SEQ ID NO: 392653 - DNA, 99 bp, Homo sapiens; identical to SEQ ID NO: 214009
  chr11:1985748-1985847
  hypo

SEQ ID NO: 392654 - DNA, 191 bp, Homo sapiens; identical to SEQ ID NO: 263047
  chr11:2051191-2051382
  hypo

SEQ ID NO: 392655 - DNA, 305 bp, Homo sapiens; identical to SEQ ID NO: 263049
  chr11:2055187-2055492
  hypo

SEQ ID NO: 392656 - DNA, 152 bp, Homo sapiens; identical to SEQ ID NO: 263051
  chr11:2107097-2107249
  hypo

SEQ ID NO: 392657 - DNA, 171 bp, Homo sapiens; identical to SEQ ID NO: 263062
  chr11:2136032-2136203
  hypo

SEQ ID NO: 392658 - DNA, 57 bp, Homo sapiens; identical to SEQ ID NO: 263063
  chr11:2136427-2136484
  hypo

SEQ ID NO: 392659 - DNA, 190 bp, Homo sapiens; identical to SEQ ID NO: 263066
  chr11:2176341-2176531
  hypo

SEQ ID NO: 392660 - DNA, 200 bp, Homo sapiens; identical to SEQ ID NO: 263067
  chr11:2183694-2183894
  hypo

SEQ ID NO: 392661 - DNA, 70 bp, Homo sapiens; identical to SEQ ID NO: 263073
  chr11:2229025-2229095
  hypo

SEQ ID NO: 392662 - DNA, 182 bp, Homo sapiens; identical to SEQ ID NO: 263074
  chr11:2229125-2229307
  hypo

SEQ ID NO: 392663 - DNA, 41 bp, Homo sapiens; identical to SEQ ID NO: 263082
  chr11:2294016-2294057
  hypo

SEQ ID NO: 392664 - DNA, 106 bp, Homo sapiens; identical to SEQ ID NO: 214011
  chr11:2294685-2294791
  hypo

SEQ ID NO: 392665 - DNA, 197 bp, Homo sapiens; identical to SEQ ID NO: 263096
  chr11:2423833-2424030
  hypo

SEQ ID NO: 392666 - DNA, 57 bp, Homo sapiens; identical to SEQ ID NO: 263102
  chr11:2448567-2448624
  hypo

SEQ ID NO: 392667 - DNA, 64 bp, Homo sapiens; identical to SEQ ID NO: 202409
  chr11:2554454-2554518
  hypo

SEQ ID NO: 392668 - DNA, 41 bp, Homo sapiens; identical to SEQ ID NO: 263108
  chr11:2579781-2579822
  hypo

SEQ ID NO: 392669 - DNA, 43 bp, Homo sapiens; identical to SEQ ID NO: 263109
  chr11:2581754-2581797
  hypo

SEQ ID NO: 392670 - DNA, 130 bp, Homo sapiens; identical to SEQ ID NO: 214021
  chr11:2594826-2594956
  hypo

SEQ ID NO: 392671 - DNA, 63 bp, Homo sapiens; identical to SEQ ID NO: 263111
  chr11:2595670-2595733
  hypo

SEQ ID NO: 392672 - DNA, 149 bp, Homo sapiens; identical to SEQ ID NO: 214022
  chr11:2596284-2596433
  hypo

SEQ ID NO: 392673 - DNA, 143 bp, Homo sapiens; identical to SEQ ID NO: 263115
  chr11:2720203-2720346
  hypo

SEQ ID NO: 392674 - DNA, 385 bp, Homo sapiens; identical to SEQ ID NO: 214024
  chr11:2772656-2773041
  hypo

SEQ ID NO: 392675 - DNA, 218 bp, Homo sapiens; identical to SEQ ID NO: 263127
  chr11:2865183-2865401
  hypo

SEQ ID NO: 392676 - DNA, 215 bp, Homo sapiens; identical to SEQ ID NO: 263129
  chr11:2874227-2874442
  hypo

SEQ ID NO: 392677 - DNA, 54 bp, Homo sapiens; identical to SEQ ID NO: 263131
  chr11:2885741-2885795
  hypo

SEQ ID NO: 392678 - DNA, 201 bp, Homo sapiens; identical to SEQ ID NO: 263133
  chr11:2934242-2934443
  hypo

SEQ ID NO: 392679 - DNA, 197 bp, Homo sapiens; identical to SEQ ID NO: 214033
  chr11:2939101-2939298
  hypo

SEQ ID NO: 392680 - DNA, 433 bp, Homo sapiens; identical to SEQ ID NO: 224029
  chr11:2951691-2952124
  hypo

SEQ ID NO: 392681 - DNA, 393 bp, Homo sapiens; identical to SEQ ID NO: 263157
  chr11:3167019-3167412
  hypo

SEQ ID NO: 392682 - DNA, 236 bp, Homo sapiens; identical to SEQ ID NO: 263187
  chr11:6477624-6477860
  hypo

SEQ ID NO: 392683 - DNA, 105 bp, Homo sapiens; identical to SEQ ID NO: 202421
  chr11:6502787-6502892
  hypo

SEQ ID NO: 392684 - DNA, 40 bp, Homo sapiens; identical to SEQ ID NO: 202425
  chr11:8103155-8103195
  hypo

SEQ ID NO: 392685 - DNA, 179 bp, Homo sapiens; identical to SEQ ID NO: 214060
  chr11:8759790-8759969
  hypo

SEQ ID NO: 392686 - DNA, 35 bp, Homo sapiens; identical to SEQ ID NO: 263204
  chr11:8791120-8791155
  hypo

SEQ ID NO: 392687 - DNA, 190 bp, Homo sapiens; identical to SEQ ID NO: 263206
  chr11:9074512-9074702
  hypo

SEQ ID NO: 392688 - DNA, 42 bp, Homo sapiens; identical to SEQ ID NO: 263208
  chr11:9343803-9343845
  hypo

SEQ ID NO: 392689 - DNA, 105 bp, Homo sapiens; identical to SEQ ID NO: 214068
  chr11:9567905-9568010
  hypo

SEQ ID NO: 392690 - DNA, 49 bp, Homo sapiens; identical to SEQ ID NO: 263220
  chr11:9620658-9620707
  hypo

SEQ ID NO: 392691 - DNA, 577 bp, Homo sapiens; identical to SEQ ID NO: 224046
  chr11:9685464-9686041
  hypo

SEQ ID NO: 392692 - DNA, 84 bp, Homo sapiens; identical to SEQ ID NO: 263222
  chr11:10004724-10004808
  hypo

SEQ ID NO: 392693 - DNA, 112 bp, Homo sapiens; identical to SEQ ID NO: 263224
  chr11:10512606-10512718
  hypo

SEQ ID NO: 392694 - DNA, 42 bp, Homo sapiens; identical to SEQ ID NO: 263231
  chr11:11178003-11178045
  hypo

SEQ ID NO: 392695 - DNA, 262 bp, Homo sapiens; identical to SEQ ID NO: 263240
  chr11:12115688-12115950
  hypo

SEQ ID NO: 392696 - DNA, 102 bp, Homo sapiens; identical to SEQ ID NO: 263241
  chr11:12145846-12145948
  hypo

SEQ ID NO: 392697 - DNA, 50 bp, Homo sapiens; identical to SEQ ID NO: 263243
  chr11:12172361-12172411
  hypo

SEQ ID NO: 392698 - DNA, 218 bp, Homo sapiens; identical to SEQ ID NO: 263260
  chr11:12276133-12276351
  hypo

SEQ ID NO: 392699 - DNA, 198 bp, Homo sapiens; identical to SEQ ID NO: 263267
  chr11:12296625-12296823
  hypo

SEQ ID NO: 392700 - DNA, 104 bp, Homo sapiens; identical to SEQ ID NO: 263275
  chr11:12990320-12990424
  hypo

SEQ ID NO: 392701 - DNA, 92 bp, Homo sapiens; identical to SEQ ID NO: 314071
  chr11:14520358-14520450
  hypo

SEQ ID NO: 392702 - DNA, 105 bp, Homo sapiens; identical to SEQ ID NO: 224055
  chr11:15671822-15671927
  hypo

SEQ ID NO: 392703 - DNA, 42 bp, Homo sapiens; identical to SEQ ID NO: 263287
  chr11:16050846-16050888
  hypo

SEQ ID NO: 392704 - DNA, 260 bp, Homo sapiens; identical to SEQ ID NO: 224059
  chr11:17498486-17498746
  hypo

SEQ ID NO: 392705 - DNA, 58 bp, Homo sapiens; identical to SEQ ID NO: 314088
  chr11:17653729-17653787
  hypo

SEQ ID NO: 392706 - DNA, 158 bp, Homo sapiens; identical to SEQ ID NO: 263298
  chr11:17905736-17905894
  hypo

SEQ ID NO: 392707 - DNA, 36 bp, Homo sapiens; identical to SEQ ID NO: 263314
  chr11:27381177-27381213
  hypo

SEQ ID NO: 392708 - DNA, 83 bp, Homo sapiens; identical to SEQ ID NO: 263321
  chr11:31760147-31760230
  hypo

SEQ ID NO: 392709 - DNA, 127 bp, Homo sapiens; identical to SEQ ID NO: 263331
  chr11:33667398-33667525
  hypo

SEQ ID NO: 392710 - DNA, 111 bp, Homo sapiens; identical to SEQ ID NO: 263337
  chr11:34190793-34190904
  hypo

SEQ ID NO: 392711 - DNA, 44 bp, Homo sapiens; identical to SEQ ID NO: 263347
  chr11:34592834-34592878
  hypo

SEQ ID NO: 392712 - DNA, 74 bp, Homo sapiens; identical to SEQ ID NO: 214138
  chr11:35661156-35661230
  hypo

SEQ ID NO: 392713 - DNA, 38 bp, Homo sapiens; identical to SEQ ID NO: 214139
  chr11:36060520-36060558
  hypo

SEQ ID NO: 392714 - DNA, 37 bp, Homo sapiens; identical to SEQ ID NO: 214140
  chr11:36060798-36060835
  hypo

SEQ ID NO: 392715 - DNA, 42 bp, Homo sapiens; identical to SEQ ID NO: 263362
  chr11:36292455-36292497
  hypo

SEQ ID NO: 392716 - DNA, 183 bp, Homo sapiens; identical to SEQ ID NO: 263363
  chr11:36300631-36300814
  hypo

SEQ ID NO: 392717 - DNA, 82 bp, Homo sapiens; identical to SEQ ID NO: 214143
  chr11:40039796-40039878
  hypo

SEQ ID NO: 392718 - DNA, 33 bp, Homo sapiens; identical to SEQ ID NO: 263388
  chr11:44993090-44993123
  hypo

SEQ ID NO: 392719 - DNA, 371 bp, Homo sapiens; identical to SEQ ID NO: 263389
  chr11:45011418-45011789
  hypo

SEQ ID NO: 392720 - DNA, 195 bp, Homo sapiens; identical to SEQ ID NO: 214157
  chr11:45951099-45951294
  hypo

SEQ ID NO: 392721 - DNA, 189 bp, Homo sapiens; identical to SEQ ID NO: 263399
  chr11:45955789-45955978
  hypo

SEQ ID NO: 392722 - DNA, 62 bp, Homo sapiens; identical to SEQ ID NO: 202540
  chr11:46264958-46265020
  hypo

SEQ ID NO: 392723 - DNA, 34 bp, Homo sapiens
  chr11:46338449-46338483
  hypo
gagctgtcaggcagcagaaccaggctatgggcag

SEQ ID NO: 392724 - DNA, 182 bp, Homo sapiens; identical to SEQ ID NO: 224103
  chr11:46848281-46848463
  hypo

SEQ ID NO: 392725 - DNA, 34 bp, Homo sapiens; identical to SEQ ID NO: 214169
  chr11:46959101-46959135
  hypo

SEQ ID NO: 392726 - DNA, 186 bp, Homo sapiens; identical to SEQ ID NO: 214170
  chr11:47169578-47169764
  hypo

SEQ ID NO: 392727 - DNA, 251 bp, Homo sapiens; identical to SEQ ID NO: 263420
  chr11:47348746-47348997
  hypo

SEQ ID NO: 392728 - DNA, 80 bp, Homo sapiens; identical to SEQ ID NO: 263422
  chr11:47431265-47431345
  hypo

SEQ ID NO: 392729 - DNA, 180 bp, Homo sapiens; identical to SEQ ID NO: 263423
  chr11:47479675-47479855
  hypo

SEQ ID NO: 392730 - DNA, 158 bp, Homo sapiens; identical to SEQ ID NO: 263437
  chr11:57010762-57010920
  hypo

SEQ ID NO: 392731 - DNA, 84 bp, Homo sapiens; identical to SEQ ID NO: 314264
  chr11:57373338-57373422
  hypo

SEQ ID NO: 392732 - DNA, 42 bp, Homo sapiens; identical to SEQ ID NO: 214183
  chr11:58949204-58949246
  hypo

SEQ ID NO: 392733 - DNA, 66 bp, Homo sapiens; identical to SEQ ID NO: 314273
  chr11:59312681-59312747
  hypo

SEQ ID NO: 392734 - DNA, 83 bp, Homo sapiens
  chr11:60648733-60648816
  hypo
ggtagtcaacatttactgagtgcctcatctctacatgaaacagttcacttaattctcaagagccctggaacaaaaggcaacag

SEQ ID NO: 392735 - DNA, 93 bp, Homo sapiens; identical to SEQ ID NO: 263472
  chr11:60680209-60680302
  hypo

SEQ ID NO: 392736 - DNA, 230 bp, Homo sapiens; identical to SEQ ID NO: 214192
  chr11:60689401-60689631
  hypo

SEQ ID NO: 392737 - DNA, 173 bp, Homo sapiens; identical to SEQ ID NO: 214195
  chr11:60880738-60880911
  hypo

SEQ ID NO: 392738 - DNA, 103 bp, Homo sapiens; identical to SEQ ID NO: 263484
  chr11:60920711-60920814
  hypo

SEQ ID NO: 392739 - DNA, 32 bp, Homo sapiens; identical to SEQ ID NO: 214197
  chr11:60926976-60927008
  hypo

SEQ ID NO: 392740 - DNA, 100 bp, Homo sapiens; identical to SEQ ID NO: 214204
  chr11:61108987-61109087
  hypo

SEQ ID NO: 392741 - DNA, 169 bp, Homo sapiens; identical to SEQ ID NO: 263494
  chr11:61110433-61110602
  hypo

SEQ ID NO: 392742 - DNA, 260 bp, Homo sapiens; identical to SEQ ID NO: 214208
  chr11:61305393-61305653
  hypo

SEQ ID NO: 392743 - DNA, 52 bp, Homo sapiens; identical to SEQ ID NO: 263504
  chr11:61475156-61475208
  hypo

SEQ ID NO: 392744 - DNA, 240 bp, Homo sapiens; identical to SEQ ID NO: 224116
  chr11:61520025-61520265
  hypo

SEQ ID NO: 392745 - DNA, 458 bp, Homo sapiens; identical to SEQ ID NO: 214219
  chr11:61522483-61522941
  hypo

SEQ ID NO: 392746 - DNA, 407 bp, Homo sapiens; identical to SEQ ID NO: 214223
  chr11:61632399-61632806
  hypo

SEQ ID NO: 392747 - DNA, 63 bp, Homo sapiens; identical to SEQ ID NO: 314360
  chr11:61666025-61666088
  hypo

SEQ ID NO: 392748 - DNA, 66 bp, Homo sapiens; identical to SEQ ID NO: 214236
  chr11:61688731-61688797
  hypo

SEQ ID NO: 392749 - DNA, 44 bp, Homo sapiens; identical to SEQ ID NO: 214242
  chr11:61825693-61825737
  hypo

SEQ ID NO: 392750 - DNA, 49 bp, Homo sapiens; identical to SEQ ID NO: 314392
  chr11:62450079-62450128
  hypo

SEQ ID NO: 392751 - DNA, 197 bp, Homo sapiens; identical to SEQ ID NO: 214247
  chr11:62474896-62475093
  hypo

SEQ ID NO: 392752 - DNA, 66 bp, Homo sapiens; identical to SEQ ID NO: 214248
  chr11:62532994-62533060
  hypo

SEQ ID NO: 392753 - DNA, 296 bp, Homo sapiens; identical to SEQ ID NO: 263571
  chr11:62581077-62581373
  hypo

SEQ ID NO: 392754 - DNA, 120 bp, Homo sapiens; identical to SEQ ID NO: 263573
  chr11:62658210-62658330
  hypo

SEQ ID NO: 392755 - DNA, 69 bp, Homo sapiens; identical to SEQ ID NO: 214260
  chr11:63764163-63764232
  hypo

SEQ ID NO: 392756 - DNA, 437 bp, Homo sapiens; identical to SEQ ID NO: 214263
  chr11:63832549-63832986
  hypo

SEQ ID NO: 392757 - DNA, 33 bp, Homo sapiens; identical to SEQ ID NO: 263607
  chr11:63889204-63889237
  hypo

SEQ ID NO: 392758 - DNA, 252 bp, Homo sapiens; identical to SEQ ID NO: 263613
  chr11:63916439-63916691
  hypo

SEQ ID NO: 392759 - DNA, 115 bp, Homo sapiens; identical to SEQ ID NO: 214277
  chr11:64081531-64081646
  hypo

SEQ ID NO: 392760 - DNA, 229 bp, Homo sapiens; identical to SEQ ID NO: 214281
  chr11:64120593-64120822
  hypo

SEQ ID NO: 392761 - DNA, 171 bp, Homo sapiens; identical to SEQ ID NO: 214282
  chr11:64120948-64121119
  hypo

SEQ ID NO: 392762 - DNA, 42 bp, Homo sapiens; identical to SEQ ID NO: 214288
  chr11:64335474-64335516
  hypo

SEQ ID NO: 392763 - DNA, 87 bp, Homo sapiens; identical to SEQ ID NO: 214289
  chr11:64347188-64347275
  hypo

SEQ ID NO: 392764 - DNA, 58 bp, Homo sapiens; identical to SEQ ID NO: 214291
  chr11:64418855-64418913
  hypo

SEQ ID NO: 392765 - DNA, 65 bp, Homo sapiens; identical to SEQ ID NO: 263655
  chr11:64521038-64521103
  hypo

SEQ ID NO: 392766 - DNA, 78 bp, Homo sapiens; identical to SEQ ID NO: 314501
  chr11:64631090-64631168
  hypo

SEQ ID NO: 392767 - DNA, 99 bp, Homo sapiens; identical to SEQ ID NO: 314526
  chr11:64975361-64975460
  hypo

SEQ ID NO: 392768 - DNA, 329 bp, Homo sapiens; identical to SEQ ID NO: 314527
  chr11:64975532-64975861
  hypo

SEQ ID NO: 392769 - DNA, 98 bp, Homo sapiens; identical to SEQ ID NO: 202592
  chr11:65189906-65190004
  hypo

SEQ ID NO: 392770 - DNA, 168 bp, Homo sapiens; identical to SEQ ID NO: 214312
  chr11:65306213-65306381
  hypo

SEQ ID NO: 392771 - DNA, 350 bp, Homo sapiens; identical to SEQ ID NO: 214313
  chr11:65306425-65306775
  hypo

SEQ ID NO: 392772 - DNA, 299 bp, Homo sapiens; identical to SEQ ID NO: 386310
  chr11:65306805-65307104
  hypo

SEQ ID NO: 392773 - DNA, 224 bp, Homo sapiens; identical to SEQ ID NO: 214315
  chr11:65353078-65353302
  hypo

SEQ ID NO: 392774 - DNA, 37 bp, Homo sapiens; identical to SEQ ID NO: 214322
  chr11:65524510-65524547
  hypo

SEQ ID NO: 392775 - DNA, 226 bp, Homo sapiens; identical to SEQ ID NO: 314567
  chr11:65629224-65629450
  hypo

SEQ ID NO: 392776 - DNA, 41 bp, Homo sapiens; identical to SEQ ID NO: 214336
  chr11:65810130-65810171
  hypo

SEQ ID NO: 392777 - DNA, 78 bp, Homo sapiens; identical to SEQ ID NO: 214337
  chr11:65817722-65817800
  hypo

SEQ ID NO: 392778 - DNA, 233 bp, Homo sapiens; identical to SEQ ID NO: 263743
  chr11:66373085-66373318
  hypo

SEQ ID NO: 392779 - DNA, 36 bp, Homo sapiens; identical to SEQ ID NO: 214348
  chr11:66453719-66453755
  hypo

SEQ ID NO: 392780 - DNA, 119 bp, Homo sapiens; identical to SEQ ID NO: 263749
  chr11:66461612-66461731
  hypo

SEQ ID NO: 392781 - DNA, 97 bp, Homo sapiens; identical to SEQ ID NO: 263768
  chr11:66637738-66637835
  hypo

SEQ ID NO: 392782 - DNA, 40 bp, Homo sapiens; identical to SEQ ID NO: 263769
  chr11:66639553-66639593
  hypo

SEQ ID NO: 392783 - DNA, 298 bp, Homo sapiens; identical to SEQ ID NO: 214361
  chr11:66676020-66676318
  hypo

SEQ ID NO: 392784 - DNA, 346 bp, Homo sapiens; identical to SEQ ID NO: 214364
  chr11:66701354-66701700
  hypo

SEQ ID NO: 392785 - DNA, 33 bp, Homo sapiens; identical to SEQ ID NO: 263790
  chr11:66867270-66867303
  hypo

SEQ ID NO: 392786 - DNA, 31 bp, Homo sapiens; identical to SEQ ID NO: 214369
  chr11:67002080-67002111
  hypo

SEQ ID NO: 392787 - DNA, 77 bp, Homo sapiens; identical to SEQ ID NO: 214370
  chr11:67051193-67051270
  hypo

SEQ ID NO: 392788 - DNA, 209 bp, Homo sapiens; identical to SEQ ID NO: 263799
  chr11:67073281-67073490
  hypo

SEQ ID NO: 392789 - DNA, 105 bp, Homo sapiens; identical to SEQ ID NO: 224150
  chr11:67141093-67141198
  hypo

SEQ ID NO: 392790 - DNA, 76 bp, Homo sapiens; identical to SEQ ID NO: 263806
  chr11:67145532-67145608
  hypo

SEQ ID NO: 392791 - DNA, 234 bp, Homo sapiens; identical to SEQ ID NO: 202629
  chr11:67210770-67211004
  hypo

SEQ ID NO: 392792 - DNA, 289 bp, Homo sapiens; identical to SEQ ID NO: 263819
  chr11:67257336-67257625
  hypo

SEQ ID NO: 392793 - DNA, 383 bp, Homo sapiens; identical to SEQ ID NO: 214382
  chr11:67259386-67259769
  hypo

SEQ ID NO: 392794 - DNA, 110 bp, Homo sapiens; identical to SEQ ID NO: 263827
  chr11:67406911-67407021
  hypo

SEQ ID NO: 392795 - DNA, 180 bp, Homo sapiens; identical to SEQ ID NO: 263835
  chr11:67785446-67785626
  hypo

SEQ ID NO: 392796 - DNA, 257 bp, Homo sapiens; identical to SEQ ID NO: 263836
  chr11:67786112-67786369
  hypo

SEQ ID NO: 392797 - DNA, 64 bp, Homo sapiens; identical to SEQ ID NO: 214390
  chr11:67810254-67810318
  hypo

SEQ ID NO: 392798 - DNA, 77 bp, Homo sapiens; identical to SEQ ID NO: 214395
  chr11:67864777-67864854
  hypo

SEQ ID NO: 392799 - DNA, 257 bp, Homo sapiens; identical to SEQ ID NO: 214398
  chr11:67984063-67984320
  hypo

SEQ ID NO: 392800 - DNA, 44 bp, Homo sapiens; identical to SEQ ID NO: 314706
  chr11:67984388-67984432
  hypo

SEQ ID NO: 392801 - DNA, 110 bp, Homo sapiens; identical to SEQ ID NO: 224156
  chr11:68080104-68080214
  hypo

SEQ ID NO: 392802 - DNA, 192 bp, Homo sapiens; identical to SEQ ID NO: 214401
  chr11:68142591-68142783
  hypo

SEQ ID NO: 392803 - DNA, 145 bp, Homo sapiens; identical to SEQ ID NO: 214404
  chr11:68162351-68162496
  hypo

SEQ ID NO: 392804 - DNA, 99 bp, Homo sapiens; identical to SEQ ID NO: 214405
  chr11:68172056-68172155
  hypo

SEQ ID NO: 392805 - DNA, 192 bp, Homo sapiens; identical to SEQ ID NO: 214415
  chr11:68201117-68201309
  hypo

SEQ ID NO: 392806 - DNA, 140 bp, Homo sapiens; identical to SEQ ID NO: 214416
  chr11:68203449-68203589
  hypo

SEQ ID NO: 392807 - DNA, 218 bp, Homo sapiens; identical to SEQ ID NO: 263884
  chr11:68225539-68225757
  hypo

SEQ ID NO: 392808 - DNA, 156 bp, Homo sapiens; identical to SEQ ID NO: 263886
  chr11:68341483-68341639
  hypo

SEQ ID NO: 392809 - DNA, 137 bp, Homo sapiens; identical to SEQ ID NO: 263892
  chr11:68442013-68442150
  hypo

SEQ ID NO: 392810 - DNA, 176 bp, Homo sapiens; identical to SEQ ID NO: 214428
  chr11:68838712-68838888
  hypo

SEQ ID NO: 392811 - DNA, 71 bp, Homo sapiens; identical to SEQ ID NO: 214429
  chr11:68853901-68853972
  hypo

SEQ ID NO: 392812 - DNA, 76 bp, Homo sapiens; identical to SEQ ID NO: 263912
  chr11:68856610-68856686
  hypo

SEQ ID NO: 392813 - DNA, 196 bp, Homo sapiens; identical to SEQ ID NO: 263913
  chr11:68968788-68968984
  hypo

SEQ ID NO: 392814 - DNA, 45 bp, Homo sapiens; identical to SEQ ID NO: 263918
  chr11:69192163-69192208
  hypo

SEQ ID NO: 392815 - DNA, 89 bp, Homo sapiens; identical to SEQ ID NO: 263933
  chr11:69525488-69525577
  hypo

SEQ ID NO: 392816 - DNA, 77 bp, Homo sapiens; identical to SEQ ID NO: 263943
  chr11:69971958-69972035
  hypo

SEQ ID NO: 392817 - DNA, 163 bp, Homo sapiens; identical to SEQ ID NO: 263950
  chr11:69985998-69986161
  hypo

SEQ ID NO: 392818 - DNA, 182 bp, Homo sapiens; identical to SEQ ID NO: 263962
  chr11:70080115-70080297
  hypo

SEQ ID NO: 392819 - DNA, 74 bp, Homo sapiens; identical to SEQ ID NO: 263963
  chr11:70125200-70125274
  hypo

SEQ ID NO: 392820 - DNA, 31 bp, Homo sapiens; identical to SEQ ID NO: 263964
  chr11:70139604-70139635
  hypo

SEQ ID NO: 392821 - DNA, 77 bp, Homo sapiens; identical to SEQ ID NO: 214449
  chr11:70281167-70281244
  hypo

SEQ ID NO: 392822 - DNA, 120 bp, Homo sapiens; identical to SEQ ID NO: 263984
  chr11:71296339-71296459
  hypo

SEQ ID NO: 392823 - DNA, 107 bp, Homo sapiens; identical to SEQ ID NO: 214465
  chr11:72437783-72437890
  hypo

SEQ ID NO: 392824 - DNA, 80 bp, Homo sapiens; identical to SEQ ID NO: 264005
  chr11:72907831-72907911
  hypo

SEQ ID NO: 392825 - DNA, 157 bp, Homo sapiens; identical to SEQ ID NO: 264013
  chr11:73476967-73477124
  hypo

SEQ ID NO: 392826 - DNA, 35 bp, Homo sapiens; identical to SEQ ID NO: 264018
  chr11:73662698-73662733
  hypo

SEQ ID NO: 392827 - DNA, 145 bp, Homo sapiens; identical to SEQ ID NO: 314886
  chr11:73883535-73883680
  hypo

SEQ ID NO: 392828 - DNA, 96 bp, Homo sapiens; identical to SEQ ID NO: 264025
  chr11:74100758-74100854
  hypo

SEQ ID NO: 392829 - DNA, 120 bp, Homo sapiens; identical to SEQ ID NO: 214484
  chr11:75303123-75303243
  hypo

SEQ ID NO: 392830 - DNA, 43 bp, Homo sapiens; identical to SEQ ID NO: 214485
  chr11:75303273-75303316
  hypo

SEQ ID NO: 392831 - DNA, 141 bp, Homo sapiens; identical to SEQ ID NO: 264051
  chr11:75315461-75315602
  hypo

SEQ ID NO: 392832 - DNA, 92 bp, Homo sapiens; identical to SEQ ID NO: 264052
  chr11:75389093-75389185
  hypo

SEQ ID NO: 392833 - DNA, 180 bp, Homo sapiens; identical to SEQ ID NO: 214488
  chr11:75536035-75536215
  hypo

SEQ ID NO: 392834 - DNA, 192 bp, Homo sapiens; identical to SEQ ID NO: 214498
  chr11:76408273-76408465
  hypo

SEQ ID NO: 392835 - DNA, 73 bp, Homo sapiens; identical to SEQ ID NO: 264087
  chr11:78497977-78498050
  hypo

SEQ ID NO: 392836 - DNA, 42 bp, Homo sapiens; identical to SEQ ID NO: 264093
  chr11:85319011-85319053
  hypo

SEQ ID NO: 392837 - DNA, 169 bp, Homo sapiens; identical to SEQ ID NO: 214506
  chr11:85692740-85692909
  hypo

SEQ ID NO: 392838 - DNA, 180 bp, Homo sapiens; identical to SEQ ID NO: 264096
  chr11:85749362-85749542
  hypo

SEQ ID NO: 392839 - DNA, 662 bp, Homo sapiens; identical to SEQ ID NO: 224180
  chr11:86511379-86512041
  hypo

SEQ ID NO: 392840 - DNA, 283 bp, Homo sapiens; identical to SEQ ID NO: 224181
  chr11:86513414-86513697
  hypo

SEQ ID NO: 392841 - DNA, 185 bp, Homo sapiens; identical to SEQ ID NO: 214514
  chr11:91435729-91435914
  hypo

SEQ ID NO: 392842 - DNA, 101 bp, Homo sapiens; identical to SEQ ID NO: 264106
  chr11:93065699-93065800
  hypo

SEQ ID NO: 392843 - DNA, 79 bp, Homo sapiens; identical to SEQ ID NO: 264114
  chr11:94390523-94390602
  hypo

SEQ ID NO: 392844 - DNA, 34 bp, Homo sapiens; identical to SEQ ID NO: 214518
  chr11:94952098-94952132
  hypo

SEQ ID NO: 392845 - DNA, 203 bp, Homo sapiens; identical to SEQ ID NO: 264120
  chr11:95526175-95526378
  hypo

SEQ ID NO: 392846 - DNA, 429 bp, Homo sapiens; identical to SEQ ID NO: 388916
  chr11:96123256-96123685
  hypo

SEQ ID NO: 392847 - DNA, 77 bp, Homo sapiens; identical to SEQ ID NO: 264128
  chr11:102246147-102246224
  hypo

SEQ ID NO: 392848 - DNA, 43 bp, Homo sapiens; identical to SEQ ID NO: 264143
  chr11:112066436-112066479
  hypo

SEQ ID NO: 392849 - DNA, 34 bp, Homo sapiens; identical to SEQ ID NO: 214530
  chr11:113747597-113747631
  hypo

SEQ ID NO: 392850 - DNA, 31 bp, Homo sapiens; identical to SEQ ID NO: 264163
  chr11:116256383-116256414
  hypo

SEQ ID NO: 392851 - DNA, 288 bp, Homo sapiens; identical to SEQ ID NO: 288458
  chr11:116450735-116451023
  hypo

SEQ ID NO: 392852 - DNA, 123 bp, Homo sapiens; identical to SEQ ID NO: 288459
  chr11:116451190-116451313
  hypo

SEQ ID NO: 392853 - DNA, 35 bp, Homo sapiens; identical to SEQ ID NO: 264171
  chr11:116960726-116960761
  hypo

SEQ ID NO: 392854 - DNA, 250 bp, Homo sapiens; identical to SEQ ID NO: 224203
  chr11:117352704-117352954
  hypo

SEQ ID NO: 392855 - DNA, 381 bp, Homo sapiens; identical to SEQ ID NO: 214553
  chr11:117389166-117389547
  hypo

SEQ ID NO: 392856 - DNA, 114 bp, Homo sapiens; identical to SEQ ID NO: 264192
  chr11:117403090-117403204
  hypo

SEQ ID NO: 392857 - DNA, 100 bp, Homo sapiens; identical to SEQ ID NO: 264196
  chr11:117949567-117949667
  hypo

SEQ ID NO: 392858 - DNA, 261 bp, Homo sapiens; identical to SEQ ID NO: 214557
  chr11:119044183-119044444
  hypo

SEQ ID NO: 392859 - DNA, 54 bp, Homo sapiens; identical to SEQ ID NO: 264207
  chr11:119052936-119052990
  hypo

SEQ ID NO: 392860 - DNA, 86 bp, Homo sapiens; identical to SEQ ID NO: 202746
  chr11:119168098-119168184
  hypo

SEQ ID NO: 392861 - DNA, 85 bp, Homo sapiens; identical to SEQ ID NO: 214574
  chr11:119493220-119493305
  hypo

SEQ ID NO: 392862 - DNA, 217 bp, Homo sapiens; identical to SEQ ID NO: 315124
  chr11:119523963-119524180
  hypo

SEQ ID NO: 392863 - DNA, 39 bp, Homo sapiens; identical to SEQ ID NO: 214578
  chr11:119524226-119524265
  hypo

SEQ ID NO: 392864 - DNA, 186 bp, Homo sapiens; identical to SEQ ID NO: 264223
  chr11:119536817-119537003
  hypo

SEQ ID NO: 392865 - DNA, 99 bp, Homo sapiens; identical to SEQ ID NO: 214581
  chr11:119541630-119541729
  hypo

SEQ ID NO: 392866 - DNA, 73 bp, Homo sapiens; identical to SEQ ID NO: 214585
  chr11:119576250-119576323
  hypo

SEQ ID NO: 392867 - DNA, 142 bp, Homo sapiens; identical to SEQ ID NO: 202758
  chr11:120206447-120206589
  hypo

SEQ ID NO: 392868 - DNA, 271 bp, Homo sapiens; identical to SEQ ID NO: 288522
  chr11:120382097-120382368
  hypo

SEQ ID NO: 392869 - DNA, 206 bp, Homo sapiens; identical to SEQ ID NO: 288523
  chr11:120382448-120382654
  hypo

SEQ ID NO: 392870 - DNA, 147 bp, Homo sapiens; identical to SEQ ID NO: 264262
  chr11:122621690-122621837
  hypo

SEQ ID NO: 392871 - DNA, 39 bp, Homo sapiens; identical to SEQ ID NO: 264266
  chr11:123027337-123027376
  hypo

SEQ ID NO: 392872 - DNA, 42 bp, Homo sapiens; identical to SEQ ID NO: 384411
  chr11:124709075-124709117
  hypo

SEQ ID NO: 392873 - DNA, 249 bp, Homo sapiens; identical to SEQ ID NO: 202775
  chr11:124709233-124709482
  hypo

SEQ ID NO: 392874 - DNA, 210 bp, Homo sapiens; identical to SEQ ID NO: 202776
  chr11:124709856-124710066
  hypo

SEQ ID NO: 392875 - DNA, 141 bp, Homo sapiens; identical to SEQ ID NO: 264271
  chr11:124792306-124792447
  hypo

SEQ ID NO: 392876 - DNA, 56 bp, Homo sapiens; identical to SEQ ID NO: 202779
  chr11:125932494-125932550
  hypo

SEQ ID NO: 392877 - DNA, 436 bp, Homo sapiens; identical to SEQ ID NO: 8456
  chr11:125932556-125932992
  hypo

SEQ ID NO: 392878 - DNA, 105 bp, Homo sapiens; identical to SEQ ID NO: 224241
  chr11:125933223-125933328
  hypo

SEQ ID NO: 392879 - DNA, 32 bp, Homo sapiens; identical to SEQ ID NO: 264294
  chr11:127323962-127323994
  hypo

SEQ ID NO: 392880 - DNA, 184 bp, Homo sapiens; identical to SEQ ID NO: 264303
  chr11:129575147-129575331
  hypo

SEQ ID NO: 392881 - DNA, 94 bp, Homo sapiens; identical to SEQ ID NO: 264304
  chr11:129686910-129687004
  hypo

SEQ ID NO: 392882 - DNA, 41 bp, Homo sapiens; identical to SEQ ID NO: 264313
  chr11:129897979-129898020
  hypo

SEQ ID NO: 392883 - DNA, 36 bp, Homo sapiens; identical to SEQ ID NO: 264316
  chr11:129968278-129968314
  hypo

SEQ ID NO: 392884 - DNA, 84 bp, Homo sapiens; identical to SEQ ID NO: 264323
  chr11:130074709-130074793
  hypo

SEQ ID NO: 392885 - DNA, 200 bp, Homo sapiens; identical to SEQ ID NO: 214656
  chr11:131648918-131649118
  hypo

SEQ ID NO: 392886 - DNA, 79 bp, Homo sapiens; identical to SEQ ID NO: 264339
  chr11:133771363-133771442
  hypo

SEQ ID NO: 392887 - DNA, 113 bp, Homo sapiens; identical to SEQ ID NO: 214659
  chr11:133777670-133777783
  hypo

SEQ ID NO: 392888 - DNA, 294 bp, Homo sapiens; identical to SEQ ID NO: 214660
  chr11:133777845-133778139
  hypo

SEQ ID NO: 392889 - DNA, 138 bp, Homo sapiens; identical to SEQ ID NO: 214670
  chr11:134023320-134023458
  hypo

SEQ ID NO: 392890 - DNA, 94 bp, Homo sapiens; identical to SEQ ID NO: 264354
  chr11:134075571-134075665
  hypo

SEQ ID NO: 392891 - DNA, 97 bp, Homo sapiens; identical to SEQ ID NO: 214672
  chr11:134083475-134083572
  hypo

SEQ ID NO: 392892 - DNA, 386 bp, Homo sapiens; identical to SEQ ID NO: 214674
  chr11:134212673-134213059
  hypo

SEQ ID NO: 392893 - DNA, 33 bp, Homo sapiens; identical to SEQ ID NO: 264373
  chr11:134534372-134534405
  hypo

SEQ ID NO: 392894 - DNA, 234 bp, Homo sapiens; identical to SEQ ID NO: 264374
  chr11:134571549-134571783
  hypo

SEQ ID NO: 392895 - DNA, 108 bp, Homo sapiens; identical to SEQ ID NO: 214682
  chr12:658733-658841
  hypo

SEQ ID NO: 392896 - DNA, 95 bp, Homo sapiens; identical to SEQ ID NO: 315334
  chr12:665735-665830
  hypo

SEQ ID NO: 392897 - DNA, 123 bp, Homo sapiens; identical to SEQ ID NO: 315335
  chr12:665901-666024
  hypo

SEQ ID NO: 392898 - DNA, 236 bp, Homo sapiens; identical to SEQ ID NO: 264400
  chr12:974283-974519
  hypo

SEQ ID NO: 392899 - DNA, 69 bp, Homo sapiens; identical to SEQ ID NO: 264401
  chr12:1005679-1005748
  hypo

SEQ ID NO: 392900 - DNA, 84 bp, Homo sapiens; identical to SEQ ID NO: 264405
  chr12:1353962-1354046
  hypo

SEQ ID NO: 392901 - DNA, 120 bp, Homo sapiens; identical to SEQ ID NO: 214697
  chr12:1840409-1840529
  hypo

SEQ ID NO: 392902 - DNA, 133 bp, Homo sapiens; identical to SEQ ID NO: 264423
  chr12:1987522-1987655
  hypo

SEQ ID NO: 392903 - DNA, 73 bp, Homo sapiens; identical to SEQ ID NO: 202820
  chr12:2163510-2163583
  hypo

SEQ ID NO: 392904 - DNA, 36 bp, Homo sapiens; identical to SEQ ID NO: 264439
  chr12:2654536-2654572
  hypo

SEQ ID NO: 392905 - DNA, 426 bp, Homo sapiens; identical to SEQ ID NO: 264440
  chr12:2664072-2664498
  hypo

SEQ ID NO: 392906 - DNA, 83 bp, Homo sapiens; identical to SEQ ID NO: 214712
  chr12:2778072-2778155
  hypo

SEQ ID NO: 392907 - DNA, 142 bp, Homo sapiens; identical to SEQ ID NO: 202827
  chr12:3129463-3129605
  hypo

SEQ ID NO: 392908 - DNA, 46 bp, Homo sapiens; identical to SEQ ID NO: 214722
  chr12:3215227-3215273
  hypo

SEQ ID NO: 392909 - DNA, 129 bp, Homo sapiens; identical to SEQ ID NO: 264459
  chr12:3316845-3316974
  hypo

SEQ ID NO: 392910 - DNA, 72 bp, Homo sapiens; identical to SEQ ID NO: 384418
  chr12:3601270-3601342
  hypo

SEQ ID NO: 392911 - DNA, 101 bp, Homo sapiens; identical to SEQ ID NO: 202831
  chr12:3601377-3601478
  hypo

SEQ ID NO: 392912 - DNA, 86 bp, Homo sapiens; identical to SEQ ID NO: 264496
  chr12:5435949-5436035
  hypo

SEQ ID NO: 392913 - DNA, 95 bp, Homo sapiens; identical to SEQ ID NO: 264515
  chr12:6199649-6199744
  hypo

SEQ ID NO: 392914 - DNA, 35 bp, Homo sapiens; identical to SEQ ID NO: 264525
  chr12:6381467-6381502
  hypo

SEQ ID NO: 392915 - DNA, 187 bp, Homo sapiens; identical to SEQ ID NO: 214753
  chr12:6388701-6388888
  hypo

SEQ ID NO: 392916 - DNA, 43 bp, Homo sapiens
  chr12:6391153-6391196
  hypo
tcaaaacaaaacaaaacaaacaaaaaacatgcatttggtaaca

SEQ ID NO: 392917 - DNA, 158 bp, Homo sapiens; identical to SEQ ID NO: 214760
  chr12:6464388-6464546
  hypo

SEQ ID NO: 392918 - DNA, 38 bp, Homo sapiens; identical to SEQ ID NO: 264534
  chr12:6481166-6481204
  hypo

SEQ ID NO: 392919 - DNA, 120 bp, Homo sapiens; identical to SEQ ID NO: 264537
  chr12:6531710-6531830
  hypo

SEQ ID NO: 392920 - DNA, 38 bp, Homo sapiens; identical to SEQ ID NO: 264544
  chr12:6749347-6749385
  hypo

SEQ ID NO: 392921 - DNA, 45 bp, Homo sapiens; identical to SEQ ID NO: 264549
  chr12:6871063-6871108
  hypo

SEQ ID NO: 392922 - DNA, 55 bp, Homo sapiens; identical to SEQ ID NO: 264550
  chr12:7249425-7249480
  hypo

SEQ ID NO: 392923 - DNA, 32 bp, Homo sapiens; identical to SEQ ID NO: 214768
  chr12:8009570-8009602
  hypo

SEQ ID NO: 392924 - DNA, 32 bp, Homo sapiens; identical to SEQ ID NO: 214769
  chr12:8017218-8017250
  hypo

SEQ ID NO: 392925 - DNA, 64 bp, Homo sapiens; identical to SEQ ID NO: 264562
  chr12:8022094-8022158
  hypo

SEQ ID NO: 392926 - DNA, 31 bp, Homo sapiens; identical to SEQ ID NO: 214771
  chr12:8147088-8147119
  hypo

SEQ ID NO: 392927 - DNA, 47 bp, Homo sapiens; identical to SEQ ID NO: 264575
  chr12:8601976-8602023
  hypo

SEQ ID NO: 392928 - DNA, 33 bp, Homo sapiens; identical to SEQ ID NO: 214779
  chr12:8808923-8808956
  hypo

SEQ ID NO: 392929 - DNA, 180 bp, Homo sapiens; identical to SEQ ID NO: 214781
  chr12:8893949-8894129
  hypo

SEQ ID NO: 392930 - DNA, 214 bp, Homo sapiens; identical to SEQ ID NO: 264593
  chr12:10073226-10073440
  hypo

SEQ ID NO: 392931 - DNA, 36 bp, Homo sapiens; identical to SEQ ID NO: 315568
  chr12:10823868-10823904
  hypo

SEQ ID NO: 392932 - DNA, 217 bp, Homo sapiens; identical to SEQ ID NO: 224295
  chr12:12006278-12006495
  hypo

SEQ ID NO: 392933 - DNA, 2801 bp, Homo sapiens; identical to SEQ ID NO: 202878
  chr12:12043874-12046675
  hypo

SEQ ID NO: 392934 - DNA, 1481 bp, Homo sapiens; identical to SEQ ID NO: 202879
  chr12:12046855-12048336
  hypo

SEQ ID NO: 392935 - DNA, 59 bp, Homo sapiens; identical to SEQ ID NO: 288740
  chr12:12869129-12869188
  hypo

SEQ ID NO: 392936 - DNA, 86 bp, Homo sapiens; identical to SEQ ID NO: 264621
  chr12:13056218-13056304
  hypo

SEQ ID NO: 392937 - DNA, 93 bp, Homo sapiens; identical to SEQ ID NO: 224308
  chr12:13154241-13154334
  hypo

SEQ ID NO: 392938 - DNA, 191 bp, Homo sapiens; identical to SEQ ID NO: 264626
  chr12:13237737-13237928
  hypo

SEQ ID NO: 392939 - DNA, 36 bp, Homo sapiens; identical to SEQ ID NO: 214807
  chr12:14721513-14721549
  hypo

SEQ ID NO: 392940 - DNA, 197 bp, Homo sapiens; identical to SEQ ID NO: 264633
  chr12:14743808-14744005
  hypo

SEQ ID NO: 392941 - DNA, 72 bp, Homo sapiens; identical to SEQ ID NO: 264637
  chr12:15057301-15057373
  hypo

SEQ ID NO: 392942 - DNA, 43 bp, Homo sapiens; identical to SEQ ID NO: 264647
  chr12:19928383-19928426
  hypo

SEQ ID NO: 392943 - DNA, 87 bp, Homo sapiens; identical to SEQ ID NO: 315641
  chr12:22698196-22698283
  hypo

SEQ ID NO: 392944 - DNA, 54 bp, Homo sapiens; identical to SEQ ID NO: 264656
  chr12:24679251-24679305
  hypo

SEQ ID NO: 392945 - DNA, 199 bp, Homo sapiens; identical to SEQ ID NO: 214830
  chr12:26966974-26967173
  hypo

SEQ ID NO: 392946 - DNA, 159 bp, Homo sapiens; identical to SEQ ID NO: 264675
  chr12:29945371-29945530
  hypo

SEQ ID NO: 392947 - DNA, 108 bp, Homo sapiens; identical to SEQ ID NO: 264682
  chr12:31399695-31399803
  hypo

SEQ ID NO: 392948 - DNA, 39 bp, Homo sapiens; identical to SEQ ID NO: 214838
  chr12:32140933-32140972
  hypo

SEQ ID NO: 392949 - DNA, 142 bp, Homo sapiens; identical to SEQ ID NO: 214840
  chr12:32155239-32155381
  hypo

SEQ ID NO: 392950 - DNA, 34 bp, Homo sapiens; identical to SEQ ID NO: 214841
  chr12:32831180-32831214
  hypo

SEQ ID NO: 392951 - DNA, 682 bp, Homo sapiens; identical to SEQ ID NO: 214848
  chr12:34319319-34320001
  hypo

SEQ ID NO: 392952 - DNA, 572 bp, Homo sapiens; identical to SEQ ID NO: 214851
  chr12:38548366-38548938
  hypo

SEQ ID NO: 392953 - DNA, 123 bp, Homo sapiens; identical to SEQ ID NO: 214852
  chr12:38548968-38549091
  hypo

SEQ ID NO: 392954 - DNA, 196 bp, Homo sapiens; identical to SEQ ID NO: 315705
  chr12:38550957-38551153
  hypo

SEQ ID NO: 392955 - DNA, 60 bp, Homo sapiens; identical to SEQ ID NO: 214854
  chr12:38551305-38551365
  hypo

SEQ ID NO: 392956 - DNA, 587 bp, Homo sapiens; identical to SEQ ID NO: 315709
  chr12:38553243-38553830
  hypo

SEQ ID NO: 392957 - DNA, 338 bp, Homo sapiens; identical to SEQ ID NO: 214856
  chr12:38553866-38554204
  hypo

SEQ ID NO: 392958 - DNA, 371 bp, Homo sapiens; identical to SEQ ID NO: 315711
  chr12:38554258-38554629
  hypo

SEQ ID NO: 392959 - DNA, 120 bp, Homo sapiens; identical to SEQ ID NO: 264710
  chr12:41967350-41967470
  hypo

SEQ ID NO: 392960 - DNA, 32 bp, Homo sapiens; identical to SEQ ID NO: 264713
  chr12:42504945-42504977
  hypo

SEQ ID NO: 392961 - DNA, 133 bp, Homo sapiens; identical to SEQ ID NO: 264725
  chr12:45862284-45862417
  hypo

SEQ ID NO: 392962 - DNA, 149 bp, Homo sapiens; identical to SEQ ID NO: 264733
  chr12:47699297-47699446
  hypo

SEQ ID NO: 392963 - DNA, 154 bp, Homo sapiens; identical to SEQ ID NO: 214883
  chr12:49620906-49621060
  hypo

SEQ ID NO: 392964 - DNA, 85 bp, Homo sapiens; identical to SEQ ID NO: 264753
  chr12:49647106-49647191
  hypo

SEQ ID NO: 392965 - DNA, 247 bp, Homo sapiens; identical to SEQ ID NO: 214885
  chr12:49935483-49935730
  hypo

SEQ ID NO: 392966 - DNA, 307 bp, Homo sapiens; identical to SEQ ID NO: 214889
  chr12:50366185-50366492
  hypo

SEQ ID NO: 392967 - DNA, 233 bp, Homo sapiens; identical to SEQ ID NO: 214890
  chr12:50400184-50400417
  hypo

SEQ ID NO: 392968 - DNA, 180 bp, Homo sapiens; identical to SEQ ID NO: 264771
  chr12:50602878-50603058
  hypo

SEQ ID NO: 392969 - DNA, 136 bp, Homo sapiens; identical to SEQ ID NO: 214892
  chr12:51116977-51117113
  hypo

SEQ ID NO: 392970 - DNA, 120 bp, Homo sapiens; identical to SEQ ID NO: 264782
  chr12:51478095-51478215
  hypo

SEQ ID NO: 392971 - DNA, 120 bp, Homo sapiens; identical to SEQ ID NO: 264786
  chr12:51615467-51615587
  hypo

SEQ ID NO: 392972 - DNA, 149 bp, Homo sapiens; identical to SEQ ID NO: 288943
  chr12:52416804-52416953
  hypo

SEQ ID NO: 392973 - DNA, 179 bp, Homo sapiens; identical to SEQ ID NO: 288944
  chr12:52416985-52417164
  hypo

SEQ ID NO: 392974 - DNA, 82 bp, Homo sapiens; identical to SEQ ID NO: 315829
  chr12:52490992-52491074
  hypo

SEQ ID NO: 392975 - DNA, 44 bp, Homo sapiens; identical to SEQ ID NO: 315830
  chr12:52491127-52491171
  hypo

SEQ ID NO: 392976 - DNA, 95 bp, Homo sapiens; identical to SEQ ID NO: 264806
  chr12:52906094-52906189
  hypo

SEQ ID NO: 392977 - DNA, 72 bp, Homo sapiens; identical to SEQ ID NO: 264808
  chr12:52911390-52911462
  hypo

SEQ ID NO: 392978 - DNA, 421 bp, Homo sapiens; identical to SEQ ID NO: 264816
  chr12:53183249-53183670
  hypo

SEQ ID NO: 392979 - DNA, 33 bp, Homo sapiens; identical to SEQ ID NO: 264820
  chr12:53345414-53345447
  hypo

SEQ ID NO: 392980 - DNA, 75 bp, Homo sapiens; identical to SEQ ID NO: 264822
  chr12:53454239-53454314
  hypo

SEQ ID NO: 392981 - DNA, 81 bp, Homo sapiens; identical to SEQ ID NO: 264823
  chr12:53463204-53463285
  hypo

SEQ ID NO: 392982 - DNA, 86 bp, Homo sapiens; identical to SEQ ID NO: 214909
  chr12:53467253-53467339
  hypo

SEQ ID NO: 392983 - DNA, 58 bp, Homo sapiens; identical to SEQ ID NO: 264828
  chr12:53547966-53548024
  hypo

SEQ ID NO: 392984 - DNA, 59 bp, Homo sapiens; identical to SEQ ID NO: 214912
  chr12:53686627-53686686
  hypo

SEQ ID NO: 392985 - DNA, 92 bp, Homo sapiens; identical to SEQ ID NO: 264836
  chr12:53796833-53796925
  hypo

SEQ ID NO: 392986 - DNA, 44 bp, Homo sapiens; identical to SEQ ID NO: 264846
  chr12:54031206-54031250
  hypo

SEQ ID NO: 392987 - DNA, 38 bp, Homo sapiens; identical to SEQ ID NO: 264852
  chr12:54718115-54718153
  hypo

SEQ ID NO: 392988 - DNA, 277 bp, Homo sapiens; identical to SEQ ID NO: 289049
  chr12:54812879-54813156
  hypo

SEQ ID NO: 392989 - DNA, 31 bp, Homo sapiens; identical to SEQ ID NO: 264855
  chr12:54890476-54890507
  hypo

SEQ ID NO: 392990 - DNA, 278 bp, Homo sapiens; identical to SEQ ID NO: 264859
  chr12:56078877-56079155
  hypo

SEQ ID NO: 392991 - DNA, 88 bp, Homo sapiens; identical to SEQ ID NO: 214927
  chr12:56182547-56182635
  hypo

SEQ ID NO: 392992 - DNA, 151 bp, Homo sapiens; identical to SEQ ID NO: 203036
  chr12:56390556-56390707
  hypo

SEQ ID NO: 392993 - DNA, 200 bp, Homo sapiens; identical to SEQ ID NO: 214936
  chr12:56993681-56993881
  hypo

SEQ ID NO: 392994 - DNA, 62 bp, Homo sapiens; identical to SEQ ID NO: 315922
  chr12:57054418-57054480
  hypo

SEQ ID NO: 392995 - DNA, 108 bp, Homo sapiens; identical to SEQ ID NO: 264880
  chr12:57431637-57431745
  hypo

SEQ ID NO: 392996 - DNA, 32 bp, Homo sapiens; identical to SEQ ID NO: 214937
  chr12:57446184-57446216
  hypo

SEQ ID NO: 392997 - DNA, 356 bp, Homo sapiens; identical to SEQ ID NO: 264886
  chr12:57570816-57571172
  hypo

SEQ ID NO: 392998 - DNA, 35 bp, Homo sapiens; identical to SEQ ID NO: 264887
  chr12:57572148-57572183
  hypo

SEQ ID NO: 392999 - DNA, 38 bp, Homo sapiens; identical to SEQ ID NO: 264888
  chr12:57577265-57577303
  hypo

SEQ ID NO: 393000 - DNA, 86 bp, Homo sapiens; identical to SEQ ID NO: 264904
  chr12:58068674-58068760
  hypo

SEQ ID NO: 393001 - DNA, 166 bp, Homo sapiens; identical to SEQ ID NO: 214945
  chr12:58152861-58153027
  hypo

SEQ ID NO: 393002 - DNA, 251 bp, Homo sapiens; identical to SEQ ID NO: 203054
  chr12:58159038-58159289
  hypo

SEQ ID NO: 393003 - DNA, 85 bp, Homo sapiens; identical to SEQ ID NO: 389019
  chr12:58159346-58159431
  hypo

SEQ ID NO: 393004 - DNA, 102 bp, Homo sapiens; identical to SEQ ID NO: 214948
  chr12:58241599-58241701
  hypo

SEQ ID NO: 393005 - DNA, 41 bp, Homo sapiens; identical to SEQ ID NO: 264911
  chr12:58274994-58275035
  hypo

SEQ ID NO: 393006 - DNA, 137 bp, Homo sapiens; identical to SEQ ID NO: 384444
  chr12:59313525-59313662
  hypo

SEQ ID NO: 393007 - DNA, 266 bp, Homo sapiens; identical to SEQ ID NO: 264922
  chr12:63397171-63397437
  hypo

SEQ ID NO: 393008 - DNA, 110 bp, Homo sapiens; identical to SEQ ID NO: 203073
  chr12:64238195-64238305
  hypo

SEQ ID NO: 393009 - DNA, 98 bp, Homo sapiens; identical to SEQ ID NO: 264925
  chr12:64373753-64373851
  hypo

SEQ ID NO: 393010 - DNA, 269 bp, Homo sapiens; identical to SEQ ID NO: 315979
  chr12:64782916-64783185
  hypo

SEQ ID NO: 393011 - DNA, 144 bp, Homo sapiens; identical to SEQ ID NO: 264930
  chr12:64993418-64993562
  hypo

SEQ ID NO: 393012 - DNA, 50 bp, Homo sapiens; identical to SEQ ID NO: 49821
  chr12:65564722-65564772
  hypo

SEQ ID NO: 393013 - DNA, 94 bp, Homo sapiens; identical to SEQ ID NO: 264941
  chr12:66889676-66889770
  hypo

SEQ ID NO: 393014 - DNA, 33 bp, Homo sapiens; identical to SEQ ID NO: 264945
  chr12:69002754-69002787
  hypo

SEQ ID NO: 393015 - DNA, 64 bp, Homo sapiens; identical to SEQ ID NO: 224404
  chr12:69080591-69080655
  hypo

SEQ ID NO: 393016 - DNA, 209 bp, Homo sapiens; identical to SEQ ID NO: 214969
  chr12:69190343-69190552
  hypo

SEQ ID NO: 393017 - DNA, 137 bp, Homo sapiens; identical to SEQ ID NO: 264951
  chr12:69219402-69219539
  hypo

SEQ ID NO: 393018 - DNA, 114 bp, Homo sapiens; identical to SEQ ID NO: 264956
  chr12:69461743-69461857
  hypo

SEQ ID NO: 393019 - DNA, 98 bp, Homo sapiens; identical to SEQ ID NO: 264959
  chr12:69799148-69799246
  hypo

SEQ ID NO: 393020 - DNA, 33 bp, Homo sapiens; identical to SEQ ID NO: 264960
  chr12:69820434-69820467
  hypo

SEQ ID NO: 393021 - DNA, 33 bp, Homo sapiens; identical to SEQ ID NO: 264967
  chr12:70435915-70435948
  hypo

SEQ ID NO: 393022 - DNA, 171 bp, Homo sapiens; identical to SEQ ID NO: 214974
  chr12:70648187-70648358
  hypo

SEQ ID NO: 393023 - DNA, 237 bp, Homo sapiens; identical to SEQ ID NO: 264979
  chr12:75699403-75699640
  hypo

SEQ ID NO: 393024 - DNA, 31 bp, Homo sapiens; identical to SEQ ID NO: 264981
  chr12:76706641-76706672
  hypo

SEQ ID NO: 393025 - DNA, 70 bp, Homo sapiens; identical to SEQ ID NO: 264984
  chr12:77002013-77002083
  hypo

SEQ ID NO: 393026 - DNA, 38 bp, Homo sapiens; identical to SEQ ID NO: 264993
  chr12:86216675-86216713
  hypo

SEQ ID NO: 393027 - DNA, 158 bp, Homo sapiens; identical to SEQ ID NO: 264995
  chr12:89772134-89772292
  hypo

SEQ ID NO: 393028 - DNA, 96 bp, Homo sapiens; identical to SEQ ID NO: 265007
  chr12:93738883-93738979
  hypo

SEQ ID NO: 393029 - DNA, 141 bp, Homo sapiens; identical to SEQ ID NO: 265008
  chr12:94093737-94093878
  hypo

SEQ ID NO: 393030 - DNA, 104 bp, Homo sapiens; identical to SEQ ID NO: 265013
  chr12:94235585-94235689
  hypo

SEQ ID NO: 393031 - DNA, 209 bp, Homo sapiens; identical to SEQ ID NO: 265020
  chr12:95676257-95676466
  hypo

SEQ ID NO: 393032 - DNA, 37 bp, Homo sapiens; identical to SEQ ID NO: 265021
  chr12:95900348-95900385
  hypo

SEQ ID NO: 393033 - DNA, 94 bp, Homo sapiens; identical to SEQ ID NO: 265023
  chr12:96131819-96131913
  hypo

SEQ ID NO: 393034 - DNA, 59 bp, Homo sapiens; identical to SEQ ID NO: 265028
  chr12:96613304-96613363
  hypo

SEQ ID NO: 393035 - DNA, 33 bp, Homo sapiens; identical to SEQ ID NO: 224420
  chr12:96618052-96618085
  hypo

SEQ ID NO: 393036 - DNA, 77 bp, Homo sapiens; identical to SEQ ID NO: 265029
  chr12:96633652-96633729
  hypo

SEQ ID NO: 393037 - DNA, 83 bp, Homo sapiens; identical to SEQ ID NO: 265030
  chr12:96641021-96641104
  hypo

SEQ ID NO: 393038 - DNA, 120 bp, Homo sapiens; identical to SEQ ID NO: 265036
  chr12:100624655-100624775
  hypo

SEQ ID NO: 393039 - DNA, 36 bp, Homo sapiens; identical to SEQ ID NO: 265041
  chr12:101962172-101962208
  hypo

SEQ ID NO: 393040 - DNA, 150 bp, Homo sapiens; identical to SEQ ID NO: 265049
  chr12:102457339-102457489
  hypo

SEQ ID NO: 393041 - DNA, 143 bp, Homo sapiens; identical to SEQ ID NO: 265063
  chr12:104799424-104799567
  hypo

SEQ ID NO: 393042 - DNA, 175 bp, Homo sapiens; identical to SEQ ID NO: 215023
  chr12:105096586-105096761
  hypo

SEQ ID NO: 393043 - DNA, 146 bp, Homo sapiens; identical to SEQ ID NO: 265069
  chr12:105607980-105608126
  hypo

SEQ ID NO: 393044 - DNA, 105 bp, Homo sapiens; identical to SEQ ID NO: 224430
  chr12:106641151-106641256
  hypo

SEQ ID NO: 393045 - DNA, 189 bp, Homo sapiens; identical to SEQ ID NO: 215028
  chr12:106881472-106881661
  hypo

SEQ ID NO: 393046 - DNA, 142 bp, Homo sapiens; identical to SEQ ID NO: 224433
  chr12:107167936-107168078
  hypo

SEQ ID NO: 393047 - DNA, 41 bp, Homo sapiens; identical to SEQ ID NO: 226552
  chr12:108298348-108298389
  hypo

SEQ ID NO: 393048 - DNA, 32 bp, Homo sapiens; identical to SEQ ID NO: 215032
  chr12:108963690-108963722
  hypo

SEQ ID NO: 393049 - DNA, 169 bp, Homo sapiens; identical to SEQ ID NO: 265088
  chr12:109181383-109181552
  hypo

SEQ ID NO: 393050 - DNA, 295 bp, Homo sapiens; identical to SEQ ID NO: 384461
  chr12:109746919-109747214
  hypo

SEQ ID NO: 393051 - DNA, 39 bp, Homo sapiens; identical to SEQ ID NO: 265101
  chr12:109878129-109878168
  hypo

SEQ ID NO: 393052 - DNA, 195 bp, Homo sapiens; identical to SEQ ID NO: 265102
  chr12:109881228-109881423
  hypo

SEQ ID NO: 393053 - DNA, 159 bp, Homo sapiens; identical to SEQ ID NO: 265110
  chr12:109936815-109936974
  hypo

SEQ ID NO: 393054 - DNA, 34 bp, Homo sapiens; identical to SEQ ID NO: 265117
  chr12:110250928-110250962
  hypo

SEQ ID NO: 393055 - DNA, 63 bp, Homo sapiens; identical to SEQ ID NO: 316202
  chr12:110563722-110563785
  hypo

SEQ ID NO: 393056 - DNA, 303 bp, Homo sapiens; identical to SEQ ID NO: 265136
  chr12:110785458-110785761
  hypo

SEQ ID NO: 393057 - DNA, 201 bp, Homo sapiens; identical to SEQ ID NO: 215047
  chr12:110808573-110808774
  hypo

SEQ ID NO: 393058 - DNA, 37 bp, Homo sapiens; identical to SEQ ID NO: 215050
  chr12:110916994-110917031
  hypo

SEQ ID NO: 393059 - DNA, 61 bp, Homo sapiens; identical to SEQ ID NO: 265154
  chr12:111855883-111855944
  hypo

SEQ ID NO: 393060 - DNA, 120 bp, Homo sapiens; identical to SEQ ID NO: 265160
  chr12:112126606-112126726
  hypo

SEQ ID NO: 393061 - DNA, 53 bp, Homo sapiens; identical to SEQ ID NO: 265183
  chr12:112753046-112753099
  hypo

SEQ ID NO: 393062 - DNA, 35 bp, Homo sapiens; identical to SEQ ID NO: 203186
  chr12:112884177-112884212
  hypo

SEQ ID NO: 393063 - DNA, 481 bp, Homo sapiens; identical to SEQ ID NO: 265184
  chr12:112893631-112894112
  hypo

SEQ ID NO: 393064 - DNA, 58 bp, Homo sapiens; identical to SEQ ID NO: 203187
  chr12:112915451-112915509
  hypo

SEQ ID NO: 393065 - DNA, 199 bp, Homo sapiens; identical to SEQ ID NO: 316286
  chr12:114295304-114295503
  hypo

SEQ ID NO: 393066 - DNA, 283 bp, Homo sapiens; identical to SEQ ID NO: 265206
  chr12:114399937-114400220
  hypo

SEQ ID NO: 393067 - DNA, 147 bp, Homo sapiens; identical to SEQ ID NO: 203201
  chr12:114841493-114841640
  hypo

SEQ ID NO: 393068 - DNA, 138 bp, Homo sapiens; identical to SEQ ID NO: 265216
  chr12:116401202-116401340
  hypo

SEQ ID NO: 393069 - DNA, 69 bp, Homo sapiens; identical to SEQ ID NO: 265225
  chr12:116757111-116757180
  hypo

SEQ ID NO: 393070 - DNA, 34 bp, Homo sapiens; identical to SEQ ID NO: 265229
  chr12:116936895-116936929
  hypo

SEQ ID NO: 393071 - DNA, 40 bp, Homo sapiens; identical to SEQ ID NO: 265232
  chr12:116981481-116981521
  hypo

SEQ ID NO: 393072 - DNA, 41 bp, Homo sapiens; identical to SEQ ID NO: 265241
  chr12:117162195-117162236
  hypo

SEQ ID NO: 393073 - DNA, 43 bp, Homo sapiens; identical to SEQ ID NO: 215113
  chr12:117588696-117588739
  hypo

SEQ ID NO: 393074 - DNA, 57 bp, Homo sapiens; identical to SEQ ID NO: 265273
  chr12:118318419-118318476
  hypo

SEQ ID NO: 393075 - DNA, 32 bp, Homo sapiens; identical to SEQ ID NO: 265276
  chr12:118361967-118361999
  hypo

SEQ ID NO: 393076 - DNA, 120 bp, Homo sapiens; identical to SEQ ID NO: 215122
  chr12:118481549-118481669
  hypo

SEQ ID NO: 393077 - DNA, 153 bp, Homo sapiens; identical to SEQ ID NO: 265289
  chr12:120127978-120128131
  hypo

SEQ ID NO: 393078 - DNA, 196 bp, Homo sapiens; identical to SEQ ID NO: 215129
  chr12:120134818-120135014
  hypo

SEQ ID NO: 393079 - DNA, 89 bp, Homo sapiens; identical to SEQ ID NO: 265318
  chr12:120725460-120725549
  hypo

SEQ ID NO: 393080 - DNA, 83 bp, Homo sapiens; identical to SEQ ID NO: 215143
  chr12:120758714-120758797
  hypo

SEQ ID NO: 393081 - DNA, 39 bp, Homo sapiens; identical to SEQ ID NO: 265332
  chr12:121199754-121199793
  hypo

SEQ ID NO: 393082 - DNA, 178 bp, Homo sapiens; identical to SEQ ID NO: 215155
  chr12:121711833-121712011
  hypo

SEQ ID NO: 393083 - DNA, 110 bp, Homo sapiens; identical to SEQ ID NO: 265368
  chr12:122268640-122268750
  hypo

SEQ ID NO: 393084 - DNA, 41 bp, Homo sapiens; identical to SEQ ID NO: 215172
  chr12:122282339-122282380
  hypo

SEQ ID NO: 393085 - DNA, 34 bp, Homo sapiens; identical to SEQ ID NO: 215173
  chr12:122425316-122425350
  hypo

SEQ ID NO: 393086 - DNA, 213 bp, Homo sapiens; identical to SEQ ID NO: 215178
  chr12:122479007-122479220
  hypo

SEQ ID NO: 393087 - DNA, 176 bp, Homo sapiens; identical to SEQ ID NO: 265402
  chr12:122734927-122735103
  hypo

SEQ ID NO: 393088 - DNA, 44 bp, Homo sapiens; identical to SEQ ID NO: 265407
  chr12:122908028-122908072
  hypo

SEQ ID NO: 393089 - DNA, 34 bp, Homo sapiens; identical to SEQ ID NO: 265409
  chr12:122908260-122908294
  hypo

SEQ ID NO: 393090 - DNA, 103 bp, Homo sapiens; identical to SEQ ID NO: 215189
  chr12:122952405-122952508
  hypo

SEQ ID NO: 393091 - DNA, 133 bp, Homo sapiens; identical to SEQ ID NO: 215190
  chr12:122958416-122958549
  hypo

SEQ ID NO: 393092 - DNA, 124 bp, Homo sapiens; identical to SEQ ID NO: 316517
  chr12:122958579-122958703
  hypo

SEQ ID NO: 393093 - DNA, 36 bp, Homo sapiens; identical to SEQ ID NO: 265417
  chr12:123097245-123097281
  hypo

SEQ ID NO: 393094 - DNA, 36 bp, Homo sapiens; identical to SEQ ID NO: 215195
  chr12:123120922-123120958
  hypo

SEQ ID NO: 393095 - DNA, 336 bp, Homo sapiens; identical to SEQ ID NO: 265426
  chr12:123340660-123340996
  hypo

SEQ ID NO: 393096 - DNA, 77 bp, Homo sapiens; identical to SEQ ID NO: 265427
  chr12:123359583-123359660
  hypo

SEQ ID NO: 393097 - DNA, 41 bp, Homo sapiens; identical to SEQ ID NO: 265443
  chr12:123736871-123736912
  hypo

SEQ ID NO: 393098 - DNA, 537 bp, Homo sapiens; identical to SEQ ID NO: 265446
  chr12:123773444-123773981
  hypo

SEQ ID NO: 393099 - DNA, 364 bp, Homo sapiens; identical to SEQ ID NO: 265451
  chr12:123959873-123960237
  hypo

SEQ ID NO: 393100 - DNA, 274 bp, Homo sapiens; identical to SEQ ID NO: 224479
  chr12:124017709-124017983
  hypo

SEQ ID NO: 393101 - DNA, 125 bp, Homo sapiens; identical to SEQ ID NO: 215207
  chr12:124111672-124111797
  hypo

SEQ ID NO: 393102 - DNA, 48 bp, Homo sapiens; identical to SEQ ID NO: 265461
  chr12:124175161-124175209
  hypo

SEQ ID NO: 393103 - DNA, 81 bp, Homo sapiens; identical to SEQ ID NO: 215213
  chr12:124404099-124404180
  hypo

SEQ ID NO: 393104 - DNA, 68 bp, Homo sapiens; identical to SEQ ID NO: 215214
  chr12:124404272-124404340
  hypo

SEQ ID NO: 393105 - DNA, 50 bp, Homo sapiens; identical to SEQ ID NO: 265474
  chr12:124582793-124582843
  hypo

SEQ ID NO: 393106 - DNA, 82 bp, Homo sapiens; identical to SEQ ID NO: 316584
  chr12:124651851-124651933
  hypo

SEQ ID NO: 393107 - DNA, 145 bp, Homo sapiens; identical to SEQ ID NO: 265476
  chr12:124668398-124668543
  hypo

SEQ ID NO: 393108 - DNA, 184 bp, Homo sapiens; identical to SEQ ID NO: 265486
  chr12:124829274-124829458
  hypo

SEQ ID NO: 393109 - DNA, 71 bp, Homo sapiens; identical to SEQ ID NO: 265503
  chr12:124915171-124915242
  hypo

SEQ ID NO: 393110 - DNA, 230 bp, Homo sapiens; identical to SEQ ID NO: 265509
  chr12:124966043-124966273
  hypo

SEQ ID NO: 393111 - DNA, 883 bp, Homo sapiens; identical to SEQ ID NO: 316627
  chr12:125000464-125001347
  hypo

SEQ ID NO: 393112 - DNA, 226 bp, Homo sapiens; identical to SEQ ID NO: 265539
  chr12:125299402-125299628
  hypo

SEQ ID NO: 393113 - DNA, 153 bp, Homo sapiens; identical to SEQ ID NO: 215253
  chr12:125447387-125447540
  hypo

SEQ ID NO: 393114 - DNA, 93 bp, Homo sapiens; identical to SEQ ID NO: 265553
  chr12:128310534-128310627
  hypo

SEQ ID NO: 393115 - DNA, 31 bp, Homo sapiens; identical to SEQ ID NO: 265567
  chr12:129806103-129806134
  hypo

SEQ ID NO: 393116 - DNA, 138 bp, Homo sapiens; identical to SEQ ID NO: 265573
  chr12:130628827-130628965
  hypo

SEQ ID NO: 393117 - DNA, 38 bp, Homo sapiens; identical to SEQ ID NO: 265577
  chr12:130828450-130828488
  hypo

SEQ ID NO: 393118 - DNA, 224 bp, Homo sapiens; identical to SEQ ID NO: 215274
  chr12:130906937-130907161
  hypo

SEQ ID NO: 393119 - DNA, 258 bp, Homo sapiens; identical to SEQ ID NO: 265587
  chr12:130915750-130916008
  hypo

SEQ ID NO: 393120 - DNA, 102 bp, Homo sapiens; identical to SEQ ID NO: 265594
  chr12:130929720-130929822
  hypo

SEQ ID NO: 393121 - DNA, 141 bp, Homo sapiens; identical to SEQ ID NO: 265611
  chr12:131111477-131111618
  hypo

SEQ ID NO: 393122 - DNA, 42 bp, Homo sapiens; identical to SEQ ID NO: 265624
  chr12:131186211-131186253
  hypo

SEQ ID NO: 393123 - DNA, 385 bp, Homo sapiens; identical to SEQ ID NO: 265638
  chr12:131443181-131443566
  hypo

SEQ ID NO: 393124 - DNA, 216 bp, Homo sapiens; identical to SEQ ID NO: 265645
  chr12:131515098-131515314
  hypo

SEQ ID NO: 393125 - DNA, 330 bp, Homo sapiens; identical to SEQ ID NO: 265650
  chr12:131581012-131581342
  hypo

SEQ ID NO: 393126 - DNA, 64 bp, Homo sapiens; identical to SEQ ID NO: 215302
  chr12:132205019-132205083
  hypo

SEQ ID NO: 393127 - DNA, 325 bp, Homo sapiens; identical to SEQ ID NO: 215308
  chr12:132259528-132259853
  hypo

SEQ ID NO: 393128 - DNA, 226 bp, Homo sapiens; identical to SEQ ID NO: 215309
  chr12:132259883-132260109
  hypo

SEQ ID NO: 393129 - DNA, 111 bp, Homo sapiens; identical to SEQ ID NO: 215310
  chr12:132263619-132263730
  hypo

SEQ ID NO: 393130 - DNA, 34 bp, Homo sapiens; identical to SEQ ID NO: 265701
  chr12:132397845-132397879
  hypo

SEQ ID NO: 393131 - DNA, 130 bp, Homo sapiens; identical to SEQ ID NO: 215316
  chr12:132400435-132400565
  hypo

SEQ ID NO: 393132 - DNA, 271 bp, Homo sapiens; identical to SEQ ID NO: 215320
  chr12:132514252-132514523
  hypo

SEQ ID NO: 393133 - DNA, 73 bp, Homo sapiens; identical to SEQ ID NO: 215321
  chr12:132529444-132529517
  hypo

SEQ ID NO: 393134 - DNA, 175 bp, Homo sapiens; identical to SEQ ID NO: 215324
  chr12:132541957-132542132
  hypo

SEQ ID NO: 393135 - DNA, 206 bp, Homo sapiens; identical to SEQ ID NO: 215325
  chr12:132546645-132546851
  hypo

SEQ ID NO: 393136 - DNA, 225 bp, Homo sapiens; identical to SEQ ID NO: 265719
  chr12:132561923-132562148
  hypo

SEQ ID NO: 393137 - DNA, 38 bp, Homo sapiens; identical to SEQ ID NO: 215329
  chr12:132581294-132581332
  hypo

SEQ ID NO: 393138 - DNA, 41 bp, Homo sapiens; identical to SEQ ID NO: 215342
  chr12:133019660-133019701
  hypo

SEQ ID NO: 393139 - DNA, 94 bp, Homo sapiens; identical to SEQ ID NO: 265762
  chr12:133148941-133149035
  hypo

SEQ ID NO: 393140 - DNA, 60 bp, Homo sapiens; identical to SEQ ID NO: 265763
  chr12:133149549-133149609
  hypo

SEQ ID NO: 393141 - DNA, 148 bp, Homo sapiens; identical to SEQ ID NO: 215354
  chr12:133156531-133156679
  hypo

SEQ ID NO: 393142 - DNA, 150 bp, Homo sapiens; identical to SEQ ID NO: 316906
  chr12:133168795-133168945
  hypo

SEQ ID NO: 393143 - DNA, 44 bp, Homo sapiens; identical to SEQ ID NO: 215363
  chr12:133225533-133225577
  hypo

SEQ ID NO: 393144 - DNA, 61 bp, Homo sapiens; identical to SEQ ID NO: 215365
  chr12:133277669-133277730
  hypo

SEQ ID NO: 393145 - DNA, 86 bp, Homo sapiens; identical to SEQ ID NO: 215367
  chr12:133308293-133308379
  hypo

SEQ ID NO: 393146 - DNA, 392 bp, Homo sapiens; identical to SEQ ID NO: 215370
  chr12:133351310-133351702
  hypo

SEQ ID NO: 393147 - DNA, 108 bp, Homo sapiens; identical to SEQ ID NO: 265795
  chr12:133417245-133417353
  hypo

SEQ ID NO: 393148 - DNA, 442 bp, Homo sapiens; identical to SEQ ID NO: 226553
  chr12:133443618-133444060
  hypo

SEQ ID NO: 393149 - DNA, 74 bp, Homo sapiens; identical to SEQ ID NO: 215380
  chr12:133448788-133448862
  hypo

SEQ ID NO: 393150 - DNA, 125 bp, Homo sapiens; identical to SEQ ID NO: 215381
  chr12:133449100-133449225
  hypo

SEQ ID NO: 393151 - DNA, 136 bp, Homo sapiens; identical to SEQ ID NO: 265805
  chr12:133716926-133717062
  hypo

SEQ ID NO: 393152 - DNA, 179 bp, Homo sapiens; identical to SEQ ID NO: 265808
  chr13:19664765-19664944
  hypo

SEQ ID NO: 393153 - DNA, 85 bp, Homo sapiens; identical to SEQ ID NO: 215387
  chr13:20521929-20522014
  hypo

SEQ ID NO: 393154 - DNA, 313 bp, Homo sapiens; identical to SEQ ID NO: 265820
  chr13:21047373-21047686
  hypo

SEQ ID NO: 393155 - DNA, 105 bp, Homo sapiens; identical to SEQ ID NO: 224501
  chr13:21141668-21141773
  hypo

SEQ ID NO: 393156 - DNA, 187 bp, Homo sapiens; identical to SEQ ID NO: 265846
  chr13:22417569-22417756
  hypo

SEQ ID NO: 393157 - DNA, 157 bp, Homo sapiens; identical to SEQ ID NO: 265849
  chr13:22511719-22511876
  hypo

SEQ ID NO: 393158 - DNA, 91 bp, Homo sapiens; identical to SEQ ID NO: 265852
  chr13:22786757-22786848
  hypo

SEQ ID NO: 393159 - DNA, 369 bp, Homo sapiens; identical to SEQ ID NO: 265853
  chr13:23508831-23509200
  hypo

SEQ ID NO: 393160 - DNA, 140 bp, Homo sapiens; identical to SEQ ID NO: 265854
  chr13:23629553-23629693
  hypo

SEQ ID NO: 393161 - DNA, 358 bp, Homo sapiens; identical to SEQ ID NO: 215411
  chr13:24718516-24718874
  hypo

SEQ ID NO: 393162 - DNA, 38 bp, Homo sapiens; identical to SEQ ID NO: 265864
  chr13:24720491-24720529
  hypo

SEQ ID NO: 393163 - DNA, 51 bp, Homo sapiens; identical to SEQ ID NO: 265869
  chr13:24819243-24819294
  hypo

SEQ ID NO: 393164 - DNA, 164 bp, Homo sapiens; identical to SEQ ID NO: 215418
  chr13:25932257-25932421
  hypo

SEQ ID NO: 393165 - DNA, 37 bp, Homo sapiens; identical to SEQ ID NO: 215421
  chr13:27556411-27556448
  hypo

SEQ ID NO: 393166 - DNA, 275 bp, Homo sapiens; identical to SEQ ID NO: 203294
  chr13:27744759-27745034
  hypo

SEQ ID NO: 393167 - DNA, 31 bp, Homo sapiens; identical to SEQ ID NO: 215426
  chr13:27914840-27914871
  hypo

SEQ ID NO: 393168 - DNA, 106 bp, Homo sapiens; identical to SEQ ID NO: 203314
  chr13:28636040-28636146
  hypo

SEQ ID NO: 393169 - DNA, 204 bp, Homo sapiens; identical to SEQ ID NO: 215440
  chr13:29920653-29920857
  hypo

SEQ ID NO: 393170 - DNA, 242 bp, Homo sapiens; identical to SEQ ID NO: 265907
  chr13:30082638-30082880
  hypo

SEQ ID NO: 393171 - DNA, 149 bp, Homo sapiens; identical to SEQ ID NO: 215442
  chr13:30087251-30087400
  hypo

SEQ ID NO: 393172 - DNA, 206 bp, Homo sapiens; identical to SEQ ID NO: 215451
  chr13:31208407-31208613
  hypo

SEQ ID NO: 393173 - DNA, 146 bp, Homo sapiens; identical to SEQ ID NO: 224540
  chr13:32905055-32905201
  hypo

SEQ ID NO: 393174 - DNA, 96 bp, Homo sapiens; identical to SEQ ID NO: 224543
  chr13:32918694-32918790
  hypo

SEQ ID NO: 393175 - DNA, 188 bp, Homo sapiens; identical to SEQ ID NO: 224547
  chr13:32931878-32932066
  hypo

SEQ ID NO: 393176 - DNA, 56 bp, Homo sapiens; identical to SEQ ID NO: 265940
  chr13:33510409-33510465
  hypo

SEQ ID NO: 393177 - DNA, 60 bp, Homo sapiens; identical to SEQ ID NO: 265950
  chr13:37838971-37839031
  hypo

SEQ ID NO: 393178 - DNA, 77 bp, Homo sapiens; identical to SEQ ID NO: 265951
  chr13:39358216-39358293
  hypo

SEQ ID NO: 393179 - DNA, 162 bp, Homo sapiens; identical to SEQ ID NO: 224571
  chr13:42615145-42615307
  hypo

SEQ ID NO: 393180 - DNA, 177 bp, Homo sapiens; identical to SEQ ID NO: 265968
  chr13:44543798-44543975
  hypo

SEQ ID NO: 393181 - DNA, 205 bp, Homo sapiens; identical to SEQ ID NO: 224576
  chr13:44991619-44991824
  hypo

SEQ ID NO: 393182 - DNA, 252 bp, Homo sapiens; identical to SEQ ID NO: 265972
  chr13:45003134-45003386
  hypo

SEQ ID NO: 393183 - DNA, 101 bp, Homo sapiens; identical to SEQ ID NO: 265976
  chr13:45493229-45493330
  hypo

SEQ ID NO: 393184 - DNA, 137 bp, Homo sapiens; identical to SEQ ID NO: 265979
  chr13:45741238-45741375
  hypo

SEQ ID NO: 393185 - DNA, 129 bp, Homo sapiens
  chr13:45926492-45926621
  hypo
gtttgaatgaacattttaagcatggtatctgcctgccaccttggttctcaaagtggtctcccagaccttttcagggatctattacatcaaaactattttcagggtttttttttttttttttgagactga

SEQ ID NO: 393186 - DNA, 64 bp, Homo sapiens; identical to SEQ ID NO: 265984
  chr13:45939385-45939449
  hypo

SEQ ID NO: 393187 - DNA, 136 bp, Homo sapiens; identical to SEQ ID NO: 215477
  chr13:46037882-46038018
  hypo

SEQ ID NO: 393188 - DNA, 77 bp, Homo sapiens; identical to SEQ ID NO: 215479
  chr13:46288451-46288528
  hypo

SEQ ID NO: 393189 - DNA, 87 bp, Homo sapiens; identical to SEQ ID NO: 265991
  chr13:46318163-46318250
  hypo

SEQ ID NO: 393190 - DNA, 44 bp, Homo sapiens; identical to SEQ ID NO: 386495
  chr13:46948591-46948635
  hypo

SEQ ID NO: 393191 - DNA, 159 bp, Homo sapiens; identical to SEQ ID NO: 266000
  chr13:49076869-49077028
  hypo

SEQ ID NO: 393192 - DNA, 278 bp, Homo sapiens; identical to SEQ ID NO: 266005
  chr13:49884960-49885238
  hypo

SEQ ID NO: 393193 - DNA, 291 bp, Homo sapiens; identical to SEQ ID NO: 224578
  chr13:52585269-52585560
  hypo

SEQ ID NO: 393194 - DNA, 280 bp, Homo sapiens; identical to SEQ ID NO: 224580
  chr13:52702767-52703047
  hypo

SEQ ID NO: 393195 - DNA, 74 bp, Homo sapiens; identical to SEQ ID NO: 317238
  chr13:73619519-73619593
  hypo

SEQ ID NO: 393196 - DNA, 37 bp, Homo sapiens; identical to SEQ ID NO: 317239
  chr13:73619623-73619660
  hypo

SEQ ID NO: 393197 - DNA, 34 bp, Homo sapiens; identical to SEQ ID NO: 215495
  chr13:73619752-73619786
  hypo

SEQ ID NO: 393198 - DNA, 157 bp, Homo sapiens; identical to SEQ ID NO: 266030
  chr13:73636133-73636290
  hypo

SEQ ID NO: 393199 - DNA, 38 bp, Homo sapiens; identical to SEQ ID NO: 266033
  chr13:73642917-73642955
  hypo

SEQ ID NO: 393200 - DNA, 143 bp, Homo sapiens; identical to SEQ ID NO: 266037
  chr13:74248145-74248288
  hypo

SEQ ID NO: 393201 - DNA, 35 bp, Homo sapiens; identical to SEQ ID NO: 215505
  chr13:79993208-79993243
  hypo

SEQ ID NO: 393202 - DNA, 40 bp, Homo sapiens; identical to SEQ ID NO: 266050
  chr13:83206528-83206568
  hypo

SEQ ID NO: 393203 - DNA, 108 bp, Homo sapiens; identical to SEQ ID NO: 266051
  chr13:84107123-84107231
  hypo

SEQ ID NO: 393204 - DNA, 51 bp, Homo sapiens; identical to SEQ ID NO: 266056
  chr13:87732415-87732466
  hypo

SEQ ID NO: 393205 - DNA, 150 bp, Homo sapiens; identical to SEQ ID NO: 266060
  chr13:95061643-95061793
  hypo

SEQ ID NO: 393206 - DNA, 46 bp, Homo sapiens; identical to SEQ ID NO: 266071
  chr13:95869960-95870006
  hypo

SEQ ID NO: 393207 - DNA, 92 bp, Homo sapiens; identical to SEQ ID NO: 266087
  chr13:98761016-98761108
  hypo

SEQ ID NO: 393208 - DNA, 187 bp, Homo sapiens; identical to SEQ ID NO: 266095
  chr13:98981025-98981212
  hypo

SEQ ID NO: 393209 - DNA, 95 bp, Homo sapiens; identical to SEQ ID NO: 266105
  chr13:99141397-99141492
  hypo

SEQ ID NO: 393210 - DNA, 124 bp, Homo sapiens; identical to SEQ ID NO: 266123
  chr13:100005097-100005221
  hypo

SEQ ID NO: 393211 - DNA, 160 bp, Homo sapiens; identical to SEQ ID NO: 215534
  chr13:100035864-100036024
  hypo

SEQ ID NO: 393212 - DNA, 129 bp, Homo sapiens; identical to SEQ ID NO: 266128
  chr13:100036956-100037085
  hypo

SEQ ID NO: 393213 - DNA, 319 bp, Homo sapiens; identical to SEQ ID NO: 266129
  chr13:100067888-100068207
  hypo

SEQ ID NO: 393214 - DNA, 91 bp, Homo sapiens; identical to SEQ ID NO: 266137
  chr13:101091896-101091987
  hypo

SEQ ID NO: 393215 - DNA, 167 bp, Homo sapiens; identical to SEQ ID NO: 215545
  chr13:101297851-101298018
  hypo

SEQ ID NO: 393216 - DNA, 38 bp, Homo sapiens; identical to SEQ ID NO: 317384
  chr13:103569193-103569231
  hypo

SEQ ID NO: 393217 - DNA, 268 bp, Homo sapiens; identical to SEQ ID NO: 266157
  chr13:107078199-107078467
  hypo

SEQ ID NO: 393218 - DNA, 42 bp, Homo sapiens; identical to SEQ ID NO: 266159
  chr13:107128750-107128792
  hypo

SEQ ID NO: 393219 - DNA, 40 bp, Homo sapiens; identical to SEQ ID NO: 266162
  chr13:108816275-108816315
  hypo

SEQ ID NO: 393220 - DNA, 42 bp, Homo sapiens; identical to SEQ ID NO: 266181
  chr13:111087191-111087233
  hypo

SEQ ID NO: 393221 - DNA, 170 bp, Homo sapiens; identical to SEQ ID NO: 215570
  chr13:111135308-111135478
  hypo

SEQ ID NO: 393222 - DNA, 195 bp, Homo sapiens; identical to SEQ ID NO: 266187
  chr13:111145418-111145613
  hypo

SEQ ID NO: 393223 - DNA, 240 bp, Homo sapiens; identical to SEQ ID NO: 224638
  chr13:111213793-111214033
  hypo

SEQ ID NO: 393224 - DNA, 186 bp, Homo sapiens; identical to SEQ ID NO: 266191
  chr13:111279860-111280046
  hypo

SEQ ID NO: 393225 - DNA, 289 bp, Homo sapiens; identical to SEQ ID NO: 215581
  chr13:111305194-111305483
  hypo

SEQ ID NO: 393226 - DNA, 79 bp, Homo sapiens; identical to SEQ ID NO: 266206
  chr13:111589026-111589105
  hypo

SEQ ID NO: 393227 - DNA, 357 bp, Homo sapiens
  chr13:111881497-111881854
  hypo
ggggctggctgtgcttcctcagcccaaggaatccagagctcttcagttccagaaaggatcttctcaaggactacttccagctcactccctgatttttctcctgaatatcttactagatgtcttattttgccctctgttttaatccgcgtattttaatctactttgcgtatctgtttgtttcactgtgctgtattatctattcctctgcctgtcagttcattaattccctcctcacggtgatactaacctgtttgtggagatttccattttagtgaccatatttatttgtagaagttttgctgcgcttcagatgttttcagtcttcatggcgccttttttattcgtcgtgattggtcc

SEQ ID NO: 393228 - DNA, 56 bp, Homo sapiens; identical to SEQ ID NO: 215593
  chr13:112051223-112051279
  hypo

SEQ ID NO: 393229 - DNA, 111 bp, Homo sapiens; identical to SEQ ID NO: 317468
  chr13:112062637-112062748
  hypo

SEQ ID NO: 393230 - DNA, 68 bp, Homo sapiens; identical to SEQ ID NO: 317469
  chr13:112062778-112062846
  hypo

SEQ ID NO: 393231 - DNA, 106 bp, Homo sapiens; identical to SEQ ID NO: 317476
  chr13:112320937-112321043
  hypo

SEQ ID NO: 393232 - DNA, 247 bp, Homo sapiens; identical to SEQ ID NO: 317477
  chr13:112321075-112321322
  hypo

SEQ ID NO: 393233 - DNA, 179 bp, Homo sapiens; identical to SEQ ID NO: 266238
  chr13:112334238-112334417
  hypo

SEQ ID NO: 393234 - DNA, 114 bp, Homo sapiens; identical to SEQ ID NO: 266254
  chr13:112804837-112804951
  hypo

SEQ ID NO: 393235 - DNA, 52 bp, Homo sapiens; identical to SEQ ID NO: 266260
  chr13:112887814-112887866
  hypo

SEQ ID NO: 393236 - DNA, 45 bp, Homo sapiens; identical to SEQ ID NO: 266266
  chr13:113008186-113008231
  hypo

SEQ ID NO: 393237 - DNA, 42 bp, Homo sapiens; identical to SEQ ID NO: 266271
  chr13:113111904-113111946
  hypo

SEQ ID NO: 393238 - DNA, 122 bp, Homo sapiens; identical to SEQ ID NO: 266274
  chr13:113163202-113163324
  hypo

SEQ ID NO: 393239 - DNA, 98 bp, Homo sapiens; identical to SEQ ID NO: 266283
  chr13:113342679-113342777
  hypo

SEQ ID NO: 393240 - DNA, 450 bp, Homo sapiens
  chr13:113351290-113351740
  hypo
gtgcgcaggctggcgggtgggcgaggcgggtggaggatgcgtggggcgcagtgcttgcgcgcagtgggtggcggggtggacgaggtgagggcctggccaggtgggtgcctgcgtgtccagcctgaggggcggcccacgcagcagcctctgggagccctggggccttccgtgggctgcttcctgtggcgtcctgcgggctggccgcccctcggtgggctccggtgctggcctctgccttccccagggccacggtgggctcctagtggcctttcttccctctccatcaacatccttgtcccaggaagaggcgtccactgcctgctacacgccacccagccgtgttcatttccgtgttccagtgtcacccgtgtgcctagaacgttcctggcacagaaaagccacgcagaaaacagctgctgggccaacaccgagaccccaggtcattagtgt

SEQ ID NO: 393241 - DNA, 241 bp, Homo sapiens; identical to SEQ ID NO: 266291
  chr13:113368823-113369064
  hypo

SEQ ID NO: 393242 - DNA, 90 bp, Homo sapiens; identical to SEQ ID NO: 266296
  chr13:113382140-113382230
  hypo

SEQ ID NO: 393243 - DNA, 391 bp, Homo sapiens; identical to SEQ ID NO: 215617
  chr13:113398309-113398700
  hypo

SEQ ID NO: 393244 - DNA, 248 bp, Homo sapiens; identical to SEQ ID NO: 266320
  chr13:113474180-113474428
  hypo

SEQ ID NO: 393245 - DNA, 35 bp, Homo sapiens; identical to SEQ ID NO: 266325
  chr13:113493552-113493587
  hypo

SEQ ID NO: 393246 - DNA, 95 bp, Homo sapiens; identical to SEQ ID NO: 27306
  chr13:113498378-113498473
  hypo

SEQ ID NO: 393247 - DNA, 54 bp, Homo sapiens; identical to SEQ ID NO: 266328
  chr13:113499309-113499363
  hypo

SEQ ID NO: 393248 - DNA, 75 bp, Homo sapiens; identical to SEQ ID NO: 215639
  chr13:113516326-113516401
  hypo

SEQ ID NO: 393249 - DNA, 99 bp, Homo sapiens; identical to SEQ ID NO: 266337
  chr13:113537723-113537822
  hypo

SEQ ID NO: 393250 - DNA, 208 bp, Homo sapiens; identical to SEQ ID NO: 215642
  chr13:113539438-113539646
  hypo

SEQ ID NO: 393251 - DNA, 45 bp, Homo sapiens; identical to SEQ ID NO: 215644
  chr13:113555445-113555490
  hypo

SEQ ID NO: 393252 - DNA, 182 bp, Homo sapiens; identical to SEQ ID NO: 266347
  chr13:113570827-113571009
  hypo

SEQ ID NO: 393253 - DNA, 184 bp, Homo sapiens; identical to SEQ ID NO: 266351
  chr13:113622064-113622248
  hypo

SEQ ID NO: 393254 - DNA, 118 bp, Homo sapiens; identical to SEQ ID NO: 266353
  chr13:113631096-113631214
  hypo

SEQ ID NO: 393255 - DNA, 38 bp, Homo sapiens; identical to SEQ ID NO: 266359
  chr13:113654369-113654407
  hypo

SEQ ID NO: 393256 - DNA, 62 bp, Homo sapiens; identical to SEQ ID NO: 215652
  chr13:113719023-113719085
  hypo

SEQ ID NO: 393257 - DNA, 786 bp, Homo sapiens; identical to SEQ ID NO: 317623
  chr13:113719189-113719975
  hypo

SEQ ID NO: 393258 - DNA, 96 bp, Homo sapiens; identical to SEQ ID NO: 266374
  chr13:113739496-113739592
  hypo

SEQ ID NO: 393259 - DNA, 103 bp, Homo sapiens; identical to SEQ ID NO: 266379
  chr13:113866200-113866303
  hypo

SEQ ID NO: 393260 - DNA, 87 bp, Homo sapiens; identical to SEQ ID NO: 203465
  chr13:113951225-113951312
  hypo

SEQ ID NO: 393261 - DNA, 290 bp, Homo sapiens; identical to SEQ ID NO: 266384
  chr13:113980176-113980466
  hypo

SEQ ID NO: 393262 - DNA, 83 bp, Homo sapiens; identical to SEQ ID NO: 266390
  chr13:114002279-114002362
  hypo

SEQ ID NO: 393263 - DNA, 84 bp, Homo sapiens; identical to SEQ ID NO: 266395
  chr13:114032122-114032206
  hypo

SEQ ID NO: 393264 - DNA, 154 bp, Homo sapiens; identical to SEQ ID NO: 215674
  chr13:114115142-114115296
  hypo

SEQ ID NO: 393265 - DNA, 145 bp, Homo sapiens; identical to SEQ ID NO: 215690
  chr13:114246191-114246336
  hypo

SEQ ID NO: 393266 - DNA, 76 bp, Homo sapiens; identical to SEQ ID NO: 389145
  chr13:114285627-114285703
  hypo

SEQ ID NO: 393267 - DNA, 71 bp, Homo sapiens; identical to SEQ ID NO: 266435
  chr13:114286281-114286352
  hypo

SEQ ID NO: 393268 - DNA, 157 bp, Homo sapiens; identical to SEQ ID NO: 266438
  chr13:114290658-114290815
  hypo

SEQ ID NO: 393269 - DNA, 42 bp, Homo sapiens; identical to SEQ ID NO: 266443
  chr13:114296440-114296482
  hypo

SEQ ID NO: 393270 - DNA, 47 bp, Homo sapiens
  chr13:114302558-114302605
  hypo
ggtaaattgatttagttaaccttacaacatatctgcaaggtttttaa

SEQ ID NO: 393271 - DNA, 263 bp, Homo sapiens; identical to SEQ ID NO: 317709
  chr13:114318243-114318506
  hypo

SEQ ID NO: 393272 - DNA, 142 bp, Homo sapiens; identical to SEQ ID NO: 317713
  chr13:114497267-114497409
  hypo

SEQ ID NO: 393273 - DNA, 31 bp, Homo sapiens; identical to SEQ ID NO: 317714
  chr13:114497439-114497470
  hypo

SEQ ID NO: 393274 - DNA, 69 bp, Homo sapiens; identical to SEQ ID NO: 317720
  chr13:114517613-114517682
  hypo

SEQ ID NO: 393275 - DNA, 51 bp, Homo sapiens; identical to SEQ ID NO: 317721
  chr13:114517712-114517763
  hypo

SEQ ID NO: 393276 - DNA, 144 bp, Homo sapiens; identical to SEQ ID NO: 215715
  chr13:114791748-114791892
  hypo

SEQ ID NO: 393277 - DNA, 48 bp, Homo sapiens; identical to SEQ ID NO: 266494
  chr13:114804554-114804602
  hypo

SEQ ID NO: 393278 - DNA, 65 bp, Homo sapiens; identical to SEQ ID NO: 266495
  chr13:114804861-114804926
  hypo

SEQ ID NO: 393279 - DNA, 43 bp, Homo sapiens; identical to SEQ ID NO: 215720
  chr13:114855701-114855744
  hypo

SEQ ID NO: 393280 - DNA, 89 bp, Homo sapiens; identical to SEQ ID NO: 266515
  chr13:115025097-115025186
  hypo

SEQ ID NO: 393281 - DNA, 165 bp, Homo sapiens; identical to SEQ ID NO: 224663
  chr14:21150255-21150420
  hypo

SEQ ID NO: 393282 - DNA, 274 bp, Homo sapiens; identical to SEQ ID NO: 266521
  chr14:21464749-21465023
  hypo

SEQ ID NO: 393283 - DNA, 88 bp, Homo sapiens; identical to SEQ ID NO: 266545
  chr14:23530469-23530557
  hypo

SEQ ID NO: 393284 - DNA, 188 bp, Homo sapiens; identical to SEQ ID NO: 203499
  chr14:23776071-23776259
  hypo

SEQ ID NO: 393285 - DNA, 84 bp, Homo sapiens; identical to SEQ ID NO: 266574
  chr14:31035127-31035211
  hypo

SEQ ID NO: 393286 - DNA, 100 bp, Homo sapiens; identical to SEQ ID NO: 215747
  chr14:31456881-31456981
  hypo

SEQ ID NO: 393287 - DNA, 205 bp, Homo sapiens; identical to SEQ ID NO: 215749
  chr14:31484306-31484511
  hypo

SEQ ID NO: 393288 - DNA, 44 bp, Homo sapiens; identical to SEQ ID NO: 215753
  chr14:32597576-32597620
  hypo

SEQ ID NO: 393289 - DNA, 37 bp, Homo sapiens; identical to SEQ ID NO: 266608
  chr14:35266883-35266920
  hypo

SEQ ID NO: 393290 - DNA, 48 bp, Homo sapiens; identical to SEQ ID NO: 266610
  chr14:35331322-35331370
  hypo

SEQ ID NO: 393291 - DNA, 34 bp, Homo sapiens; identical to SEQ ID NO: 215761
  chr14:37174263-37174297
  hypo

SEQ ID NO: 393292 - DNA, 32 bp, Homo sapiens; identical to SEQ ID NO: 266631
  chr14:45437464-45437496
  hypo

SEQ ID NO: 393293 - DNA, 31 bp, Homo sapiens; identical to SEQ ID NO: 266632
  chr14:45437736-45437767
  hypo

SEQ ID NO: 393294 - DNA, 42 bp, Homo sapiens; identical to SEQ ID NO: 266651
  chr14:51148375-51148417
  hypo

SEQ ID NO: 393295 - DNA, 41 bp, Homo sapiens; identical to SEQ ID NO: 215778
  chr14:51836280-51836321
  hypo

SEQ ID NO: 393296 - DNA, 84 bp, Homo sapiens; identical to SEQ ID NO: 266660
  chr14:53196020-53196104
  hypo

SEQ ID NO: 393297 - DNA, 38 bp, Homo sapiens; identical to SEQ ID NO: 224692
  chr14:55032358-55032396
  hypo

SEQ ID NO: 393298 - DNA, 201 bp, Homo sapiens; identical to SEQ ID NO: 215785
  chr14:55590026-55590227
  hypo

SEQ ID NO: 393299 - DNA, 214 bp, Homo sapiens; identical to SEQ ID NO: 266668
  chr14:55731632-55731846
  hypo

SEQ ID NO: 393300 - DNA, 164 bp, Homo sapiens; identical to SEQ ID NO: 215790
  chr14:55819829-55819993
  hypo

SEQ ID NO: 393301 - DNA, 31 bp, Homo sapiens; identical to SEQ ID NO: 215791
  chr14:55894600-55894631
  hypo

SEQ ID NO: 393302 - DNA, 77 bp, Homo sapiens; identical to SEQ ID NO: 215794
  chr14:57073649-57073726
  hypo

SEQ ID NO: 393303 - DNA, 34 bp, Homo sapiens; identical to SEQ ID NO: 266692
  chr14:59734888-59734922
  hypo

SEQ ID NO: 393304 - DNA, 164 bp, Homo sapiens; identical to SEQ ID NO: 215800
  chr14:59821078-59821242
  hypo

SEQ ID NO: 393305 - DNA, 184 bp, Homo sapiens; identical to SEQ ID NO: 266700
  chr14:61246679-61246863
  hypo

SEQ ID NO: 393306 - DNA, 148 bp, Homo sapiens; identical to SEQ ID NO: 215809
  chr14:62015169-62015317
  hypo

SEQ ID NO: 393307 - DNA, 54 bp, Homo sapiens; identical to SEQ ID NO: 266706
  chr14:62027306-62027360
  hypo

SEQ ID NO: 393308 - DNA, 42 bp, Homo sapiens; identical to SEQ ID NO: 215813
  chr14:64190117-64190159
  hypo

SEQ ID NO: 393309 - DNA, 221 bp, Homo sapiens; identical to SEQ ID NO: 290271
  chr14:64760852-64761073
  hypo

SEQ ID NO: 393310 - DNA, 61 bp, Homo sapiens; identical to SEQ ID NO: 389191
  chr14:64761254-64761315
  hypo

SEQ ID NO: 393311 - DNA, 84 bp, Homo sapiens; identical to SEQ ID NO: 215826
  chr14:65237647-65237731
  hypo

SEQ ID NO: 393312 - DNA, 61 bp, Homo sapiens; identical to SEQ ID NO: 266751
  chr14:66560926-66560987
  hypo

SEQ ID NO: 393313 - DNA, 42 bp, Homo sapiens; identical to SEQ ID NO: 215832
  chr14:66814104-66814146
  hypo

SEQ ID NO: 393314 - DNA, 37 bp, Homo sapiens; identical to SEQ ID NO: 266755
  chr14:66976456-66976493
  hypo

SEQ ID NO: 393315 - DNA, 179 bp, Homo sapiens; identical to SEQ ID NO: 266760
  chr14:67888349-67888528
  hypo

SEQ ID NO: 393316 - DNA, 54 bp, Homo sapiens; identical to SEQ ID NO: 266764
  chr14:68163051-68163105
  hypo

SEQ ID NO: 393317 - DNA, 99 bp, Homo sapiens; identical to SEQ ID NO: 266770
  chr14:69050653-69050752
  hypo

SEQ ID NO: 393318 - DNA, 88 bp, Homo sapiens; identical to SEQ ID NO: 318050
  chr14:69143561-69143649
  hypo

SEQ ID NO: 393319 - DNA, 93 bp, Homo sapiens; identical to SEQ ID NO: 266778
  chr14:69218775-69218868
  hypo

SEQ ID NO: 393320 - DNA, 140 bp, Homo sapiens; identical to SEQ ID NO: 318074
  chr14:69867591-69867731
  hypo

SEQ ID NO: 393321 - DNA, 83 bp, Homo sapiens; identical to SEQ ID NO: 318075
  chr14:69867761-69867844
  hypo

SEQ ID NO: 393322 - DNA, 87 bp, Homo sapiens; identical to SEQ ID NO: 266794
  chr14:70387802-70387889
  hypo

SEQ ID NO: 393323 - DNA, 60 bp, Homo sapiens; identical to SEQ ID NO: 224724
  chr14:71108798-71108858
  hypo

SEQ ID NO: 393324 - DNA, 40 bp, Homo sapiens; identical to SEQ ID NO: 266795
  chr14:71443359-71443399
  hypo

SEQ ID NO: 393325 - DNA, 215 bp, Homo sapiens; identical to SEQ ID NO: 266810
  chr14:73302930-73303145
  hypo

SEQ ID NO: 393326 - DNA, 73 bp, Homo sapiens; identical to SEQ ID NO: 215858
  chr14:73428614-73428687
  hypo

SEQ ID NO: 393327 - DNA, 180 bp, Homo sapiens; identical to SEQ ID NO: 266817
  chr14:73482390-73482570
  hypo

SEQ ID NO: 393328 - DNA, 37 bp, Homo sapiens; identical to SEQ ID NO: 266822
  chr14:73926314-73926351
  hypo

SEQ ID NO: 393329 - DNA, 88 bp, Homo sapiens; identical to SEQ ID NO: 215870
  chr14:74626548-74626636
  hypo

SEQ ID NO: 393330 - DNA, 161 bp, Homo sapiens; identical to SEQ ID NO: 215871
  chr14:74628386-74628547
  hypo

SEQ ID NO: 393331 - DNA, 39 bp, Homo sapiens; identical to SEQ ID NO: 266840
  chr14:75416062-75416101
  hypo

SEQ ID NO: 393332 - DNA, 71 bp, Homo sapiens; identical to SEQ ID NO: 215873
  chr14:75423075-75423146
  hypo

SEQ ID NO: 393333 - DNA, 196 bp, Homo sapiens; identical to SEQ ID NO: 203675
  chr14:75743668-75743864
  hypo

SEQ ID NO: 393334 - DNA, 103 bp, Homo sapiens; identical to SEQ ID NO: 266864
  chr14:77433610-77433713
  hypo

SEQ ID NO: 393335 - DNA, 88 bp, Homo sapiens; identical to SEQ ID NO: 384533
  chr14:77736779-77736867
  hypo

SEQ ID NO: 393336 - DNA, 97 bp, Homo sapiens; identical to SEQ ID NO: 290401
  chr14:77736883-77736980
  hypo

SEQ ID NO: 393337 - DNA, 101 bp, Homo sapiens; identical to SEQ ID NO: 266871
  chr14:77939354-77939455
  hypo

SEQ ID NO: 393338 - DNA, 37 bp, Homo sapiens; identical to SEQ ID NO: 215893
  chr14:78388714-78388751
  hypo

SEQ ID NO: 393339 - DNA, 37 bp, Homo sapiens; identical to SEQ ID NO: 266888
  chr14:81904519-81904556
  hypo

SEQ ID NO: 393340 - DNA, 102 bp, Homo sapiens; identical to SEQ ID NO: 266889
  chr14:82295806-82295908
  hypo

SEQ ID NO: 393341 - DNA, 34 bp, Homo sapiens; identical to SEQ ID NO: 266890
  chr14:86054380-86054414
  hypo

SEQ ID NO: 393342 - DNA, 33 bp, Homo sapiens; identical to SEQ ID NO: 215898
  chr14:88527464-88527497
  hypo

SEQ ID NO: 393343 - DNA, 147 bp, Homo sapiens; identical to SEQ ID NO: 266896
  chr14:88587438-88587585
  hypo

SEQ ID NO: 393344 - DNA, 36 bp, Homo sapiens; identical to SEQ ID NO: 215901
  chr14:88686789-88686825
  hypo

SEQ ID NO: 393345 - DNA, 503 bp, Homo sapiens; identical to SEQ ID NO: 224745
  chr14:89020910-89021413
  hypo

SEQ ID NO: 393346 - DNA, 725 bp, Homo sapiens; identical to SEQ ID NO: 290430
  chr14:89290490-89291215
  hypo

SEQ ID NO: 393347 - DNA, 181 bp, Homo sapiens; identical to SEQ ID NO: 266904
  chr14:89646424-89646605
  hypo

SEQ ID NO: 393348 - DNA, 182 bp, Homo sapiens; identical to SEQ ID NO: 224749
  chr14:90167708-90167890
  hypo

SEQ ID NO: 393349 - DNA, 109 bp, Homo sapiens; identical to SEQ ID NO: 318240
  chr14:90983360-90983469
  hypo

SEQ ID NO: 393350 - DNA, 103 bp, Homo sapiens; identical to SEQ ID NO: 266930
  chr14:91077534-91077637
  hypo

SEQ ID NO: 393351 - DNA, 131 bp, Homo sapiens; identical to SEQ ID NO: 215923
  chr14:91127198-91127329
  hypo

SEQ ID NO: 393352 - DNA, 408 bp, Homo sapiens; identical to SEQ ID NO: 266941
  chr14:91744077-91744485
  hypo

SEQ ID NO: 393353 - DNA, 67 bp, Homo sapiens; identical to SEQ ID NO: 318259
  chr14:91758193-91758260
  hypo

SEQ ID NO: 393354 - DNA, 100 bp, Homo sapiens; identical to SEQ ID NO: 215930
  chr14:91775792-91775892
  hypo

SEQ ID NO: 393355 - DNA, 189 bp, Homo sapiens; identical to SEQ ID NO: 215937
  chr14:91848934-91849123
  hypo

SEQ ID NO: 393356 - DNA, 207 bp, Homo sapiens; identical to SEQ ID NO: 215938
  chr14:91850943-91851150
  hypo

SEQ ID NO: 393357 - DNA, 44 bp, Homo sapiens; identical to SEQ ID NO: 266968
  chr14:92992506-92992550
  hypo

SEQ ID NO: 393358 - DNA, 100 bp, Homo sapiens; identical to SEQ ID NO: 266973
  chr14:93149543-93149643
  hypo

SEQ ID NO: 393359 - DNA, 189 bp, Homo sapiens; identical to SEQ ID NO: 215945
  chr14:93486022-93486211
  hypo

SEQ ID NO: 393360 - DNA, 281 bp, Homo sapiens; identical to SEQ ID NO: 266988
  chr14:93533287-93533568
  hypo

SEQ ID NO: 393361 - DNA, 127 bp, Homo sapiens; identical to SEQ ID NO: 318307
  chr14:93697057-93697184
  hypo

SEQ ID NO: 393362 - DNA, 175 bp, Homo sapiens; identical to SEQ ID NO: 267005
  chr14:94829568-94829743
  hypo

SEQ ID NO: 393363 - DNA, 124 bp, Homo sapiens; identical to SEQ ID NO: 267006
  chr14:95538387-95538511
  hypo

SEQ ID NO: 393364 - DNA, 186 bp, Homo sapiens; identical to SEQ ID NO: 267020
  chr14:96745877-96746063
  hypo

SEQ ID NO: 393365 - DNA, 214 bp, Homo sapiens; identical to SEQ ID NO: 267035
  chr14:99509012-99509226
  hypo

SEQ ID NO: 393366 - DNA, 330 bp, Homo sapiens; identical to SEQ ID NO: 267037
  chr14:99655545-99655875
  hypo

SEQ ID NO: 393367 - DNA, 97 bp, Homo sapiens; identical to SEQ ID NO: 267038
  chr14:99681714-99681811
  hypo

SEQ ID NO: 393368 - DNA, 241 bp, Homo sapiens; identical to SEQ ID NO: 267048
  chr14:99932772-99933013
  hypo

SEQ ID NO: 393369 - DNA, 643 bp, Homo sapiens; identical to SEQ ID NO: 389231
  chr14:100069898-100070541
  hypo

SEQ ID NO: 393370 - DNA, 177 bp, Homo sapiens; identical to SEQ ID NO: 267053
  chr14:100118139-100118316
  hypo

SEQ ID NO: 393371 - DNA, 87 bp, Homo sapiens; identical to SEQ ID NO: 215979
  chr14:100644135-100644222
  hypo

SEQ ID NO: 393372 - DNA, 228 bp, Homo sapiens; identical to SEQ ID NO: 267065
  chr14:100681486-100681714
  hypo

SEQ ID NO: 393373 - DNA, 244 bp, Homo sapiens; identical to SEQ ID NO: 267073
  chr14:100795242-100795486
  hypo

SEQ ID NO: 393374 - DNA, 42 bp, Homo sapiens; identical to SEQ ID NO: 267081
  chr14:100980664-100980706
  hypo

SEQ ID NO: 393375 - DNA, 193 bp, Homo sapiens; identical to SEQ ID NO: 267082
  chr14:100990019-100990212
  hypo

SEQ ID NO: 393376 - DNA, 1413 bp, Homo sapiens; identical to SEQ ID NO: 267083
  chr14:101003646-101005059
  hypo

SEQ ID NO: 393377 - DNA, 133 bp, Homo sapiens; identical to SEQ ID NO: 318430
  chr14:101506260-101506393
  hypo

SEQ ID NO: 393378 - DNA, 274 bp, Homo sapiens; identical to SEQ ID NO: 215997
  chr14:101579008-101579282
  hypo

SEQ ID NO: 393379 - DNA, 34 bp, Homo sapiens; identical to SEQ ID NO: 267110
  chr14:101727903-101727937
  hypo

SEQ ID NO: 393380 - DNA, 305 bp, Homo sapiens; identical to SEQ ID NO: 267116
  chr14:102053854-102054159
  hypo

SEQ ID NO: 393381 - DNA, 89 bp, Homo sapiens; identical to SEQ ID NO: 215999
  chr14:102093963-102094052
  hypo

SEQ ID NO: 393382 - DNA, 113 bp, Homo sapiens; identical to SEQ ID NO: 216000
  chr14:102094128-102094241
  hypo

SEQ ID NO: 393383 - DNA, 127 bp, Homo sapiens; identical to SEQ ID NO: 267120
  chr14:102186689-102186816
  hypo

SEQ ID NO: 393384 - DNA, 128 bp, Homo sapiens; identical to SEQ ID NO: 386592
  chr14:102230011-102230139
  hypo

SEQ ID NO: 393385 - DNA, 324 bp, Homo sapiens; identical to SEQ ID NO: 267129
  chr14:102330613-102330937
  hypo

SEQ ID NO: 393386 - DNA, 245 bp, Homo sapiens; identical to SEQ ID NO: 267135
  chr14:102361139-102361384
  hypo

SEQ ID NO: 393387 - DNA, 35 bp, Homo sapiens; identical to SEQ ID NO: 267144
  chr14:102450595-102450630
  hypo

SEQ ID NO: 393388 - DNA, 90 bp, Homo sapiens; identical to SEQ ID NO: 267157
  chr14:102668988-102669078
  hypo

SEQ ID NO: 393389 - DNA, 118 bp, Homo sapiens; identical to SEQ ID NO: 267158
  chr14:102680415-102680533
  hypo

SEQ ID NO: 393390 - DNA, 87 bp, Homo sapiens
  chr14:102681974-102682061
  hypo
ctttcagtaggagctcttttcctggctagagttcattgtctgcctactcctcatcttgaatagtgtttgcttaaggctttgtgctgg

SEQ ID NO: 393391 - DNA, 233 bp, Homo sapiens; identical to SEQ ID NO: 216018
  chr14:102793000-102793233
  hypo

SEQ ID NO: 393392 - DNA, 159 bp, Homo sapiens; identical to SEQ ID NO: 318498
  chr14:102909003-102909162
  hypo

SEQ ID NO: 393393 - DNA, 289 bp, Homo sapiens; identical to SEQ ID NO: 318499
  chr14:102909192-102909481
  hypo

SEQ ID NO: 393394 - DNA, 352 bp, Homo sapiens; identical to SEQ ID NO: 267171
  chr14:102961892-102962244
  hypo

SEQ ID NO: 393395 - DNA, 168 bp, Homo sapiens; identical to SEQ ID NO: 216021
  chr14:102966288-102966456
  hypo

SEQ ID NO: 393396 - DNA, 55 bp, Homo sapiens; identical to SEQ ID NO: 267190
  chr14:103366993-103367048
  hypo

SEQ ID NO: 393397 - DNA, 44 bp, Homo sapiens; identical to SEQ ID NO: 318531
  chr14:103416814-103416858
  hypo

SEQ ID NO: 393398 - DNA, 55 bp, Homo sapiens; identical to SEQ ID NO: 384547
  chr14:103430379-103430434
  hypo

SEQ ID NO: 393399 - DNA, 219 bp, Homo sapiens; identical to SEQ ID NO: 290575
  chr14:103593755-103593974
  hypo

SEQ ID NO: 393400 - DNA, 140 bp, Homo sapiens; identical to SEQ ID NO: 203773
  chr14:103594004-103594144
  hypo

SEQ ID NO: 393401 - DNA, 72 bp, Homo sapiens; identical to SEQ ID NO: 267223
  chr14:103697779-103697851
  hypo

SEQ ID NO: 393402 - DNA, 119 bp, Homo sapiens; identical to SEQ ID NO: 290588
  chr14:104094604-104094723
  hypo

SEQ ID NO: 393403 - DNA, 119 bp, Homo sapiens; identical to SEQ ID NO: 318582
  chr14:104121158-104121277
  hypo

SEQ ID NO: 393404 - DNA, 45 bp, Homo sapiens; identical to SEQ ID NO: 216072
  chr14:104335355-104335400
  hypo

SEQ ID NO: 393405 - DNA, 231 bp, Homo sapiens; identical to SEQ ID NO: 267264
  chr14:104570011-104570242
  hypo

SEQ ID NO: 393406 - DNA, 111 bp, Homo sapiens; identical to SEQ ID NO: 267265
  chr14:104571681-104571792
  hypo

SEQ ID NO: 393407 - DNA, 205 bp, Homo sapiens; identical to SEQ ID NO: 318630
  chr14:104770380-104770585
  hypo

SEQ ID NO: 393408 - DNA, 36 bp, Homo sapiens; identical to SEQ ID NO: 267293
  chr14:104813345-104813381
  hypo

SEQ ID NO: 393409 - DNA, 255 bp, Homo sapiens; identical to SEQ ID NO: 267295
  chr14:104839337-104839592
  hypo

SEQ ID NO: 393410 - DNA, 67 bp, Homo sapiens; identical to SEQ ID NO: 267303
  chr14:105119951-105120018
  hypo

SEQ ID NO: 393411 - DNA, 122 bp, Homo sapiens; identical to SEQ ID NO: 318647
  chr14:105157363-105157485
  hypo

SEQ ID NO: 393412 - DNA, 64 bp, Homo sapiens; identical to SEQ ID NO: 318648
  chr14:105174394-105174458
  hypo

SEQ ID NO: 393413 - DNA, 212 bp, Homo sapiens; identical to SEQ ID NO: 389242
  chr14:105195591-105195803
  hypo

SEQ ID NO: 393414 - DNA, 108 bp, Homo sapiens; identical to SEQ ID NO: 267317
  chr14:105225798-105225906
  hypo

SEQ ID NO: 393415 - DNA, 166 bp, Homo sapiens; identical to SEQ ID NO: 267318
  chr14:105226172-105226338
  hypo

SEQ ID NO: 393416 - DNA, 58 bp, Homo sapiens; identical to SEQ ID NO: 216099
  chr14:105245408-105245466
  hypo

SEQ ID NO: 393417 - DNA, 62 bp, Homo sapiens; identical to SEQ ID NO: 267334
  chr14:105351133-105351195
  hypo

SEQ ID NO: 393418 - DNA, 324 bp, Homo sapiens; identical to SEQ ID NO: 267355
  chr14:105621962-105622286
  hypo

SEQ ID NO: 393419 - DNA, 144 bp, Homo sapiens; identical to SEQ ID NO: 224807
  chr14:105647609-105647753
  hypo

SEQ ID NO: 393420 - DNA, 270 bp, Homo sapiens; identical to SEQ ID NO: 267360
  chr14:105690180-105690450
  hypo

SEQ ID NO: 393421 - DNA, 142 bp, Homo sapiens; identical to SEQ ID NO: 216123
  chr15:22966142-22966284
  hypo

SEQ ID NO: 393422 - DNA, 116 bp, Homo sapiens; identical to SEQ ID NO: 216124
  chr15:22968266-22968382
  hypo

SEQ ID NO: 393423 - DNA, 103 bp, Homo sapiens; identical to SEQ ID NO: 216126
  chr15:22979738-22979841
  hypo

SEQ ID NO: 393424 - DNA, 149 bp, Homo sapiens; identical to SEQ ID NO: 267399
  chr15:28358254-28358403
  hypo

SEQ ID NO: 393425 - DNA, 50 bp, Homo sapiens; identical to SEQ ID NO: 318752
  chr15:28389777-28389827
  hypo

SEQ ID NO: 393426 - DNA, 65 bp, Homo sapiens; identical to SEQ ID NO: 216133
  chr15:28390033-28390098
  hypo

SEQ ID NO: 393427 - DNA, 86 bp, Homo sapiens; identical to SEQ ID NO: 216136
  chr15:28900534-28900620
  hypo

SEQ ID NO: 393428 - DNA, 152 bp, Homo sapiens; identical to SEQ ID NO: 216137
  chr15:29101155-29101307
  hypo

SEQ ID NO: 393429 - DNA, 350 bp, Homo sapiens; identical to SEQ ID NO: 216141
  chr15:29236505-29236855
  hypo

SEQ ID NO: 393430 - DNA, 157 bp, Homo sapiens; identical to SEQ ID NO: 267420
  chr15:29357222-29357379
  hypo

SEQ ID NO: 393431 - DNA, 187 bp, Homo sapiens; identical to SEQ ID NO: 267426
  chr15:29411084-29411271
  hypo

SEQ ID NO: 393432 - DNA, 65 bp, Homo sapiens; identical to SEQ ID NO: 267434
  chr15:29487547-29487612
  hypo

SEQ ID NO: 393433 - DNA, 75 bp, Homo sapiens; identical to SEQ ID NO: 267449
  chr15:31490444-31490519
  hypo

SEQ ID NO: 393434 - DNA, 457 bp, Homo sapiens; identical to SEQ ID NO: 267462
  chr15:31776581-31777038
  hypo

SEQ ID NO: 393435 - DNA, 99 bp, Homo sapiens; identical to SEQ ID NO: 389247
  chr15:33603879-33603978
  hypo

SEQ ID NO: 393436 - DNA, 146 bp, Homo sapiens; identical to SEQ ID NO: 267489
  chr15:36870094-36870240
  hypo

SEQ ID NO: 393437 - DNA, 217 bp, Homo sapiens; identical to SEQ ID NO: 267493
  chr15:39703028-39703245
  hypo

SEQ ID NO: 393438 - DNA, 218 bp, Homo sapiens; identical to SEQ ID NO: 267494
  chr15:39742868-39743086
  hypo

SEQ ID NO: 393439 - DNA, 158 bp, Homo sapiens; identical to SEQ ID NO: 216182
  chr15:39881427-39881585
  hypo

SEQ ID NO: 393440 - DNA, 118 bp, Homo sapiens; identical to SEQ ID NO: 318869
  chr15:40368064-40368182
  hypo

SEQ ID NO: 393441 - DNA, 36 bp, Homo sapiens; identical to SEQ ID NO: 203836
  chr15:40559555-40559591
  hypo

SEQ ID NO: 393442 - DNA, 43 bp, Homo sapiens; identical to SEQ ID NO: 267512
  chr15:40701565-40701608
  hypo

SEQ ID NO: 393443 - DNA, 156 bp, Homo sapiens; identical to SEQ ID NO: 224840
  chr15:41136285-41136441
  hypo

SEQ ID NO: 393444 - DNA, 200 bp, Homo sapiens; identical to SEQ ID NO: 224842
  chr15:42112223-42112423
  hypo

SEQ ID NO: 393445 - DNA, 120 bp, Homo sapiens; identical to SEQ ID NO: 267539
  chr15:42151063-42151183
  hypo

SEQ ID NO: 393446 - DNA, 71 bp, Homo sapiens; identical to SEQ ID NO: 216206
  chr15:42167406-42167477
  hypo

SEQ ID NO: 393447 - DNA, 101 bp, Homo sapiens; identical to SEQ ID NO: 267548
  chr15:42211495-42211596
  hypo

SEQ ID NO: 393448 - DNA, 110 bp, Homo sapiens; identical to SEQ ID NO: 216208
  chr15:42362997-42363107
  hypo

SEQ ID NO: 393449 - DNA, 44 bp, Homo sapiens; identical to SEQ ID NO: 216209
  chr15:42388224-42388268
  hypo

SEQ ID NO: 393450 - DNA, 192 bp, Homo sapiens; identical to SEQ ID NO: 216210
  chr15:42434610-42434802
  hypo

SEQ ID NO: 393451 - DNA, 76 bp, Homo sapiens; identical to SEQ ID NO: 267562
  chr15:42446969-42447045
  hypo

SEQ ID NO: 393452 - DNA, 119 bp, Homo sapiens; identical to SEQ ID NO: 216212
  chr15:42452409-42452528
  hypo

SEQ ID NO: 393453 - DNA, 68 bp, Homo sapiens; identical to SEQ ID NO: 267571
  chr15:42696332-42696400
  hypo

SEQ ID NO: 393454 - DNA, 180 bp, Homo sapiens; identical to SEQ ID NO: 267572
  chr15:42711709-42711889
  hypo

SEQ ID NO: 393455 - DNA, 33 bp, Homo sapiens; identical to SEQ ID NO: 267580
  chr15:43124802-43124835
  hypo

SEQ ID NO: 393456 - DNA, 37 bp, Homo sapiens; identical to SEQ ID NO: 267600
  chr15:44823850-44823887
  hypo

SEQ ID NO: 393457 - DNA, 31 bp, Homo sapiens; identical to SEQ ID NO: 267608
  chr15:45450627-45450658
  hypo

SEQ ID NO: 393458 - DNA, 120 bp, Homo sapiens; identical to SEQ ID NO: 267613
  chr15:45809769-45809889
  hypo

SEQ ID NO: 393459 - DNA, 194 bp, Homo sapiens; identical to SEQ ID NO: 267617
  chr15:48707764-48707958
  hypo

SEQ ID NO: 393460 - DNA, 37 bp, Homo sapiens; identical to SEQ ID NO: 216231
  chr15:51016480-51016517
  hypo

SEQ ID NO: 393461 - DNA, 58 bp, Homo sapiens; identical to SEQ ID NO: 216232
  chr15:51176888-51176946
  hypo

SEQ ID NO: 393462 - DNA, 120 bp, Homo sapiens; identical to SEQ ID NO: 267627
  chr15:51182345-51182465
  hypo

SEQ ID NO: 393463 - DNA, 76 bp, Homo sapiens; identical to SEQ ID NO: 389267
  chr15:51633890-51633966
  hypo

SEQ ID NO: 393464 - DNA, 153 bp, Homo sapiens; identical to SEQ ID NO: 290808
  chr15:51634175-51634328
  hypo

SEQ ID NO: 393465 - DNA, 197 bp, Homo sapiens; identical to SEQ ID NO: 267630
  chr15:51659607-51659804
  hypo

SEQ ID NO: 393466 - DNA, 95 bp, Homo sapiens; identical to SEQ ID NO: 267634
  chr15:52310149-52310244
  hypo

SEQ ID NO: 393467 - DNA, 510 bp, Homo sapiens; identical to SEQ ID NO: 389272
  chr15:52820415-52820925
  hypo

SEQ ID NO: 393468 - DNA, 79 bp, Homo sapiens; identical to SEQ ID NO: 290832
  chr15:56035510-56035589
  hypo

SEQ ID NO: 393469 - DNA, 82 bp, Homo sapiens; identical to SEQ ID NO: 125767
  chr15:56035677-56035759
  hypo

SEQ ID NO: 393470 - DNA, 184 bp, Homo sapiens; identical to SEQ ID NO: 267651
  chr15:56140361-56140545
  hypo

SEQ ID NO: 393471 - DNA, 87 bp, Homo sapiens; identical to SEQ ID NO: 216241
  chr15:56170930-56171017
  hypo

SEQ ID NO: 393472 - DNA, 166 bp, Homo sapiens; identical to SEQ ID NO: 267667
  chr15:58761931-58762097
  hypo

SEQ ID NO: 393473 - DNA, 40 bp, Homo sapiens; identical to SEQ ID NO: 267673
  chr15:59291804-59291844
  hypo

SEQ ID NO: 393474 - DNA, 61 bp, Homo sapiens; identical to SEQ ID NO: 267674
  chr15:59450930-59450991
  hypo

SEQ ID NO: 393475 - DNA, 102 bp, Homo sapiens; identical to SEQ ID NO: 267679
  chr15:59561665-59561767
  hypo

SEQ ID NO: 393476 - DNA, 97 bp, Homo sapiens; identical to SEQ ID NO: 203912
  chr15:62456139-62456236
  hypo

SEQ ID NO: 393477 - DNA, 204 bp, Homo sapiens; identical to SEQ ID NO: 389283
  chr15:62456395-62456599
  hypo

SEQ ID NO: 393478 - DNA, 41 bp, Homo sapiens; identical to SEQ ID NO: 267700
  chr15:62753414-62753455
  hypo

SEQ ID NO: 393479 - DNA, 99 bp, Homo sapiens; identical to SEQ ID NO: 216266
  chr15:62776552-62776651
  hypo

SEQ ID NO: 393480 - DNA, 152 bp, Homo sapiens; identical to SEQ ID NO: 267704
  chr15:62779386-62779538
  hypo

SEQ ID NO: 393481 - DNA, 73 bp, Homo sapiens; identical to SEQ ID NO: 216271
  chr15:62828095-62828168
  hypo

SEQ ID NO: 393482 - DNA, 97 bp, Homo sapiens; identical to SEQ ID NO: 216274
  chr15:62959085-62959182
  hypo

SEQ ID NO: 393483 - DNA, 35 bp, Homo sapiens; identical to SEQ ID NO: 267717
  chr15:62967409-62967444
  hypo

SEQ ID NO: 393484 - DNA, 161 bp, Homo sapiens; identical to SEQ ID NO: 267724
  chr15:63028501-63028662
  hypo

SEQ ID NO: 393485 - DNA, 89 bp, Homo sapiens; identical to SEQ ID NO: 216294
  chr15:63245891-63245980
  hypo

SEQ ID NO: 393486 - DNA, 136 bp, Homo sapiens; identical to SEQ ID NO: 267758
  chr15:63647633-63647769
  hypo

SEQ ID NO: 393487 - DNA, 62 bp, Homo sapiens; identical to SEQ ID NO: 216296
  chr15:63753619-63753681
  hypo

SEQ ID NO: 393488 - DNA, 88 bp, Homo sapiens; identical to SEQ ID NO: 216306
  chr15:64865096-64865184
  hypo

SEQ ID NO: 393489 - DNA, 102 bp, Homo sapiens; identical to SEQ ID NO: 216308
  chr15:65119640-65119742
  hypo

SEQ ID NO: 393490 - DNA, 195 bp, Homo sapiens; identical to SEQ ID NO: 267787
  chr15:65538640-65538835
  hypo

SEQ ID NO: 393491 - DNA, 159 bp, Homo sapiens; identical to SEQ ID NO: 319194
  chr15:66964083-66964242
  hypo

SEQ ID NO: 393492 - DNA, 77 bp, Homo sapiens; identical to SEQ ID NO: 267809
  chr15:67481788-67481865
  hypo

SEQ ID NO: 393493 - DNA, 341 bp, Homo sapiens; identical to SEQ ID NO: 267812
  chr15:67757461-67757802
  hypo

SEQ ID NO: 393494 - DNA, 258 bp, Homo sapiens; identical to SEQ ID NO: 216323
  chr15:69002974-69003232
  hypo

SEQ ID NO: 393495 - DNA, 113 bp, Homo sapiens; identical to SEQ ID NO: 267832
  chr15:69285723-69285836
  hypo

SEQ ID NO: 393496 - DNA, 214 bp, Homo sapiens; identical to SEQ ID NO: 216330
  chr15:69590152-69590366
  hypo

SEQ ID NO: 393497 - DNA, 71 bp, Homo sapiens; identical to SEQ ID NO: 319253
  chr15:70347466-70347537
  hypo

SEQ ID NO: 393498 - DNA, 33 bp, Homo sapiens; identical to SEQ ID NO: 319254
  chr15:70347575-70347608
  hypo

SEQ ID NO: 393499 - DNA, 76 bp, Homo sapiens; identical to SEQ ID NO: 203948
  chr15:70391279-70391355
  hypo

SEQ ID NO: 393500 - DNA, 31 bp, Homo sapiens; identical to SEQ ID NO: 216343
  chr15:71466447-71466478
  hypo

SEQ ID NO: 393501 - DNA, 99 bp, Homo sapiens; identical to SEQ ID NO: 267870
  chr15:71966264-71966363
  hypo

SEQ ID NO: 393502 - DNA, 147 bp, Homo sapiens; identical to SEQ ID NO: 267877
  chr15:72109741-72109888
  hypo

SEQ ID NO: 393503 - DNA, 37 bp, Homo sapiens; identical to SEQ ID NO: 267882
  chr15:72525047-72525084
  hypo

SEQ ID NO: 393504 - DNA, 37 bp, Homo sapiens; identical to SEQ ID NO: 267883
  chr15:72525324-72525361
  hypo

SEQ ID NO: 393505 - DNA, 164 bp, Homo sapiens; identical to SEQ ID NO: 224892
  chr15:73344008-73344172
  hypo

SEQ ID NO: 393506 - DNA, 57 bp, Homo sapiens; identical to SEQ ID NO: 267893
  chr15:73634701-73634758
  hypo

SEQ ID NO: 393507 - DNA, 99 bp, Homo sapiens; identical to SEQ ID NO: 267894
  chr15:73635760-73635859
  hypo

SEQ ID NO: 393508 - DNA, 71 bp, Homo sapiens; identical to SEQ ID NO: 319314
  chr15:74903825-74903896
  hypo

SEQ ID NO: 393509 - DNA, 71 bp, Homo sapiens; identical to SEQ ID NO: 267909
  chr15:74912418-74912489
  hypo

SEQ ID NO: 393510 - DNA, 125 bp, Homo sapiens; identical to SEQ ID NO: 267910
  chr15:74913937-74914062
  hypo

SEQ ID NO: 393511 - DNA, 47 bp, Homo sapiens; identical to SEQ ID NO: 267913
  chr15:75093277-75093324
  hypo

SEQ ID NO: 393512 - DNA, 42 bp, Homo sapiens; identical to SEQ ID NO: 216360
  chr15:75158924-75158966
  hypo

SEQ ID NO: 393513 - DNA, 103 bp, Homo sapiens; identical to SEQ ID NO: 267922
  chr15:75498358-75498461
  hypo

SEQ ID NO: 393514 - DNA, 151 bp, Homo sapiens; identical to SEQ ID NO: 267924
  chr15:75594676-75594827
  hypo

SEQ ID NO: 393515 - DNA, 205 bp, Homo sapiens; identical to SEQ ID NO: 267931
  chr15:75949260-75949465
  hypo

SEQ ID NO: 393516 - DNA, 126 bp, Homo sapiens; identical to SEQ ID NO: 216370
  chr15:75981377-75981503
  hypo

SEQ ID NO: 393517 - DNA, 153 bp, Homo sapiens; identical to SEQ ID NO: 267933
  chr15:75997150-75997303
  hypo

SEQ ID NO: 393518 - DNA, 42 bp, Homo sapiens; identical to SEQ ID NO: 267938
  chr15:77072238-77072280
  hypo

SEQ ID NO: 393519 - DNA, 120 bp, Homo sapiens; identical to SEQ ID NO: 267939
  chr15:77072340-77072460
  hypo

SEQ ID NO: 393520 - DNA, 31 bp, Homo sapiens; identical to SEQ ID NO: 267943
  chr15:77358028-77358059
  hypo

SEQ ID NO: 393521 - DNA, 183 bp, Homo sapiens; identical to SEQ ID NO: 267944
  chr15:77473436-77473619
  hypo

SEQ ID NO: 393522 - DNA, 95 bp, Homo sapiens; identical to SEQ ID NO: 267952
  chr15:78181925-78182020
  hypo

SEQ ID NO: 393523 - DNA, 171 bp, Homo sapiens; identical to SEQ ID NO: 216376
  chr15:78268339-78268510
  hypo

SEQ ID NO: 393524 - DNA, 38 bp, Homo sapiens; identical to SEQ ID NO: 267959
  chr15:78295565-78295603
  hypo

SEQ ID NO: 393525 - DNA, 93 bp, Homo sapiens; identical to SEQ ID NO: 267960
  chr15:78403530-78403623
  hypo

SEQ ID NO: 393526 - DNA, 79 bp, Homo sapiens; identical to SEQ ID NO: 216377
  chr15:78450091-78450170
  hypo

SEQ ID NO: 393527 - DNA, 81 bp, Homo sapiens; identical to SEQ ID NO: 216381
  chr15:78510187-78510268
  hypo

SEQ ID NO: 393528 - DNA, 133 bp, Homo sapiens; identical to SEQ ID NO: 267978
  chr15:79050495-79050628
  hypo

SEQ ID NO: 393529 - DNA, 239 bp, Homo sapiens; identical to SEQ ID NO: 267979
  chr15:79055678-79055917
  hypo

SEQ ID NO: 393530 - DNA, 232 bp, Homo sapiens; identical to SEQ ID NO: 267980
  chr15:79056239-79056471
  hypo

SEQ ID NO: 393531 - DNA, 103 bp, Homo sapiens; identical to SEQ ID NO: 267986
  chr15:79222387-79222490
  hypo

SEQ ID NO: 393532 - DNA, 125 bp, Homo sapiens; identical to SEQ ID NO: 216387
  chr15:79309573-79309698
  hypo

SEQ ID NO: 393533 - DNA, 133 bp, Homo sapiens; identical to SEQ ID NO: 267988
  chr15:79310062-79310195
  hypo

SEQ ID NO: 393534 - DNA, 223 bp, Homo sapiens; identical to SEQ ID NO: 267990
  chr15:80216925-80217148
  hypo

SEQ ID NO: 393535 - DNA, 79 bp, Homo sapiens; identical to SEQ ID NO: 267991
  chr15:80217366-80217445
  hypo

SEQ ID NO: 393536 - DNA, 229 bp, Homo sapiens; identical to SEQ ID NO: 268004
  chr15:81224341-81224570
  hypo

SEQ ID NO: 393537 - DNA, 328 bp, Homo sapiens; identical to SEQ ID NO: 224922
  chr15:85143661-85143989
  hypo

SEQ ID NO: 393538 - DNA, 37 bp, Homo sapiens
  chr15:85200368-85200405
  hypo
ctgggccctcctgacattggagcaggggcccggctca

SEQ ID NO: 393539 - DNA, 82 bp, Homo sapiens; identical to SEQ ID NO: 268022
  chr15:85401076-85401158
  hypo

SEQ ID NO: 393540 - DNA, 89 bp, Homo sapiens; identical to SEQ ID NO: 216405
  chr15:85478275-85478364
  hypo

SEQ ID NO: 393541 - DNA, 266 bp, Homo sapiens; identical to SEQ ID NO: 268040
  chr15:89179287-89179553
  hypo

SEQ ID NO: 393542 - DNA, 186 bp, Homo sapiens; identical to SEQ ID NO: 216411
  chr15:89404008-89404194
  hypo

SEQ ID NO: 393543 - DNA, 35 bp, Homo sapiens; identical to SEQ ID NO: 268045
  chr15:89605894-89605929
  hypo

SEQ ID NO: 393544 - DNA, 45 bp, Homo sapiens; identical to SEQ ID NO: 268047
  chr15:89807367-89807412
  hypo

SEQ ID NO: 393545 - DNA, 41 bp, Homo sapiens; identical to SEQ ID NO: 268056
  chr15:90317994-90318035
  hypo

SEQ ID NO: 393546 - DNA, 32 bp, Homo sapiens; identical to SEQ ID NO: 268067
  chr15:90702246-90702278
  hypo

SEQ ID NO: 393547 - DNA, 36 bp, Homo sapiens; identical to SEQ ID NO: 216427
  chr15:90729568-90729604
  hypo

SEQ ID NO: 393548 - DNA, 202 bp, Homo sapiens; identical to SEQ ID NO: 216429
  chr15:90753863-90754065
  hypo

SEQ ID NO: 393549 - DNA, 200 bp, Homo sapiens; identical to SEQ ID NO: 268076
  chr15:90806189-90806389
  hypo

SEQ ID NO: 393550 - DNA, 60 bp, Homo sapiens; identical to SEQ ID NO: 291143
  chr15:90891947-90892007
  hypo

SEQ ID NO: 393551 - DNA, 80 bp, Homo sapiens; identical to SEQ ID NO: 268081
  chr15:91162925-91163005
  hypo

SEQ ID NO: 393552 - DNA, 72 bp, Homo sapiens; identical to SEQ ID NO: 204036
  chr15:91414358-91414430
  hypo

SEQ ID NO: 393553 - DNA, 109 bp, Homo sapiens; identical to SEQ ID NO: 319530
  chr15:91500831-91500940
  hypo

SEQ ID NO: 393554 - DNA, 74 bp, Homo sapiens; identical to SEQ ID NO: 268106
  chr15:93176138-93176212
  hypo

SEQ ID NO: 393555 - DNA, 180 bp, Homo sapiens; identical to SEQ ID NO: 268108
  chr15:93316009-93316189
  hypo

SEQ ID NO: 393556 - DNA, 120 bp, Homo sapiens; identical to SEQ ID NO: 216448
  chr15:93350343-93350463
  hypo

SEQ ID NO: 393557 - DNA, 81 bp, Homo sapiens; identical to SEQ ID NO: 216452
  chr15:93567908-93567989
  hypo

SEQ ID NO: 393558 - DNA, 665 bp, Homo sapiens; identical to SEQ ID NO: 268121
  chr15:93588122-93588787
  hypo

SEQ ID NO: 393559 - DNA, 300 bp, Homo sapiens; identical to SEQ ID NO: 384586
  chr15:94774274-94774574
  hypo

SEQ ID NO: 393560 - DNA, 220 bp, Homo sapiens; identical to SEQ ID NO: 268131
  chr15:94778462-94778682
  hypo

SEQ ID NO: 393561 - DNA, 43 bp, Homo sapiens; identical to SEQ ID NO: 216459
  chr15:94794563-94794606
  hypo

SEQ ID NO: 393562 - DNA, 76 bp, Homo sapiens; identical to SEQ ID NO: 268133
  chr15:94841669-94841745
  hypo

SEQ ID NO: 393563 - DNA, 56 bp, Homo sapiens; identical to SEQ ID NO: 268136
  chr15:95019094-95019150
  hypo

SEQ ID NO: 393564 - DNA, 390 bp, Homo sapiens; identical to SEQ ID NO: 268138
  chr15:95398763-95399153
  hypo

SEQ ID NO: 393565 - DNA, 34 bp, Homo sapiens; identical to SEQ ID NO: 268140
  chr15:96817336-96817370
  hypo

SEQ ID NO: 393566 - DNA, 377 bp, Homo sapiens; identical to SEQ ID NO: 389321
  chr15:96873421-96873798
  hypo

SEQ ID NO: 393567 - DNA, 33 bp, Homo sapiens; identical to SEQ ID NO: 268152
  chr15:99190315-99190348
  hypo

SEQ ID NO: 393568 - DNA, 570 bp, Homo sapiens; identical to SEQ ID NO: 224952
  chr15:99192162-99192732
  hypo

SEQ ID NO: 393569 - DNA, 76 bp, Homo sapiens; identical to SEQ ID NO: 268154
  chr15:99215806-99215882
  hypo

SEQ ID NO: 393570 - DNA, 38 bp, Homo sapiens; identical to SEQ ID NO: 216472
  chr15:99340602-99340640
  hypo

SEQ ID NO: 393571 - DNA, 172 bp, Homo sapiens; identical to SEQ ID NO: 268165
  chr15:99352651-99352823
  hypo

SEQ ID NO: 393572 - DNA, 120 bp, Homo sapiens; identical to SEQ ID NO: 216473
  chr15:99354751-99354871
  hypo

SEQ ID NO: 393573 - DNA, 108 bp, Homo sapiens; identical to SEQ ID NO: 216476
  chr15:99440185-99440293
  hypo

SEQ ID NO: 393574 - DNA, 97 bp, Homo sapiens; identical to SEQ ID NO: 268189
  chr15:99954583-99954680
  hypo

SEQ ID NO: 393575 - DNA, 42 bp, Homo sapiens; identical to SEQ ID NO: 204068
  chr15:100273862-100273904
  hypo

SEQ ID NO: 393576 - DNA, 48 bp, Homo sapiens; identical to SEQ ID NO: 224955
  chr15:100273946-100273994
  hypo

SEQ ID NO: 393577 - DNA, 92 bp, Homo sapiens; identical to SEQ ID NO: 216486
  chr15:100274190-100274282
  hypo

SEQ ID NO: 393578 - DNA, 209 bp, Homo sapiens; identical to SEQ ID NO: 216487
  chr15:100649031-100649240
  hypo

SEQ ID NO: 393579 - DNA, 35 bp, Homo sapiens; identical to SEQ ID NO: 268203
  chr15:101194866-101194901
  hypo

SEQ ID NO: 393580 - DNA, 196 bp, Homo sapiens; identical to SEQ ID NO: 216497
  chr15:101862667-101862863
  hypo

SEQ ID NO: 393581 - DNA, 32 bp, Homo sapiens; identical to SEQ ID NO: 216500
  chr15:101949766-101949798
  hypo

SEQ ID NO: 393582 - DNA, 172 bp, Homo sapiens; identical to SEQ ID NO: 216502
  chr15:102004885-102005057
  hypo

SEQ ID NO: 393583 - DNA, 143 bp, Homo sapiens; identical to SEQ ID NO: 216515
  chr16:136642-136785
  hypo

SEQ ID NO: 393584 - DNA, 89 bp, Homo sapiens; identical to SEQ ID NO: 268262
  chr16:255869-255958
  hypo

SEQ ID NO: 393585 - DNA, 50 bp, Homo sapiens; identical to SEQ ID NO: 268268
  chr16:316210-316260
  hypo

SEQ ID NO: 393586 - DNA, 134 bp, Homo sapiens; identical to SEQ ID NO: 216522
  chr16:354255-354389
  hypo

SEQ ID NO: 393587 - DNA, 190 bp, Homo sapiens; identical to SEQ ID NO: 216524
  chr16:360132-360322
  hypo

SEQ ID NO: 393588 - DNA, 92 bp, Homo sapiens; identical to SEQ ID NO: 268289
  chr16:439056-439148
  hypo

SEQ ID NO: 393589 - DNA, 39 bp, Homo sapiens; identical to SEQ ID NO: 386687
  chr16:468014-468053
  hypo

SEQ ID NO: 393590 - DNA, 568 bp, Homo sapiens; identical to SEQ ID NO: 268300
  chr16:525278-525846
  hypo

SEQ ID NO: 393591 - DNA, 165 bp, Homo sapiens; identical to SEQ ID NO: 216542
  chr16:588070-588235
  hypo

SEQ ID NO: 393592 - DNA, 40 bp, Homo sapiens; identical to SEQ ID NO: 216546
  chr16:613512-613552
  hypo

SEQ ID NO: 393593 - DNA, 785 bp, Homo sapiens; identical to SEQ ID NO: 268321
  chr16:623991-624776
  hypo

SEQ ID NO: 393594 - DNA, 44 bp, Homo sapiens
  chr16:666664-666708
  hypo
ccctccctaacaccaaccttggcagttcctgggctgcagtaagc

SEQ ID NO: 393595 - DNA, 145 bp, Homo sapiens; identical to SEQ ID NO: 268334
  chr16:689010-689155
  hypo

SEQ ID NO: 393596 - DNA, 50 bp, Homo sapiens; identical to SEQ ID NO: 204077
  chr16:717960-718010
  hypo

SEQ ID NO: 393597 - DNA, 518 bp, Homo sapiens; identical to SEQ ID NO: 216565
  chr16:767027-767545
  hypo

SEQ ID NO: 393598 - DNA, 105 bp, Homo sapiens; identical to SEQ ID NO: 224977
  chr16:778111-778216
  hypo

SEQ ID NO: 393599 - DNA, 477 bp, Homo sapiens; identical to SEQ ID NO: 268354
  chr16:816636-817113
  hypo

SEQ ID NO: 393600 - DNA, 299 bp, Homo sapiens; identical to SEQ ID NO: 319828
  chr16:898860-899159
  hypo

SEQ ID NO: 393601 - DNA, 41 bp, Homo sapiens; identical to SEQ ID NO: 216574
  chr16:899189-899230
  hypo

SEQ ID NO: 393602 - DNA, 220 bp, Homo sapiens; identical to SEQ ID NO: 319833
  chr16:929566-929786
  hypo

SEQ ID NO: 393603 - DNA, 573 bp, Homo sapiens; identical to SEQ ID NO: 319860
  chr16:1075861-1076434
  hypo

SEQ ID NO: 393604 - DNA, 227 bp, Homo sapiens; identical to SEQ ID NO: 268402
  chr16:1199857-1200084
  hypo

SEQ ID NO: 393605 - DNA, 39 bp, Homo sapiens; identical to SEQ ID NO: 268426
  chr16:1341419-1341458
  hypo

SEQ ID NO: 393606 - DNA, 100 bp, Homo sapiens; identical to SEQ ID NO: 268431
  chr16:1370327-1370427
  hypo

SEQ ID NO: 393607 - DNA, 145 bp, Homo sapiens; identical to SEQ ID NO: 268433
  chr16:1390248-1390393
  hypo

SEQ ID NO: 393608 - DNA, 145 bp, Homo sapiens; identical to SEQ ID NO: 268441
  chr16:1416341-1416486
  hypo

SEQ ID NO: 393609 - DNA, 248 bp, Homo sapiens; identical to SEQ ID NO: 268447
  chr16:1435412-1435660
  hypo

SEQ ID NO: 393610 - DNA, 59 bp, Homo sapiens
  chr16:1472168-1472227
  hypo
aagcacaacaacaacaaaaacctaagctcaaagatcagtgcctgaaatatttagcagag

SEQ ID NO: 393611 - DNA, 67 bp, Homo sapiens; identical to SEQ ID NO: 216621
  chr16:1613977-1614044
  hypo

SEQ ID NO: 393612 - DNA, 434 bp, Homo sapiens; identical to SEQ ID NO: 224987
  chr16:1660449-1660883
  hypo

SEQ ID NO: 393613 - DNA, 161 bp, Homo sapiens; identical to SEQ ID NO: 319979
  chr16:1739991-1740152
  hypo

SEQ ID NO: 393614 - DNA, 83 bp, Homo sapiens; identical to SEQ ID NO: 319980
  chr16:1740206-1740289
  hypo

SEQ ID NO: 393615 - DNA, 68 bp, Homo sapiens; identical to SEQ ID NO: 268495
  chr16:1748235-1748303
  hypo

SEQ ID NO: 393616 - DNA, 90 bp, Homo sapiens; identical to SEQ ID NO: 268498
  chr16:1751083-1751173
  hypo

SEQ ID NO: 393617 - DNA, 34 bp, Homo sapiens; identical to SEQ ID NO: 268504
  chr16:1807114-1807148
  hypo

SEQ ID NO: 393618 - DNA, 307 bp, Homo sapiens; identical to SEQ ID NO: 216642
  chr16:1818407-1818714
  hypo

SEQ ID NO: 393619 - DNA, 308 bp, Homo sapiens; identical to SEQ ID NO: 216649
  chr16:2049434-2049742
  hypo

SEQ ID NO: 393620 - DNA, 71 bp, Homo sapiens; identical to SEQ ID NO: 268553
  chr16:2144843-2144914
  hypo

SEQ ID NO: 393621 - DNA, 50 bp, Homo sapiens; identical to SEQ ID NO: 268576
  chr16:2294342-2294392
  hypo

SEQ ID NO: 393622 - DNA, 160 bp, Homo sapiens; identical to SEQ ID NO: 268580
  chr16:2339391-2339551
  hypo

SEQ ID NO: 393623 - DNA, 396 bp, Homo sapiens; identical to SEQ ID NO: 268581
  chr16:2347405-2347801
  hypo

SEQ ID NO: 393624 - DNA, 209 bp, Homo sapiens; identical to SEQ ID NO: 268604
  chr16:2716878-2717087
  hypo

SEQ ID NO: 393625 - DNA, 165 bp, Homo sapiens; identical to SEQ ID NO: 320120
  chr16:2819593-2819758
  hypo

SEQ ID NO: 393626 - DNA, 232 bp, Homo sapiens; identical to SEQ ID NO: 268615
  chr16:2975080-2975312
  hypo

SEQ ID NO: 393627 - DNA, 65 bp, Homo sapiens; identical to SEQ ID NO: 268617
  chr16:3051091-3051156
  hypo

SEQ ID NO: 393628 - DNA, 35 bp, Homo sapiens; identical to SEQ ID NO: 268619
  chr16:3053165-3053200
  hypo

SEQ ID NO: 393629 - DNA, 37 bp, Homo sapiens; identical to SEQ ID NO: 291287
  chr16:3097009-3097046
  hypo

SEQ ID NO: 393630 - DNA, 469 bp, Homo sapiens
  chr16:3139975-3140444
  hypo
gctggaagctctggccgcagtgggagcacaggacatcggtcagtggcggcgcttcggccttactctcaggagcgcagggcggcttctggtcctgggcgtgcgccagcaggtgctgcacaaggctggcgcggcgctggaagccgcggccgcactctgcgcacaggaaggcgggttcggaggagtgggtcagcaggtgcttgctcaggtgcgagctctggcggaagcggtggccgcacaggtggcaggcgtgcggccgctcgtccgtgtgagtgcgcatgtgcagcttgagaatggagctgcggccgaagctcttcccgcagcaaaggcacaggaaggagcgcccagccgggtgcgagcgcagctggtgcgccttcaggcgagacagctgcgggaagctcaccccgcagtccgcgcagatgaactgcaactccggattgggctcggggacgccctcagccactttgacctc

SEQ ID NO: 393631 - DNA, 187 bp, Homo sapiens; identical to SEQ ID NO: 216701
  chr16:3189117-3189304
  hypo

SEQ ID NO: 393632 - DNA, 137 bp, Homo sapiens; identical to SEQ ID NO: 216707
  chr16:3515977-3516114
  hypo

SEQ ID NO: 393633 - DNA, 145 bp, Homo sapiens; identical to SEQ ID NO: 268637
  chr16:3542403-3542548
  hypo

SEQ ID NO: 393634 - DNA, 118 bp, Homo sapiens; identical to SEQ ID NO: 268641
  chr16:3635039-3635157
  hypo

SEQ ID NO: 393635 - DNA, 121 bp, Homo sapiens; identical to SEQ ID NO: 268643
  chr16:3704780-3704901
  hypo

SEQ ID NO: 393636 - DNA, 146 bp, Homo sapiens; identical to SEQ ID NO: 268649
  chr16:3777135-3777281
  hypo

SEQ ID NO: 393637 - DNA, 766 bp, Homo sapiens; identical to SEQ ID NO: 268652
  chr16:3781796-3782562
  hypo

SEQ ID NO: 393638 - DNA, 237 bp, Homo sapiens; identical to SEQ ID NO: 268667
  chr16:4021225-4021462
  hypo

SEQ ID NO: 393639 - DNA, 138 bp, Homo sapiens; identical to SEQ ID NO: 268668
  chr16:4029240-4029378
  hypo

SEQ ID NO: 393640 - DNA, 273 bp, Homo sapiens; identical to SEQ ID NO: 268672
  chr16:4160070-4160343
  hypo

SEQ ID NO: 393641 - DNA, 482 bp, Homo sapiens; identical to SEQ ID NO: 268680
  chr16:4268166-4268648
  hypo

SEQ ID NO: 393642 - DNA, 204 bp, Homo sapiens; identical to SEQ ID NO: 320203
  chr16:4385112-4385316
  hypo

SEQ ID NO: 393643 - DNA, 44 bp, Homo sapiens; identical to SEQ ID NO: 268688
  chr16:4414173-4414217
  hypo

SEQ ID NO: 393644 - DNA, 116 bp, Homo sapiens; identical to SEQ ID NO: 268702
  chr16:4644648-4644764
  hypo

SEQ ID NO: 393645 - DNA, 226 bp, Homo sapiens; identical to SEQ ID NO: 268711
  chr16:4731810-4732036
  hypo

SEQ ID NO: 393646 - DNA, 215 bp, Homo sapiens; identical to SEQ ID NO: 225008
  chr16:4852975-4853190
  hypo

SEQ ID NO: 393647 - DNA, 96 bp, Homo sapiens; identical to SEQ ID NO: 216745
  chr16:4900508-4900604
  hypo

SEQ ID NO: 393648 - DNA, 117 bp, Homo sapiens; identical to SEQ ID NO: 216746
  chr16:4900634-4900751
  hypo

SEQ ID NO: 393649 - DNA, 167 bp, Homo sapiens; identical to SEQ ID NO: 216752
  chr16:4980311-4980478
  hypo

SEQ ID NO: 393650 - DNA, 207 bp, Homo sapiens; identical to SEQ ID NO: 268732
  chr16:5084818-5085025
  hypo

SEQ ID NO: 393651 - DNA, 97 bp, Homo sapiens; identical to SEQ ID NO: 268752
  chr16:10517770-10517867
  hypo

SEQ ID NO: 393652 - DNA, 186 bp, Homo sapiens; identical to SEQ ID NO: 216761
  chr16:10631325-10631511
  hypo

SEQ ID NO: 393653 - DNA, 257 bp, Homo sapiens; identical to SEQ ID NO: 216763
  chr16:10868652-10868909
  hypo

SEQ ID NO: 393654 - DNA, 54 bp, Homo sapiens; identical to SEQ ID NO: 268760
  chr16:11072431-11072485
  hypo

SEQ ID NO: 393655 - DNA, 314 bp, Homo sapiens; identical to SEQ ID NO: 268761
  chr16:11072844-11073158
  hypo

SEQ ID NO: 393656 - DNA, 196 bp, Homo sapiens; identical to SEQ ID NO: 268762
  chr16:11085470-11085666
  hypo

SEQ ID NO: 393657 - DNA, 186 bp, Homo sapiens; identical to SEQ ID NO: 216769
  chr16:11174343-11174529
  hypo

SEQ ID NO: 393658 - DNA, 41 bp, Homo sapiens; identical to SEQ ID NO: 268771
  chr16:11225773-11225814
  hypo

SEQ ID NO: 393659 - DNA, 49 bp, Homo sapiens; identical to SEQ ID NO: 268774
  chr16:11249342-11249391
  hypo

SEQ ID NO: 393660 - DNA, 104 bp, Homo sapiens; identical to SEQ ID NO: 216776
  chr16:11265077-11265181
  hypo

SEQ ID NO: 393661 - DNA, 138 bp, Homo sapiens; identical to SEQ ID NO: 320309
  chr16:11282895-11283033
  hypo

SEQ ID NO: 393662 - DNA, 52 bp, Homo sapiens; identical to SEQ ID NO: 216777
  chr16:11370335-11370387
  hypo

SEQ ID NO: 393663 - DNA, 110 bp, Homo sapiens; identical to SEQ ID NO: 320321
  chr16:11770050-11770160
  hypo

SEQ ID NO: 393664 - DNA, 134 bp, Homo sapiens; identical to SEQ ID NO: 320322
  chr16:11770190-11770324
  hypo

SEQ ID NO: 393665 - DNA, 44 bp, Homo sapiens; identical to SEQ ID NO: 268806
  chr16:11989479-11989523
  hypo

SEQ ID NO: 393666 - DNA, 120 bp, Homo sapiens; identical to SEQ ID NO: 268809
  chr16:12018078-12018198
  hypo

SEQ ID NO: 393667 - DNA, 78 bp, Homo sapiens; identical to SEQ ID NO: 216792
  chr16:12136759-12136837
  hypo

SEQ ID NO: 393668 - DNA, 85 bp, Homo sapiens; identical to SEQ ID NO: 268824
  chr16:12286197-12286282
  hypo

SEQ ID NO: 393669 - DNA, 101 bp, Homo sapiens; identical to SEQ ID NO: 268828
  chr16:12331021-12331122
  hypo

SEQ ID NO: 393670 - DNA, 169 bp, Homo sapiens; identical to SEQ ID NO: 268829
  chr16:12377985-12378154
  hypo

SEQ ID NO: 393671 - DNA, 358 bp, Homo sapiens; identical to SEQ ID NO: 268832
  chr16:12412005-12412363
  hypo

SEQ ID NO: 393672 - DNA, 80 bp, Homo sapiens; identical to SEQ ID NO: 268834
  chr16:12497524-12497604
  hypo

SEQ ID NO: 393673 - DNA, 111 bp, Homo sapiens; identical to SEQ ID NO: 216800
  chr16:14725660-14725771
  hypo

SEQ ID NO: 393674 - DNA, 38 bp, Homo sapiens; identical to SEQ ID NO: 268861
  chr16:15055595-15055633
  hypo

SEQ ID NO: 393675 - DNA, 120 bp, Homo sapiens; identical to SEQ ID NO: 216806
  chr16:15607783-15607903
  hypo

SEQ ID NO: 393676 - DNA, 55 bp, Homo sapiens; identical to SEQ ID NO: 268888
  chr16:15798699-15798754
  hypo

SEQ ID NO: 393677 - DNA, 42 bp, Homo sapiens; identical to SEQ ID NO: 268894
  chr16:15991506-15991548
  hypo

SEQ ID NO: 393678 - DNA, 35 bp, Homo sapiens; identical to SEQ ID NO: 268897
  chr16:16041979-16042014
  hypo

SEQ ID NO: 393679 - DNA, 39 bp, Homo sapiens; identical to SEQ ID NO: 268898
  chr16:16090901-16090940
  hypo

SEQ ID NO: 393680 - DNA, 75 bp, Homo sapiens; identical to SEQ ID NO: 268909
  chr16:17294379-17294454
  hypo

SEQ ID NO: 393681 - DNA, 37 bp, Homo sapiens; identical to SEQ ID NO: 268912
  chr16:18036046-18036083
  hypo

SEQ ID NO: 393682 - DNA, 160 bp, Homo sapiens; identical to SEQ ID NO: 268918
  chr16:19051022-19051182
  hypo

SEQ ID NO: 393683 - DNA, 36 bp, Homo sapiens; identical to SEQ ID NO: 268919
  chr16:19085558-19085594
  hypo

SEQ ID NO: 393684 - DNA, 42 bp, Homo sapiens; identical to SEQ ID NO: 216827
  chr16:19184226-19184268
  hypo

SEQ ID NO: 393685 - DNA, 89 bp, Homo sapiens; identical to SEQ ID NO: 268922
  chr16:19252128-19252217
  hypo

SEQ ID NO: 393686 - DNA, 45 bp, Homo sapiens; identical to SEQ ID NO: 268927
  chr16:19568731-19568776
  hypo

SEQ ID NO: 393687 - DNA, 86 bp, Homo sapiens; identical to SEQ ID NO: 268931
  chr16:19706325-19706411
  hypo

SEQ ID NO: 393688 - DNA, 149 bp, Homo sapiens; identical to SEQ ID NO: 320481
  chr16:21539210-21539359
  hypo

SEQ ID NO: 393689 - DNA, 153 bp, Homo sapiens; identical to SEQ ID NO: 268972
  chr16:22792389-22792542
  hypo

SEQ ID NO: 393690 - DNA, 42 bp, Homo sapiens; identical to SEQ ID NO: 268973
  chr16:23093841-23093883
  hypo

SEQ ID NO: 393691 - DNA, 155 bp, Homo sapiens; identical to SEQ ID NO: 268978
  chr16:23402871-23403026
  hypo

SEQ ID NO: 393692 - DNA, 49 bp, Homo sapiens; identical to SEQ ID NO: 268981
  chr16:23481441-23481490
  hypo

SEQ ID NO: 393693 - DNA, 86 bp, Homo sapiens; identical to SEQ ID NO: 268994
  chr16:24079284-24079370
  hypo

SEQ ID NO: 393694 - DNA, 121 bp, Homo sapiens; identical to SEQ ID NO: 268996
  chr16:24131552-24131673
  hypo

SEQ ID NO: 393695 - DNA, 41 bp, Homo sapiens; identical to SEQ ID NO: 268999
  chr16:24587543-24587584
  hypo

SEQ ID NO: 393696 - DNA, 80 bp, Homo sapiens; identical to SEQ ID NO: 216861
  chr16:24772184-24772264
  hypo

SEQ ID NO: 393697 - DNA, 42 bp, Homo sapiens; identical to SEQ ID NO: 216864
  chr16:25266495-25266537
  hypo

SEQ ID NO: 393698 - DNA, 107 bp, Homo sapiens; identical to SEQ ID NO: 216865
  chr16:25266573-25266680
  hypo

SEQ ID NO: 393699 - DNA, 118 bp, Homo sapiens; identical to SEQ ID NO: 320545
  chr16:27052120-27052238
  hypo

SEQ ID NO: 393700 - DNA, 119 bp, Homo sapiens; identical to SEQ ID NO: 320546
  chr16:27052308-27052427
  hypo

SEQ ID NO: 393701 - DNA, 142 bp, Homo sapiens; identical to SEQ ID NO: 225038
  chr16:27121251-27121393
  hypo

SEQ ID NO: 393702 - DNA, 574 bp, Homo sapiens; identical to SEQ ID NO: 216871
  chr16:27475618-27476192
  hypo

SEQ ID NO: 393703 - DNA, 103 bp, Homo sapiens; identical to SEQ ID NO: 269031
  chr16:27640048-27640151
  hypo

SEQ ID NO: 393704 - DNA, 42 bp, Homo sapiens; identical to SEQ ID NO: 269037
  chr16:27945907-27945949
  hypo

SEQ ID NO: 393705 - DNA, 141 bp, Homo sapiens; identical to SEQ ID NO: 216880
  chr16:28332354-28332495
  hypo

SEQ ID NO: 393706 - DNA, 120 bp, Homo sapiens; identical to SEQ ID NO: 216881
  chr16:28822780-28822900
  hypo

SEQ ID NO: 393707 - DNA, 99 bp, Homo sapiens; identical to SEQ ID NO: 269056
  chr16:29023076-29023175
  hypo

SEQ ID NO: 393708 - DNA, 175 bp, Homo sapiens; identical to SEQ ID NO: 320599
  chr16:29230296-29230471
  hypo

SEQ ID NO: 393709 - DNA, 79 bp, Homo sapiens; identical to SEQ ID NO: 204150
  chr16:29606232-29606311
  hypo

SEQ ID NO: 393710 - DNA, 180 bp, Homo sapiens; identical to SEQ ID NO: 269070
  chr16:29703876-29704056
  hypo

SEQ ID NO: 393711 - DNA, 413 bp, Homo sapiens; identical to SEQ ID NO: 216893
  chr16:29755602-29756015
  hypo

SEQ ID NO: 393712 - DNA, 83 bp, Homo sapiens; identical to SEQ ID NO: 269075
  chr16:29821043-29821126
  hypo

SEQ ID NO: 393713 - DNA, 104 bp, Homo sapiens; identical to SEQ ID NO: 269085
  chr16:29971777-29971881
  hypo

SEQ ID NO: 393714 - DNA, 127 bp, Homo sapiens; identical to SEQ ID NO: 216905
  chr16:30125291-30125418
  hypo

SEQ ID NO: 393715 - DNA, 403 bp, Homo sapiens; identical to SEQ ID NO: 216907
  chr16:30199143-30199546
  hypo

SEQ ID NO: 393716 - DNA, 39 bp, Homo sapiens; identical to SEQ ID NO: 269107
  chr16:30506741-30506780
  hypo

SEQ ID NO: 393717 - DNA, 47 bp, Homo sapiens; identical to SEQ ID NO: 269112
  chr16:30737305-30737352
  hypo

SEQ ID NO: 393718 - DNA, 100 bp, Homo sapiens; identical to SEQ ID NO: 216911
  chr16:30794665-30794765
  hypo

SEQ ID NO: 393719 - DNA, 660 bp, Homo sapiens; identical to SEQ ID NO: 269122
  chr16:30845547-30846207
  hypo

SEQ ID NO: 393720 - DNA, 198 bp, Homo sapiens; identical to SEQ ID NO: 269126
  chr16:30939779-30939977
  hypo

SEQ ID NO: 393721 - DNA, 458 bp, Homo sapiens; identical to SEQ ID NO: 269127
  chr16:30958051-30958509
  hypo

SEQ ID NO: 393722 - DNA, 250 bp, Homo sapiens; identical to SEQ ID NO: 269128
  chr16:30964630-30964880
  hypo

SEQ ID NO: 393723 - DNA, 63 bp, Homo sapiens; identical to SEQ ID NO: 269136
  chr16:31009764-31009827
  hypo

SEQ ID NO: 393724 - DNA, 108 bp, Homo sapiens; identical to SEQ ID NO: 269140
  chr16:31073553-31073661
  hypo

SEQ ID NO: 393725 - DNA, 402 bp, Homo sapiens; identical to SEQ ID NO: 225055
  chr16:31453960-31454362
  hypo

SEQ ID NO: 393726 - DNA, 175 bp, Homo sapiens; identical to SEQ ID NO: 269161
  chr16:34986007-34986182
  hypo

SEQ ID NO: 393727 - DNA, 99 bp, Homo sapiens; identical to SEQ ID NO: 269181
  chr16:48535068-48535167
  hypo

SEQ ID NO: 393728 - DNA, 156 bp, Homo sapiens; identical to SEQ ID NO: 216949
  chr16:48577583-48577739
  hypo

SEQ ID NO: 393729 - DNA, 32 bp, Homo sapiens; identical to SEQ ID NO: 216951
  chr16:50218668-50218700
  hypo

SEQ ID NO: 393730 - DNA, 87 bp, Homo sapiens; identical to SEQ ID NO: 269196
  chr16:50272245-50272332
  hypo

SEQ ID NO: 393731 - DNA, 141 bp, Homo sapiens; identical to SEQ ID NO: 320750
  chr16:50336215-50336356
  hypo

SEQ ID NO: 393732 - DNA, 239 bp, Homo sapiens; identical to SEQ ID NO: 216956
  chr16:50336386-50336625
  hypo

SEQ ID NO: 393733 - DNA, 82 bp, Homo sapiens; identical to SEQ ID NO: 216965
  chr16:53825645-53825727
  hypo

SEQ ID NO: 393734 - DNA, 212 bp, Homo sapiens; identical to SEQ ID NO: 269216
  chr16:55052638-55052850
  hypo

SEQ ID NO: 393735 - DNA, 34 bp, Homo sapiens; identical to SEQ ID NO: 269219
  chr16:55215807-55215841
  hypo

SEQ ID NO: 393736 - DNA, 165 bp, Homo sapiens; identical to SEQ ID NO: 269224
  chr16:56368690-56368855
  hypo

SEQ ID NO: 393737 - DNA, 43 bp, Homo sapiens; identical to SEQ ID NO: 269234
  chr16:56902581-56902624
  hypo

SEQ ID NO: 393738 - DNA, 57 bp, Homo sapiens; identical to SEQ ID NO: 269250
  chr16:57686683-57686740
  hypo

SEQ ID NO: 393739 - DNA, 101 bp, Homo sapiens; identical to SEQ ID NO: 216983
  chr16:57697546-57697647
  hypo

SEQ ID NO: 393740 - DNA, 75 bp, Homo sapiens; identical to SEQ ID NO: 269253
  chr16:57737538-57737613
  hypo

SEQ ID NO: 393741 - DNA, 207 bp, Homo sapiens; identical to SEQ ID NO: 269254
  chr16:57759978-57760185
  hypo

SEQ ID NO: 393742 - DNA, 67 bp, Homo sapiens; identical to SEQ ID NO: 216988
  chr16:58076202-58076269
  hypo

SEQ ID NO: 393743 - DNA, 159 bp, Homo sapiens; identical to SEQ ID NO: 269272
  chr16:66579299-66579458
  hypo

SEQ ID NO: 393744 - DNA, 64 bp, Homo sapiens; identical to SEQ ID NO: 269275
  chr16:66752187-66752251
  hypo

SEQ ID NO: 393745 - DNA, 757 bp, Homo sapiens; identical to SEQ ID NO: 269277
  chr16:66835306-66836063
  hypo

SEQ ID NO: 393746 - DNA, 120 bp, Homo sapiens; identical to SEQ ID NO: 269279
  chr16:66986333-66986453
  hypo

SEQ ID NO: 393747 - DNA, 368 bp, Homo sapiens; identical to SEQ ID NO: 217008
  chr16:67469689-67470057
  hypo

SEQ ID NO: 393748 - DNA, 218 bp, Homo sapiens; identical to SEQ ID NO: 269297
  chr16:67478341-67478559
  hypo

SEQ ID NO: 393749 - DNA, 66 bp, Homo sapiens; identical to SEQ ID NO: 269300
  chr16:67574479-67574545
  hypo

SEQ ID NO: 393750 - DNA, 39 bp, Homo sapiens; identical to SEQ ID NO: 269308
  chr16:68250713-68250752
  hypo

SEQ ID NO: 393751 - DNA, 34 bp, Homo sapiens; identical to SEQ ID NO: 217031
  chr16:68739594-68739628
  hypo

SEQ ID NO: 393752 - DNA, 88 bp, Homo sapiens; identical to SEQ ID NO: 269319
  chr16:68782327-68782415
  hypo

SEQ ID NO: 393753 - DNA, 224 bp, Homo sapiens; identical to SEQ ID NO: 269323
  chr16:68856757-68856981
  hypo

SEQ ID NO: 393754 - DNA, 660 bp, Homo sapiens; identical to SEQ ID NO: 225107
  chr16:69139815-69140475
  hypo

SEQ ID NO: 393755 - DNA, 36 bp, Homo sapiens; identical to SEQ ID NO: 217049
  chr16:69439224-69439260
  hypo

SEQ ID NO: 393756 - DNA, 84 bp, Homo sapiens; identical to SEQ ID NO: 217050
  chr16:69495121-69495205
  hypo

SEQ ID NO: 393757 - DNA, 275 bp, Homo sapiens; identical to SEQ ID NO: 217051
  chr16:69557609-69557884
  hypo

SEQ ID NO: 393758 - DNA, 41 bp, Homo sapiens; identical to SEQ ID NO: 269347
  chr16:69613048-69613089
  hypo

SEQ ID NO: 393759 - DNA, 130 bp, Homo sapiens; identical to SEQ ID NO: 217063
  chr16:70286315-70286445
  hypo

SEQ ID NO: 393760 - DNA, 105 bp, Homo sapiens; identical to SEQ ID NO: 225109
  chr16:70472498-70472603
  hypo

SEQ ID NO: 393761 - DNA, 187 bp, Homo sapiens; identical to SEQ ID NO: 269374
  chr16:70754253-70754440
  hypo

SEQ ID NO: 393762 - DNA, 96 bp, Homo sapiens; identical to SEQ ID NO: 269382
  chr16:70829399-70829495
  hypo

SEQ ID NO: 393763 - DNA, 148 bp, Homo sapiens; identical to SEQ ID NO: 269386
  chr16:71674493-71674641
  hypo

SEQ ID NO: 393764 - DNA, 35 bp, Homo sapiens; identical to SEQ ID NO: 269391
  chr16:71756040-71756075
  hypo

SEQ ID NO: 393765 - DNA, 149 bp, Homo sapiens; identical to SEQ ID NO: 225111
  chr16:72699010-72699159
  hypo

SEQ ID NO: 393766 - DNA, 174 bp, Homo sapiens; identical to SEQ ID NO: 269406
  chr16:72958495-72958669
  hypo

SEQ ID NO: 393767 - DNA, 101 bp, Homo sapiens; identical to SEQ ID NO: 217089
  chr16:72984703-72984804
  hypo

SEQ ID NO: 393768 - DNA, 86 bp, Homo sapiens; identical to SEQ ID NO: 217092
  chr16:73007796-73007882
  hypo

SEQ ID NO: 393769 - DNA, 334 bp, Homo sapiens; identical to SEQ ID NO: 291692
  chr16:73091551-73091885
  hypo

SEQ ID NO: 393770 - DNA, 217 bp, Homo sapiens; identical to SEQ ID NO: 53263
  chr16:73091900-73092117
  hypo

SEQ ID NO: 393771 - DNA, 43 bp, Homo sapiens; identical to SEQ ID NO: 269423
  chr16:74540183-74540226
  hypo

SEQ ID NO: 393772 - DNA, 149 bp, Homo sapiens; identical to SEQ ID NO: 269430
  chr16:74872626-74872775
  hypo

SEQ ID NO: 393773 - DNA, 146 bp, Homo sapiens; identical to SEQ ID NO: 269432
  chr16:74901700-74901846
  hypo

SEQ ID NO: 393774 - DNA, 40 bp, Homo sapiens; identical to SEQ ID NO: 204287
  chr16:75018963-75019003
  hypo

SEQ ID NO: 393775 - DNA, 457 bp, Homo sapiens; identical to SEQ ID NO: 269456
  chr16:75513119-75513576
  hypo

SEQ ID NO: 393776 - DNA, 165 bp, Homo sapiens; identical to SEQ ID NO: 204293
  chr16:75529727-75529892
  hypo

SEQ ID NO: 393777 - DNA, 580 bp, Homo sapiens; identical to SEQ ID NO: 217123
  chr16:77228259-77228839
  hypo

SEQ ID NO: 393778 - DNA, 43 bp, Homo sapiens; identical to SEQ ID NO: 217124
  chr16:77229453-77229496
  hypo

SEQ ID NO: 393779 - DNA, 38 bp, Homo sapiens; identical to SEQ ID NO: 217135
  chr16:80654697-80654735
  hypo

SEQ ID NO: 393780 - DNA, 158 bp, Homo sapiens; identical to SEQ ID NO: 269478
  chr16:80714339-80714497
  hypo

SEQ ID NO: 393781 - DNA, 164 bp, Homo sapiens; identical to SEQ ID NO: 269508
  chr16:81700317-81700481
  hypo

SEQ ID NO: 393782 - DNA, 453 bp, Homo sapiens; identical to SEQ ID NO: 269511
  chr16:81737255-81737708
  hypo

SEQ ID NO: 393783 - DNA, 377 bp, Homo sapiens; identical to SEQ ID NO: 269514
  chr16:81924958-81925335
  hypo

SEQ ID NO: 393784 - DNA, 55 bp, Homo sapiens; identical to SEQ ID NO: 386778
  chr16:84132212-84132267
  hypo

SEQ ID NO: 393785 - DNA, 113 bp, Homo sapiens; identical to SEQ ID NO: 217160
  chr16:84423862-84423975
  hypo

SEQ ID NO: 393786 - DNA, 212 bp, Homo sapiens; identical to SEQ ID NO: 217164
  chr16:84535780-84535992
  hypo

SEQ ID NO: 393787 - DNA, 255 bp, Homo sapiens; identical to SEQ ID NO: 269546
  chr16:84537368-84537623
  hypo

SEQ ID NO: 393788 - DNA, 139 bp, Homo sapiens; identical to SEQ ID NO: 217165
  chr16:84593079-84593218
  hypo

SEQ ID NO: 393789 - DNA, 41 bp, Homo sapiens; identical to SEQ ID NO: 269555
  chr16:84735938-84735979
  hypo

SEQ ID NO: 393790 - DNA, 185 bp, Homo sapiens; identical to SEQ ID NO: 217167
  chr16:84749467-84749652
  hypo

SEQ ID NO: 393791 - DNA, 231 bp, Homo sapiens; identical to SEQ ID NO: 269558
  chr16:84800549-84800780
  hypo

SEQ ID NO: 393792 - DNA, 450 bp, Homo sapiens; identical to SEQ ID NO: 269562
  chr16:84824664-84825114
  hypo

SEQ ID NO: 393793 - DNA, 182 bp, Homo sapiens; identical to SEQ ID NO: 217171
  chr16:84965070-84965252
  hypo

SEQ ID NO: 393794 - DNA, 143 bp, Homo sapiens; identical to SEQ ID NO: 217177
  chr16:85008291-85008434
  hypo

SEQ ID NO: 393795 - DNA, 118 bp, Homo sapiens; identical to SEQ ID NO: 269578
  chr16:85011214-85011332
  hypo

SEQ ID NO: 393796 - DNA, 120 bp, Homo sapiens; identical to SEQ ID NO: 269579
  chr16:85013863-85013983
  hypo

SEQ ID NO: 393797 - DNA, 458 bp, Homo sapiens; identical to SEQ ID NO: 269581
  chr16:85019752-85020210
  hypo

SEQ ID NO: 393798 - DNA, 143 bp, Homo sapiens; identical to SEQ ID NO: 269582
  chr16:85024470-85024613
  hypo

SEQ ID NO: 393799 - DNA, 173 bp, Homo sapiens; identical to SEQ ID NO: 217184
  chr16:85214271-85214444
  hypo

SEQ ID NO: 393800 - DNA, 374 bp, Homo sapiens; identical to SEQ ID NO: 269595
  chr16:85216377-85216751
  hypo

SEQ ID NO: 393801 - DNA, 45 bp, Homo sapiens; identical to SEQ ID NO: 269598
  chr16:85283528-85283573
  hypo

SEQ ID NO: 393802 - DNA, 187 bp, Homo sapiens; identical to SEQ ID NO: 269599
  chr16:85305676-85305863
  hypo

SEQ ID NO: 393803 - DNA, 53 bp, Homo sapiens; identical to SEQ ID NO: 321222
  chr16:85317797-85317850
  hypo

SEQ ID NO: 393804 - DNA, 107 bp, Homo sapiens; identical to SEQ ID NO: 321223
  chr16:85317882-85317989
  hypo

SEQ ID NO: 393805 - DNA, 172 bp, Homo sapiens; identical to SEQ ID NO: 269606
  chr16:85329623-85329795
  hypo

SEQ ID NO: 393806 - DNA, 83 bp, Homo sapiens; identical to SEQ ID NO: 269611
  chr16:85369411-85369494
  hypo

SEQ ID NO: 393807 - DNA, 285 bp, Homo sapiens; identical to SEQ ID NO: 269621
  chr16:85428653-85428938
  hypo

SEQ ID NO: 393808 - DNA, 94 bp, Homo sapiens; identical to SEQ ID NO: 217199
  chr16:85432465-85432559
  hypo

SEQ ID NO: 393809 - DNA, 141 bp, Homo sapiens; identical to SEQ ID NO: 269636
  chr16:85520266-85520407
  hypo

SEQ ID NO: 393810 - DNA, 413 bp, Homo sapiens; identical to SEQ ID NO: 269638
  chr16:85529540-85529953
  hypo

SEQ ID NO: 393811 - DNA, 173 bp, Homo sapiens; identical to SEQ ID NO: 321265
  chr16:85537318-85537491
  hypo

SEQ ID NO: 393812 - DNA, 521 bp, Homo sapiens; identical to SEQ ID NO: 269648
  chr16:85616219-85616740
  hypo

SEQ ID NO: 393813 - DNA, 74 bp, Homo sapiens; identical to SEQ ID NO: 217223
  chr16:85678761-85678835
  hypo

SEQ ID NO: 393814 - DNA, 234 bp, Homo sapiens; identical to SEQ ID NO: 269671
  chr16:85743824-85744058
  hypo

SEQ ID NO: 393815 - DNA, 37 bp, Homo sapiens; identical to SEQ ID NO: 269674
  chr16:85954880-85954917
  hypo

SEQ ID NO: 393816 - DNA, 122 bp, Homo sapiens; identical to SEQ ID NO: 269682
  chr16:86562411-86562533
  hypo

SEQ ID NO: 393817 - DNA, 189 bp, Homo sapiens; identical to SEQ ID NO: 269683
  chr16:86570329-86570518
  hypo

SEQ ID NO: 393818 - DNA, 155 bp, Homo sapiens; identical to SEQ ID NO: 269685
  chr16:86740874-86741029
  hypo

SEQ ID NO: 393819 - DNA, 126 bp, Homo sapiens; identical to SEQ ID NO: 269693
  chr16:87177254-87177380
  hypo

SEQ ID NO: 393820 - DNA, 47 bp, Homo sapiens; identical to SEQ ID NO: 217246
  chr16:87447846-87447893
  hypo

SEQ ID NO: 393821 - DNA, 95 bp, Homo sapiens; identical to SEQ ID NO: 269710
  chr16:87493948-87494043
  hypo

SEQ ID NO: 393822 - DNA, 169 bp, Homo sapiens; identical to SEQ ID NO: 269712
  chr16:87625740-87625909
  hypo

SEQ ID NO: 393823 - DNA, 76 bp, Homo sapiens; identical to SEQ ID NO: 389392
  chr16:87635461-87635537
  hypo

SEQ ID NO: 393824 - DNA, 100 bp, Homo sapiens; identical to SEQ ID NO: 269715
  chr16:87724407-87724507
  hypo

SEQ ID NO: 393825 - DNA, 178 bp, Homo sapiens; identical to SEQ ID NO: 269720
  chr16:87756599-87756777
  hypo

SEQ ID NO: 393826 - DNA, 150 bp, Homo sapiens; identical to SEQ ID NO: 269723
  chr16:87784654-87784804
  hypo

SEQ ID NO: 393827 - DNA, 82 bp, Homo sapiens; identical to SEQ ID NO: 269729
  chr16:87911934-87912016
  hypo

SEQ ID NO: 393828 - DNA, 45 bp, Homo sapiens; identical to SEQ ID NO: 269732
  chr16:87934808-87934853
  hypo

SEQ ID NO: 393829 - DNA, 282 bp, Homo sapiens; identical to SEQ ID NO: 217264
  chr16:88073665-88073947
  hypo

SEQ ID NO: 393830 - DNA, 49 bp, Homo sapiens; identical to SEQ ID NO: 217265
  chr16:88078972-88079021
  hypo

SEQ ID NO: 393831 - DNA, 268 bp, Homo sapiens; identical to SEQ ID NO: 269762
  chr16:88385554-88385822
  hypo

SEQ ID NO: 393832 - DNA, 431 bp, Homo sapiens; identical to SEQ ID NO: 321409
  chr16:88460215-88460646
  hypo

SEQ ID NO: 393833 - DNA, 635 bp, Homo sapiens; identical to SEQ ID NO: 269766
  chr16:88479696-88480331
  hypo

SEQ ID NO: 393834 - DNA, 45 bp, Homo sapiens; identical to SEQ ID NO: 217281
  chr16:88537675-88537720
  hypo

SEQ ID NO: 393835 - DNA, 205 bp, Homo sapiens; identical to SEQ ID NO: 269777
  chr16:88538054-88538259
  hypo

SEQ ID NO: 393836 - DNA, 503 bp, Homo sapiens; identical to SEQ ID NO: 321423
  chr16:88550903-88551406
  hypo

SEQ ID NO: 393837 - DNA, 306 bp, Homo sapiens; identical to SEQ ID NO: 217284
  chr16:88551574-88551880
  hypo

SEQ ID NO: 393838 - DNA, 44 bp, Homo sapiens; identical to SEQ ID NO: 217285
  chr16:88642725-88642769
  hypo

SEQ ID NO: 393839 - DNA, 493 bp, Homo sapiens; identical to SEQ ID NO: 269791
  chr16:88673630-88674123
  hypo

SEQ ID NO: 393840 - DNA, 64 bp, Homo sapiens; identical to SEQ ID NO: 217291
  chr16:88689149-88689213
  hypo

SEQ ID NO: 393841 - DNA, 65 bp, Homo sapiens; identical to SEQ ID NO: 321443
  chr16:88722261-88722326
  hypo

SEQ ID NO: 393842 - DNA, 113 bp, Homo sapiens; identical to SEQ ID NO: 217296
  chr16:88722817-88722930
  hypo

SEQ ID NO: 393843 - DNA, 127 bp, Homo sapiens; identical to SEQ ID NO: 217300
  chr16:88738306-88738433
  hypo

SEQ ID NO: 393844 - DNA, 133 bp, Homo sapiens; identical to SEQ ID NO: 225167
  chr16:88764923-88765056
  hypo

SEQ ID NO: 393845 - DNA, 322 bp, Homo sapiens; identical to SEQ ID NO: 269807
  chr16:88776937-88777259
  hypo

SEQ ID NO: 393846 - DNA, 31 bp, Homo sapiens; identical to SEQ ID NO: 269808
  chr16:88780638-88780669
  hypo

SEQ ID NO: 393847 - DNA, 38 bp, Homo sapiens; identical to SEQ ID NO: 269811
  chr16:88785880-88785918
  hypo

SEQ ID NO: 393848 - DNA, 101 bp, Homo sapiens; identical to SEQ ID NO: 217303
  chr16:88787977-88788078
  hypo

SEQ ID NO: 393849 - DNA, 62 bp, Homo sapiens; identical to SEQ ID NO: 217304
  chr16:88788384-88788446
  hypo

SEQ ID NO: 393850 - DNA, 602 bp, Homo sapiens; identical to SEQ ID NO: 269822
  chr16:88800570-88801172
  hypo

SEQ ID NO: 393851 - DNA, 80 bp, Homo sapiens; identical to SEQ ID NO: 269826
  chr16:88810535-88810615
  hypo

SEQ ID NO: 393852 - DNA, 59 bp, Homo sapiens; identical to SEQ ID NO: 217313
  chr16:88831171-88831230
  hypo

SEQ ID NO: 393853 - DNA, 142 bp, Homo sapiens; identical to SEQ ID NO: 217314
  chr16:88831297-88831439
  hypo

SEQ ID NO: 393854 - DNA, 114 bp, Homo sapiens; identical to SEQ ID NO: 204339
  chr16:88851818-88851932
  hypo

SEQ ID NO: 393855 - DNA, 507 bp, Homo sapiens; identical to SEQ ID NO: 204340
  chr16:88878527-88879034
  hypo

SEQ ID NO: 393856 - DNA, 485 bp, Homo sapiens; identical to SEQ ID NO: 217330
  chr16:88978122-88978607
  hypo

SEQ ID NO: 393857 - DNA, 102 bp, Homo sapiens; identical to SEQ ID NO: 321517
  chr16:88997823-88997925
  hypo

SEQ ID NO: 393858 - DNA, 201 bp, Homo sapiens; identical to SEQ ID NO: 321523
  chr16:89010085-89010286
  hypo

SEQ ID NO: 393859 - DNA, 200 bp, Homo sapiens; identical to SEQ ID NO: 269876
  chr16:89027649-89027849
  hypo

SEQ ID NO: 393860 - DNA, 164 bp, Homo sapiens; identical to SEQ ID NO: 269881
  chr16:89089219-89089383
  hypo

SEQ ID NO: 393861 - DNA, 78 bp, Homo sapiens; identical to SEQ ID NO: 321531
  chr16:89103370-89103448
  hypo

SEQ ID NO: 393862 - DNA, 102 bp, Homo sapiens; identical to SEQ ID NO: 269886
  chr16:89115645-89115747
  hypo

SEQ ID NO: 393863 - DNA, 277 bp, Homo sapiens; identical to SEQ ID NO: 269892
  chr16:89132011-89132288
  hypo

SEQ ID NO: 393864 - DNA, 240 bp, Homo sapiens; identical to SEQ ID NO: 269897
  chr16:89147081-89147321
  hypo

SEQ ID NO: 393865 - DNA, 324 bp, Homo sapiens; identical to SEQ ID NO: 269905
  chr16:89179513-89179837
  hypo

SEQ ID NO: 393866 - DNA, 86 bp, Homo sapiens; identical to SEQ ID NO: 321567
  chr16:89225782-89225868
  hypo

SEQ ID NO: 393867 - DNA, 215 bp, Homo sapiens; identical to SEQ ID NO: 321568
  chr16:89226047-89226262
  hypo

SEQ ID NO: 393868 - DNA, 98 bp, Homo sapiens; identical to SEQ ID NO: 217359
  chr16:89255153-89255251
  hypo

SEQ ID NO: 393869 - DNA, 314 bp, Homo sapiens; identical to SEQ ID NO: 217364
  chr16:89359017-89359331
  hypo

SEQ ID NO: 393870 - DNA, 70 bp, Homo sapiens; identical to SEQ ID NO: 269942
  chr16:89471629-89471699
  hypo

SEQ ID NO: 393871 - DNA, 99 bp, Homo sapiens; identical to SEQ ID NO: 217375
  chr16:89548161-89548260
  hypo

SEQ ID NO: 393872 - DNA, 300 bp, Homo sapiens; identical to SEQ ID NO: 217380
  chr16:89647764-89648064
  hypo

SEQ ID NO: 393873 - DNA, 186 bp, Homo sapiens; identical to SEQ ID NO: 321620
  chr16:89663966-89664152
  hypo

SEQ ID NO: 393874 - DNA, 47 bp, Homo sapiens; identical to SEQ ID NO: 217386
  chr16:89715825-89715872
  hypo

SEQ ID NO: 393875 - DNA, 85 bp, Homo sapiens; identical to SEQ ID NO: 217391
  chr16:89807744-89807829
  hypo

SEQ ID NO: 393876 - DNA, 38 bp, Homo sapiens; identical to SEQ ID NO: 217393
  chr16:89830047-89830085
  hypo

SEQ ID NO: 393877 - DNA, 64 bp, Homo sapiens; identical to SEQ ID NO: 269987
  chr16:89920072-89920136
  hypo

SEQ ID NO: 393878 - DNA, 310 bp, Homo sapiens; identical to SEQ ID NO: 217399
  chr16:89966590-89966900
  hypo

SEQ ID NO: 393879 - DNA, 123 bp, Homo sapiens; identical to SEQ ID NO: 270002
  chr16:90057596-90057719
  hypo

SEQ ID NO: 393880 - DNA, 135 bp, Homo sapiens; identical to SEQ ID NO: 217407
  chr16:90059132-90059267
  hypo

SEQ ID NO: 393881 - DNA, 206 bp, Homo sapiens; identical to SEQ ID NO: 270007
  chr16:90109929-90110135
  hypo

SEQ ID NO: 393882 - DNA, 41 bp, Homo sapiens; identical to SEQ ID NO: 270011
  chr17:523202-523243
  hypo

SEQ ID NO: 393883 - DNA, 59 bp, Homo sapiens; identical to SEQ ID NO: 389401
  chr17:523856-523915
  hypo

SEQ ID NO: 393884 - DNA, 464 bp, Homo sapiens; identical to SEQ ID NO: 217426
  chr17:693367-693831
  hypo

SEQ ID NO: 393885 - DNA, 33 bp, Homo sapiens; identical to SEQ ID NO: 270027
  chr17:744617-744650
  hypo

SEQ ID NO: 393886 - DNA, 96 bp, Homo sapiens; identical to SEQ ID NO: 270029
  chr17:817716-817812
  hypo

SEQ ID NO: 393887 - DNA, 150 bp, Homo sapiens; identical to SEQ ID NO: 217428
  chr17:836153-836303
  hypo

SEQ ID NO: 393888 - DNA, 409 bp, Homo sapiens; identical to SEQ ID NO: 270032
  chr17:839511-839920
  hypo

SEQ ID NO: 393889 - DNA, 84 bp, Homo sapiens; identical to SEQ ID NO: 225185
  chr17:883202-883286
  hypo

SEQ ID NO: 393890 - DNA, 64 bp, Homo sapiens; identical to SEQ ID NO: 217432
  chr17:916258-916322
  hypo

SEQ ID NO: 393891 - DNA, 110 bp, Homo sapiens; identical to SEQ ID NO: 270048
  chr17:1053213-1053323
  hypo

SEQ ID NO: 393892 - DNA, 53 bp, Homo sapiens; identical to SEQ ID NO: 270053
  chr17:1208267-1208320
  hypo

SEQ ID NO: 393893 - DNA, 214 bp, Homo sapiens; identical to SEQ ID NO: 270054
  chr17:1240771-1240985
  hypo

SEQ ID NO: 393894 - DNA, 116 bp, Homo sapiens; identical to SEQ ID NO: 217437
  chr17:1387481-1387597
  hypo

SEQ ID NO: 393895 - DNA, 186 bp, Homo sapiens; identical to SEQ ID NO: 321752
  chr17:1494364-1494550
  hypo

SEQ ID NO: 393896 - DNA, 204 bp, Homo sapiens; identical to SEQ ID NO: 270076
  chr17:1527254-1527458
  hypo

SEQ ID NO: 393897 - DNA, 39 bp, Homo sapiens; identical to SEQ ID NO: 270079
  chr17:1562742-1562781
  hypo

SEQ ID NO: 393898 - DNA, 58 bp, Homo sapiens; identical to SEQ ID NO: 270090
  chr17:1802318-1802376
  hypo

SEQ ID NO: 393899 - DNA, 146 bp, Homo sapiens; identical to SEQ ID NO: 321770
  chr17:1824435-1824581
  hypo

SEQ ID NO: 393900 - DNA, 79 bp, Homo sapiens; identical to SEQ ID NO: 321771
  chr17:1824611-1824690
  hypo

SEQ ID NO: 393901 - DNA, 31 bp, Homo sapiens; identical to SEQ ID NO: 217457
  chr17:2015469-2015500
  hypo

SEQ ID NO: 393902 - DNA, 156 bp, Homo sapiens; identical to SEQ ID NO: 217459
  chr17:2182384-2182540
  hypo

SEQ ID NO: 393903 - DNA, 51 bp, Homo sapiens; identical to SEQ ID NO: 321789
  chr17:2278750-2278801
  hypo

SEQ ID NO: 393904 - DNA, 452 bp, Homo sapiens; identical to SEQ ID NO: 321790
  chr17:2278925-2279377
  hypo

SEQ ID NO: 393905 - DNA, 128 bp, Homo sapiens; identical to SEQ ID NO: 270111
  chr17:2290294-2290422
  hypo

SEQ ID NO: 393906 - DNA, 66 bp, Homo sapiens; identical to SEQ ID NO: 386842
  chr17:2326291-2326357
  hypo

SEQ ID NO: 393907 - DNA, 39 bp, Homo sapiens; identical to SEQ ID NO: 217463
  chr17:2326810-2326849
  hypo

SEQ ID NO: 393908 - DNA, 120 bp, Homo sapiens; identical to SEQ ID NO: 217464
  chr17:2388546-2388666
  hypo

SEQ ID NO: 393909 - DNA, 39 bp, Homo sapiens; identical to SEQ ID NO: 270118
  chr17:2590520-2590559
  hypo

SEQ ID NO: 393910 - DNA, 203 bp, Homo sapiens; identical to SEQ ID NO: 217465
  chr17:2595624-2595827
  hypo

SEQ ID NO: 393911 - DNA, 235 bp, Homo sapiens; identical to SEQ ID NO: 270120
  chr17:2599038-2599273
  hypo

SEQ ID NO: 393912 - DNA, 34 bp, Homo sapiens; identical to SEQ ID NO: 217468
  chr17:2616132-2616166
  hypo

SEQ ID NO: 393913 - DNA, 240 bp, Homo sapiens; identical to SEQ ID NO: 217471
  chr17:2684894-2685134
  hypo

SEQ ID NO: 393914 - DNA, 190 bp, Homo sapiens; identical to SEQ ID NO: 270144
  chr17:3653522-3653712
  hypo

SEQ ID NO: 393915 - DNA, 111 bp, Homo sapiens; identical to SEQ ID NO: 270152
  chr17:3793345-3793456
  hypo

SEQ ID NO: 393916 - DNA, 370 bp, Homo sapiens; identical to SEQ ID NO: 270155
  chr17:3850755-3851125
  hypo

SEQ ID NO: 393917 - DNA, 288 bp, Homo sapiens; identical to SEQ ID NO: 270165
  chr17:4074112-4074400
  hypo

SEQ ID NO: 393918 - DNA, 37 bp, Homo sapiens; identical to SEQ ID NO: 270177
  chr17:4289153-4289190
  hypo

SEQ ID NO: 393919 - DNA, 164 bp, Homo sapiens; identical to SEQ ID NO: 217505
  chr17:5392214-5392378
  hypo

SEQ ID NO: 393920 - DNA, 138 bp, Homo sapiens; identical to SEQ ID NO: 270195
  chr17:6419897-6420035
  hypo

SEQ ID NO: 393921 - DNA, 159 bp, Homo sapiens; identical to SEQ ID NO: 270203
  chr17:7076077-7076236
  hypo

SEQ ID NO: 393922 - DNA, 67 bp, Homo sapiens; identical to SEQ ID NO: 204392
  chr17:7146588-7146655
  hypo

SEQ ID NO: 393923 - DNA, 274 bp, Homo sapiens; identical to SEQ ID NO: 225215
  chr17:7340607-7340881
  hypo

SEQ ID NO: 393924 - DNA, 249 bp, Homo sapiens; identical to SEQ ID NO: 321923
  chr17:7419658-7419907
  hypo

SEQ ID NO: 393925 - DNA, 385 bp, Homo sapiens; identical to SEQ ID NO: 291954
  chr17:7486279-7486664
  hypo

SEQ ID NO: 393926 - DNA, 329 bp, Homo sapiens; identical to SEQ ID NO: 204409
  chr17:7590625-7590954
  hypo

SEQ ID NO: 393927 - DNA, 79 bp, Homo sapiens; identical to SEQ ID NO: 217543
  chr17:7813720-7813799
  hypo

SEQ ID NO: 393928 - DNA, 83 bp, Homo sapiens; identical to SEQ ID NO: 217550
  chr17:8325971-8326054
  hypo

SEQ ID NO: 393929 - DNA, 104 bp, Homo sapiens; identical to SEQ ID NO: 270270
  chr17:8458246-8458350
  hypo

SEQ ID NO: 393930 - DNA, 57 bp, Homo sapiens; identical to SEQ ID NO: 270271
  chr17:8471465-8471522
  hypo

SEQ ID NO: 393931 - DNA, 102 bp, Homo sapiens; identical to SEQ ID NO: 270278
  chr17:8932900-8933002
  hypo

SEQ ID NO: 393932 - DNA, 147 bp, Homo sapiens; identical to SEQ ID NO: 217556
  chr17:9054227-9054374
  hypo

SEQ ID NO: 393933 - DNA, 44 bp, Homo sapiens; identical to SEQ ID NO: 321991
  chr17:9065675-9065719
  hypo

SEQ ID NO: 393934 - DNA, 106 bp, Homo sapiens; identical to SEQ ID NO: 321992
  chr17:9065749-9065855
  hypo

SEQ ID NO: 393935 - DNA, 275 bp, Homo sapiens; identical to SEQ ID NO: 270287
  chr17:9124886-9125161
  hypo

SEQ ID NO: 393936 - DNA, 193 bp, Homo sapiens; identical to SEQ ID NO: 270293
  chr17:9264056-9264249
  hypo

SEQ ID NO: 393937 - DNA, 184 bp, Homo sapiens; identical to SEQ ID NO: 270305
  chr17:10216484-10216668
  hypo

SEQ ID NO: 393938 - DNA, 242 bp, Homo sapiens; identical to SEQ ID NO: 217571
  chr17:12905698-12905940
  hypo

SEQ ID NO: 393939 - DNA, 44 bp, Homo sapiens; identical to SEQ ID NO: 217574
  chr17:14236462-14236506
  hypo

SEQ ID NO: 393940 - DNA, 121 bp, Homo sapiens; identical to SEQ ID NO: 217582
  chr17:16385291-16385412
  hypo

SEQ ID NO: 393941 - DNA, 57 bp, Homo sapiens; identical to SEQ ID NO: 225243
  chr17:16395229-16395286
  hypo

SEQ ID NO: 393942 - DNA, 200 bp, Homo sapiens; identical to SEQ ID NO: 270333
  chr17:16434315-16434515
  hypo

SEQ ID NO: 393943 - DNA, 119 bp, Homo sapiens; identical to SEQ ID NO: 270339
  chr17:17012232-17012351
  hypo

SEQ ID NO: 393944 - DNA, 484 bp, Homo sapiens; identical to SEQ ID NO: 270343
  chr17:17067430-17067914
  hypo

SEQ ID NO: 393945 - DNA, 206 bp, Homo sapiens; identical to SEQ ID NO: 270354
  chr17:17250660-17250866
  hypo

SEQ ID NO: 393946 - DNA, 311 bp, Homo sapiens; identical to SEQ ID NO: 217590
  chr17:17251122-17251433
  hypo

SEQ ID NO: 393947 - DNA, 101 bp, Homo sapiens; identical to SEQ ID NO: 270356
  chr17:17255033-17255134
  hypo

SEQ ID NO: 393948 - DNA, 247 bp, Homo sapiens; identical to SEQ ID NO: 270361
  chr17:17344148-17344395
  hypo

SEQ ID NO: 393949 - DNA, 132 bp, Homo sapiens; identical to SEQ ID NO: 217594
  chr17:17447945-17448077
  hypo

SEQ ID NO: 393950 - DNA, 79 bp, Homo sapiens; identical to SEQ ID NO: 217605
  chr17:19211655-19211734
  hypo

SEQ ID NO: 393951 - DNA, 216 bp, Homo sapiens; identical to SEQ ID NO: 322128
  chr17:19211764-19211980
  hypo

SEQ ID NO: 393952 - DNA, 65 bp, Homo sapiens; identical to SEQ ID NO: 217611
  chr17:19641468-19641533
  hypo

SEQ ID NO: 393953 - DNA, 58 bp, Homo sapiens; identical to SEQ ID NO: 270412
  chr17:19642884-19642942
  hypo

SEQ ID NO: 393954 - DNA, 174 bp, Homo sapiens; identical to SEQ ID NO: 270414
  chr17:19644760-19644934
  hypo

SEQ ID NO: 393955 - DNA, 71 bp, Homo sapiens; identical to SEQ ID NO: 270423
  chr17:19772163-19772234
  hypo

SEQ ID NO: 393956 - DNA, 93 bp, Homo sapiens; identical to SEQ ID NO: 270426
  chr17:19861688-19861781
  hypo

SEQ ID NO: 393957 - DNA, 120 bp, Homo sapiens; identical to SEQ ID NO: 270428
  chr17:19902538-19902658
  hypo

SEQ ID NO: 393958 - DNA, 120 bp, Homo sapiens; identical to SEQ ID NO: 270431
  chr17:20065370-20065490
  hypo

SEQ ID NO: 393959 - DNA, 83 bp, Homo sapiens; identical to SEQ ID NO: 217617
  chr17:20087136-20087219
  hypo

SEQ ID NO: 393960 - DNA, 78 bp, Homo sapiens; identical to SEQ ID NO: 270435
  chr17:20141015-20141093
  hypo

SEQ ID NO: 393961 - DNA, 33 bp, Homo sapiens; identical to SEQ ID NO: 270439
  chr17:20220061-20220094
  hypo

SEQ ID NO: 393962 - DNA, 133 bp, Homo sapiens; identical to SEQ ID NO: 217619
  chr17:20905669-20905802
  hypo

SEQ ID NO: 393963 - DNA, 195 bp, Homo sapiens; identical to SEQ ID NO: 217620
  chr17:20914087-20914282
  hypo

SEQ ID NO: 393964 - DNA, 185 bp, Homo sapiens; identical to SEQ ID NO: 217621
  chr17:20919060-20919245
  hypo

SEQ ID NO: 393965 - DNA, 41 bp, Homo sapiens; identical to SEQ ID NO: 270454
  chr17:21128221-21128262
  hypo

SEQ ID NO: 393966 - DNA, 97 bp, Homo sapiens; identical to SEQ ID NO: 217634
  chr17:25948172-25948269
  hypo

SEQ ID NO: 393967 - DNA, 238 bp, Homo sapiens; identical to SEQ ID NO: 217640
  chr17:26960859-26961097
  hypo

SEQ ID NO: 393968 - DNA, 129 bp, Homo sapiens; identical to SEQ ID NO: 217643
  chr17:27011597-27011726
  hypo

SEQ ID NO: 393969 - DNA, 64 bp, Homo sapiens; identical to SEQ ID NO: 270492
  chr17:27028074-27028138
  hypo

SEQ ID NO: 393970 - DNA, 35 bp, Homo sapiens; identical to SEQ ID NO: 217645
  chr17:27138132-27138167
  hypo

SEQ ID NO: 393971 - DNA, 96 bp, Homo sapiens; identical to SEQ ID NO: 270499
  chr17:27171310-27171406
  hypo

SEQ ID NO: 393972 - DNA, 74 bp, Homo sapiens; identical to SEQ ID NO: 384646
  chr17:27333201-27333275
  hypo

SEQ ID NO: 393973 - DNA, 69 bp, Homo sapiens; identical to SEQ ID NO: 217648
  chr17:27407262-27407331
  hypo

SEQ ID NO: 393974 - DNA, 36 bp, Homo sapiens; identical to SEQ ID NO: 270518
  chr17:27908746-27908782
  hypo

SEQ ID NO: 393975 - DNA, 360 bp, Homo sapiens; identical to SEQ ID NO: 225260
  chr17:27942986-27943346
  hypo

SEQ ID NO: 393976 - DNA, 174 bp, Homo sapiens; identical to SEQ ID NO: 204493
  chr17:29527439-29527613
  hypo

SEQ ID NO: 393977 - DNA, 136 bp, Homo sapiens; identical to SEQ ID NO: 204499
  chr17:29546009-29546145
  hypo

SEQ ID NO: 393978 - DNA, 156 bp, Homo sapiens; identical to SEQ ID NO: 204502
  chr17:29552112-29552268
  hypo

SEQ ID NO: 393979 - DNA, 250 bp, Homo sapiens; identical to SEQ ID NO: 204503
  chr17:29553452-29553702
  hypo

SEQ ID NO: 393980 - DNA, 117 bp, Homo sapiens; identical to SEQ ID NO: 204510
  chr17:29559090-29559207
  hypo

SEQ ID NO: 393981 - DNA, 136 bp, Homo sapiens; identical to SEQ ID NO: 204514
  chr17:29576001-29576137
  hypo

SEQ ID NO: 393982 - DNA, 203 bp, Homo sapiens; identical to SEQ ID NO: 204523
  chr17:29657313-29657516
  hypo

SEQ ID NO: 393983 - DNA, 410 bp, Homo sapiens; identical to SEQ ID NO: 204535
  chr17:29683977-29684387
  hypo

SEQ ID NO: 393984 - DNA, 143 bp, Homo sapiens; identical to SEQ ID NO: 204536
  chr17:29685497-29685640
  hypo

SEQ ID NO: 393985 - DNA, 217 bp, Homo sapiens; identical to SEQ ID NO: 204538
  chr17:29687504-29687721
  hypo

SEQ ID NO: 393986 - DNA, 241 bp, Homo sapiens; identical to SEQ ID NO: 270534
  chr17:30348356-30348597
  hypo

SEQ ID NO: 393987 - DNA, 40 bp, Homo sapiens; identical to SEQ ID NO: 270536
  chr17:30582939-30582979
  hypo

SEQ ID NO: 393988 - DNA, 89 bp, Homo sapiens; identical to SEQ ID NO: 204542
  chr17:30813422-30813511
  hypo

SEQ ID NO: 393989 - DNA, 105 bp, Homo sapiens; identical to SEQ ID NO: 225322
  chr17:31203740-31203845
  hypo

SEQ ID NO: 393990 - DNA, 172 bp, Homo sapiens; identical to SEQ ID NO: 270557
  chr17:35045439-35045611
  hypo

SEQ ID NO: 393991 - DNA, 35 bp, Homo sapiens; identical to SEQ ID NO: 217732
  chr17:35414066-35414101
  hypo

SEQ ID NO: 393992 - DNA, 42 bp, Homo sapiens; identical to SEQ ID NO: 270568
  chr17:36818503-36818545
  hypo

SEQ ID NO: 393993 - DNA, 42 bp, Homo sapiens; identical to SEQ ID NO: 217742
  chr17:36967822-36967864
  hypo

SEQ ID NO: 393994 - DNA, 35 bp, Homo sapiens; identical to SEQ ID NO: 270580
  chr17:37276419-37276454
  hypo

SEQ ID NO: 393995 - DNA, 85 bp, Homo sapiens; identical to SEQ ID NO: 217747
  chr17:37483846-37483931
  hypo

SEQ ID NO: 393996 - DNA, 180 bp, Homo sapiens; identical to SEQ ID NO: 270587
  chr17:37583288-37583468
  hypo

SEQ ID NO: 393997 - DNA, 31 bp, Homo sapiens; identical to SEQ ID NO: 322392
  chr17:37887589-37887620
  hypo

SEQ ID NO: 393998 - DNA, 84 bp, Homo sapiens; identical to SEQ ID NO: 270594
  chr17:38075339-38075423
  hypo

SEQ ID NO: 393999 - DNA, 120 bp, Homo sapiens; identical to SEQ ID NO: 217758
  chr17:38105714-38105834
  hypo

SEQ ID NO: 394000 - DNA, 46 bp, Homo sapiens; identical to SEQ ID NO: 217762
  chr17:38244541-38244587
  hypo

SEQ ID NO: 394001 - DNA, 504 bp, Homo sapiens; identical to SEQ ID NO: 217763
  chr17:38249240-38249744
  hypo

SEQ ID NO: 394002 - DNA, 164 bp, Homo sapiens; identical to SEQ ID NO: 270600
  chr17:38250103-38250267
  hypo

SEQ ID NO: 394003 - DNA, 124 bp, Homo sapiens; identical to SEQ ID NO: 217764
  chr17:38251853-38251977
  hypo

SEQ ID NO: 394004 - DNA, 120 bp, Homo sapiens; identical to SEQ ID NO: 270602
  chr17:38276209-38276329
  hypo

SEQ ID NO: 394005 - DNA, 37 bp, Homo sapiens; identical to SEQ ID NO: 217765
  chr17:38380418-38380455
  hypo

SEQ ID NO: 394006 - DNA, 91 bp, Homo sapiens; identical to SEQ ID NO: 217769
  chr17:38513565-38513656
  hypo

SEQ ID NO: 394007 - DNA, 41 bp, Homo sapiens; identical to SEQ ID NO: 270607
  chr17:38638673-38638714
  hypo

SEQ ID NO: 394008 - DNA, 97 bp, Homo sapiens; identical to SEQ ID NO: 270608
  chr17:38656559-38656656
  hypo

SEQ ID NO: 394009 - DNA, 323 bp, Homo sapiens; identical to SEQ ID NO: 270612
  chr17:38774236-38774559
  hypo

SEQ ID NO: 394010 - DNA, 111 bp, Homo sapiens; identical to SEQ ID NO: 270625
  chr17:39694232-39694343
  hypo

SEQ ID NO: 394011 - DNA, 136 bp, Homo sapiens; identical to SEQ ID NO: 270630
  chr17:40330251-40330387
  hypo

SEQ ID NO: 394012 - DNA, 203 bp, Homo sapiens; identical to SEQ ID NO: 270633
  chr17:40362204-40362407
  hypo

SEQ ID NO: 394013 - DNA, 418 bp, Homo sapiens; identical to SEQ ID NO: 270645
  chr17:40456105-40456523
  hypo

SEQ ID NO: 394014 - DNA, 196 bp, Homo sapiens; identical to SEQ ID NO: 270655
  chr17:40695505-40695701
  hypo

SEQ ID NO: 394015 - DNA, 42 bp, Homo sapiens; identical to SEQ ID NO: 270658
  chr17:40711057-40711099
  hypo

SEQ ID NO: 394016 - DNA, 104 bp, Homo sapiens; identical to SEQ ID NO: 270662
  chr17:40820751-40820855
  hypo

SEQ ID NO: 394017 - DNA, 33 bp, Homo sapiens; identical to SEQ ID NO: 270664
  chr17:40856548-40856581
  hypo

SEQ ID NO: 394018 - DNA, 93 bp, Homo sapiens; identical to SEQ ID NO: 322480
  chr17:40951180-40951273
  hypo

SEQ ID NO: 394019 - DNA, 58 bp, Homo sapiens; identical to SEQ ID NO: 217798
  chr17:41131474-41131532
  hypo

SEQ ID NO: 394020 - DNA, 43 bp, Homo sapiens; identical to SEQ ID NO: 270672
  chr17:41177996-41178039
  hypo

SEQ ID NO: 394021 - DNA, 38 bp, Homo sapiens; identical to SEQ ID NO: 292338
  chr17:41209114-41209152
  hypo

SEQ ID NO: 394022 - DNA, 172 bp, Homo sapiens; identical to SEQ ID NO: 225368
  chr17:41234420-41234592
  hypo

SEQ ID NO: 394023 - DNA, 89 bp, Homo sapiens; identical to SEQ ID NO: 225369
  chr17:41242960-41243049
  hypo

SEQ ID NO: 394024 - DNA, 77 bp, Homo sapiens; identical to SEQ ID NO: 225371
  chr17:41247862-41247939
  hypo

SEQ ID NO: 394025 - DNA, 120 bp, Homo sapiens; identical to SEQ ID NO: 322506
  chr17:41290192-41290312
  hypo

SEQ ID NO: 394026 - DNA, 33 bp, Homo sapiens; identical to SEQ ID NO: 270680
  chr17:41444581-41444614
  hypo

SEQ ID NO: 394027 - DNA, 37 bp, Homo sapiens; identical to SEQ ID NO: 270687
  chr17:41915919-41915956
  hypo

SEQ ID NO: 394028 - DNA, 614 bp, Homo sapiens; identical to SEQ ID NO: 292390
  chr17:42298856-42299470
  hypo

SEQ ID NO: 394029 - DNA, 198 bp, Homo sapiens; identical to SEQ ID NO: 270706
  chr17:42427016-42427214
  hypo

SEQ ID NO: 394030 - DNA, 388 bp, Homo sapiens; identical to SEQ ID NO: 217815
  chr17:42427764-42428152
  hypo

SEQ ID NO: 394031 - DNA, 159 bp, Homo sapiens; identical to SEQ ID NO: 217819
  chr17:42942200-42942359
  hypo

SEQ ID NO: 394032 - DNA, 207 bp, Homo sapiens; identical to SEQ ID NO: 217821
  chr17:42992858-42993065
  hypo

SEQ ID NO: 394033 - DNA, 85 bp, Homo sapiens; identical to SEQ ID NO: 217825
  chr17:43124006-43124091
  hypo

SEQ ID NO: 394034 - DNA, 33 bp, Homo sapiens; identical to SEQ ID NO: 217826
  chr17:43173433-43173466
  hypo

SEQ ID NO: 394035 - DNA, 223 bp, Homo sapiens; identical to SEQ ID NO: 270724
  chr17:43208547-43208770
  hypo

SEQ ID NO: 394036 - DNA, 113 bp, Homo sapiens; identical to SEQ ID NO: 217833
  chr17:43321183-43321296
  hypo

SEQ ID NO: 394037 - DNA, 88 bp, Homo sapiens; identical to SEQ ID NO: 217834
  chr17:43321347-43321435
  hypo

SEQ ID NO: 394038 - DNA, 37 bp, Homo sapiens; identical to SEQ ID NO: 270747
  chr17:46017956-46017993
  hypo

SEQ ID NO: 394039 - DNA, 33 bp, Homo sapiens; identical to SEQ ID NO: 217842
  chr17:46123911-46123944
  hypo

SEQ ID NO: 394040 - DNA, 57 bp, Homo sapiens; identical to SEQ ID NO: 270754
  chr17:46176826-46176883
  hypo

SEQ ID NO: 394041 - DNA, 37 bp, Homo sapiens; identical to SEQ ID NO: 270756
  chr17:46223566-46223603
  hypo

SEQ ID NO: 394042 - DNA, 120 bp, Homo sapiens; identical to SEQ ID NO: 270757
  chr17:46235537-46235657
  hypo

SEQ ID NO: 394043 - DNA, 66 bp, Homo sapiens; identical to SEQ ID NO: 389489
  chr17:46696472-46696538
  hypo

SEQ ID NO: 394044 - DNA, 119 bp, Homo sapiens; identical to SEQ ID NO: 322624
  chr17:47170956-47171075
  hypo

SEQ ID NO: 394045 - DNA, 53 bp, Homo sapiens; identical to SEQ ID NO: 292495
  chr17:47547746-47547799
  hypo

SEQ ID NO: 394046 - DNA, 92 bp, Homo sapiens; identical to SEQ ID NO: 217858
  chr17:47895284-47895376
  hypo

SEQ ID NO: 394047 - DNA, 162 bp, Homo sapiens; identical to SEQ ID NO: 217859
  chr17:47911774-47911936
  hypo

SEQ ID NO: 394048 - DNA, 85 bp, Homo sapiens; identical to SEQ ID NO: 384670
  chr17:47928527-47928612
  hypo

SEQ ID NO: 394049 - DNA, 173 bp, Homo sapiens; identical to SEQ ID NO: 225421
  chr17:47929093-47929266
  hypo

SEQ ID NO: 394050 - DNA, 282 bp, Homo sapiens; identical to SEQ ID NO: 225427
  chr17:48072333-48072615
  hypo

SEQ ID NO: 394051 - DNA, 113 bp, Homo sapiens; identical to SEQ ID NO: 270776
  chr17:48183244-48183357
  hypo

SEQ ID NO: 394052 - DNA, 79 bp, Homo sapiens; identical to SEQ ID NO: 270778
  chr17:48258096-48258175
  hypo

SEQ ID NO: 394053 - DNA, 219 bp, Homo sapiens; identical to SEQ ID NO: 270779
  chr17:48258578-48258797
  hypo

SEQ ID NO: 394054 - DNA, 40 bp, Homo sapiens; identical to SEQ ID NO: 270786
  chr17:48589712-48589752
  hypo

SEQ ID NO: 394055 - DNA, 45 bp, Homo sapiens; identical to SEQ ID NO: 322657
  chr17:48620600-48620645
  hypo

SEQ ID NO: 394056 - DNA, 115 bp, Homo sapiens; identical to SEQ ID NO: 204711
  chr17:49028000-49028115
  hypo

SEQ ID NO: 394057 - DNA, 46 bp, Homo sapiens; identical to SEQ ID NO: 270808
  chr17:49354211-49354257
  hypo

SEQ ID NO: 394058 - DNA, 43 bp, Homo sapiens; identical to SEQ ID NO: 270810
  chr17:52865183-52865226
  hypo

SEQ ID NO: 394059 - DNA, 36 bp, Homo sapiens; identical to SEQ ID NO: 270812
  chr17:53398066-53398102
  hypo

SEQ ID NO: 394060 - DNA, 185 bp, Homo sapiens; identical to SEQ ID NO: 270818
  chr17:53852162-53852347
  hypo

SEQ ID NO: 394061 - DNA, 271 bp, Homo sapiens; identical to SEQ ID NO: 217885
  chr17:54976882-54977153
  hypo

SEQ ID NO: 394062 - DNA, 43 bp, Homo sapiens; identical to SEQ ID NO: 322698
  chr17:55184835-55184878
  hypo

SEQ ID NO: 394063 - DNA, 34 bp, Homo sapiens; identical to SEQ ID NO: 217889
  chr17:55426663-55426697
  hypo

SEQ ID NO: 394064 - DNA, 44 bp, Homo sapiens; identical to SEQ ID NO: 217890
  chr17:55519664-55519708
  hypo

SEQ ID NO: 394065 - DNA, 32 bp, Homo sapiens; identical to SEQ ID NO: 270831
  chr17:55615595-55615627
  hypo

SEQ ID NO: 394066 - DNA, 91 bp, Homo sapiens; identical to SEQ ID NO: 270834
  chr17:55647400-55647491
  hypo

SEQ ID NO: 394067 - DNA, 182 bp, Homo sapiens; identical to SEQ ID NO: 217892
  chr17:55752305-55752487
  hypo

SEQ ID NO: 394068 - DNA, 32 bp, Homo sapiens; identical to SEQ ID NO: 217899
  chr17:56471400-56471432
  hypo

SEQ ID NO: 394069 - DNA, 31 bp, Homo sapiens; identical to SEQ ID NO: 217907
  chr17:57832470-57832501
  hypo

SEQ ID NO: 394070 - DNA, 36 bp, Homo sapiens; identical to SEQ ID NO: 217910
  chr17:58590466-58590502
  hypo

SEQ ID NO: 394071 - DNA, 125 bp, Homo sapiens; identical to SEQ ID NO: 204731
  chr17:58711213-58711338
  hypo

SEQ ID NO: 394072 - DNA, 599 bp, Homo sapiens; identical to SEQ ID NO: 270884
  chr17:59520971-59521570
  hypo

SEQ ID NO: 394073 - DNA, 41 bp, Homo sapiens; identical to SEQ ID NO: 270900
  chr17:60750844-60750885
  hypo

SEQ ID NO: 394074 - DNA, 192 bp, Homo sapiens; identical to SEQ ID NO: 292604
  chr17:60781450-60781642
  hypo

SEQ ID NO: 394075 - DNA, 393 bp, Homo sapiens; identical to SEQ ID NO: 270916
  chr17:61514950-61515343
  hypo

SEQ ID NO: 394076 - DNA, 89 bp, Homo sapiens; identical to SEQ ID NO: 270921
  chr17:61611415-61611504
  hypo

SEQ ID NO: 394077 - DNA, 85 bp, Homo sapiens; identical to SEQ ID NO: 270946
  chr17:63497915-63498000
  hypo

SEQ ID NO: 394078 - DNA, 40 bp, Homo sapiens; identical to SEQ ID NO: 270957
  chr17:65298392-65298432
  hypo

SEQ ID NO: 394079 - DNA, 201 bp, Homo sapiens; identical to SEQ ID NO: 270965
  chr17:66384596-66384797
  hypo

SEQ ID NO: 394080 - DNA, 127 bp, Homo sapiens; identical to SEQ ID NO: 270977
  chr17:67081066-67081193
  hypo

SEQ ID NO: 394081 - DNA, 209 bp, Homo sapiens; identical to SEQ ID NO: 270978
  chr17:67468376-67468585
  hypo

SEQ ID NO: 394082 - DNA, 31 bp, Homo sapiens; identical to SEQ ID NO: 270979
  chr17:68197136-68197167
  hypo

SEQ ID NO: 394083 - DNA, 64 bp, Homo sapiens; identical to SEQ ID NO: 270984
  chr17:70507522-70507586
  hypo

SEQ ID NO: 394084 - DNA, 85 bp, Homo sapiens; identical to SEQ ID NO: 270986
  chr17:70705003-70705088
  hypo

SEQ ID NO: 394085 - DNA, 603 bp, Homo sapiens; identical to SEQ ID NO: 322892
  chr17:70712101-70712704
  hypo

SEQ ID NO: 394086 - DNA, 87 bp, Homo sapiens; identical to SEQ ID NO: 322893
  chr17:70712734-70712821
  hypo

SEQ ID NO: 394087 - DNA, 120 bp, Homo sapiens; identical to SEQ ID NO: 270990
  chr17:70948870-70948990
  hypo

SEQ ID NO: 394088 - DNA, 42 bp, Homo sapiens; identical to SEQ ID NO: 270993
  chr17:71190856-71190898
  hypo

SEQ ID NO: 394089 - DNA, 87 bp, Homo sapiens; identical to SEQ ID NO: 217979
  chr17:71272524-71272611
  hypo

SEQ ID NO: 394090 - DNA, 154 bp, Homo sapiens; identical to SEQ ID NO: 271004
  chr17:71326305-71326459
  hypo

SEQ ID NO: 394091 - DNA, 199 bp, Homo sapiens; identical to SEQ ID NO: 271005
  chr17:71345761-71345960
  hypo

SEQ ID NO: 394092 - DNA, 449 bp, Homo sapiens; identical to SEQ ID NO: 389524
  chr17:72208668-72209117
  hypo

SEQ ID NO: 394093 - DNA, 49 bp, Homo sapiens; identical to SEQ ID NO: 271032
  chr17:72370873-72370922
  hypo

SEQ ID NO: 394094 - DNA, 34 bp, Homo sapiens; identical to SEQ ID NO: 271037
  chr17:72808771-72808805
  hypo

SEQ ID NO: 394095 - DNA, 43 bp, Homo sapiens; identical to SEQ ID NO: 271047
  chr17:72999880-72999923
  hypo

SEQ ID NO: 394096 - DNA, 113 bp, Homo sapiens; identical to SEQ ID NO: 322974
  chr17:73089510-73089623
  hypo

SEQ ID NO: 394097 - DNA, 369 bp, Homo sapiens; identical to SEQ ID NO: 322975
  chr17:73090127-73090496
  hypo

SEQ ID NO: 394098 - DNA, 221 bp, Homo sapiens; identical to SEQ ID NO: 271065
  chr17:73131495-73131716
  hypo

SEQ ID NO: 394099 - DNA, 120 bp, Homo sapiens; identical to SEQ ID NO: 271071
  chr17:73172030-73172150
  hypo

SEQ ID NO: 394100 - DNA, 180 bp, Homo sapiens; identical to SEQ ID NO: 218016
  chr17:73209661-73209841
  hypo

SEQ ID NO: 394101 - DNA, 151 bp, Homo sapiens; identical to SEQ ID NO: 218018
  chr17:73241507-73241658
  hypo

SEQ ID NO: 394102 - DNA, 214 bp, Homo sapiens; identical to SEQ ID NO: 271081
  chr17:73274193-73274407
  hypo

SEQ ID NO: 394103 - DNA, 397 bp, Homo sapiens; identical to SEQ ID NO: 218023
  chr17:73311549-73311946
  hypo

SEQ ID NO: 394104 - DNA, 156 bp, Homo sapiens; identical to SEQ ID NO: 218038
  chr17:73680637-73680793
  hypo

SEQ ID NO: 394105 - DNA, 46 bp, Homo sapiens; identical to SEQ ID NO: 271107
  chr17:73718995-73719041
  hypo

SEQ ID NO: 394106 - DNA, 45 bp, Homo sapiens; identical to SEQ ID NO: 225503
  chr17:73874667-73874712
  hypo

SEQ ID NO: 394107 - DNA, 31 bp, Homo sapiens; identical to SEQ ID NO: 218047
  chr17:73904785-73904816
  hypo

SEQ ID NO: 394108 - DNA, 44 bp, Homo sapiens; identical to SEQ ID NO: 271128
  chr17:73915888-73915932
  hypo

SEQ ID NO: 394109 - DNA, 102 bp, Homo sapiens; identical to SEQ ID NO: 271133
  chr17:74008701-74008803
  hypo

SEQ ID NO: 394110 - DNA, 31 bp, Homo sapiens; identical to SEQ ID NO: 271140
  chr17:74041104-74041135
  hypo

SEQ ID NO: 394111 - DNA, 50 bp, Homo sapiens; identical to SEQ ID NO: 271150
  chr17:74094005-74094055
  hypo

SEQ ID NO: 394112 - DNA, 33 bp, Homo sapiens; identical to SEQ ID NO: 271154
  chr17:74333712-74333745
  hypo

SEQ ID NO: 394113 - DNA, 180 bp, Homo sapiens; identical to SEQ ID NO: 271172
  chr17:74574205-74574385
  hypo

SEQ ID NO: 394114 - DNA, 34 bp, Homo sapiens; identical to SEQ ID NO: 218070
  chr17:74579152-74579186
  hypo

SEQ ID NO: 394115 - DNA, 232 bp, Homo sapiens; identical to SEQ ID NO: 204805
  chr17:74732973-74733205
  hypo

SEQ ID NO: 394116 - DNA, 253 bp, Homo sapiens; identical to SEQ ID NO: 218077
  chr17:74771040-74771293
  hypo

SEQ ID NO: 394117 - DNA, 87 bp, Homo sapiens; identical to SEQ ID NO: 218078
  chr17:74771572-74771659
  hypo

SEQ ID NO: 394118 - DNA, 37 bp, Homo sapiens; identical to SEQ ID NO: 218082
  chr17:75196310-75196347
  hypo

SEQ ID NO: 394119 - DNA, 114 bp, Homo sapiens; identical to SEQ ID NO: 271194
  chr17:75303152-75303266
  hypo

SEQ ID NO: 394120 - DNA, 201 bp, Homo sapiens; identical to SEQ ID NO: 271197
  chr17:75354844-75355045
  hypo

SEQ ID NO: 394121 - DNA, 146 bp, Homo sapiens; identical to SEQ ID NO: 271198
  chr17:75373025-75373171
  hypo

SEQ ID NO: 394122 - DNA, 59 bp, Homo sapiens; identical to SEQ ID NO: 271206
  chr17:75452368-75452427
  hypo

SEQ ID NO: 394123 - DNA, 515 bp, Homo sapiens; identical to SEQ ID NO: 218096
  chr17:75476867-75477382
  hypo

SEQ ID NO: 394124 - DNA, 31 bp, Homo sapiens; identical to SEQ ID NO: 271220
  chr17:75603635-75603666
  hypo

SEQ ID NO: 394125 - DNA, 61 bp, Homo sapiens; identical to SEQ ID NO: 271226
  chr17:75828065-75828126
  hypo

SEQ ID NO: 394126 - DNA, 151 bp, Homo sapiens; identical to SEQ ID NO: 271227
  chr17:75840892-75841043
  hypo

SEQ ID NO: 394127 - DNA, 48 bp, Homo sapiens; identical to SEQ ID NO: 271233
  chr17:76046728-76046776
  hypo

SEQ ID NO: 394128 - DNA, 42 bp, Homo sapiens; identical to SEQ ID NO: 271234
  chr17:76076532-76076574
  hypo

SEQ ID NO: 394129 - DNA, 189 bp, Homo sapiens; identical to SEQ ID NO: 218103
  chr17:76129456-76129645
  hypo

SEQ ID NO: 394130 - DNA, 157 bp, Homo sapiens; identical to SEQ ID NO: 225520
  chr17:76349231-76349388
  hypo

SEQ ID NO: 394131 - DNA, 38 bp, Homo sapiens; identical to SEQ ID NO: 271261
  chr17:76396177-76396215
  hypo

SEQ ID NO: 394132 - DNA, 39 bp, Homo sapiens; identical to SEQ ID NO: 323202
  chr17:76396873-76396912
  hypo

SEQ ID NO: 394133 - DNA, 139 bp, Homo sapiens; identical to SEQ ID NO: 218114
  chr17:76397569-76397708
  hypo

SEQ ID NO: 394134 - DNA, 100 bp, Homo sapiens; identical to SEQ ID NO: 218115
  chr17:76404659-76404759
  hypo

SEQ ID NO: 394135 - DNA, 292 bp, Homo sapiens; identical to SEQ ID NO: 218116
  chr17:76404803-76405095
  hypo

SEQ ID NO: 394136 - DNA, 48 bp, Homo sapiens; identical to SEQ ID NO: 218117
  chr17:76405130-76405178
  hypo

SEQ ID NO: 394137 - DNA, 193 bp, Homo sapiens; identical to SEQ ID NO: 271270
  chr17:76457712-76457905
  hypo

SEQ ID NO: 394138 - DNA, 39 bp, Homo sapiens; identical to SEQ ID NO: 271301
  chr17:76963990-76964029
  hypo

SEQ ID NO: 394139 - DNA, 72 bp, Homo sapiens; identical to SEQ ID NO: 218129
  chr17:76977964-76978036
  hypo

SEQ ID NO: 394140 - DNA, 145 bp, Homo sapiens; identical to SEQ ID NO: 218140
  chr17:76999462-76999607
  hypo

SEQ ID NO: 394141 - DNA, 85 bp, Homo sapiens; identical to SEQ ID NO: 271331
  chr17:77206526-77206611
  hypo

SEQ ID NO: 394142 - DNA, 213 bp, Homo sapiens; identical to SEQ ID NO: 271332
  chr17:77224254-77224467
  hypo

SEQ ID NO: 394143 - DNA, 31 bp, Homo sapiens; identical to SEQ ID NO: 271338
  chr17:77385164-77385195
  hypo

SEQ ID NO: 394144 - DNA, 386 bp, Homo sapiens; identical to SEQ ID NO: 225527
  chr17:77774854-77775240
  hypo

SEQ ID NO: 394145 - DNA, 63 bp, Homo sapiens; identical to SEQ ID NO: 271346
  chr17:77900547-77900610
  hypo

SEQ ID NO: 394146 - DNA, 61 bp, Homo sapiens; identical to SEQ ID NO: 271366
  chr17:77954476-77954537
  hypo

SEQ ID NO: 394147 - DNA, 100 bp, Homo sapiens; identical to SEQ ID NO: 271368
  chr17:77956294-77956394
  hypo

SEQ ID NO: 394148 - DNA, 484 bp, Homo sapiens; identical to SEQ ID NO: 271370
  chr17:77975731-77976215
  hypo

SEQ ID NO: 394149 - DNA, 443 bp, Homo sapiens; identical to SEQ ID NO: 225536
  chr17:78010060-78010503
  hypo

SEQ ID NO: 394150 - DNA, 175 bp, Homo sapiens; identical to SEQ ID NO: 271377
  chr17:78022348-78022523
  hypo

SEQ ID NO: 394151 - DNA, 225 bp, Homo sapiens; identical to SEQ ID NO: 271380
  chr17:78026928-78027153
  hypo

SEQ ID NO: 394152 - DNA, 212 bp, Homo sapiens; identical to SEQ ID NO: 271384
  chr17:78055253-78055465
  hypo

SEQ ID NO: 394153 - DNA, 194 bp, Homo sapiens; identical to SEQ ID NO: 323348
  chr17:78083553-78083747
  hypo

SEQ ID NO: 394154 - DNA, 37 bp, Homo sapiens; identical to SEQ ID NO: 323349
  chr17:78083818-78083855
  hypo

SEQ ID NO: 394155 - DNA, 33 bp, Homo sapiens; identical to SEQ ID NO: 271399
  chr17:78179550-78179583
  hypo

SEQ ID NO: 394156 - DNA, 96 bp, Homo sapiens; identical to SEQ ID NO: 271401
  chr17:78188823-78188919
  hypo

SEQ ID NO: 394157 - DNA, 129 bp, Homo sapiens; identical to SEQ ID NO: 218183
  chr17:78195404-78195533
  hypo

SEQ ID NO: 394158 - DNA, 54 bp, Homo sapiens; identical to SEQ ID NO: 271411
  chr17:78338098-78338152
  hypo

SEQ ID NO: 394159 - DNA, 90 bp, Homo sapiens; identical to SEQ ID NO: 225538
  chr17:78389461-78389551
  hypo

SEQ ID NO: 394160 - DNA, 136 bp, Homo sapiens; identical to SEQ ID NO: 271419
  chr17:78442642-78442778
  hypo

SEQ ID NO: 394161 - DNA, 117 bp, Homo sapiens; identical to SEQ ID NO: 271420
  chr17:78475921-78476038
  hypo

SEQ ID NO: 394162 - DNA, 290 bp, Homo sapiens; identical to SEQ ID NO: 271441
  chr17:78747664-78747954
  hypo

SEQ ID NO: 394163 - DNA, 31 bp, Homo sapiens; identical to SEQ ID NO: 271447
  chr17:78782970-78783001
  hypo

SEQ ID NO: 394164 - DNA, 31 bp, Homo sapiens; identical to SEQ ID NO: 271448
  chr17:78783241-78783272
  hypo

SEQ ID NO: 394165 - DNA, 196 bp, Homo sapiens; identical to SEQ ID NO: 323411
  chr17:78794034-78794230
  hypo

SEQ ID NO: 394166 - DNA, 232 bp, Homo sapiens; identical to SEQ ID NO: 271463
  chr17:78870192-78870424
  hypo

SEQ ID NO: 394167 - DNA, 183 bp, Homo sapiens; identical to SEQ ID NO: 218206
  chr17:78873841-78874024
  hypo

SEQ ID NO: 394168 - DNA, 449 bp, Homo sapiens; identical to SEQ ID NO: 218207
  chr17:78876642-78877091
  hypo

SEQ ID NO: 394169 - DNA, 109 bp, Homo sapiens; identical to SEQ ID NO: 218208
  chr17:78877957-78878066
  hypo

SEQ ID NO: 394170 - DNA, 37 bp, Homo sapiens; identical to SEQ ID NO: 271477
  chr17:78975640-78975677
  hypo

SEQ ID NO: 394171 - DNA, 71 bp, Homo sapiens; identical to SEQ ID NO: 323438
  chr17:78999784-78999855
  hypo

SEQ ID NO: 394172 - DNA, 34 bp, Homo sapiens; identical to SEQ ID NO: 271492
  chr17:79052330-79052364
  hypo

SEQ ID NO: 394173 - DNA, 133 bp, Homo sapiens; identical to SEQ ID NO: 271498
  chr17:79061383-79061516
  hypo

SEQ ID NO: 394174 - DNA, 97 bp, Homo sapiens; identical to SEQ ID NO: 218221
  chr17:79065509-79065606
  hypo

SEQ ID NO: 394175 - DNA, 123 bp, Homo sapiens; identical to SEQ ID NO: 218230
  chr17:79083370-79083493
  hypo

SEQ ID NO: 394176 - DNA, 356 bp, Homo sapiens; identical to SEQ ID NO: 218238
  chr17:79102634-79102990
  hypo

SEQ ID NO: 394177 - DNA, 148 bp, Homo sapiens; identical to SEQ ID NO: 271525
  chr17:79133081-79133229
  hypo

SEQ ID NO: 394178 - DNA, 182 bp, Homo sapiens; identical to SEQ ID NO: 271527
  chr17:79135804-79135986
  hypo

SEQ ID NO: 394179 - DNA, 264 bp, Homo sapiens; identical to SEQ ID NO: 271528
  chr17:79154928-79155192
  hypo

SEQ ID NO: 394180 - DNA, 36 bp, Homo sapiens; identical to SEQ ID NO: 271531
  chr17:79168720-79168756
  hypo

SEQ ID NO: 394181 - DNA, 278 bp, Homo sapiens; identical to SEQ ID NO: 271532
  chr17:79169406-79169684
  hypo

SEQ ID NO: 394182 - DNA, 60 bp, Homo sapiens; identical to SEQ ID NO: 218257
  chr17:79653803-79653863
  hypo

SEQ ID NO: 394183 - DNA, 260 bp, Homo sapiens; identical to SEQ ID NO: 271571
  chr17:79772552-79772812
  hypo

SEQ ID NO: 394184 - DNA, 42 bp, Homo sapiens; identical to SEQ ID NO: 271572
  chr17:79776471-79776513
  hypo

SEQ ID NO: 394185 - DNA, 278 bp, Homo sapiens; identical to SEQ ID NO: 271574
  chr17:79792218-79792496
  hypo

SEQ ID NO: 394186 - DNA, 243 bp, Homo sapiens; identical to SEQ ID NO: 271577
  chr17:79804099-79804342
  hypo

SEQ ID NO: 394187 - DNA, 138 bp, Homo sapiens; identical to SEQ ID NO: 225549
  chr17:79885939-79886077
  hypo

SEQ ID NO: 394188 - DNA, 83 bp, Homo sapiens; identical to SEQ ID NO: 218270
  chr17:79892730-79892813
  hypo

SEQ ID NO: 394189 - DNA, 412 bp, Homo sapiens; identical to SEQ ID NO: 323553
  chr17:79892890-79893302
  hypo

SEQ ID NO: 394190 - DNA, 378 bp, Homo sapiens; identical to SEQ ID NO: 271599
  chr17:79961365-79961743
  hypo

SEQ ID NO: 394191 - DNA, 280 bp, Homo sapiens; identical to SEQ ID NO: 323570
  chr17:79977136-79977416
  hypo

SEQ ID NO: 394192 - DNA, 209 bp, Homo sapiens; identical to SEQ ID NO: 323571
  chr17:79977446-79977655
  hypo

SEQ ID NO: 394193 - DNA, 40 bp, Homo sapiens; identical to SEQ ID NO: 204847
  chr17:79989900-79989940
  hypo

SEQ ID NO: 394194 - DNA, 373 bp, Homo sapiens; identical to SEQ ID NO: 218283
  chr17:80005250-80005623
  hypo

SEQ ID NO: 394195 - DNA, 267 bp, Homo sapiens; identical to SEQ ID NO: 218284
  chr17:80018605-80018872
  hypo

SEQ ID NO: 394196 - DNA, 64 bp, Homo sapiens; identical to SEQ ID NO: 218288
  chr17:80038872-80038936
  hypo

SEQ ID NO: 394197 - DNA, 87 bp, Homo sapiens; identical to SEQ ID NO: 218289
  chr17:80040622-80040709
  hypo

SEQ ID NO: 394198 - DNA, 282 bp, Homo sapiens; identical to SEQ ID NO: 271618
  chr17:80062707-80062989
  hypo

SEQ ID NO: 394199 - DNA, 187 bp, Homo sapiens; identical to SEQ ID NO: 271623
  chr17:80135500-80135687
  hypo

SEQ ID NO: 394200 - DNA, 236 bp, Homo sapiens; identical to SEQ ID NO: 271626
  chr17:80159381-80159617
  hypo

SEQ ID NO: 394201 - DNA, 109 bp, Homo sapiens; identical to SEQ ID NO: 271627
  chr17:80176133-80176242
  hypo

SEQ ID NO: 394202 - DNA, 176 bp, Homo sapiens; identical to SEQ ID NO: 271629
  chr17:80202410-80202586
  hypo

SEQ ID NO: 394203 - DNA, 138 bp, Homo sapiens; identical to SEQ ID NO: 271630
  chr17:80207968-80208106
  hypo

SEQ ID NO: 394204 - DNA, 48 bp, Homo sapiens; identical to SEQ ID NO: 218304
  chr17:80260760-80260808
  hypo

SEQ ID NO: 394205 - DNA, 323 bp, Homo sapiens; identical to SEQ ID NO: 271652
  chr17:80355877-80356200
  hypo

SEQ ID NO: 394206 - DNA, 147 bp, Homo sapiens; identical to SEQ ID NO: 323637
  chr17:80448730-80448877
  hypo

SEQ ID NO: 394207 - DNA, 100 bp, Homo sapiens; identical to SEQ ID NO: 271664
  chr17:80487529-80487629
  hypo

SEQ ID NO: 394208 - DNA, 62 bp, Homo sapiens; identical to SEQ ID NO: 271666
  chr17:80503130-80503192
  hypo

SEQ ID NO: 394209 - DNA, 120 bp, Homo sapiens; identical to SEQ ID NO: 218316
  chr17:80593584-80593704
  hypo

SEQ ID NO: 394210 - DNA, 139 bp, Homo sapiens; identical to SEQ ID NO: 218317
  chr17:80604378-80604517
  hypo

SEQ ID NO: 394211 - DNA, 116 bp, Homo sapiens; identical to SEQ ID NO: 271692
  chr17:80671048-80671164
  hypo

SEQ ID NO: 394212 - DNA, 159 bp, Homo sapiens; identical to SEQ ID NO: 271693
  chr17:80671194-80671353
  hypo

SEQ ID NO: 394213 - DNA, 74 bp, Homo sapiens; identical to SEQ ID NO: 218323
  chr17:80678256-80678330
  hypo

SEQ ID NO: 394214 - DNA, 37 bp, Homo sapiens; identical to SEQ ID NO: 323672
  chr17:80692926-80692963
  hypo

SEQ ID NO: 394215 - DNA, 40 bp, Homo sapiens; identical to SEQ ID NO: 271701
  chr17:80744319-80744359
  hypo

SEQ ID NO: 394216 - DNA, 217 bp, Homo sapiens; identical to SEQ ID NO: 218335
  chr17:80819087-80819304
  hypo

SEQ ID NO: 394217 - DNA, 34 bp, Homo sapiens; identical to SEQ ID NO: 271721
  chr17:80825506-80825540
  hypo

SEQ ID NO: 394218 - DNA, 84 bp, Homo sapiens; identical to SEQ ID NO: 271723
  chr17:80828571-80828655
  hypo

SEQ ID NO: 394219 - DNA, 78 bp, Homo sapiens; identical to SEQ ID NO: 218336
  chr17:80830876-80830954
  hypo

SEQ ID NO: 394220 - DNA, 401 bp, Homo sapiens; identical to SEQ ID NO: 323709
  chr17:80847894-80848295
  hypo

SEQ ID NO: 394221 - DNA, 55 bp, Homo sapiens; identical to SEQ ID NO: 271731
  chr17:80859905-80859960
  hypo

SEQ ID NO: 394222 - DNA, 349 bp, Homo sapiens; identical to SEQ ID NO: 271743
  chr17:80898972-80899321
  hypo

SEQ ID NO: 394223 - DNA, 114 bp, Homo sapiens; identical to SEQ ID NO: 218345
  chr17:80917377-80917491
  hypo

SEQ ID NO: 394224 - DNA, 34 bp, Homo sapiens; identical to SEQ ID NO: 271754
  chr17:80997455-80997489
  hypo

SEQ ID NO: 394225 - DNA, 192 bp, Homo sapiens; identical to SEQ ID NO: 271771
  chr17:81102241-81102433
  hypo

SEQ ID NO: 394226 - DNA, 177 bp, Homo sapiens; identical to SEQ ID NO: 271772
  chr17:81104183-81104360
  hypo

SEQ ID NO: 394227 - DNA, 37 bp, Homo sapiens; identical to SEQ ID NO: 218363
  chr18:698119-698156
  hypo

SEQ ID NO: 394228 - DNA, 192 bp, Homo sapiens; identical to SEQ ID NO: 271792
  chr18:2851484-2851676
  hypo

SEQ ID NO: 394229 - DNA, 34 bp, Homo sapiens; identical to SEQ ID NO: 271795
  chr18:2910452-2910486
  hypo

SEQ ID NO: 394230 - DNA, 36 bp, Homo sapiens; identical to SEQ ID NO: 271811
  chr18:3412987-3413023
  hypo

SEQ ID NO: 394231 - DNA, 120 bp, Homo sapiens; identical to SEQ ID NO: 218379
  chr18:3443851-3443971
  hypo

SEQ ID NO: 394232 - DNA, 631 bp, Homo sapiens; identical to SEQ ID NO: 204865
  chr18:3447898-3448529
  hypo

SEQ ID NO: 394233 - DNA, 42 bp, Homo sapiens; identical to SEQ ID NO: 218384
  chr18:3534580-3534622
  hypo

SEQ ID NO: 394234 - DNA, 62 bp, Homo sapiens; identical to SEQ ID NO: 271825
  chr18:3592367-3592429
  hypo

SEQ ID NO: 394235 - DNA, 76 bp, Homo sapiens; identical to SEQ ID NO: 271829
  chr18:3608039-3608115
  hypo

SEQ ID NO: 394236 - DNA, 90 bp, Homo sapiens; identical to SEQ ID NO: 292875
  chr18:4455561-4455651
  hypo

SEQ ID NO: 394237 - DNA, 154 bp, Homo sapiens; identical to SEQ ID NO: 271845
  chr18:5149403-5149557
  hypo

SEQ ID NO: 394238 - DNA, 198 bp, Homo sapiens; identical to SEQ ID NO: 271849
  chr18:6284881-6285079
  hypo

SEQ ID NO: 394239 - DNA, 80 bp, Homo sapiens; identical to SEQ ID NO: 218399
  chr18:7351750-7351830
  hypo

SEQ ID NO: 394240 - DNA, 409 bp, Homo sapiens; identical to SEQ ID NO: 271854
  chr18:8348210-8348619
  hypo

SEQ ID NO: 394241 - DNA, 200 bp, Homo sapiens; identical to SEQ ID NO: 292896
  chr18:8367259-8367459
  hypo

SEQ ID NO: 394242 - DNA, 56 bp, Homo sapiens; identical to SEQ ID NO: 271862
  chr18:8711911-8711967
  hypo

SEQ ID NO: 394243 - DNA, 154 bp, Homo sapiens; identical to SEQ ID NO: 271872
  chr18:8814259-8814413
  hypo

SEQ ID NO: 394244 - DNA, 31 bp, Homo sapiens; identical to SEQ ID NO: 218414
  chr18:9101197-9101228
  hypo

SEQ ID NO: 394245 - DNA, 162 bp, Homo sapiens; identical to SEQ ID NO: 218424
  chr18:9797400-9797562
  hypo

SEQ ID NO: 394246 - DNA, 269 bp, Homo sapiens; identical to SEQ ID NO: 271901
  chr18:9838068-9838337
  hypo

SEQ ID NO: 394247 - DNA, 83 bp, Homo sapiens; identical to SEQ ID NO: 271908
  chr18:10047642-10047725
  hypo

SEQ ID NO: 394248 - DNA, 249 bp, Homo sapiens; identical to SEQ ID NO: 271910
  chr18:10150712-10150961
  hypo

SEQ ID NO: 394249 - DNA, 98 bp, Homo sapiens; identical to SEQ ID NO: 271913
  chr18:10336858-10336956
  hypo

SEQ ID NO: 394250 - DNA, 64 bp, Homo sapiens; identical to SEQ ID NO: 271918
  chr18:10538267-10538331
  hypo

SEQ ID NO: 394251 - DNA, 45 bp, Homo sapiens; identical to SEQ ID NO: 271927
  chr18:11589694-11589739
  hypo

SEQ ID NO: 394252 - DNA, 681 bp, Homo sapiens; identical to SEQ ID NO: 384702
  chr18:12308216-12308897
  hypo

SEQ ID NO: 394253 - DNA, 125 bp, Homo sapiens; identical to SEQ ID NO: 384703
  chr18:12308927-12309052
  hypo

SEQ ID NO: 394254 - DNA, 98 bp, Homo sapiens; identical to SEQ ID NO: 218443
  chr18:12431471-12431569
  hypo

SEQ ID NO: 394255 - DNA, 101 bp, Homo sapiens; identical to SEQ ID NO: 271963
  chr18:13181960-13182061
  hypo

SEQ ID NO: 394256 - DNA, 130 bp, Homo sapiens; identical to SEQ ID NO: 271976
  chr18:13393100-13393230
  hypo

SEQ ID NO: 394257 - DNA, 125 bp, Homo sapiens; identical to SEQ ID NO: 324006
  chr18:13460975-13461100
  hypo

SEQ ID NO: 394258 - DNA, 98 bp, Homo sapiens; identical to SEQ ID NO: 324007
  chr18:13461383-13461481
  hypo

SEQ ID NO: 394259 - DNA, 43 bp, Homo sapiens; identical to SEQ ID NO: 324010
  chr18:13477929-13477972
  hypo

SEQ ID NO: 394260 - DNA, 44 bp, Homo sapiens; identical to SEQ ID NO: 271998
  chr18:13505525-13505569
  hypo

SEQ ID NO: 394261 - DNA, 147 bp, Homo sapiens; identical to SEQ ID NO: 272001
  chr18:13519311-13519458
  hypo

SEQ ID NO: 394262 - DNA, 202 bp, Homo sapiens; identical to SEQ ID NO: 218463
  chr18:13525325-13525527
  hypo

SEQ ID NO: 394263 - DNA, 88 bp, Homo sapiens; identical to SEQ ID NO: 272015
  chr18:18997462-18997550
  hypo

SEQ ID NO: 394264 - DNA, 34 bp, Homo sapiens; identical to SEQ ID NO: 218468
  chr18:19778302-19778336
  hypo

SEQ ID NO: 394265 - DNA, 132 bp, Homo sapiens; identical to SEQ ID NO: 272024
  chr18:20380480-20380612
  hypo

SEQ ID NO: 394266 - DNA, 256 bp, Homo sapiens; identical to SEQ ID NO: 272031
  chr18:20853662-20853918
  hypo

SEQ ID NO: 394267 - DNA, 42 bp, Homo sapiens; identical to SEQ ID NO: 218478
  chr18:20910923-20910965
  hypo

SEQ ID NO: 394268 - DNA, 155 bp, Homo sapiens; identical to SEQ ID NO: 272036
  chr18:21104196-21104351
  hypo

SEQ ID NO: 394269 - DNA, 48 bp, Homo sapiens; identical to SEQ ID NO: 218480
  chr18:21164538-21164586
  hypo

SEQ ID NO: 394270 - DNA, 389 bp, Homo sapiens; identical to SEQ ID NO: 389559
  chr18:21242427-21242816
  hypo

SEQ ID NO: 394271 - DNA, 204 bp, Homo sapiens; identical to SEQ ID NO: 272048
  chr18:22098635-22098839
  hypo

SEQ ID NO: 394272 - DNA, 186 bp, Homo sapiens; identical to SEQ ID NO: 272050
  chr18:22597055-22597241
  hypo

SEQ ID NO: 394273 - DNA, 105 bp, Homo sapiens; identical to SEQ ID NO: 225614
  chr18:22653839-22653944
  hypo

SEQ ID NO: 394274 - DNA, 154 bp, Homo sapiens; identical to SEQ ID NO: 218486
  chr18:23652341-23652495
  hypo

SEQ ID NO: 394275 - DNA, 32 bp, Homo sapiens; identical to SEQ ID NO: 272062
  chr18:24409812-24409844
  hypo

SEQ ID NO: 394276 - DNA, 36 bp, Homo sapiens; identical to SEQ ID NO: 204939
  chr18:29265160-29265196
  hypo

SEQ ID NO: 394277 - DNA, 54 bp, Homo sapiens; identical to SEQ ID NO: 218493
  chr18:29293795-29293849
  hypo

SEQ ID NO: 394278 - DNA, 178 bp, Homo sapiens; identical to SEQ ID NO: 55008
  chr18:31803673-31803851
  hypo

SEQ ID NO: 394279 - DNA, 240 bp, Homo sapiens; identical to SEQ ID NO: 225630
  chr18:33766971-33767211
  hypo

SEQ ID NO: 394280 - DNA, 47 bp, Homo sapiens; identical to SEQ ID NO: 272095
  chr18:42295260-42295307
  hypo

SEQ ID NO: 394281 - DNA, 67 bp, Homo sapiens; identical to SEQ ID NO: 204969
  chr18:42531892-42531959
  hypo

SEQ ID NO: 394282 - DNA, 192 bp, Homo sapiens; identical to SEQ ID NO: 272098
  chr18:43307167-43307359
  hypo

SEQ ID NO: 394283 - DNA, 32 bp, Homo sapiens; identical to SEQ ID NO: 218512
  chr18:43599472-43599504
  hypo

SEQ ID NO: 394284 - DNA, 336 bp, Homo sapiens; identical to SEQ ID NO: 272106
  chr18:43906510-43906846
  hypo

SEQ ID NO: 394285 - DNA, 34 bp, Homo sapiens; identical to SEQ ID NO: 272113
  chr18:45186646-45186680
  hypo

SEQ ID NO: 394286 - DNA, 194 bp, Homo sapiens; identical to SEQ ID NO: 272119
  chr18:45820419-45820613
  hypo

SEQ ID NO: 394287 - DNA, 291 bp, Homo sapiens; identical to SEQ ID NO: 272122
  chr18:46142031-46142322
  hypo

SEQ ID NO: 394288 - DNA, 84 bp, Homo sapiens; identical to SEQ ID NO: 272131
  chr18:46524824-46524908
  hypo

SEQ ID NO: 394289 - DNA, 255 bp, Homo sapiens; identical to SEQ ID NO: 272132
  chr18:46547227-46547482
  hypo

SEQ ID NO: 394290 - DNA, 40 bp, Homo sapiens; identical to SEQ ID NO: 205004
  chr18:53257761-53257801
  hypo

SEQ ID NO: 394291 - DNA, 187 bp, Homo sapiens; identical to SEQ ID NO: 272158
  chr18:55760789-55760976
  hypo

SEQ ID NO: 394292 - DNA, 33 bp, Homo sapiens; identical to SEQ ID NO: 272160
  chr18:55817734-55817767
  hypo

SEQ ID NO: 394293 - DNA, 184 bp, Homo sapiens; identical to SEQ ID NO: 272168
  chr18:55945680-55945864
  hypo

SEQ ID NO: 394294 - DNA, 173 bp, Homo sapiens; identical to SEQ ID NO: 272170
  chr18:55977131-55977304
  hypo

SEQ ID NO: 394295 - DNA, 183 bp, Homo sapiens; identical to SEQ ID NO: 324227
  chr18:55992342-55992525
  hypo

SEQ ID NO: 394296 - DNA, 141 bp, Homo sapiens; identical to SEQ ID NO: 272177
  chr18:56359260-56359401
  hypo

SEQ ID NO: 394297 - DNA, 136 bp, Homo sapiens; identical to SEQ ID NO: 218545
  chr18:56483782-56483918
  hypo

SEQ ID NO: 394298 - DNA, 83 bp, Homo sapiens; identical to SEQ ID NO: 272187
  chr18:59834319-59834402
  hypo

SEQ ID NO: 394299 - DNA, 157 bp, Homo sapiens; identical to SEQ ID NO: 272197
  chr18:60154518-60154675
  hypo

SEQ ID NO: 394300 - DNA, 1435 bp, Homo sapiens; identical to SEQ ID NO: 205030
  chr18:60382939-60384374
  hypo

SEQ ID NO: 394301 - DNA, 97 bp, Homo sapiens; identical to SEQ ID NO: 272211
  chr18:60614284-60614381
  hypo

SEQ ID NO: 394302 - DNA, 111 bp, Homo sapiens; identical to SEQ ID NO: 272218
  chr18:60959765-60959876
  hypo

SEQ ID NO: 394303 - DNA, 361 bp, Homo sapiens; identical to SEQ ID NO: 272229
  chr18:67992600-67992961
  hypo

SEQ ID NO: 394304 - DNA, 83 bp, Homo sapiens; identical to SEQ ID NO: 272233
  chr18:71847878-71847961
  hypo

SEQ ID NO: 394305 - DNA, 171 bp, Homo sapiens; identical to SEQ ID NO: 218577
  chr18:71889077-71889248
  hypo

SEQ ID NO: 394306 - DNA, 34 bp, Homo sapiens; identical to SEQ ID NO: 272268
  chr18:73282767-73282801
  hypo

SEQ ID NO: 394307 - DNA, 96 bp, Homo sapiens; identical to SEQ ID NO: 272270
  chr18:74065277-74065373
  hypo

SEQ ID NO: 394308 - DNA, 52 bp, Homo sapiens; identical to SEQ ID NO: 218595
  chr18:74094279-74094331
  hypo

SEQ ID NO: 394309 - DNA, 465 bp, Homo sapiens; identical to SEQ ID NO: 272298
  chr18:74143894-74144359
  hypo

SEQ ID NO: 394310 - DNA, 51 bp, Homo sapiens; identical to SEQ ID NO: 272300
  chr18:74147444-74147495
  hypo

SEQ ID NO: 394311 - DNA, 171 bp, Homo sapiens; identical to SEQ ID NO: 272303
  chr18:74149887-74150058
  hypo

SEQ ID NO: 394312 - DNA, 150 bp, Homo sapiens; identical to SEQ ID NO: 272316
  chr18:74260505-74260655
  hypo

SEQ ID NO: 394313 - DNA, 203 bp, Homo sapiens; identical to SEQ ID NO: 272317
  chr18:74275176-74275379
  hypo

SEQ ID NO: 394314 - DNA, 280 bp, Homo sapiens; identical to SEQ ID NO: 272325
  chr18:74420127-74420407
  hypo

SEQ ID NO: 394315 - DNA, 62 bp, Homo sapiens; identical to SEQ ID NO: 272338
  chr18:74627687-74627749
  hypo

SEQ ID NO: 394316 - DNA, 99 bp, Homo sapiens; identical to SEQ ID NO: 218625
  chr18:74729467-74729566
  hypo

SEQ ID NO: 394317 - DNA, 237 bp, Homo sapiens; identical to SEQ ID NO: 272353
  chr18:74731842-74732079
  hypo

SEQ ID NO: 394318 - DNA, 284 bp, Homo sapiens; identical to SEQ ID NO: 272355
  chr18:74734080-74734364
  hypo

SEQ ID NO: 394319 - DNA, 37 bp, Homo sapiens; identical to SEQ ID NO: 218637
  chr18:74841696-74841733
  hypo

SEQ ID NO: 394320 - DNA, 136 bp, Homo sapiens; identical to SEQ ID NO: 272375
  chr18:75087208-75087344
  hypo

SEQ ID NO: 394321 - DNA, 208 bp, Homo sapiens; identical to SEQ ID NO: 272377
  chr18:75120506-75120714
  hypo

SEQ ID NO: 394322 - DNA, 37 bp, Homo sapiens; identical to SEQ ID NO: 272382
  chr18:75361204-75361241
  hypo

SEQ ID NO: 394323 - DNA, 155 bp, Homo sapiens; identical to SEQ ID NO: 272393
  chr18:76252107-76252262
  hypo

SEQ ID NO: 394324 - DNA, 165 bp, Homo sapiens; identical to SEQ ID NO: 218651
  chr18:76477630-76477795
  hypo

SEQ ID NO: 394325 - DNA, 210 bp, Homo sapiens; identical to SEQ ID NO: 272405
  chr18:76546830-76547040
  hypo

SEQ ID NO: 394326 - DNA, 45 bp, Homo sapiens; identical to SEQ ID NO: 272420
  chr18:77143641-77143686
  hypo

SEQ ID NO: 394327 - DNA, 58 bp, Homo sapiens; identical to SEQ ID NO: 272421
  chr18:77145392-77145450
  hypo

SEQ ID NO: 394328 - DNA, 379 bp, Homo sapiens; identical to SEQ ID NO: 218663
  chr18:77166684-77167063
  hypo

SEQ ID NO: 394329 - DNA, 356 bp, Homo sapiens; identical to SEQ ID NO: 293196
  chr18:77193428-77193784
  hypo

SEQ ID NO: 394330 - DNA, 1761 bp, Homo sapiens; identical to SEQ ID NO: 218669
  chr18:77196527-77198288
  hypo

SEQ ID NO: 394331 - DNA, 157 bp, Homo sapiens; identical to SEQ ID NO: 272438
  chr18:77208090-77208247
  hypo

SEQ ID NO: 394332 - DNA, 927 bp, Homo sapiens; identical to SEQ ID NO: 218672
  chr18:77210976-77211903
  hypo

SEQ ID NO: 394333 - DNA, 458 bp, Homo sapiens; identical to SEQ ID NO: 218674
  chr18:77212957-77213415
  hypo

SEQ ID NO: 394334 - DNA, 175 bp, Homo sapiens; identical to SEQ ID NO: 218675
  chr18:77215331-77215506
  hypo

SEQ ID NO: 394335 - DNA, 189 bp, Homo sapiens; identical to SEQ ID NO: 272457
  chr18:77304066-77304255
  hypo

SEQ ID NO: 394336 - DNA, 41 bp, Homo sapiens; identical to SEQ ID NO: 218688
  chr18:77315948-77315989
  hypo

SEQ ID NO: 394337 - DNA, 84 bp, Homo sapiens; identical to SEQ ID NO: 218693
  chr18:77356569-77356653
  hypo

SEQ ID NO: 394338 - DNA, 103 bp, Homo sapiens; identical to SEQ ID NO: 272483
  chr18:77390502-77390605
  hypo

SEQ ID NO: 394339 - DNA, 367 bp, Homo sapiens; identical to SEQ ID NO: 218712
  chr18:77638243-77638610
  hypo

SEQ ID NO: 394340 - DNA, 130 bp, Homo sapiens; identical to SEQ ID NO: 272523
  chr18:77685460-77685590
  hypo

SEQ ID NO: 394341 - DNA, 381 bp, Homo sapiens; identical to SEQ ID NO: 272531
  chr18:77804875-77805256
  hypo

SEQ ID NO: 394342 - DNA, 38 bp, Homo sapiens; identical to SEQ ID NO: 272535
  chr18:77913923-77913961
  hypo

SEQ ID NO: 394343 - DNA, 88 bp, Homo sapiens; identical to SEQ ID NO: 272539
  chr18:77957216-77957304
  hypo

SEQ ID NO: 394344 - DNA, 185 bp, Homo sapiens; identical to SEQ ID NO: 272540
  chr18:77988259-77988444
  hypo

SEQ ID NO: 394345 - DNA, 294 bp, Homo sapiens; identical to SEQ ID NO: 272550
  chr19:416971-417265
  hypo

SEQ ID NO: 394346 - DNA, 37 bp, Homo sapiens; identical to SEQ ID NO: 218723
  chr19:434176-434213
  hypo

SEQ ID NO: 394347 - DNA, 34 bp, Homo sapiens; identical to SEQ ID NO: 272564
  chr19:484683-484717
  hypo

SEQ ID NO: 394348 - DNA, 41 bp, Homo sapiens; identical to SEQ ID NO: 205062
  chr19:507106-507147
  hypo

SEQ ID NO: 394349 - DNA, 39 bp, Homo sapiens; identical to SEQ ID NO: 272574
  chr19:546049-546088
  hypo

SEQ ID NO: 394350 - DNA, 45 bp, Homo sapiens; identical to SEQ ID NO: 272577
  chr19:559344-559389
  hypo

SEQ ID NO: 394351 - DNA, 126 bp, Homo sapiens; identical to SEQ ID NO: 272582
  chr19:585310-585436
  hypo

SEQ ID NO: 394352 - DNA, 620 bp, Homo sapiens; identical to SEQ ID NO: 218734
  chr19:619067-619687
  hypo

SEQ ID NO: 394353 - DNA, 218 bp, Homo sapiens; identical to SEQ ID NO: 324691
  chr19:624025-624243
  hypo

SEQ ID NO: 394354 - DNA, 298 bp, Homo sapiens; identical to SEQ ID NO: 95427
  chr19:647140-647438
  hypo

SEQ ID NO: 394355 - DNA, 56 bp, Homo sapiens; identical to SEQ ID NO: 272612
  chr19:762948-763004
  hypo

SEQ ID NO: 394356 - DNA, 62 bp, Homo sapiens; identical to SEQ ID NO: 272615
  chr19:807308-807370
  hypo

SEQ ID NO: 394357 - DNA, 319 bp, Homo sapiens; identical to SEQ ID NO: 272616
  chr19:813011-813330
  hypo

SEQ ID NO: 394358 - DNA, 92 bp, Homo sapiens; identical to SEQ ID NO: 272624
  chr19:882615-882707
  hypo

SEQ ID NO: 394359 - DNA, 33 bp, Homo sapiens; identical to SEQ ID NO: 272630
  chr19:927379-927412
  hypo

SEQ ID NO: 394360 - DNA, 48 bp, Homo sapiens; identical to SEQ ID NO: 272647
  chr19:962810-962858
  hypo

SEQ ID NO: 394361 - DNA, 370 bp, Homo sapiens; identical to SEQ ID NO: 272657
  chr19:1009749-1010119
  hypo

SEQ ID NO: 394362 - DNA, 89 bp, Homo sapiens; identical to SEQ ID NO: 218777
  chr19:1047747-1047836
  hypo

SEQ ID NO: 394363 - DNA, 480 bp, Homo sapiens; identical to SEQ ID NO: 272670
  chr19:1077669-1078149
  hypo

SEQ ID NO: 394364 - DNA, 35 bp, Homo sapiens; identical to SEQ ID NO: 324787
  chr19:1082938-1082973
  hypo

SEQ ID NO: 394365 - DNA, 305 bp, Homo sapiens; identical to SEQ ID NO: 324788
  chr19:1083009-1083314
  hypo

SEQ ID NO: 394366 - DNA, 43 bp, Homo sapiens; identical to SEQ ID NO: 272674
  chr19:1089505-1089548
  hypo

SEQ ID NO: 394367 - DNA, 311 bp, Homo sapiens; identical to SEQ ID NO: 218785
  chr19:1117275-1117586
  hypo

SEQ ID NO: 394368 - DNA, 33 bp, Homo sapiens; identical to SEQ ID NO: 225706
  chr19:1173617-1173650
  hypo

SEQ ID NO: 394369 - DNA, 267 bp, Homo sapiens; identical to SEQ ID NO: 218795
  chr19:1178810-1179077
  hypo

SEQ ID NO: 394370 - DNA, 188 bp, Homo sapiens; identical to SEQ ID NO: 272714
  chr19:1310928-1311116
  hypo

SEQ ID NO: 394371 - DNA, 358 bp, Homo sapiens; identical to SEQ ID NO: 272726
  chr19:1388331-1388689
  hypo

SEQ ID NO: 394372 - DNA, 161 bp, Homo sapiens; identical to SEQ ID NO: 272729
  chr19:1416664-1416825
  hypo

SEQ ID NO: 394373 - DNA, 413 bp, Homo sapiens; identical to SEQ ID NO: 272733
  chr19:1425396-1425809
  hypo

SEQ ID NO: 394374 - DNA, 33 bp, Homo sapiens; identical to SEQ ID NO: 218819
  chr19:1555127-1555160
  hypo

SEQ ID NO: 394375 - DNA, 342 bp, Homo sapiens; identical to SEQ ID NO: 324875
  chr19:1578503-1578845
  hypo

SEQ ID NO: 394376 - DNA, 68 bp, Homo sapiens; identical to SEQ ID NO: 218821
  chr19:1579338-1579406
  hypo

SEQ ID NO: 394377 - DNA, 391 bp, Homo sapiens; identical to SEQ ID NO: 272752
  chr19:1638548-1638939
  hypo

SEQ ID NO: 394378 - DNA, 517 bp, Homo sapiens; identical to SEQ ID NO: 272763
  chr19:1815903-1816420
  hypo

SEQ ID NO: 394379 - DNA, 175 bp, Homo sapiens; identical to SEQ ID NO: 218831
  chr19:1822372-1822547
  hypo

SEQ ID NO: 394380 - DNA, 114 bp, Homo sapiens; identical to SEQ ID NO: 272798
  chr19:2115182-2115296
  hypo

SEQ ID NO: 394381 - DNA, 31 bp, Homo sapiens; identical to SEQ ID NO: 218852
  chr19:2136920-2136951
  hypo

SEQ ID NO: 394382 - DNA, 200 bp, Homo sapiens; identical to SEQ ID NO: 218854
  chr19:2148550-2148750
  hypo

SEQ ID NO: 394383 - DNA, 206 bp, Homo sapiens; identical to SEQ ID NO: 389612
  chr19:2168903-2169109
  hypo

SEQ ID NO: 394384 - DNA, 315 bp, Homo sapiens; identical to SEQ ID NO: 272806
  chr19:2176355-2176670
  hypo

SEQ ID NO: 394385 - DNA, 210 bp, Homo sapiens; identical to SEQ ID NO: 324954
  chr19:2214155-2214365
  hypo

SEQ ID NO: 394386 - DNA, 268 bp, Homo sapiens; identical to SEQ ID NO: 272822
  chr19:2255405-2255673
  hypo

SEQ ID NO: 394387 - DNA, 205 bp, Homo sapiens; identical to SEQ ID NO: 272824
  chr19:2278466-2278671
  hypo

SEQ ID NO: 394388 - DNA, 112 bp, Homo sapiens; identical to SEQ ID NO: 324975
  chr19:2331161-2331273
  hypo

SEQ ID NO: 394389 - DNA, 62 bp, Homo sapiens; identical to SEQ ID NO: 324976
  chr19:2331443-2331505
  hypo

SEQ ID NO: 394390 - DNA, 85 bp, Homo sapiens; identical to SEQ ID NO: 272834
  chr19:2399106-2399191
  hypo

SEQ ID NO: 394391 - DNA, 189 bp, Homo sapiens; identical to SEQ ID NO: 272835
  chr19:2408350-2408539
  hypo

SEQ ID NO: 394392 - DNA, 58 bp, Homo sapiens; identical to SEQ ID NO: 218883
  chr19:2683833-2683891
  hypo

SEQ ID NO: 394393 - DNA, 76 bp, Homo sapiens; identical to SEQ ID NO: 272849
  chr19:2733948-2734024
  hypo

SEQ ID NO: 394394 - DNA, 164 bp, Homo sapiens; identical to SEQ ID NO: 272853
  chr19:2789345-2789509
  hypo

SEQ ID NO: 394395 - DNA, 69 bp, Homo sapiens; identical to SEQ ID NO: 218894
  chr19:2941878-2941947
  hypo

SEQ ID NO: 394396 - DNA, 300 bp, Homo sapiens; identical to SEQ ID NO: 225727
  chr19:2944752-2945052
  hypo

SEQ ID NO: 394397 - DNA, 141 bp, Homo sapiens; identical to SEQ ID NO: 205110
  chr19:2977372-2977513
  hypo

SEQ ID NO: 394398 - DNA, 61 bp, Homo sapiens; identical to SEQ ID NO: 218898
  chr19:2996848-2996909
  hypo

SEQ ID NO: 394399 - DNA, 143 bp, Homo sapiens; identical to SEQ ID NO: 272872
  chr19:3053351-3053494
  hypo

SEQ ID NO: 394400 - DNA, 143 bp, Homo sapiens; identical to SEQ ID NO: 225731
  chr19:3094777-3094920
  hypo

SEQ ID NO: 394401 - DNA, 140 bp, Homo sapiens; identical to SEQ ID NO: 272882
  chr19:3135020-3135160
  hypo

SEQ ID NO: 394402 - DNA, 670 bp, Homo sapiens; identical to SEQ ID NO: 272883
  chr19:3148406-3149076
  hypo

SEQ ID NO: 394403 - DNA, 32 bp, Homo sapiens; identical to SEQ ID NO: 272899
  chr19:3453421-3453453
  hypo

SEQ ID NO: 394404 - DNA, 69 bp, Homo sapiens; identical to SEQ ID NO: 272908
  chr19:3509503-3509572
  hypo

SEQ ID NO: 394405 - DNA, 489 bp, Homo sapiens; identical to SEQ ID NO: 225737
  chr19:3606743-3607232
  hypo

SEQ ID NO: 394406 - DNA, 122 bp, Homo sapiens; identical to SEQ ID NO: 272921
  chr19:3630283-3630405
  hypo

SEQ ID NO: 394407 - DNA, 480 bp, Homo sapiens; identical to SEQ ID NO: 325118
  chr19:3855704-3856184
  hypo

SEQ ID NO: 394408 - DNA, 36 bp, Homo sapiens; identical to SEQ ID NO: 325119
  chr19:3856216-3856252
  hypo

SEQ ID NO: 394409 - DNA, 459 bp, Homo sapiens; identical to SEQ ID NO: 325129
  chr19:3982274-3982733
  hypo

SEQ ID NO: 394410 - DNA, 99 bp, Homo sapiens; identical to SEQ ID NO: 325130
  chr19:3983095-3983194
  hypo

SEQ ID NO: 394411 - DNA, 61 bp, Homo sapiens; identical to SEQ ID NO: 272966
  chr19:4042780-4042841
  hypo

SEQ ID NO: 394412 - DNA, 45 bp, Homo sapiens; identical to SEQ ID NO: 325145
  chr19:4050362-4050407
  hypo

SEQ ID NO: 394413 - DNA, 143 bp, Homo sapiens; identical to SEQ ID NO: 272981
  chr19:4168249-4168392
  hypo

SEQ ID NO: 394414 - DNA, 114 bp, Homo sapiens; identical to SEQ ID NO: 272987
  chr19:4322986-4323100
  hypo

SEQ ID NO: 394415 - DNA, 42 bp, Homo sapiens; identical to SEQ ID NO: 272988
  chr19:4360669-4360711
  hypo

SEQ ID NO: 394416 - DNA, 393 bp, Homo sapiens; identical to SEQ ID NO: 218967
  chr19:4371567-4371960
  hypo

SEQ ID NO: 394417 - DNA, 48 bp, Homo sapiens; identical to SEQ ID NO: 272991
  chr19:4419788-4419836
  hypo

SEQ ID NO: 394418 - DNA, 185 bp, Homo sapiens; identical to SEQ ID NO: 218970
  chr19:4442913-4443098
  hypo

SEQ ID NO: 394419 - DNA, 237 bp, Homo sapiens; identical to SEQ ID NO: 218972
  chr19:4483097-4483334
  hypo

SEQ ID NO: 394420 - DNA, 105 bp, Homo sapiens; identical to SEQ ID NO: 225752
  chr19:4580776-4580881
  hypo

SEQ ID NO: 394421 - DNA, 78 bp, Homo sapiens; identical to SEQ ID NO: 273006
  chr19:4627183-4627261
  hypo

SEQ ID NO: 394422 - DNA, 207 bp, Homo sapiens; identical to SEQ ID NO: 273011
  chr19:4678845-4679052
  hypo

SEQ ID NO: 394423 - DNA, 166 bp, Homo sapiens; identical to SEQ ID NO: 273026
  chr19:4851997-4852163
  hypo

SEQ ID NO: 394424 - DNA, 34 bp, Homo sapiens; identical to SEQ ID NO: 273027
  chr19:4902800-4902834
  hypo

SEQ ID NO: 394425 - DNA, 59 bp, Homo sapiens; identical to SEQ ID NO: 218985
  chr19:4962295-4962354
  hypo

SEQ ID NO: 394426 - DNA, 116 bp, Homo sapiens; identical to SEQ ID NO: 218986
  chr19:4962384-4962500
  hypo

SEQ ID NO: 394427 - DNA, 81 bp, Homo sapiens; identical to SEQ ID NO: 273034
  chr19:4973466-4973547
  hypo

SEQ ID NO: 394428 - DNA, 311 bp, Homo sapiens; identical to SEQ ID NO: 325232
  chr19:5058359-5058670
  hypo

SEQ ID NO: 394429 - DNA, 77 bp, Homo sapiens; identical to SEQ ID NO: 325233
  chr19:5058700-5058777
  hypo

SEQ ID NO: 394430 - DNA, 268 bp, Homo sapiens; identical to SEQ ID NO: 218996
  chr19:5060971-5061239
  hypo

SEQ ID NO: 394431 - DNA, 988 bp, Homo sapiens; identical to SEQ ID NO: 273067
  chr19:5237605-5238593
  hypo

SEQ ID NO: 394432 - DNA, 35 bp, Homo sapiens; identical to SEQ ID NO: 273077
  chr19:5577528-5577563
  hypo

SEQ ID NO: 394433 - DNA, 139 bp, Homo sapiens; identical to SEQ ID NO: 219004
  chr19:5587166-5587305
  hypo

SEQ ID NO: 394434 - DNA, 275 bp, Homo sapiens; identical to SEQ ID NO: 273084
  chr19:5661522-5661797
  hypo

SEQ ID NO: 394435 - DNA, 103 bp, Homo sapiens; identical to SEQ ID NO: 273085
  chr19:5667770-5667873
  hypo

SEQ ID NO: 394436 - DNA, 92 bp, Homo sapiens; identical to SEQ ID NO: 325276
  chr19:5676242-5676334
  hypo

SEQ ID NO: 394437 - DNA, 44 bp, Homo sapiens; identical to SEQ ID NO: 273092
  chr19:5722397-5722441
  hypo

SEQ ID NO: 394438 - DNA, 94 bp, Homo sapiens; identical to SEQ ID NO: 273095
  chr19:5784778-5784872
  hypo

SEQ ID NO: 394439 - DNA, 198 bp, Homo sapiens; identical to SEQ ID NO: 219013
  chr19:5785480-5785678
  hypo

SEQ ID NO: 394440 - DNA, 162 bp, Homo sapiens; identical to SEQ ID NO: 219032
  chr19:5985339-5985501
  hypo

SEQ ID NO: 394441 - DNA, 571 bp, Homo sapiens; identical to SEQ ID NO: 273127
  chr19:5998429-5999000
  hypo

SEQ ID NO: 394442 - DNA, 450 bp, Homo sapiens; identical to SEQ ID NO: 273128
  chr19:5999240-5999690
  hypo

SEQ ID NO: 394443 - DNA, 654 bp, Homo sapiens; identical to SEQ ID NO: 273130
  chr19:6002450-6003104
  hypo

SEQ ID NO: 394444 - DNA, 99 bp, Homo sapiens; identical to SEQ ID NO: 273131
  chr19:6003433-6003532
  hypo

SEQ ID NO: 394445 - DNA, 225 bp, Homo sapiens; identical to SEQ ID NO: 219037
  chr19:6003832-6004057
  hypo

SEQ ID NO: 394446 - DNA, 76 bp, Homo sapiens; identical to SEQ ID NO: 219046
  chr19:6018261-6018337
  hypo

SEQ ID NO: 394447 - DNA, 390 bp, Homo sapiens; identical to SEQ ID NO: 273146
  chr19:6021709-6022099
  hypo

SEQ ID NO: 394448 - DNA, 580 bp, Homo sapiens; identical to SEQ ID NO: 273150
  chr19:6026959-6027539
  hypo

SEQ ID NO: 394449 - DNA, 36 bp, Homo sapiens; identical to SEQ ID NO: 273158
  chr19:6076061-6076097
  hypo

SEQ ID NO: 394450 - DNA, 267 bp, Homo sapiens; identical to SEQ ID NO: 273163
  chr19:6215002-6215269
  hypo

SEQ ID NO: 394451 - DNA, 235 bp, Homo sapiens; identical to SEQ ID NO: 273165
  chr19:6230445-6230680
  hypo

SEQ ID NO: 394452 - DNA, 164 bp, Homo sapiens; identical to SEQ ID NO: 273168
  chr19:6249578-6249742
  hypo

SEQ ID NO: 394453 - DNA, 423 bp, Homo sapiens; identical to SEQ ID NO: 273171
  chr19:6374177-6374600
  hypo

SEQ ID NO: 394454 - DNA, 118 bp, Homo sapiens; identical to SEQ ID NO: 273175
  chr19:6433456-6433574
  hypo

SEQ ID NO: 394455 - DNA, 96 bp, Homo sapiens; identical to SEQ ID NO: 219066
  chr19:7194737-7194833
  hypo

SEQ ID NO: 394456 - DNA, 81 bp, Homo sapiens; identical to SEQ ID NO: 273192
  chr19:7236595-7236676
  hypo

SEQ ID NO: 394457 - DNA, 188 bp, Homo sapiens; identical to SEQ ID NO: 219070
  chr19:7484059-7484247
  hypo

SEQ ID NO: 394458 - DNA, 180 bp, Homo sapiens; identical to SEQ ID NO: 273209
  chr19:7555031-7555211
  hypo

SEQ ID NO: 394459 - DNA, 159 bp, Homo sapiens; identical to SEQ ID NO: 273214
  chr19:7655856-7656015
  hypo

SEQ ID NO: 394460 - DNA, 613 bp, Homo sapiens; identical to SEQ ID NO: 273216
  chr19:7680032-7680645
  hypo

SEQ ID NO: 394461 - DNA, 44 bp, Homo sapiens; identical to SEQ ID NO: 273225
  chr19:7862879-7862923
  hypo

SEQ ID NO: 394462 - DNA, 312 bp, Homo sapiens; identical to SEQ ID NO: 273228
  chr19:7920730-7921042
  hypo

SEQ ID NO: 394463 - DNA, 160 bp, Homo sapiens; identical to SEQ ID NO: 225768
  chr19:7990126-7990286
  hypo

SEQ ID NO: 394464 - DNA, 45 bp, Homo sapiens; identical to SEQ ID NO: 273249
  chr19:8440196-8440241
  hypo

SEQ ID NO: 394465 - DNA, 228 bp, Homo sapiens; identical to SEQ ID NO: 273255
  chr19:8495657-8495885
  hypo

SEQ ID NO: 394466 - DNA, 156 bp, Homo sapiens; identical to SEQ ID NO: 219096
  chr19:8528411-8528567
  hypo

SEQ ID NO: 394467 - DNA, 164 bp, Homo sapiens; identical to SEQ ID NO: 273262
  chr19:8554605-8554769
  hypo

SEQ ID NO: 394468 - DNA, 228 bp, Homo sapiens; identical to SEQ ID NO: 273270
  chr19:8618012-8618240
  hypo

SEQ ID NO: 394469 - DNA, 86 bp, Homo sapiens; identical to SEQ ID NO: 219103
  chr19:9343354-9343440
  hypo

SEQ ID NO: 394470 - DNA, 91 bp, Homo sapiens; identical to SEQ ID NO: 273278
  chr19:9845537-9845628
  hypo

SEQ ID NO: 394471 - DNA, 105 bp, Homo sapiens; identical to SEQ ID NO: 273279
  chr19:9894646-9894751
  hypo

SEQ ID NO: 394472 - DNA, 38 bp, Homo sapiens; identical to SEQ ID NO: 325493
  chr19:9937315-9937353
  hypo

SEQ ID NO: 394473 - DNA, 115 bp, Homo sapiens; identical to SEQ ID NO: 219111
  chr19:10246096-10246211
  hypo

SEQ ID NO: 394474 - DNA, 253 bp, Homo sapiens; identical to SEQ ID NO: 219112
  chr19:10246253-10246506
  hypo

SEQ ID NO: 394475 - DNA, 416 bp, Homo sapiens; identical to SEQ ID NO: 219113
  chr19:10246566-10246982
  hypo

SEQ ID NO: 394476 - DNA, 145 bp, Homo sapiens; identical to SEQ ID NO: 219115
  chr19:10295674-10295819
  hypo

SEQ ID NO: 394477 - DNA, 42 bp, Homo sapiens; identical to SEQ ID NO: 273303
  chr19:10394496-10394538
  hypo

SEQ ID NO: 394478 - DNA, 36 bp, Homo sapiens; identical to SEQ ID NO: 219132
  chr19:10794362-10794398
  hypo

SEQ ID NO: 394479 - DNA, 317 bp, Homo sapiens; identical to SEQ ID NO: 273321
  chr19:10818162-10818479
  hypo

SEQ ID NO: 394480 - DNA, 147 bp, Homo sapiens; identical to SEQ ID NO: 273322
  chr19:10822778-10822925
  hypo

SEQ ID NO: 394481 - DNA, 151 bp, Homo sapiens; identical to SEQ ID NO: 325565
  chr19:11002590-11002741
  hypo

SEQ ID NO: 394482 - DNA, 180 bp, Homo sapiens; identical to SEQ ID NO: 273347
  chr19:11068308-11068488
  hypo

SEQ ID NO: 394483 - DNA, 330 bp, Homo sapiens; identical to SEQ ID NO: 273357
  chr19:11154843-11155173
  hypo

SEQ ID NO: 394484 - DNA, 270 bp, Homo sapiens; identical to SEQ ID NO: 273361
  chr19:11213902-11214172
  hypo

SEQ ID NO: 394485 - DNA, 266 bp, Homo sapiens; identical to SEQ ID NO: 225793
  chr19:11308102-11308368
  hypo

SEQ ID NO: 394486 - DNA, 148 bp, Homo sapiens; identical to SEQ ID NO: 273385
  chr19:11820662-11820810
  hypo

SEQ ID NO: 394487 - DNA, 44 bp, Homo sapiens; identical to SEQ ID NO: 325619
  chr19:11926785-11926829
  hypo

SEQ ID NO: 394488 - DNA, 360 bp, Homo sapiens; identical to SEQ ID NO: 273391
  chr19:12205465-12205825
  hypo

SEQ ID NO: 394489 - DNA, 43 bp, Homo sapiens; identical to SEQ ID NO: 273393
  chr19:12416132-12416175
  hypo

SEQ ID NO: 394490 - DNA, 145 bp, Homo sapiens; identical to SEQ ID NO: 273395
  chr19:12461696-12461841
  hypo

SEQ ID NO: 394491 - DNA, 40 bp, Homo sapiens; identical to SEQ ID NO: 273397
  chr19:12701915-12701955
  hypo

SEQ ID NO: 394492 - DNA, 120 bp, Homo sapiens; identical to SEQ ID NO: 219175
  chr19:12746886-12747006
  hypo

SEQ ID NO: 394493 - DNA, 149 bp, Homo sapiens; identical to SEQ ID NO: 273413
  chr19:12953398-12953547
  hypo

SEQ ID NO: 394494 - DNA, 75 bp, Homo sapiens; identical to SEQ ID NO: 273421
  chr19:13017983-13018058
  hypo

SEQ ID NO: 394495 - DNA, 98 bp, Homo sapiens; identical to SEQ ID NO: 205217
  chr19:13029775-13029873
  hypo

SEQ ID NO: 394496 - DNA, 51 bp, Homo sapiens; identical to SEQ ID NO: 384755
  chr19:13030316-13030367
  hypo

SEQ ID NO: 394497 - DNA, 144 bp, Homo sapiens; identical to SEQ ID NO: 384757
  chr19:13106028-13106172
  hypo

SEQ ID NO: 394498 - DNA, 37 bp, Homo sapiens; identical to SEQ ID NO: 273438
  chr19:13154726-13154763
  hypo

SEQ ID NO: 394499 - DNA, 62 bp, Homo sapiens; identical to SEQ ID NO: 205232
  chr19:13274019-13274081
  hypo

SEQ ID NO: 394500 - DNA, 131 bp, Homo sapiens; identical to SEQ ID NO: 273454
  chr19:13309845-13309976
  hypo

SEQ ID NO: 394501 - DNA, 49 bp, Homo sapiens; identical to SEQ ID NO: 325720
  chr19:13936528-13936577
  hypo

SEQ ID NO: 394502 - DNA, 71 bp, Homo sapiens; identical to SEQ ID NO: 325721
  chr19:13936712-13936783
  hypo

SEQ ID NO: 394503 - DNA, 245 bp, Homo sapiens; identical to SEQ ID NO: 273493
  chr19:14591231-14591476
  hypo

SEQ ID NO: 394504 - DNA, 107 bp, Homo sapiens; identical to SEQ ID NO: 273496
  chr19:14636954-14637061
  hypo

SEQ ID NO: 394505 - DNA, 32 bp, Homo sapiens; identical to SEQ ID NO: 384763
  chr19:14887561-14887593
  hypo

SEQ ID NO: 394506 - DNA, 81 bp, Homo sapiens; identical to SEQ ID NO: 273519
  chr19:15346126-15346207
  hypo

SEQ ID NO: 394507 - DNA, 396 bp, Homo sapiens; identical to SEQ ID NO: 219235
  chr19:15375241-15375637
  hypo

SEQ ID NO: 394508 - DNA, 206 bp, Homo sapiens; identical to SEQ ID NO: 273529
  chr19:15487800-15488006
  hypo

SEQ ID NO: 394509 - DNA, 120 bp, Homo sapiens; identical to SEQ ID NO: 219238
  chr19:15506075-15506195
  hypo

SEQ ID NO: 394510 - DNA, 128 bp, Homo sapiens; identical to SEQ ID NO: 273552
  chr19:16337602-16337730
  hypo

SEQ ID NO: 394511 - DNA, 155 bp, Homo sapiens; identical to SEQ ID NO: 273562
  chr19:16528334-16528489
  hypo

SEQ ID NO: 394512 - DNA, 43 bp, Homo sapiens; identical to SEQ ID NO: 219258
  chr19:16631183-16631226
  hypo

SEQ ID NO: 394513 - DNA, 83 bp, Homo sapiens; identical to SEQ ID NO: 219260
  chr19:16680107-16680190
  hypo

SEQ ID NO: 394514 - DNA, 390 bp, Homo sapiens; identical to SEQ ID NO: 273573
  chr19:16680657-16681047
  hypo

SEQ ID NO: 394515 - DNA, 190 bp, Homo sapiens; identical to SEQ ID NO: 273576
  chr19:16735778-16735968
  hypo

SEQ ID NO: 394516 - DNA, 97 bp, Homo sapiens; identical to SEQ ID NO: 273583
  chr19:16835422-16835519
  hypo

SEQ ID NO: 394517 - DNA, 866 bp, Homo sapiens; identical to SEQ ID NO: 273612
  chr19:17443706-17444572
  hypo

SEQ ID NO: 394518 - DNA, 372 bp, Homo sapiens; identical to SEQ ID NO: 273615
  chr19:17597312-17597684
  hypo

SEQ ID NO: 394519 - DNA, 258 bp, Homo sapiens; identical to SEQ ID NO: 273617
  chr19:17657447-17657705
  hypo

SEQ ID NO: 394520 - DNA, 41 bp, Homo sapiens; identical to SEQ ID NO: 219290
  chr19:18054174-18054215
  hypo

SEQ ID NO: 394521 - DNA, 47 bp, Homo sapiens; identical to SEQ ID NO: 273635
  chr19:18120713-18120760
  hypo

SEQ ID NO: 394522 - DNA, 135 bp, Homo sapiens; identical to SEQ ID NO: 273643
  chr19:18242689-18242824
  hypo

SEQ ID NO: 394523 - DNA, 145 bp, Homo sapiens; identical to SEQ ID NO: 273647
  chr19:18277902-18278047
  hypo

SEQ ID NO: 394524 - DNA, 157 bp, Homo sapiens; identical to SEQ ID NO: 273650
  chr19:18416995-18417152
  hypo

SEQ ID NO: 394525 - DNA, 330 bp, Homo sapiens; identical to SEQ ID NO: 205279
  chr19:18420497-18420827
  hypo

SEQ ID NO: 394526 - DNA, 101 bp, Homo sapiens; identical to SEQ ID NO: 273651
  chr19:18435014-18435115
  hypo

SEQ ID NO: 394527 - DNA, 79 bp, Homo sapiens; identical to SEQ ID NO: 219304
  chr19:18496195-18496274
  hypo

SEQ ID NO: 394528 - DNA, 67 bp, Homo sapiens; identical to SEQ ID NO: 219306
  chr19:18557168-18557235
  hypo

SEQ ID NO: 394529 - DNA, 142 bp, Homo sapiens; identical to SEQ ID NO: 273659
  chr19:18591739-18591881
  hypo

SEQ ID NO: 394530 - DNA, 81 bp, Homo sapiens; identical to SEQ ID NO: 219308
  chr19:18675984-18676065
  hypo

SEQ ID NO: 394531 - DNA, 36 bp, Homo sapiens; identical to SEQ ID NO: 325996
  chr19:19218819-19218855
  hypo

SEQ ID NO: 394532 - DNA, 275 bp, Homo sapiens; identical to SEQ ID NO: 273705
  chr19:19231766-19232041
  hypo

SEQ ID NO: 394533 - DNA, 328 bp, Homo sapiens; identical to SEQ ID NO: 273707
  chr19:19389261-19389589
  hypo

SEQ ID NO: 394534 - DNA, 194 bp, Homo sapiens; identical to SEQ ID NO: 273717
  chr19:19611820-19612014
  hypo

SEQ ID NO: 394535 - DNA, 98 bp, Homo sapiens; identical to SEQ ID NO: 273721
  chr19:19624553-19624651
  hypo

SEQ ID NO: 394536 - DNA, 65 bp, Homo sapiens; identical to SEQ ID NO: 273724
  chr19:19674354-19674419
  hypo

SEQ ID NO: 394537 - DNA, 54 bp, Homo sapiens; identical to SEQ ID NO: 273730
  chr19:19766967-19767021
  hypo

SEQ ID NO: 394538 - DNA, 120 bp, Homo sapiens; identical to SEQ ID NO: 273732
  chr19:19775583-19775703
  hypo

SEQ ID NO: 394539 - DNA, 225 bp, Homo sapiens; identical to SEQ ID NO: 273734
  chr19:19822261-19822486
  hypo

SEQ ID NO: 394540 - DNA, 37 bp, Homo sapiens; identical to SEQ ID NO: 273738
  chr19:20095094-20095131
  hypo

SEQ ID NO: 394541 - DNA, 41 bp, Homo sapiens; identical to SEQ ID NO: 273740
  chr19:20115867-20115908
  hypo

SEQ ID NO: 394542 - DNA, 96 bp, Homo sapiens; identical to SEQ ID NO: 219349
  chr19:21654951-21655047
  hypo

SEQ ID NO: 394543 - DNA, 180 bp, Homo sapiens; identical to SEQ ID NO: 273757
  chr19:21798902-21799082
  hypo

SEQ ID NO: 394544 - DNA, 180 bp, Homo sapiens; identical to SEQ ID NO: 273772
  chr19:23435643-23435823
  hypo

SEQ ID NO: 394545 - DNA, 33 bp, Homo sapiens; identical to SEQ ID NO: 293816
  chr19:31210819-31210852
  hypo

SEQ ID NO: 394546 - DNA, 107 bp, Homo sapiens; identical to SEQ ID NO: 273814
  chr19:31792447-31792554
  hypo

SEQ ID NO: 394547 - DNA, 42 bp, Homo sapiens; identical to SEQ ID NO: 273818
  chr19:32064208-32064250
  hypo

SEQ ID NO: 394548 - DNA, 42 bp, Homo sapiens; identical to SEQ ID NO: 273821
  chr19:32087789-32087831
  hypo

SEQ ID NO: 394549 - DNA, 189 bp, Homo sapiens; identical to SEQ ID NO: 273822
  chr19:32088784-32088973
  hypo

SEQ ID NO: 394550 - DNA, 118 bp, Homo sapiens; identical to SEQ ID NO: 273829
  chr19:32537990-32538108
  hypo

SEQ ID NO: 394551 - DNA, 1022 bp, Homo sapiens; identical to SEQ ID NO: 384772
  chr19:33790839-33791861
  hypo

SEQ ID NO: 394552 - DNA, 52 bp, Homo sapiens; identical to SEQ ID NO: 273867
  chr19:33917859-33917911
  hypo

SEQ ID NO: 394553 - DNA, 183 bp, Homo sapiens; identical to SEQ ID NO: 219398
  chr19:33939089-33939272
  hypo

SEQ ID NO: 394554 - DNA, 32 bp, Homo sapiens; identical to SEQ ID NO: 273870
  chr19:33953394-33953426
  hypo

SEQ ID NO: 394555 - DNA, 348 bp, Homo sapiens
  chr19:34263490-34263838
  hypo
cgccttccgcgacaagtttgagcaccccaacagctactatcacccggtcttcggcaaggccatcctggcccggtaccgcgccaatgcctctcgggaggccctgcggaccggctctggggtgcgttttcccgagttcgtccagtacctgctggacgtgcaccggcccgtggggatggacattcactgggaccatgtcagccggctctgcagcccctgcctcatcgactacgatttcgtaggcaagttcgagagcatggaggacgatgccaacttcttcctgagcctcatccgcgcgccgcggaacctgaccttcccccggttcaaggaccggcactcgcaggaggcgcg

SEQ ID NO: 394556 - DNA, 88 bp, Homo sapiens; identical to SEQ ID NO: 219403
  chr19:34421531-34421619
  hypo

SEQ ID NO: 394557 - DNA, 32 bp, Homo sapiens; identical to SEQ ID NO: 273882
  chr19:34537937-34537969
  hypo

SEQ ID NO: 394558 - DNA, 34 bp, Homo sapiens; identical to SEQ ID NO: 273884
  chr19:34538665-34538699
  hypo

SEQ ID NO: 394559 - DNA, 34 bp, Homo sapiens; identical to SEQ ID NO: 273885
  chr19:34538939-34538973
  hypo

SEQ ID NO: 394560 - DNA, 34 bp, Homo sapiens; identical to SEQ ID NO: 273886
  chr19:34603234-34603268
  hypo

SEQ ID NO: 394561 - DNA, 32 bp, Homo sapiens; identical to SEQ ID NO: 219412
  chr19:35591100-35591132
  hypo

SEQ ID NO: 394562 - DNA, 60 bp, Homo sapiens; identical to SEQ ID NO: 326236
  chr19:35608882-35608942
  hypo

SEQ ID NO: 394563 - DNA, 115 bp, Homo sapiens; identical to SEQ ID NO: 273916
  chr19:35619189-35619304
  hypo

SEQ ID NO: 394564 - DNA, 229 bp, Homo sapiens; identical to SEQ ID NO: 273934
  chr19:36157519-36157748
  hypo

SEQ ID NO: 394565 - DNA, 78 bp, Homo sapiens; identical to SEQ ID NO: 273936
  chr19:36172746-36172824
  hypo

SEQ ID NO: 394566 - DNA, 77 bp, Homo sapiens; identical to SEQ ID NO: 273944
  chr19:36262374-36262451
  hypo

SEQ ID NO: 394567 - DNA, 79 bp, Homo sapiens; identical to SEQ ID NO: 219423
  chr19:36388611-36388690
  hypo

SEQ ID NO: 394568 - DNA, 50 bp, Homo sapiens; identical to SEQ ID NO: 387179
  chr19:36593115-36593165
  hypo

SEQ ID NO: 394569 - DNA, 246 bp, Homo sapiens; identical to SEQ ID NO: 219426
  chr19:36641157-36641403
  hypo

SEQ ID NO: 394570 - DNA, 32 bp, Homo sapiens; identical to SEQ ID NO: 273956
  chr19:36707255-36707287
  hypo

SEQ ID NO: 394571 - DNA, 44 bp, Homo sapiens; identical to SEQ ID NO: 273959
  chr19:36750231-36750275
  hypo

SEQ ID NO: 394572 - DNA, 113 bp, Homo sapiens; identical to SEQ ID NO: 225912
  chr19:37262887-37263000
  hypo

SEQ ID NO: 394573 - DNA, 190 bp, Homo sapiens; identical to SEQ ID NO: 219429
  chr19:37504006-37504196
  hypo

SEQ ID NO: 394574 - DNA, 284 bp, Homo sapiens; identical to SEQ ID NO: 219430
  chr19:37504226-37504510
  hypo

SEQ ID NO: 394575 - DNA, 36 bp, Homo sapiens; identical to SEQ ID NO: 273981
  chr19:37674960-37674996
  hypo

SEQ ID NO: 394576 - DNA, 241 bp, Homo sapiens; identical to SEQ ID NO: 273987
  chr19:37853603-37853844
  hypo

SEQ ID NO: 394577 - DNA, 35 bp, Homo sapiens; identical to SEQ ID NO: 326317
  chr19:37995775-37995810
  hypo

SEQ ID NO: 394578 - DNA, 39 bp, Homo sapiens; identical to SEQ ID NO: 219433
  chr19:38287060-38287099
  hypo

SEQ ID NO: 394579 - DNA, 142 bp, Homo sapiens; identical to SEQ ID NO: 219441
  chr19:38572720-38572862
  hypo

SEQ ID NO: 394580 - DNA, 221 bp, Homo sapiens; identical to SEQ ID NO: 274013
  chr19:38625953-38626174
  hypo

SEQ ID NO: 394581 - DNA, 92 bp, Homo sapiens; identical to SEQ ID NO: 219444
  chr19:38639131-38639223
  hypo

SEQ ID NO: 394582 - DNA, 179 bp, Homo sapiens; identical to SEQ ID NO: 326349
  chr19:38684215-38684394
  hypo

SEQ ID NO: 394583 - DNA, 38 bp, Homo sapiens; identical to SEQ ID NO: 326350
  chr19:38684424-38684462
  hypo

SEQ ID NO: 394584 - DNA, 58 bp, Homo sapiens; identical to SEQ ID NO: 326367
  chr19:38782477-38782535
  hypo

SEQ ID NO: 394585 - DNA, 73 bp, Homo sapiens; identical to SEQ ID NO: 326368
  chr19:38782670-38782743
  hypo

SEQ ID NO: 394586 - DNA, 44 bp, Homo sapiens; identical to SEQ ID NO: 219453
  chr19:38828333-38828377
  hypo

SEQ ID NO: 394587 - DNA, 33 bp, Homo sapiens; identical to SEQ ID NO: 274045
  chr19:38900084-38900117
  hypo

SEQ ID NO: 394588 - DNA, 595 bp, Homo sapiens; identical to SEQ ID NO: 219462
  chr19:39051723-39052318
  hypo

SEQ ID NO: 394589 - DNA, 125 bp, Homo sapiens; identical to SEQ ID NO: 274064
  chr19:39092089-39092214
  hypo

SEQ ID NO: 394590 - DNA, 31 bp, Homo sapiens; identical to SEQ ID NO: 274068
  chr19:39128243-39128274
  hypo

SEQ ID NO: 394591 - DNA, 79 bp, Homo sapiens; identical to SEQ ID NO: 219465
  chr19:39144877-39144956
  hypo

SEQ ID NO: 394592 - DNA, 154 bp, Homo sapiens; identical to SEQ ID NO: 274074
  chr19:39189493-39189647
  hypo

SEQ ID NO: 394593 - DNA, 86 bp, Homo sapiens; identical to SEQ ID NO: 274078
  chr19:39211068-39211154
  hypo

SEQ ID NO: 394594 - DNA, 178 bp, Homo sapiens; identical to SEQ ID NO: 219471
  chr19:39279303-39279481
  hypo

SEQ ID NO: 394595 - DNA, 77 bp, Homo sapiens; identical to SEQ ID NO: 274088
  chr19:39302318-39302395
  hypo

SEQ ID NO: 394596 - DNA, 36 bp, Homo sapiens; identical to SEQ ID NO: 219476
  chr19:39310980-39311016
  hypo

SEQ ID NO: 394597 - DNA, 433 bp, Homo sapiens; identical to SEQ ID NO: 274096
  chr19:39332929-39333362
  hypo

SEQ ID NO: 394598 - DNA, 147 bp, Homo sapiens; identical to SEQ ID NO: 274101
  chr19:39439160-39439307
  hypo

SEQ ID NO: 394599 - DNA, 62 bp, Homo sapiens; identical to SEQ ID NO: 274102
  chr19:39544160-39544222
  hypo

SEQ ID NO: 394600 - DNA, 42 bp, Homo sapiens; identical to SEQ ID NO: 274104
  chr19:39568094-39568136
  hypo

SEQ ID NO: 394601 - DNA, 124 bp, Homo sapiens; identical to SEQ ID NO: 219480
  chr19:39597518-39597642
  hypo

SEQ ID NO: 394602 - DNA, 196 bp, Homo sapiens; identical to SEQ ID NO: 219486
  chr19:39671859-39672055
  hypo

SEQ ID NO: 394603 - DNA, 247 bp, Homo sapiens; identical to SEQ ID NO: 274122
  chr19:39818151-39818398
  hypo

SEQ ID NO: 394604 - DNA, 31 bp, Homo sapiens; identical to SEQ ID NO: 274133
  chr19:40026202-40026233
  hypo

SEQ ID NO: 394605 - DNA, 95 bp, Homo sapiens; identical to SEQ ID NO: 274140
  chr19:40343350-40343445
  hypo

SEQ ID NO: 394606 - DNA, 103 bp, Homo sapiens; identical to SEQ ID NO: 274143
  chr19:40405622-40405725
  hypo

SEQ ID NO: 394607 - DNA, 119 bp, Homo sapiens; identical to SEQ ID NO: 274144
  chr19:40408775-40408894
  hypo

SEQ ID NO: 394608 - DNA, 42 bp, Homo sapiens; identical to SEQ ID NO: 274150
  chr19:40706865-40706907
  hypo

SEQ ID NO: 394609 - DNA, 34 bp, Homo sapiens; identical to SEQ ID NO: 274153
  chr19:40727176-40727210
  hypo

SEQ ID NO: 394610 - DNA, 367 bp, Homo sapiens; identical to SEQ ID NO: 274157
  chr19:40741640-40742007
  hypo

SEQ ID NO: 394611 - DNA, 161 bp, Homo sapiens; identical to SEQ ID NO: 219502
  chr19:40745940-40746101
  hypo

SEQ ID NO: 394612 - DNA, 169 bp, Homo sapiens; identical to SEQ ID NO: 219504
  chr19:40828672-40828841
  hypo

SEQ ID NO: 394613 - DNA, 109 bp, Homo sapiens; identical to SEQ ID NO: 219507
  chr19:40873917-40874026
  hypo

SEQ ID NO: 394614 - DNA, 93 bp, Homo sapiens; identical to SEQ ID NO: 274184
  chr19:41168076-41168169
  hypo

SEQ ID NO: 394615 - DNA, 41 bp, Homo sapiens; identical to SEQ ID NO: 219515
  chr19:41616326-41616367
  hypo

SEQ ID NO: 394616 - DNA, 342 bp, Homo sapiens; identical to SEQ ID NO: 219517
  chr19:41675691-41676033
  hypo

SEQ ID NO: 394617 - DNA, 124 bp, Homo sapiens; identical to SEQ ID NO: 326543
  chr19:41919971-41920095
  hypo

SEQ ID NO: 394618 - DNA, 134 bp, Homo sapiens; identical to SEQ ID NO: 274202
  chr19:42373112-42373246
  hypo

SEQ ID NO: 394619 - DNA, 308 bp, Homo sapiens; identical to SEQ ID NO: 219520
  chr19:42400292-42400600
  hypo

SEQ ID NO: 394620 - DNA, 185 bp, Homo sapiens; identical to SEQ ID NO: 274213
  chr19:42700691-42700876
  hypo

SEQ ID NO: 394621 - DNA, 94 bp, Homo sapiens; identical to SEQ ID NO: 274219
  chr19:42796467-42796561
  hypo

SEQ ID NO: 394622 - DNA, 90 bp, Homo sapiens; identical to SEQ ID NO: 274232
  chr19:44207878-44207968
  hypo

SEQ ID NO: 394623 - DNA, 322 bp, Homo sapiens; identical to SEQ ID NO: 274242
  chr19:44932984-44933306
  hypo

SEQ ID NO: 394624 - DNA, 104 bp, Homo sapiens; identical to SEQ ID NO: 274251
  chr19:45193693-45193797
  hypo

SEQ ID NO: 394625 - DNA, 38 bp, Homo sapiens; identical to SEQ ID NO: 274261
  chr19:45328104-45328142
  hypo

SEQ ID NO: 394626 - DNA, 368 bp, Homo sapiens; identical to SEQ ID NO: 294084
  chr19:45347906-45348274
  hypo

SEQ ID NO: 394627 - DNA, 78 bp, Homo sapiens; identical to SEQ ID NO: 387208
  chr19:45377394-45377472
  hypo

SEQ ID NO: 394628 - DNA, 44 bp, Homo sapiens; identical to SEQ ID NO: 274265
  chr19:45382930-45382974
  hypo

SEQ ID NO: 394629 - DNA, 40 bp, Homo sapiens; identical to SEQ ID NO: 274266
  chr19:45385981-45386021
  hypo

SEQ ID NO: 394630 - DNA, 212 bp, Homo sapiens; identical to SEQ ID NO: 219558
  chr19:45567707-45567919
  hypo

SEQ ID NO: 394631 - DNA, 259 bp, Homo sapiens; identical to SEQ ID NO: 274282
  chr19:45627566-45627825
  hypo

SEQ ID NO: 394632 - DNA, 86 bp, Homo sapiens; identical to SEQ ID NO: 219569
  chr19:45866860-45866946
  hypo

SEQ ID NO: 394633 - DNA, 41 bp, Homo sapiens; identical to SEQ ID NO: 274308
  chr19:46208926-46208967
  hypo

SEQ ID NO: 394634 - DNA, 316 bp, Homo sapiens; identical to SEQ ID NO: 274315
  chr19:46326464-46326780
  hypo

SEQ ID NO: 394635 - DNA, 685 bp, Homo sapiens; identical to SEQ ID NO: 225964
  chr19:47258852-47259537
  hypo

SEQ ID NO: 394636 - DNA, 75 bp, Homo sapiens; identical to SEQ ID NO: 384794
  chr19:47363328-47363403
  hypo

SEQ ID NO: 394637 - DNA, 56 bp, Homo sapiens; identical to SEQ ID NO: 326722
  chr19:47540628-47540684
  hypo

SEQ ID NO: 394638 - DNA, 79 bp, Homo sapiens; identical to SEQ ID NO: 326723
  chr19:47540719-47540798
  hypo

SEQ ID NO: 394639 - DNA, 39 bp, Homo sapiens; identical to SEQ ID NO: 219600
  chr19:48145667-48145706
  hypo

SEQ ID NO: 394640 - DNA, 45 bp, Homo sapiens; identical to SEQ ID NO: 274373
  chr19:48251493-48251538
  hypo

SEQ ID NO: 394641 - DNA, 38 bp, Homo sapiens; identical to SEQ ID NO: 219603
  chr19:48393224-48393262
  hypo

SEQ ID NO: 394642 - DNA, 44 bp, Homo sapiens; identical to SEQ ID NO: 274378
  chr19:48479211-48479255
  hypo

SEQ ID NO: 394643 - DNA, 228 bp, Homo sapiens; identical to SEQ ID NO: 274384
  chr19:48798924-48799152
  hypo

SEQ ID NO: 394644 - DNA, 105 bp, Homo sapiens; identical to SEQ ID NO: 225979
  chr19:48823631-48823736
  hypo

SEQ ID NO: 394645 - DNA, 53 bp, Homo sapiens; identical to SEQ ID NO: 274387
  chr19:48846609-48846662
  hypo

SEQ ID NO: 394646 - DNA, 144 bp, Homo sapiens; identical to SEQ ID NO: 219609
  chr19:48889258-48889402
  hypo

SEQ ID NO: 394647 - DNA, 183 bp, Homo sapiens; identical to SEQ ID NO: 294193
  chr19:48994398-48994581
  hypo

SEQ ID NO: 394648 - DNA, 93 bp, Homo sapiens; identical to SEQ ID NO: 219624
  chr19:49419216-49419309
  hypo

SEQ ID NO: 394649 - DNA, 48 bp, Homo sapiens; identical to SEQ ID NO: 274430
  chr19:49509361-49509409
  hypo

SEQ ID NO: 394650 - DNA, 55 bp, Homo sapiens
  chr19:49600408-49600463
  hypo
tttatttctctagcttctggcaacacccacactgtcttcctgaaaaggtagcacc

SEQ ID NO: 394651 - DNA, 205 bp, Homo sapiens; identical to SEQ ID NO: 274440
  chr19:49705148-49705353
  hypo

SEQ ID NO: 394652 - DNA, 190 bp, Homo sapiens; identical to SEQ ID NO: 219635
  chr19:50063175-50063365
  hypo

SEQ ID NO: 394653 - DNA, 38 bp, Homo sapiens; identical to SEQ ID NO: 219638
  chr19:50130457-50130495
  hypo

SEQ ID NO: 394654 - DNA, 135 bp, Homo sapiens; identical to SEQ ID NO: 274465
  chr19:50289573-50289708
  hypo

SEQ ID NO: 394655 - DNA, 203 bp, Homo sapiens; identical to SEQ ID NO: 274466
  chr19:50291871-50292074
  hypo

SEQ ID NO: 394656 - DNA, 34 bp, Homo sapiens; identical to SEQ ID NO: 219644
  chr19:50305176-50305210
  hypo

SEQ ID NO: 394657 - DNA, 162 bp, Homo sapiens; identical to SEQ ID NO: 219645
  chr19:50305240-50305402
  hypo

SEQ ID NO: 394658 - DNA, 89 bp, Homo sapiens; identical to SEQ ID NO: 274479
  chr19:50326703-50326792
  hypo

SEQ ID NO: 394659 - DNA, 204 bp, Homo sapiens; identical to SEQ ID NO: 219648
  chr19:50406382-50406586
  hypo

SEQ ID NO: 394660 - DNA, 173 bp, Homo sapiens; identical to SEQ ID NO: 274487
  chr19:50412838-50413011
  hypo

SEQ ID NO: 394661 - DNA, 166 bp, Homo sapiens; identical to SEQ ID NO: 326878
  chr19:50477639-50477805
  hypo

SEQ ID NO: 394662 - DNA, 37 bp, Homo sapiens; identical to SEQ ID NO: 219651
  chr19:50705041-50705078
  hypo

SEQ ID NO: 394663 - DNA, 76 bp, Homo sapiens; identical to SEQ ID NO: 219655
  chr19:50898815-50898891
  hypo

SEQ ID NO: 394664 - DNA, 43 bp, Homo sapiens; identical to SEQ ID NO: 326897
  chr19:50938504-50938547
  hypo

SEQ ID NO: 394665 - DNA, 44 bp, Homo sapiens; identical to SEQ ID NO: 219657
  chr19:51098421-51098465
  hypo

SEQ ID NO: 394666 - DNA, 204 bp, Homo sapiens; identical to SEQ ID NO: 326903
  chr19:51128562-51128766
  hypo

SEQ ID NO: 394667 - DNA, 35 bp, Homo sapiens; identical to SEQ ID NO: 326904
  chr19:51128799-51128834
  hypo

SEQ ID NO: 394668 - DNA, 136 bp, Homo sapiens; identical to SEQ ID NO: 219659
  chr19:51293556-51293692
  hypo

SEQ ID NO: 394669 - DNA, 106 bp, Homo sapiens; identical to SEQ ID NO: 274516
  chr19:51589548-51589654
  hypo

SEQ ID NO: 394670 - DNA, 253 bp, Homo sapiens; identical to SEQ ID NO: 274518
  chr19:51607194-51607447
  hypo

SEQ ID NO: 394671 - DNA, 205 bp, Homo sapiens; identical to SEQ ID NO: 274525
  chr19:51906688-51906893
  hypo

SEQ ID NO: 394672 - DNA, 47 bp, Homo sapiens; identical to SEQ ID NO: 219672
  chr19:52405665-52405712
  hypo

SEQ ID NO: 394673 - DNA, 82 bp, Homo sapiens; identical to SEQ ID NO: 219676
  chr19:52479588-52479670
  hypo

SEQ ID NO: 394674 - DNA, 36 bp, Homo sapiens; identical to SEQ ID NO: 219683
  chr19:52718578-52718614
  hypo

SEQ ID NO: 394675 - DNA, 31 bp, Homo sapiens; identical to SEQ ID NO: 219687
  chr19:52861439-52861470
  hypo

SEQ ID NO: 394676 - DNA, 182 bp, Homo sapiens; identical to SEQ ID NO: 219688
  chr19:52917256-52917438
  hypo

SEQ ID NO: 394677 - DNA, 38 bp, Homo sapiens; identical to SEQ ID NO: 274560
  chr19:53055548-53055586
  hypo

SEQ ID NO: 394678 - DNA, 79 bp, Homo sapiens; identical to SEQ ID NO: 274561
  chr19:53058376-53058455
  hypo

SEQ ID NO: 394679 - DNA, 158 bp, Homo sapiens; identical to SEQ ID NO: 219692
  chr19:53089793-53089951
  hypo

SEQ ID NO: 394680 - DNA, 31 bp, Homo sapiens; identical to SEQ ID NO: 274574
  chr19:53163140-53163171
  hypo

SEQ ID NO: 394681 - DNA, 515 bp, Homo sapiens; identical to SEQ ID NO: 274576
  chr19:53228720-53229235
  hypo

SEQ ID NO: 394682 - DNA, 99 bp, Homo sapiens; identical to SEQ ID NO: 274581
  chr19:53297749-53297848
  hypo

SEQ ID NO: 394683 - DNA, 120 bp, Homo sapiens; identical to SEQ ID NO: 274596
  chr19:53509014-53509134
  hypo

SEQ ID NO: 394684 - DNA, 100 bp, Homo sapiens; identical to SEQ ID NO: 219704
  chr19:53685270-53685370
  hypo

SEQ ID NO: 394685 - DNA, 34 bp, Homo sapiens; identical to SEQ ID NO: 219708
  chr19:53821074-53821108
  hypo

SEQ ID NO: 394686 - DNA, 120 bp, Homo sapiens; identical to SEQ ID NO: 274627
  chr19:53873291-53873411
  hypo

SEQ ID NO: 394687 - DNA, 290 bp, Homo sapiens; identical to SEQ ID NO: 219710
  chr19:53886631-53886921
  hypo

SEQ ID NO: 394688 - DNA, 197 bp, Homo sapiens; identical to SEQ ID NO: 274630
  chr19:53977470-53977667
  hypo

SEQ ID NO: 394689 - DNA, 198 bp, Homo sapiens; identical to SEQ ID NO: 327037
  chr19:53982539-53982737
  hypo

SEQ ID NO: 394690 - DNA, 42 bp, Homo sapiens; identical to SEQ ID NO: 274634
  chr19:54074926-54074968
  hypo

SEQ ID NO: 394691 - DNA, 108 bp, Homo sapiens; identical to SEQ ID NO: 274641
  chr19:54120403-54120511
  hypo

SEQ ID NO: 394692 - DNA, 225 bp, Homo sapiens; identical to SEQ ID NO: 274649
  chr19:54152258-54152483
  hypo

SEQ ID NO: 394693 - DNA, 33 bp, Homo sapiens; identical to SEQ ID NO: 274656
  chr19:54212284-54212317
  hypo

SEQ ID NO: 394694 - DNA, 64 bp, Homo sapiens; identical to SEQ ID NO: 274658
  chr19:54254582-54254646
  hypo

SEQ ID NO: 394695 - DNA, 109 bp, Homo sapiens; identical to SEQ ID NO: 274660
  chr19:54268118-54268227
  hypo

SEQ ID NO: 394696 - DNA, 82 bp, Homo sapiens; identical to SEQ ID NO: 219719
  chr19:54271336-54271418
  hypo

SEQ ID NO: 394697 - DNA, 325 bp, Homo sapiens; identical to SEQ ID NO: 294367
  chr19:54382389-54382714
  hypo

SEQ ID NO: 394698 - DNA, 194 bp, Homo sapiens; identical to SEQ ID NO: 294368
  chr19:54382804-54382998
  hypo

SEQ ID NO: 394699 - DNA, 132 bp, Homo sapiens; identical to SEQ ID NO: 274665
  chr19:54487090-54487222
  hypo

SEQ ID NO: 394700 - DNA, 176 bp, Homo sapiens; identical to SEQ ID NO: 219731
  chr19:55824302-55824478
  hypo

SEQ ID NO: 394701 - DNA, 404 bp, Homo sapiens; identical to SEQ ID NO: 219736
  chr19:55872208-55872612
  hypo

SEQ ID NO: 394702 - DNA, 108 bp, Homo sapiens; identical to SEQ ID NO: 274696
  chr19:56089714-56089822
  hypo

SEQ ID NO: 394703 - DNA, 303 bp, Homo sapiens; identical to SEQ ID NO: 274700
  chr19:56113855-56114158
  hypo

SEQ ID NO: 394704 - DNA, 334 bp, Homo sapiens; identical to SEQ ID NO: 274722
  chr19:56465555-56465889
  hypo

SEQ ID NO: 394705 - DNA, 61 bp, Homo sapiens; identical to SEQ ID NO: 327167
  chr19:56806261-56806322
  hypo

SEQ ID NO: 394706 - DNA, 42 bp, Homo sapiens; identical to SEQ ID NO: 274744
  chr19:56829441-56829483
  hypo

SEQ ID NO: 394707 - DNA, 1448 bp, Homo sapiens; identical to SEQ ID NO: 219771
  chr19:57175022-57176470
  hypo

SEQ ID NO: 394708 - DNA, 91 bp, Homo sapiens; identical to SEQ ID NO: 274756
  chr19:57254044-57254135
  hypo

SEQ ID NO: 394709 - DNA, 50 bp, Homo sapiens; identical to SEQ ID NO: 274758
  chr19:57349850-57349900
  hypo

SEQ ID NO: 394710 - DNA, 42 bp, Homo sapiens; identical to SEQ ID NO: 274768
  chr19:57583563-57583605
  hypo

SEQ ID NO: 394711 - DNA, 42 bp, Homo sapiens; identical to SEQ ID NO: 274779
  chr19:58184721-58184763
  hypo

SEQ ID NO: 394712 - DNA, 81 bp, Homo sapiens; identical to SEQ ID NO: 274782
  chr19:58298051-58298132
  hypo

SEQ ID NO: 394713 - DNA, 38 bp, Homo sapiens; identical to SEQ ID NO: 219780
  chr19:58317135-58317173
  hypo

SEQ ID NO: 394714 - DNA, 44 bp, Homo sapiens; identical to SEQ ID NO: 274788
  chr19:58484262-58484306
  hypo

SEQ ID NO: 394715 - DNA, 250 bp, Homo sapiens; identical to SEQ ID NO: 219782
  chr19:58551437-58551687
  hypo

SEQ ID NO: 394716 - DNA, 289 bp, Homo sapiens; identical to SEQ ID NO: 327222
  chr19:58551717-58552006
  hypo

SEQ ID NO: 394717 - DNA, 69 bp, Homo sapiens; identical to SEQ ID NO: 327223
  chr19:58552051-58552120
  hypo

SEQ ID NO: 394718 - DNA, 31 bp, Homo sapiens; identical to SEQ ID NO: 274792
  chr19:58555625-58555656
  hypo

SEQ ID NO: 394719 - DNA, 318 bp, Homo sapiens; identical to SEQ ID NO: 219785
  chr19:58557757-58558075
  hypo

SEQ ID NO: 394720 - DNA, 156 bp, Homo sapiens; identical to SEQ ID NO: 274804
  chr19:58711831-58711987
  hypo

SEQ ID NO: 394721 - DNA, 71 bp, Homo sapiens; identical to SEQ ID NO: 226057
  chr19:58920316-58920387
  hypo

SEQ ID NO: 394722 - DNA, 116 bp, Homo sapiens; identical to SEQ ID NO: 219801
  chr20:413054-413170
  hypo

SEQ ID NO: 394723 - DNA, 43 bp, Homo sapiens; identical to SEQ ID NO: 219802
  chr20:417445-417488
  hypo

SEQ ID NO: 394724 - DNA, 91 bp, Homo sapiens; identical to SEQ ID NO: 274826
  chr20:631995-632086
  hypo

SEQ ID NO: 394725 - DNA, 137 bp, Homo sapiens; identical to SEQ ID NO: 274829
  chr20:773017-773154
  hypo

SEQ ID NO: 394726 - DNA, 36 bp, Homo sapiens; identical to SEQ ID NO: 219809
  chr20:1276610-1276646
  hypo

SEQ ID NO: 394727 - DNA, 154 bp, Homo sapiens; identical to SEQ ID NO: 274834
  chr20:1277696-1277850
  hypo

SEQ ID NO: 394728 - DNA, 66 bp, Homo sapiens; identical to SEQ ID NO: 294519
  chr20:3063059-3063125
  hypo

SEQ ID NO: 394729 - DNA, 94 bp, Homo sapiens; identical to SEQ ID NO: 294520
  chr20:3063391-3063485
  hypo

SEQ ID NO: 394730 - DNA, 135 bp, Homo sapiens; identical to SEQ ID NO: 274856
  chr20:3208371-3208506
  hypo

SEQ ID NO: 394731 - DNA, 221 bp, Homo sapiens; identical to SEQ ID NO: 274863
  chr20:3635666-3635887
  hypo

SEQ ID NO: 394732 - DNA, 35 bp, Homo sapiens; identical to SEQ ID NO: 274885
  chr20:5649290-5649325
  hypo

SEQ ID NO: 394733 - DNA, 180 bp, Homo sapiens; identical to SEQ ID NO: 219833
  chr20:5734498-5734678
  hypo

SEQ ID NO: 394734 - DNA, 120 bp, Homo sapiens; identical to SEQ ID NO: 219841
  chr20:6302507-6302627
  hypo

SEQ ID NO: 394735 - DNA, 34 bp, Homo sapiens; identical to SEQ ID NO: 274896
  chr20:6732281-6732315
  hypo

SEQ ID NO: 394736 - DNA, 169 bp, Homo sapiens; identical to SEQ ID NO: 274898
  chr20:6759075-6759244
  hypo

SEQ ID NO: 394737 - DNA, 35 bp, Homo sapiens; identical to SEQ ID NO: 219844
  chr20:6861141-6861176
  hypo

SEQ ID NO: 394738 - DNA, 1019 bp, Homo sapiens; identical to SEQ ID NO: 205705
  chr20:10654669-10655688
  hypo

SEQ ID NO: 394739 - DNA, 453 bp, Homo sapiens; identical to SEQ ID NO: 389761
  chr20:11871901-11872354
  hypo

SEQ ID NO: 394740 - DNA, 180 bp, Homo sapiens; identical to SEQ ID NO: 274916
  chr20:15011645-15011825
  hypo

SEQ ID NO: 394741 - DNA, 409 bp, Homo sapiens; identical to SEQ ID NO: 274918
  chr20:16510876-16511285
  hypo

SEQ ID NO: 394742 - DNA, 119 bp, Homo sapiens; identical to SEQ ID NO: 219869
  chr20:20392662-20392781
  hypo

SEQ ID NO: 394743 - DNA, 32 bp, Homo sapiens; identical to SEQ ID NO: 219872
  chr20:21115585-21115617
  hypo

SEQ ID NO: 394744 - DNA, 105 bp, Homo sapiens; identical to SEQ ID NO: 384811
  chr20:21495255-21495360
  hypo

SEQ ID NO: 394745 - DNA, 42 bp, Homo sapiens; identical to SEQ ID NO: 274966
  chr20:23283473-23283515
  hypo

SEQ ID NO: 394746 - DNA, 383 bp, Homo sapiens; identical to SEQ ID NO: 274969
  chr20:23346218-23346601
  hypo

SEQ ID NO: 394747 - DNA, 240 bp, Homo sapiens; identical to SEQ ID NO: 274974
  chr20:24188722-24188962
  hypo

SEQ ID NO: 394748 - DNA, 76 bp, Homo sapiens; identical to SEQ ID NO: 274976
  chr20:24236950-24237026
  hypo

SEQ ID NO: 394749 - DNA, 488 bp, Homo sapiens; identical to SEQ ID NO: 274992
  chr20:25187625-25188113
  hypo

SEQ ID NO: 394750 - DNA, 224 bp, Homo sapiens; identical to SEQ ID NO: 275000
  chr20:25254265-25254489
  hypo

SEQ ID NO: 394751 - DNA, 43 bp, Homo sapiens; identical to SEQ ID NO: 275001
  chr20:25254609-25254652
  hypo

SEQ ID NO: 394752 - DNA, 33 bp, Homo sapiens; identical to SEQ ID NO: 219893
  chr20:25278858-25278891
  hypo

SEQ ID NO: 394753 - DNA, 218 bp, Homo sapiens; identical to SEQ ID NO: 275018
  chr20:25972702-25972920
  hypo

SEQ ID NO: 394754 - DNA, 41 bp, Homo sapiens; identical to SEQ ID NO: 219904
  chr20:30468561-30468602
  hypo

SEQ ID NO: 394755 - DNA, 43 bp, Homo sapiens; identical to SEQ ID NO: 294694
  chr20:30583025-30583068
  hypo

SEQ ID NO: 394756 - DNA, 289 bp, Homo sapiens; identical to SEQ ID NO: 275037
  chr20:30810304-30810593
  hypo

SEQ ID NO: 394757 - DNA, 359 bp, Homo sapiens; identical to SEQ ID NO: 205772
  chr20:31019123-31019482
  hypo

SEQ ID NO: 394758 - DNA, 634 bp, Homo sapiens; identical to SEQ ID NO: 205774
  chr20:31021086-31021720
  hypo

SEQ ID NO: 394759 - DNA, 88 bp, Homo sapiens; identical to SEQ ID NO: 219923
  chr20:31115869-31115957
  hypo

SEQ ID NO: 394760 - DNA, 56 bp, Homo sapiens; identical to SEQ ID NO: 219924
  chr20:31146689-31146745
  hypo

SEQ ID NO: 394761 - DNA, 59 bp, Homo sapiens; identical to SEQ ID NO: 275057
  chr20:31392269-31392328
  hypo

SEQ ID NO: 394762 - DNA, 253 bp, Homo sapiens; identical to SEQ ID NO: 275061
  chr20:31936115-31936368
  hypo

SEQ ID NO: 394763 - DNA, 258 bp, Homo sapiens; identical to SEQ ID NO: 275064
  chr20:32266840-32267098
  hypo

SEQ ID NO: 394764 - DNA, 42 bp, Homo sapiens; identical to SEQ ID NO: 275065
  chr20:32270661-32270703
  hypo

SEQ ID NO: 394765 - DNA, 210 bp, Homo sapiens; identical to SEQ ID NO: 275066
  chr20:32284902-32285112
  hypo

SEQ ID NO: 394766 - DNA, 100 bp, Homo sapiens; identical to SEQ ID NO: 219932
  chr20:32311064-32311164
  hypo

SEQ ID NO: 394767 - DNA, 200 bp, Homo sapiens; identical to SEQ ID NO: 219934
  chr20:32376690-32376890
  hypo

SEQ ID NO: 394768 - DNA, 35 bp, Homo sapiens; identical to SEQ ID NO: 219937
  chr20:32381768-32381803
  hypo

SEQ ID NO: 394769 - DNA, 60 bp, Homo sapiens; identical to SEQ ID NO: 275084
  chr20:32772952-32773012
  hypo

SEQ ID NO: 394770 - DNA, 76 bp, Homo sapiens; identical to SEQ ID NO: 275096
  chr20:33544843-33544919
  hypo

SEQ ID NO: 394771 - DNA, 81 bp, Homo sapiens; identical to SEQ ID NO: 275101
  chr20:33803020-33803101
  hypo

SEQ ID NO: 394772 - DNA, 49 bp, Homo sapiens; identical to SEQ ID NO: 275109
  chr20:34092136-34092185
  hypo

SEQ ID NO: 394773 - DNA, 96 bp, Homo sapiens; identical to SEQ ID NO: 275113
  chr20:34166313-34166409
  hypo

SEQ ID NO: 394774 - DNA, 171 bp, Homo sapiens; identical to SEQ ID NO: 275114
  chr20:34171852-34172023
  hypo

SEQ ID NO: 394775 - DNA, 321 bp, Homo sapiens; identical to SEQ ID NO: 275141
  chr20:35907656-35907977
  hypo

SEQ ID NO: 394776 - DNA, 102 bp, Homo sapiens; identical to SEQ ID NO: 275145
  chr20:35940186-35940288
  hypo

SEQ ID NO: 394777 - DNA, 123 bp, Homo sapiens; identical to SEQ ID NO: 219969
  chr20:35987182-35987305
  hypo

SEQ ID NO: 394778 - DNA, 34 bp, Homo sapiens; identical to SEQ ID NO: 219970
  chr20:36151088-36151122
  hypo

SEQ ID NO: 394779 - DNA, 346 bp, Homo sapiens; identical to SEQ ID NO: 327651
  chr20:36151161-36151507
  hypo

SEQ ID NO: 394780 - DNA, 279 bp, Homo sapiens; identical to SEQ ID NO: 219976
  chr20:36770537-36770816
  hypo

SEQ ID NO: 394781 - DNA, 232 bp, Homo sapiens; identical to SEQ ID NO: 275171
  chr20:37536535-37536767
  hypo

SEQ ID NO: 394782 - DNA, 120 bp, Homo sapiens; identical to SEQ ID NO: 275174
  chr20:37588339-37588459
  hypo

SEQ ID NO: 394783 - DNA, 85 bp, Homo sapiens; identical to SEQ ID NO: 275176
  chr20:37622329-37622414
  hypo

SEQ ID NO: 394784 - DNA, 75 bp, Homo sapiens; identical to SEQ ID NO: 275182
  chr20:37671509-37671584
  hypo

SEQ ID NO: 394785 - DNA, 90 bp, Homo sapiens; identical to SEQ ID NO: 275189
  chr20:39436088-39436178
  hypo

SEQ ID NO: 394786 - DNA, 220 bp, Homo sapiens; identical to SEQ ID NO: 275193
  chr20:39791147-39791367
  hypo

SEQ ID NO: 394787 - DNA, 41 bp, Homo sapiens; identical to SEQ ID NO: 275199
  chr20:40352413-40352454
  hypo

SEQ ID NO: 394788 - DNA, 120 bp, Homo sapiens; identical to SEQ ID NO: 275206
  chr20:42215917-42216037
  hypo

SEQ ID NO: 394789 - DNA, 109 bp, Homo sapiens; identical to SEQ ID NO: 327711
  chr20:42345995-42346104
  hypo

SEQ ID NO: 394790 - DNA, 122 bp, Homo sapiens; identical to SEQ ID NO: 327712
  chr20:42346134-42346256
  hypo

SEQ ID NO: 394791 - DNA, 158 bp, Homo sapiens
  chr20:42833336-42833494
  hypo
gtgtgttcaatgtttagcccccacttctaagtgagaacatgcagcatgtggttttacaaatacataatttttgaccatatattttgaaaaatttttaaataatgttccaagtaatttttagggataccaaaatggcttaattttactttttttttttt

SEQ ID NO: 394792 - DNA, 156 bp, Homo sapiens; identical to SEQ ID NO: 219999
  chr20:42924601-42924757
  hypo

SEQ ID NO: 394793 - DNA, 199 bp, Homo sapiens; identical to SEQ ID NO: 275226
  chr20:43356086-43356285
  hypo

SEQ ID NO: 394794 - DNA, 73 bp, Homo sapiens; identical to SEQ ID NO: 226157
  chr20:44462767-44462840
  hypo

SEQ ID NO: 394795 - DNA, 188 bp, Homo sapiens; identical to SEQ ID NO: 275236
  chr20:44463585-44463773
  hypo

SEQ ID NO: 394796 - DNA, 132 bp, Homo sapiens; identical to SEQ ID NO: 275243
  chr20:44578453-44578585
  hypo

SEQ ID NO: 394797 - DNA, 128 bp, Homo sapiens; identical to SEQ ID NO: 275254
  chr20:45343199-45343327
  hypo

SEQ ID NO: 394798 - DNA, 196 bp, Homo sapiens; identical to SEQ ID NO: 220014
  chr20:45837756-45837952
  hypo

SEQ ID NO: 394799 - DNA, 120 bp, Homo sapiens; identical to SEQ ID NO: 220018
  chr20:46011002-46011122
  hypo

SEQ ID NO: 394800 - DNA, 31 bp, Homo sapiens; identical to SEQ ID NO: 275270
  chr20:46175277-46175308
  hypo

SEQ ID NO: 394801 - DNA, 140 bp, Homo sapiens; identical to SEQ ID NO: 327787
  chr20:46315385-46315525
  hypo

SEQ ID NO: 394802 - DNA, 59 bp, Homo sapiens; identical to SEQ ID NO: 275277
  chr20:46489240-46489299
  hypo

SEQ ID NO: 394803 - DNA, 31 bp, Homo sapiens; identical to SEQ ID NO: 275300
  chr20:47805438-47805469
  hypo

SEQ ID NO: 394804 - DNA, 272 bp, Homo sapiens; identical to SEQ ID NO: 275304
  chr20:47865551-47865823
  hypo

SEQ ID NO: 394805 - DNA, 39 bp, Homo sapiens; identical to SEQ ID NO: 275319
  chr20:48549957-48549996
  hypo

SEQ ID NO: 394806 - DNA, 42 bp, Homo sapiens; identical to SEQ ID NO: 275328
  chr20:48791873-48791915
  hypo

SEQ ID NO: 394807 - DNA, 42 bp, Homo sapiens; identical to SEQ ID NO: 275333
  chr20:48936571-48936613
  hypo

SEQ ID NO: 394808 - DNA, 65 bp, Homo sapiens; identical to SEQ ID NO: 220034
  chr20:49046944-49047009
  hypo

SEQ ID NO: 394809 - DNA, 69 bp, Homo sapiens; identical to SEQ ID NO: 220053
  chr20:49406843-49406912
  hypo

SEQ ID NO: 394810 - DNA, 367 bp, Homo sapiens; identical to SEQ ID NO: 275388
  chr20:50199790-50200157
  hypo

SEQ ID NO: 394811 - DNA, 79 bp, Homo sapiens; identical to SEQ ID NO: 275390
  chr20:50213712-50213791
  hypo

SEQ ID NO: 394812 - DNA, 31 bp, Homo sapiens; identical to SEQ ID NO: 220056
  chr20:50326111-50326142
  hypo

SEQ ID NO: 394813 - DNA, 135 bp, Homo sapiens; identical to SEQ ID NO: 220059
  chr20:50378297-50378432
  hypo

SEQ ID NO: 394814 - DNA, 47 bp, Homo sapiens; identical to SEQ ID NO: 327908
  chr20:50378462-50378509
  hypo

SEQ ID NO: 394815 - DNA, 79 bp, Homo sapiens; identical to SEQ ID NO: 220063
  chr20:50405412-50405491
  hypo

SEQ ID NO: 394816 - DNA, 149 bp, Homo sapiens; identical to SEQ ID NO: 220066
  chr20:50408300-50408449
  hypo

SEQ ID NO: 394817 - DNA, 83 bp, Homo sapiens; identical to SEQ ID NO: 327919
  chr20:50419388-50419471
  hypo

SEQ ID NO: 394818 - DNA, 157 bp, Homo sapiens; identical to SEQ ID NO: 275407
  chr20:50451581-50451738
  hypo

SEQ ID NO: 394819 - DNA, 139 bp, Homo sapiens; identical to SEQ ID NO: 275415
  chr20:51870537-51870676
  hypo

SEQ ID NO: 394820 - DNA, 39 bp, Homo sapiens; identical to SEQ ID NO: 275421
  chr20:52305003-52305042
  hypo

SEQ ID NO: 394821 - DNA, 182 bp, Homo sapiens; identical to SEQ ID NO: 275425
  chr20:52481243-52481425
  hypo

SEQ ID NO: 394822 - DNA, 50 bp, Homo sapiens; identical to SEQ ID NO: 275438
  chr20:55091876-55091926
  hypo

SEQ ID NO: 394823 - DNA, 152 bp, Homo sapiens; identical to SEQ ID NO: 275442
  chr20:55692780-55692932
  hypo

SEQ ID NO: 394824 - DNA, 104 bp, Homo sapiens; identical to SEQ ID NO: 327975
  chr20:56031298-56031402
  hypo

SEQ ID NO: 394825 - DNA, 274 bp, Homo sapiens; identical to SEQ ID NO: 275458
  chr20:56076054-56076328
  hypo

SEQ ID NO: 394826 - DNA, 155 bp, Homo sapiens; identical to SEQ ID NO: 275462
  chr20:56167908-56168063
  hypo

SEQ ID NO: 394827 - DNA, 102 bp, Homo sapiens; identical to SEQ ID NO: 275466
  chr20:56262196-56262298
  hypo

SEQ ID NO: 394828 - DNA, 67 bp, Homo sapiens; identical to SEQ ID NO: 275474
  chr20:56717706-56717773
  hypo

SEQ ID NO: 394829 - DNA, 234 bp, Homo sapiens; identical to SEQ ID NO: 220102
  chr20:57244309-57244543
  hypo

SEQ ID NO: 394830 - DNA, 208 bp, Homo sapiens; identical to SEQ ID NO: 226190
  chr20:57414593-57414801
  hypo

SEQ ID NO: 394831 - DNA, 285 bp, Homo sapiens; identical to SEQ ID NO: 294939
  chr20:58514845-58515130
  hypo

SEQ ID NO: 394832 - DNA, 519 bp, Homo sapiens; identical to SEQ ID NO: 275518
  chr20:59965387-59965906
  hypo

SEQ ID NO: 394833 - DNA, 195 bp, Homo sapiens; identical to SEQ ID NO: 275520
  chr20:60098286-60098481
  hypo

SEQ ID NO: 394834 - DNA, 44 bp, Homo sapiens; identical to SEQ ID NO: 275524
  chr20:60176907-60176951
  hypo

SEQ ID NO: 394835 - DNA, 175 bp, Homo sapiens; identical to SEQ ID NO: 275529
  chr20:60236697-60236872
  hypo

SEQ ID NO: 394836 - DNA, 190 bp, Homo sapiens; identical to SEQ ID NO: 220136
  chr20:60361300-60361490
  hypo

SEQ ID NO: 394837 - DNA, 557 bp, Homo sapiens; identical to SEQ ID NO: 275553
  chr20:60495766-60496323
  hypo

SEQ ID NO: 394838 - DNA, 34 bp, Homo sapiens; identical to SEQ ID NO: 328111
  chr20:60635123-60635157
  hypo

SEQ ID NO: 394839 - DNA, 75 bp, Homo sapiens
  chr20:60842845-60842920
  hypo
gacagtgtctttgctgagacagcacatgtctgtgcctcctgcagttgccacttgtcattgtcttcagggtatatc

SEQ ID NO: 394840 - DNA, 222 bp, Homo sapiens; identical to SEQ ID NO: 328142
  chr20:60905729-60905951
  hypo

SEQ ID NO: 394841 - DNA, 236 bp, Homo sapiens; identical to SEQ ID NO: 220172
  chr20:60906010-60906246
  hypo

SEQ ID NO: 394842 - DNA, 234 bp, Homo sapiens; identical to SEQ ID NO: 220174
  chr20:60913381-60913615
  hypo

SEQ ID NO: 394843 - DNA, 201 bp, Homo sapiens; identical to SEQ ID NO: 220183
  chr20:60997210-60997411
  hypo

SEQ ID NO: 394844 - DNA, 133 bp, Homo sapiens; identical to SEQ ID NO: 275615
  chr20:61009827-61009960
  hypo

SEQ ID NO: 394845 - DNA, 105 bp, Homo sapiens; identical to SEQ ID NO: 275619
  chr20:61275877-61275982
  hypo

SEQ ID NO: 394846 - DNA, 201 bp, Homo sapiens; identical to SEQ ID NO: 220185
  chr20:61285585-61285786
  hypo

SEQ ID NO: 394847 - DNA, 313 bp, Homo sapiens; identical to SEQ ID NO: 275627
  chr20:61298975-61299288
  hypo

SEQ ID NO: 394848 - DNA, 115 bp, Homo sapiens; identical to SEQ ID NO: 328189
  chr20:61364297-61364412
  hypo

SEQ ID NO: 394849 - DNA, 54 bp, Homo sapiens; identical to SEQ ID NO: 328190
  chr20:61364476-61364530
  hypo

SEQ ID NO: 394850 - DNA, 62 bp, Homo sapiens; identical to SEQ ID NO: 328198
  chr20:61411118-61411180
  hypo

SEQ ID NO: 394851 - DNA, 118 bp, Homo sapiens; identical to SEQ ID NO: 275648
  chr20:61442868-61442986
  hypo

SEQ ID NO: 394852 - DNA, 93 bp, Homo sapiens; identical to SEQ ID NO: 220197
  chr20:61518345-61518438
  hypo

SEQ ID NO: 394853 - DNA, 92 bp, Homo sapiens; identical to SEQ ID NO: 275667
  chr20:61540950-61541042
  hypo

SEQ ID NO: 394854 - DNA, 135 bp, Homo sapiens; identical to SEQ ID NO: 220200
  chr20:61576504-61576639
  hypo

SEQ ID NO: 394855 - DNA, 103 bp, Homo sapiens; identical to SEQ ID NO: 294961
  chr20:61583882-61583985
  hypo

SEQ ID NO: 394856 - DNA, 316 bp, Homo sapiens; identical to SEQ ID NO: 294962
  chr20:61584015-61584331
  hypo

SEQ ID NO: 394857 - DNA, 130 bp, Homo sapiens; identical to SEQ ID NO: 220201
  chr20:61619034-61619164
  hypo

SEQ ID NO: 394858 - DNA, 210 bp, Homo sapiens; identical to SEQ ID NO: 275674
  chr20:61666077-61666287
  hypo

SEQ ID NO: 394859 - DNA, 165 bp, Homo sapiens; identical to SEQ ID NO: 220207
  chr20:61748971-61749136
  hypo

SEQ ID NO: 394860 - DNA, 86 bp, Homo sapiens; identical to SEQ ID NO: 275686
  chr20:61759828-61759914
  hypo

SEQ ID NO: 394861 - DNA, 154 bp, Homo sapiens; identical to SEQ ID NO: 275691
  chr20:61819884-61820038
  hypo

SEQ ID NO: 394862 - DNA, 55 bp, Homo sapiens; identical to SEQ ID NO: 220216
  chr20:61895763-61895818
  hypo

SEQ ID NO: 394863 - DNA, 37 bp, Homo sapiens; identical to SEQ ID NO: 220217
  chr20:61909562-61909599
  hypo

SEQ ID NO: 394864 - DNA, 58 bp, Homo sapiens; identical to SEQ ID NO: 220218
  chr20:61913595-61913653
  hypo

SEQ ID NO: 394865 - DNA, 244 bp, Homo sapiens; identical to SEQ ID NO: 275708
  chr20:61979331-61979575
  hypo

SEQ ID NO: 394866 - DNA, 247 bp, Homo sapiens; identical to SEQ ID NO: 220221
  chr20:61981498-61981745
  hypo

SEQ ID NO: 394867 - DNA, 187 bp, Homo sapiens; identical to SEQ ID NO: 220222
  chr20:61982647-61982834
  hypo

SEQ ID NO: 394868 - DNA, 84 bp, Homo sapiens; identical to SEQ ID NO: 275717
  chr20:62019401-62019485
  hypo

SEQ ID NO: 394869 - DNA, 47 bp, Homo sapiens; identical to SEQ ID NO: 328281
  chr20:62037978-62038025
  hypo

SEQ ID NO: 394870 - DNA, 32 bp, Homo sapiens; identical to SEQ ID NO: 220229
  chr20:62083855-62083887
  hypo

SEQ ID NO: 394871 - DNA, 42 bp, Homo sapiens; identical to SEQ ID NO: 226226
  chr20:62152087-62152129
  hypo

SEQ ID NO: 394872 - DNA, 77 bp, Homo sapiens; identical to SEQ ID NO: 220234
  chr20:62190624-62190701
  hypo

SEQ ID NO: 394873 - DNA, 184 bp, Homo sapiens; identical to SEQ ID NO: 275751
  chr20:62209403-62209587
  hypo

SEQ ID NO: 394874 - DNA, 278 bp, Homo sapiens; identical to SEQ ID NO: 275753
  chr20:62218275-62218553
  hypo

SEQ ID NO: 394875 - DNA, 828 bp, Homo sapiens
  chr20:62220463-62221291
  hypo
ccacatgggaatcctcgacctccatagtgactggttctgtttatgcctctgccccaggactgaagccctagggacacacctcatggatctcagacccctgggaggggccggctcagggacaggctgcccaggacctccgcacccggtcaagtgcactcacaggggctcaggggccacccaaagagctaactcgggaagcctaggcactcaccattattttggttgaaaatgctataaatctgactcttcctagaagcctactaagcaattcacttaaaaacaccctcagtacatgtgcaacaatgcctggaccacgcctcgtctgtgcggcccctgggccacctgagcaccggctgggggcgggggaggcaggcacccatcaggatctgcaccccaagctccgggtgcatgttcccaactggaggagaacggggcgccagccacactaaacctacagaaaactgtgggaagaaaccaaatccataggatccagaggtttcacacttgggcttagctcccaagtcatgagttagtaacgtccccagggacctggctgggtgcagacatgggggcctcgtgacctgctgcaccgcgtccagcacctgcagggtcgcgctcggcacctggctctgcttcctctgtctctgctgcacccaggctccccctagcccccgcccacctggctcctgatcaaggcccaatgtgtaaacagtattaataagcaacagatggaaaaatatatttcccaagaaaaaagggggaggaaacgtgggacctgaagaccgattttccaggttgctctcgctgttctgtccccttctctcttct

SEQ ID NO: 394876 - DNA, 120 bp, Homo sapiens; identical to SEQ ID NO: 275760
  chr20:62252635-62252755
  hypo

SEQ ID NO: 394877 - DNA, 651 bp, Homo sapiens; identical to SEQ ID NO: 294982
  chr20:62283836-62284487
  hypo

SEQ ID NO: 394878 - DNA, 69 bp, Homo sapiens; identical to SEQ ID NO: 294983
  chr20:62284615-62284684
  hypo

SEQ ID NO: 394879 - DNA, 230 bp, Homo sapiens; identical to SEQ ID NO: 328336
  chr20:62329296-62329526
  hypo

SEQ ID NO: 394880 - DNA, 126 bp, Homo sapiens; identical to SEQ ID NO: 328337
  chr20:62329556-62329682
  hypo

SEQ ID NO: 394881 - DNA, 55 bp, Homo sapiens; identical to SEQ ID NO: 220248
  chr20:62398949-62399004
  hypo

SEQ ID NO: 394882 - DNA, 117 bp, Homo sapiens; identical to SEQ ID NO: 275794
  chr20:62494226-62494343
  hypo

SEQ ID NO: 394883 - DNA, 251 bp, Homo sapiens; identical to SEQ ID NO: 275797
  chr20:62520344-62520595
  hypo

SEQ ID NO: 394884 - DNA, 361 bp, Homo sapiens; identical to SEQ ID NO: 226233
  chr20:62525784-62526145
  hypo

SEQ ID NO: 394885 - DNA, 42 bp, Homo sapiens; identical to SEQ ID NO: 220254
  chr20:62544237-62544279
  hypo

SEQ ID NO: 394886 - DNA, 244 bp, Homo sapiens; identical to SEQ ID NO: 275804
  chr20:62571650-62571894
  hypo

SEQ ID NO: 394887 - DNA, 125 bp, Homo sapiens; identical to SEQ ID NO: 275806
  chr20:62576162-62576287
  hypo

SEQ ID NO: 394888 - DNA, 125 bp, Homo sapiens; identical to SEQ ID NO: 220266
  chr20:62608161-62608286
  hypo

SEQ ID NO: 394889 - DNA, 205 bp, Homo sapiens; identical to SEQ ID NO: 294999
  chr20:62673632-62673837
  hypo

SEQ ID NO: 394890 - DNA, 322 bp, Homo sapiens; identical to SEQ ID NO: 295000
  chr20:62679894-62680216
  hypo

SEQ ID NO: 394891 - DNA, 34 bp, Homo sapiens; identical to SEQ ID NO: 275819
  chr20:62705149-62705183
  hypo

SEQ ID NO: 394892 - DNA, 71 bp, Homo sapiens; identical to SEQ ID NO: 275826
  chr20:62797053-62797124
  hypo

SEQ ID NO: 394893 - DNA, 263 bp, Homo sapiens; identical to SEQ ID NO: 275830
  chr20:62859283-62859546
  hypo

SEQ ID NO: 394894 - DNA, 142 bp, Homo sapiens; identical to SEQ ID NO: 328413
  chr20:62871681-62871823
  hypo

SEQ ID NO: 394895 - DNA, 38 bp, Homo sapiens; identical to SEQ ID NO: 275836
  chr20:62912885-62912923
  hypo

SEQ ID NO: 394896 - DNA, 37 bp, Homo sapiens; identical to SEQ ID NO: 275857
  chr21:22495685-22495722
  hypo

SEQ ID NO: 394897 - DNA, 42 bp, Homo sapiens; identical to SEQ ID NO: 275866
  chr21:30488430-30488472
  hypo

SEQ ID NO: 394898 - DNA, 105 bp, Homo sapiens; identical to SEQ ID NO: 226254
  chr21:32932326-32932431
  hypo

SEQ ID NO: 394899 - DNA, 101 bp, Homo sapiens; identical to SEQ ID NO: 220307
  chr21:33175427-33175528
  hypo

SEQ ID NO: 394900 - DNA, 120 bp, Homo sapiens; identical to SEQ ID NO: 275878
  chr21:33627820-33627940
  hypo

SEQ ID NO: 394901 - DNA, 616 bp, Homo sapiens; identical to SEQ ID NO: 220309
  chr21:33707628-33708244
  hypo

SEQ ID NO: 394902 - DNA, 583 bp, Homo sapiens; identical to SEQ ID NO: 275890
  chr21:33760391-33760974
  hypo

SEQ ID NO: 394903 - DNA, 65 bp, Homo sapiens; identical to SEQ ID NO: 220316
  chr21:33849056-33849121
  hypo

SEQ ID NO: 394904 - DNA, 36 bp, Homo sapiens; identical to SEQ ID NO: 275898
  chr21:33857747-33857783
  hypo

SEQ ID NO: 394905 - DNA, 109 bp, Homo sapiens; identical to SEQ ID NO: 275906
  chr21:33976772-33976881
  hypo

SEQ ID NO: 394906 - DNA, 176 bp, Homo sapiens; identical to SEQ ID NO: 275911
  chr21:34498741-34498917
  hypo

SEQ ID NO: 394907 - DNA, 92 bp, Homo sapiens; identical to SEQ ID NO: 220321
  chr21:34710940-34711032
  hypo

SEQ ID NO: 394908 - DNA, 32 bp, Homo sapiens; identical to SEQ ID NO: 220322
  chr21:34711332-34711364
  hypo

SEQ ID NO: 394909 - DNA, 251 bp, Homo sapiens; identical to SEQ ID NO: 328512
  chr21:34927031-34927282
  hypo

SEQ ID NO: 394910 - DNA, 180 bp, Homo sapiens; identical to SEQ ID NO: 328513
  chr21:34927363-34927543
  hypo

SEQ ID NO: 394911 - DNA, 154 bp, Homo sapiens; identical to SEQ ID NO: 275924
  chr21:35453130-35453284
  hypo

SEQ ID NO: 394912 - DNA, 74 bp, Homo sapiens; identical to SEQ ID NO: 275928
  chr21:36074666-36074740
  hypo

SEQ ID NO: 394913 - DNA, 42 bp, Homo sapiens; identical to SEQ ID NO: 275932
  chr21:36242109-36242151
  hypo

SEQ ID NO: 394914 - DNA, 131 bp, Homo sapiens; identical to SEQ ID NO: 205982
  chr21:36421464-36421595
  hypo

SEQ ID NO: 394915 - DNA, 42 bp, Homo sapiens; identical to SEQ ID NO: 275942
  chr21:37514437-37514479
  hypo

SEQ ID NO: 394916 - DNA, 62 bp, Homo sapiens; identical to SEQ ID NO: 275943
  chr21:37527866-37527928
  hypo

SEQ ID NO: 394917 - DNA, 45 bp, Homo sapiens; identical to SEQ ID NO: 275952
  chr21:37727417-37727462
  hypo

SEQ ID NO: 394918 - DNA, 206 bp, Homo sapiens; identical to SEQ ID NO: 220343
  chr21:37847275-37847481
  hypo

SEQ ID NO: 394919 - DNA, 79 bp, Homo sapiens; identical to SEQ ID NO: 275962
  chr21:37855513-37855592
  hypo

SEQ ID NO: 394920 - DNA, 200 bp, Homo sapiens; identical to SEQ ID NO: 275969
  chr21:38282807-38283007
  hypo

SEQ ID NO: 394921 - DNA, 199 bp, Homo sapiens; identical to SEQ ID NO: 295105
  chr21:38362192-38362391
  hypo

SEQ ID NO: 394922 - DNA, 122 bp, Homo sapiens; identical to SEQ ID NO: 328578
  chr21:38383188-38383310
  hypo

SEQ ID NO: 394923 - DNA, 50 bp, Homo sapiens; identical to SEQ ID NO: 328590
  chr21:38823585-38823635
  hypo

SEQ ID NO: 394924 - DNA, 397 bp, Homo sapiens; identical to SEQ ID NO: 220349
  chr21:38823665-38824062
  hypo

SEQ ID NO: 394925 - DNA, 284 bp, Homo sapiens; identical to SEQ ID NO: 276009
  chr21:40340040-40340324
  hypo

SEQ ID NO: 394926 - DNA, 145 bp, Homo sapiens; identical to SEQ ID NO: 276014
  chr21:40431056-40431201
  hypo

SEQ ID NO: 394927 - DNA, 245 bp, Homo sapiens; identical to SEQ ID NO: 276034
  chr21:40764919-40765164
  hypo

SEQ ID NO: 394928 - DNA, 89 bp, Homo sapiens; identical to SEQ ID NO: 220370
  chr21:40904967-40905056
  hypo

SEQ ID NO: 394929 - DNA, 86 bp, Homo sapiens; identical to SEQ ID NO: 276038
  chr21:40952126-40952212
  hypo

SEQ ID NO: 394930 - DNA, 35 bp, Homo sapiens; identical to SEQ ID NO: 276040
  chr21:41711102-41711137
  hypo

SEQ ID NO: 394931 - DNA, 85 bp, Homo sapiens; identical to SEQ ID NO: 220381
  chr21:42609014-42609099
  hypo

SEQ ID NO: 394932 - DNA, 120 bp, Homo sapiens; identical to SEQ ID NO: 220388
  chr21:42896357-42896477
  hypo

SEQ ID NO: 394933 - DNA, 39 bp, Homo sapiens; identical to SEQ ID NO: 276073
  chr21:43108231-43108270
  hypo

SEQ ID NO: 394934 - DNA, 162 bp, Homo sapiens; identical to SEQ ID NO: 276082
  chr21:43171157-43171319
  hypo

SEQ ID NO: 394935 - DNA, 153 bp, Homo sapiens; identical to SEQ ID NO: 276090
  chr21:43269265-43269418
  hypo

SEQ ID NO: 394936 - DNA, 89 bp, Homo sapiens; identical to SEQ ID NO: 220409
  chr21:43347890-43347979
  hypo

SEQ ID NO: 394937 - DNA, 96 bp, Homo sapiens; identical to SEQ ID NO: 276105
  chr21:43544448-43544544
  hypo

SEQ ID NO: 394938 - DNA, 424 bp, Homo sapiens; identical to SEQ ID NO: 276117
  chr21:43767524-43767948
  hypo

SEQ ID NO: 394939 - DNA, 460 bp, Homo sapiens; identical to SEQ ID NO: 276123
  chr21:43825720-43826180
  hypo

SEQ ID NO: 394940 - DNA, 49 bp, Homo sapiens; identical to SEQ ID NO: 328748
  chr21:43864679-43864728
  hypo

SEQ ID NO: 394941 - DNA, 308 bp, Homo sapiens; identical to SEQ ID NO: 276144
  chr21:44088802-44089110
  hypo

SEQ ID NO: 394942 - DNA, 128 bp, Homo sapiens; identical to SEQ ID NO: 276148
  chr21:44110392-44110520
  hypo

SEQ ID NO: 394943 - DNA, 34 bp, Homo sapiens; identical to SEQ ID NO: 276150
  chr21:44129779-44129813
  hypo

SEQ ID NO: 394944 - DNA, 136 bp, Homo sapiens; identical to SEQ ID NO: 276154
  chr21:44176666-44176802
  hypo

SEQ ID NO: 394945 - DNA, 246 bp, Homo sapiens; identical to SEQ ID NO: 220427
  chr21:44440492-44440738
  hypo

SEQ ID NO: 394946 - DNA, 46 bp, Homo sapiens; identical to SEQ ID NO: 328799
  chr21:44480610-44480656
  hypo

SEQ ID NO: 394947 - DNA, 229 bp, Homo sapiens; identical to SEQ ID NO: 220435
  chr21:44601206-44601435
  hypo

SEQ ID NO: 394948 - DNA, 82 bp, Homo sapiens; identical to SEQ ID NO: 276185
  chr21:44792954-44793036
  hypo

SEQ ID NO: 394949 - DNA, 201 bp, Homo sapiens; identical to SEQ ID NO: 220437
  chr21:44799064-44799265
  hypo

SEQ ID NO: 394950 - DNA, 111 bp, Homo sapiens; identical to SEQ ID NO: 276203
  chr21:44888677-44888788
  hypo

SEQ ID NO: 394951 - DNA, 500 bp, Homo sapiens; identical to SEQ ID NO: 387360
  chr21:45176320-45176820
  hypo

SEQ ID NO: 394952 - DNA, 32 bp, Homo sapiens; identical to SEQ ID NO: 328849
  chr21:45187154-45187186
  hypo

SEQ ID NO: 394953 - DNA, 421 bp, Homo sapiens; identical to SEQ ID NO: 276216
  chr21:45188555-45188976
  hypo

SEQ ID NO: 394954 - DNA, 598 bp, Homo sapiens; identical to SEQ ID NO: 220449
  chr21:45224195-45224793
  hypo

SEQ ID NO: 394955 - DNA, 186 bp, Homo sapiens; identical to SEQ ID NO: 276234
  chr21:45299787-45299973
  hypo

SEQ ID NO: 394956 - DNA, 113 bp, Homo sapiens; identical to SEQ ID NO: 276240
  chr21:45355818-45355931
  hypo

SEQ ID NO: 394957 - DNA, 397 bp, Homo sapiens; identical to SEQ ID NO: 226297
  chr21:45381212-45381609
  hypo

SEQ ID NO: 394958 - DNA, 156 bp, Homo sapiens; identical to SEQ ID NO: 328890
  chr21:45411685-45411841
  hypo

SEQ ID NO: 394959 - DNA, 64 bp, Homo sapiens; identical to SEQ ID NO: 276258
  chr21:45483497-45483561
  hypo

SEQ ID NO: 394960 - DNA, 192 bp, Homo sapiens; identical to SEQ ID NO: 220471
  chr21:45558785-45558977
  hypo

SEQ ID NO: 394961 - DNA, 144 bp, Homo sapiens; identical to SEQ ID NO: 226299
  chr21:45660255-45660399
  hypo

SEQ ID NO: 394962 - DNA, 211 bp, Homo sapiens; identical to SEQ ID NO: 384837
  chr21:45662515-45662726
  hypo

SEQ ID NO: 394963 - DNA, 110 bp, Homo sapiens; identical to SEQ ID NO: 220476
  chr21:45709581-45709691
  hypo

SEQ ID NO: 394964 - DNA, 299 bp, Homo sapiens; identical to SEQ ID NO: 276289
  chr21:45768770-45769069
  hypo

SEQ ID NO: 394965 - DNA, 196 bp, Homo sapiens; identical to SEQ ID NO: 276309
  chr21:46144852-46145048
  hypo

SEQ ID NO: 394966 - DNA, 192 bp, Homo sapiens; identical to SEQ ID NO: 328957
  chr21:46183769-46183961
  hypo

SEQ ID NO: 394967 - DNA, 150 bp, Homo sapiens; identical to SEQ ID NO: 328958
  chr21:46184287-46184437
  hypo

SEQ ID NO: 394968 - DNA, 468 bp, Homo sapiens; identical to SEQ ID NO: 276341
  chr21:46330230-46330698
  hypo

SEQ ID NO: 394969 - DNA, 36 bp, Homo sapiens; identical to SEQ ID NO: 276346
  chr21:46383298-46383334
  hypo

SEQ ID NO: 394970 - DNA, 200 bp, Homo sapiens; identical to SEQ ID NO: 220503
  chr21:46392162-46392362
  hypo

SEQ ID NO: 394971 - DNA, 186 bp, Homo sapiens; identical to SEQ ID NO: 329000
  chr21:46452572-46452758
  hypo

SEQ ID NO: 394972 - DNA, 255 bp, Homo sapiens; identical to SEQ ID NO: 220506
  chr21:46763204-46763459
  hypo

SEQ ID NO: 394973 - DNA, 82 bp, Homo sapiens; identical to SEQ ID NO: 276364
  chr21:46763922-46764004
  hypo

SEQ ID NO: 394974 - DNA, 142 bp, Homo sapiens; identical to SEQ ID NO: 276378
  chr21:46808897-46809039
  hypo

SEQ ID NO: 394975 - DNA, 138 bp, Homo sapiens; identical to SEQ ID NO: 220518
  chr21:46827462-46827600
  hypo

SEQ ID NO: 394976 - DNA, 322 bp, Homo sapiens; identical to SEQ ID NO: 276400
  chr21:46846292-46846614
  hypo

SEQ ID NO: 394977 - DNA, 88 bp, Homo sapiens; identical to SEQ ID NO: 220554
  chr21:46998316-46998404
  hypo

SEQ ID NO: 394978 - DNA, 127 bp, Homo sapiens; identical to SEQ ID NO: 276460
  chr21:47403601-47403728
  hypo

SEQ ID NO: 394979 - DNA, 141 bp, Homo sapiens; identical to SEQ ID NO: 220563
  chr21:47417619-47417760
  hypo

SEQ ID NO: 394980 - DNA, 318 bp, Homo sapiens; identical to SEQ ID NO: 220564
  chr21:47418109-47418427
  hypo

SEQ ID NO: 394981 - DNA, 226 bp, Homo sapiens; identical to SEQ ID NO: 276470
  chr21:47421947-47422173
  hypo

SEQ ID NO: 394982 - DNA, 114 bp, Homo sapiens; identical to SEQ ID NO: 220567
  chr21:47459901-47460015
  hypo

SEQ ID NO: 394983 - DNA, 58 bp, Homo sapiens; identical to SEQ ID NO: 329162
  chr21:47737837-47737895
  hypo

SEQ ID NO: 394984 - DNA, 98 bp, Homo sapiens; identical to SEQ ID NO: 220575
  chr21:47773781-47773879
  hypo

SEQ ID NO: 394985 - DNA, 266 bp, Homo sapiens; identical to SEQ ID NO: 276501
  chr21:47798303-47798569
  hypo

SEQ ID NO: 394986 - DNA, 44 bp, Homo sapiens; identical to SEQ ID NO: 206048
  chr21:47799137-47799181
  hypo

SEQ ID NO: 394987 - DNA, 52 bp, Homo sapiens; identical to SEQ ID NO: 206049
  chr21:47799225-47799277
  hypo

SEQ ID NO: 394988 - DNA, 301 bp, Homo sapiens; identical to SEQ ID NO: 276507
  chr21:47851456-47851757
  hypo

SEQ ID NO: 394989 - DNA, 114 bp, Homo sapiens; identical to SEQ ID NO: 276510
  chr21:47897027-47897141
  hypo

SEQ ID NO: 394990 - DNA, 267 bp, Homo sapiens; identical to SEQ ID NO: 276519
  chr22:17828553-17828820
  hypo

SEQ ID NO: 394991 - DNA, 78 bp, Homo sapiens; identical to SEQ ID NO: 276523
  chr22:17932151-17932229
  hypo

SEQ ID NO: 394992 - DNA, 35 bp, Homo sapiens; identical to SEQ ID NO: 220586
  chr22:18074668-18074703
  hypo

SEQ ID NO: 394993 - DNA, 161 bp, Homo sapiens; identical to SEQ ID NO: 220587
  chr22:18081585-18081746
  hypo

SEQ ID NO: 394994 - DNA, 315 bp, Homo sapiens; identical to SEQ ID NO: 220592
  chr22:18291533-18291848
  hypo

SEQ ID NO: 394995 - DNA, 44 bp, Homo sapiens; identical to SEQ ID NO: 276543
  chr22:18345292-18345336
  hypo

SEQ ID NO: 394996 - DNA, 154 bp, Homo sapiens; identical to SEQ ID NO: 220600
  chr22:18355710-18355864
  hypo

SEQ ID NO: 394997 - DNA, 105 bp, Homo sapiens; identical to SEQ ID NO: 220604
  chr22:18400898-18401003
  hypo

SEQ ID NO: 394998 - DNA, 262 bp, Homo sapiens; identical to SEQ ID NO: 276559
  chr22:18451007-18451269
  hypo

SEQ ID NO: 394999 - DNA, 271 bp, Homo sapiens; identical to SEQ ID NO: 276565
  chr22:18973383-18973654
  hypo

SEQ ID NO: 395000 - DNA, 36 bp, Homo sapiens; identical to SEQ ID NO: 276573
  chr22:19584223-19584259
  hypo

SEQ ID NO: 395001 - DNA, 288 bp, Homo sapiens; identical to SEQ ID NO: 295228
  chr22:19748301-19748589
  hypo

SEQ ID NO: 395002 - DNA, 40 bp, Homo sapiens; identical to SEQ ID NO: 133782
  chr22:19749084-19749124
  hypo

SEQ ID NO: 395003 - DNA, 84 bp, Homo sapiens; identical to SEQ ID NO: 220618
  chr22:19856498-19856582
  hypo

SEQ ID NO: 395004 - DNA, 132 bp, Homo sapiens; identical to SEQ ID NO: 276592
  chr22:19870367-19870499
  hypo

SEQ ID NO: 395005 - DNA, 114 bp, Homo sapiens; identical to SEQ ID NO: 220621
  chr22:19891185-19891299
  hypo

SEQ ID NO: 395006 - DNA, 177 bp, Homo sapiens; identical to SEQ ID NO: 276598
  chr22:19892921-19893098
  hypo

SEQ ID NO: 395007 - DNA, 57 bp, Homo sapiens; identical to SEQ ID NO: 220624
  chr22:19965520-19965577
  hypo

SEQ ID NO: 395008 - DNA, 38 bp, Homo sapiens; identical to SEQ ID NO: 220627
  chr22:19971874-19971912
  hypo

SEQ ID NO: 395009 - DNA, 42 bp, Homo sapiens; identical to SEQ ID NO: 276618
  chr22:20120590-20120632
  hypo

SEQ ID NO: 395010 - DNA, 190 bp, Homo sapiens; identical to SEQ ID NO: 220632
  chr22:20126324-20126514
  hypo

SEQ ID NO: 395011 - DNA, 156 bp, Homo sapiens; identical to SEQ ID NO: 226322
  chr22:20255237-20255393
  hypo

SEQ ID NO: 395012 - DNA, 50 bp, Homo sapiens; identical to SEQ ID NO: 329303
  chr22:20308710-20308760
  hypo

SEQ ID NO: 395013 - DNA, 45 bp, Homo sapiens; identical to SEQ ID NO: 329305
  chr22:20765421-20765466
  hypo

SEQ ID NO: 395014 - DNA, 120 bp, Homo sapiens; identical to SEQ ID NO: 276629
  chr22:20857254-20857374
  hypo

SEQ ID NO: 395015 - DNA, 112 bp, Homo sapiens; identical to SEQ ID NO: 276635
  chr22:20958608-20958720
  hypo

SEQ ID NO: 395016 - DNA, 42 bp, Homo sapiens; identical to SEQ ID NO: 276662
  chr22:22108627-22108669
  hypo

SEQ ID NO: 395017 - DNA, 36 bp, Homo sapiens; identical to SEQ ID NO: 276669
  chr22:22939290-22939326
  hypo

SEQ ID NO: 395018 - DNA, 208 bp, Homo sapiens; identical to SEQ ID NO: 276676
  chr22:23456377-23456585
  hypo

SEQ ID NO: 395019 - DNA, 113 bp, Homo sapiens; identical to SEQ ID NO: 276679
  chr22:23610355-23610468
  hypo

SEQ ID NO: 395020 - DNA, 85 bp, Homo sapiens; identical to SEQ ID NO: 276680
  chr22:23624725-23624810
  hypo

SEQ ID NO: 395021 - DNA, 126 bp, Homo sapiens; identical to SEQ ID NO: 276683
  chr22:23779039-23779165
  hypo

SEQ ID NO: 395022 - DNA, 35 bp, Homo sapiens; identical to SEQ ID NO: 276689
  chr22:24061531-24061566
  hypo

SEQ ID NO: 395023 - DNA, 458 bp, Homo sapiens; identical to SEQ ID NO: 226339
  chr22:24110419-24110877
  hypo

SEQ ID NO: 395024 - DNA, 142 bp, Homo sapiens; identical to SEQ ID NO: 276696
  chr22:24530396-24530538
  hypo

SEQ ID NO: 395025 - DNA, 91 bp, Homo sapiens; identical to SEQ ID NO: 206073
  chr22:24989196-24989287
  hypo

SEQ ID NO: 395026 - DNA, 36 bp, Homo sapiens; identical to SEQ ID NO: 276703
  chr22:25091139-25091175
  hypo

SEQ ID NO: 395027 - DNA, 120 bp, Homo sapiens; identical to SEQ ID NO: 220675
  chr22:25336184-25336304
  hypo

SEQ ID NO: 395028 - DNA, 331 bp, Homo sapiens; identical to SEQ ID NO: 220679
  chr22:25461275-25461606
  hypo

SEQ ID NO: 395029 - DNA, 40 bp, Homo sapiens; identical to SEQ ID NO: 276710
  chr22:25464946-25464986
  hypo

SEQ ID NO: 395030 - DNA, 91 bp, Homo sapiens; identical to SEQ ID NO: 276711
  chr22:25483556-25483647
  hypo

SEQ ID NO: 395031 - DNA, 33 bp, Homo sapiens; identical to SEQ ID NO: 276723
  chr22:26069299-26069332
  hypo

SEQ ID NO: 395032 - DNA, 79 bp, Homo sapiens; identical to SEQ ID NO: 329425
  chr22:26150543-26150622
  hypo

SEQ ID NO: 395033 - DNA, 125 bp, Homo sapiens; identical to SEQ ID NO: 276728
  chr22:26422520-26422645
  hypo

SEQ ID NO: 395034 - DNA, 146 bp, Homo sapiens; identical to SEQ ID NO: 329435
  chr22:26930530-26930676
  hypo

SEQ ID NO: 395035 - DNA, 80 bp, Homo sapiens; identical to SEQ ID NO: 220693
  chr22:26965205-26965285
  hypo

SEQ ID NO: 395036 - DNA, 232 bp, Homo sapiens; identical to SEQ ID NO: 276741
  chr22:27486749-27486981
  hypo

SEQ ID NO: 395037 - DNA, 175 bp, Homo sapiens; identical to SEQ ID NO: 329446
  chr22:28191122-28191297
  hypo

SEQ ID NO: 395038 - DNA, 210 bp, Homo sapiens; identical to SEQ ID NO: 295301
  chr22:28197049-28197259
  hypo

SEQ ID NO: 395039 - DNA, 32 bp, Homo sapiens; identical to SEQ ID NO: 276744
  chr22:28361345-28361377
  hypo

SEQ ID NO: 395040 - DNA, 44 bp, Homo sapiens; identical to SEQ ID NO: 384852
  chr22:29469129-29469173
  hypo

SEQ ID NO: 395041 - DNA, 202 bp, Homo sapiens; identical to SEQ ID NO: 206096
  chr22:29469213-29469415
  hypo

SEQ ID NO: 395042 - DNA, 80 bp, Homo sapiens; identical to SEQ ID NO: 276750
  chr22:29525175-29525255
  hypo

SEQ ID NO: 395043 - DNA, 676 bp, Homo sapiens; identical to SEQ ID NO: 384855
  chr22:29702500-29703176
  hypo

SEQ ID NO: 395044 - DNA, 179 bp, Homo sapiens; identical to SEQ ID NO: 276772
  chr22:30073518-30073697
  hypo

SEQ ID NO: 395045 - DNA, 209 bp, Homo sapiens; identical to SEQ ID NO: 276775
  chr22:30086757-30086966
  hypo

SEQ ID NO: 395046 - DNA, 31 bp, Homo sapiens; identical to SEQ ID NO: 220716
  chr22:30310013-30310044
  hypo

SEQ ID NO: 395047 - DNA, 143 bp, Homo sapiens; identical to SEQ ID NO: 329496
  chr22:30634183-30634326
  hypo

SEQ ID NO: 395048 - DNA, 32 bp, Homo sapiens; identical to SEQ ID NO: 329497
  chr22:30634356-30634388
  hypo

SEQ ID NO: 395049 - DNA, 90 bp, Homo sapiens; identical to SEQ ID NO: 276791
  chr22:30647190-30647280
  hypo

SEQ ID NO: 395050 - DNA, 197 bp, Homo sapiens; identical to SEQ ID NO: 220720
  chr22:30656576-30656773
  hypo

SEQ ID NO: 395051 - DNA, 72 bp, Homo sapiens; identical to SEQ ID NO: 276794
  chr22:30681973-30682045
  hypo

SEQ ID NO: 395052 - DNA, 64 bp, Homo sapiens; identical to SEQ ID NO: 276798
  chr22:30843508-30843572
  hypo

SEQ ID NO: 395053 - DNA, 352 bp, Homo sapiens
  chr22:30951743-30952095
  hypo
gttggtcggcaccaggccgcgcacctcgtcgtagtggaagcgcatgtggttgcagatgatgttgaagcaggccccgggccgatagtcctgcaccaggctgcgggcgaagaaggtcgggtagtcgaagtcattgcggccgttagggaaggcgaacttgagccggtgcttctggccgaagcggaacaggatgttgagcagggtgctgctggccgtcttgtgcgtcttcaagaacacgatgttgcgccgcggctggcactcccccgccgagccgttggcccggatcactgcctctggctcgagtgcaggtggagagcaggacgctgcggcctccggggtcctgctggggacagag

SEQ ID NO: 395054 - DNA, 33 bp, Homo sapiens; identical to SEQ ID NO: 220725
  chr22:31062272-31062305
  hypo

SEQ ID NO: 395055 - DNA, 45 bp, Homo sapiens; identical to SEQ ID NO: 276814
  chr22:31250071-31250116
  hypo

SEQ ID NO: 395056 - DNA, 36 bp, Homo sapiens; identical to SEQ ID NO: 276816
  chr22:31261979-31262015
  hypo

SEQ ID NO: 395057 - DNA, 221 bp, Homo sapiens; identical to SEQ ID NO: 276820
  chr22:31301689-31301910
  hypo

SEQ ID NO: 395058 - DNA, 118 bp, Homo sapiens; identical to SEQ ID NO: 276830
  chr22:31655943-31656061
  hypo

SEQ ID NO: 395059 - DNA, 302 bp, Homo sapiens; identical to SEQ ID NO: 329547
  chr22:32009418-32009720
  hypo

SEQ ID NO: 395060 - DNA, 198 bp, Homo sapiens; identical to SEQ ID NO: 276852
  chr22:32792002-32792200
  hypo

SEQ ID NO: 395061 - DNA, 189 bp, Homo sapiens; identical to SEQ ID NO: 276856
  chr22:32997561-32997750
  hypo

SEQ ID NO: 395062 - DNA, 107 bp, Homo sapiens; identical to SEQ ID NO: 276857
  chr22:33250662-33250769
  hypo

SEQ ID NO: 395063 - DNA, 183 bp, Homo sapiens; identical to SEQ ID NO: 220745
  chr22:35730462-35730645
  hypo

SEQ ID NO: 395064 - DNA, 42 bp, Homo sapiens; identical to SEQ ID NO: 276869
  chr22:35806956-35806998
  hypo

SEQ ID NO: 395065 - DNA, 153 bp, Homo sapiens; identical to SEQ ID NO: 276879
  chr22:36123184-36123337
  hypo

SEQ ID NO: 395066 - DNA, 177 bp, Homo sapiens; identical to SEQ ID NO: 220765
  chr22:37168633-37168810
  hypo

SEQ ID NO: 395067 - DNA, 147 bp, Homo sapiens; identical to SEQ ID NO: 276916
  chr22:37332531-37332678
  hypo

SEQ ID NO: 395068 - DNA, 110 bp, Homo sapiens; identical to SEQ ID NO: 276922
  chr22:37562423-37562533
  hypo

SEQ ID NO: 395069 - DNA, 208 bp, Homo sapiens; identical to SEQ ID NO: 276923
  chr22:37622731-37622939
  hypo

SEQ ID NO: 395070 - DNA, 99 bp, Homo sapiens; identical to SEQ ID NO: 276934
  chr22:38019344-38019443
  hypo

SEQ ID NO: 395071 - DNA, 77 bp, Homo sapiens; identical to SEQ ID NO: 276947
  chr22:38182164-38182241
  hypo

SEQ ID NO: 395072 - DNA, 109 bp, Homo sapiens; identical to SEQ ID NO: 276965
  chr22:38415281-38415390
  hypo

SEQ ID NO: 395073 - DNA, 255 bp, Homo sapiens; identical to SEQ ID NO: 276977
  chr22:38520660-38520915
  hypo

SEQ ID NO: 395074 - DNA, 390 bp, Homo sapiens; identical to SEQ ID NO: 389876
  chr22:38577754-38578144
  hypo

SEQ ID NO: 395075 - DNA, 364 bp, Homo sapiens; identical to SEQ ID NO: 276985
  chr22:38618369-38618733
  hypo

SEQ ID NO: 395076 - DNA, 114 bp, Homo sapiens; identical to SEQ ID NO: 276987
  chr22:38634943-38635057
  hypo

SEQ ID NO: 395077 - DNA, 154 bp, Homo sapiens; identical to SEQ ID NO: 277003
  chr22:39122031-39122185
  hypo

SEQ ID NO: 395078 - DNA, 42 bp, Homo sapiens; identical to SEQ ID NO: 277008
  chr22:39175179-39175221
  hypo

SEQ ID NO: 395079 - DNA, 253 bp, Homo sapiens; identical to SEQ ID NO: 295439
  chr22:39239093-39239346
  hypo

SEQ ID NO: 395080 - DNA, 32 bp, Homo sapiens; identical to SEQ ID NO: 206137
  chr22:39239412-39239444
  hypo

SEQ ID NO: 395081 - DNA, 189 bp, Homo sapiens; identical to SEQ ID NO: 295441
  chr22:39239935-39240124
  hypo

SEQ ID NO: 395082 - DNA, 204 bp, Homo sapiens; identical to SEQ ID NO: 277014
  chr22:39474506-39474710
  hypo

SEQ ID NO: 395083 - DNA, 100 bp, Homo sapiens; identical to SEQ ID NO: 220804
  chr22:39530873-39530973
  hypo

SEQ ID NO: 395084 - DNA, 47 bp, Homo sapiens; identical to SEQ ID NO: 206139
  chr22:39638593-39638640
  hypo

SEQ ID NO: 395085 - DNA, 41 bp, Homo sapiens; identical to SEQ ID NO: 277022
  chr22:39744066-39744107
  hypo

SEQ ID NO: 395086 - DNA, 49 bp, Homo sapiens; identical to SEQ ID NO: 220812
  chr22:39872956-39873005
  hypo

SEQ ID NO: 395087 - DNA, 108 bp, Homo sapiens; identical to SEQ ID NO: 220821
  chr22:40444189-40444297
  hypo

SEQ ID NO: 395088 - DNA, 39 bp, Homo sapiens; identical to SEQ ID NO: 220823
  chr22:40621438-40621477
  hypo

SEQ ID NO: 395089 - DNA, 198 bp, Homo sapiens; identical to SEQ ID NO: 277058
  chr22:40642784-40642982
  hypo

SEQ ID NO: 395090 - DNA, 282 bp, Homo sapiens; identical to SEQ ID NO: 277059
  chr22:40693256-40693538
  hypo

SEQ ID NO: 395091 - DNA, 33 bp, Homo sapiens; identical to SEQ ID NO: 387429
  chr22:41639669-41639702
  hypo

SEQ ID NO: 395092 - DNA, 180 bp, Homo sapiens; identical to SEQ ID NO: 277094
  chr22:41871436-41871616
  hypo

SEQ ID NO: 395093 - DNA, 105 bp, Homo sapiens; identical to SEQ ID NO: 226389
  chr22:42670075-42670180
  hypo

SEQ ID NO: 395094 - DNA, 200 bp, Homo sapiens; identical to SEQ ID NO: 277113
  chr22:42822800-42823000
  hypo

SEQ ID NO: 395095 - DNA, 189 bp, Homo sapiens; identical to SEQ ID NO: 277123
  chr22:43005280-43005469
  hypo

SEQ ID NO: 395096 - DNA, 34 bp, Homo sapiens; identical to SEQ ID NO: 277126
  chr22:43138068-43138102
  hypo

SEQ ID NO: 395097 - DNA, 163 bp, Homo sapiens; identical to SEQ ID NO: 277140
  chr22:43390391-43390554
  hypo

SEQ ID NO: 395098 - DNA, 92 bp, Homo sapiens; identical to SEQ ID NO: 277141
  chr22:43402810-43402902
  hypo

SEQ ID NO: 395099 - DNA, 143 bp, Homo sapiens; identical to SEQ ID NO: 277148
  chr22:43559030-43559173
  hypo

SEQ ID NO: 395100 - DNA, 182 bp, Homo sapiens; identical to SEQ ID NO: 220869
  chr22:43581409-43581591
  hypo

SEQ ID NO: 395101 - DNA, 130 bp, Homo sapiens; identical to SEQ ID NO: 329896
  chr22:43581627-43581757
  hypo

SEQ ID NO: 395102 - DNA, 313 bp, Homo sapiens; identical to SEQ ID NO: 329897
  chr22:43608344-43608657
  hypo

SEQ ID NO: 395103 - DNA, 75 bp, Homo sapiens; identical to SEQ ID NO: 329898
  chr22:43608687-43608762
  hypo

SEQ ID NO: 395104 - DNA, 135 bp, Homo sapiens; identical to SEQ ID NO: 220870
  chr22:43689261-43689396
  hypo

SEQ ID NO: 395105 - DNA, 50 bp, Homo sapiens; identical to SEQ ID NO: 277156
  chr22:43861119-43861169
  hypo

SEQ ID NO: 395106 - DNA, 301 bp, Homo sapiens; identical to SEQ ID NO: 220871
  chr22:43926571-43926872
  hypo

SEQ ID NO: 395107 - DNA, 98 bp, Homo sapiens; identical to SEQ ID NO: 389897
  chr22:44287922-44288020
  hypo

SEQ ID NO: 395108 - DNA, 131 bp, Homo sapiens; identical to SEQ ID NO: 277166
  chr22:44495597-44495728
  hypo

SEQ ID NO: 395109 - DNA, 43 bp, Homo sapiens; identical to SEQ ID NO: 329921
  chr22:44681502-44681545
  hypo

SEQ ID NO: 395110 - DNA, 199 bp, Homo sapiens; identical to SEQ ID NO: 277176
  chr22:44790443-44790642
  hypo

SEQ ID NO: 395111 - DNA, 136 bp, Homo sapiens; identical to SEQ ID NO: 329925
  chr22:44892380-44892516
  hypo

SEQ ID NO: 395112 - DNA, 52 bp, Homo sapiens; identical to SEQ ID NO: 277182
  chr22:45085115-45085167
  hypo

SEQ ID NO: 395113 - DNA, 268 bp, Homo sapiens; identical to SEQ ID NO: 277200
  chr22:45312207-45312475
  hypo

SEQ ID NO: 395114 - DNA, 103 bp, Homo sapiens; identical to SEQ ID NO: 277206
  chr22:45474745-45474848
  hypo

SEQ ID NO: 395115 - DNA, 85 bp, Homo sapiens; identical to SEQ ID NO: 220891
  chr22:45594816-45594901
  hypo

SEQ ID NO: 395116 - DNA, 184 bp, Homo sapiens; identical to SEQ ID NO: 277223
  chr22:45814422-45814606
  hypo

SEQ ID NO: 395117 - DNA, 125 bp, Homo sapiens; identical to SEQ ID NO: 220903
  chr22:45976304-45976429
  hypo

SEQ ID NO: 395118 - DNA, 70 bp, Homo sapiens; identical to SEQ ID NO: 220904
  chr22:45982908-45982978
  hypo

SEQ ID NO: 395119 - DNA, 56 bp, Homo sapiens; identical to SEQ ID NO: 277248
  chr22:46158114-46158170
  hypo

SEQ ID NO: 395120 - DNA, 116 bp, Homo sapiens; identical to SEQ ID NO: 277250
  chr22:46229733-46229849
  hypo

SEQ ID NO: 395121 - DNA, 147 bp, Homo sapiens; identical to SEQ ID NO: 330017
  chr22:46410634-46410781
  hypo

SEQ ID NO: 395122 - DNA, 36 bp, Homo sapiens; identical to SEQ ID NO: 220910
  chr22:46455649-46455685
  hypo

SEQ ID NO: 395123 - DNA, 58 bp, Homo sapiens; identical to SEQ ID NO: 277266
  chr22:46499693-46499751
  hypo

SEQ ID NO: 395124 - DNA, 110 bp, Homo sapiens; identical to SEQ ID NO: 220918
  chr22:46785285-46785395
  hypo

SEQ ID NO: 395125 - DNA, 402 bp, Homo sapiens; identical to SEQ ID NO: 277286
  chr22:46787966-46788368
  hypo

SEQ ID NO: 395126 - DNA, 203 bp, Homo sapiens; identical to SEQ ID NO: 220924
  chr22:46838991-46839194
  hypo

SEQ ID NO: 395127 - DNA, 235 bp, Homo sapiens; identical to SEQ ID NO: 220925
  chr22:46859885-46860120
  hypo

SEQ ID NO: 395128 - DNA, 167 bp, Homo sapiens; identical to SEQ ID NO: 277303
  chr22:46905651-46905818
  hypo

SEQ ID NO: 395129 - DNA, 87 bp, Homo sapiens; identical to SEQ ID NO: 220932
  chr22:47004986-47005073
  hypo

SEQ ID NO: 395130 - DNA, 61 bp, Homo sapiens; identical to SEQ ID NO: 277324
  chr22:47074764-47074825
  hypo

SEQ ID NO: 395131 - DNA, 264 bp, Homo sapiens; identical to SEQ ID NO: 277326
  chr22:47107084-47107348
  hypo

SEQ ID NO: 395132 - DNA, 154 bp, Homo sapiens; identical to SEQ ID NO: 277343
  chr22:47381551-47381705
  hypo

SEQ ID NO: 395133 - DNA, 235 bp, Homo sapiens; identical to SEQ ID NO: 277344
  chr22:47393097-47393332
  hypo

SEQ ID NO: 395134 - DNA, 217 bp, Homo sapiens; identical to SEQ ID NO: 277370
  chr22:48723482-48723699
  hypo

SEQ ID NO: 395135 - DNA, 341 bp, Homo sapiens; identical to SEQ ID NO: 277376
  chr22:48918775-48919116
  hypo

SEQ ID NO: 395136 - DNA, 570 bp, Homo sapiens; identical to SEQ ID NO: 277377
  chr22:48921050-48921620
  hypo

SEQ ID NO: 395137 - DNA, 377 bp, Homo sapiens; identical to SEQ ID NO: 277378
  chr22:48923829-48924206
  hypo

SEQ ID NO: 395138 - DNA, 159 bp, Homo sapiens; identical to SEQ ID NO: 277379
  chr22:48946285-48946444
  hypo

SEQ ID NO: 395139 - DNA, 110 bp, Homo sapiens; identical to SEQ ID NO: 277381
  chr22:48956016-48956126
  hypo

SEQ ID NO: 395140 - DNA, 91 bp, Homo sapiens; identical to SEQ ID NO: 277402
  chr22:49087333-49087424
  hypo

SEQ ID NO: 395141 - DNA, 31 bp, Homo sapiens; identical to SEQ ID NO: 277423
  chr22:49424884-49424915
  hypo

SEQ ID NO: 395142 - DNA, 275 bp, Homo sapiens; identical to SEQ ID NO: 277425
  chr22:49498249-49498524
  hypo

SEQ ID NO: 395143 - DNA, 108 bp, Homo sapiens; identical to SEQ ID NO: 277429
  chr22:49535540-49535648
  hypo

SEQ ID NO: 395144 - DNA, 254 bp, Homo sapiens; identical to SEQ ID NO: 277457
  chr22:49855321-49855575
  hypo

SEQ ID NO: 395145 - DNA, 120 bp, Homo sapiens; identical to SEQ ID NO: 277461
  chr22:49880500-49880620
  hypo

SEQ ID NO: 395146 - DNA, 84 bp, Homo sapiens; identical to SEQ ID NO: 277473
  chr22:49971682-49971766
  hypo

SEQ ID NO: 395147 - DNA, 46 bp, Homo sapiens; identical to SEQ ID NO: 330255
  chr22:50025072-50025118
  hypo

SEQ ID NO: 395148 - DNA, 173 bp, Homo sapiens; identical to SEQ ID NO: 220973
  chr22:50025148-50025321
  hypo

SEQ ID NO: 395149 - DNA, 33 bp, Homo sapiens; identical to SEQ ID NO: 277485
  chr22:50047562-50047595
  hypo

SEQ ID NO: 395150 - DNA, 50 bp, Homo sapiens; identical to SEQ ID NO: 277492
  chr22:50114361-50114411
  hypo

SEQ ID NO: 395151 - DNA, 131 bp, Homo sapiens; identical to SEQ ID NO: 277495
  chr22:50156812-50156943
  hypo

SEQ ID NO: 395152 - DNA, 343 bp, Homo sapiens; identical to SEQ ID NO: 226407
  chr22:50246433-50246776
  hypo

SEQ ID NO: 395153 - DNA, 174 bp, Homo sapiens; identical to SEQ ID NO: 277509
  chr22:50250093-50250267
  hypo

SEQ ID NO: 395154 - DNA, 445 bp, Homo sapiens; identical to SEQ ID NO: 277520
  chr22:50346303-50346748
  hypo

SEQ ID NO: 395155 - DNA, 197 bp, Homo sapiens; identical to SEQ ID NO: 277529
  chr22:50521454-50521651
  hypo

SEQ ID NO: 395156 - DNA, 59 bp, Homo sapiens; identical to SEQ ID NO: 220994
  chr22:50656965-50657024
  hypo

SEQ ID NO: 395157 - DNA, 463 bp, Homo sapiens; identical to SEQ ID NO: 220996
  chr22:50721365-50721828
  hypo

SEQ ID NO: 395158 - DNA, 616 bp, Homo sapiens; identical to SEQ ID NO: 330323
  chr22:50721872-50722488
  hypo

SEQ ID NO: 395159 - DNA, 84 bp, Homo sapiens; identical to SEQ ID NO: 206187
  chr22:50745645-50745729
  hypo

SEQ ID NO: 395160 - DNA, 183 bp, Homo sapiens; identical to SEQ ID NO: 206188
  chr22:50765110-50765293
  hypo

SEQ ID NO: 395161 - DNA, 221 bp, Homo sapiens; identical to SEQ ID NO: 277542
  chr22:50858128-50858349
  hypo

SEQ ID NO: 395162 - DNA, 72 bp, Homo sapiens; identical to SEQ ID NO: 221004
  chr22:50874675-50874747
  hypo

SEQ ID NO: 395163 - DNA, 115 bp, Homo sapiens; identical to SEQ ID NO: 277549
  chr22:50882626-50882741
  hypo

SEQ ID NO: 395164 - DNA, 137 bp, Homo sapiens; identical to SEQ ID NO: 277555
  chr22:50918772-50918909
  hypo

SEQ ID NO: 395165 - DNA, 139 bp, Homo sapiens; identical to SEQ ID NO: 330349
  chr22:50938934-50939073
  hypo

SEQ ID NO: 395166 - DNA, 33 bp, Homo sapiens; identical to SEQ ID NO: 330350
  chr22:50939111-50939144
  hypo

SEQ ID NO: 395167 - DNA, 269 bp, Homo sapiens; identical to SEQ ID NO: 221021
  chr22:51149171-51149440
  hypo

SEQ ID NO: 395168 - DNA, 80 bp, Homo sapiens; identical to SEQ ID NO: 330369
  chrX:2931093-2931173
  hypo

SEQ ID NO: 395169 - DNA, 148 bp, Homo sapiens; identical to SEQ ID NO: 277572
  chrX:3609054-3609202
  hypo

SEQ ID NO: 395170 - DNA, 42 bp, Homo sapiens; identical to SEQ ID NO: 277577
  chrX:4637572-4637614
  hypo

SEQ ID NO: 395171 - DNA, 120 bp, Homo sapiens; identical to SEQ ID NO: 277578
  chrX:4643432-4643552
  hypo

SEQ ID NO: 395172 - DNA, 161 bp, Homo sapiens; identical to SEQ ID NO: 226428
  chrX:11776190-11776351
  hypo

SEQ ID NO: 395173 - DNA, 32 bp, Homo sapiens; identical to SEQ ID NO: 277593
  chrX:15806008-15806040
  hypo

SEQ ID NO: 395174 - DNA, 82 bp, Homo sapiens; identical to SEQ ID NO: 206215
  chrX:15817994-15818076
  hypo

SEQ ID NO: 395175 - DNA, 31 bp, Homo sapiens; identical to SEQ ID NO: 221046
  chrX:19530839-19530870
  hypo

SEQ ID NO: 395176 - DNA, 221 bp, Homo sapiens; identical to SEQ ID NO: 221047
  chrX:20135284-20135505
  hypo

SEQ ID NO: 395177 - DNA, 52 bp, Homo sapiens; identical to SEQ ID NO: 221048
  chrX:20160884-20160936
  hypo

SEQ ID NO: 395178 - DNA, 33 bp, Homo sapiens; identical to SEQ ID NO: 277602
  chrX:24128931-24128964
  hypo

SEQ ID NO: 395179 - DNA, 70 bp, Homo sapiens; identical to SEQ ID NO: 206227
  chrX:27999798-27999868
  hypo

SEQ ID NO: 395180 - DNA, 157 bp, Homo sapiens; identical to SEQ ID NO: 206231
  chrX:39913138-39913295
  hypo

SEQ ID NO: 395181 - DNA, 167 bp, Homo sapiens; identical to SEQ ID NO: 206234
  chrX:39916407-39916574
  hypo

SEQ ID NO: 395182 - DNA, 1059 bp, Homo sapiens; identical to SEQ ID NO: 384879
  chrX:39932474-39933533
  hypo

SEQ ID NO: 395183 - DNA, 79 bp, Homo sapiens; identical to SEQ ID NO: 206242
  chrX:39935706-39935785
  hypo

SEQ ID NO: 395184 - DNA, 36 bp, Homo sapiens; identical to SEQ ID NO: 277617
  chrX:44909558-44909594
  hypo

SEQ ID NO: 395185 - DNA, 197 bp, Homo sapiens; identical to SEQ ID NO: 277624
  chrX:65007842-65008039
  hypo

SEQ ID NO: 395186 - DNA, 317 bp, Homo sapiens; identical to SEQ ID NO: 277627
  chrX:70797825-70798142
  hypo

SEQ ID NO: 395187 - DNA, 359 bp, Homo sapiens; identical to SEQ ID NO: 226464
  chrX:73163983-73164342
  hypo

SEQ ID NO: 395188 - DNA, 97 bp, Homo sapiens; identical to SEQ ID NO: 206283
  chrX:123171376-123171473
  hypo

SEQ ID NO: 395189 - DNA, 77 bp, Homo sapiens; identical to SEQ ID NO: 206284
  chrX:123176418-123176495
  hypo

SEQ ID NO: 395190 - DNA, 135 bp, Homo sapiens; identical to SEQ ID NO: 206288
  chrX:123184024-123184159
  hypo

SEQ ID NO: 395191 - DNA, 71 bp, Homo sapiens; identical to SEQ ID NO: 206296
  chrX:123199725-123199796
  hypo

SEQ ID NO: 395192 - DNA, 102 bp, Homo sapiens; identical to SEQ ID NO: 206301
  chrX:123211806-123211908
  hypo

SEQ ID NO: 395193 - DNA, 133 bp, Homo sapiens; identical to SEQ ID NO: 206303
  chrX:123217270-123217403
  hypo

SEQ ID NO: 395194 - DNA, 127 bp, Homo sapiens; identical to SEQ ID NO: 206306
  chrX:123227867-123227994
  hypo

SEQ ID NO: 395195 - DNA, 2398 bp, Homo sapiens; identical to SEQ ID NO: 384886
  chrX:129147791-129150189
  hypo

SEQ ID NO: 395196 - DNA, 227 bp, Homo sapiens; identical to SEQ ID NO: 206315
  chrX:129162609-129162836
  hypo

SEQ ID NO: 395197 - DNA, 44 bp, Homo sapiens; identical to SEQ ID NO: 206327
  chrX:133527938-133527982
  hypo

SEQ ID NO: 395198 - DNA, 180 bp, Homo sapiens; identical to SEQ ID NO: 221137
  chrY:15446038-15446218
  hypo

SEQ ID NO: 395199 - DNA, 45 bp, Homo sapiens; identical to SEQ ID NO: 277648
  chrY:16001309-16001354
  hypo

SEQ ID NO: 395200 - DNA, 45 bp, Homo sapiens; identical to SEQ ID NO: 277649
  chrY:16001474-16001519
  hypo

SEQ ID NO: 395201 - DNA, 152 bp, Homo sapiens; identical to SEQ ID NO: 221140
  chrY:21226202-21226354
  hypo

SEQ ID NO: 395202 - DNA, 55 bp, Homo sapiens; identical to SEQ ID NO: 221141
  chrY:23568831-23568886
  hypo

SEQ ID NO: 395203 - DNA, 166 bp, Homo sapiens; identical to SEQ ID NO: 277658
  AC153808.1_1-20788:1301-1467
  hypo

SEQ ID NO: 395204 - DNA, 74 bp, Homo sapiens; identical to SEQ ID NO: 277667
  AEKP01160137.1_1408-4031:1582-1656
  hypo

SEQ ID NO: 395205 - DNA, 120 bp, Homo sapiens; identical to SEQ ID NO: 221147
  AEKP01221093.1_87-1602:855-975
  hypo

SEQ ID NO: 395206 - DNA, 54 bp, Homo sapiens; identical to SEQ ID NO: 221150
  NW_001838014.1_249000-295694:7052-7106
  hypo

SEQ ID NO: 395207 - DNA, 142 bp, Homo sapiens; identical to SEQ ID NO: 221156
  NW_001838993.2_42143-59442:15877-16019
  hypo

SEQ ID NO: 395208 - DNA, 198 bp, Homo sapiens; identical to SEQ ID NO: 277693
  NW_001839317.1_1572-22707:16430-16628
  hypo

SEQ ID NO: 395209 - DNA, 207 bp, Homo sapiens; identical to SEQ ID NO: 277695
  NW_001839407.1_18933-24809:5028-5235
  hypo

SEQ ID NO: 395210 - DNA, 120 bp, Homo sapiens; identical to SEQ ID NO: 277699
  NW_001839407.1_56047-63507:6752-6872
  hypo

SEQ ID NO: 395211 - DNA, 47 bp, Homo sapiens; identical to SEQ ID NO: 330594
  NW_001839407.1_56047-63507:6992-7039
  hypo

SEQ ID NO: 395212 - DNA, 34 bp, Homo sapiens; identical to SEQ ID NO: 330595
  NW_001839407.1_56047-63507:7078-7112
  hypo

SEQ ID NO: 395213 - DNA, 300 bp, Homo sapiens; identical to SEQ ID NO: 221158
  NW_001839646.1_1-5206:2128-2428
  hypo

SEQ ID NO: 395214 - DNA, 120 bp, Homo sapiens; identical to SEQ ID NO: 277710
  NW_001839651.1_32960-37353:877-997
  hypo

SEQ ID NO: 395215 - DNA, 95 bp, Homo sapiens; identical to SEQ ID NO: 277711
  NW_001839668.1_21493-58548:14916-15011
  hypo

SEQ ID NO: 395216 - DNA, 120 bp, Homo sapiens; identical to SEQ ID NO: 221161
  NW_001839864.1_130-4387:2039-2159
  hypo

SEQ ID NO: 395217 - DNA, 61 bp, Homo sapiens; identical to SEQ ID NO: 221164
  NW_001840859.1_1-2890:1537-1598
  hypo

SEQ ID NO: 395218 - DNA, 120 bp, Homo sapiens; identical to SEQ ID NO: 221167
  NW_001841145.1_129149-174453:6133-6253
  hypo

SEQ ID NO: 395219 - DNA, 180 bp, Homo sapiens; identical to SEQ ID NO: 277739
  NW_001841145.1_40791-55171:240-420
  hypo

SEQ ID NO: 395220 - DNA, 265 bp, Homo sapiens; identical to SEQ ID NO: 277745
  NW_001841507.1_62-5931:3856-4121
  hypo

SEQ ID NO: 395221 - DNA, 178 bp, Homo sapiens; identical to SEQ ID NO: 277748
  NW_001842432.1_1-179261:39824-40002
  hypo

SEQ ID NO: 395222 - DNA, 187 bp, Homo sapiens; identical to SEQ ID NO: 197232
  chr1:877475-877662
  hyper

SEQ ID NO: 395223 - DNA, 299 bp, Homo sapiens; identical to SEQ ID NO: 226564
  chr1:901741-902040
  hyper

SEQ ID NO: 395224 - DNA, 898 bp, Homo sapiens; identical to SEQ ID NO: 221173
  chr1:935362-936260
  hyper

SEQ ID NO: 395225 - DNA, 392 bp, Homo sapiens; identical to SEQ ID NO: 197235
  chr1:955508-955900
  hyper

SEQ ID NO: 395226 - DNA, 256 bp, Homo sapiens; identical to SEQ ID NO: 277801
  chr1:975561-975817
  hyper

SEQ ID NO: 395227 - DNA, 51 bp, Homo sapiens; identical to SEQ ID NO: 226566
  chr1:976153-976204
  hyper

SEQ ID NO: 395228 - DNA, 61 bp, Homo sapiens; identical to SEQ ID NO: 221176
  chr1:994999-995060
  hyper

SEQ ID NO: 395229 - DNA, 130 bp, Homo sapiens; identical to SEQ ID NO: 221177
  chr1:1052182-1052312
  hyper

SEQ ID NO: 395230 - DNA, 268 bp, Homo sapiens; identical to SEQ ID NO: 226571
  chr1:1334561-1334829
  hyper

SEQ ID NO: 395231 - DNA, 71 bp, Homo sapiens; identical to SEQ ID NO: 197239
  chr1:1510423-1510494
  hyper

SEQ ID NO: 395232 - DNA, 54 bp, Homo sapiens; identical to SEQ ID NO: 34876
  chr1:1510559-1510613
  hyper

SEQ ID NO: 395233 - DNA, 76 bp, Homo sapiens; identical to SEQ ID NO: 197241
  chr1:1535610-1535686
  hyper

SEQ ID NO: 395234 - DNA, 136 bp, Homo sapiens; identical to SEQ ID NO: 197242
  chr1:1550765-1550901
  hyper

SEQ ID NO: 395235 - DNA, 148 bp, Homo sapiens; identical to SEQ ID NO: 221180
  chr1:1737808-1737956
  hyper

SEQ ID NO: 395236 - DNA, 44 bp, Homo sapiens; identical to SEQ ID NO: 197244
  chr1:1747214-1747258
  hyper

SEQ ID NO: 395237 - DNA, 143 bp, Homo sapiens; identical to SEQ ID NO: 197245
  chr1:1850719-1850862
  hyper

SEQ ID NO: 395238 - DNA, 222 bp, Homo sapiens; identical to SEQ ID NO: 102341
  chr1:1850928-1851150
  hyper

SEQ ID NO: 395239 - DNA, 82 bp, Homo sapiens; identical to SEQ ID NO: 226582
  chr1:1976105-1976187
  hyper

SEQ ID NO: 395240 - DNA, 66 bp, Homo sapiens; identical to SEQ ID NO: 226583
  chr1:2078513-2078579
  hyper

SEQ ID NO: 395241 - DNA, 114 bp, Homo sapiens; identical to SEQ ID NO: 277832
  chr1:2135930-2136044
  hyper

SEQ ID NO: 395242 - DNA, 251 bp, Homo sapiens; identical to SEQ ID NO: 277833
  chr1:2136088-2136339
  hyper

SEQ ID NO: 395243 - DNA, 49 bp, Homo sapiens; identical to SEQ ID NO: 277834
  chr1:2137068-2137117
  hyper

SEQ ID NO: 395244 - DNA, 109 bp, Homo sapiens; identical to SEQ ID NO: 197250
  chr1:2165786-2165895
  hyper

SEQ ID NO: 395245 - DNA, 171 bp, Homo sapiens; identical to SEQ ID NO: 197251
  chr1:2165999-2166170
  hyper

SEQ ID NO: 395246 - DNA, 373 bp, Homo sapiens; identical to SEQ ID NO: 197252
  chr1:2457940-2458313
  hyper

SEQ ID NO: 395247 - DNA, 778 bp, Homo sapiens; identical to SEQ ID NO: 226598
  chr1:2574028-2574806
  hyper

SEQ ID NO: 395248 - DNA, 51 bp, Homo sapiens; identical to SEQ ID NO: 226605
  chr1:2985971-2986022
  hyper

SEQ ID NO: 395249 - DNA, 39 bp, Homo sapiens; identical to SEQ ID NO: 277850
  chr1:2986307-2986346
  hyper

SEQ ID NO: 395250 - DNA, 56 bp, Homo sapiens; identical to SEQ ID NO: 34924
  chr1:2987628-2987684
  hyper

SEQ ID NO: 395251 - DNA, 341 bp, Homo sapiens; identical to SEQ ID NO: 221196
  chr1:3370921-3371262
  hyper

SEQ ID NO: 395252 - DNA, 144 bp, Homo sapiens; identical to SEQ ID NO: 197269
  chr1:3713029-3713173
  hyper

SEQ ID NO: 395253 - DNA, 159 bp, Homo sapiens; identical to SEQ ID NO: 226624
  chr1:3773814-3773973
  hyper

SEQ ID NO: 395254 - DNA, 191 bp, Homo sapiens; identical to SEQ ID NO: 226625
  chr1:3816433-3816624
  hyper

SEQ ID NO: 395255 - DNA, 92 bp, Homo sapiens; identical to SEQ ID NO: 226627
  chr1:3817790-3817882
  hyper

SEQ ID NO: 395256 - DNA, 137 bp, Homo sapiens; identical to SEQ ID NO: 226631
  chr1:5907431-5907568
  hyper

SEQ ID NO: 395257 - DNA, 45 bp, Homo sapiens; identical to SEQ ID NO: 221207
  chr1:6137261-6137306
  hyper

SEQ ID NO: 395258 - DNA, 179 bp, Homo sapiens; identical to SEQ ID NO: 277881
  chr1:6208937-6209116
  hyper

SEQ ID NO: 395259 - DNA, 222 bp, Homo sapiens; identical to SEQ ID NO: 226637
  chr1:6259131-6259353
  hyper

SEQ ID NO: 395260 - DNA, 161 bp, Homo sapiens; identical to SEQ ID NO: 197279
  chr1:6296163-6296324
  hyper

SEQ ID NO: 395261 - DNA, 236 bp, Homo sapiens; identical to SEQ ID NO: 226644
  chr1:6453981-6454217
  hyper

SEQ ID NO: 395262 - DNA, 232 bp, Homo sapiens; identical to SEQ ID NO: 277894
  chr1:6479023-6479255
  hyper

SEQ ID NO: 395263 - DNA, 478 bp, Homo sapiens; identical to SEQ ID NO: 277895
  chr1:6479314-6479792
  hyper

SEQ ID NO: 395264 - DNA, 110 bp, Homo sapiens; identical to SEQ ID NO: 226648
  chr1:6483912-6484022
  hyper

SEQ ID NO: 395265 - DNA, 87 bp, Homo sapiens; identical to SEQ ID NO: 383686
  chr1:6526181-6526268
  hyper

SEQ ID NO: 395266 - DNA, 217 bp, Homo sapiens; identical to SEQ ID NO: 226658
  chr1:6614573-6614790
  hyper

SEQ ID NO: 395267 - DNA, 194 bp, Homo sapiens; identical to SEQ ID NO: 221214
  chr1:6659237-6659431
  hyper

SEQ ID NO: 395268 - DNA, 163 bp, Homo sapiens; identical to SEQ ID NO: 197288
  chr1:6663518-6663681
  hyper

SEQ ID NO: 395269 - DNA, 436 bp, Homo sapiens; identical to SEQ ID NO: 221215
  chr1:6675302-6675738
  hyper

SEQ ID NO: 395270 - DNA, 222 bp, Homo sapiens; identical to SEQ ID NO: 226661
  chr1:6845233-6845455
  hyper

SEQ ID NO: 395271 - DNA, 178 bp, Homo sapiens; identical to SEQ ID NO: 226662
  chr1:7022452-7022630
  hyper

SEQ ID NO: 395272 - DNA, 40 bp, Homo sapiens; identical to SEQ ID NO: 197291
  chr1:7843653-7843693
  hyper

SEQ ID NO: 395273 - DNA, 390 bp, Homo sapiens; identical to SEQ ID NO: 226667
  chr1:8021446-8021836
  hyper

SEQ ID NO: 395274 - DNA, 136 bp, Homo sapiens; identical to SEQ ID NO: 226671
  chr1:8484296-8484432
  hyper

SEQ ID NO: 395275 - DNA, 268 bp, Homo sapiens; identical to SEQ ID NO: 221223
  chr1:9188954-9189222
  hyper

SEQ ID NO: 395276 - DNA, 189 bp, Homo sapiens; identical to SEQ ID NO: 197299
  chr1:9352965-9353154
  hyper

SEQ ID NO: 395277 - DNA, 47 bp, Homo sapiens; identical to SEQ ID NO: 226675
  chr1:9599387-9599434
  hyper

SEQ ID NO: 395278 - DNA, 175 bp, Homo sapiens; identical to SEQ ID NO: 197307
  chr1:10271266-10271441
  hyper

SEQ ID NO: 395279 - DNA, 348 bp, Homo sapiens; identical to SEQ ID NO: 226687
  chr1:10532553-10532901
  hyper

SEQ ID NO: 395280 - DNA, 502 bp, Homo sapiens; identical to SEQ ID NO: 197309
  chr1:10853673-10854175
  hyper

SEQ ID NO: 395281 - DNA, 612 bp, Homo sapiens; identical to SEQ ID NO: 197312
  chr1:10856315-10856927
  hyper

SEQ ID NO: 395282 - DNA, 353 bp, Homo sapiens; identical to SEQ ID NO: 226697
  chr1:11159755-11160108
  hyper

SEQ ID NO: 395283 - DNA, 397 bp, Homo sapiens; identical to SEQ ID NO: 226698
  chr1:11322517-11322914
  hyper

SEQ ID NO: 395284 - DNA, 58 bp, Homo sapiens; identical to SEQ ID NO: 226700
  chr1:11618432-11618490
  hyper

SEQ ID NO: 395285 - DNA, 178 bp, Homo sapiens; identical to SEQ ID NO: 197319
  chr1:11866366-11866544
  hyper

SEQ ID NO: 395286 - DNA, 231 bp, Homo sapiens; identical to SEQ ID NO: 226709
  chr1:11994683-11994914
  hyper

SEQ ID NO: 395287 - DNA, 234 bp, Homo sapiens; identical to SEQ ID NO: 226710
  chr1:12040194-12040428
  hyper

SEQ ID NO: 395288 - DNA, 304 bp, Homo sapiens; identical to SEQ ID NO: 197327
  chr1:12679083-12679387
  hyper

SEQ ID NO: 395289 - DNA, 104 bp, Homo sapiens; identical to SEQ ID NO: 221241
  chr1:15905420-15905524
  hyper

SEQ ID NO: 395290 - DNA, 75 bp, Homo sapiens; identical to SEQ ID NO: 277994
  chr1:15928914-15928989
  hyper

SEQ ID NO: 395291 - DNA, 75 bp, Homo sapiens; identical to SEQ ID NO: 387523
  chr1:15929019-15929094
  hyper

SEQ ID NO: 395292 - DNA, 163 bp, Homo sapiens; identical to SEQ ID NO: 226730
  chr1:16011276-16011439
  hyper

SEQ ID NO: 395293 - DNA, 216 bp, Homo sapiens; identical to SEQ ID NO: 226733
  chr1:16175858-16176074
  hyper

SEQ ID NO: 395294 - DNA, 212 bp, Homo sapiens; identical to SEQ ID NO: 226735
  chr1:16399670-16399882
  hyper

SEQ ID NO: 395295 - DNA, 801 bp, Homo sapiens; identical to SEQ ID NO: 226736
  chr1:16481258-16482059
  hyper

SEQ ID NO: 395296 - DNA, 304 bp, Homo sapiens; identical to SEQ ID NO: 226740
  chr1:16563566-16563870
  hyper

SEQ ID NO: 395297 - DNA, 145 bp, Homo sapiens; identical to SEQ ID NO: 226742
  chr1:16693549-16693694
  hyper

SEQ ID NO: 395298 - DNA, 208 bp, Homo sapiens; identical to SEQ ID NO: 197347
  chr1:17591036-17591244
  hyper

SEQ ID NO: 395299 - DNA, 502 bp, Homo sapiens; identical to SEQ ID NO: 226748
  chr1:17866199-17866701
  hyper

SEQ ID NO: 395300 - DNA, 308 bp, Homo sapiens; identical to SEQ ID NO: 197351
  chr1:18435565-18435873
  hyper

SEQ ID NO: 395301 - DNA, 181 bp, Homo sapiens
  chr1:18964072-18964253
  hyper
gacccaagcactcctagcccaggtctctctccagttctcagaagaccctcccaaccttgaagatgaacttcacagacaaagccggcttactaagacaactcccatctacgcccagcccccacaggcgtggtccgaggaggaaggatgggtggccgggcagccccgtgtgacagcggcctgg

SEQ ID NO: 395302 - DNA, 138 bp, Homo sapiens; identical to SEQ ID NO: 226760
  chr1:18965006-18965144
  hyper

SEQ ID NO: 395303 - DNA, 338 bp, Homo sapiens; identical to SEQ ID NO: 278024
  chr1:18966697-18967035
  hyper

SEQ ID NO: 395304 - DNA, 65 bp, Homo sapiens; identical to SEQ ID NO: 226765
  chr1:18969252-18969317
  hyper

SEQ ID NO: 395305 - DNA, 32 bp, Homo sapiens; identical to SEQ ID NO: 278033
  chr1:18978535-18978567
  hyper

SEQ ID NO: 395306 - DNA, 223 bp, Homo sapiens; identical to SEQ ID NO: 226772
  chr1:19229114-19229337
  hyper

SEQ ID NO: 395307 - DNA, 224 bp, Homo sapiens; identical to SEQ ID NO: 226773
  chr1:19229565-19229789
  hyper

SEQ ID NO: 395308 - DNA, 125 bp, Homo sapiens; identical to SEQ ID NO: 226776
  chr1:19577871-19577996
  hyper

SEQ ID NO: 395309 - DNA, 74 bp, Homo sapiens; identical to SEQ ID NO: 278041
  chr1:19600653-19600727
  hyper

SEQ ID NO: 395310 - DNA, 325 bp, Homo sapiens; identical to SEQ ID NO: 197362
  chr1:19639187-19639512
  hyper

SEQ ID NO: 395311 - DNA, 241 bp, Homo sapiens; identical to SEQ ID NO: 226779
  chr1:19812417-19812658
  hyper

SEQ ID NO: 395312 - DNA, 167 bp, Homo sapiens; identical to SEQ ID NO: 197363
  chr1:20002971-20003138
  hyper

SEQ ID NO: 395313 - DNA, 64 bp, Homo sapiens; identical to SEQ ID NO: 226789
  chr1:20878727-20878791
  hyper

SEQ ID NO: 395314 - DNA, 408 bp, Homo sapiens; identical to SEQ ID NO: 197377
  chr1:20987844-20988252
  hyper

SEQ ID NO: 395315 - DNA, 56 bp, Homo sapiens; identical to SEQ ID NO: 278062
  chr1:21058207-21058263
  hyper

SEQ ID NO: 395316 - DNA, 50 bp, Homo sapiens; identical to SEQ ID NO: 197380
  chr1:22263555-22263605
  hyper

SEQ ID NO: 395317 - DNA, 101 bp, Homo sapiens; identical to SEQ ID NO: 226804
  chr1:22350998-22351099
  hyper

SEQ ID NO: 395318 - DNA, 168 bp, Homo sapiens; identical to SEQ ID NO: 226807
  chr1:22746912-22747080
  hyper

SEQ ID NO: 395319 - DNA, 48 bp, Homo sapiens; identical to SEQ ID NO: 278078
  chr1:23280132-23280180
  hyper

SEQ ID NO: 395320 - DNA, 169 bp, Homo sapiens; identical to SEQ ID NO: 102782
  chr1:23280211-23280380
  hyper

SEQ ID NO: 395321 - DNA, 76 bp, Homo sapiens; identical to SEQ ID NO: 226812
  chr1:23346189-23346265
  hyper

SEQ ID NO: 395322 - DNA, 167 bp, Homo sapiens; identical to SEQ ID NO: 197385
  chr1:23495361-23495528
  hyper

SEQ ID NO: 395323 - DNA, 52 bp, Homo sapiens; identical to SEQ ID NO: 35231
  chr1:23543840-23543892
  hyper

SEQ ID NO: 395324 - DNA, 257 bp, Homo sapiens; identical to SEQ ID NO: 226816
  chr1:23694766-23695023
  hyper

SEQ ID NO: 395325 - DNA, 233 bp, Homo sapiens; identical to SEQ ID NO: 226818
  chr1:23696195-23696428
  hyper

SEQ ID NO: 395326 - DNA, 62 bp, Homo sapiens; identical to SEQ ID NO: 226820
  chr1:23857274-23857336
  hyper

SEQ ID NO: 395327 - DNA, 197 bp, Homo sapiens; identical to SEQ ID NO: 197388
  chr1:23857853-23858050
  hyper

SEQ ID NO: 395328 - DNA, 70 bp, Homo sapiens; identical to SEQ ID NO: 226823
  chr1:23889004-23889074
  hyper

SEQ ID NO: 395329 - DNA, 94 bp, Homo sapiens; identical to SEQ ID NO: 226836
  chr1:24969452-24969546
  hyper

SEQ ID NO: 395330 - DNA, 172 bp, Homo sapiens; identical to SEQ ID NO: 226837
  chr1:24969956-24970128
  hyper

SEQ ID NO: 395331 - DNA, 338 bp, Homo sapiens; identical to SEQ ID NO: 226838
  chr1:25071297-25071635
  hyper

SEQ ID NO: 395332 - DNA, 247 bp, Homo sapiens; identical to SEQ ID NO: 226842
  chr1:25757172-25757419
  hyper

SEQ ID NO: 395333 - DNA, 168 bp, Homo sapiens; identical to SEQ ID NO: 197396
  chr1:25870618-25870786
  hyper

SEQ ID NO: 395334 - DNA, 288 bp, Homo sapiens; identical to SEQ ID NO: 226845
  chr1:26185983-26186271
  hyper

SEQ ID NO: 395335 - DNA, 194 bp, Homo sapiens; identical to SEQ ID NO: 197397
  chr1:26232692-26232886
  hyper

SEQ ID NO: 395336 - DNA, 72 bp, Homo sapiens; identical to SEQ ID NO: 197398
  chr1:26248952-26249024
  hyper

SEQ ID NO: 395337 - DNA, 209 bp, Homo sapiens; identical to SEQ ID NO: 197399
  chr1:26249626-26249835
  hyper

SEQ ID NO: 395338 - DNA, 216 bp, Homo sapiens; identical to SEQ ID NO: 226853
  chr1:26633064-26633280
  hyper

SEQ ID NO: 395339 - DNA, 308 bp, Homo sapiens; identical to SEQ ID NO: 197402
  chr1:26735283-26735591
  hyper

SEQ ID NO: 395340 - DNA, 41 bp, Homo sapiens; identical to SEQ ID NO: 278131
  chr1:26735987-26736028
  hyper

SEQ ID NO: 395341 - DNA, 79 bp, Homo sapiens; identical to SEQ ID NO: 278132
  chr1:26737102-26737181
  hyper

SEQ ID NO: 395342 - DNA, 413 bp, Homo sapiens; identical to SEQ ID NO: 226858
  chr1:26758410-26758823
  hyper

SEQ ID NO: 395343 - DNA, 152 bp, Homo sapiens; identical to SEQ ID NO: 226860
  chr1:26947306-26947458
  hyper

SEQ ID NO: 395344 - DNA, 143 bp, Homo sapiens; identical to SEQ ID NO: 226864
  chr1:27247998-27248141
  hyper

SEQ ID NO: 395345 - DNA, 125 bp, Homo sapiens; identical to SEQ ID NO: 197408
  chr1:27286497-27286622
  hyper

SEQ ID NO: 395346 - DNA, 120 bp, Homo sapiens; identical to SEQ ID NO: 226866
  chr1:27321040-27321160
  hyper

SEQ ID NO: 395347 - DNA, 164 bp, Homo sapiens; identical to SEQ ID NO: 226867
  chr1:27560696-27560860
  hyper

SEQ ID NO: 395348 - DNA, 372 bp, Homo sapiens; identical to SEQ ID NO: 278147
  chr1:27718844-27719216
  hyper

SEQ ID NO: 395349 - DNA, 279 bp, Homo sapiens; identical to SEQ ID NO: 278153
  chr1:27929078-27929357
  hyper

SEQ ID NO: 395350 - DNA, 184 bp, Homo sapiens; identical to SEQ ID NO: 278155
  chr1:27961554-27961738
  hyper

SEQ ID NO: 395351 - DNA, 86 bp, Homo sapiens; identical to SEQ ID NO: 102936
  chr1:27961831-27961917
  hyper

SEQ ID NO: 395352 - DNA, 49 bp, Homo sapiens; identical to SEQ ID NO: 226875
  chr1:28099536-28099585
  hyper

SEQ ID NO: 395353 - DNA, 296 bp, Homo sapiens; identical to SEQ ID NO: 226878
  chr1:28241265-28241561
  hyper

SEQ ID NO: 395354 - DNA, 143 bp, Homo sapiens; identical to SEQ ID NO: 197421
  chr1:28414990-28415133
  hyper

SEQ ID NO: 395355 - DNA, 242 bp, Homo sapiens; identical to SEQ ID NO: 226882
  chr1:28562656-28562898
  hyper

SEQ ID NO: 395356 - DNA, 216 bp, Homo sapiens; identical to SEQ ID NO: 278166
  chr1:28586719-28586935
  hyper

SEQ ID NO: 395357 - DNA, 280 bp, Homo sapiens; identical to SEQ ID NO: 102957
  chr1:28586972-28587252
  hyper

SEQ ID NO: 395358 - DNA, 397 bp, Homo sapiens; identical to SEQ ID NO: 226888
  chr1:28908623-28909020
  hyper

SEQ ID NO: 395359 - DNA, 356 bp, Homo sapiens; identical to SEQ ID NO: 226889
  chr1:28969540-28969896
  hyper

SEQ ID NO: 395360 - DNA, 300 bp, Homo sapiens; identical to SEQ ID NO: 226890
  chr1:28974716-28975016
  hyper

SEQ ID NO: 395361 - DNA, 47 bp, Homo sapiens; identical to SEQ ID NO: 226892
  chr1:29063453-29063500
  hyper

SEQ ID NO: 395362 - DNA, 82 bp, Homo sapiens
  chr1:29448433-29448515
  hyper
aatccgggagggaagctccggccgcccagcccaggccgcttggagatccctggcggccacccccggattttcccgggcggcg

SEQ ID NO: 395363 - DNA, 48 bp, Homo sapiens; identical to SEQ ID NO: 383706
  chr1:29448910-29448958
  hyper

SEQ ID NO: 395364 - DNA, 239 bp, Homo sapiens; identical to SEQ ID NO: 226897
  chr1:29449138-29449377
  hyper

SEQ ID NO: 395365 - DNA, 32 bp, Homo sapiens; identical to SEQ ID NO: 226899
  chr1:29563130-29563162
  hyper

SEQ ID NO: 395366 - DNA, 143 bp, Homo sapiens; identical to SEQ ID NO: 278185
  chr1:29564623-29564766
  hyper

SEQ ID NO: 395367 - DNA, 335 bp, Homo sapiens; identical to SEQ ID NO: 278186
  chr1:29564802-29565137
  hyper

SEQ ID NO: 395368 - DNA, 58 bp, Homo sapiens; identical to SEQ ID NO: 226904
  chr1:30559447-30559505
  hyper

SEQ ID NO: 395369 - DNA, 140 bp, Homo sapiens; identical to SEQ ID NO: 197428
  chr1:31192212-31192352
  hyper

SEQ ID NO: 395370 - DNA, 43 bp, Homo sapiens; identical to SEQ ID NO: 278194
  chr1:31538418-31538461
  hyper

SEQ ID NO: 395371 - DNA, 165 bp, Homo sapiens; identical to SEQ ID NO: 103003
  chr1:31538499-31538664
  hyper

SEQ ID NO: 395372 - DNA, 229 bp, Homo sapiens; identical to SEQ ID NO: 226912
  chr1:32083723-32083952
  hyper

SEQ ID NO: 395373 - DNA, 73 bp, Homo sapiens; identical to SEQ ID NO: 226918
  chr1:32480181-32480254
  hyper

SEQ ID NO: 395374 - DNA, 66 bp, Homo sapiens; identical to SEQ ID NO: 226919
  chr1:32573589-32573655
  hyper

SEQ ID NO: 395375 - DNA, 174 bp, Homo sapiens; identical to SEQ ID NO: 197435
  chr1:32574075-32574249
  hyper

SEQ ID NO: 395376 - DNA, 121 bp, Homo sapiens; identical to SEQ ID NO: 221290
  chr1:32666272-32666393
  hyper

SEQ ID NO: 395377 - DNA, 413 bp, Homo sapiens; identical to SEQ ID NO: 226922
  chr1:32687709-32688122
  hyper

SEQ ID NO: 395378 - DNA, 137 bp, Homo sapiens; identical to SEQ ID NO: 221291
  chr1:32757550-32757687
  hyper

SEQ ID NO: 395379 - DNA, 164 bp, Homo sapiens; identical to SEQ ID NO: 226924
  chr1:32758019-32758183
  hyper

SEQ ID NO: 395380 - DNA, 36 bp, Homo sapiens; identical to SEQ ID NO: 197442
  chr1:33005606-33005642
  hyper

SEQ ID NO: 395381 - DNA, 203 bp, Homo sapiens; identical to SEQ ID NO: 197443
  chr1:33116489-33116692
  hyper

SEQ ID NO: 395382 - DNA, 138 bp, Homo sapiens; identical to SEQ ID NO: 221294
  chr1:33207544-33207682
  hyper

SEQ ID NO: 395383 - DNA, 254 bp, Homo sapiens; identical to SEQ ID NO: 226931
  chr1:33282729-33282983
  hyper

SEQ ID NO: 395384 - DNA, 126 bp, Homo sapiens; identical to SEQ ID NO: 197448
  chr1:33283881-33284007
  hyper

SEQ ID NO: 395385 - DNA, 272 bp, Homo sapiens; identical to SEQ ID NO: 226936
  chr1:33502498-33502770
  hyper

SEQ ID NO: 395386 - DNA, 649 bp, Homo sapiens; identical to SEQ ID NO: 226937
  chr1:33592695-33593344
  hyper

SEQ ID NO: 395387 - DNA, 498 bp, Homo sapiens; identical to SEQ ID NO: 197450
  chr1:33721208-33721706
  hyper

SEQ ID NO: 395388 - DNA, 83 bp, Homo sapiens; identical to SEQ ID NO: 226955
  chr1:36023211-36023294
  hyper

SEQ ID NO: 395389 - DNA, 156 bp, Homo sapiens; identical to SEQ ID NO: 278247
  chr1:36173085-36173241
  hyper

SEQ ID NO: 395390 - DNA, 414 bp, Homo sapiens; identical to SEQ ID NO: 278248
  chr1:36173282-36173696
  hyper

SEQ ID NO: 395391 - DNA, 85 bp, Homo sapiens; identical to SEQ ID NO: 197459
  chr1:36235729-36235814
  hyper

SEQ ID NO: 395392 - DNA, 173 bp, Homo sapiens; identical to SEQ ID NO: 197460
  chr1:36615012-36615185
  hyper

SEQ ID NO: 395393 - DNA, 40 bp, Homo sapiens; identical to SEQ ID NO: 226960
  chr1:36789376-36789416
  hyper

SEQ ID NO: 395394 - DNA, 866 bp, Homo sapiens; identical to SEQ ID NO: 197462
  chr1:36931643-36932509
  hyper

SEQ ID NO: 395395 - DNA, 218 bp, Homo sapiens; identical to SEQ ID NO: 197463
  chr1:36933230-36933448
  hyper

SEQ ID NO: 395396 - DNA, 167 bp, Homo sapiens; identical to SEQ ID NO: 278261
  chr1:37501688-37501855
  hyper

SEQ ID NO: 395397 - DNA, 98 bp, Homo sapiens; identical to SEQ ID NO: 278262
  chr1:37501885-37501983
  hyper

SEQ ID NO: 395398 - DNA, 73 bp, Homo sapiens; identical to SEQ ID NO: 226967
  chr1:37940474-37940547
  hyper

SEQ ID NO: 395399 - DNA, 82 bp, Homo sapiens; identical to SEQ ID NO: 226968
  chr1:37940787-37940869
  hyper

SEQ ID NO: 395400 - DNA, 157 bp, Homo sapiens; identical to SEQ ID NO: 278265
  chr1:37980346-37980503
  hyper

SEQ ID NO: 395401 - DNA, 135 bp, Homo sapiens; identical to SEQ ID NO: 197469
  chr1:38061487-38061622
  hyper

SEQ ID NO: 395402 - DNA, 167 bp, Homo sapiens; identical to SEQ ID NO: 278268
  chr1:38100075-38100242
  hyper

SEQ ID NO: 395403 - DNA, 221 bp, Homo sapiens; identical to SEQ ID NO: 197470
  chr1:38100272-38100493
  hyper

SEQ ID NO: 395404 - DNA, 58 bp, Homo sapiens; identical to SEQ ID NO: 347
  chr1:38100533-38100591
  hyper

SEQ ID NO: 395405 - DNA, 256 bp, Homo sapiens; identical to SEQ ID NO: 226973
  chr1:38157954-38158210
  hyper

SEQ ID NO: 395406 - DNA, 98 bp, Homo sapiens; identical to SEQ ID NO: 221316
  chr1:38580185-38580283
  hyper

SEQ ID NO: 395407 - DNA, 205 bp, Homo sapiens; identical to SEQ ID NO: 197474
  chr1:39338990-39339195
  hyper

SEQ ID NO: 395408 - DNA, 42 bp, Homo sapiens; identical to SEQ ID NO: 197475
  chr1:39874199-39874241
  hyper

SEQ ID NO: 395409 - DNA, 45 bp, Homo sapiens; identical to SEQ ID NO: 226990
  chr1:40042402-40042447
  hyper

SEQ ID NO: 395410 - DNA, 183 bp, Homo sapiens; identical to SEQ ID NO: 226992
  chr1:40157111-40157294
  hyper

SEQ ID NO: 395411 - DNA, 344 bp, Homo sapiens; identical to SEQ ID NO: 278290
  chr1:40254463-40254807
  hyper

SEQ ID NO: 395412 - DNA, 121 bp, Homo sapiens; identical to SEQ ID NO: 278291
  chr1:40254922-40255043
  hyper

SEQ ID NO: 395413 - DNA, 35 bp, Homo sapiens; identical to SEQ ID NO: 278292
  chr1:40255068-40255103
  hyper

SEQ ID NO: 395414 - DNA, 81 bp, Homo sapiens; identical to SEQ ID NO: 278293
  chr1:40255104-40255185
  hyper

SEQ ID NO: 395415 - DNA, 280 bp, Homo sapiens; identical to SEQ ID NO: 278294
  chr1:40367951-40368231
  hyper

SEQ ID NO: 395416 - DNA, 31 bp, Homo sapiens; identical to SEQ ID NO: 221329
  chr1:40420568-40420599
  hyper

SEQ ID NO: 395417 - DNA, 46 bp, Homo sapiens; identical to SEQ ID NO: 226999
  chr1:41131456-41131502
  hyper

SEQ ID NO: 395418 - DNA, 239 bp, Homo sapiens; identical to SEQ ID NO: 197481
  chr1:41328054-41328293
  hyper

SEQ ID NO: 395419 - DNA, 146 bp, Homo sapiens; identical to SEQ ID NO: 278306
  chr1:41444974-41445120
  hyper

SEQ ID NO: 395420 - DNA, 56 bp, Homo sapiens
  chr1:41848754-41848810
  hyper
ggatctgattcccacttgacacactttcccactggtcttagtctcacccacccgaa

SEQ ID NO: 395421 - DNA, 37 bp, Homo sapiens; identical to SEQ ID NO: 197486
  chr1:41848840-41848877
  hyper

SEQ ID NO: 395422 - DNA, 306 bp, Homo sapiens; identical to SEQ ID NO: 197487
  chr1:41848976-41849282
  hyper

SEQ ID NO: 395423 - DNA, 163 bp, Homo sapiens; identical to SEQ ID NO: 227009
  chr1:42127233-42127396
  hyper

SEQ ID NO: 395424 - DNA, 456 bp, Homo sapiens; identical to SEQ ID NO: 197489
  chr1:42928782-42929238
  hyper

SEQ ID NO: 395425 - DNA, 472 bp, Homo sapiens; identical to SEQ ID NO: 103258
  chr1:43232901-43233373
  hyper

SEQ ID NO: 395426 - DNA, 79 bp, Homo sapiens; identical to SEQ ID NO: 227015
  chr1:43282586-43282665
  hyper

SEQ ID NO: 395427 - DNA, 124 bp, Homo sapiens; identical to SEQ ID NO: 278323
  chr1:43613349-43613473
  hyper

SEQ ID NO: 395428 - DNA, 67 bp, Homo sapiens; identical to SEQ ID NO: 197494
  chr1:43814927-43814994
  hyper

SEQ ID NO: 395429 - DNA, 287 bp, Homo sapiens; identical to SEQ ID NO: 197497
  chr1:43919241-43919528
  hyper

SEQ ID NO: 395430 - DNA, 119 bp, Homo sapiens; identical to SEQ ID NO: 391
  chr1:43919541-43919660
  hyper

SEQ ID NO: 395431 - DNA, 217 bp, Homo sapiens; identical to SEQ ID NO: 227025
  chr1:43997371-43997588
  hyper

SEQ ID NO: 395432 - DNA, 112 bp, Homo sapiens; identical to SEQ ID NO: 278338
  chr1:44402260-44402372
  hyper

SEQ ID NO: 395433 - DNA, 58 bp, Homo sapiens; identical to SEQ ID NO: 227028
  chr1:44411960-44412018
  hyper

SEQ ID NO: 395434 - DNA, 270 bp, Homo sapiens; identical to SEQ ID NO: 227029
  chr1:44412317-44412587
  hyper

SEQ ID NO: 395435 - DNA, 44 bp, Homo sapiens; identical to SEQ ID NO: 227032
  chr1:44445510-44445554
  hyper

SEQ ID NO: 395436 - DNA, 227 bp, Homo sapiens; identical to SEQ ID NO: 227046
  chr1:45477622-45477849
  hyper

SEQ ID NO: 395437 - DNA, 35 bp, Homo sapiens; identical to SEQ ID NO: 227047
  chr1:45671645-45671680
  hyper

SEQ ID NO: 395438 - DNA, 129 bp, Homo sapiens; identical to SEQ ID NO: 278361
  chr1:45792559-45792688
  hyper

SEQ ID NO: 395439 - DNA, 164 bp, Homo sapiens; identical to SEQ ID NO: 278362
  chr1:45792689-45792853
  hyper

SEQ ID NO: 395440 - DNA, 977 bp, Homo sapiens; identical to SEQ ID NO: 227052
  chr1:45986970-45987947
  hyper

SEQ ID NO: 395441 - DNA, 185 bp, Homo sapiens; identical to SEQ ID NO: 227054
  chr1:46153751-46153936
  hyper

SEQ ID NO: 395442 - DNA, 32 bp, Homo sapiens; identical to SEQ ID NO: 227056
  chr1:46269380-46269412
  hyper

SEQ ID NO: 395443 - DNA, 105 bp, Homo sapiens; identical to SEQ ID NO: 227057
  chr1:46598366-46598471
  hyper

SEQ ID NO: 395444 - DNA, 129 bp, Homo sapiens; identical to SEQ ID NO: 227059
  chr1:46712818-46712947
  hyper

SEQ ID NO: 395445 - DNA, 31 bp, Homo sapiens; identical to SEQ ID NO: 227061
  chr1:46806341-46806372
  hyper

SEQ ID NO: 395446 - DNA, 327 bp, Homo sapiens; identical to SEQ ID NO: 278378
  chr1:46932180-46932507
  hyper

SEQ ID NO: 395447 - DNA, 72 bp, Homo sapiens; identical to SEQ ID NO: 197513
  chr1:46957804-46957876
  hyper

SEQ ID NO: 395448 - DNA, 148 bp, Homo sapiens; identical to SEQ ID NO: 227075
  chr1:47691969-47692117
  hyper

SEQ ID NO: 395449 - DNA, 120 bp, Homo sapiens; identical to SEQ ID NO: 227079
  chr1:47904009-47904129
  hyper

SEQ ID NO: 395450 - DNA, 163 bp, Homo sapiens; identical to SEQ ID NO: 278394
  chr1:48173821-48173984
  hyper

SEQ ID NO: 395451 - DNA, 635 bp, Homo sapiens; identical to SEQ ID NO: 278395
  chr1:48174046-48174681
  hyper

SEQ ID NO: 395452 - DNA, 111 bp, Homo sapiens; identical to SEQ ID NO: 278406
  chr1:50489672-50489783
  hyper

SEQ ID NO: 395453 - DNA, 81 bp, Homo sapiens; identical to SEQ ID NO: 227107
  chr1:50896802-50896883
  hyper

SEQ ID NO: 395454 - DNA, 62 bp, Homo sapiens; identical to SEQ ID NO: 197530
  chr1:51425638-51425700
  hyper

SEQ ID NO: 395455 - DNA, 144 bp, Homo sapiens; identical to SEQ ID NO: 227110
  chr1:51434359-51434503
  hyper

SEQ ID NO: 395456 - DNA, 261 bp, Homo sapiens; identical to SEQ ID NO: 227113
  chr1:52082578-52082839
  hyper

SEQ ID NO: 395457 - DNA, 192 bp, Homo sapiens; identical to SEQ ID NO: 227117
  chr1:52521176-52521368
  hyper

SEQ ID NO: 395458 - DNA, 180 bp, Homo sapiens; identical to SEQ ID NO: 221355
  chr1:52608469-52608649
  hyper

SEQ ID NO: 395459 - DNA, 161 bp, Homo sapiens; identical to SEQ ID NO: 227118
  chr1:52832014-52832175
  hyper

SEQ ID NO: 395460 - DNA, 166 bp, Homo sapiens; identical to SEQ ID NO: 278425
  chr1:53019302-53019468
  hyper

SEQ ID NO: 395461 - DNA, 211 bp, Homo sapiens; identical to SEQ ID NO: 278428
  chr1:53527606-53527817
  hyper

SEQ ID NO: 395462 - DNA, 55 bp, Homo sapiens; identical to SEQ ID NO: 197539
  chr1:53686483-53686538
  hyper

SEQ ID NO: 395463 - DNA, 174 bp, Homo sapiens; identical to SEQ ID NO: 227132
  chr1:54355496-54355670
  hyper

SEQ ID NO: 395464 - DNA, 148 bp, Homo sapiens; identical to SEQ ID NO: 197541
  chr1:54965082-54965230
  hyper

SEQ ID NO: 395465 - DNA, 193 bp, Homo sapiens; identical to SEQ ID NO: 197544
  chr1:55353149-55353342
  hyper

SEQ ID NO: 395466 - DNA, 485 bp, Homo sapiens; identical to SEQ ID NO: 278443
  chr1:55462188-55462673
  hyper

SEQ ID NO: 395467 - DNA, 331 bp, Homo sapiens; identical to SEQ ID NO: 221363
  chr1:56943370-56943701
  hyper

SEQ ID NO: 395468 - DNA, 747 bp, Homo sapiens; identical to SEQ ID NO: 221364
  chr1:57044295-57045042
  hyper

SEQ ID NO: 395469 - DNA, 101 bp, Homo sapiens; identical to SEQ ID NO: 197551
  chr1:59249797-59249898
  hyper

SEQ ID NO: 395470 - DNA, 190 bp, Homo sapiens; identical to SEQ ID NO: 278458
  chr1:59369778-59369968
  hyper

SEQ ID NO: 395471 - DNA, 31 bp, Homo sapiens; identical to SEQ ID NO: 227154
  chr1:59762509-59762540
  hyper

SEQ ID NO: 395472 - DNA, 114 bp, Homo sapiens; identical to SEQ ID NO: 387594
  chr1:60280227-60280341
  hyper

SEQ ID NO: 395473 - DNA, 279 bp, Homo sapiens; identical to SEQ ID NO: 35762
  chr1:60280812-60281091
  hyper

SEQ ID NO: 395474 - DNA, 82 bp, Homo sapiens; identical to SEQ ID NO: 227157
  chr1:60747090-60747172
  hyper

SEQ ID NO: 395475 - DNA, 133 bp, Homo sapiens; identical to SEQ ID NO: 278466
  chr1:61508554-61508687
  hyper

SEQ ID NO: 395476 - DNA, 215 bp, Homo sapiens; identical to SEQ ID NO: 278467
  chr1:61508954-61509169
  hyper

SEQ ID NO: 395477 - DNA, 40 bp, Homo sapiens; identical to SEQ ID NO: 197558
  chr1:61516034-61516074
  hyper

SEQ ID NO: 395478 - DNA, 223 bp, Homo sapiens; identical to SEQ ID NO: 227160
  chr1:62190978-62191201
  hyper

SEQ ID NO: 395479 - DNA, 316 bp, Homo sapiens
  chr1:62208494-62208810
  hyper
gggcccgggtgaccccacggtggtccccgccccgccgcgcagggctcgccgaggccgcgggcagggaggggcgccgccccgcctccccaggcctttcgggcctcgaatctcggcccactggtattcgggggtggcacggatcctattttgcgcccagatcggtgcccctgtttcgctcccagagctgggcggagtctttccctccatcggtggccgtggaaggagggaacggggtgaggggacaaagaggagggggtgctcagagccgggctgagggggcgacttgggcccggccgcgtcgcggcgcctggtcatc

SEQ ID NO: 395480 - DNA, 970 bp, Homo sapiens; identical to SEQ ID NO: 278486
  chr1:64936233-64937203
  hyper

SEQ ID NO: 395481 - DNA, 419 bp, Homo sapiens; identical to SEQ ID NO: 35809
  chr1:65210939-65211358
  hyper

SEQ ID NO: 395482 - DNA, 38 bp, Homo sapiens; identical to SEQ ID NO: 197577
  chr1:65614491-65614529
  hyper

SEQ ID NO: 395483 - DNA, 39 bp, Homo sapiens; identical to SEQ ID NO: 197579
  chr1:65720329-65720368
  hyper

SEQ ID NO: 395484 - DNA, 81 bp, Homo sapiens; identical to SEQ ID NO: 197581
  chr1:66258064-66258145
  hyper

SEQ ID NO: 395485 - DNA, 74 bp, Homo sapiens; identical to SEQ ID NO: 383730
  chr1:66259003-66259077
  hyper

SEQ ID NO: 395486 - DNA, 703 bp, Homo sapiens; identical to SEQ ID NO: 227191
  chr1:66797585-66798288
  hyper

SEQ ID NO: 395487 - DNA, 349 bp, Homo sapiens; identical to SEQ ID NO: 278506
  chr1:67390718-67391067
  hyper

SEQ ID NO: 395488 - DNA, 135 bp, Homo sapiens; identical to SEQ ID NO: 227198
  chr1:68150809-68150944
  hyper

SEQ ID NO: 395489 - DNA, 115 bp, Homo sapiens; identical to SEQ ID NO: 197586
  chr1:68297572-68297687
  hyper

SEQ ID NO: 395490 - DNA, 606 bp, Homo sapiens; identical to SEQ ID NO: 197587
  chr1:68297773-68298379
  hyper

SEQ ID NO: 395491 - DNA, 175 bp, Homo sapiens; identical to SEQ ID NO: 197589
  chr1:68696600-68696775
  hyper

SEQ ID NO: 395492 - DNA, 574 bp, Homo sapiens; identical to SEQ ID NO: 278516
  chr1:68697037-68697611
  hyper

SEQ ID NO: 395493 - DNA, 174 bp, Homo sapiens; identical to SEQ ID NO: 278520
  chr1:70034574-70034748
  hyper

SEQ ID NO: 395494 - DNA, 325 bp, Homo sapiens; identical to SEQ ID NO: 227205
  chr1:70820330-70820655
  hyper

SEQ ID NO: 395495 - DNA, 131 bp, Homo sapiens; identical to SEQ ID NO: 278525
  chr1:71512731-71512862
  hyper

SEQ ID NO: 395496 - DNA, 117 bp, Homo sapiens; identical to SEQ ID NO: 278526
  chr1:71513747-71513864
  hyper

SEQ ID NO: 395497 - DNA, 44 bp, Homo sapiens; identical to SEQ ID NO: 278527
  chr1:72747787-72747831
  hyper

SEQ ID NO: 395498 - DNA, 383 bp, Homo sapiens; identical to SEQ ID NO: 197597
  chr1:72748267-72748650
  hyper

SEQ ID NO: 395499 - DNA, 42 bp, Homo sapiens; identical to SEQ ID NO: 227209
  chr1:75594039-75594081
  hyper

SEQ ID NO: 395500 - DNA, 55 bp, Homo sapiens; identical to SEQ ID NO: 227210
  chr1:75595516-75595571
  hyper

SEQ ID NO: 395501 - DNA, 67 bp, Homo sapiens; identical to SEQ ID NO: 278535
  chr1:75598806-75598873
  hyper

SEQ ID NO: 395502 - DNA, 258 bp, Homo sapiens; identical to SEQ ID NO: 227219
  chr1:76082673-76082931
  hyper

SEQ ID NO: 395503 - DNA, 79 bp, Homo sapiens; identical to SEQ ID NO: 227223
  chr1:77684951-77685030
  hyper

SEQ ID NO: 395504 - DNA, 219 bp, Homo sapiens; identical to SEQ ID NO: 227229
  chr1:78245317-78245536
  hyper

SEQ ID NO: 395505 - DNA, 33 bp, Homo sapiens; identical to SEQ ID NO: 197608
  chr1:82269508-82269541
  hyper

SEQ ID NO: 395506 - DNA, 179 bp, Homo sapiens; identical to SEQ ID NO: 278567
  chr1:84464234-84464413
  hyper

SEQ ID NO: 395507 - DNA, 503 bp, Homo sapiens; identical to SEQ ID NO: 278568
  chr1:84464878-84465381
  hyper

SEQ ID NO: 395508 - DNA, 56 bp, Homo sapiens; identical to SEQ ID NO: 197611
  chr1:85040191-85040247
  hyper

SEQ ID NO: 395509 - DNA, 161 bp, Homo sapiens; identical to SEQ ID NO: 197615
  chr1:85666112-85666273
  hyper

SEQ ID NO: 395510 - DNA, 395 bp, Homo sapiens; identical to SEQ ID NO: 221394
  chr1:85666768-85667163
  hyper

SEQ ID NO: 395511 - DNA, 98 bp, Homo sapiens; identical to SEQ ID NO: 227251
  chr1:85931033-85931131
  hyper

SEQ ID NO: 395512 - DNA, 153 bp, Homo sapiens; identical to SEQ ID NO: 278585
  chr1:86042081-86042234
  hyper

SEQ ID NO: 395513 - DNA, 35 bp, Homo sapiens; identical to SEQ ID NO: 227252
  chr1:86042647-86042682
  hyper

SEQ ID NO: 395514 - DNA, 63 bp, Homo sapiens; identical to SEQ ID NO: 278591
  chr1:86622127-86622190
  hyper

SEQ ID NO: 395515 - DNA, 52 bp, Homo sapiens; identical to SEQ ID NO: 227257
  chr1:87380149-87380201
  hyper

SEQ ID NO: 395516 - DNA, 101 bp, Homo sapiens; identical to SEQ ID NO: 197621
  chr1:87617583-87617684
  hyper

SEQ ID NO: 395517 - DNA, 72 bp, Homo sapiens; identical to SEQ ID NO: 278595
  chr1:87617858-87617930
  hyper

SEQ ID NO: 395518 - DNA, 94 bp, Homo sapiens; identical to SEQ ID NO: 227261
  chr1:89149364-89149458
  hyper

SEQ ID NO: 395519 - DNA, 143 bp, Homo sapiens; identical to SEQ ID NO: 221399
  chr1:90228347-90228490
  hyper

SEQ ID NO: 395520 - DNA, 172 bp, Homo sapiens; identical to SEQ ID NO: 197626
  chr1:90286176-90286348
  hyper

SEQ ID NO: 395521 - DNA, 45 bp, Homo sapiens; identical to SEQ ID NO: 197627
  chr1:90287493-90287538
  hyper

SEQ ID NO: 395522 - DNA, 205 bp, Homo sapiens; identical to SEQ ID NO: 278613
  chr1:91179021-91179226
  hyper

SEQ ID NO: 395523 - DNA, 58 bp, Homo sapiens; identical to SEQ ID NO: 227274
  chr1:91179581-91179639
  hyper

SEQ ID NO: 395524 - DNA, 114 bp, Homo sapiens; identical to SEQ ID NO: 227288
  chr1:91486937-91487051
  hyper

SEQ ID NO: 395525 - DNA, 140 bp, Homo sapiens; identical to SEQ ID NO: 197635
  chr1:91966293-91966433
  hyper

SEQ ID NO: 395526 - DNA, 170 bp, Homo sapiens; identical to SEQ ID NO: 197636
  chr1:92350554-92350724
  hyper

SEQ ID NO: 395527 - DNA, 331 bp, Homo sapiens; identical to SEQ ID NO: 197637
  chr1:92351379-92351710
  hyper

SEQ ID NO: 395528 - DNA, 616 bp, Homo sapiens; identical to SEQ ID NO: 227296
  chr1:92545648-92546264
  hyper

SEQ ID NO: 395529 - DNA, 35 bp, Homo sapiens; identical to SEQ ID NO: 221405
  chr1:92946278-92946313
  hyper

SEQ ID NO: 395530 - DNA, 300 bp, Homo sapiens; identical to SEQ ID NO: 221409
  chr1:93250632-93250932
  hyper

SEQ ID NO: 395531 - DNA, 340 bp, Homo sapiens
  chr1:93913410-93913750
  hyper
gtccgactggcagcggagtgggggcagtccaagctccggggtacctgcaggaggagactcgaccagcgagaggggccagcgagggtgaccaggtgcccgcttggggaccccgccggcggtggccaggctagcccaggtcctccccgatcccaggatgcactgcgccccgccccctccccgcgccgcgttccgcctcccctcggccccggccccctcccgcccagcgcggggaggcggggacgcgtcggcggcggaggcttctccagtcgcgtctttctcactcactggggagcccggcggtggcggcacctttcgaggtagacccgctgagctgctagcc

SEQ ID NO: 395532 - DNA, 475 bp, Homo sapiens
  chr1:93913990-93914465
  hyper
gggtcccgctcgtctttgtgtgcagactcctcttcccttctcggccgggggtctagggggccgctagtccgtgctcccgcctttgccgccgtggtgcagctcgggcggcgcccgggacggccgggggagcagcccgcgggctcctgcgtgcgccgtgatcccctcttgttccttctccctcctccaccttcacttttcccgacgcctggcttcgcgcccggcggctcctctcttcctttgtatctctcctcccggaggcgggggagggggcccattgtccccaaggggcgctgttcgagggcggggaggggaccggccgcgattcctcgcccgggccaggtccgcggggctagggcgtcgcccgtctggggcggcgccgcccagagccctcgccccaggtatggggacccaggcggctttgttcggagcccggcctcgggccagccaggcccagcccacacgcacatttctctct

SEQ ID NO: 395533 - DNA, 143 bp, Homo sapiens; identical to SEQ ID NO: 197646
  chr1:93914736-93914879
  hyper

SEQ ID NO: 395534 - DNA, 618 bp, Homo sapiens
  chr1:95006902-95007520
  hyper
tgcaactcccgccggcgcccgacggactcggttcattcaagccgggctgggtgagcgcagccgagtcccgtaggcgcgggggacaacatgggcgccccggggaaccagggcgagcccgctgccagccaggactgtcgcctccctcctgcgtgtggcgcgccccgggcttccaggggctggtgccactcacctgaagcgccggccacctgggcgaagacccagccgagcaggagcgtccgagcgacggcggtctcggggcgcgggacccggggccaggcaggggtctccatgtctaccagttggcggcgagatcgagcgggttccgtggcgcccgtggggctggggaggttgggctgaaggcgccctgggccggccagagggagtgcgagggggtgcggggagctcgcagtcttggggagccggtgccccgcgcgctataaagggccggcggcgcgctctcccgcgcctctgcccgcccccggcgcccgcccccgccgctcctcccgactccccgcccccggcccgggtcacttgccgtcgcggtgggcggcccccggcgagtccacacccctgccccgcctcctcccggtaggaaactccgggaccctgcaagggatg

SEQ ID NO: 395535 - DNA, 240 bp, Homo sapiens
  chr1:95391500-95391740
  hyper
agggggacgcctctcatctctttcccaggccaaaagtcctaaagataaacctaacgcattcttgggctcagtggcaaagctgagcgtcaccaaatcccaatcgctccaaactataagccgcctcagcaaacaagccccaaacaaaagcaacccacaaaaataatcctttatgtcgtgaaagtctaatgtacttcaaacttctcagtgtttcataaaaagtctcaagcctaagcagatatc

SEQ ID NO: 395536 - DNA, 219 bp, Homo sapiens; identical to SEQ ID NO: 278662
  chr1:95392624-95392843
  hyper

SEQ ID NO: 395537 - DNA, 108 bp, Homo sapiens; identical to SEQ ID NO: 197661
  chr1:95392887-95392995
  hyper

SEQ ID NO: 395538 - DNA, 32 bp, Homo sapiens; identical to SEQ ID NO: 197662
  chr1:95393067-95393099
  hyper

SEQ ID NO: 395539 - DNA, 491 bp, Homo sapiens; identical to SEQ ID NO: 227321
  chr1:95538361-95538852
  hyper

SEQ ID NO: 395540 - DNA, 935 bp, Homo sapiens; identical to SEQ ID NO: 278667
  chr1:95582633-95583568
  hyper

SEQ ID NO: 395541 - DNA, 372 bp, Homo sapiens; identical to SEQ ID NO: 278670
  chr1:98386195-98386567
  hyper

SEQ ID NO: 395542 - DNA, 52 bp, Homo sapiens
  chr1:98386618-98386670
  hyper
cgcggggcggcaacgcccccggggcggggctgcgctctcggtcctgcggctc

SEQ ID NO: 395543 - DNA, 190 bp, Homo sapiens; identical to SEQ ID NO: 197668
  chr1:98514255-98514445
  hyper

SEQ ID NO: 395544 - DNA, 134 bp, Homo sapiens; identical to SEQ ID NO: 278676
  chr1:99470847-99470981
  hyper

SEQ ID NO: 395545 - DNA, 40 bp, Homo sapiens; identical to SEQ ID NO: 197672
  chr1:100316318-100316358
  hyper

SEQ ID NO: 395546 - DNA, 551 bp, Homo sapiens; identical to SEQ ID NO: 227336
  chr1:100503350-100503901
  hyper

SEQ ID NO: 395547 - DNA, 65 bp, Homo sapiens; identical to SEQ ID NO: 227341
  chr1:100817825-100817890
  hyper

SEQ ID NO: 395548 - DNA, 182 bp, Homo sapiens; identical to SEQ ID NO: 227362
  chr1:109235041-109235223
  hyper

SEQ ID NO: 395549 - DNA, 453 bp, Homo sapiens; identical to SEQ ID NO: 278707
  chr1:109632945-109633398
  hyper

SEQ ID NO: 395550 - DNA, 273 bp, Homo sapiens; identical to SEQ ID NO: 278718
  chr1:110009818-110010091
  hyper

SEQ ID NO: 395551 - DNA, 105 bp, Homo sapiens; identical to SEQ ID NO: 221431
  chr1:110052180-110052285
  hyper

SEQ ID NO: 395552 - DNA, 103 bp, Homo sapiens; identical to SEQ ID NO: 227374
  chr1:110090998-110091101
  hyper

SEQ ID NO: 395553 - DNA, 172 bp, Homo sapiens; identical to SEQ ID NO: 227375
  chr1:110162331-110162503
  hyper

SEQ ID NO: 395554 - DNA, 147 bp, Homo sapiens; identical to SEQ ID NO: 197694
  chr1:110453160-110453307
  hyper

SEQ ID NO: 395555 - DNA, 421 bp, Homo sapiens; identical to SEQ ID NO: 197695
  chr1:110453531-110453952
  hyper

SEQ ID NO: 395556 - DNA, 62 bp, Homo sapiens; identical to SEQ ID NO: 227380
  chr1:110526885-110526947
  hyper

SEQ ID NO: 395557 - DNA, 84 bp, Homo sapiens; identical to SEQ ID NO: 227382
  chr1:110577102-110577186
  hyper

SEQ ID NO: 395558 - DNA, 218 bp, Homo sapiens; identical to SEQ ID NO: 227393
  chr1:110880352-110880570
  hyper

SEQ ID NO: 395559 - DNA, 320 bp, Homo sapiens
  chr1:111149268-111149588
  hyper
agttcagctcttaagcccccggcgtccagccgagggaccgccgaggctcagtgtccaacccaaaatcccggaacctgatctctgggggtggggagtagcctgcgccaggctgccgccccagatctcagcttccttttaagcgcgggggctcggcggcagcccacggccccagcgaaggggaaagccctctctgcagcaaagccgtttgttattctgtgccgaagaggcgaatgcagcccggccgtcccaagtggttcaggtcctaccaacccgcgctatttaccagacatggttatgctgccagctgcacttcccaccac

SEQ ID NO: 395560 - DNA, 40 bp, Homo sapiens; identical to SEQ ID NO: 197700
  chr1:111289414-111289454
  hyper

SEQ ID NO: 395561 - DNA, 260 bp, Homo sapiens; identical to SEQ ID NO: 227402
  chr1:111683181-111683441
  hyper

SEQ ID NO: 395562 - DNA, 46 bp, Homo sapiens; identical to SEQ ID NO: 278744
  chr1:111813500-111813546
  hyper

SEQ ID NO: 395563 - DNA, 63 bp, Homo sapiens; identical to SEQ ID NO: 278745
  chr1:111813604-111813667
  hyper

SEQ ID NO: 395564 - DNA, 155 bp, Homo sapiens; identical to SEQ ID NO: 227405
  chr1:111889101-111889256
  hyper

SEQ ID NO: 395565 - DNA, 145 bp, Homo sapiens; identical to SEQ ID NO: 227408
  chr1:112532138-112532283
  hyper

SEQ ID NO: 395566 - DNA, 35 bp, Homo sapiens; identical to SEQ ID NO: 197705
  chr1:112938562-112938597
  hyper

SEQ ID NO: 395567 - DNA, 165 bp, Homo sapiens; identical to SEQ ID NO: 227411
  chr1:112939042-112939207
  hyper

SEQ ID NO: 395568 - DNA, 426 bp, Homo sapiens; identical to SEQ ID NO: 278753
  chr1:113051157-113051583
  hyper

SEQ ID NO: 395569 - DNA, 436 bp, Homo sapiens; identical to SEQ ID NO: 227415
  chr1:113216760-113217196
  hyper

SEQ ID NO: 395570 - DNA, 140 bp, Homo sapiens; identical to SEQ ID NO: 197710
  chr1:113258352-113258492
  hyper

SEQ ID NO: 395571 - DNA, 57 bp, Homo sapiens; identical to SEQ ID NO: 278761
  chr1:113392152-113392209
  hyper

SEQ ID NO: 395572 - DNA, 149 bp, Homo sapiens; identical to SEQ ID NO: 221448
  chr1:114695147-114695296
  hyper

SEQ ID NO: 395573 - DNA, 105 bp, Homo sapiens; identical to SEQ ID NO: 221451
  chr1:114697920-114698025
  hyper

SEQ ID NO: 395574 - DNA, 275 bp, Homo sapiens; identical to SEQ ID NO: 197719
  chr1:115124231-115124506
  hyper

SEQ ID NO: 395575 - DNA, 195 bp, Homo sapiens; identical to SEQ ID NO: 227433
  chr1:115323253-115323448
  hyper

SEQ ID NO: 395576 - DNA, 239 bp, Homo sapiens
  chr1:116382148-116382387
  hyper
gccttctgggagggggccgctcagaaccgctgggcttccgggtaattcgggcttcgagaaagggcccggcaggaggagaaaggcccctgcaggggctgcacgcaccgcccctgggcgtcgggagtgaggaccaggctgagaactcggggccccggcgtgggcagcctccacgacgctcggcacgggagaaatccgcgtcggcgacgtataggagcgtttgcttctagagaaacaaaagc

SEQ ID NO: 395577 - DNA, 35 bp, Homo sapiens; identical to SEQ ID NO: 227443
  chr1:116519005-116519040
  hyper

SEQ ID NO: 395578 - DNA, 338 bp, Homo sapiens; identical to SEQ ID NO: 197729
  chr1:117209809-117210147
  hyper

SEQ ID NO: 395579 - DNA, 40 bp, Homo sapiens; identical to SEQ ID NO: 227447
  chr1:117215387-117215427
  hyper

SEQ ID NO: 395580 - DNA, 58 bp, Homo sapiens; identical to SEQ ID NO: 227449
  chr1:117664693-117664751
  hyper

SEQ ID NO: 395581 - DNA, 412 bp, Homo sapiens; identical to SEQ ID NO: 227450
  chr1:118148622-118149034
  hyper

SEQ ID NO: 395582 - DNA, 136 bp, Homo sapiens; identical to SEQ ID NO: 278797
  chr1:119527652-119527788
  hyper

SEQ ID NO: 395583 - DNA, 48 bp, Homo sapiens; identical to SEQ ID NO: 278798
  chr1:119527820-119527868
  hyper

SEQ ID NO: 395584 - DNA, 224 bp, Homo sapiens; identical to SEQ ID NO: 278799
  chr1:119535349-119535573
  hyper

SEQ ID NO: 395585 - DNA, 80 bp, Homo sapiens; identical to SEQ ID NO: 197733
  chr1:119544707-119544787
  hyper

SEQ ID NO: 395586 - DNA, 255 bp, Homo sapiens; identical to SEQ ID NO: 227471
  chr1:120254605-120254860
  hyper

SEQ ID NO: 395587 - DNA, 69 bp, Homo sapiens; identical to SEQ ID NO: 227479
  chr1:150849135-150849204
  hyper

SEQ ID NO: 395588 - DNA, 87 bp, Homo sapiens; identical to SEQ ID NO: 227480
  chr1:150898621-150898708
  hyper

SEQ ID NO: 395589 - DNA, 170 bp, Homo sapiens; identical to SEQ ID NO: 227485
  chr1:151032105-151032275
  hyper

SEQ ID NO: 395590 - DNA, 106 bp, Homo sapiens; identical to SEQ ID NO: 227486
  chr1:151042862-151042968
  hyper

SEQ ID NO: 395591 - DNA, 238 bp, Homo sapiens; identical to SEQ ID NO: 197745
  chr1:151043249-151043487
  hyper

SEQ ID NO: 395592 - DNA, 78 bp, Homo sapiens; identical to SEQ ID NO: 227489
  chr1:151138453-151138531
  hyper

SEQ ID NO: 395593 - DNA, 132 bp, Homo sapiens; identical to SEQ ID NO: 227490
  chr1:151170900-151171032
  hyper

SEQ ID NO: 395594 - DNA, 232 bp, Homo sapiens; identical to SEQ ID NO: 227493
  chr1:151483994-151484226
  hyper

SEQ ID NO: 395595 - DNA, 46 bp, Homo sapiens; identical to SEQ ID NO: 387637
  chr1:151566653-151566699
  hyper

SEQ ID NO: 395596 - DNA, 289 bp, Homo sapiens; identical to SEQ ID NO: 227496
  chr1:151584377-151584666
  hyper

SEQ ID NO: 395597 - DNA, 146 bp, Homo sapiens; identical to SEQ ID NO: 278834
  chr1:151689189-151689335
  hyper

SEQ ID NO: 395598 - DNA, 256 bp, Homo sapiens; identical to SEQ ID NO: 221464
  chr1:151763859-151764115
  hyper

SEQ ID NO: 395599 - DNA, 86 bp, Homo sapiens; identical to SEQ ID NO: 278840
  chr1:151811028-151811114
  hyper

SEQ ID NO: 395600 - DNA, 90 bp, Homo sapiens; identical to SEQ ID NO: 278845
  chr1:152084599-152084689
  hyper

SEQ ID NO: 395601 - DNA, 180 bp, Homo sapiens; identical to SEQ ID NO: 227516
  chr1:153631120-153631300
  hyper

SEQ ID NO: 395602 - DNA, 419 bp, Homo sapiens
  chr1:153651023-153651442
  hyper
taaagatcctggattggctcttctgtcactgagtctgggaggggaagcggctgggagggagggttcggagcttggctcgggtcctccacggttccctccggatagccggagacttgggccggccggacgccccttctggcacactccctggggcaggcgctcacgcacgctacaaacacacactcctctttcctccctcgcgcgccctctctcatccttcttcacgaagcgctcactcgcaccctttctctctctctctctctctctctaacacgcacgcacactcccagttgttcacactcgggtcctctccagcccgacgttctcctggcacccacctgctccgcggcgccctgcgcgcccccctcggtcgcgccccttgcgctctcggcccagaccgtcgcagctacagggggcct

SEQ ID NO: 395603 - DNA, 278 bp, Homo sapiens; identical to SEQ ID NO: 227524
  chr1:153963330-153963608
  hyper

SEQ ID NO: 395604 - DNA, 215 bp, Homo sapiens; identical to SEQ ID NO: 227528
  chr1:154377607-154377822
  hyper

SEQ ID NO: 395605 - DNA, 643 bp, Homo sapiens; identical to SEQ ID NO: 227533
  chr1:154909302-154909945
  hyper

SEQ ID NO: 395606 - DNA, 238 bp, Homo sapiens; identical to SEQ ID NO: 227538
  chr1:155051346-155051584
  hyper

SEQ ID NO: 395607 - DNA, 377 bp, Homo sapiens
  chr1:155099556-155099933
  hyper
attcaagagcctgttcgcacggtgtacgcgtgtgttgttacatatactcaggttattagcgctctttgacttatctaaaataagaacggccccctctcgagcccagggtcccgcgtgtcgctcctgcgggcaggcactgatgtgatggacagaggcgtccttagccccggccgcacacgttacacactcgatcacacaaagcgttgcactttattcccggcatctaggcgatgacacaatctccagaacaaagacaacattgacaaacccaacaaaaacaaacagccgcgtgtgtgtggggaggggcagtcaagcgcagagtccgggaaggggatgggggaggaggagagtgtgggaacgcgggcgcccgagcctgg

SEQ ID NO: 395608 - DNA, 261 bp, Homo sapiens
  chr1:155152251-155152512
  hyper
ccacccgctggcagcggcgggaggaggtgaggggcaccagtgccctgcttgagaaccccgacacgggctctgtgtatgtgctgcgtgtccgcggctgcaacaaggccggctacggcgaatacagtgaagatgtgcacctgcacacgcccccggcacctggtgagtgggcaggcacaggtggtcgtgcaaagggcatggggtatgccagggcctaggccctgacggttggttccggtggccgctagagaggccatataacat

SEQ ID NO: 395609 - DNA, 115 bp, Homo sapiens; identical to SEQ ID NO: 227547
  chr1:155278330-155278445
  hyper

SEQ ID NO: 395610 - DNA, 34 bp, Homo sapiens; identical to SEQ ID NO: 227548
  chr1:155278672-155278706
  hyper

SEQ ID NO: 395611 - DNA, 31 bp, Homo sapiens; identical to SEQ ID NO: 227549
  chr1:155830059-155830090
  hyper

SEQ ID NO: 395612 - DNA, 179 bp, Homo sapiens; identical to SEQ ID NO: 227551
  chr1:155904142-155904321
  hyper

SEQ ID NO: 395613 - DNA, 65 bp, Homo sapiens; identical to SEQ ID NO: 227553
  chr1:156023928-156023993
  hyper

SEQ ID NO: 395614 - DNA, 105 bp, Homo sapiens; identical to SEQ ID NO: 221480
  chr1:156084256-156084361
  hyper

SEQ ID NO: 395615 - DNA, 331 bp, Homo sapiens; identical to SEQ ID NO: 221481
  chr1:156084629-156084960
  hyper

SEQ ID NO: 395616 - DNA, 360 bp, Homo sapiens; identical to SEQ ID NO: 227560
  chr1:156307948-156308308
  hyper

SEQ ID NO: 395617 - DNA, 80 bp, Homo sapiens; identical to SEQ ID NO: 227567
  chr1:156427347-156427427
  hyper

SEQ ID NO: 395618 - DNA, 262 bp, Homo sapiens; identical to SEQ ID NO: 278906
  chr1:156541960-156542222
  hyper

SEQ ID NO: 395619 - DNA, 113 bp, Homo sapiens; identical to SEQ ID NO: 221488
  chr1:156542391-156542504
  hyper

SEQ ID NO: 395620 - DNA, 139 bp, Homo sapiens; identical to SEQ ID NO: 227570
  chr1:156571300-156571439
  hyper

SEQ ID NO: 395621 - DNA, 70 bp, Homo sapiens; identical to SEQ ID NO: 278912
  chr1:156611643-156611713
  hyper

SEQ ID NO: 395622 - DNA, 47 bp, Homo sapiens; identical to SEQ ID NO: 278913
  chr1:156612119-156612166
  hyper

SEQ ID NO: 395623 - DNA, 62 bp, Homo sapiens; identical to SEQ ID NO: 197787
  chr1:156647957-156648019
  hyper

SEQ ID NO: 395624 - DNA, 425 bp, Homo sapiens
  chr1:156675831-156676256
  hyper
tggatccagtgggaccactccgtactcagagaggggcttgggagctgcggggttccgggggttagggatctaagtgaggcaacggcgccccctgctggaacaactcggagaggctgggcgggggcggcacggtccccccacccctccaccctgcttcgggctcacgtaatgcctggggactctggaagtagtcgccaggcgactcgctccccttaatgcgctgggcggacattgaagggttaagcaggagcccagggcgcgaggctgggagggcagaggtcacagccaatcacttgacgcaaggtctttattaaaacgctttctctgtcgcttcactcccgagaccccgagggggtctcagtagggggaagggagggaggcggggacagaggcgcggagccctggcgagctgcgccaccacctag

SEQ ID NO: 395625 - DNA, 222 bp, Homo sapiens; identical to SEQ ID NO: 227581
  chr1:156710901-156711123
  hyper

SEQ ID NO: 395626 - DNA, 60 bp, Homo sapiens; identical to SEQ ID NO: 197792
  chr1:156716530-156716590
  hyper

SEQ ID NO: 395627 - DNA, 47 bp, Homo sapiens; identical to SEQ ID NO: 227584
  chr1:156721109-156721156
  hyper

SEQ ID NO: 395628 - DNA, 209 bp, Homo sapiens; identical to SEQ ID NO: 227585
  chr1:156722050-156722259
  hyper

SEQ ID NO: 395629 - DNA, 73 bp, Homo sapiens; identical to SEQ ID NO: 278930
  chr1:156890423-156890496
  hyper

SEQ ID NO: 395630 - DNA, 126 bp, Homo sapiens; identical to SEQ ID NO: 197795
  chr1:157108692-157108818
  hyper

SEQ ID NO: 395631 - DNA, 178 bp, Homo sapiens; identical to SEQ ID NO: 227596
  chr1:158088031-158088209
  hyper

SEQ ID NO: 395632 - DNA, 32 bp, Homo sapiens; identical to SEQ ID NO: 278940
  chr1:159750347-159750379
  hyper

SEQ ID NO: 395633 - DNA, 145 bp, Homo sapiens; identical to SEQ ID NO: 383759
  chr1:159750772-159750917
  hyper

SEQ ID NO: 395634 - DNA, 518 bp, Homo sapiens; identical to SEQ ID NO: 221497
  chr1:159824506-159825024
  hyper

SEQ ID NO: 395635 - DNA, 386 bp, Homo sapiens; identical to SEQ ID NO: 278945
  chr1:159915360-159915746
  hyper

SEQ ID NO: 395636 - DNA, 58 bp, Homo sapiens; identical to SEQ ID NO: 278946
  chr1:159915791-159915849
  hyper

SEQ ID NO: 395637 - DNA, 223 bp, Homo sapiens; identical to SEQ ID NO: 227603
  chr1:160001425-160001648
  hyper

SEQ ID NO: 395638 - DNA, 152 bp, Homo sapiens; identical to SEQ ID NO: 278962
  chr1:161068574-161068726
  hyper

SEQ ID NO: 395639 - DNA, 41 bp, Homo sapiens; identical to SEQ ID NO: 227616
  chr1:161087909-161087950
  hyper

SEQ ID NO: 395640 - DNA, 106 bp, Homo sapiens; identical to SEQ ID NO: 227617
  chr1:161102589-161102695
  hyper

SEQ ID NO: 395641 - DNA, 131 bp, Homo sapiens; identical to SEQ ID NO: 227620
  chr1:161136046-161136177
  hyper

SEQ ID NO: 395642 - DNA, 190 bp, Homo sapiens; identical to SEQ ID NO: 227626
  chr1:161283831-161284021
  hyper

SEQ ID NO: 395643 - DNA, 285 bp, Homo sapiens; identical to SEQ ID NO: 227636
  chr1:161696448-161696733
  hyper

SEQ ID NO: 395644 - DNA, 35 bp, Homo sapiens; identical to SEQ ID NO: 197821
  chr1:161736084-161736119
  hyper

SEQ ID NO: 395645 - DNA, 125 bp, Homo sapiens; identical to SEQ ID NO: 227641
  chr1:162531409-162531534
  hyper

SEQ ID NO: 395646 - DNA, 70 bp, Homo sapiens; identical to SEQ ID NO: 227643
  chr1:163291479-163291549
  hyper

SEQ ID NO: 395647 - DNA, 131 bp, Homo sapiens; identical to SEQ ID NO: 36436
  chr1:164290723-164290854
  hyper

SEQ ID NO: 395648 - DNA, 312 bp, Homo sapiens; identical to SEQ ID NO: 227645
  chr1:164529156-164529468
  hyper

SEQ ID NO: 395649 - DNA, 42 bp, Homo sapiens; identical to SEQ ID NO: 197830
  chr1:165323109-165323151
  hyper

SEQ ID NO: 395650 - DNA, 66 bp, Homo sapiens; identical to SEQ ID NO: 197831
  chr1:165323181-165323247
  hyper

SEQ ID NO: 395651 - DNA, 38 bp, Homo sapiens; identical to SEQ ID NO: 197832
  chr1:165323481-165323519
  hyper

SEQ ID NO: 395652 - DNA, 189 bp, Homo sapiens; identical to SEQ ID NO: 279005
  chr1:165345284-165345473
  hyper

SEQ ID NO: 395653 - DNA, 55 bp, Homo sapiens; identical to SEQ ID NO: 197834
  chr1:165599887-165599942
  hyper

SEQ ID NO: 395654 - DNA, 124 bp, Homo sapiens; identical to SEQ ID NO: 227657
  chr1:165667436-165667560
  hyper

SEQ ID NO: 395655 - DNA, 189 bp, Homo sapiens; identical to SEQ ID NO: 227658
  chr1:165667892-165668081
  hyper

SEQ ID NO: 395656 - DNA, 33 bp, Homo sapiens; identical to SEQ ID NO: 227661
  chr1:166136429-166136462
  hyper

SEQ ID NO: 395657 - DNA, 208 bp, Homo sapiens; identical to SEQ ID NO: 197837
  chr1:166944964-166945172
  hyper

SEQ ID NO: 395658 - DNA, 41 bp, Homo sapiens; identical to SEQ ID NO: 197838
  chr1:167028536-167028577
  hyper

SEQ ID NO: 395659 - DNA, 141 bp, Homo sapiens; identical to SEQ ID NO: 221512
  chr1:167190260-167190401
  hyper

SEQ ID NO: 395660 - DNA, 150 bp, Homo sapiens; identical to SEQ ID NO: 221513
  chr1:167423964-167424114
  hyper

SEQ ID NO: 395661 - DNA, 131 bp, Homo sapiens; identical to SEQ ID NO: 227669
  chr1:167424548-167424679
  hyper

SEQ ID NO: 395662 - DNA, 34 bp, Homo sapiens; identical to SEQ ID NO: 227671
  chr1:167523050-167523084
  hyper

SEQ ID NO: 395663 - DNA, 202 bp, Homo sapiens; identical to SEQ ID NO: 227683
  chr1:169455342-169455544
  hyper

SEQ ID NO: 395664 - DNA, 37 bp, Homo sapiens; identical to SEQ ID NO: 197847
  chr1:170043654-170043691
  hyper

SEQ ID NO: 395665 - DNA, 185 bp, Homo sapiens; identical to SEQ ID NO: 279043
  chr1:170634283-170634468
  hyper

SEQ ID NO: 395666 - DNA, 31 bp, Homo sapiens; identical to SEQ ID NO: 227691
  chr1:170634835-170634866
  hyper

SEQ ID NO: 395667 - DNA, 32 bp, Homo sapiens; identical to SEQ ID NO: 383769
  chr1:171220888-171220920
  hyper

SEQ ID NO: 395668 - DNA, 153 bp, Homo sapiens; identical to SEQ ID NO: 197851
  chr1:171455049-171455202
  hyper

SEQ ID NO: 395669 - DNA, 271 bp, Homo sapiens; identical to SEQ ID NO: 227697
  chr1:171711247-171711518
  hyper

SEQ ID NO: 395670 - DNA, 111 bp, Homo sapiens; identical to SEQ ID NO: 279054
  chr1:172501926-172502037
  hyper

SEQ ID NO: 395671 - DNA, 350 bp, Homo sapiens; identical to SEQ ID NO: 104599
  chr1:172502085-172502435
  hyper

SEQ ID NO: 395672 - DNA, 37 bp, Homo sapiens; identical to SEQ ID NO: 227706
  chr1:173837159-173837196
  hyper

SEQ ID NO: 395673 - DNA, 134 bp, Homo sapiens; identical to SEQ ID NO: 227708
  chr1:174968762-174968896
  hyper

SEQ ID NO: 395674 - DNA, 38 bp, Homo sapiens; identical to SEQ ID NO: 279075
  chr1:179050619-179050657
  hyper

SEQ ID NO: 395675 - DNA, 39 bp, Homo sapiens; identical to SEQ ID NO: 227718
  chr1:179262758-179262797
  hyper

SEQ ID NO: 395676 - DNA, 42 bp, Homo sapiens; identical to SEQ ID NO: 197863
  chr1:179711890-179711932
  hyper

SEQ ID NO: 395677 - DNA, 360 bp, Homo sapiens; identical to SEQ ID NO: 227722
  chr1:179923500-179923860
  hyper

SEQ ID NO: 395678 - DNA, 68 bp, Homo sapiens; identical to SEQ ID NO: 279084
  chr1:180197993-180198061
  hyper

SEQ ID NO: 395679 - DNA, 38 bp, Homo sapiens; identical to SEQ ID NO: 197871
  chr1:181287267-181287305
  hyper

SEQ ID NO: 395680 - DNA, 121 bp, Homo sapiens; identical to SEQ ID NO: 279094
  chr1:181288202-181288323
  hyper

SEQ ID NO: 395681 - DNA, 82 bp, Homo sapiens; identical to SEQ ID NO: 279095
  chr1:182026347-182026429
  hyper

SEQ ID NO: 395682 - DNA, 115 bp, Homo sapiens; identical to SEQ ID NO: 227737
  chr1:182358842-182358957
  hyper

SEQ ID NO: 395683 - DNA, 57 bp, Homo sapiens; identical to SEQ ID NO: 197872
  chr1:182360260-182360317
  hyper

SEQ ID NO: 395684 - DNA, 71 bp, Homo sapiens; identical to SEQ ID NO: 197873
  chr1:182360888-182360959
  hyper

SEQ ID NO: 395685 - DNA, 435 bp, Homo sapiens; identical to SEQ ID NO: 227740
  chr1:182557967-182558402
  hyper

SEQ ID NO: 395686 - DNA, 225 bp, Homo sapiens; identical to SEQ ID NO: 227744
  chr1:182991637-182991862
  hyper

SEQ ID NO: 395687 - DNA, 289 bp, Homo sapiens; identical to SEQ ID NO: 221528
  chr1:182992844-182993133
  hyper

SEQ ID NO: 395688 - DNA, 291 bp, Homo sapiens; identical to SEQ ID NO: 221529
  chr1:183155179-183155470
  hyper

SEQ ID NO: 395689 - DNA, 201 bp, Homo sapiens; identical to SEQ ID NO: 227747
  chr1:183441278-183441479
  hyper

SEQ ID NO: 395690 - DNA, 193 bp, Homo sapiens; identical to SEQ ID NO: 227748
  chr1:183604496-183604689
  hyper

SEQ ID NO: 395691 - DNA, 144 bp, Homo sapiens; identical to SEQ ID NO: 227749
  chr1:183605167-183605311
  hyper

SEQ ID NO: 395692 - DNA, 507 bp, Homo sapiens; identical to SEQ ID NO: 197878
  chr1:184355381-184355888
  hyper

SEQ ID NO: 395693 - DNA, 278 bp, Homo sapiens; identical to SEQ ID NO: 197879
  chr1:184355936-184356214
  hyper

SEQ ID NO: 395694 - DNA, 146 bp, Homo sapiens; identical to SEQ ID NO: 197880
  chr1:184356541-184356687
  hyper

SEQ ID NO: 395695 - DNA, 60 bp, Homo sapiens; identical to SEQ ID NO: 383773
  chr1:184722970-184723030
  hyper

SEQ ID NO: 395696 - DNA, 254 bp, Homo sapiens; identical to SEQ ID NO: 227759
  chr1:185125952-185126206
  hyper

SEQ ID NO: 395697 - DNA, 176 bp, Homo sapiens; identical to SEQ ID NO: 227761
  chr1:185643478-185643654
  hyper

SEQ ID NO: 395698 - DNA, 519 bp, Homo sapiens; identical to SEQ ID NO: 227762
  chr1:185703184-185703703
  hyper

SEQ ID NO: 395699 - DNA, 65 bp, Homo sapiens; identical to SEQ ID NO: 279127
  chr1:186344948-186345013
  hyper

SEQ ID NO: 395700 - DNA, 493 bp, Homo sapiens; identical to SEQ ID NO: 227765
  chr1:186798092-186798585
  hyper

SEQ ID NO: 395701 - DNA, 43 bp, Homo sapiens; identical to SEQ ID NO: 197887
  chr1:190444812-190444855
  hyper

SEQ ID NO: 395702 - DNA, 45 bp, Homo sapiens; identical to SEQ ID NO: 279133
  chr1:190445093-190445138
  hyper

SEQ ID NO: 395703 - DNA, 139 bp, Homo sapiens; identical to SEQ ID NO: 227771
  chr1:193028795-193028934
  hyper

SEQ ID NO: 395704 - DNA, 82 bp, Homo sapiens; identical to SEQ ID NO: 197896
  chr1:200009450-200009532
  hyper

SEQ ID NO: 395705 - DNA, 816 bp, Homo sapiens; identical to SEQ ID NO: 279158
  chr1:201083266-201084082
  hyper

SEQ ID NO: 395706 - DNA, 233 bp, Homo sapiens; identical to SEQ ID NO: 197903
  chr1:201437933-201438166
  hyper

SEQ ID NO: 395707 - DNA, 169 bp, Homo sapiens; identical to SEQ ID NO: 279170
  chr1:201924323-201924492
  hyper

SEQ ID NO: 395708 - DNA, 549 bp, Homo sapiens; identical to SEQ ID NO: 221540
  chr1:202162904-202163453
  hyper

SEQ ID NO: 395709 - DNA, 190 bp, Homo sapiens; identical to SEQ ID NO: 221542
  chr1:202612832-202613022
  hyper

SEQ ID NO: 395710 - DNA, 62 bp, Homo sapiens; identical to SEQ ID NO: 279179
  chr1:202679708-202679770
  hyper

SEQ ID NO: 395711 - DNA, 51 bp, Homo sapiens; identical to SEQ ID NO: 197910
  chr1:202830113-202830164
  hyper

SEQ ID NO: 395712 - DNA, 385 bp, Homo sapiens
  chr1:202830481-202830866
  hyper
ccgttttgcgctgcgggcccttcccaccgaccccccgtgcgcccccggcatcctccccatcgtgcgacaccctcccccgcacagcatccttcaccatggttgatccagtagttgaagttggagggtcgctgactgcagacaccatacgggtctccagcaacaccacgaatcccaacgcgcggttgctggcgggaccttataaatccccggagagccgccggttgtgtctcctggcggggactcccattgggtcgcagctggacagagatcggatcgtcccccgcgcgactctcactgggccaggcccccaccgaggcccgcccctctctccgctattggccagccgcttacgaaacagccccgccgcagcggtcattgggcagtt

SEQ ID NO: 395713 - DNA, 64 bp, Homo sapiens; identical to SEQ ID NO: 197911
  chr1:202858344-202858408
  hyper

SEQ ID NO: 395714 - DNA, 148 bp, Homo sapiens; identical to SEQ ID NO: 227810
  chr1:202976330-202976478
  hyper

SEQ ID NO: 395715 - DNA, 219 bp, Homo sapiens; identical to SEQ ID NO: 227817
  chr1:203830671-203830890
  hyper

SEQ ID NO: 395716 - DNA, 33 bp, Homo sapiens
  chr1:204043041-204043074
  hyper
gacttgggtccttgtggagagggatggcagcct

SEQ ID NO: 395717 - DNA, 188 bp, Homo sapiens; identical to SEQ ID NO: 197919
  chr1:204332591-204332779
  hyper

SEQ ID NO: 395718 - DNA, 200 bp, Homo sapiens; identical to SEQ ID NO: 279200
  chr1:204518656-204518856
  hyper

SEQ ID NO: 395719 - DNA, 65 bp, Homo sapiens; identical to SEQ ID NO: 227831
  chr1:205290855-205290920
  hyper

SEQ ID NO: 395720 - DNA, 288 bp, Homo sapiens; identical to SEQ ID NO: 227842
  chr1:205538140-205538428
  hyper

SEQ ID NO: 395721 - DNA, 88 bp, Homo sapiens; identical to SEQ ID NO: 227847
  chr1:207223723-207223811
  hyper

SEQ ID NO: 395722 - DNA, 208 bp, Homo sapiens; identical to SEQ ID NO: 279219
  chr1:207995189-207995397
  hyper

SEQ ID NO: 395723 - DNA, 257 bp, Homo sapiens; identical to SEQ ID NO: 221561
  chr1:208416772-208417029
  hyper

SEQ ID NO: 395724 - DNA, 54 bp, Homo sapiens; identical to SEQ ID NO: 104925
  chr1:208417907-208417961
  hyper

SEQ ID NO: 395725 - DNA, 55 bp, Homo sapiens; identical to SEQ ID NO: 221563
  chr1:208418731-208418786
  hyper

SEQ ID NO: 395726 - DNA, 218 bp, Homo sapiens; identical to SEQ ID NO: 227854
  chr1:209364148-209364366
  hyper

SEQ ID NO: 395727 - DNA, 103 bp, Homo sapiens; identical to SEQ ID NO: 227856
  chr1:209743000-209743103
  hyper

SEQ ID NO: 395728 - DNA, 42 bp, Homo sapiens; identical to SEQ ID NO: 227862
  chr1:210405541-210405583
  hyper

SEQ ID NO: 395729 - DNA, 89 bp, Homo sapiens; identical to SEQ ID NO: 227866
  chr1:210465689-210465778
  hyper

SEQ ID NO: 395730 - DNA, 127 bp, Homo sapiens; identical to SEQ ID NO: 227867
  chr1:210466018-210466145
  hyper

SEQ ID NO: 395731 - DNA, 221 bp, Homo sapiens; identical to SEQ ID NO: 279238
  chr1:211306898-211307119
  hyper

SEQ ID NO: 395732 - DNA, 150 bp, Homo sapiens; identical to SEQ ID NO: 279239
  chr1:211307539-211307689
  hyper

SEQ ID NO: 395733 - DNA, 117 bp, Homo sapiens; identical to SEQ ID NO: 227870
  chr1:211434031-211434148
  hyper

SEQ ID NO: 395734 - DNA, 118 bp, Homo sapiens; identical to SEQ ID NO: 227872
  chr1:211499931-211500049
  hyper

SEQ ID NO: 395735 - DNA, 149 bp, Homo sapiens; identical to SEQ ID NO: 227873
  chr1:211689002-211689151
  hyper

SEQ ID NO: 395736 - DNA, 189 bp, Homo sapiens; identical to SEQ ID NO: 227874
  chr1:211750953-211751142
  hyper

SEQ ID NO: 395737 - DNA, 296 bp, Homo sapiens; identical to SEQ ID NO: 104963
  chr1:211848657-211848953
  hyper

SEQ ID NO: 395738 - DNA, 735 bp, Homo sapiens; identical to SEQ ID NO: 221566
  chr1:212003416-212004151
  hyper

SEQ ID NO: 395739 - DNA, 74 bp, Homo sapiens; identical to SEQ ID NO: 227879
  chr1:212588336-212588410
  hyper

SEQ ID NO: 395740 - DNA, 277 bp, Homo sapiens; identical to SEQ ID NO: 279255
  chr1:212874266-212874543
  hyper

SEQ ID NO: 395741 - DNA, 155 bp, Homo sapiens; identical to SEQ ID NO: 279258
  chr1:214158625-214158780
  hyper

SEQ ID NO: 395742 - DNA, 41 bp, Homo sapiens; identical to SEQ ID NO: 227889
  chr1:214160834-214160875
  hyper

SEQ ID NO: 395743 - DNA, 351 bp, Homo sapiens; identical to SEQ ID NO: 279272
  chr1:215740687-215741038
  hyper

SEQ ID NO: 395744 - DNA, 105 bp, Homo sapiens; identical to SEQ ID NO: 279277
  chr1:217262878-217262983
  hyper

SEQ ID NO: 395745 - DNA, 166 bp, Homo sapiens; identical to SEQ ID NO: 279278
  chr1:217263356-217263522
  hyper

SEQ ID NO: 395746 - DNA, 334 bp, Homo sapiens; identical to SEQ ID NO: 227910
  chr1:220267776-220268110
  hyper

SEQ ID NO: 395747 - DNA, 85 bp, Homo sapiens; identical to SEQ ID NO: 197966
  chr1:220959916-220960001
  hyper

SEQ ID NO: 395748 - DNA, 74 bp, Homo sapiens; identical to SEQ ID NO: 227923
  chr1:223297159-223297233
  hyper

SEQ ID NO: 395749 - DNA, 82 bp, Homo sapiens; identical to SEQ ID NO: 279297
  chr1:223302695-223302777
  hyper

SEQ ID NO: 395750 - DNA, 176 bp, Homo sapiens; identical to SEQ ID NO: 279299
  chr1:223537487-223537663
  hyper

SEQ ID NO: 395751 - DNA, 220 bp, Homo sapiens; identical to SEQ ID NO: 279300
  chr1:223537693-223537913
  hyper

SEQ ID NO: 395752 - DNA, 36 bp, Homo sapiens; identical to SEQ ID NO: 383794
  chr1:223537946-223537982
  hyper

SEQ ID NO: 395753 - DNA, 271 bp, Homo sapiens; identical to SEQ ID NO: 227928
  chr1:223900415-223900686
  hyper

SEQ ID NO: 395754 - DNA, 53 bp, Homo sapiens; identical to SEQ ID NO: 227931
  chr1:224301981-224302034
  hyper

SEQ ID NO: 395755 - DNA, 150 bp, Homo sapiens; identical to SEQ ID NO: 197972
  chr1:224302336-224302486
  hyper

SEQ ID NO: 395756 - DNA, 289 bp, Homo sapiens; identical to SEQ ID NO: 197981
  chr1:226070382-226070671
  hyper

SEQ ID NO: 395757 - DNA, 34 bp, Homo sapiens; identical to SEQ ID NO: 227944
  chr1:226249797-226249831
  hyper

SEQ ID NO: 395758 - DNA, 35 bp, Homo sapiens; identical to SEQ ID NO: 227945
  chr1:226250417-226250452
  hyper

SEQ ID NO: 395759 - DNA, 56 bp, Homo sapiens; identical to SEQ ID NO: 221594
  chr1:226497394-226497450
  hyper

SEQ ID NO: 395760 - DNA, 282 bp, Homo sapiens; identical to SEQ ID NO: 279342
  chr1:228134409-228134691
  hyper

SEQ ID NO: 395761 - DNA, 207 bp, Homo sapiens; identical to SEQ ID NO: 197993
  chr1:228135899-228136106
  hyper

SEQ ID NO: 395762 - DNA, 119 bp, Homo sapiens; identical to SEQ ID NO: 197994
  chr1:228136152-228136271
  hyper

SEQ ID NO: 395763 - DNA, 31 bp, Homo sapiens; identical to SEQ ID NO: 227959
  chr1:228193571-228193602
  hyper

SEQ ID NO: 395764 - DNA, 149 bp, Homo sapiens; identical to SEQ ID NO: 279347
  chr1:228193977-228194126
  hyper

SEQ ID NO: 395765 - DNA, 112 bp, Homo sapiens; identical to SEQ ID NO: 279350
  chr1:228247886-228247998
  hyper

SEQ ID NO: 395766 - DNA, 33 bp, Homo sapiens; identical to SEQ ID NO: 279351
  chr1:228248269-228248302
  hyper

SEQ ID NO: 395767 - DNA, 178 bp, Homo sapiens; identical to SEQ ID NO: 227980
  chr1:228674803-228674981
  hyper

SEQ ID NO: 395768 - DNA, 708 bp, Homo sapiens; identical to SEQ ID NO: 198001
  chr1:228783332-228784040
  hyper

SEQ ID NO: 395769 - DNA, 40 bp, Homo sapiens; identical to SEQ ID NO: 105183
  chr1:228784106-228784146
  hyper

SEQ ID NO: 395770 - DNA, 156 bp, Homo sapiens; identical to SEQ ID NO: 227990
  chr1:229694643-229694799
  hyper

SEQ ID NO: 395771 - DNA, 94 bp, Homo sapiens; identical to SEQ ID NO: 227991
  chr1:230202416-230202510
  hyper

SEQ ID NO: 395772 - DNA, 219 bp, Homo sapiens; identical to SEQ ID NO: 198009
  chr1:230223230-230223449
  hyper

SEQ ID NO: 395773 - DNA, 34 bp, Homo sapiens; identical to SEQ ID NO: 227998
  chr1:231473772-231473806
  hyper

SEQ ID NO: 395774 - DNA, 91 bp, Homo sapiens; identical to SEQ ID NO: 198013
  chr1:231664200-231664291
  hyper

SEQ ID NO: 395775 - DNA, 102 bp, Homo sapiens; identical to SEQ ID NO: 228000
  chr1:231762650-231762752
  hyper

SEQ ID NO: 395776 - DNA, 91 bp, Homo sapiens
  chr1:232766006-232766097
  hyper
gtcagtctcaccgtccgcccggctccgggcgcagccggtgcgctgttcccaggccccgcggcgcgcgggagctgcgcgtccaggaggggcc

SEQ ID NO: 395777 - DNA, 277 bp, Homo sapiens; identical to SEQ ID NO: 228006
  chr1:233086110-233086387
  hyper

SEQ ID NO: 395778 - DNA, 138 bp, Homo sapiens; identical to SEQ ID NO: 228015
  chr1:234743048-234743186
  hyper

SEQ ID NO: 395779 - DNA, 211 bp, Homo sapiens; identical to SEQ ID NO: 228016
  chr1:234744132-234744343
  hyper

SEQ ID NO: 395780 - DNA, 141 bp, Homo sapiens; identical to SEQ ID NO: 198023
  chr1:234828214-234828355
  hyper

SEQ ID NO: 395781 - DNA, 195 bp, Homo sapiens; identical to SEQ ID NO: 228018
  chr1:235257187-235257382
  hyper

SEQ ID NO: 395782 - DNA, 110 bp, Homo sapiens; identical to SEQ ID NO: 228020
  chr1:235491613-235491723
  hyper

SEQ ID NO: 395783 - DNA, 45 bp, Homo sapiens; identical to SEQ ID NO: 198027
  chr1:236305443-236305488
  hyper

SEQ ID NO: 395784 - DNA, 85 bp, Homo sapiens; identical to SEQ ID NO: 228028
  chr1:236305805-236305890
  hyper

SEQ ID NO: 395785 - DNA, 79 bp, Homo sapiens; identical to SEQ ID NO: 228030
  chr1:236445121-236445200
  hyper

SEQ ID NO: 395786 - DNA, 166 bp, Homo sapiens; identical to SEQ ID NO: 279418
  chr1:238027762-238027928
  hyper

SEQ ID NO: 395787 - DNA, 33 bp, Homo sapiens; identical to SEQ ID NO: 221633
  chr1:241588237-241588270
  hyper

SEQ ID NO: 395788 - DNA, 306 bp, Homo sapiens; identical to SEQ ID NO: 228040
  chr1:241682870-241683176
  hyper

SEQ ID NO: 395789 - DNA, 185 bp, Homo sapiens; identical to SEQ ID NO: 228041
  chr1:242011573-242011758
  hyper

SEQ ID NO: 395790 - DNA, 65 bp, Homo sapiens; identical to SEQ ID NO: 228049
  chr1:244615535-244615600
  hyper

SEQ ID NO: 395791 - DNA, 150 bp, Homo sapiens; identical to SEQ ID NO: 228051
  chr1:244998150-244998300
  hyper

SEQ ID NO: 395792 - DNA, 95 bp, Homo sapiens; identical to SEQ ID NO: 228052
  chr1:245028045-245028140
  hyper

SEQ ID NO: 395793 - DNA, 330 bp, Homo sapiens; identical to SEQ ID NO: 221641
  chr1:246887311-246887641
  hyper

SEQ ID NO: 395794 - DNA, 137 bp, Homo sapiens; identical to SEQ ID NO: 228064
  chr1:247536197-247536334
  hyper

SEQ ID NO: 395795 - DNA, 375 bp, Homo sapiens; identical to SEQ ID NO: 228067
  chr1:249120445-249120820
  hyper

SEQ ID NO: 395796 - DNA, 123 bp, Homo sapiens; identical to SEQ ID NO: 228068
  chr1:249167654-249167777
  hyper

SEQ ID NO: 395797 - DNA, 344 bp, Homo sapiens; identical to SEQ ID NO: 228072
  chr2:264740-265084
  hyper

SEQ ID NO: 395798 - DNA, 91 bp, Homo sapiens; identical to SEQ ID NO: 279463
  chr2:289132-289223
  hyper

SEQ ID NO: 395799 - DNA, 239 bp, Homo sapiens; identical to SEQ ID NO: 198052
  chr2:677555-677794
  hyper

SEQ ID NO: 395800 - DNA, 118 bp, Homo sapiens; identical to SEQ ID NO: 228086
  chr2:3383399-3383517
  hyper

SEQ ID NO: 395801 - DNA, 161 bp, Homo sapiens; identical to SEQ ID NO: 221651
  chr2:3465103-3465264
  hyper

SEQ ID NO: 395802 - DNA, 35 bp, Homo sapiens; identical to SEQ ID NO: 198055
  chr2:5832394-5832429
  hyper

SEQ ID NO: 395803 - DNA, 60 bp, Homo sapiens; identical to SEQ ID NO: 198056
  chr2:5832655-5832715
  hyper

SEQ ID NO: 395804 - DNA, 665 bp, Homo sapiens; identical to SEQ ID NO: 221657
  chr2:8818829-8819494
  hyper

SEQ ID NO: 395805 - DNA, 169 bp, Homo sapiens; identical to SEQ ID NO: 198061
  chr2:8821592-8821761
  hyper

SEQ ID NO: 395806 - DNA, 709 bp, Homo sapiens; identical to SEQ ID NO: 198062
  chr2:8821976-8822685
  hyper

SEQ ID NO: 395807 - DNA, 136 bp, Homo sapiens; identical to SEQ ID NO: 198063
  chr2:8823634-8823770
  hyper

SEQ ID NO: 395808 - DNA, 208 bp, Homo sapiens; identical to SEQ ID NO: 198064
  chr2:8825635-8825843
  hyper

SEQ ID NO: 395809 - DNA, 459 bp, Homo sapiens; identical to SEQ ID NO: 221662
  chr2:9144090-9144549
  hyper

SEQ ID NO: 395810 - DNA, 298 bp, Homo sapiens; identical to SEQ ID NO: 387722
  chr2:9347695-9347993
  hyper

SEQ ID NO: 395811 - DNA, 123 bp, Homo sapiens; identical to SEQ ID NO: 279496
  chr2:9348023-9348146
  hyper

SEQ ID NO: 395812 - DNA, 196 bp, Homo sapiens; identical to SEQ ID NO: 228102
  chr2:9695939-9696135
  hyper

SEQ ID NO: 395813 - DNA, 73 bp, Homo sapiens; identical to SEQ ID NO: 198075
  chr2:10220687-10220760
  hyper

SEQ ID NO: 395814 - DNA, 512 bp, Homo sapiens; identical to SEQ ID NO: 279506
  chr2:10443618-10444130
  hyper

SEQ ID NO: 395815 - DNA, 165 bp, Homo sapiens; identical to SEQ ID NO: 279507
  chr2:10444193-10444358
  hyper

SEQ ID NO: 395816 - DNA, 150 bp, Homo sapiens; identical to SEQ ID NO: 228114
  chr2:10953101-10953251
  hyper

SEQ ID NO: 395817 - DNA, 102 bp, Homo sapiens; identical to SEQ ID NO: 279517
  chr2:11270218-11270320
  hyper

SEQ ID NO: 395818 - DNA, 33 bp, Homo sapiens; identical to SEQ ID NO: 198081
  chr2:11621413-11621446
  hyper

SEQ ID NO: 395819 - DNA, 53 bp, Homo sapiens; identical to SEQ ID NO: 228128
  chr2:16080083-16080136
  hyper

SEQ ID NO: 395820 - DNA, 87 bp, Homo sapiens; identical to SEQ ID NO: 105506
  chr2:16080304-16080391
  hyper

SEQ ID NO: 395821 - DNA, 152 bp, Homo sapiens; identical to SEQ ID NO: 221679
  chr2:16080622-16080774
  hyper

SEQ ID NO: 395822 - DNA, 193 bp, Homo sapiens; identical to SEQ ID NO: 198096
  chr2:18741865-18742058
  hyper

SEQ ID NO: 395823 - DNA, 193 bp, Homo sapiens; identical to SEQ ID NO: 228146
  chr2:20101765-20101958
  hyper

SEQ ID NO: 395824 - DNA, 42 bp, Homo sapiens; identical to SEQ ID NO: 198103
  chr2:20190155-20190197
  hyper

SEQ ID NO: 395825 - DNA, 329 bp, Homo sapiens; identical to SEQ ID NO: 279558
  chr2:20212119-20212448
  hyper

SEQ ID NO: 395826 - DNA, 80 bp, Homo sapiens; identical to SEQ ID NO: 228150
  chr2:20251798-20251878
  hyper

SEQ ID NO: 395827 - DNA, 597 bp, Homo sapiens; identical to SEQ ID NO: 228151
  chr2:20424296-20424893
  hyper

SEQ ID NO: 395828 - DNA, 361 bp, Homo sapiens; identical to SEQ ID NO: 198108
  chr2:20646413-20646774
  hyper

SEQ ID NO: 395829 - DNA, 32 bp, Homo sapiens; identical to SEQ ID NO: 228161
  chr2:23886284-23886316
  hyper

SEQ ID NO: 395830 - DNA, 486 bp, Homo sapiens; identical to SEQ ID NO: 228166
  chr2:24299777-24300263
  hyper

SEQ ID NO: 395831 - DNA, 33 bp, Homo sapiens; identical to SEQ ID NO: 198118
  chr2:24307619-24307652
  hyper

SEQ ID NO: 395832 - DNA, 81 bp, Homo sapiens; identical to SEQ ID NO: 228168
  chr2:24346201-24346282
  hyper

SEQ ID NO: 395833 - DNA, 181 bp, Homo sapiens; identical to SEQ ID NO: 228169
  chr2:24583444-24583625
  hyper

SEQ ID NO: 395834 - DNA, 132 bp, Homo sapiens; identical to SEQ ID NO: 228170
  chr2:25016064-25016196
  hyper

SEQ ID NO: 395835 - DNA, 79 bp, Homo sapiens; identical to SEQ ID NO: 198120
  chr2:25265055-25265134
  hyper

SEQ ID NO: 395836 - DNA, 120 bp, Homo sapiens; identical to SEQ ID NO: 198121
  chr2:25440006-25440126
  hyper

SEQ ID NO: 395837 - DNA, 149 bp, Homo sapiens; identical to SEQ ID NO: 198122
  chr2:25457152-25457301
  hyper

SEQ ID NO: 395838 - DNA, 139 bp, Homo sapiens; identical to SEQ ID NO: 198123
  chr2:25458563-25458702
  hyper

SEQ ID NO: 395839 - DNA, 52 bp, Homo sapiens; identical to SEQ ID NO: 387734
  chr2:25464537-25464589
  hyper

SEQ ID NO: 395840 - DNA, 162 bp, Homo sapiens; identical to SEQ ID NO: 198133
  chr2:25470449-25470611
  hyper

SEQ ID NO: 395841 - DNA, 192 bp, Homo sapiens; identical to SEQ ID NO: 198134
  chr2:25470892-25471084
  hyper

SEQ ID NO: 395842 - DNA, 90 bp, Homo sapiens; identical to SEQ ID NO: 198135
  chr2:25497816-25497906
  hyper

SEQ ID NO: 395843 - DNA, 237 bp, Homo sapiens; identical to SEQ ID NO: 198136
  chr2:25505304-25505541
  hyper

SEQ ID NO: 395844 - DNA, 106 bp, Homo sapiens; identical to SEQ ID NO: 228173
  chr2:25565423-25565529
  hyper

SEQ ID NO: 395845 - DNA, 217 bp, Homo sapiens; identical to SEQ ID NO: 228176
  chr2:26101334-26101551
  hyper

SEQ ID NO: 395846 - DNA, 330 bp, Homo sapiens; identical to SEQ ID NO: 221709
  chr2:26395999-26396329
  hyper

SEQ ID NO: 395847 - DNA, 143 bp, Homo sapiens; identical to SEQ ID NO: 228179
  chr2:26467720-26467863
  hyper

SEQ ID NO: 395848 - DNA, 197 bp, Homo sapiens; identical to SEQ ID NO: 228181
  chr2:26568767-26568964
  hyper

SEQ ID NO: 395849 - DNA, 185 bp, Homo sapiens; identical to SEQ ID NO: 228182
  chr2:26726521-26726706
  hyper

SEQ ID NO: 395850 - DNA, 141 bp, Homo sapiens; identical to SEQ ID NO: 228184
  chr2:27008750-27008891
  hyper

SEQ ID NO: 395851 - DNA, 142 bp, Homo sapiens
  chr2:27072010-27072152
  hyper
ggggcgggggcgggtccgaagaacgagggaaggagctcggtgcaggtggcgcccggcgaggctggttctgctgaagaatggggaggggaggagggatgcaggcgggtggaggccgcctgggtttgaggagggaggacgggag

SEQ ID NO: 395852 - DNA, 42 bp, Homo sapiens; identical to SEQ ID NO: 228189
  chr2:27273188-27273230
  hyper

SEQ ID NO: 395853 - DNA, 224 bp, Homo sapiens; identical to SEQ ID NO: 228197
  chr2:27440128-27440352
  hyper

SEQ ID NO: 395854 - DNA, 226 bp, Homo sapiens; identical to SEQ ID NO: 279632
  chr2:27485733-27485959
  hyper

SEQ ID NO: 395855 - DNA, 544 bp, Homo sapiens; identical to SEQ ID NO: 228199
  chr2:27592814-27593358
  hyper

SEQ ID NO: 395856 - DNA, 224 bp, Homo sapiens; identical to SEQ ID NO: 228201
  chr2:27651189-27651413
  hyper

SEQ ID NO: 395857 - DNA, 484 bp, Homo sapiens; identical to SEQ ID NO: 228205
  chr2:27851762-27852246
  hyper

SEQ ID NO: 395858 - DNA, 214 bp, Homo sapiens; identical to SEQ ID NO: 228208
  chr2:28113199-28113413
  hyper

SEQ ID NO: 395859 - DNA, 185 bp, Homo sapiens; identical to SEQ ID NO: 228215
  chr2:29093424-29093609
  hyper

SEQ ID NO: 395860 - DNA, 351 bp, Homo sapiens; identical to SEQ ID NO: 228225
  chr2:32235911-32236262
  hyper

SEQ ID NO: 395861 - DNA, 429 bp, Homo sapiens; identical to SEQ ID NO: 228226
  chr2:32264569-32264998
  hyper

SEQ ID NO: 395862 - DNA, 318 bp, Homo sapiens; identical to SEQ ID NO: 228227
  chr2:32288258-32288576
  hyper

SEQ ID NO: 395863 - DNA, 182 bp, Homo sapiens; identical to SEQ ID NO: 228229
  chr2:32581580-32581762
  hyper

SEQ ID NO: 395864 - DNA, 139 bp, Homo sapiens; identical to SEQ ID NO: 198160
  chr2:33171660-33171799
  hyper

SEQ ID NO: 395865 - DNA, 142 bp, Homo sapiens; identical to SEQ ID NO: 198161
  chr2:33172105-33172247
  hyper

SEQ ID NO: 395866 - DNA, 258 bp, Homo sapiens; identical to SEQ ID NO: 228234
  chr2:36825136-36825394
  hyper

SEQ ID NO: 395867 - DNA, 230 bp, Homo sapiens; identical to SEQ ID NO: 228235
  chr2:37194141-37194371
  hyper

SEQ ID NO: 395868 - DNA, 77 bp, Homo sapiens; identical to SEQ ID NO: 279678
  chr2:37571656-37571733
  hyper

SEQ ID NO: 395869 - DNA, 77 bp, Homo sapiens; identical to SEQ ID NO: 279679
  chr2:37571910-37571987
  hyper

SEQ ID NO: 395870 - DNA, 163 bp, Homo sapiens; identical to SEQ ID NO: 228239
  chr2:37572275-37572438
  hyper

SEQ ID NO: 395871 - DNA, 193 bp, Homo sapiens; identical to SEQ ID NO: 228245
  chr2:39005144-39005337
  hyper

SEQ ID NO: 395872 - DNA, 379 bp, Homo sapiens; identical to SEQ ID NO: 228250
  chr2:42068163-42068542
  hyper

SEQ ID NO: 395873 - DNA, 47 bp, Homo sapiens; identical to SEQ ID NO: 198170
  chr2:42329271-42329318
  hyper

SEQ ID NO: 395874 - DNA, 245 bp, Homo sapiens; identical to SEQ ID NO: 228259
  chr2:42795911-42796156
  hyper

SEQ ID NO: 395875 - DNA, 81 bp, Homo sapiens; identical to SEQ ID NO: 198176
  chr2:43446676-43446757
  hyper

SEQ ID NO: 395876 - DNA, 433 bp, Homo sapiens; identical to SEQ ID NO: 198179
  chr2:43822951-43823384
  hyper

SEQ ID NO: 395877 - DNA, 80 bp, Homo sapiens; identical to SEQ ID NO: 228276
  chr2:45030318-45030398
  hyper

SEQ ID NO: 395878 - DNA, 48 bp, Homo sapiens; identical to SEQ ID NO: 279716
  chr2:45163155-45163203
  hyper

SEQ ID NO: 395879 - DNA, 531 bp, Homo sapiens; identical to SEQ ID NO: 279720
  chr2:45180203-45180734
  hyper

SEQ ID NO: 395880 - DNA, 250 bp, Homo sapiens; identical to SEQ ID NO: 228288
  chr2:45182675-45182925
  hyper

SEQ ID NO: 395881 - DNA, 57 bp, Homo sapiens; identical to SEQ ID NO: 279723
  chr2:45231725-45231782
  hyper

SEQ ID NO: 395882 - DNA, 82 bp, Homo sapiens; identical to SEQ ID NO: 279724
  chr2:45236886-45236968
  hyper

SEQ ID NO: 395883 - DNA, 608 bp, Homo sapiens; identical to SEQ ID NO: 228302
  chr2:46727082-46727690
  hyper

SEQ ID NO: 395884 - DNA, 63 bp, Homo sapiens; identical to SEQ ID NO: 279735
  chr2:46770636-46770699
  hyper

SEQ ID NO: 395885 - DNA, 128 bp, Homo sapiens; identical to SEQ ID NO: 279736
  chr2:46770831-46770959
  hyper

SEQ ID NO: 395886 - DNA, 56 bp, Homo sapiens; identical to SEQ ID NO: 228303
  chr2:46926176-46926232
  hyper

SEQ ID NO: 395887 - DNA, 122 bp, Homo sapiens; identical to SEQ ID NO: 228305
  chr2:47168426-47168548
  hyper

SEQ ID NO: 395888 - DNA, 97 bp, Homo sapiens; identical to SEQ ID NO: 228306
  chr2:47169106-47169203
  hyper

SEQ ID NO: 395889 - DNA, 438 bp, Homo sapiens; identical to SEQ ID NO: 221743
  chr2:47630103-47630541
  hyper

SEQ ID NO: 395890 - DNA, 155 bp, Homo sapiens; identical to SEQ ID NO: 221744
  chr2:47635539-47635694
  hyper

SEQ ID NO: 395891 - DNA, 147 bp, Homo sapiens; identical to SEQ ID NO: 221746
  chr2:47639552-47639699
  hyper

SEQ ID NO: 395892 - DNA, 134 bp, Homo sapiens; identical to SEQ ID NO: 221748
  chr2:47643434-47643568
  hyper

SEQ ID NO: 395893 - DNA, 67 bp, Homo sapiens
  chr2:47656880-47656947
  hyper
attgaatttagtggaagcttttgtagaagatgcagaattgaggcagactttacaagaagatttactt

SEQ ID NO: 395894 - DNA, 60 bp, Homo sapiens
  chr2:47657020-47657080
  hyper
gactctatcagggtataaatcaactacctaatgttatacaggctctggaaaaacatgaag

SEQ ID NO: 395895 - DNA, 110 bp, Homo sapiens; identical to SEQ ID NO: 221750
  chr2:47672686-47672796
  hyper

SEQ ID NO: 395896 - DNA, 98 bp, Homo sapiens; identical to SEQ ID NO: 221753
  chr2:47698103-47698201
  hyper

SEQ ID NO: 395897 - DNA, 450 bp, Homo sapiens; identical to SEQ ID NO: 221758
  chr2:47709917-47710367
  hyper

SEQ ID NO: 395898 - DNA, 192 bp, Homo sapiens; identical to SEQ ID NO: 198200
  chr2:48009756-48009948
  hyper

SEQ ID NO: 395899 - DNA, 197 bp, Homo sapiens; identical to SEQ ID NO: 221762
  chr2:48018065-48018262
  hyper

SEQ ID NO: 395900 - DNA, 2545 bp, Homo sapiens; identical to SEQ ID NO: 221764
  chr2:48025749-48028294
  hyper

SEQ ID NO: 395901 - DNA, 266 bp, Homo sapiens; identical to SEQ ID NO: 221765
  chr2:48030558-48030824
  hyper

SEQ ID NO: 395902 - DNA, 90 bp, Homo sapiens; identical to SEQ ID NO: 221767
  chr2:48032756-48032846
  hyper

SEQ ID NO: 395903 - DNA, 750 bp, Homo sapiens; identical to SEQ ID NO: 221768
  chr2:48033342-48034092
  hyper

SEQ ID NO: 395904 - DNA, 227 bp, Homo sapiens; identical to SEQ ID NO: 228315
  chr2:48131259-48131486
  hyper

SEQ ID NO: 395905 - DNA, 55 bp, Homo sapiens; identical to SEQ ID NO: 228316
  chr2:48543151-48543206
  hyper

SEQ ID NO: 395906 - DNA, 111 bp, Homo sapiens; identical to SEQ ID NO: 279779
  chr2:48757430-48757541
  hyper

SEQ ID NO: 395907 - DNA, 267 bp, Homo sapiens; identical to SEQ ID NO: 279780
  chr2:48757626-48757893
  hyper

SEQ ID NO: 395908 - DNA, 133 bp, Homo sapiens; identical to SEQ ID NO: 198202
  chr2:50573244-50573377
  hyper

SEQ ID NO: 395909 - DNA, 251 bp, Homo sapiens; identical to SEQ ID NO: 198204
  chr2:50629607-50629858
  hyper

SEQ ID NO: 395910 - DNA, 50 bp, Homo sapiens; identical to SEQ ID NO: 279784
  chr2:51259211-51259261
  hyper

SEQ ID NO: 395911 - DNA, 235 bp, Homo sapiens; identical to SEQ ID NO: 198205
  chr2:51259566-51259801
  hyper

SEQ ID NO: 395912 - DNA, 41 bp, Homo sapiens; identical to SEQ ID NO: 198206
  chr2:54682463-54682504
  hyper

SEQ ID NO: 395913 - DNA, 140 bp, Homo sapiens; identical to SEQ ID NO: 221769
  chr2:54683032-54683172
  hyper

SEQ ID NO: 395914 - DNA, 101 bp, Homo sapiens; identical to SEQ ID NO: 279798
  chr2:55646327-55646428
  hyper

SEQ ID NO: 395915 - DNA, 680 bp, Homo sapiens; identical to SEQ ID NO: 279799
  chr2:55646458-55647138
  hyper

SEQ ID NO: 395916 - DNA, 52 bp, Homo sapiens; identical to SEQ ID NO: 228333
  chr2:55746535-55746587
  hyper

SEQ ID NO: 395917 - DNA, 71 bp, Homo sapiens; identical to SEQ ID NO: 105977
  chr2:55921038-55921109
  hyper

SEQ ID NO: 395918 - DNA, 456 bp, Homo sapiens; identical to SEQ ID NO: 279806
  chr2:56411799-56412255
  hyper

SEQ ID NO: 395919 - DNA, 284 bp, Homo sapiens; identical to SEQ ID NO: 279807
  chr2:56412327-56412611
  hyper

SEQ ID NO: 395920 - DNA, 232 bp, Homo sapiens; identical to SEQ ID NO: 228341
  chr2:58274307-58274539
  hyper

SEQ ID NO: 395921 - DNA, 252 bp, Homo sapiens; identical to SEQ ID NO: 228353
  chr2:60983180-60983432
  hyper

SEQ ID NO: 395922 - DNA, 213 bp, Homo sapiens; identical to SEQ ID NO: 228354
  chr2:61108072-61108285
  hyper

SEQ ID NO: 395923 - DNA, 77 bp, Homo sapiens; identical to SEQ ID NO: 198225
  chr2:61109819-61109896
  hyper

SEQ ID NO: 395924 - DNA, 253 bp, Homo sapiens; identical to SEQ ID NO: 228358
  chr2:61244606-61244859
  hyper

SEQ ID NO: 395925 - DNA, 286 bp, Homo sapiens; identical to SEQ ID NO: 228359
  chr2:61293059-61293345
  hyper

SEQ ID NO: 395926 - DNA, 508 bp, Homo sapiens
  chr2:61990960-61991468
  hyper
ggcgaagacagggctcgctgacgcccccggtcgcccgcgcctcttcccacagctctccgaggagcccagctaccggaaacacgccacatcaggcctcggaattctgggcatcggacggacagctcgtgacctcagaaggaggaaaacggtcaccttctgaaagaaacacgaactcctctttcctgtatcagaacatttctcattcacctgagcgcggcgtttctatcctgagatgttgggaggaggttcgaggtgggcggggtgacggttttctcttggaaatgaaaaacagcctttcctgctacccctgcccgctcacacaggcgagacttggagtctgccccgcggaaagccgtttctatgggtgacgacgtatggcaacgcgtctaagggaacgtcggcgagtcgactattgtgttcccaaagtcgccctgaaatgaggacagaagttcgggggagccgggggcgtagagtaaaggcacgatctgattggcccgcggccgcgcaa

SEQ ID NO: 395927 - DNA, 78 bp, Homo sapiens; identical to SEQ ID NO: 228363
  chr2:61991708-61991786
  hyper

SEQ ID NO: 395928 - DNA, 178 bp, Homo sapiens; identical to SEQ ID NO: 228366
  chr2:62132600-62132778
  hyper

SEQ ID NO: 395929 - DNA, 423 bp, Homo sapiens; identical to SEQ ID NO: 228367
  chr2:62422576-62422999
  hyper

SEQ ID NO: 395930 - DNA, 801 bp, Homo sapiens; identical to SEQ ID NO: 228368
  chr2:62424205-62425006
  hyper

SEQ ID NO: 395931 - DNA, 850 bp, Homo sapiens; identical to SEQ ID NO: 279842
  chr2:63276492-63277342
  hyper

SEQ ID NO: 395932 - DNA, 489 bp, Homo sapiens; identical to SEQ ID NO: 228377
  chr2:63815746-63816235
  hyper

SEQ ID NO: 395933 - DNA, 86 bp, Homo sapiens; identical to SEQ ID NO: 228378
  chr2:64067905-64067991
  hyper

SEQ ID NO: 395934 - DNA, 94 bp, Homo sapiens; identical to SEQ ID NO: 198240
  chr2:64455371-64455465
  hyper

SEQ ID NO: 395935 - DNA, 34 bp, Homo sapiens; identical to SEQ ID NO: 198241
  chr2:64455661-64455695
  hyper

SEQ ID NO: 395936 - DNA, 84 bp, Homo sapiens; identical to SEQ ID NO: 228381
  chr2:64681068-64681152
  hyper

SEQ ID NO: 395937 - DNA, 142 bp, Homo sapiens; identical to SEQ ID NO: 221780
  chr2:64872367-64872509
  hyper

SEQ ID NO: 395938 - DNA, 357 bp, Homo sapiens; identical to SEQ ID NO: 221781
  chr2:65086836-65087193
  hyper

SEQ ID NO: 395939 - DNA, 40 bp, Homo sapiens; identical to SEQ ID NO: 228386
  chr2:65659688-65659728
  hyper

SEQ ID NO: 395940 - DNA, 178 bp, Homo sapiens; identical to SEQ ID NO: 279867
  chr2:66662571-66662749
  hyper

SEQ ID NO: 395941 - DNA, 98 bp, Homo sapiens; identical to SEQ ID NO: 198251
  chr2:66662824-66662922
  hyper

SEQ ID NO: 395942 - DNA, 41 bp, Homo sapiens; identical to SEQ ID NO: 228395
  chr2:68384727-68384768
  hyper

SEQ ID NO: 395943 - DNA, 309 bp, Homo sapiens
  chr2:69240916-69241225
  hyper
gcggcggcggagtgctgcgcctttgttggggcgcgctcctcccagcctcggctccagagcccgcagccgaggcgacgccgcttgctcggaaggggacagacttcttttctgtcttgctttctgtgtcccaggagcaggcaaggggcttggaggatgctattgtcttgctgagtttctgtgactccctcccgtgttggtgggaaaggcttgcttaccaaaggcagaacttgcaggcacaggcactcctaaagttagaggcttgggcattttaaagccaatcgtcgcattttgtttttgtttttgtttttt

SEQ ID NO: 395944 - DNA, 72 bp, Homo sapiens; identical to SEQ ID NO: 228402
  chr2:69664548-69664620
  hyper

SEQ ID NO: 395945 - DNA, 35 bp, Homo sapiens; identical to SEQ ID NO: 228404
  chr2:69969207-69969242
  hyper

SEQ ID NO: 395946 - DNA, 275 bp, Homo sapiens; identical to SEQ ID NO: 228405
  chr2:70056451-70056726
  hyper

SEQ ID NO: 395947 - DNA, 200 bp, Homo sapiens
  chr2:70418116-70418316
  hyper
cgcctgccgcggccttttacaaacggggccaaactgttcgctgtaacgacaatcgttattggtcagagccgcccacgcgcggcaagtggccgcccacctgagctcgcgttgtcttatgggagttttagttctctccttcagagaccgctgagacactgggggaatgcggtggtagaacatacgccgacctagcggctgta

SEQ ID NO: 395948 - DNA, 409 bp, Homo sapiens; identical to SEQ ID NO: 228413
  chr2:70520657-70521066
  hyper

SEQ ID NO: 395949 - DNA, 322 bp, Homo sapiens; identical to SEQ ID NO: 228414
  chr2:71295259-71295581
  hyper

SEQ ID NO: 395950 - DNA, 53 bp, Homo sapiens; identical to SEQ ID NO: 221793
  chr2:71502836-71502889
  hyper

SEQ ID NO: 395951 - DNA, 40 bp, Homo sapiens; identical to SEQ ID NO: 198270
  chr2:71504818-71504858
  hyper

SEQ ID NO: 395952 - DNA, 300 bp, Homo sapiens; identical to SEQ ID NO: 279899
  chr2:71693924-71694224
  hyper

SEQ ID NO: 395953 - DNA, 83 bp, Homo sapiens; identical to SEQ ID NO: 387778
  chr2:72375815-72375898
  hyper

SEQ ID NO: 395954 - DNA, 198 bp, Homo sapiens; identical to SEQ ID NO: 279906
  chr2:72376168-72376366
  hyper

SEQ ID NO: 395955 - DNA, 39 bp, Homo sapiens; identical to SEQ ID NO: 198281
  chr2:73141975-73142014
  hyper

SEQ ID NO: 395956 - DNA, 191 bp, Homo sapiens; identical to SEQ ID NO: 198282
  chr2:73142102-73142293
  hyper

SEQ ID NO: 395957 - DNA, 78 bp, Homo sapiens
  chr2:73143409-73143487
  hyper
ccgtggccttggggcgtcaggaggcccaacccagatctgcgcgcccaggcagcgctcaggccgctagaatggaccccg

SEQ ID NO: 395958 - DNA, 307 bp, Homo sapiens; identical to SEQ ID NO: 228443
  chr2:74007133-74007440
  hyper

SEQ ID NO: 395959 - DNA, 35 bp, Homo sapiens; identical to SEQ ID NO: 228447
  chr2:74405756-74405791
  hyper

SEQ ID NO: 395960 - DNA, 146 bp, Homo sapiens; identical to SEQ ID NO: 228448
  chr2:74406031-74406177
  hyper

SEQ ID NO: 395961 - DNA, 41 bp, Homo sapiens; identical to SEQ ID NO: 228456
  chr2:74735289-74735330
  hyper

SEQ ID NO: 395962 - DNA, 104 bp, Homo sapiens; identical to SEQ ID NO: 228461
  chr2:74756283-74756387
  hyper

SEQ ID NO: 395963 - DNA, 142 bp, Homo sapiens; identical to SEQ ID NO: 198306
  chr2:74776396-74776538
  hyper

SEQ ID NO: 395964 - DNA, 74 bp, Homo sapiens; identical to SEQ ID NO: 279958
  chr2:75787357-75787431
  hyper

SEQ ID NO: 395965 - DNA, 154 bp, Homo sapiens; identical to SEQ ID NO: 228470
  chr2:75873843-75873997
  hyper

SEQ ID NO: 395966 - DNA, 115 bp, Homo sapiens; identical to SEQ ID NO: 279966
  chr2:85107819-85107934
  hyper

SEQ ID NO: 395967 - DNA, 91 bp, Homo sapiens; identical to SEQ ID NO: 228477
  chr2:85154122-85154213
  hyper

SEQ ID NO: 395968 - DNA, 101 bp, Homo sapiens; identical to SEQ ID NO: 198314
  chr2:85359942-85360043
  hyper

SEQ ID NO: 395969 - DNA, 325 bp, Homo sapiens
  chr2:85360470-85360795
  hyper
cggcccccctgcccagcccggcggtccctcctccctccctccccgctcgcccctccccggcgggccaggggctgggacgccccggcggagcaggcggcggcggtggcgagttggggagccctaggctcggcgctgccggaggggcccgagccgagccgcctgcgccccggccgggcagcgccgggcccgcttcccgcggggccacgccctgtcaaactttgttgcggcggctagcgcagcgggcccgcaagcgggcgggaggggcgccgggccgggccgggcagggcgcgggcggctaggggctccgagagcggcggccccggcc

SEQ ID NO: 395970 - DNA, 198 bp, Homo sapiens; identical to SEQ ID NO: 228479
  chr2:85553952-85554150
  hyper

SEQ ID NO: 395971 - DNA, 145 bp, Homo sapiens; identical to SEQ ID NO: 228480
  chr2:85555444-85555589
  hyper

SEQ ID NO: 395972 - DNA, 235 bp, Homo sapiens; identical to SEQ ID NO: 228481
  chr2:85581697-85581932
  hyper

SEQ ID NO: 395973 - DNA, 108 bp, Homo sapiens; identical to SEQ ID NO: 228484
  chr2:85804638-85804746
  hyper

SEQ ID NO: 395974 - DNA, 224 bp, Homo sapiens; identical to SEQ ID NO: 221813
  chr2:85829251-85829475
  hyper

SEQ ID NO: 395975 - DNA, 249 bp, Homo sapiens; identical to SEQ ID NO: 228486
  chr2:85829658-85829907
  hyper

SEQ ID NO: 395976 - DNA, 158 bp, Homo sapiens; identical to SEQ ID NO: 228487
  chr2:85830122-85830280
  hyper

SEQ ID NO: 395977 - DNA, 168 bp, Homo sapiens; identical to SEQ ID NO: 228488
  chr2:85982463-85982631
  hyper

SEQ ID NO: 395978 - DNA, 761 bp, Homo sapiens; identical to SEQ ID NO: 228489
  chr2:86114869-86115630
  hyper

SEQ ID NO: 395979 - DNA, 204 bp, Homo sapiens; identical to SEQ ID NO: 106290
  chr2:86333309-86333513
  hyper

SEQ ID NO: 395980 - DNA, 265 bp, Homo sapiens; identical to SEQ ID NO: 228492
  chr2:86668219-86668484
  hyper

SEQ ID NO: 395981 - DNA, 81 bp, Homo sapiens; identical to SEQ ID NO: 228499
  chr2:88355120-88355201
  hyper

SEQ ID NO: 395982 - DNA, 345 bp, Homo sapiens; identical to SEQ ID NO: 280001
  chr2:95825283-95825628
  hyper

SEQ ID NO: 395983 - DNA, 114 bp, Homo sapiens; identical to SEQ ID NO: 228511
  chr2:95831017-95831131
  hyper

SEQ ID NO: 395984 - DNA, 146 bp, Homo sapiens; identical to SEQ ID NO: 280003
  chr2:95873228-95873374
  hyper

SEQ ID NO: 395985 - DNA, 180 bp, Homo sapiens; identical to SEQ ID NO: 228514
  chr2:96068500-96068680
  hyper

SEQ ID NO: 395986 - DNA, 52 bp, Homo sapiens; identical to SEQ ID NO: 228518
  chr2:96931553-96931605
  hyper

SEQ ID NO: 395987 - DNA, 215 bp, Homo sapiens
  chr2:96987312-96987527
  hyper
aagtgcgtctcctttttcattccgaaatgaaattcgtagttggttaaaacggggcttgccagcacgatttacaaacaagacgagcgctcgctgcaatcacatgaggagaaaaggaaaggactaattcataatgcggtcactagagcctcgatgtgcccaggggagcgcccgccgagcgccagcgggaacagcgcatcgcggacgctgcagggagt

SEQ ID NO: 395988 - DNA, 197 bp, Homo sapiens; identical to SEQ ID NO: 198324
  chr2:97173863-97174060
  hyper

SEQ ID NO: 395989 - DNA, 226 bp, Homo sapiens; identical to SEQ ID NO: 198325
  chr2:97175214-97175440
  hyper

SEQ ID NO: 395990 - DNA, 228 bp, Homo sapiens; identical to SEQ ID NO: 280023
  chr2:97303973-97304201
  hyper

SEQ ID NO: 395991 - DNA, 243 bp, Homo sapiens; identical to SEQ ID NO: 228529
  chr2:97426260-97426503
  hyper

SEQ ID NO: 395992 - DNA, 156 bp, Homo sapiens; identical to SEQ ID NO: 221833
  chr2:97482863-97483019
  hyper

SEQ ID NO: 395993 - DNA, 78 bp, Homo sapiens; identical to SEQ ID NO: 228532
  chr2:97523294-97523372
  hyper

SEQ ID NO: 395994 - DNA, 137 bp, Homo sapiens; identical to SEQ ID NO: 228533
  chr2:97523809-97523946
  hyper

SEQ ID NO: 395995 - DNA, 98 bp, Homo sapiens; identical to SEQ ID NO: 228534
  chr2:97534367-97534465
  hyper

SEQ ID NO: 395996 - DNA, 69 bp, Homo sapiens; identical to SEQ ID NO: 198332
  chr2:98261938-98262007
  hyper

SEQ ID NO: 395997 - DNA, 235 bp, Homo sapiens; identical to SEQ ID NO: 228543
  chr2:99061163-99061398
  hyper

SEQ ID NO: 395998 - DNA, 35 bp, Homo sapiens; identical to SEQ ID NO: 228544
  chr2:99224744-99224779
  hyper

SEQ ID NO: 395999 - DNA, 108 bp, Homo sapiens; identical to SEQ ID NO: 228550
  chr2:99952955-99953063
  hyper

SEQ ID NO: 396000 - DNA, 232 bp, Homo sapiens; identical to SEQ ID NO: 228551
  chr2:99953660-99953892
  hyper

SEQ ID NO: 396001 - DNA, 476 bp, Homo sapiens; identical to SEQ ID NO: 280049
  chr2:100721429-100721905
  hyper

SEQ ID NO: 396002 - DNA, 391 bp, Homo sapiens; identical to SEQ ID NO: 221837
  chr2:100898414-100898805
  hyper

SEQ ID NO: 396003 - DNA, 371 bp, Homo sapiens; identical to SEQ ID NO: 228554
  chr2:101179132-101179503
  hyper

SEQ ID NO: 396004 - DNA, 339 bp, Homo sapiens; identical to SEQ ID NO: 228557
  chr2:101767139-101767478
  hyper

SEQ ID NO: 396005 - DNA, 207 bp, Homo sapiens; identical to SEQ ID NO: 228558
  chr2:101924527-101924734
  hyper

SEQ ID NO: 396006 - DNA, 227 bp, Homo sapiens; identical to SEQ ID NO: 198350
  chr2:102003274-102003501
  hyper

SEQ ID NO: 396007 - DNA, 225 bp, Homo sapiens; identical to SEQ ID NO: 198351
  chr2:102003609-102003834
  hyper

SEQ ID NO: 396008 - DNA, 112 bp, Homo sapiens; identical to SEQ ID NO: 280061
  chr2:102004154-102004266
  hyper

SEQ ID NO: 396009 - DNA, 159 bp, Homo sapiens; identical to SEQ ID NO: 198355
  chr2:102314987-102315146
  hyper

SEQ ID NO: 396010 - DNA, 128 bp, Homo sapiens; identical to SEQ ID NO: 228565
  chr2:102720910-102721038
  hyper

SEQ ID NO: 396011 - DNA, 45 bp, Homo sapiens; identical to SEQ ID NO: 228568
  chr2:103095718-103095763
  hyper

SEQ ID NO: 396012 - DNA, 209 bp, Homo sapiens
  chr2:105471213-105471422
  hyper
gcactcgcgagcagccagcagcaccacgccttcaaggacgaaaaagttttactactctaagggaaaacgagtgaaatgtgttcctgaggaggagaggagaggagaggagagagcggacaagagaaggagcgggccggttgctggtcatccgtaatttggctaaggaagaaaggagcagcttctttctttgttatctcccgtgaaacctt

SEQ ID NO: 396013 - DNA, 60 bp, Homo sapiens; identical to SEQ ID NO: 280079
  chr2:105471748-105471808
  hyper

SEQ ID NO: 396014 - DNA, 60 bp, Homo sapiens; identical to SEQ ID NO: 198364
  chr2:105472048-105472108
  hyper

SEQ ID NO: 396015 - DNA, 112 bp, Homo sapiens; identical to SEQ ID NO: 198367
  chr2:105483512-105483624
  hyper

SEQ ID NO: 396016 - DNA, 160 bp, Homo sapiens; identical to SEQ ID NO: 280087
  chr2:105483840-105484000
  hyper

SEQ ID NO: 396017 - DNA, 72 bp, Homo sapiens; identical to SEQ ID NO: 280088
  chr2:105484378-105484450
  hyper

SEQ ID NO: 396018 - DNA, 130 bp, Homo sapiens; identical to SEQ ID NO: 280089
  chr2:105484522-105484652
  hyper

SEQ ID NO: 396019 - DNA, 43 bp, Homo sapiens; identical to SEQ ID NO: 198371
  chr2:105654394-105654437
  hyper

SEQ ID NO: 396020 - DNA, 214 bp, Homo sapiens; identical to SEQ ID NO: 198372
  chr2:106362018-106362232
  hyper

SEQ ID NO: 396021 - DNA, 104 bp, Homo sapiens; identical to SEQ ID NO: 228594
  chr2:109335680-109335784
  hyper

SEQ ID NO: 396022 - DNA, 410 bp, Homo sapiens; identical to SEQ ID NO: 228595
  chr2:109402898-109403308
  hyper

SEQ ID NO: 396023 - DNA, 149 bp, Homo sapiens; identical to SEQ ID NO: 228607
  chr2:112641878-112642027
  hyper

SEQ ID NO: 396024 - DNA, 44 bp, Homo sapiens; identical to SEQ ID NO: 280127
  chr2:112895964-112896008
  hyper

SEQ ID NO: 396025 - DNA, 71 bp, Homo sapiens; identical to SEQ ID NO: 280128
  chr2:112896106-112896177
  hyper

SEQ ID NO: 396026 - DNA, 147 bp, Homo sapiens; identical to SEQ ID NO: 106508
  chr2:113012388-113012535
  hyper

SEQ ID NO: 396027 - DNA, 67 bp, Homo sapiens; identical to SEQ ID NO: 228611
  chr2:113239297-113239364
  hyper

SEQ ID NO: 396028 - DNA, 177 bp, Homo sapiens; identical to SEQ ID NO: 228612
  chr2:113240292-113240469
  hyper

SEQ ID NO: 396029 - DNA, 206 bp, Homo sapiens; identical to SEQ ID NO: 228614
  chr2:113522193-113522399
  hyper

SEQ ID NO: 396030 - DNA, 212 bp, Homo sapiens; identical to SEQ ID NO: 228621
  chr2:118771324-118771536
  hyper

SEQ ID NO: 396031 - DNA, 276 bp, Homo sapiens; identical to SEQ ID NO: 198396
  chr2:119532328-119532604
  hyper

SEQ ID NO: 396032 - DNA, 52 bp, Homo sapiens; identical to SEQ ID NO: 280144
  chr2:119566105-119566157
  hyper

SEQ ID NO: 396033 - DNA, 259 bp, Homo sapiens; identical to SEQ ID NO: 280146
  chr2:119594491-119594750
  hyper

SEQ ID NO: 396034 - DNA, 36 bp, Homo sapiens; identical to SEQ ID NO: 228628
  chr2:119599150-119599186
  hyper

SEQ ID NO: 396035 - DNA, 85 bp, Homo sapiens; identical to SEQ ID NO: 198398
  chr2:119600864-119600949
  hyper

SEQ ID NO: 396036 - DNA, 94 bp, Homo sapiens; identical to SEQ ID NO: 280153
  chr2:119606041-119606135
  hyper

SEQ ID NO: 396037 - DNA, 75 bp, Homo sapiens; identical to SEQ ID NO: 198402
  chr2:119606630-119606705
  hyper

SEQ ID NO: 396038 - DNA, 45 bp, Homo sapiens; identical to SEQ ID NO: 198403
  chr2:119609396-119609441
  hyper

SEQ ID NO: 396039 - DNA, 137 bp, Homo sapiens; identical to SEQ ID NO: 198404
  chr2:119610099-119610236
  hyper

SEQ ID NO: 396040 - DNA, 225 bp, Homo sapiens; identical to SEQ ID NO: 280158
  chr2:119610619-119610844
  hyper

SEQ ID NO: 396041 - DNA, 255 bp, Homo sapiens; identical to SEQ ID NO: 198406
  chr2:119610998-119611253
  hyper

SEQ ID NO: 396042 - DNA, 91 bp, Homo sapiens; identical to SEQ ID NO: 198407
  chr2:119611824-119611915
  hyper

SEQ ID NO: 396043 - DNA, 162 bp, Homo sapiens; identical to SEQ ID NO: 198410
  chr2:120189853-120190015
  hyper

SEQ ID NO: 396044 - DNA, 138 bp, Homo sapiens; identical to SEQ ID NO: 228649
  chr2:120516995-120517133
  hyper

SEQ ID NO: 396045 - DNA, 129 bp, Homo sapiens; identical to SEQ ID NO: 198413
  chr2:120770809-120770938
  hyper

SEQ ID NO: 396046 - DNA, 218 bp, Homo sapiens; identical to SEQ ID NO: 106596
  chr2:120770966-120771184
  hyper

SEQ ID NO: 396047 - DNA, 198 bp, Homo sapiens; identical to SEQ ID NO: 228651
  chr2:121101033-121101231
  hyper

SEQ ID NO: 396048 - DNA, 133 bp, Homo sapiens; identical to SEQ ID NO: 280175
  chr2:121103355-121103488
  hyper

SEQ ID NO: 396049 - DNA, 33 bp, Homo sapiens; identical to SEQ ID NO: 280176
  chr2:121105241-121105274
  hyper

SEQ ID NO: 396050 - DNA, 55 bp, Homo sapiens; identical to SEQ ID NO: 280187
  chr2:122042061-122042116
  hyper

SEQ ID NO: 396051 - DNA, 265 bp, Homo sapiens; identical to SEQ ID NO: 228664
  chr2:122408113-122408378
  hyper

SEQ ID NO: 396052 - DNA, 208 bp, Homo sapiens; identical to SEQ ID NO: 228667
  chr2:126339277-126339485
  hyper

SEQ ID NO: 396053 - DNA, 58 bp, Homo sapiens; identical to SEQ ID NO: 198427
  chr2:127865204-127865262
  hyper

SEQ ID NO: 396054 - DNA, 71 bp, Homo sapiens; identical to SEQ ID NO: 198432
  chr2:128848514-128848585
  hyper

SEQ ID NO: 396055 - DNA, 209 bp, Homo sapiens; identical to SEQ ID NO: 221870
  chr2:131113001-131113210
  hyper

SEQ ID NO: 396056 - DNA, 224 bp, Homo sapiens; identical to SEQ ID NO: 228695
  chr2:132250191-132250415
  hyper

SEQ ID NO: 396057 - DNA, 99 bp, Homo sapiens; identical to SEQ ID NO: 198434
  chr2:132767530-132767629
  hyper

SEQ ID NO: 396058 - DNA, 225 bp, Homo sapiens; identical to SEQ ID NO: 228705
  chr2:135809730-135809955
  hyper

SEQ ID NO: 396059 - DNA, 325 bp, Homo sapiens; identical to SEQ ID NO: 228706
  chr2:136289442-136289767
  hyper

SEQ ID NO: 396060 - DNA, 304 bp, Homo sapiens; identical to SEQ ID NO: 198451
  chr2:137522037-137522341
  hyper

SEQ ID NO: 396061 - DNA, 47 bp, Homo sapiens; identical to SEQ ID NO: 387819
  chr2:137523778-137523825
  hyper

SEQ ID NO: 396062 - DNA, 265 bp, Homo sapiens; identical to SEQ ID NO: 280247
  chr2:137523855-137524120
  hyper

SEQ ID NO: 396063 - DNA, 76 bp, Homo sapiens; identical to SEQ ID NO: 280253
  chr2:148601211-148601287
  hyper

SEQ ID NO: 396064 - DNA, 1152 bp, Homo sapiens
  chr2:148601349-148602501
  hyper
tcctccgtgagttttttctttttcttttctagtcaccaagacagcacgcgtgtgcagaagctgcagcggtgggacgcagtgctaagtctgggggcgcacacaccagctcgcgcgtcgcgagctcgcctgggcagctcggcgggcgcggcgaaacagctcccacgtccgccttccaccgactcctcggtatcagagcggacgaggcgtccccccagaggaaagactgggcgccgcagacgccccttggagaagtccctggccactcgccccacctcggggtcctcttcctcttgggcttctcctgaccctttgggtgggcgctccagacaggcccgtcggacgcgatttggaaacgggtcgtgcccggcctagcccgcatctactcgcccggccacagcccagccacagcttagggactttgaggcgcccgcgcccctttgtcgcggtatctctagcccaagcaggccggacgccgaggcctcgcggtatcgagcctccgtccgccccgcctcctcgccctccactccgccccgccctcgctctctcacccctcccccgctcccgcctcgcttccccgacaatctcctcgcgctcccggcccggcacgcgcgctgcgcccggccgccgctgccgccgccgccgccgccgccgctgccgccgagcgttcctccgctgcgcctggcttccagcttcgggccggaaccggaagtttggggggcggagcccggcggaggccaggagaccgaaaacgcggccgagcccggagcccggagctggagccagagcctggaccagaacttggccgccgcctgcaccgccgccgccgctgccgcccgccgccccttccccgcgccgcagccgcctcgccgccaccgccgcgagctcggccgccagtggtcctcggactttaggtgtctgggttgaaggtcggtccggacatcggacccagtcagttcccagactgtccgggcggcagcggacgccgctgccgccgccgcctcttcgtcgcctcagcctggcgttttgttccgagagacgggagaggcgagcggagctgacagtgattttgacagtgatttaaacccgcttttgttgttgttggcttttcgttgtttggttttgtgtgttgtgcgtgtgtgtggcggtttttcc

SEQ ID NO: 396065 - DNA, 266 bp, Homo sapiens; identical to SEQ ID NO: 228726
  chr2:149267061-149267327
  hyper

SEQ ID NO: 396066 - DNA, 142 bp, Homo sapiens; identical to SEQ ID NO: 228727
  chr2:149402958-149403100
  hyper

SEQ ID NO: 396067 - DNA, 173 bp, Homo sapiens; identical to SEQ ID NO: 198465
  chr2:149894865-149895038
  hyper

SEQ ID NO: 396068 - DNA, 36 bp, Homo sapiens; identical to SEQ ID NO: 198466
  chr2:150061862-150061898
  hyper

SEQ ID NO: 396069 - DNA, 237 bp, Homo sapiens; identical to SEQ ID NO: 383864
  chr2:150186614-150186851
  hyper

SEQ ID NO: 396070 - DNA, 39 bp, Homo sapiens; identical to SEQ ID NO: 383865
  chr2:151342533-151342572
  hyper

SEQ ID NO: 396071 - DNA, 215 bp, Homo sapiens; identical to SEQ ID NO: 280272
  chr2:152118445-152118660
  hyper

SEQ ID NO: 396072 - DNA, 109 bp, Homo sapiens; identical to SEQ ID NO: 228738
  chr2:152685152-152685261
  hyper

SEQ ID NO: 396073 - DNA, 100 bp, Homo sapiens; identical to SEQ ID NO: 198475
  chr2:152956050-152956150
  hyper

SEQ ID NO: 396074 - DNA, 52 bp, Homo sapiens; identical to SEQ ID NO: 228741
  chr2:153032646-153032698
  hyper

SEQ ID NO: 396075 - DNA, 49 bp, Homo sapiens; identical to SEQ ID NO: 198479
  chr2:154729267-154729316
  hyper

SEQ ID NO: 396076 - DNA, 142 bp, Homo sapiens; identical to SEQ ID NO: 198480
  chr2:154729379-154729521
  hyper

SEQ ID NO: 396077 - DNA, 111 bp, Homo sapiens; identical to SEQ ID NO: 198481
  chr2:154730061-154730172
  hyper

SEQ ID NO: 396078 - DNA, 31 bp, Homo sapiens; identical to SEQ ID NO: 198485
  chr2:157188949-157188980
  hyper

SEQ ID NO: 396079 - DNA, 405 bp, Homo sapiens; identical to SEQ ID NO: 280290
  chr2:157189365-157189770
  hyper

SEQ ID NO: 396080 - DNA, 232 bp, Homo sapiens; identical to SEQ ID NO: 228755
  chr2:157190094-157190326
  hyper

SEQ ID NO: 396081 - DNA, 425 bp, Homo sapiens; identical to SEQ ID NO: 280294
  chr2:158484494-158484919
  hyper

SEQ ID NO: 396082 - DNA, 143 bp, Homo sapiens
  chr2:158484949-158485092
  hyper
cgactggcgcttccctgtccgccccgaaggtcagtttgctcggagcaccccctgtcccccacccccgtgctcacccgcagacctcctcccagctcccaccctcgcgggcgtcgggagagaaaccagcaccgtacctggcgaga

SEQ ID NO: 396083 - DNA, 323 bp, Homo sapiens; identical to SEQ ID NO: 280301
  chr2:160472081-160472404
  hyper

SEQ ID NO: 396084 - DNA, 363 bp, Homo sapiens; identical to SEQ ID NO: 106813
  chr2:160472575-160472938
  hyper

SEQ ID NO: 396085 - DNA, 175 bp, Homo sapiens
  chr2:160654718-160654893
  hyper
tgcgggtgggcggcagcggctgcgcggccggagaggagcggggcggggcgggagcgggggcggtgcttctcgcgtgcgagtttaatcccccccccgggcggaacgtgaacggcactgggggctcccaccaggagaacccgggtgtcccgtcccgcaggagcggctggcgcgcggc

SEQ ID NO: 396086 - DNA, 340 bp, Homo sapiens; identical to SEQ ID NO: 198496
  chr2:160919062-160919402
  hyper

SEQ ID NO: 396087 - DNA, 228 bp, Homo sapiens; identical to SEQ ID NO: 221914
  chr2:161126710-161126938
  hyper

SEQ ID NO: 396088 - DNA, 126 bp, Homo sapiens; identical to SEQ ID NO: 280307
  chr2:161263704-161263830
  hyper

SEQ ID NO: 396089 - DNA, 147 bp, Homo sapiens
  chr2:161263896-161264043
  hyper
cgcggagcccctgagcgcggccccctttgtaacgcggggctcgccgacctcggcgcggcatcccggccgccgcctcacctgcttgcgatagggcgtccggcagttgctgctgcccccggggttgccactgctgctggggaagatcat

SEQ ID NO: 396090 - DNA, 97 bp, Homo sapiens; identical to SEQ ID NO: 198499
  chr2:161560616-161560713
  hyper

SEQ ID NO: 396091 - DNA, 63 bp, Homo sapiens; identical to SEQ ID NO: 228773
  chr2:162165218-162165281
  hyper

SEQ ID NO: 396092 - DNA, 89 bp, Homo sapiens; identical to SEQ ID NO: 280326
  chr2:163694782-163694871
  hyper

SEQ ID NO: 396093 - DNA, 93 bp, Homo sapiens; identical to SEQ ID NO: 280327
  chr2:163695560-163695653
  hyper

SEQ ID NO: 396094 - DNA, 114 bp, Homo sapiens; identical to SEQ ID NO: 228791
  chr2:165477434-165477548
  hyper

SEQ ID NO: 396095 - DNA, 63 bp, Homo sapiens; identical to SEQ ID NO: 228792
  chr2:165478028-165478091
  hyper

SEQ ID NO: 396096 - DNA, 299 bp, Homo sapiens
  chr2:165698370-165698669
  hyper
gggcagggccgactcagcacctcccctgtcccgcgggcggggtgcgggcgctggctgggcgctgggggcctcgctggagcccgctctctcactcaccctgccccatttccctgcccggagtccgggagctcgccgccgcctctgcagcacggccgcacataagtggggaccagctcggcggcattggagcgagggaagcagcgagccggagagaggaacggggcgggggtgggccgggagcaagttggaatttccttcccccagggcttcgggtctttggggtccggctggggaagctg

SEQ ID NO: 396097 - DNA, 268 bp, Homo sapiens; identical to SEQ ID NO: 198518
  chr2:170218861-170219129
  hyper

SEQ ID NO: 396098 - DNA, 99 bp, Homo sapiens; identical to SEQ ID NO: 228808
  chr2:170430256-170430355
  hyper

SEQ ID NO: 396099 - DNA, 87 bp, Homo sapiens; identical to SEQ ID NO: 228809
  chr2:170655249-170655336
  hyper

SEQ ID NO: 396100 - DNA, 49 bp, Homo sapiens; identical to SEQ ID NO: 387834
  chr2:171571797-171571846
  hyper

SEQ ID NO: 396101 - DNA, 279 bp, Homo sapiens; identical to SEQ ID NO: 198526
  chr2:171572068-171572347
  hyper

SEQ ID NO: 396102 - DNA, 49 bp, Homo sapiens; identical to SEQ ID NO: 198527
  chr2:171627264-171627313
  hyper

SEQ ID NO: 396103 - DNA, 600 bp, Homo sapiens
  chr2:171627346-171627946
  hyper
cgccccgcccccccggacccgcctcccagccccgccccgggccctcctcgccgcgcccgctccgtcccgcgccctccaccgccctacggcctgggcccgcctccaccctgcctctccgtggttccccgggctgcccctgcccccgcccccgcccccgccacctcccccgccgtcgcccaattcccccagcccccaccctcggctgctgcccgagcttcctccacgcgccgtgcagtctccacggcgacgctgcgttcccgactcggagcccccagctccgcgcgagcagctagccgggctggctctcggtgtgtgcccttcggatggtctgctgaagagggccgccagctggtaagacactccgaggcaacgaccggtctccctctccctagcccggtgtgcagtctgacccagcccccacagcagaccacccccagaccgggcgcccgagtctgcggaccgctctaccgcacctggttctggctctgggccccgggccccgtggctgccaggggccgccgggaagggaggatgcgcgccactggggtgcgcctggcttgcggcaccctcctcccgcagtggtcggaagaggtgaggaag

SEQ ID NO: 396104 - DNA, 32 bp, Homo sapiens; identical to SEQ ID NO: 228820
  chr2:172017402-172017434
  hyper

SEQ ID NO: 396105 - DNA, 75 bp, Homo sapiens; identical to SEQ ID NO: 198533
  chr2:172289937-172290012
  hyper

SEQ ID NO: 396106 - DNA, 296 bp, Homo sapiens
  chr2:172379778-172380074
  hyper
ccggagcgagaatttgcccgtatttgtaacatcctcggccctgggtaaaggggctggccaaggggggcgagtgaagcatccgccctgggttcctctcctcctagagtgttaaactcagtcgagtccgggaagctgccaggacttccaagtgtgtttcgccgccctgcccagtcattggacggtcttgagcccgacttgtttatgtggcagaagagtggcgaaagttcccccgcggggcttcctattgggcactggcccagcactccgggtgggagatgcccggagagggcccgcgg

SEQ ID NO: 396107 - DNA, 162 bp, Homo sapiens; identical to SEQ ID NO: 280380
  chr2:172950953-172951115
  hyper

SEQ ID NO: 396108 - DNA, 147 bp, Homo sapiens; identical to SEQ ID NO: 280385
  chr2:172959062-172959209
  hyper

SEQ ID NO: 396109 - DNA, 38 bp, Homo sapiens; identical to SEQ ID NO: 228848
  chr2:173292254-173292292
  hyper

SEQ ID NO: 396110 - DNA, 380 bp, Homo sapiens; identical to SEQ ID NO: 228849
  chr2:173292962-173293342
  hyper

SEQ ID NO: 396111 - DNA, 103 bp, Homo sapiens; identical to SEQ ID NO: 221936
  chr2:174147823-174147926
  hyper

SEQ ID NO: 396112 - DNA, 217 bp, Homo sapiens; identical to SEQ ID NO: 198553
  chr2:174349951-174350168
  hyper

SEQ ID NO: 396113 - DNA, 318 bp, Homo sapiens; identical to SEQ ID NO: 198563
  chr2:175260398-175260716
  hyper

SEQ ID NO: 396114 - DNA, 91 bp, Homo sapiens; identical to SEQ ID NO: 228862
  chr2:175351635-175351726
  hyper

SEQ ID NO: 396115 - DNA, 94 bp, Homo sapiens; identical to SEQ ID NO: 280416
  chr2:176943767-176943861
  hyper

SEQ ID NO: 396116 - DNA, 170 bp, Homo sapiens; identical to SEQ ID NO: 280417
  chr2:176943902-176944072
  hyper

SEQ ID NO: 396117 - DNA, 280 bp, Homo sapiens; identical to SEQ ID NO: 280418
  chr2:176950481-176950761
  hyper

SEQ ID NO: 396118 - DNA, 189 bp, Homo sapiens; identical to SEQ ID NO: 228873
  chr2:176951108-176951297
  hyper

SEQ ID NO: 396119 - DNA, 146 bp, Homo sapiens; identical to SEQ ID NO: 280422
  chr2:176961517-176961663
  hyper

SEQ ID NO: 396120 - DNA, 145 bp, Homo sapiens; identical to SEQ ID NO: 280423
  chr2:176961693-176961838
  hyper

SEQ ID NO: 396121 - DNA, 92 bp, Homo sapiens; identical to SEQ ID NO: 228884
  chr2:176973290-176973382
  hyper

SEQ ID NO: 396122 - DNA, 123 bp, Homo sapiens; identical to SEQ ID NO: 280430
  chr2:176973442-176973565
  hyper

SEQ ID NO: 396123 - DNA, 116 bp, Homo sapiens; identical to SEQ ID NO: 107053
  chr2:176973598-176973714
  hyper

SEQ ID NO: 396124 - DNA, 73 bp, Homo sapiens; identical to SEQ ID NO: 280432
  chr2:176974112-176974185
  hyper

SEQ ID NO: 396125 - DNA, 104 bp, Homo sapiens; identical to SEQ ID NO: 280444
  chr2:177022459-177022563
  hyper

SEQ ID NO: 396126 - DNA, 250 bp, Homo sapiens; identical to SEQ ID NO: 228905
  chr2:178076955-178077205
  hyper

SEQ ID NO: 396127 - DNA, 388 bp, Homo sapiens; identical to SEQ ID NO: 228907
  chr2:178417525-178417913
  hyper

SEQ ID NO: 396128 - DNA, 41 bp, Homo sapiens; identical to SEQ ID NO: 228910
  chr2:179059426-179059467
  hyper

SEQ ID NO: 396129 - DNA, 85 bp, Homo sapiens; identical to SEQ ID NO: 198592
  chr2:180129611-180129696
  hyper

SEQ ID NO: 396130 - DNA, 58 bp, Homo sapiens; identical to SEQ ID NO: 228914
  chr2:180871766-180871824
  hyper

SEQ ID NO: 396131 - DNA, 97 bp, Homo sapiens; identical to SEQ ID NO: 280467
  chr2:182544331-182544428
  hyper

SEQ ID NO: 396132 - DNA, 207 bp, Homo sapiens; identical to SEQ ID NO: 280468
  chr2:182546085-182546292
  hyper

SEQ ID NO: 396133 - DNA, 292 bp, Homo sapiens; identical to SEQ ID NO: 228925
  chr2:182607563-182607855
  hyper

SEQ ID NO: 396134 - DNA, 168 bp, Homo sapiens; identical to SEQ ID NO: 198597
  chr2:182757468-182757636
  hyper

SEQ ID NO: 396135 - DNA, 391 bp, Homo sapiens; identical to SEQ ID NO: 228935
  chr2:187350702-187351093
  hyper

SEQ ID NO: 396136 - DNA, 111 bp, Homo sapiens; identical to SEQ ID NO: 198608
  chr2:190306062-190306173
  hyper

SEQ ID NO: 396137 - DNA, 313 bp, Homo sapiens; identical to SEQ ID NO: 228941
  chr2:190526051-190526364
  hyper

SEQ ID NO: 396138 - DNA, 139 bp, Homo sapiens; identical to SEQ ID NO: 198615
  chr2:191512982-191513121
  hyper

SEQ ID NO: 396139 - DNA, 248 bp, Homo sapiens; identical to SEQ ID NO: 228945
  chr2:191514202-191514450
  hyper

SEQ ID NO: 396140 - DNA, 436 bp, Homo sapiens; identical to SEQ ID NO: 198619
  chr2:191745657-191746093
  hyper

SEQ ID NO: 396141 - DNA, 80 bp, Homo sapiens; identical to SEQ ID NO: 198620
  chr2:191746519-191746599
  hyper

SEQ ID NO: 396142 - DNA, 252 bp, Homo sapiens; identical to SEQ ID NO: 228950
  chr2:191878927-191879179
  hyper

SEQ ID NO: 396143 - DNA, 54 bp, Homo sapiens; identical to SEQ ID NO: 228953
  chr2:192542863-192542917
  hyper

SEQ ID NO: 396144 - DNA, 215 bp, Homo sapiens; identical to SEQ ID NO: 228955
  chr2:197035747-197035962
  hyper

SEQ ID NO: 396145 - DNA, 121 bp, Homo sapiens; identical to SEQ ID NO: 198630
  chr2:198175715-198175836
  hyper

SEQ ID NO: 396146 - DNA, 178 bp, Homo sapiens; identical to SEQ ID NO: 198634
  chr2:198265429-198265607
  hyper

SEQ ID NO: 396147 - DNA, 376 bp, Homo sapiens; identical to SEQ ID NO: 198636
  chr2:198267374-198267750
  hyper

SEQ ID NO: 396148 - DNA, 70 bp, Homo sapiens; identical to SEQ ID NO: 198637
  chr2:198268366-198268436
  hyper

SEQ ID NO: 396149 - DNA, 93 bp, Homo sapiens; identical to SEQ ID NO: 198638
  chr2:198269812-198269905
  hyper

SEQ ID NO: 396150 - DNA, 147 bp, Homo sapiens; identical to SEQ ID NO: 198640
  chr2:198273117-198273264
  hyper

SEQ ID NO: 396151 - DNA, 414 bp, Homo sapiens; identical to SEQ ID NO: 228960
  chr2:198299572-198299986
  hyper

SEQ ID NO: 396152 - DNA, 297 bp, Homo sapiens; identical to SEQ ID NO: 228961
  chr2:198364582-198364879
  hyper

SEQ ID NO: 396153 - DNA, 62 bp, Homo sapiens; identical to SEQ ID NO: 280529
  chr2:198569898-198569960
  hyper

SEQ ID NO: 396154 - DNA, 106 bp, Homo sapiens; identical to SEQ ID NO: 280530
  chr2:198569977-198570083
  hyper

SEQ ID NO: 396155 - DNA, 781 bp, Homo sapiens; identical to SEQ ID NO: 221975
  chr2:200323016-200323797
  hyper

SEQ ID NO: 396156 - DNA, 582 bp, Homo sapiens; identical to SEQ ID NO: 221976
  chr2:200324029-200324611
  hyper

SEQ ID NO: 396157 - DNA, 304 bp, Homo sapiens; identical to SEQ ID NO: 280547
  chr2:200333430-200333734
  hyper

SEQ ID NO: 396158 - DNA, 315 bp, Homo sapiens; identical to SEQ ID NO: 280548
  chr2:200333834-200334149
  hyper

SEQ ID NO: 396159 - DNA, 95 bp, Homo sapiens; identical to SEQ ID NO: 107244
  chr2:200334504-200334599
  hyper

SEQ ID NO: 396160 - DNA, 77 bp, Homo sapiens; identical to SEQ ID NO: 280550
  chr2:200334887-200334964
  hyper

SEQ ID NO: 396161 - DNA, 79 bp, Homo sapiens; identical to SEQ ID NO: 198652
  chr2:200604747-200604826
  hyper

SEQ ID NO: 396162 - DNA, 566 bp, Homo sapiens; identical to SEQ ID NO: 198653
  chr2:200715514-200716080
  hyper

SEQ ID NO: 396163 - DNA, 111 bp, Homo sapiens; identical to SEQ ID NO: 198654
  chr2:200820437-200820548
  hyper

SEQ ID NO: 396164 - DNA, 178 bp, Homo sapiens; identical to SEQ ID NO: 228978
  chr2:201170705-201170883
  hyper

SEQ ID NO: 396165 - DNA, 55 bp, Homo sapiens; identical to SEQ ID NO: 228979
  chr2:201171095-201171150
  hyper

SEQ ID NO: 396166 - DNA, 34 bp, Homo sapiens; identical to SEQ ID NO: 228981
  chr2:201390687-201390721
  hyper

SEQ ID NO: 396167 - DNA, 250 bp, Homo sapiens; identical to SEQ ID NO: 228984
  chr2:201729265-201729515
  hyper

SEQ ID NO: 396168 - DNA, 79 bp, Homo sapiens; identical to SEQ ID NO: 228989
  chr2:202315793-202315872
  hyper

SEQ ID NO: 396169 - DNA, 162 bp, Homo sapiens; identical to SEQ ID NO: 280567
  chr2:202316090-202316252
  hyper

SEQ ID NO: 396170 - DNA, 320 bp, Homo sapiens; identical to SEQ ID NO: 228992
  chr2:202898961-202899281
  hyper

SEQ ID NO: 396171 - DNA, 104 bp, Homo sapiens; identical to SEQ ID NO: 221980
  chr2:203242328-203242432
  hyper

SEQ ID NO: 396172 - DNA, 223 bp, Homo sapiens; identical to SEQ ID NO: 228994
  chr2:203776773-203776996
  hyper

SEQ ID NO: 396173 - DNA, 74 bp, Homo sapiens; identical to SEQ ID NO: 228996
  chr2:204192792-204192866
  hyper

SEQ ID NO: 396174 - DNA, 195 bp, Homo sapiens; identical to SEQ ID NO: 198663
  chr2:204399768-204399963
  hyper

SEQ ID NO: 396175 - DNA, 188 bp, Homo sapiens; identical to SEQ ID NO: 198664
  chr2:205409782-205409970
  hyper

SEQ ID NO: 396176 - DNA, 898 bp, Homo sapiens; identical to SEQ ID NO: 38498
  chr2:205410026-205410924
  hyper

SEQ ID NO: 396177 - DNA, 106 bp, Homo sapiens; identical to SEQ ID NO: 280581
  chr2:206546583-206546689
  hyper

SEQ ID NO: 396178 - DNA, 175 bp, Homo sapiens
  chr2:206546770-206546945
  hyper
ggttctgcgtgtgtggcatcggagtcgtggaatttagggggaacaaggcttttccccccgtccccccggggtctcccttgggtgggggcgacacggccaaggcggcgcgccctgggggtgcccgggggcgcttcttccccagggcgttacgcaccggcggcccggcgcggaggtg

SEQ ID NO: 396179 - DNA, 224 bp, Homo sapiens; identical to SEQ ID NO: 229003
  chr2:206949799-206950023
  hyper

SEQ ID NO: 396180 - DNA, 152 bp, Homo sapiens; identical to SEQ ID NO: 229004
  chr2:206950964-206951116
  hyper

SEQ ID NO: 396181 - DNA, 37 bp, Homo sapiens; identical to SEQ ID NO: 229009
  chr2:207630392-207630429
  hyper

SEQ ID NO: 396182 - DNA, 469 bp, Homo sapiens; identical to SEQ ID NO: 229012
  chr2:208575825-208576294
  hyper

SEQ ID NO: 396183 - DNA, 78 bp, Homo sapiens; identical to SEQ ID NO: 198673
  chr2:209108240-209108318
  hyper

SEQ ID NO: 396184 - DNA, 261 bp, Homo sapiens; identical to SEQ ID NO: 198674
  chr2:209113128-209113389
  hyper

SEQ ID NO: 396185 - DNA, 211 bp, Homo sapiens; identical to SEQ ID NO: 198675
  chr2:209118761-209118972
  hyper

SEQ ID NO: 396186 - DNA, 118 bp, Homo sapiens; identical to SEQ ID NO: 229017
  chr2:209130875-209130993
  hyper

SEQ ID NO: 396187 - DNA, 235 bp, Homo sapiens; identical to SEQ ID NO: 229019
  chr2:210867113-210867348
  hyper

SEQ ID NO: 396188 - DNA, 96 bp, Homo sapiens; identical to SEQ ID NO: 198678
  chr2:211035494-211035590
  hyper

SEQ ID NO: 396189 - DNA, 92 bp, Homo sapiens; identical to SEQ ID NO: 198680
  chr2:211341442-211341534
  hyper

SEQ ID NO: 396190 - DNA, 137 bp, Homo sapiens; identical to SEQ ID NO: 198681
  chr2:213401042-213401179
  hyper

SEQ ID NO: 396191 - DNA, 208 bp, Homo sapiens; identical to SEQ ID NO: 280612
  chr2:214148842-214149050
  hyper

SEQ ID NO: 396192 - DNA, 311 bp, Homo sapiens; identical to SEQ ID NO: 280613
  chr2:214149129-214149440
  hyper

SEQ ID NO: 396193 - DNA, 53 bp, Homo sapiens; identical to SEQ ID NO: 229025
  chr2:216176512-216176565
  hyper

SEQ ID NO: 396194 - DNA, 310 bp, Homo sapiens; identical to SEQ ID NO: 280618
  chr2:217236253-217236563
  hyper

SEQ ID NO: 396195 - DNA, 339 bp, Homo sapiens; identical to SEQ ID NO: 198686
  chr2:217236604-217236943
  hyper

SEQ ID NO: 396196 - DNA, 40 bp, Homo sapiens; identical to SEQ ID NO: 229030
  chr2:217277057-217277097
  hyper

SEQ ID NO: 396197 - DNA, 41 bp, Homo sapiens; identical to SEQ ID NO: 229031
  chr2:217363378-217363419
  hyper

SEQ ID NO: 396198 - DNA, 334 bp, Homo sapiens; identical to SEQ ID NO: 229040
  chr2:218899131-218899465
  hyper

SEQ ID NO: 396199 - DNA, 63 bp, Homo sapiens; identical to SEQ ID NO: 229041
  chr2:219157359-219157422
  hyper

SEQ ID NO: 396200 - DNA, 40 bp, Homo sapiens; identical to SEQ ID NO: 229043
  chr2:219261657-219261697
  hyper

SEQ ID NO: 396201 - DNA, 241 bp, Homo sapiens; identical to SEQ ID NO: 221992
  chr2:219262922-219263163
  hyper

SEQ ID NO: 396202 - DNA, 989 bp, Homo sapiens; identical to SEQ ID NO: 280637
  chr2:219263453-219264442
  hyper

SEQ ID NO: 396203 - DNA, 222 bp, Homo sapiens; identical to SEQ ID NO: 229045
  chr2:219523966-219524188
  hyper

SEQ ID NO: 396204 - DNA, 38 bp, Homo sapiens; identical to SEQ ID NO: 229048
  chr2:219725693-219725731
  hyper

SEQ ID NO: 396205 - DNA, 85 bp, Homo sapiens; identical to SEQ ID NO: 229052
  chr2:219744551-219744636
  hyper

SEQ ID NO: 396206 - DNA, 255 bp, Homo sapiens; identical to SEQ ID NO: 229056
  chr2:219761613-219761868
  hyper

SEQ ID NO: 396207 - DNA, 31 bp, Homo sapiens; identical to SEQ ID NO: 229060
  chr2:219824037-219824068
  hyper

SEQ ID NO: 396208 - DNA, 40 bp, Homo sapiens; identical to SEQ ID NO: 229062
  chr2:219825941-219825981
  hyper

SEQ ID NO: 396209 - DNA, 198 bp, Homo sapiens; identical to SEQ ID NO: 198707
  chr2:219906102-219906300
  hyper

SEQ ID NO: 396210 - DNA, 112 bp, Homo sapiens; identical to SEQ ID NO: 229078
  chr2:220093844-220093956
  hyper

SEQ ID NO: 396211 - DNA, 199 bp, Homo sapiens; identical to SEQ ID NO: 198718
  chr2:220407985-220408184
  hyper

SEQ ID NO: 396212 - DNA, 237 bp, Homo sapiens; identical to SEQ ID NO: 280691
  chr2:220492470-220492707
  hyper

SEQ ID NO: 396213 - DNA, 426 bp, Homo sapiens; identical to SEQ ID NO: 280700
  chr2:223154494-223154920
  hyper

SEQ ID NO: 396214 - DNA, 146 bp, Homo sapiens; identical to SEQ ID NO: 198733
  chr2:223177678-223177824
  hyper

SEQ ID NO: 396215 - DNA, 317 bp, Homo sapiens
  chr2:224904324-224904641
  hyper
gggaataccagggctcgtaccgcgtccctgagacgcagggcatgtcgtcttggctgccccctggaagagacagagggcgccctgagacagcgctcagtcctccgggtgatggggaaacggtgccaggacgcggccgggaaggggcagataacccctcgaggcgttttgcagggtgtcctagagctgacttctccctgcctaggggacagaggaacggcggcaagtcgccttaggcaaatacagacgaggggaaccagaaaactggattcccggctatggtgatagcatgaggtacccgcagcgtcctgggaacccag

SEQ ID NO: 396216 - DNA, 53 bp, Homo sapiens; identical to SEQ ID NO: 229129
  chr2:225450598-225450651
  hyper

SEQ ID NO: 396217 - DNA, 163 bp, Homo sapiens; identical to SEQ ID NO: 198741
  chr2:229045944-229046107
  hyper

SEQ ID NO: 396218 - DNA, 315 bp, Homo sapiens; identical to SEQ ID NO: 280728
  chr2:230135850-230136165
  hyper

SEQ ID NO: 396219 - DNA, 80 bp, Homo sapiens; identical to SEQ ID NO: 280729
  chr2:230579415-230579495
  hyper

SEQ ID NO: 396220 - DNA, 91 bp, Homo sapiens; identical to SEQ ID NO: 229142
  chr2:230786754-230786845
  hyper

SEQ ID NO: 396221 - DNA, 237 bp, Homo sapiens; identical to SEQ ID NO: 198744
  chr2:231692871-231693108
  hyper

SEQ ID NO: 396222 - DNA, 44 bp, Homo sapiens; identical to SEQ ID NO: 229152
  chr2:232329225-232329269
  hyper

SEQ ID NO: 396223 - DNA, 551 bp, Homo sapiens; identical to SEQ ID NO: 222027
  chr2:232545577-232546128
  hyper

SEQ ID NO: 396224 - DNA, 48 bp, Homo sapiens; identical to SEQ ID NO: 229157
  chr2:232571124-232571172
  hyper

SEQ ID NO: 396225 - DNA, 177 bp, Homo sapiens; identical to SEQ ID NO: 229159
  chr2:232573066-232573243
  hyper

SEQ ID NO: 396226 - DNA, 234 bp, Homo sapiens; identical to SEQ ID NO: 229160
  chr2:232646071-232646305
  hyper

SEQ ID NO: 396227 - DNA, 82 bp, Homo sapiens; identical to SEQ ID NO: 222033
  chr2:233284387-233284469
  hyper

SEQ ID NO: 396228 - DNA, 235 bp, Homo sapiens; identical to SEQ ID NO: 280762
  chr2:233286008-233286243
  hyper

SEQ ID NO: 396229 - DNA, 84 bp, Homo sapiens; identical to SEQ ID NO: 198757
  chr2:233414992-233415076
  hyper

SEQ ID NO: 396230 - DNA, 99 bp, Homo sapiens; identical to SEQ ID NO: 229175
  chr2:233562009-233562108
  hyper

SEQ ID NO: 396231 - DNA, 321 bp, Homo sapiens; identical to SEQ ID NO: 229178
  chr2:234159999-234160320
  hyper

SEQ ID NO: 396232 - DNA, 96 bp, Homo sapiens; identical to SEQ ID NO: 280787
  chr2:237068294-237068390
  hyper

SEQ ID NO: 396233 - DNA, 99 bp, Homo sapiens
  chr2:237076187-237076286
  hyper
cctccgccttgtcgaagttaccgccgccgggcagcggctgcggcgcgaacttgcgggccgctgccgcctcctggtgctggggcgacgcggagaagccgc

SEQ ID NO: 396234 - DNA, 209 bp, Homo sapiens; identical to SEQ ID NO: 280794
  chr2:237079125-237079334
  hyper

SEQ ID NO: 396235 - DNA, 421 bp, Homo sapiens; identical to SEQ ID NO: 222045
  chr2:237476438-237476859
  hyper

SEQ ID NO: 396236 - DNA, 59 bp, Homo sapiens; identical to SEQ ID NO: 229205
  chr2:238200162-238200221
  hyper

SEQ ID NO: 396237 - DNA, 151 bp, Homo sapiens; identical to SEQ ID NO: 198779
  chr2:238384223-238384374
  hyper

SEQ ID NO: 396238 - DNA, 37 bp, Homo sapiens; identical to SEQ ID NO: 198780
  chr2:238395041-238395078
  hyper

SEQ ID NO: 396239 - DNA, 274 bp, Homo sapiens; identical to SEQ ID NO: 198781
  chr2:238395455-238395729
  hyper

SEQ ID NO: 396240 - DNA, 193 bp, Homo sapiens; identical to SEQ ID NO: 280807
  chr2:238395961-238396154
  hyper

SEQ ID NO: 396241 - DNA, 176 bp, Homo sapiens; identical to SEQ ID NO: 222048
  chr2:238599864-238600040
  hyper

SEQ ID NO: 396242 - DNA, 210 bp, Homo sapiens; identical to SEQ ID NO: 198784
  chr2:238876150-238876360
  hyper

SEQ ID NO: 396243 - DNA, 708 bp, Homo sapiens; identical to SEQ ID NO: 222052
  chr2:239148240-239148948
  hyper

SEQ ID NO: 396244 - DNA, 148 bp, Homo sapiens; identical to SEQ ID NO: 280816
  chr2:239755506-239755654
  hyper

SEQ ID NO: 396245 - DNA, 42 bp, Homo sapiens; identical to SEQ ID NO: 280817
  chr2:239756024-239756066
  hyper

SEQ ID NO: 396246 - DNA, 33 bp, Homo sapiens; identical to SEQ ID NO: 107727
  chr2:239756230-239756263
  hyper

SEQ ID NO: 396247 - DNA, 210 bp, Homo sapiens; identical to SEQ ID NO: 222053
  chr2:240294231-240294441
  hyper

SEQ ID NO: 396248 - DNA, 150 bp, Homo sapiens; identical to SEQ ID NO: 229219
  chr2:241172438-241172588
  hyper

SEQ ID NO: 396249 - DNA, 264 bp, Homo sapiens; identical to SEQ ID NO: 280824
  chr2:241306313-241306577
  hyper

SEQ ID NO: 396250 - DNA, 264 bp, Homo sapiens; identical to SEQ ID NO: 222056
  chr2:241375298-241375562
  hyper

SEQ ID NO: 396251 - DNA, 168 bp, Homo sapiens; identical to SEQ ID NO: 198792
  chr2:241499837-241500005
  hyper

SEQ ID NO: 396252 - DNA, 35 bp, Homo sapiens; identical to SEQ ID NO: 229227
  chr2:242041821-242041856
  hyper

SEQ ID NO: 396253 - DNA, 162 bp, Homo sapiens; identical to SEQ ID NO: 198795
  chr2:242088871-242089033
  hyper

SEQ ID NO: 396254 - DNA, 43 bp, Homo sapiens; identical to SEQ ID NO: 229239
  chr2:242576795-242576838
  hyper

SEQ ID NO: 396255 - DNA, 459 bp, Homo sapiens; identical to SEQ ID NO: 229244
  chr3:3168311-3168770
  hyper

SEQ ID NO: 396256 - DNA, 71 bp, Homo sapiens; identical to SEQ ID NO: 280855
  chr3:3842608-3842679
  hyper

SEQ ID NO: 396257 - DNA, 47 bp, Homo sapiens; identical to SEQ ID NO: 280856
  chr3:3842731-3842778
  hyper

SEQ ID NO: 396258 - DNA, 67 bp, Homo sapiens; identical to SEQ ID NO: 229250
  chr3:4508823-4508890
  hyper

SEQ ID NO: 396259 - DNA, 313 bp, Homo sapiens; identical to SEQ ID NO: 229251
  chr3:4534777-4535090
  hyper

SEQ ID NO: 396260 - DNA, 293 bp, Homo sapiens; identical to SEQ ID NO: 229252
  chr3:4535655-4535948
  hyper

SEQ ID NO: 396261 - DNA, 293 bp, Homo sapiens; identical to SEQ ID NO: 229257
  chr3:5028396-5028689
  hyper

SEQ ID NO: 396262 - DNA, 140 bp, Homo sapiens; identical to SEQ ID NO: 229259
  chr3:5163864-5164004
  hyper

SEQ ID NO: 396263 - DNA, 60 bp, Homo sapiens; identical to SEQ ID NO: 387886
  chr3:6903528-6903588
  hyper

SEQ ID NO: 396264 - DNA, 67 bp, Homo sapiens; identical to SEQ ID NO: 229267
  chr3:9291320-9291387
  hyper

SEQ ID NO: 396265 - DNA, 124 bp, Homo sapiens; identical to SEQ ID NO: 198814
  chr3:9851463-9851587
  hyper

SEQ ID NO: 396266 - DNA, 55 bp, Homo sapiens; identical to SEQ ID NO: 229277
  chr3:9885761-9885816
  hyper

SEQ ID NO: 396267 - DNA, 275 bp, Homo sapiens; identical to SEQ ID NO: 229279
  chr3:9932166-9932441
  hyper

SEQ ID NO: 396268 - DNA, 226 bp, Homo sapiens; identical to SEQ ID NO: 229281
  chr3:9975322-9975548
  hyper

SEQ ID NO: 396269 - DNA, 137 bp, Homo sapiens; identical to SEQ ID NO: 198815
  chr3:10052429-10052566
  hyper

SEQ ID NO: 396270 - DNA, 98 bp, Homo sapiens; identical to SEQ ID NO: 229287
  chr3:10157072-10157170
  hyper

SEQ ID NO: 396271 - DNA, 66 bp, Homo sapiens; identical to SEQ ID NO: 383898
  chr3:10206277-10206343
  hyper

SEQ ID NO: 396272 - DNA, 70 bp, Homo sapiens; identical to SEQ ID NO: 198818
  chr3:11035434-11035504
  hyper

SEQ ID NO: 396273 - DNA, 191 bp, Homo sapiens; identical to SEQ ID NO: 280903
  chr3:12525530-12525721
  hyper

SEQ ID NO: 396274 - DNA, 50 bp, Homo sapiens; identical to SEQ ID NO: 229299
  chr3:12598378-12598428
  hyper

SEQ ID NO: 396275 - DNA, 48 bp, Homo sapiens; identical to SEQ ID NO: 198823
  chr3:12851562-12851610
  hyper

SEQ ID NO: 396276 - DNA, 223 bp, Homo sapiens; identical to SEQ ID NO: 280906
  chr3:12851692-12851915
  hyper

SEQ ID NO: 396277 - DNA, 102 bp, Homo sapiens; identical to SEQ ID NO: 198826
  chr3:13323321-13323423
  hyper

SEQ ID NO: 396278 - DNA, 156 bp, Homo sapiens; identical to SEQ ID NO: 198828
  chr3:13692028-13692184
  hyper

SEQ ID NO: 396279 - DNA, 440 bp, Homo sapiens; identical to SEQ ID NO: 383899
  chr3:13922041-13922481
  hyper

SEQ ID NO: 396280 - DNA, 357 bp, Homo sapiens; identical to SEQ ID NO: 229312
  chr3:14166221-14166578
  hyper

SEQ ID NO: 396281 - DNA, 372 bp, Homo sapiens; identical to SEQ ID NO: 229322
  chr3:15642964-15643336
  hyper

SEQ ID NO: 396282 - DNA, 218 bp, Homo sapiens; identical to SEQ ID NO: 229325
  chr3:16306495-16306713
  hyper

SEQ ID NO: 396283 - DNA, 37 bp, Homo sapiens; identical to SEQ ID NO: 229337
  chr3:20227787-20227824
  hyper

SEQ ID NO: 396284 - DNA, 43 bp, Homo sapiens; identical to SEQ ID NO: 229339
  chr3:23847466-23847509
  hyper

SEQ ID NO: 396285 - DNA, 69 bp, Homo sapiens; identical to SEQ ID NO: 198842
  chr3:23986035-23986104
  hyper

SEQ ID NO: 396286 - DNA, 152 bp, Homo sapiens; identical to SEQ ID NO: 222085
  chr3:23986746-23986898
  hyper

SEQ ID NO: 396287 - DNA, 103 bp, Homo sapiens; identical to SEQ ID NO: 280959
  chr3:24535351-24535454
  hyper

SEQ ID NO: 396288 - DNA, 219 bp, Homo sapiens
  chr3:24535595-24535814
  hyper
acggcgcacgccaacatccaggataattctcctttccaagcccgggagttccggggcaggcgaaaaaggggggatgggagacccacagtccctttaaccctcccccctggcctgccaaccttttccgaacccccatgtcacacaacttcctcatcatggaaacttccactgggttcggcgctgaggatgccaaactccatttcacaaggaacatgtcaa

SEQ ID NO: 396289 - DNA, 161 bp, Homo sapiens; identical to SEQ ID NO: 280971
  chr3:26663871-26664032
  hyper

SEQ ID NO: 396290 - DNA, 259 bp, Homo sapiens
  chr3:27755341-27755600
  hyper
gaattctctccagagcagaaaagaattctagaggctacatgtgggctgctttccccccttcttccttttttccctcgcaaaccaacaaccaaaaagtgtttggtgatggaaagaacaccagtggaaaacggcaaataacagtatttccaactccgagtcaggtcctctttgcactgctttttcctgtttcattgcaatttattgattttattgtggttttttgtttatttggggcaagaacggagatgtgaaccaggac

SEQ ID NO: 396291 - DNA, 116 bp, Homo sapiens; identical to SEQ ID NO: 280976
  chr3:27755601-27755717
  hyper

SEQ ID NO: 396292 - DNA, 132 bp, Homo sapiens; identical to SEQ ID NO: 198859
  chr3:27755955-27756087
  hyper

SEQ ID NO: 396293 - DNA, 74 bp, Homo sapiens; identical to SEQ ID NO: 387904
  chr3:27756242-27756316
  hyper

SEQ ID NO: 396294 - DNA, 200 bp, Homo sapiens; identical to SEQ ID NO: 280982
  chr3:27772590-27772790
  hyper

SEQ ID NO: 396295 - DNA, 146 bp, Homo sapiens; identical to SEQ ID NO: 280984
  chr3:28616516-28616662
  hyper

SEQ ID NO: 396296 - DNA, 214 bp, Homo sapiens; identical to SEQ ID NO: 198864
  chr3:28617983-28618197
  hyper

SEQ ID NO: 396297 - DNA, 354 bp, Homo sapiens; identical to SEQ ID NO: 229361
  chr3:30647759-30648113
  hyper

SEQ ID NO: 396298 - DNA, 42 bp, Homo sapiens; identical to SEQ ID NO: 229363
  chr3:32023042-32023084
  hyper

SEQ ID NO: 396299 - DNA, 160 bp, Homo sapiens; identical to SEQ ID NO: 198865
  chr3:32148437-32148597
  hyper

SEQ ID NO: 396300 - DNA, 137 bp, Homo sapiens; identical to SEQ ID NO: 198869
  chr3:32442878-32443015
  hyper

SEQ ID NO: 396301 - DNA, 55 bp, Homo sapiens; identical to SEQ ID NO: 198870
  chr3:32443510-32443565
  hyper

SEQ ID NO: 396302 - DNA, 192 bp, Homo sapiens; identical to SEQ ID NO: 229367
  chr3:32612447-32612639
  hyper

SEQ ID NO: 396303 - DNA, 124 bp, Homo sapiens; identical to SEQ ID NO: 198873
  chr3:33137820-33137944
  hyper

SEQ ID NO: 396304 - DNA, 264 bp, Homo sapiens; identical to SEQ ID NO: 229377
  chr3:33839852-33840116
  hyper

SEQ ID NO: 396305 - DNA, 73 bp, Homo sapiens; identical to SEQ ID NO: 281010
  chr3:36805377-36805450
  hyper

SEQ ID NO: 396306 - DNA, 74 bp, Homo sapiens; identical to SEQ ID NO: 222104
  chr3:37045891-37045965
  hyper

SEQ ID NO: 396307 - DNA, 73 bp, Homo sapiens; identical to SEQ ID NO: 222105
  chr3:37048481-37048554
  hyper

SEQ ID NO: 396308 - DNA, 92 bp, Homo sapiens; identical to SEQ ID NO: 222106
  chr3:37050304-37050396
  hyper

SEQ ID NO: 396309 - DNA, 280 bp, Homo sapiens; identical to SEQ ID NO: 222107
  chr3:37053310-37053590
  hyper

SEQ ID NO: 396310 - DNA, 113 bp, Homo sapiens; identical to SEQ ID NO: 222108
  chr3:37055922-37056035
  hyper

SEQ ID NO: 396311 - DNA, 154 bp, Homo sapiens; identical to SEQ ID NO: 222110
  chr3:37061800-37061954
  hyper

SEQ ID NO: 396312 - DNA, 371 bp, Homo sapiens; identical to SEQ ID NO: 222111
  chr3:37067127-37067498
  hyper

SEQ ID NO: 396313 - DNA, 165 bp, Homo sapiens; identical to SEQ ID NO: 222115
  chr3:37089009-37089174
  hyper

SEQ ID NO: 396314 - DNA, 93 bp, Homo sapiens; identical to SEQ ID NO: 222116
  chr3:37090007-37090100
  hyper

SEQ ID NO: 396315 - DNA, 418 bp, Homo sapiens; identical to SEQ ID NO: 387911
  chr3:37493091-37493509
  hyper

SEQ ID NO: 396316 - DNA, 153 bp, Homo sapiens; identical to SEQ ID NO: 229394
  chr3:38178729-38178882
  hyper

SEQ ID NO: 396317 - DNA, 83 bp, Homo sapiens; identical to SEQ ID NO: 281039
  chr3:38179801-38179884
  hyper

SEQ ID NO: 396318 - DNA, 147 bp, Homo sapiens; identical to SEQ ID NO: 39092
  chr3:38179984-38180131
  hyper

SEQ ID NO: 396319 - DNA, 183 bp, Homo sapiens; identical to SEQ ID NO: 108120
  chr3:38206942-38207125
  hyper

SEQ ID NO: 396320 - DNA, 78 bp, Homo sapiens; identical to SEQ ID NO: 198884
  chr3:38495097-38495175
  hyper

SEQ ID NO: 396321 - DNA, 52 bp, Homo sapiens; identical to SEQ ID NO: 39102
  chr3:38495213-38495265
  hyper

SEQ ID NO: 396322 - DNA, 101 bp, Homo sapiens; identical to SEQ ID NO: 198886
  chr3:38495679-38495780
  hyper

SEQ ID NO: 396323 - DNA, 105 bp, Homo sapiens; identical to SEQ ID NO: 222125
  chr3:38496021-38496126
  hyper

SEQ ID NO: 396324 - DNA, 81 bp, Homo sapiens; identical to SEQ ID NO: 229399
  chr3:38496682-38496763
  hyper

SEQ ID NO: 396325 - DNA, 132 bp, Homo sapiens; identical to SEQ ID NO: 229400
  chr3:38497123-38497255
  hyper

SEQ ID NO: 396326 - DNA, 156 bp, Homo sapiens; identical to SEQ ID NO: 229401
  chr3:38537735-38537891
  hyper

SEQ ID NO: 396327 - DNA, 278 bp, Homo sapiens; identical to SEQ ID NO: 281049
  chr3:38690811-38691089
  hyper

SEQ ID NO: 396328 - DNA, 69 bp, Homo sapiens; identical to SEQ ID NO: 281050
  chr3:38691144-38691213
  hyper

SEQ ID NO: 396329 - DNA, 211 bp, Homo sapiens; identical to SEQ ID NO: 229403
  chr3:39093354-39093565
  hyper

SEQ ID NO: 396330 - DNA, 277 bp, Homo sapiens; identical to SEQ ID NO: 222128
  chr3:39148232-39148509
  hyper

SEQ ID NO: 396331 - DNA, 227 bp, Homo sapiens; identical to SEQ ID NO: 229406
  chr3:39448005-39448232
  hyper

SEQ ID NO: 396332 - DNA, 329 bp, Homo sapiens
  chr3:39850413-39850742
  hyper
gttccgcagctgtgtttgggagacttgggggcgcattagcctggacagctccctgatcggtaacccctttgatgtgtgttgaatgaatgagcgtcgttagcgtagtagtaaatttatgggagaattaaagcaatccagataggggtcactacggagactttaattacccagggactgtgaagtggggaagagctgtctgtggaggagcgccacaccatgtcttagattcaggcaggccccggattctggtgacccattactctacggtcactgagggtccgggcccccaggactcagaggcaggagacaggaaaagcctgacttagaat

SEQ ID NO: 396333 - DNA, 396 bp, Homo sapiens; identical to SEQ ID NO: 229411
  chr3:40498461-40498857
  hyper

SEQ ID NO: 396334 - DNA, 91 bp, Homo sapiens; identical to SEQ ID NO: 198893
  chr3:41240629-41240720
  hyper

SEQ ID NO: 396335 - DNA, 54 bp, Homo sapiens; identical to SEQ ID NO: 229415
  chr3:41240948-41241002
  hyper

SEQ ID NO: 396336 - DNA, 161 bp, Homo sapiens; identical to SEQ ID NO: 198894
  chr3:42056668-42056829
  hyper

SEQ ID NO: 396337 - DNA, 45 bp, Homo sapiens; identical to SEQ ID NO: 198896
  chr3:42641736-42641781
  hyper

SEQ ID NO: 396338 - DNA, 33 bp, Homo sapiens; identical to SEQ ID NO: 198898
  chr3:42845262-42845295
  hyper

SEQ ID NO: 396339 - DNA, 207 bp, Homo sapiens; identical to SEQ ID NO: 281078
  chr3:43020689-43020896
  hyper

SEQ ID NO: 396340 - DNA, 37 bp, Homo sapiens; identical to SEQ ID NO: 229432
  chr3:43662919-43662956
  hyper

SEQ ID NO: 396341 - DNA, 214 bp, Homo sapiens; identical to SEQ ID NO: 198903
  chr3:43663334-43663548
  hyper

SEQ ID NO: 396342 - DNA, 359 bp, Homo sapiens; identical to SEQ ID NO: 198904
  chr3:43731959-43732318
  hyper

SEQ ID NO: 396343 - DNA, 141 bp, Homo sapiens; identical to SEQ ID NO: 222138
  chr3:44518642-44518783
  hyper

SEQ ID NO: 396344 - DNA, 162 bp, Homo sapiens; identical to SEQ ID NO: 198912
  chr3:44626179-44626341
  hyper

SEQ ID NO: 396345 - DNA, 66 bp, Homo sapiens; identical to SEQ ID NO: 198914
  chr3:44690079-44690145
  hyper

SEQ ID NO: 396346 - DNA, 255 bp, Homo sapiens; identical to SEQ ID NO: 198915
  chr3:44690175-44690430
  hyper

SEQ ID NO: 396347 - DNA, 213 bp, Homo sapiens; identical to SEQ ID NO: 281095
  chr3:44690489-44690702
  hyper

SEQ ID NO: 396348 - DNA, 219 bp, Homo sapiens; identical to SEQ ID NO: 281096
  chr3:44754122-44754341
  hyper

SEQ ID NO: 396349 - DNA, 188 bp, Homo sapiens; identical to SEQ ID NO: 229446
  chr3:45017826-45018014
  hyper

SEQ ID NO: 396350 - DNA, 87 bp, Homo sapiens; identical to SEQ ID NO: 229452
  chr3:46854159-46854246
  hyper

SEQ ID NO: 396351 - DNA, 137 bp, Homo sapiens; identical to SEQ ID NO: 229456
  chr3:46933850-46933987
  hyper

SEQ ID NO: 396352 - DNA, 237 bp, Homo sapiens; identical to SEQ ID NO: 229457
  chr3:47018180-47018417
  hyper

SEQ ID NO: 396353 - DNA, 278 bp, Homo sapiens; identical to SEQ ID NO: 198920
  chr3:47020746-47021024
  hyper

SEQ ID NO: 396354 - DNA, 84 bp, Homo sapiens; identical to SEQ ID NO: 108235
  chr3:47021079-47021163
  hyper

SEQ ID NO: 396355 - DNA, 78 bp, Homo sapiens; identical to SEQ ID NO: 222142
  chr3:47050739-47050817
  hyper

SEQ ID NO: 396356 - DNA, 453 bp, Homo sapiens; identical to SEQ ID NO: 229460
  chr3:47205420-47205873
  hyper

SEQ ID NO: 396357 - DNA, 196 bp, Homo sapiens; identical to SEQ ID NO: 229466
  chr3:48282460-48282656
  hyper

SEQ ID NO: 396358 - DNA, 218 bp, Homo sapiens; identical to SEQ ID NO: 229468
  chr3:48470350-48470568
  hyper

SEQ ID NO: 396359 - DNA, 332 bp, Homo sapiens; identical to SEQ ID NO: 229470
  chr3:48481454-48481786
  hyper

SEQ ID NO: 396360 - DNA, 213 bp, Homo sapiens; identical to SEQ ID NO: 229471
  chr3:48487961-48488174
  hyper

SEQ ID NO: 396361 - DNA, 312 bp, Homo sapiens; identical to SEQ ID NO: 229473
  chr3:48594205-48594517
  hyper

SEQ ID NO: 396362 - DNA, 39 bp, Homo sapiens; identical to SEQ ID NO: 229474
  chr3:48672961-48673000
  hyper

SEQ ID NO: 396363 - DNA, 257 bp, Homo sapiens; identical to SEQ ID NO: 198926
  chr3:48700956-48701213
  hyper

SEQ ID NO: 396364 - DNA, 212 bp, Homo sapiens; identical to SEQ ID NO: 198927
  chr3:48701259-48701471
  hyper

SEQ ID NO: 396365 - DNA, 111 bp, Homo sapiens; identical to SEQ ID NO: 198928
  chr3:48701576-48701687
  hyper

SEQ ID NO: 396366 - DNA, 56 bp, Homo sapiens; identical to SEQ ID NO: 229477
  chr3:48754857-48754913
  hyper

SEQ ID NO: 396367 - DNA, 47 bp, Homo sapiens; identical to SEQ ID NO: 198929
  chr3:48885300-48885347
  hyper

SEQ ID NO: 396368 - DNA, 391 bp, Homo sapiens; identical to SEQ ID NO: 229479
  chr3:48955804-48956195
  hyper

SEQ ID NO: 396369 - DNA, 293 bp, Homo sapiens; identical to SEQ ID NO: 229483
  chr3:49044449-49044742
  hyper

SEQ ID NO: 396370 - DNA, 137 bp, Homo sapiens; identical to SEQ ID NO: 229484
  chr3:49057921-49058058
  hyper

SEQ ID NO: 396371 - DNA, 31 bp, Homo sapiens; identical to SEQ ID NO: 229485
  chr3:49058561-49058592
  hyper

SEQ ID NO: 396372 - DNA, 286 bp, Homo sapiens; identical to SEQ ID NO: 229488
  chr3:49131391-49131677
  hyper

SEQ ID NO: 396373 - DNA, 38 bp, Homo sapiens; identical to SEQ ID NO: 229490
  chr3:49142558-49142596
  hyper

SEQ ID NO: 396374 - DNA, 188 bp, Homo sapiens; identical to SEQ ID NO: 198934
  chr3:49158289-49158477
  hyper

SEQ ID NO: 396375 - DNA, 243 bp, Homo sapiens; identical to SEQ ID NO: 229493
  chr3:49203302-49203545
  hyper

SEQ ID NO: 396376 - DNA, 239 bp, Homo sapiens; identical to SEQ ID NO: 229495
  chr3:49395700-49395939
  hyper

SEQ ID NO: 396377 - DNA, 104 bp, Homo sapiens; identical to SEQ ID NO: 281153
  chr3:49449335-49449439
  hyper

SEQ ID NO: 396378 - DNA, 525 bp, Homo sapiens; identical to SEQ ID NO: 108317
  chr3:49449454-49449979
  hyper

SEQ ID NO: 396379 - DNA, 165 bp, Homo sapiens; identical to SEQ ID NO: 281157
  chr3:49591667-49591832
  hyper

SEQ ID NO: 396380 - DNA, 242 bp, Homo sapiens; identical to SEQ ID NO: 229501
  chr3:49761709-49761951
  hyper

SEQ ID NO: 396381 - DNA, 67 bp, Homo sapiens; identical to SEQ ID NO: 229506
  chr3:49977376-49977443
  hyper

SEQ ID NO: 396382 - DNA, 39 bp, Homo sapiens; identical to SEQ ID NO: 198940
  chr3:50126252-50126291
  hyper

SEQ ID NO: 396383 - DNA, 172 bp, Homo sapiens; identical to SEQ ID NO: 229508
  chr3:50192568-50192740
  hyper

SEQ ID NO: 396384 - DNA, 201 bp, Homo sapiens; identical to SEQ ID NO: 229520
  chr3:50649440-50649641
  hyper

SEQ ID NO: 396385 - DNA, 59 bp, Homo sapiens; identical to SEQ ID NO: 198949
  chr3:50654360-50654419
  hyper

SEQ ID NO: 396386 - DNA, 643 bp, Homo sapiens; identical to SEQ ID NO: 281181
  chr3:50712377-50713020
  hyper

SEQ ID NO: 396387 - DNA, 312 bp, Homo sapiens; identical to SEQ ID NO: 281182
  chr3:51975954-51976266
  hyper

SEQ ID NO: 396388 - DNA, 55 bp, Homo sapiens; identical to SEQ ID NO: 229525
  chr3:52001437-52001492
  hyper

SEQ ID NO: 396389 - DNA, 188 bp, Homo sapiens; identical to SEQ ID NO: 229530
  chr3:52029759-52029947
  hyper

SEQ ID NO: 396390 - DNA, 225 bp, Homo sapiens; identical to SEQ ID NO: 229535
  chr3:52739477-52739702
  hyper

SEQ ID NO: 396391 - DNA, 322 bp, Homo sapiens; identical to SEQ ID NO: 229537
  chr3:52804893-52805215
  hyper

SEQ ID NO: 396392 - DNA, 303 bp, Homo sapiens; identical to SEQ ID NO: 229539
  chr3:53164409-53164712
  hyper

SEQ ID NO: 396393 - DNA, 147 bp, Homo sapiens; identical to SEQ ID NO: 222158
  chr3:53190592-53190739
  hyper

SEQ ID NO: 396394 - DNA, 302 bp, Homo sapiens; identical to SEQ ID NO: 229542
  chr3:53381571-53381873
  hyper

SEQ ID NO: 396395 - DNA, 154 bp, Homo sapiens; identical to SEQ ID NO: 222161
  chr3:53528643-53528797
  hyper

SEQ ID NO: 396396 - DNA, 273 bp, Homo sapiens; identical to SEQ ID NO: 198958
  chr3:53925898-53926171
  hyper

SEQ ID NO: 396397 - DNA, 80 bp, Homo sapiens; identical to SEQ ID NO: 281212
  chr3:55518994-55519074
  hyper

SEQ ID NO: 396398 - DNA, 78 bp, Homo sapiens; identical to SEQ ID NO: 281213
  chr3:55519141-55519219
  hyper

SEQ ID NO: 396399 - DNA, 263 bp, Homo sapiens; identical to SEQ ID NO: 281214
  chr3:55519253-55519516
  hyper

SEQ ID NO: 396400 - DNA, 379 bp, Homo sapiens; identical to SEQ ID NO: 198963
  chr3:56501326-56501705
  hyper

SEQ ID NO: 396401 - DNA, 139 bp, Homo sapiens; identical to SEQ ID NO: 229560
  chr3:57262340-57262479
  hyper

SEQ ID NO: 396402 - DNA, 196 bp, Homo sapiens; identical to SEQ ID NO: 229561
  chr3:57541812-57542008
  hyper

SEQ ID NO: 396403 - DNA, 62 bp, Homo sapiens; identical to SEQ ID NO: 229565
  chr3:57742969-57743031
  hyper

SEQ ID NO: 396404 - DNA, 166 bp, Homo sapiens; identical to SEQ ID NO: 229567
  chr3:58203325-58203491
  hyper

SEQ ID NO: 396405 - DNA, 179 bp, Homo sapiens; identical to SEQ ID NO: 198970
  chr3:58224037-58224216
  hyper

SEQ ID NO: 396406 - DNA, 64 bp, Homo sapiens; identical to SEQ ID NO: 229571
  chr3:58318385-58318449
  hyper

SEQ ID NO: 396407 - DNA, 384 bp, Homo sapiens
  chr3:61546308-61546692
  hyper
cctagtcctcccatttcccccggacgcctctccccgattgctaaagaagcagccgctccccgggtagctgccaggaaatcagtccggccccgcggcgctgctttcaccctgcagggtgtaagaggcgcacttcctgcgccctccccgcggccaaaccggggtgcgggaaccttctccagagaagctgcgagttggggaaactccgccaccgatccatcgtggcgccgggaaaggggatgcggggctcggaagggctagatttcgcaatcctgggatcgacattcctcccctcccccactttccccagccttggactgggccaatgaaagcccgaaaaagaaaaaaaaaaaaaattaaatctcaatgtagccggagtgcaaaggc

SEQ ID NO: 396408 - DNA, 704 bp, Homo sapiens; identical to SEQ ID NO: 281244
  chr3:61548213-61548917
  hyper

SEQ ID NO: 396409 - DNA, 51 bp, Homo sapiens; identical to SEQ ID NO: 281245
  chr3:61549008-61549059
  hyper

SEQ ID NO: 396410 - DNA, 44 bp, Homo sapiens; identical to SEQ ID NO: 198974
  chr3:62254650-62254694
  hyper

SEQ ID NO: 396411 - DNA, 31 bp, Homo sapiens; identical to SEQ ID NO: 198975
  chr3:62254724-62254755
  hyper

SEQ ID NO: 396412 - DNA, 44 bp, Homo sapiens; identical to SEQ ID NO: 198976
  chr3:62358624-62358668
  hyper

SEQ ID NO: 396413 - DNA, 40 bp, Homo sapiens; identical to SEQ ID NO: 281252
  chr3:62360635-62360675
  hyper

SEQ ID NO: 396414 - DNA, 52 bp, Homo sapiens; identical to SEQ ID NO: 281257
  chr3:62861939-62861991
  hyper

SEQ ID NO: 396415 - DNA, 40 bp, Homo sapiens; identical to SEQ ID NO: 229597
  chr3:63850067-63850107
  hyper

SEQ ID NO: 396416 - DNA, 156 bp, Homo sapiens; identical to SEQ ID NO: 222173
  chr3:69062098-69062254
  hyper

SEQ ID NO: 396417 - DNA, 225 bp, Homo sapiens; identical to SEQ ID NO: 281283
  chr3:71833751-71833976
  hyper

SEQ ID NO: 396418 - DNA, 448 bp, Homo sapiens; identical to SEQ ID NO: 281292
  chr3:74663366-74663814
  hyper

SEQ ID NO: 396419 - DNA, 72 bp, Homo sapiens; identical to SEQ ID NO: 199008
  chr3:75471467-75471539
  hyper

SEQ ID NO: 396420 - DNA, 339 bp, Homo sapiens; identical to SEQ ID NO: 229625
  chr3:77087670-77088009
  hyper

SEQ ID NO: 396421 - DNA, 320 bp, Homo sapiens; identical to SEQ ID NO: 281296
  chr3:79067817-79068137
  hyper

SEQ ID NO: 396422 - DNA, 215 bp, Homo sapiens; identical to SEQ ID NO: 281297
  chr3:79068331-79068546
  hyper

SEQ ID NO: 396423 - DNA, 73 bp, Homo sapiens; identical to SEQ ID NO: 229628
  chr3:79068799-79068872
  hyper

SEQ ID NO: 396424 - DNA, 370 bp, Homo sapiens; identical to SEQ ID NO: 281300
  chr3:79816408-79816778
  hyper

SEQ ID NO: 396425 - DNA, 201 bp, Homo sapiens; identical to SEQ ID NO: 281301
  chr3:79817015-79817216
  hyper

SEQ ID NO: 396426 - DNA, 243 bp, Homo sapiens; identical to SEQ ID NO: 383925
  chr3:85008991-85009234
  hyper

SEQ ID NO: 396427 - DNA, 60 bp, Homo sapiens; identical to SEQ ID NO: 199012
  chr3:87039596-87039656
  hyper

SEQ ID NO: 396428 - DNA, 206 bp, Homo sapiens; identical to SEQ ID NO: 199013
  chr3:87040548-87040754
  hyper

SEQ ID NO: 396429 - DNA, 65 bp, Homo sapiens; identical to SEQ ID NO: 199014
  chr3:87276369-87276434
  hyper

SEQ ID NO: 396430 - DNA, 163 bp, Homo sapiens; identical to SEQ ID NO: 281312
  chr3:88198587-88198750
  hyper

SEQ ID NO: 396431 - DNA, 432 bp, Homo sapiens; identical to SEQ ID NO: 281314
  chr3:89156623-89157055
  hyper

SEQ ID NO: 396432 - DNA, 38 bp, Homo sapiens; identical to SEQ ID NO: 199017
  chr3:93692750-93692788
  hyper

SEQ ID NO: 396433 - DNA, 31 bp, Homo sapiens; identical to SEQ ID NO: 281322
  chr3:97483737-97483768
  hyper

SEQ ID NO: 396434 - DNA, 101 bp, Homo sapiens; identical to SEQ ID NO: 108591
  chr3:97483833-97483934
  hyper

SEQ ID NO: 396435 - DNA, 271 bp, Homo sapiens; identical to SEQ ID NO: 222186
  chr3:97690771-97691042
  hyper

SEQ ID NO: 396436 - DNA, 37 bp, Homo sapiens; identical to SEQ ID NO: 229650
  chr3:97691378-97691415
  hyper

SEQ ID NO: 396437 - DNA, 92 bp, Homo sapiens; identical to SEQ ID NO: 199021
  chr3:98311894-98311986
  hyper

SEQ ID NO: 396438 - DNA, 323 bp, Homo sapiens; identical to SEQ ID NO: 281329
  chr3:98451047-98451370
  hyper

SEQ ID NO: 396439 - DNA, 206 bp, Homo sapiens; identical to SEQ ID NO: 281330
  chr3:98451479-98451685
  hyper

SEQ ID NO: 396440 - DNA, 160 bp, Homo sapiens; identical to SEQ ID NO: 281331
  chr3:98452371-98452531
  hyper

SEQ ID NO: 396441 - DNA, 117 bp, Homo sapiens; identical to SEQ ID NO: 229656
  chr3:99536600-99536717
  hyper

SEQ ID NO: 396442 - DNA, 56 bp, Homo sapiens; identical to SEQ ID NO: 229657
  chr3:99787818-99787874
  hyper

SEQ ID NO: 396443 - DNA, 131 bp, Homo sapiens; identical to SEQ ID NO: 229658
  chr3:100053358-100053489
  hyper

SEQ ID NO: 396444 - DNA, 981 bp, Homo sapiens; identical to SEQ ID NO: 199027
  chr3:101231399-101232380
  hyper

SEQ ID NO: 396445 - DNA, 495 bp, Homo sapiens; identical to SEQ ID NO: 229661
  chr3:101280471-101280966
  hyper

SEQ ID NO: 396446 - DNA, 189 bp, Homo sapiens; identical to SEQ ID NO: 199028
  chr3:101292846-101293035
  hyper

SEQ ID NO: 396447 - DNA, 204 bp, Homo sapiens; identical to SEQ ID NO: 229667
  chr3:101546676-101546880
  hyper

SEQ ID NO: 396448 - DNA, 208 bp, Homo sapiens; identical to SEQ ID NO: 229673
  chr3:107243052-107243260
  hyper

SEQ ID NO: 396449 - DNA, 393 bp, Homo sapiens; identical to SEQ ID NO: 229675
  chr3:107646510-107646903
  hyper

SEQ ID NO: 396450 - DNA, 76 bp, Homo sapiens; identical to SEQ ID NO: 383933
  chr3:110791244-110791320
  hyper

SEQ ID NO: 396451 - DNA, 432 bp, Homo sapiens; identical to SEQ ID NO: 229682
  chr3:111804991-111805423
  hyper

SEQ ID NO: 396452 - DNA, 35 bp, Homo sapiens; identical to SEQ ID NO: 229684
  chr3:112709773-112709808
  hyper

SEQ ID NO: 396453 - DNA, 93 bp, Homo sapiens; identical to SEQ ID NO: 229686
  chr3:113233979-113234072
  hyper

SEQ ID NO: 396454 - DNA, 252 bp, Homo sapiens; identical to SEQ ID NO: 281376
  chr3:113557555-113557807
  hyper

SEQ ID NO: 396455 - DNA, 377 bp, Homo sapiens; identical to SEQ ID NO: 229692
  chr3:113775219-113775596
  hyper

SEQ ID NO: 396456 - DNA, 52 bp, Homo sapiens; identical to SEQ ID NO: 199053
  chr3:117715651-117715703
  hyper

SEQ ID NO: 396457 - DNA, 160 bp, Homo sapiens; identical to SEQ ID NO: 281393
  chr3:120168944-120169104
  hyper

SEQ ID NO: 396458 - DNA, 218 bp, Homo sapiens
  chr3:120169149-120169367
  hyper
gacttgggagggaaaagtccccaactactctcagtctcctctgaagtgaaggacggaactgaggcgcctttttgaactcgctgctgctccagtcgccgcctcgtccccgtcggcccagcccgtcccctctcctcctccccgctctccctccatgttagccgcggcggggctcccgcttacggcccgaactacttttcctgctttaaagatttaagttt

SEQ ID NO: 396459 - DNA, 32 bp, Homo sapiens; identical to SEQ ID NO: 229710
  chr3:120628277-120628309
  hyper

SEQ ID NO: 396460 - DNA, 259 bp, Homo sapiens; identical to SEQ ID NO: 229712
  chr3:121264679-121264938
  hyper

SEQ ID NO: 396461 - DNA, 197 bp, Homo sapiens; identical to SEQ ID NO: 229713
  chr3:121468538-121468735
  hyper

SEQ ID NO: 396462 - DNA, 101 bp, Homo sapiens; identical to SEQ ID NO: 229714
  chr3:121553926-121554027
  hyper

SEQ ID NO: 396463 - DNA, 285 bp, Homo sapiens; identical to SEQ ID NO: 229717
  chr3:122101937-122102222
  hyper

SEQ ID NO: 396464 - DNA, 273 bp, Homo sapiens; identical to SEQ ID NO: 229718
  chr3:122134806-122135079
  hyper

SEQ ID NO: 396465 - DNA, 353 bp, Homo sapiens; identical to SEQ ID NO: 229719
  chr3:122282989-122283342
  hyper

SEQ ID NO: 396466 - DNA, 250 bp, Homo sapiens; identical to SEQ ID NO: 229722
  chr3:122513919-122514169
  hyper

SEQ ID NO: 396467 - DNA, 585 bp, Homo sapiens; identical to SEQ ID NO: 281411
  chr3:122746969-122747554
  hyper

SEQ ID NO: 396468 - DNA, 186 bp, Homo sapiens; identical to SEQ ID NO: 229725
  chr3:122920576-122920762
  hyper

SEQ ID NO: 396469 - DNA, 261 bp, Homo sapiens; identical to SEQ ID NO: 222207
  chr3:124605642-124605903
  hyper

SEQ ID NO: 396470 - DNA, 191 bp, Homo sapiens; identical to SEQ ID NO: 281427
  chr3:125931775-125931966
  hyper

SEQ ID NO: 396471 - DNA, 232 bp, Homo sapiens; identical to SEQ ID NO: 199072
  chr3:125932020-125932252
  hyper

SEQ ID NO: 396472 - DNA, 361 bp, Homo sapiens; identical to SEQ ID NO: 281430
  chr3:126074822-126075183
  hyper

SEQ ID NO: 396473 - DNA, 306 bp, Homo sapiens; identical to SEQ ID NO: 281431
  chr3:126075653-126075959
  hyper

SEQ ID NO: 396474 - DNA, 179 bp, Homo sapiens; identical to SEQ ID NO: 281432
  chr3:126076063-126076242
  hyper

SEQ ID NO: 396475 - DNA, 140 bp, Homo sapiens; identical to SEQ ID NO: 222210
  chr3:126195083-126195223
  hyper

SEQ ID NO: 396476 - DNA, 70 bp, Homo sapiens; identical to SEQ ID NO: 281434
  chr3:126242791-126242861
  hyper

SEQ ID NO: 396477 - DNA, 327 bp, Homo sapiens; identical to SEQ ID NO: 281435
  chr3:126243058-126243385
  hyper

SEQ ID NO: 396478 - DNA, 176 bp, Homo sapiens; identical to SEQ ID NO: 281436
  chr3:126243461-126243637
  hyper

SEQ ID NO: 396479 - DNA, 113 bp, Homo sapiens; identical to SEQ ID NO: 281441
  chr3:126854312-126854425
  hyper

SEQ ID NO: 396480 - DNA, 140 bp, Homo sapiens; identical to SEQ ID NO: 229752
  chr3:127174691-127174831
  hyper

SEQ ID NO: 396481 - DNA, 340 bp, Homo sapiens; identical to SEQ ID NO: 229755
  chr3:127309528-127309868
  hyper

SEQ ID NO: 396482 - DNA, 207 bp, Homo sapiens; identical to SEQ ID NO: 199079
  chr3:127348123-127348330
  hyper

SEQ ID NO: 396483 - DNA, 334 bp, Homo sapiens; identical to SEQ ID NO: 281455
  chr3:128201959-128202293
  hyper

SEQ ID NO: 396484 - DNA, 352 bp, Homo sapiens; identical to SEQ ID NO: 281456
  chr3:128202708-128203060
  hyper

SEQ ID NO: 396485 - DNA, 46 bp, Homo sapiens; identical to SEQ ID NO: 281462
  chr3:128564768-128564814
  hyper

SEQ ID NO: 396486 - DNA, 120 bp, Homo sapiens; identical to SEQ ID NO: 229769
  chr3:128598081-128598201
  hyper

SEQ ID NO: 396487 - DNA, 188 bp, Homo sapiens; identical to SEQ ID NO: 199087
  chr3:128840084-128840272
  hyper

SEQ ID NO: 396488 - DNA, 120 bp, Homo sapiens; identical to SEQ ID NO: 229775
  chr3:128968529-128968649
  hyper

SEQ ID NO: 396489 - DNA, 76 bp, Homo sapiens; identical to SEQ ID NO: 229780
  chr3:129611907-129611983
  hyper

SEQ ID NO: 396490 - DNA, 70 bp, Homo sapiens
  chr3:130235723-130235793
  hyper
cggatctgcacgccctgcctatctttggggtacagagaaggcgcgtaccatgaaagccccaacttcccct

SEQ ID NO: 396491 - DNA, 219 bp, Homo sapiens; identical to SEQ ID NO: 229783
  chr3:130465368-130465587
  hyper

SEQ ID NO: 396492 - DNA, 182 bp, Homo sapiens; identical to SEQ ID NO: 229784
  chr3:130613296-130613478
  hyper

SEQ ID NO: 396493 - DNA, 228 bp, Homo sapiens; identical to SEQ ID NO: 281485
  chr3:131245722-131245950
  hyper

SEQ ID NO: 396494 - DNA, 70 bp, Homo sapiens; identical to SEQ ID NO: 108890
  chr3:131246019-131246089
  hyper

SEQ ID NO: 396495 - DNA, 44 bp, Homo sapiens; identical to SEQ ID NO: 281487
  chr3:131752786-131752830
  hyper

SEQ ID NO: 396496 - DNA, 49 bp, Homo sapiens; identical to SEQ ID NO: 199099
  chr3:133276458-133276507
  hyper

SEQ ID NO: 396497 - DNA, 385 bp, Homo sapiens; identical to SEQ ID NO: 229798
  chr3:133524471-133524856
  hyper

SEQ ID NO: 396498 - DNA, 134 bp, Homo sapiens; identical to SEQ ID NO: 281499
  chr3:133646157-133646291
  hyper

SEQ ID NO: 396499 - DNA, 266 bp, Homo sapiens; identical to SEQ ID NO: 281500
  chr3:133646451-133646717
  hyper

SEQ ID NO: 396500 - DNA, 35 bp, Homo sapiens; identical to SEQ ID NO: 281501
  chr3:133748105-133748140
  hyper

SEQ ID NO: 396501 - DNA, 52 bp, Homo sapiens; identical to SEQ ID NO: 199100
  chr3:133969907-133969959
  hyper

SEQ ID NO: 396502 - DNA, 61 bp, Homo sapiens; identical to SEQ ID NO: 199101
  chr3:134092503-134092564
  hyper

SEQ ID NO: 396503 - DNA, 274 bp, Homo sapiens
  chr3:134092643-134092917
  hyper
ttccaaatactctaacgctgacgtcaccgggctggacagcaggctgcattctttctaagtgagggccaattcgtggctccagagaggattttccaaggaagacaaagaggaattcttggactagttgggggcaaaggcacctgtaacccccacctaaccaaatcagcccgcaggaccctgcaacttgagctccaagcggcgcctccatccctgtcccccgccacccccacccccgccgacctgcaacccgaaacactgtggctgttgtctccgg

SEQ ID NO: 396504 - DNA, 108 bp, Homo sapiens; identical to SEQ ID NO: 229803
  chr3:134093757-134093865
  hyper

SEQ ID NO: 396505 - DNA, 72 bp, Homo sapiens; identical to SEQ ID NO: 281511
  chr3:134125148-134125220
  hyper

SEQ ID NO: 396506 - DNA, 366 bp, Homo sapiens; identical to SEQ ID NO: 229805
  chr3:134204740-134205106
  hyper

SEQ ID NO: 396507 - DNA, 78 bp, Homo sapiens; identical to SEQ ID NO: 281515
  chr3:134514788-134514866
  hyper

SEQ ID NO: 396508 - DNA, 140 bp, Homo sapiens; identical to SEQ ID NO: 281516
  chr3:134514895-134515035
  hyper

SEQ ID NO: 396509 - DNA, 750 bp, Homo sapiens; identical to SEQ ID NO: 281525
  chr3:137482464-137483214
  hyper

SEQ ID NO: 396510 - DNA, 69 bp, Homo sapiens; identical to SEQ ID NO: 281526
  chr3:137483244-137483313
  hyper

SEQ ID NO: 396511 - DNA, 738 bp, Homo sapiens; identical to SEQ ID NO: 108956
  chr3:137833932-137834670
  hyper

SEQ ID NO: 396512 - DNA, 260 bp, Homo sapiens; identical to SEQ ID NO: 229825
  chr3:137893550-137893810
  hyper

SEQ ID NO: 396513 - DNA, 158 bp, Homo sapiens; identical to SEQ ID NO: 229826
  chr3:137906199-137906357
  hyper

SEQ ID NO: 396514 - DNA, 130 bp, Homo sapiens; identical to SEQ ID NO: 229827
  chr3:138048356-138048486
  hyper

SEQ ID NO: 396515 - DNA, 33 bp, Homo sapiens; identical to SEQ ID NO: 281536
  chr3:138066747-138066780
  hyper

SEQ ID NO: 396516 - DNA, 560 bp, Homo sapiens; identical to SEQ ID NO: 199116
  chr3:138153256-138153816
  hyper

SEQ ID NO: 396517 - DNA, 572 bp, Homo sapiens; identical to SEQ ID NO: 229831
  chr3:138312854-138313426
  hyper

SEQ ID NO: 396518 - DNA, 43 bp, Homo sapiens; identical to SEQ ID NO: 229832
  chr3:138553746-138553789
  hyper

SEQ ID NO: 396519 - DNA, 156 bp, Homo sapiens; identical to SEQ ID NO: 229833
  chr3:138634847-138635003
  hyper

SEQ ID NO: 396520 - DNA, 268 bp, Homo sapiens; identical to SEQ ID NO: 281549
  chr3:138668328-138668596
  hyper

SEQ ID NO: 396521 - DNA, 254 bp, Homo sapiens; identical to SEQ ID NO: 229840
  chr3:139062831-139063085
  hyper

SEQ ID NO: 396522 - DNA, 237 bp, Homo sapiens; identical to SEQ ID NO: 229849
  chr3:140950012-140950249
  hyper

SEQ ID NO: 396523 - DNA, 175 bp, Homo sapiens; identical to SEQ ID NO: 229850
  chr3:140951287-140951462
  hyper

SEQ ID NO: 396524 - DNA, 110 bp, Homo sapiens; identical to SEQ ID NO: 281557
  chr3:141030361-141030471
  hyper

SEQ ID NO: 396525 - DNA, 103 bp, Homo sapiens; identical to SEQ ID NO: 109000
  chr3:141030521-141030624
  hyper

SEQ ID NO: 396526 - DNA, 230 bp, Homo sapiens; identical to SEQ ID NO: 229855
  chr3:141944304-141944534
  hyper

SEQ ID NO: 396527 - DNA, 33 bp, Homo sapiens; identical to SEQ ID NO: 229856
  chr3:142166775-142166808
  hyper

SEQ ID NO: 396528 - DNA, 356 bp, Homo sapiens; identical to SEQ ID NO: 281574
  chr3:147074101-147074457
  hyper

SEQ ID NO: 396529 - DNA, 131 bp, Homo sapiens; identical to SEQ ID NO: 281575
  chr3:147074487-147074618
  hyper

SEQ ID NO: 396530 - DNA, 206 bp, Homo sapiens; identical to SEQ ID NO: 281581
  chr3:147089099-147089305
  hyper

SEQ ID NO: 396531 - DNA, 431 bp, Homo sapiens; identical to SEQ ID NO: 229873
  chr3:147095403-147095834
  hyper

SEQ ID NO: 396532 - DNA, 129 bp, Homo sapiens; identical to SEQ ID NO: 229878
  chr3:147107635-147107764
  hyper

SEQ ID NO: 396533 - DNA, 292 bp, Homo sapiens; identical to SEQ ID NO: 281590
  chr3:147112343-147112635
  hyper

SEQ ID NO: 396534 - DNA, 40 bp, Homo sapiens; identical to SEQ ID NO: 199132
  chr3:147112665-147112705
  hyper

SEQ ID NO: 396535 - DNA, 214 bp, Homo sapiens; identical to SEQ ID NO: 199133
  chr3:148709993-148710207
  hyper

SEQ ID NO: 396536 - DNA, 372 bp, Homo sapiens; identical to SEQ ID NO: 199135
  chr3:149689311-149689683
  hyper

SEQ ID NO: 396537 - DNA, 54 bp, Homo sapiens; identical to SEQ ID NO: 199136
  chr3:150126521-150126575
  hyper

SEQ ID NO: 396538 - DNA, 357 bp, Homo sapiens; identical to SEQ ID NO: 229893
  chr3:150264352-150264709
  hyper

SEQ ID NO: 396539 - DNA, 210 bp, Homo sapiens; identical to SEQ ID NO: 222252
  chr3:150320966-150321176
  hyper

SEQ ID NO: 396540 - DNA, 37 bp, Homo sapiens; identical to SEQ ID NO: 229897
  chr3:151556892-151556929
  hyper

SEQ ID NO: 396541 - DNA, 108 bp, Homo sapiens; identical to SEQ ID NO: 229898
  chr3:151986596-151986704
  hyper

SEQ ID NO: 396542 - DNA, 174 bp, Homo sapiens; identical to SEQ ID NO: 229899
  chr3:152016858-152017032
  hyper

SEQ ID NO: 396543 - DNA, 325 bp, Homo sapiens; identical to SEQ ID NO: 229904
  chr3:154042065-154042390
  hyper

SEQ ID NO: 396544 - DNA, 1286 bp, Homo sapiens; identical to SEQ ID NO: 229907
  chr3:155461744-155463030
  hyper

SEQ ID NO: 396545 - DNA, 41 bp, Homo sapiens; identical to SEQ ID NO: 199149
  chr3:155722292-155722333
  hyper

SEQ ID NO: 396546 - DNA, 244 bp, Homo sapiens; identical to SEQ ID NO: 229914
  chr3:156877883-156878127
  hyper

SEQ ID NO: 396547 - DNA, 213 bp, Homo sapiens; identical to SEQ ID NO: 229915
  chr3:157154537-157154750
  hyper

SEQ ID NO: 396548 - DNA, 64 bp, Homo sapiens; identical to SEQ ID NO: 199153
  chr3:157155188-157155252
  hyper

SEQ ID NO: 396549 - DNA, 211 bp, Homo sapiens; identical to SEQ ID NO: 281630
  chr3:157155490-157155701
  hyper

SEQ ID NO: 396550 - DNA, 204 bp, Homo sapiens; identical to SEQ ID NO: 281631
  chr3:157155778-157155982
  hyper

SEQ ID NO: 396551 - DNA, 288 bp, Homo sapiens; identical to SEQ ID NO: 229926
  chr3:158362204-158362492
  hyper

SEQ ID NO: 396552 - DNA, 211 bp, Homo sapiens; identical to SEQ ID NO: 222257
  chr3:159706814-159707025
  hyper

SEQ ID NO: 396553 - DNA, 157 bp, Homo sapiens; identical to SEQ ID NO: 199177
  chr3:164924661-164924818
  hyper

SEQ ID NO: 396554 - DNA, 351 bp, Homo sapiens; identical to SEQ ID NO: 229946
  chr3:167453720-167454071
  hyper

SEQ ID NO: 396555 - DNA, 234 bp, Homo sapiens; identical to SEQ ID NO: 229951
  chr3:168867255-168867489
  hyper

SEQ ID NO: 396556 - DNA, 87 bp, Homo sapiens; identical to SEQ ID NO: 222261
  chr3:169380983-169381070
  hyper

SEQ ID NO: 396557 - DNA, 163 bp, Homo sapiens; identical to SEQ ID NO: 222262
  chr3:169381408-169381571
  hyper

SEQ ID NO: 396558 - DNA, 519 bp, Homo sapiens; identical to SEQ ID NO: 199184
  chr3:169386025-169386544
  hyper

SEQ ID NO: 396559 - DNA, 73 bp, Homo sapiens; identical to SEQ ID NO: 199185
  chr3:169386633-169386706
  hyper

SEQ ID NO: 396560 - DNA, 322 bp, Homo sapiens; identical to SEQ ID NO: 229957
  chr3:169386973-169387295
  hyper

SEQ ID NO: 396561 - DNA, 315 bp, Homo sapiens; identical to SEQ ID NO: 229961
  chr3:169684381-169684696
  hyper

SEQ ID NO: 396562 - DNA, 56 bp, Homo sapiens; identical to SEQ ID NO: 229964
  chr3:169899556-169899612
  hyper

SEQ ID NO: 396563 - DNA, 254 bp, Homo sapiens; identical to SEQ ID NO: 199190
  chr3:170074116-170074370
  hyper

SEQ ID NO: 396564 - DNA, 172 bp, Homo sapiens; identical to SEQ ID NO: 281697
  chr3:170136455-170136627
  hyper

SEQ ID NO: 396565 - DNA, 349 bp, Homo sapiens; identical to SEQ ID NO: 199194
  chr3:170746074-170746423
  hyper

SEQ ID NO: 396566 - DNA, 284 bp, Homo sapiens; identical to SEQ ID NO: 229976
  chr3:171178162-171178446
  hyper

SEQ ID NO: 396567 - DNA, 196 bp, Homo sapiens; identical to SEQ ID NO: 199198
  chr3:171757155-171757351
  hyper

SEQ ID NO: 396568 - DNA, 154 bp, Homo sapiens; identical to SEQ ID NO: 199199
  chr3:171758579-171758733
  hyper

SEQ ID NO: 396569 - DNA, 287 bp, Homo sapiens; identical to SEQ ID NO: 199201
  chr3:172240998-172241285
  hyper

SEQ ID NO: 396570 - DNA, 162 bp, Homo sapiens; identical to SEQ ID NO: 229982
  chr3:172313933-172314095
  hyper

SEQ ID NO: 396571 - DNA, 243 bp, Homo sapiens; identical to SEQ ID NO: 281714
  chr3:173113694-173113937
  hyper

SEQ ID NO: 396572 - DNA, 183 bp, Homo sapiens
  chr3:173115774-173115957
  hyper
gccccagtcactgcagctcttcaccctagagctgtgccctgggaccacagagaccaagagcatggaaatcggctgagaggtacaaaagaaataaggaacagattacgagaaagcggggagggtttcctggcgaaatacggaggctgagcagatggaggaacaatgccgcctccagaagaaaac

SEQ ID NO: 396573 - DNA, 201 bp, Homo sapiens; identical to SEQ ID NO: 229989
  chr3:174158463-174158664
  hyper

SEQ ID NO: 396574 - DNA, 159 bp, Homo sapiens; identical to SEQ ID NO: 199208
  chr3:178789082-178789241
  hyper

SEQ ID NO: 396575 - DNA, 157 bp, Homo sapiens; identical to SEQ ID NO: 229993
  chr3:178865536-178865693
  hyper

SEQ ID NO: 396576 - DNA, 40 bp, Homo sapiens; identical to SEQ ID NO: 199210
  chr3:179064154-179064194
  hyper

SEQ ID NO: 396577 - DNA, 444 bp, Homo sapiens; identical to SEQ ID NO: 229995
  chr3:179065418-179065862
  hyper

SEQ ID NO: 396578 - DNA, 116 bp, Homo sapiens; identical to SEQ ID NO: 229998
  chr3:179280318-179280434
  hyper

SEQ ID NO: 396579 - DNA, 253 bp, Homo sapiens; identical to SEQ ID NO: 230000
  chr3:179322630-179322883
  hyper

SEQ ID NO: 396580 - DNA, 79 bp, Homo sapiens; identical to SEQ ID NO: 230001
  chr3:179367505-179367584
  hyper

SEQ ID NO: 396581 - DNA, 35 bp, Homo sapiens; identical to SEQ ID NO: 230002
  chr3:179370451-179370486
  hyper

SEQ ID NO: 396582 - DNA, 190 bp, Homo sapiens; identical to SEQ ID NO: 230008
  chr3:180630143-180630333
  hyper

SEQ ID NO: 396583 - DNA, 236 bp, Homo sapiens; identical to SEQ ID NO: 230011
  chr3:181418234-181418470
  hyper

SEQ ID NO: 396584 - DNA, 95 bp, Homo sapiens; identical to SEQ ID NO: 230012
  chr3:181418702-181418797
  hyper

SEQ ID NO: 396585 - DNA, 64 bp, Homo sapiens; identical to SEQ ID NO: 199216
  chr3:181428196-181428260
  hyper

SEQ ID NO: 396586 - DNA, 331 bp, Homo sapiens; identical to SEQ ID NO: 230027
  chr3:182399999-182400330
  hyper

SEQ ID NO: 396587 - DNA, 85 bp, Homo sapiens; identical to SEQ ID NO: 230028
  chr3:182510867-182510952
  hyper

SEQ ID NO: 396588 - DNA, 170 bp, Homo sapiens; identical to SEQ ID NO: 199225
  chr3:182511623-182511793
  hyper

SEQ ID NO: 396589 - DNA, 145 bp, Homo sapiens; identical to SEQ ID NO: 199227
  chr3:182698591-182698736
  hyper

SEQ ID NO: 396590 - DNA, 79 bp, Homo sapiens; identical to SEQ ID NO: 230041
  chr3:183415419-183415498
  hyper

SEQ ID NO: 396591 - DNA, 231 bp, Homo sapiens; identical to SEQ ID NO: 222281
  chr3:183602814-183603045
  hyper

SEQ ID NO: 396592 - DNA, 86 bp, Homo sapiens; identical to SEQ ID NO: 199238
  chr3:183851915-183852001
  hyper

SEQ ID NO: 396593 - DNA, 45 bp, Homo sapiens; identical to SEQ ID NO: 230045
  chr3:183852315-183852360
  hyper

SEQ ID NO: 396594 - DNA, 117 bp, Homo sapiens; identical to SEQ ID NO: 230048
  chr3:183967307-183967424
  hyper

SEQ ID NO: 396595 - DNA, 72 bp, Homo sapiens; identical to SEQ ID NO: 199239
  chr3:184053512-184053584
  hyper

SEQ ID NO: 396596 - DNA, 249 bp, Homo sapiens; identical to SEQ ID NO: 230052
  chr3:184080988-184081237
  hyper

SEQ ID NO: 396597 - DNA, 224 bp, Homo sapiens; identical to SEQ ID NO: 281784
  chr3:184097688-184097912
  hyper

SEQ ID NO: 396598 - DNA, 280 bp, Homo sapiens; identical to SEQ ID NO: 222284
  chr3:184098372-184098652
  hyper

SEQ ID NO: 396599 - DNA, 86 bp, Homo sapiens; identical to SEQ ID NO: 281786
  chr3:184099331-184099417
  hyper

SEQ ID NO: 396600 - DNA, 34 bp, Homo sapiens; identical to SEQ ID NO: 281787
  chr3:184099446-184099480
  hyper

SEQ ID NO: 396601 - DNA, 78 bp, Homo sapiens
  chr3:184279816-184279894
  hyper
gcatccccaggaccgccgggctcggtgcaccgcctcggtcccggagccgcccgcctggattgcattccctcctctcct

SEQ ID NO: 396602 - DNA, 242 bp, Homo sapiens; identical to SEQ ID NO: 199242
  chr3:184279929-184280171
  hyper

SEQ ID NO: 396603 - DNA, 68 bp, Homo sapiens; identical to SEQ ID NO: 281790
  chr3:184280222-184280290
  hyper

SEQ ID NO: 396604 - DNA, 69 bp, Homo sapiens; identical to SEQ ID NO: 230057
  chr3:184280320-184280389
  hyper

SEQ ID NO: 396605 - DNA, 135 bp, Homo sapiens; identical to SEQ ID NO: 281794
  chr3:184320096-184320231
  hyper

SEQ ID NO: 396606 - DNA, 63 bp, Homo sapiens; identical to SEQ ID NO: 230063
  chr3:184430244-184430307
  hyper

SEQ ID NO: 396607 - DNA, 229 bp, Homo sapiens; identical to SEQ ID NO: 230064
  chr3:184530229-184530458
  hyper

SEQ ID NO: 396608 - DNA, 165 bp, Homo sapiens; identical to SEQ ID NO: 230066
  chr3:185303809-185303974
  hyper

SEQ ID NO: 396609 - DNA, 372 bp, Homo sapiens; identical to SEQ ID NO: 230067
  chr3:185541060-185541432
  hyper

SEQ ID NO: 396610 - DNA, 236 bp, Homo sapiens; identical to SEQ ID NO: 199248
  chr3:185542334-185542570
  hyper

SEQ ID NO: 396611 - DNA, 412 bp, Homo sapiens
  chr3:185825761-185826173
  hyper
aagctcaatgcttcattcacaaaaagggaagaaaaaaaaaaaagccgcagggagcagcgagccaacgaaagaaacccgcttcattcataaagtcacccacattcataaaaacgaggtgcggcgcccggcgctaccaaccgcttccaatccccccacccccaacatctctccctggcaccccctcgtcgaccaggagttcggttcccccccgagttttctccaccctctgaaaatgcggccggaaccctaatccgctgcgaggctgcagcatctttcggtgctgtcccctccacacccgtgttatccccaccatccccaggccgctgttccggtgcgccccgattttctcgagtcgccgcacagccggacgccctcagcctgctgggtgggagcagggcgactggatgtccac

SEQ ID NO: 396612 - DNA, 37 bp, Homo sapiens; identical to SEQ ID NO: 230073
  chr3:185826637-185826674
  hyper

SEQ ID NO: 396613 - DNA, 526 bp, Homo sapiens
  chr3:185826974-185827500
  hyper
gttcccattggccagaggccgttcccgcggctgtccatcacctcttgtttaccctgtctgcgggcaaatccaaccaagccgccccatcaactccggcccccattggccagcggtgcatctctctccaccccctcaggggtctgttttacataatttatgcaccgggggccattggccaatcagcacaggcttgtttatataatgaatgtaaggacgtttttcattcataaaaaacgcgacctgagggggaagcttagctgagtcagtgaagcacttaaaggggccgaggccaggaggagccgccgttacttcccttctcgccgctctcccgacttttcaccgaggcacgactcttcccccttacccactcacccccacttctccatccagcaaagccccgaccagaattgggtctcttggcgccagacgttcgcagctgcagcaccaagcaaagttatcattttagaattcaggggagaggaattcgtcattccacacaaactcgctgaccgacctgggcgtttag

SEQ ID NO: 396614 - DNA, 48 bp, Homo sapiens; identical to SEQ ID NO: 230081
  chr3:186288738-186288786
  hyper

SEQ ID NO: 396615 - DNA, 47 bp, Homo sapiens; identical to SEQ ID NO: 199254
  chr3:186544979-186545026
  hyper

SEQ ID NO: 396616 - DNA, 144 bp, Homo sapiens; identical to SEQ ID NO: 222300
  chr3:187462668-187462812
  hyper

SEQ ID NO: 396617 - DNA, 227 bp, Homo sapiens; identical to SEQ ID NO: 281825
  chr3:187463100-187463327
  hyper

SEQ ID NO: 396618 - DNA, 358 bp, Homo sapiens; identical to SEQ ID NO: 281828
  chr3:189838066-189838424
  hyper

SEQ ID NO: 396619 - DNA, 60 bp, Homo sapiens; identical to SEQ ID NO: 281829
  chr3:189838441-189838501
  hyper

SEQ ID NO: 396620 - DNA, 31 bp, Homo sapiens; identical to SEQ ID NO: 230100
  chr3:190231801-190231832
  hyper

SEQ ID NO: 396621 - DNA, 37 bp, Homo sapiens; identical to SEQ ID NO: 230101
  chr3:190232236-190232273
  hyper

SEQ ID NO: 396622 - DNA, 196 bp, Homo sapiens; identical to SEQ ID NO: 230112
  chr3:193310837-193311033
  hyper

SEQ ID NO: 396623 - DNA, 441 bp, Homo sapiens; identical to SEQ ID NO: 222307
  chr3:193721033-193721474
  hyper

SEQ ID NO: 396624 - DNA, 104 bp, Homo sapiens; identical to SEQ ID NO: 222308
  chr3:193721577-193721681
  hyper

SEQ ID NO: 396625 - DNA, 484 bp, Homo sapiens; identical to SEQ ID NO: 199269
  chr3:193853887-193854371
  hyper

SEQ ID NO: 396626 - DNA, 121 bp, Homo sapiens; identical to SEQ ID NO: 222312
  chr3:193859656-193859777
  hyper

SEQ ID NO: 396627 - DNA, 40 bp, Homo sapiens; identical to SEQ ID NO: 230120
  chr3:194207834-194207874
  hyper

SEQ ID NO: 396628 - DNA, 571 bp, Homo sapiens; identical to SEQ ID NO: 222316
  chr3:194353932-194354503
  hyper

SEQ ID NO: 396629 - DNA, 117 bp, Homo sapiens; identical to SEQ ID NO: 281855
  chr3:194406436-194406553
  hyper

SEQ ID NO: 396630 - DNA, 477 bp, Homo sapiens; identical to SEQ ID NO: 40105
  chr3:194406589-194407066
  hyper

SEQ ID NO: 396631 - DNA, 258 bp, Homo sapiens; identical to SEQ ID NO: 222317
  chr3:194980253-194980511
  hyper

SEQ ID NO: 396632 - DNA, 194 bp, Homo sapiens; identical to SEQ ID NO: 230125
  chr3:194992081-194992275
  hyper

SEQ ID NO: 396633 - DNA, 287 bp, Homo sapiens; identical to SEQ ID NO: 230126
  chr3:195163846-195164133
  hyper

SEQ ID NO: 396634 - DNA, 505 bp, Homo sapiens; identical to SEQ ID NO: 281869
  chr3:195808865-195809370
  hyper

SEQ ID NO: 396635 - DNA, 158 bp, Homo sapiens; identical to SEQ ID NO: 230130
  chr3:196014679-196014837
  hyper

SEQ ID NO: 396636 - DNA, 46 bp, Homo sapiens; identical to SEQ ID NO: 230134
  chr3:196466463-196466509
  hyper

SEQ ID NO: 396637 - DNA, 352 bp, Homo sapiens; identical to SEQ ID NO: 281880
  chr3:197183346-197183698
  hyper

SEQ ID NO: 396638 - DNA, 156 bp, Homo sapiens; identical to SEQ ID NO: 281883
  chr3:197281702-197281858
  hyper

SEQ ID NO: 396639 - DNA, 238 bp, Homo sapiens; identical to SEQ ID NO: 109572
  chr3:197281920-197282158
  hyper

SEQ ID NO: 396640 - DNA, 190 bp, Homo sapiens; identical to SEQ ID NO: 230141
  chr3:197517983-197518173
  hyper

SEQ ID NO: 396641 - DNA, 40 bp, Homo sapiens; identical to SEQ ID NO: 109581
  chr3:197808380-197808420
  hyper

SEQ ID NO: 396642 - DNA, 31 bp, Homo sapiens; identical to SEQ ID NO: 230146
  chr4:379916-379947
  hyper

SEQ ID NO: 396643 - DNA, 234 bp, Homo sapiens; identical to SEQ ID NO: 230148
  chr4:492842-493076
  hyper

SEQ ID NO: 396644 - DNA, 226 bp, Homo sapiens; identical to SEQ ID NO: 281898
  chr4:667540-667766
  hyper

SEQ ID NO: 396645 - DNA, 238 bp, Homo sapiens; identical to SEQ ID NO: 281899
  chr4:779894-780132
  hyper

SEQ ID NO: 396646 - DNA, 309 bp, Homo sapiens; identical to SEQ ID NO: 222331
  chr4:966933-967242
  hyper

SEQ ID NO: 396647 - DNA, 291 bp, Homo sapiens; identical to SEQ ID NO: 230160
  chr4:1004498-1004789
  hyper

SEQ ID NO: 396648 - DNA, 318 bp, Homo sapiens; identical to SEQ ID NO: 281906
  chr4:1049472-1049790
  hyper

SEQ ID NO: 396649 - DNA, 140 bp, Homo sapiens; identical to SEQ ID NO: 199293
  chr4:1243421-1243561
  hyper

SEQ ID NO: 396650 - DNA, 358 bp, Homo sapiens; identical to SEQ ID NO: 383987
  chr4:1397889-1398247
  hyper

SEQ ID NO: 396651 - DNA, 298 bp, Homo sapiens; identical to SEQ ID NO: 281914
  chr4:1398378-1398676
  hyper

SEQ ID NO: 396652 - DNA, 246 bp, Homo sapiens; identical to SEQ ID NO: 281915
  chr4:1399254-1399500
  hyper

SEQ ID NO: 396653 - DNA, 256 bp, Homo sapiens; identical to SEQ ID NO: 222343
  chr4:1407532-1407788
  hyper

SEQ ID NO: 396654 - DNA, 201 bp, Homo sapiens; identical to SEQ ID NO: 281923
  chr4:1408542-1408743
  hyper

SEQ ID NO: 396655 - DNA, 54 bp, Homo sapiens; identical to SEQ ID NO: 230172
  chr4:1714965-1715019
  hyper

SEQ ID NO: 396656 - DNA, 174 bp, Homo sapiens; identical to SEQ ID NO: 383989
  chr4:1794972-1795146
  hyper

SEQ ID NO: 396657 - DNA, 1121 bp, Homo sapiens
  chr4:1795182-1796303
  hyper
cgctcgccaggtccgtgcttggggccgggcaggctcgcggaggggtccaacggtgctcgcggaggggtcggggcgcggctgtcgcggaaccacagaggtccctgcagcgggccgggccggggcgcgggcttcccgctccggaaagtttgccgccgccgccgccctgggagggctttgcagcagccagggagggaagggggaggagggagggaccgcggcggggaggaggcggccggcgccaggcggcccgggagccctgggcggcggcggcggcgggcggggcggctgggggtcggaggggtcgggacgcaggagccggccaccgccgctttcgtccctgtccgcccctctaacgagctgccttcctcctcctgtagtctcccgagcggcgcccgcctcccgccggtgcccgcgccgggccgtggggggcagcatgcccgcgcgcgctgcctgaggacgccgcggcccccgcccccgccatgggcgcccctgcctgcgccctcgcgctctgcgtggccgtggccatcgtggccggcgcctcctcggagtccttggggacggagcagcgcgtcgtggggcgagcggcaggtaagaagggacccactaggcacgggagaggccggcccgtgcgggcagaggcgttggggacgggaaccggccccgggtcggaggggccgccgggtgtgagtgacgccccggggttagagcccggattccgctgcctccttgccggagagcgcggccagagctagcgcggcgacttgtggtgcgcccggagccgcagctaccctccaagtgcgaggccaccacggggagccaggctgggggttggcgtccgcagccccgatcccctgcgactccctagccctggcctgtcgggagggcgcggggggccccatttccacgattcccgctgttgttattcgggttctgcgcagacggaaagttcccattgttggcgtccccctcccccgggccccagtttgtggccagcttcggccaaggcgagagaccggacttctaagggtgggtgtgcgcgtcagcgaagcccggcccctgcccgcccgaagaggcagcagcctccagcgtccccgctgccgaccctgcccctgcctgggggc

SEQ ID NO: 396658 - DNA, 104 bp, Homo sapiens; identical to SEQ ID NO: 222346
  chr4:1828625-1828729
  hyper

SEQ ID NO: 396659 - DNA, 84 bp, Homo sapiens; identical to SEQ ID NO: 199301
  chr4:2418904-2418988
  hyper

SEQ ID NO: 396660 - DNA, 871 bp, Homo sapiens; identical to SEQ ID NO: 281935
  chr4:2419032-2419903
  hyper

SEQ ID NO: 396661 - DNA, 68 bp, Homo sapiens; identical to SEQ ID NO: 230182
  chr4:2421165-2421233
  hyper

SEQ ID NO: 396662 - DNA, 136 bp, Homo sapiens; identical to SEQ ID NO: 199303
  chr4:2965827-2965963
  hyper

SEQ ID NO: 396663 - DNA, 154 bp, Homo sapiens; identical to SEQ ID NO: 199304
  chr4:3445267-3445421
  hyper

SEQ ID NO: 396664 - DNA, 206 bp, Homo sapiens; identical to SEQ ID NO: 230191
  chr4:3464873-3465079
  hyper

SEQ ID NO: 396665 - DNA, 74 bp, Homo sapiens; identical to SEQ ID NO: 199305
  chr4:4250037-4250111
  hyper

SEQ ID NO: 396666 - DNA, 239 bp, Homo sapiens; identical to SEQ ID NO: 230202
  chr4:4543750-4543989
  hyper

SEQ ID NO: 396667 - DNA, 221 bp, Homo sapiens; identical to SEQ ID NO: 281961
  chr4:4859825-4860046
  hyper

SEQ ID NO: 396668 - DNA, 61 bp, Homo sapiens; identical to SEQ ID NO: 281962
  chr4:4860075-4860136
  hyper

SEQ ID NO: 396669 - DNA, 123 bp, Homo sapiens; identical to SEQ ID NO: 383992
  chr4:4861657-4861780
  hyper

SEQ ID NO: 396670 - DNA, 340 bp, Homo sapiens; identical to SEQ ID NO: 230230
  chr4:6894039-6894379
  hyper

SEQ ID NO: 396671 - DNA, 155 bp, Homo sapiens; identical to SEQ ID NO: 230232
  chr4:7070680-7070835
  hyper

SEQ ID NO: 396672 - DNA, 153 bp, Homo sapiens; identical to SEQ ID NO: 282009
  chr4:8874787-8874940
  hyper

SEQ ID NO: 396673 - DNA, 92 bp, Homo sapiens; identical to SEQ ID NO: 199343
  chr4:8894036-8894128
  hyper

SEQ ID NO: 396674 - DNA, 105 bp, Homo sapiens; identical to SEQ ID NO: 199345
  chr4:9534314-9534419
  hyper

SEQ ID NO: 396675 - DNA, 209 bp, Homo sapiens; identical to SEQ ID NO: 199346
  chr4:9684933-9685142
  hyper

SEQ ID NO: 396676 - DNA, 58 bp, Homo sapiens; identical to SEQ ID NO: 199347
  chr4:10089890-10089948
  hyper

SEQ ID NO: 396677 - DNA, 320 bp, Homo sapiens; identical to SEQ ID NO: 199352
  chr4:11430339-11430659
  hyper

SEQ ID NO: 396678 - DNA, 569 bp, Homo sapiens; identical to SEQ ID NO: 199353
  chr4:11430707-11431276
  hyper

SEQ ID NO: 396679 - DNA, 223 bp, Homo sapiens; identical to SEQ ID NO: 230263
  chr4:13486089-13486312
  hyper

SEQ ID NO: 396680 - DNA, 147 bp, Homo sapiens; identical to SEQ ID NO: 230267
  chr4:13538786-13538933
  hyper

SEQ ID NO: 396681 - DNA, 98 bp, Homo sapiens; identical to SEQ ID NO: 282028
  chr4:13545288-13545386
  hyper

SEQ ID NO: 396682 - DNA, 44 bp, Homo sapiens; identical to SEQ ID NO: 199354
  chr4:13550560-13550604
  hyper

SEQ ID NO: 396683 - DNA, 69 bp, Homo sapiens; identical to SEQ ID NO: 230273
  chr4:13629534-13629603
  hyper

SEQ ID NO: 396684 - DNA, 33 bp, Homo sapiens; identical to SEQ ID NO: 199355
  chr4:13655883-13655916
  hyper

SEQ ID NO: 396685 - DNA, 107 bp, Homo sapiens; identical to SEQ ID NO: 230277
  chr4:15683192-15683299
  hyper

SEQ ID NO: 396686 - DNA, 126 bp, Homo sapiens; identical to SEQ ID NO: 282037
  chr4:16083804-16083930
  hyper

SEQ ID NO: 396687 - DNA, 271 bp, Homo sapiens; identical to SEQ ID NO: 230281
  chr4:17616177-17616448
  hyper

SEQ ID NO: 396688 - DNA, 250 bp, Homo sapiens; identical to SEQ ID NO: 230283
  chr4:17812338-17812588
  hyper

SEQ ID NO: 396689 - DNA, 174 bp, Homo sapiens; identical to SEQ ID NO: 388073
  chr4:20254519-20254693
  hyper

SEQ ID NO: 396690 - DNA, 207 bp, Homo sapiens; identical to SEQ ID NO: 199365
  chr4:20255120-20255327
  hyper

SEQ ID NO: 396691 - DNA, 38 bp, Homo sapiens; identical to SEQ ID NO: 282051
  chr4:21949839-21949877
  hyper

SEQ ID NO: 396692 - DNA, 915 bp, Homo sapiens; identical to SEQ ID NO: 222380
  chr4:22517139-22518054
  hyper

SEQ ID NO: 396693 - DNA, 90 bp, Homo sapiens; identical to SEQ ID NO: 282056
  chr4:24473241-24473331
  hyper

SEQ ID NO: 396694 - DNA, 436 bp, Homo sapiens; identical to SEQ ID NO: 230292
  chr4:24474654-24475090
  hyper

SEQ ID NO: 396695 - DNA, 143 bp, Homo sapiens; identical to SEQ ID NO: 230302
  chr4:26321224-26321367
  hyper

SEQ ID NO: 396696 - DNA, 68 bp, Homo sapiens; identical to SEQ ID NO: 230303
  chr4:26585707-26585775
  hyper

SEQ ID NO: 396697 - DNA, 182 bp, Homo sapiens; identical to SEQ ID NO: 230304
  chr4:26862030-26862212
  hyper

SEQ ID NO: 396698 - DNA, 502 bp, Homo sapiens; identical to SEQ ID NO: 282082
  chr4:30723011-30723513
  hyper

SEQ ID NO: 396699 - DNA, 107 bp, Homo sapiens; identical to SEQ ID NO: 282087
  chr4:37245430-37245537
  hyper

SEQ ID NO: 396700 - DNA, 86 bp, Homo sapiens; identical to SEQ ID NO: 199386
  chr4:37688564-37688650
  hyper

SEQ ID NO: 396701 - DNA, 225 bp, Homo sapiens; identical to SEQ ID NO: 282091
  chr4:37891998-37892223
  hyper

SEQ ID NO: 396702 - DNA, 249 bp, Homo sapiens; identical to SEQ ID NO: 230320
  chr4:39529280-39529529
  hyper

SEQ ID NO: 396703 - DNA, 249 bp, Homo sapiens; identical to SEQ ID NO: 282101
  chr4:39529736-39529985
  hyper

SEQ ID NO: 396704 - DNA, 126 bp, Homo sapiens; identical to SEQ ID NO: 230322
  chr4:39639612-39639738
  hyper

SEQ ID NO: 396705 - DNA, 40 bp, Homo sapiens; identical to SEQ ID NO: 230328
  chr4:40752533-40752573
  hyper

SEQ ID NO: 396706 - DNA, 138 bp, Homo sapiens; identical to SEQ ID NO: 199395
  chr4:41216265-41216403
  hyper

SEQ ID NO: 396707 - DNA, 108 bp, Homo sapiens; identical to SEQ ID NO: 282115
  chr4:41751611-41751719
  hyper

SEQ ID NO: 396708 - DNA, 61 bp, Homo sapiens; identical to SEQ ID NO: 110024
  chr4:41882651-41882712
  hyper

SEQ ID NO: 396709 - DNA, 89 bp, Homo sapiens; identical to SEQ ID NO: 282120
  chr4:41884432-41884521
  hyper

SEQ ID NO: 396710 - DNA, 177 bp, Homo sapiens; identical to SEQ ID NO: 199398
  chr4:41991961-41992138
  hyper

SEQ ID NO: 396711 - DNA, 152 bp, Homo sapiens; identical to SEQ ID NO: 282126
  chr4:44448455-44448607
  hyper

SEQ ID NO: 396712 - DNA, 54 bp, Homo sapiens; identical to SEQ ID NO: 282127
  chr4:44448660-44448714
  hyper

SEQ ID NO: 396713 - DNA, 62 bp, Homo sapiens; identical to SEQ ID NO: 230358
  chr4:44680330-44680392
  hyper

SEQ ID NO: 396714 - DNA, 207 bp, Homo sapiens; identical to SEQ ID NO: 230359
  chr4:44680670-44680877
  hyper

SEQ ID NO: 396715 - DNA, 150 bp, Homo sapiens; identical to SEQ ID NO: 282136
  chr4:47033394-47033544
  hyper

SEQ ID NO: 396716 - DNA, 47 bp, Homo sapiens; identical to SEQ ID NO: 282137
  chr4:47033601-47033648
  hyper

SEQ ID NO: 396717 - DNA, 184 bp, Homo sapiens; identical to SEQ ID NO: 199406
  chr4:47465718-47465902
  hyper

SEQ ID NO: 396718 - DNA, 105 bp, Homo sapiens; identical to SEQ ID NO: 222402
  chr4:47487073-47487178
  hyper

SEQ ID NO: 396719 - DNA, 314 bp, Homo sapiens; identical to SEQ ID NO: 230367
  chr4:47838720-47839034
  hyper

SEQ ID NO: 396720 - DNA, 400 bp, Homo sapiens; identical to SEQ ID NO: 230369
  chr4:47916484-47916884
  hyper

SEQ ID NO: 396721 - DNA, 523 bp, Homo sapiens; identical to SEQ ID NO: 230373
  chr4:48833079-48833602
  hyper

SEQ ID NO: 396722 - DNA, 256 bp, Homo sapiens; identical to SEQ ID NO: 199411
  chr4:48908455-48908711
  hyper

SEQ ID NO: 396723 - DNA, 130 bp, Homo sapiens; identical to SEQ ID NO: 282150
  chr4:48988335-48988465
  hyper

SEQ ID NO: 396724 - DNA, 32 bp, Homo sapiens; identical to SEQ ID NO: 282151
  chr4:48988533-48988565
  hyper

SEQ ID NO: 396725 - DNA, 207 bp, Homo sapiens; identical to SEQ ID NO: 110080
  chr4:52904505-52904712
  hyper

SEQ ID NO: 396726 - DNA, 34 bp, Homo sapiens; identical to SEQ ID NO: 230379
  chr4:53578477-53578511
  hyper

SEQ ID NO: 396727 - DNA, 65 bp, Homo sapiens; identical to SEQ ID NO: 230384
  chr4:54930698-54930763
  hyper

SEQ ID NO: 396728 - DNA, 175 bp, Homo sapiens; identical to SEQ ID NO: 230385
  chr4:54931050-54931225
  hyper

SEQ ID NO: 396729 - DNA, 43 bp, Homo sapiens; identical to SEQ ID NO: 282171
  chr4:55096171-55096214
  hyper

SEQ ID NO: 396730 - DNA, 194 bp, Homo sapiens; identical to SEQ ID NO: 282172
  chr4:55096344-55096538
  hyper

SEQ ID NO: 396731 - DNA, 115 bp, Homo sapiens
  chr4:55523973-55524088
  hyper
cagacgccgccgggaagaagcgagacccgggcgggcgcgagggaggggaggcgaggaggggcgtggccggcgcgcagagggagggcgctgggaggaggggctgctgctcgccgct

SEQ ID NO: 396732 - DNA, 75 bp, Homo sapiens; identical to SEQ ID NO: 199422
  chr4:55569950-55570025
  hyper

SEQ ID NO: 396733 - DNA, 43 bp, Homo sapiens; identical to SEQ ID NO: 199424
  chr4:55593675-55593718
  hyper

SEQ ID NO: 396734 - DNA, 34 bp, Homo sapiens; identical to SEQ ID NO: 199425
  chr4:55598031-55598065
  hyper

SEQ ID NO: 396735 - DNA, 54 bp, Homo sapiens; identical to SEQ ID NO: 282184
  chr4:55990892-55990946
  hyper

SEQ ID NO: 396736 - DNA, 61 bp, Homo sapiens; identical to SEQ ID NO: 199427
  chr4:55991393-55991454
  hyper

SEQ ID NO: 396737 - DNA, 133 bp, Homo sapiens; identical to SEQ ID NO: 199428
  chr4:55991493-55991626
  hyper

SEQ ID NO: 396738 - DNA, 61 bp, Homo sapiens; identical to SEQ ID NO: 199429
  chr4:55991802-55991863
  hyper

SEQ ID NO: 396739 - DNA, 39 bp, Homo sapiens; identical to SEQ ID NO: 199430
  chr4:55992221-55992260
  hyper

SEQ ID NO: 396740 - DNA, 91 bp, Homo sapiens; identical to SEQ ID NO: 230406
  chr4:56501808-56501899
  hyper

SEQ ID NO: 396741 - DNA, 301 bp, Homo sapiens; identical to SEQ ID NO: 230408
  chr4:56502563-56502864
  hyper

SEQ ID NO: 396742 - DNA, 126 bp, Homo sapiens; identical to SEQ ID NO: 282196
  chr4:56719667-56719793
  hyper

SEQ ID NO: 396743 - DNA, 419 bp, Homo sapiens; identical to SEQ ID NO: 110145
  chr4:56719823-56720242
  hyper

SEQ ID NO: 396744 - DNA, 177 bp, Homo sapiens; identical to SEQ ID NO: 230412
  chr4:57253559-57253736
  hyper

SEQ ID NO: 396745 - DNA, 66 bp, Homo sapiens; identical to SEQ ID NO: 230424
  chr4:57844898-57844964
  hyper

SEQ ID NO: 396746 - DNA, 249 bp, Homo sapiens; identical to SEQ ID NO: 282212
  chr4:62067624-62067873
  hyper

SEQ ID NO: 396747 - DNA, 44 bp, Homo sapiens; identical to SEQ ID NO: 199438
  chr4:66536636-66536680
  hyper

SEQ ID NO: 396748 - DNA, 213 bp, Homo sapiens; identical to SEQ ID NO: 230434
  chr4:68411140-68411353
  hyper

SEQ ID NO: 396749 - DNA, 80 bp, Homo sapiens; identical to SEQ ID NO: 230435
  chr4:68567004-68567084
  hyper

SEQ ID NO: 396750 - DNA, 109 bp, Homo sapiens; identical to SEQ ID NO: 230436
  chr4:71479320-71479429
  hyper

SEQ ID NO: 396751 - DNA, 730 bp, Homo sapiens; identical to SEQ ID NO: 199439
  chr4:71767778-71768508
  hyper

SEQ ID NO: 396752 - DNA, 177 bp, Homo sapiens; identical to SEQ ID NO: 110197
  chr4:71768550-71768727
  hyper

SEQ ID NO: 396753 - DNA, 46 bp, Homo sapiens; identical to SEQ ID NO: 230441
  chr4:71859073-71859119
  hyper

SEQ ID NO: 396754 - DNA, 84 bp, Homo sapiens; identical to SEQ ID NO: 230442
  chr4:72052855-72052939
  hyper

SEQ ID NO: 396755 - DNA, 146 bp, Homo sapiens; identical to SEQ ID NO: 222428
  chr4:74702603-74702749
  hyper

SEQ ID NO: 396756 - DNA, 217 bp, Homo sapiens; identical to SEQ ID NO: 282231
  chr4:74734859-74735076
  hyper

SEQ ID NO: 396757 - DNA, 177 bp, Homo sapiens; identical to SEQ ID NO: 110211
  chr4:74735193-74735370
  hyper

SEQ ID NO: 396758 - DNA, 357 bp, Homo sapiens; identical to SEQ ID NO: 388098
  chr4:74904790-74905147
  hyper

SEQ ID NO: 396759 - DNA, 91 bp, Homo sapiens; identical to SEQ ID NO: 230453
  chr4:75719943-75720034
  hyper

SEQ ID NO: 396760 - DNA, 362 bp, Homo sapiens; identical to SEQ ID NO: 388099
  chr4:75859572-75859934
  hyper

SEQ ID NO: 396761 - DNA, 35 bp, Homo sapiens; identical to SEQ ID NO: 230455
  chr4:76439684-76439719
  hyper

SEQ ID NO: 396762 - DNA, 71 bp, Homo sapiens; identical to SEQ ID NO: 230458
  chr4:76649921-76649992
  hyper

SEQ ID NO: 396763 - DNA, 349 bp, Homo sapiens; identical to SEQ ID NO: 230461
  chr4:77135172-77135521
  hyper

SEQ ID NO: 396764 - DNA, 472 bp, Homo sapiens; identical to SEQ ID NO: 199460
  chr4:77818185-77818657
  hyper

SEQ ID NO: 396765 - DNA, 131 bp, Homo sapiens; identical to SEQ ID NO: 384011
  chr4:77818754-77818885
  hyper

SEQ ID NO: 396766 - DNA, 42 bp, Homo sapiens; identical to SEQ ID NO: 230467
  chr4:77997174-77997216
  hyper

SEQ ID NO: 396767 - DNA, 111 bp, Homo sapiens; identical to SEQ ID NO: 230468
  chr4:78079532-78079643
  hyper

SEQ ID NO: 396768 - DNA, 784 bp, Homo sapiens; identical to SEQ ID NO: 282264
  chr4:78979792-78980576
  hyper

SEQ ID NO: 396769 - DNA, 100 bp, Homo sapiens; identical to SEQ ID NO: 282265
  chr4:79472691-79472791
  hyper

SEQ ID NO: 396770 - DNA, 86 bp, Homo sapiens; identical to SEQ ID NO: 282266
  chr4:79473111-79473197
  hyper

SEQ ID NO: 396771 - DNA, 283 bp, Homo sapiens; identical to SEQ ID NO: 230493
  chr4:83812351-83812634
  hyper

SEQ ID NO: 396772 - DNA, 234 bp, Homo sapiens; identical to SEQ ID NO: 230494
  chr4:83821698-83821932
  hyper

SEQ ID NO: 396773 - DNA, 267 bp, Homo sapiens; identical to SEQ ID NO: 230497
  chr4:84205947-84206214
  hyper

SEQ ID NO: 396774 - DNA, 571 bp, Homo sapiens; identical to SEQ ID NO: 230498
  chr4:84376736-84377307
  hyper

SEQ ID NO: 396775 - DNA, 61 bp, Homo sapiens; identical to SEQ ID NO: 230499
  chr4:84406474-84406535
  hyper

SEQ ID NO: 396776 - DNA, 233 bp, Homo sapiens; identical to SEQ ID NO: 230515
  chr4:86851207-86851440
  hyper

SEQ ID NO: 396777 - DNA, 74 bp, Homo sapiens; identical to SEQ ID NO: 230520
  chr4:87855923-87855997
  hyper

SEQ ID NO: 396778 - DNA, 1019 bp, Homo sapiens; identical to SEQ ID NO: 230521
  chr4:87856414-87857433
  hyper

SEQ ID NO: 396779 - DNA, 42 bp, Homo sapiens; identical to SEQ ID NO: 199487
  chr4:88887030-88887072
  hyper

SEQ ID NO: 396780 - DNA, 441 bp, Homo sapiens; identical to SEQ ID NO: 230524
  chr4:89299895-89300336
  hyper

SEQ ID NO: 396781 - DNA, 274 bp, Homo sapiens; identical to SEQ ID NO: 230527
  chr4:89444895-89445169
  hyper

SEQ ID NO: 396782 - DNA, 151 bp, Homo sapiens; identical to SEQ ID NO: 199490
  chr4:89513528-89513679
  hyper

SEQ ID NO: 396783 - DNA, 234 bp, Homo sapiens; identical to SEQ ID NO: 199492
  chr4:91048333-91048567
  hyper

SEQ ID NO: 396784 - DNA, 91 bp, Homo sapiens; identical to SEQ ID NO: 199493
  chr4:91048568-91048659
  hyper

SEQ ID NO: 396785 - DNA, 87 bp, Homo sapiens; identical to SEQ ID NO: 199496
  chr4:92905822-92905909
  hyper

SEQ ID NO: 396786 - DNA, 71 bp, Homo sapiens; identical to SEQ ID NO: 230541
  chr4:95372822-95372893
  hyper

SEQ ID NO: 396787 - DNA, 49 bp, Homo sapiens; identical to SEQ ID NO: 230549
  chr4:100484871-100484920
  hyper

SEQ ID NO: 396788 - DNA, 55 bp, Homo sapiens; identical to SEQ ID NO: 230550
  chr4:100485194-100485249
  hyper

SEQ ID NO: 396789 - DNA, 119 bp, Homo sapiens; identical to SEQ ID NO: 199510
  chr4:101111126-101111245
  hyper

SEQ ID NO: 396790 - DNA, 216 bp, Homo sapiens; identical to SEQ ID NO: 199511
  chr4:101111971-101112187
  hyper

SEQ ID NO: 396791 - DNA, 220 bp, Homo sapiens; identical to SEQ ID NO: 222446
  chr4:103266878-103267098
  hyper

SEQ ID NO: 396792 - DNA, 79 bp, Homo sapiens; identical to SEQ ID NO: 230559
  chr4:103422182-103422261
  hyper

SEQ ID NO: 396793 - DNA, 406 bp, Homo sapiens; identical to SEQ ID NO: 230562
  chr4:103748279-103748685
  hyper

SEQ ID NO: 396794 - DNA, 138 bp, Homo sapiens; identical to SEQ ID NO: 230563
  chr4:103749252-103749390
  hyper

SEQ ID NO: 396795 - DNA, 203 bp, Homo sapiens; identical to SEQ ID NO: 230565
  chr4:105412285-105412488
  hyper

SEQ ID NO: 396796 - DNA, 61 bp, Homo sapiens; identical to SEQ ID NO: 230566
  chr4:105412786-105412847
  hyper

SEQ ID NO: 396797 - DNA, 295 bp, Homo sapiens; identical to SEQ ID NO: 199518
  chr4:106067841-106068136
  hyper

SEQ ID NO: 396798 - DNA, 105 bp, Homo sapiens; identical to SEQ ID NO: 222450
  chr4:106068588-106068693
  hyper

SEQ ID NO: 396799 - DNA, 1085 bp, Homo sapiens
  chr4:106155053-106156138
  hyper
aattcaactagagggcagccttgtggatggccccgaagcaagcctgatggaacaggatagaaccaaccatgttgagggcaacagactaagtccattcctgataccatcacctcccatttgccagacagaacctctggctacaaagctccagaatggaagcccactgcctgagagagctcatccagaagtaaatggagacaccaagtggcactctttcaaaagttattatggaataccctgtatgaagggaagccagaatagtcgtgtgagtcctgactttacacaagaaagtagagggtattccaagtgtttgcaaaatggaggaataaaacgcacagttagtgaaccttctctctctgggctccttcagatcaagaaattgaaacaagaccaaaaggctaatggagaaagacgtaacttcggggtaagccaagaaagaaatccaggtgaaagcagtcaaccaaatgtctccgatttgagtgataagaaagaatctgtgagttctgtagcccaagaaaatgcagttaaagatttcaccagtttttcaacacataactgcagtgggcctgaaaatccagagcttcagattctgaatgagcaggaggggaaaagtgctaattaccatgacaagaacattgtattacttaaaaacaaggcagtgctaatgcctaatggtgctacagtttctgcctcttccgtggaacacacacatggtgaactcctggaaaaaacactgtctcaatattatccagattgtgtttccattgcggtgcagaaaaccacatctcacataaatgccattaacagtcaggctactaatgagttgtcctgtgagatcactcacccatcgcatacctcagggcagatcaattccgcacagacctctaactctgagctgcctccaaagccagctgcagtggtgagtgaggcctgtgatgctgatgatgctgataatgccagtaaactagctgcaatgctaaatacctgttcctttcagaaaccagaacaactacaacaacaaaaatcagtttttgagatatgcccatctcctgcagaaaataacatccagggaaccacaaagctag

SEQ ID NO: 396800 - DNA, 2024 bp, Homo sapiens
  chr4:106157490-106159514
  hyper
gagactcataatgtccaaatgggactggaggaagtacagaatataaatcgtagaaattccccttatagtcagaccatgaaatcaagtgcatgcaaaatacaggtttcttgttcaaacaatacacacctagtttcagagaataaagaacagactacacatcctgaactttttgcaggaaacaagacccaaaacttgcatcacatgcaatattttccaaataatgtgatcccaaagcaagatcttcttcacaggtgctttcaagaacaggagcagaagtcacaacaagcttcagttctacagggatataaaaatagaaaccaagatatgtctggtcaacaagctgcgcaacttgctcagcaaaggtacttgatacataaccatgcaaatgtttttcctgtgcctgaccagggaggaagtcacactcagacccctccccagaaggacactcaaaagcatgctgctctaaggtggcatctcttacagaagcaagaacagcagcaaacacagcaaccccaaactgagtcttgccatagtcagatgcacaggccaattaaggtggaacctggatgcaagccacatgcctgtatgcacacagcaccaccagaaaacaaaacatggaaaaaggtaactaagcaagagaatccacctgcaagctgtgataatgtgcagcaaaagagcatcattgagaccatggagcagcatctgaagcagtttcacgccaagtcgttatttgaccataaggctcttactctcaaatcacagaagcaagtaaaagttgaaatgtcagggccagtcacagttttgactagacaaaccactgctgcagaacttgatagccacaccccagctttagagcagcaaacaacttcttcagaaaagacaccaaccaaaagaacagctgcttctgttctcaataattttatagagtcaccttccaaattactagatactcctataaaaaatttattggatacacctgtcaagactcaatatgatttcccatcttgcagatgtgtaggtaagtgccagaaatgtactgagacacatggcgtttatccagaattagcaaatttatcttcagatatgggattttccttctttttttaaatcttgagtctggcagcaatttgtaaaggctcataaaaatctgaagcttacattttttgtcaagttaccgatgcttgtgtcttgtgaaagagaacttcacttacatgcagtttttccaaaagaattaaataatcgtgcatgtttatttttccctctcttcagatcctgtaaaatttgaatgtatctgttttagatcaattcgcctatttagctctttgtatattatctcctggagagacagctaggcagcaaaaaaacaatctattaaaatgagaaaataacgaccataggcagtctaatgtacgaactttaaatattttttaattcaaggtaaaatatattagtttcacaagatttctggctaatagggaaattattatcttcagtcttcatgagttgggggaaatgataatgctgacactcttagtgctcctaaagtttccttttctccatttatacatttggaatgttgtgatttatattcattttgattcccttttctctaaaatttcatctttttgattaaaaaatatgatacaggcatacctcagagatattgtgggtttggctccataccacaataaaatgaatattacaataaagcaagttgtaaggactttttggtttctcactgtatgtaaaagttatttatatactatactgtaacatactaagtgtgcaatagcattgtgtctaaaaaatatatactttaaaaataatttattgttaaaaaaatgccaacaattatctgggcctttagtgagtgctaatctttttgctggtggagggtcgtgcttcagtattgatcgctgtggactgatcatggtggtagttgctgaaggttgctgggatggctgtgtgtgtggcaatttcttaaaataagacaacagtgaagtgctgtatcaattgatttttcc

SEQ ID NO: 396801 - DNA, 240 bp, Homo sapiens; identical to SEQ ID NO: 199522
  chr4:106159634-106159874
  hyper

SEQ ID NO: 396802 - DNA, 120 bp, Homo sapiens; identical to SEQ ID NO: 199524
  chr4:106161134-106161254
  hyper

SEQ ID NO: 396803 - DNA, 177 bp, Homo sapiens; identical to SEQ ID NO: 199527
  chr4:106180762-106180939
  hyper

SEQ ID NO: 396804 - DNA, 107 bp, Homo sapiens; identical to SEQ ID NO: 199528
  chr4:106182911-106183018
  hyper

SEQ ID NO: 396805 - DNA, 376 bp, Homo sapiens; identical to SEQ ID NO: 199530
  chr4:106193708-106194084
  hyper

SEQ ID NO: 396806 - DNA, 3101 bp, Homo sapiens; identical to SEQ ID NO: 199531
  chr4:106196198-106199299
  hyper

SEQ ID NO: 396807 - DNA, 1601 bp, Homo sapiens; identical to SEQ ID NO: 199532
  chr4:106199359-106200960
  hyper

SEQ ID NO: 396808 - DNA, 181 bp, Homo sapiens; identical to SEQ ID NO: 199534
  chr4:106816201-106816382
  hyper

SEQ ID NO: 396809 - DNA, 329 bp, Homo sapiens; identical to SEQ ID NO: 282398
  chr4:106816425-106816754
  hyper

SEQ ID NO: 396810 - DNA, 1102 bp, Homo sapiens; identical to SEQ ID NO: 282399
  chr4:106816801-106817903
  hyper

SEQ ID NO: 396811 - DNA, 334 bp, Homo sapiens; identical to SEQ ID NO: 230572
  chr4:107237672-107238006
  hyper

SEQ ID NO: 396812 - DNA, 162 bp, Homo sapiens
  chr4:109089757-109089919
  hyper
ggggagtcacagcgggggcctcgggcccaaatgcctctgcccggagctcgagccgacacacacactcagtccgacccctctttgttcccggctcgagtttctcagcctggctcgccggctcgccgctctgcacgcctccgccggccagctctgtcaaagcaa

SEQ ID NO: 396813 - DNA, 416 bp, Homo sapiens; identical to SEQ ID NO: 199541
  chr4:109092685-109093101
  hyper

SEQ ID NO: 396814 - DNA, 236 bp, Homo sapiens; identical to SEQ ID NO: 230581
  chr4:109541581-109541817
  hyper

SEQ ID NO: 396815 - DNA, 56 bp, Homo sapiens; identical to SEQ ID NO: 384025
  chr4:110343800-110343856
  hyper

SEQ ID NO: 396816 - DNA, 156 bp, Homo sapiens; identical to SEQ ID NO: 222468
  chr4:111117165-111117321
  hyper

SEQ ID NO: 396817 - DNA, 411 bp, Homo sapiens; identical to SEQ ID NO: 222469
  chr4:111119823-111120234
  hyper

SEQ ID NO: 396818 - DNA, 163 bp, Homo sapiens; identical to SEQ ID NO: 199550
  chr4:111537244-111537407
  hyper

SEQ ID NO: 396819 - DNA, 94 bp, Homo sapiens; identical to SEQ ID NO: 199551
  chr4:111537497-111537591
  hyper

SEQ ID NO: 396820 - DNA, 260 bp, Homo sapiens; identical to SEQ ID NO: 199555
  chr4:111554139-111554399
  hyper

SEQ ID NO: 396821 - DNA, 289 bp, Homo sapiens; identical to SEQ ID NO: 199556
  chr4:111554661-111554950
  hyper

SEQ ID NO: 396822 - DNA, 190 bp, Homo sapiens; identical to SEQ ID NO: 282433
  chr4:111562152-111562342
  hyper

SEQ ID NO: 396823 - DNA, 221 bp, Homo sapiens; identical to SEQ ID NO: 282434
  chr4:111562690-111562911
  hyper

SEQ ID NO: 396824 - DNA, 218 bp, Homo sapiens; identical to SEQ ID NO: 230620
  chr4:113558091-113558309
  hyper

SEQ ID NO: 396825 - DNA, 286 bp, Homo sapiens; identical to SEQ ID NO: 230621
  chr4:113558540-113558826
  hyper

SEQ ID NO: 396826 - DNA, 159 bp, Homo sapiens; identical to SEQ ID NO: 230624
  chr4:113739235-113739394
  hyper

SEQ ID NO: 396827 - DNA, 33 bp, Homo sapiens; identical to SEQ ID NO: 282455
  chr4:115519422-115519455
  hyper

SEQ ID NO: 396828 - DNA, 85 bp, Homo sapiens; identical to SEQ ID NO: 199566
  chr4:115519971-115520056
  hyper

SEQ ID NO: 396829 - DNA, 304 bp, Homo sapiens; identical to SEQ ID NO: 199569
  chr4:119200550-119200854
  hyper

SEQ ID NO: 396830 - DNA, 50 bp, Homo sapiens; identical to SEQ ID NO: 230634
  chr4:119757206-119757256
  hyper

SEQ ID NO: 396831 - DNA, 221 bp, Homo sapiens; identical to SEQ ID NO: 110565
  chr4:119757549-119757770
  hyper

SEQ ID NO: 396832 - DNA, 250 bp, Homo sapiens; identical to SEQ ID NO: 230637
  chr4:120133569-120133819
  hyper

SEQ ID NO: 396833 - DNA, 50 bp, Homo sapiens; identical to SEQ ID NO: 199576
  chr4:120221611-120221661
  hyper

SEQ ID NO: 396834 - DNA, 635 bp, Homo sapiens; identical to SEQ ID NO: 230641
  chr4:120988004-120988639
  hyper

SEQ ID NO: 396835 - DNA, 52 bp, Homo sapiens; identical to SEQ ID NO: 230648
  chr4:122722576-122722628
  hyper

SEQ ID NO: 396836 - DNA, 330 bp, Homo sapiens; identical to SEQ ID NO: 230649
  chr4:122744981-122745311
  hyper

SEQ ID NO: 396837 - DNA, 178 bp, Homo sapiens; identical to SEQ ID NO: 199585
  chr4:123653964-123654142
  hyper

SEQ ID NO: 396838 - DNA, 657 bp, Homo sapiens; identical to SEQ ID NO: 230657
  chr4:123843158-123843815
  hyper

SEQ ID NO: 396839 - DNA, 338 bp, Homo sapiens; identical to SEQ ID NO: 230661
  chr4:124319560-124319898
  hyper

SEQ ID NO: 396840 - DNA, 209 bp, Homo sapiens; identical to SEQ ID NO: 282491
  chr4:124426861-124427070
  hyper

SEQ ID NO: 396841 - DNA, 79 bp, Homo sapiens; identical to SEQ ID NO: 282492
  chr4:124427137-124427216
  hyper

SEQ ID NO: 396842 - DNA, 38 bp, Homo sapiens; identical to SEQ ID NO: 230663
  chr4:125634029-125634067
  hyper

SEQ ID NO: 396843 - DNA, 242 bp, Homo sapiens; identical to SEQ ID NO: 282496
  chr4:126236000-126236242
  hyper

SEQ ID NO: 396844 - DNA, 250 bp, Homo sapiens; identical to SEQ ID NO: 282497
  chr4:126237060-126237310
  hyper

SEQ ID NO: 396845 - DNA, 43 bp, Homo sapiens; identical to SEQ ID NO: 199592
  chr4:126237611-126237654
  hyper

SEQ ID NO: 396846 - DNA, 104 bp, Homo sapiens; identical to SEQ ID NO: 222489
  chr4:126238450-126238554
  hyper

SEQ ID NO: 396847 - DNA, 45 bp, Homo sapiens; identical to SEQ ID NO: 199593
  chr4:128554021-128554066
  hyper

SEQ ID NO: 396848 - DNA, 137 bp, Homo sapiens; identical to SEQ ID NO: 199594
  chr4:128703235-128703372
  hyper

SEQ ID NO: 396849 - DNA, 130 bp, Homo sapiens; identical to SEQ ID NO: 199595
  chr4:128887030-128887160
  hyper

SEQ ID NO: 396850 - DNA, 57 bp, Homo sapiens; identical to SEQ ID NO: 199597
  chr4:134067733-134067790
  hyper

SEQ ID NO: 396851 - DNA, 157 bp, Homo sapiens; identical to SEQ ID NO: 282514
  chr4:134073705-134073862
  hyper

SEQ ID NO: 396852 - DNA, 111 bp, Homo sapiens; identical to SEQ ID NO: 282515
  chr4:134073919-134074030
  hyper

SEQ ID NO: 396853 - DNA, 130 bp, Homo sapiens; identical to SEQ ID NO: 230678
  chr4:134074354-134074484
  hyper

SEQ ID NO: 396854 - DNA, 92 bp, Homo sapiens; identical to SEQ ID NO: 230680
  chr4:140005146-140005238
  hyper

SEQ ID NO: 396855 - DNA, 102 bp, Homo sapiens; identical to SEQ ID NO: 199600
  chr4:140097254-140097356
  hyper

SEQ ID NO: 396856 - DNA, 403 bp, Homo sapiens; identical to SEQ ID NO: 230684
  chr4:140222258-140222661
  hyper

SEQ ID NO: 396857 - DNA, 180 bp, Homo sapiens; identical to SEQ ID NO: 222492
  chr4:140587058-140587238
  hyper

SEQ ID NO: 396858 - DNA, 36 bp, Homo sapiens; identical to SEQ ID NO: 230687
  chr4:140969978-140970014
  hyper

SEQ ID NO: 396859 - DNA, 784 bp, Homo sapiens
  chr4:141073728-141074512
  hyper
cctcactccgacgctcctctaggctccctccgcccctcgcagtcgtgactggcttctcccctctcgccccctcctccccaaatctgacaaccctgacagattaacaggtagcgacgacggcagctttttccctaagaaaagttgacgttaacccttaggcttcagcccacctcacccaccgtgcaaatcagacccttgtacccccatgtaagaagctccacgcgccccccaccaccaccaccacccccaacgcgcgccgcaagcccgctgcccgtgcgccctcaccatgatcagcgtgtggttcctctgctccgccgaggcagcctccgcatcttgctggggtttgctcgggtgctgctgtttgccggtgccggcgcccgatttcttggccctctgctccagggtccgctggtagaggctcacggtgtcccggcgctccagctccagctgctccacctgagcctgctggtacctgttctcgcagttgacgtggtgccgacggcagccctcgatgcgctggcggagccgctccaccacggtgctgtgcttgggaacggccgccgaaccgccgccggggcccccggagccgccgcatccaccggctgccgggtgattgctactcggagcagcgggagtactattgggagtattattcacaccgatcccggccccgccgaggctgctgttcaggctactgttgatgcaaatactactgccattcgcggcagcagcgggggctgcgaaatcccccatcctgctccccgggcacactattttggaagaa

SEQ ID NO: 396860 - DNA, 61 bp, Homo sapiens; identical to SEQ ID NO: 230691
  chr4:141173821-141173882
  hyper

SEQ ID NO: 396861 - DNA, 224 bp, Homo sapiens; identical to SEQ ID NO: 282535
  chr4:141348840-141349064
  hyper

SEQ ID NO: 396862 - DNA, 71 bp, Homo sapiens; identical to SEQ ID NO: 199614
  chr4:142141958-142142029
  hyper

SEQ ID NO: 396863 - DNA, 540 bp, Homo sapiens; identical to SEQ ID NO: 199619
  chr4:144256959-144257499
  hyper

SEQ ID NO: 396864 - DNA, 300 bp, Homo sapiens; identical to SEQ ID NO: 199621
  chr4:144258375-144258675
  hyper

SEQ ID NO: 396865 - DNA, 270 bp, Homo sapiens; identical to SEQ ID NO: 230708
  chr4:144434324-144434594
  hyper

SEQ ID NO: 396866 - DNA, 182 bp, Homo sapiens; identical to SEQ ID NO: 230709
  chr4:144434957-144435139
  hyper

SEQ ID NO: 396867 - DNA, 171 bp, Homo sapiens; identical to SEQ ID NO: 230713
  chr4:146018850-146019021
  hyper

SEQ ID NO: 396868 - DNA, 127 bp, Homo sapiens; identical to SEQ ID NO: 230715
  chr4:146402704-146402831
  hyper

SEQ ID NO: 396869 - DNA, 495 bp, Homo sapiens; identical to SEQ ID NO: 230716
  chr4:146403011-146403506
  hyper

SEQ ID NO: 396870 - DNA, 43 bp, Homo sapiens; identical to SEQ ID NO: 199626
  chr4:147443081-147443124
  hyper

SEQ ID NO: 396871 - DNA, 91 bp, Homo sapiens; identical to SEQ ID NO: 282562
  chr4:148402121-148402212
  hyper

SEQ ID NO: 396872 - DNA, 174 bp, Homo sapiens; identical to SEQ ID NO: 199628
  chr4:148402740-148402914
  hyper

SEQ ID NO: 396873 - DNA, 33 bp, Homo sapiens; identical to SEQ ID NO: 199629
  chr4:148538935-148538968
  hyper

SEQ ID NO: 396874 - DNA, 93 bp, Homo sapiens; identical to SEQ ID NO: 199632
  chr4:149364560-149364653
  hyper

SEQ ID NO: 396875 - DNA, 86 bp, Homo sapiens; identical to SEQ ID NO: 230739
  chr4:154073798-154073884
  hyper

SEQ ID NO: 396876 - DNA, 47 bp, Homo sapiens; identical to SEQ ID NO: 230743
  chr4:154605244-154605291
  hyper

SEQ ID NO: 396877 - DNA, 271 bp, Homo sapiens; identical to SEQ ID NO: 282591
  chr4:154710914-154711185
  hyper

SEQ ID NO: 396878 - DNA, 53 bp, Homo sapiens; identical to SEQ ID NO: 230755
  chr4:155662823-155662876
  hyper

SEQ ID NO: 396879 - DNA, 178 bp, Homo sapiens; identical to SEQ ID NO: 199659
  chr4:157891924-157892102
  hyper

SEQ ID NO: 396880 - DNA, 125 bp, Homo sapiens
  chr4:157892596-157892721
  hyper
acaaggcgagggcgccgcggcgggtcccacgggccggggcgccggagcggggccggggggctccgggccgacggcggcccgggcgcaggcggagagaggccgcggggctcccgctcctcagcccg

SEQ ID NO: 396881 - DNA, 465 bp, Homo sapiens; identical to SEQ ID NO: 282608
  chr4:157892762-157893227
  hyper

SEQ ID NO: 396882 - DNA, 103 bp, Homo sapiens
  chr4:158143917-158144020
  hyper
gctgggaagctctgtgatgggttcagataaagtactagaaaccaaacaattagggatctaaaaggattggtgtggaggccagagggctccggtccccgcgctc

SEQ ID NO: 396883 - DNA, 129 bp, Homo sapiens; identical to SEQ ID NO: 230768
  chr4:159593505-159593634
  hyper

SEQ ID NO: 396884 - DNA, 48 bp, Homo sapiens; identical to SEQ ID NO: 230775
  chr4:164415908-164415956
  hyper

SEQ ID NO: 396885 - DNA, 140 bp, Homo sapiens; identical to SEQ ID NO: 282625
  chr4:165305190-165305330
  hyper

SEQ ID NO: 396886 - DNA, 79 bp, Homo sapiens; identical to SEQ ID NO: 230777
  chr4:166248060-166248139
  hyper

SEQ ID NO: 396887 - DNA, 467 bp, Homo sapiens; identical to SEQ ID NO: 230783
  chr4:169401169-169401636
  hyper

SEQ ID NO: 396888 - DNA, 178 bp, Homo sapiens; identical to SEQ ID NO: 230787
  chr4:169931434-169931612
  hyper

SEQ ID NO: 396889 - DNA, 73 bp, Homo sapiens; identical to SEQ ID NO: 199677
  chr4:170192274-170192347
  hyper

SEQ ID NO: 396890 - DNA, 40 bp, Homo sapiens; identical to SEQ ID NO: 199678
  chr4:170192665-170192705
  hyper

SEQ ID NO: 396891 - DNA, 260 bp, Homo sapiens; identical to SEQ ID NO: 388158
  chr4:170946845-170947105
  hyper

SEQ ID NO: 396892 - DNA, 42 bp, Homo sapiens; identical to SEQ ID NO: 230795
  chr4:174254798-174254840
  hyper

SEQ ID NO: 396893 - DNA, 514 bp, Homo sapiens; identical to SEQ ID NO: 230797
  chr4:174415375-174415889
  hyper

SEQ ID NO: 396894 - DNA, 76 bp, Homo sapiens; identical to SEQ ID NO: 282650
  chr4:174429791-174429867
  hyper

SEQ ID NO: 396895 - DNA, 43 bp, Homo sapiens; identical to SEQ ID NO: 110864
  chr4:174429949-174429992
  hyper

SEQ ID NO: 396896 - DNA, 398 bp, Homo sapiens; identical to SEQ ID NO: 110869
  chr4:174439053-174439451
  hyper

SEQ ID NO: 396897 - DNA, 69 bp, Homo sapiens; identical to SEQ ID NO: 199695
  chr4:177713159-177713228
  hyper

SEQ ID NO: 396898 - DNA, 236 bp, Homo sapiens; identical to SEQ ID NO: 230826
  chr4:178363508-178363744
  hyper

SEQ ID NO: 396899 - DNA, 126 bp, Homo sapiens; identical to SEQ ID NO: 230827
  chr4:178363969-178364095
  hyper

SEQ ID NO: 396900 - DNA, 211 bp, Homo sapiens; identical to SEQ ID NO: 282679
  chr4:183063455-183063666
  hyper

SEQ ID NO: 396901 - DNA, 429 bp, Homo sapiens; identical to SEQ ID NO: 282680
  chr4:183065517-183065946
  hyper

SEQ ID NO: 396902 - DNA, 318 bp, Homo sapiens; identical to SEQ ID NO: 282681
  chr4:183066306-183066624
  hyper

SEQ ID NO: 396903 - DNA, 41 bp, Homo sapiens; identical to SEQ ID NO: 282682
  chr4:183369220-183369261
  hyper

SEQ ID NO: 396904 - DNA, 241 bp, Homo sapiens; identical to SEQ ID NO: 282683
  chr4:183370318-183370559
  hyper

SEQ ID NO: 396905 - DNA, 321 bp, Homo sapiens; identical to SEQ ID NO: 282688
  chr4:184328290-184328611
  hyper

SEQ ID NO: 396906 - DNA, 36 bp, Homo sapiens; identical to SEQ ID NO: 230836
  chr4:184365599-184365635
  hyper

SEQ ID NO: 396907 - DNA, 75 bp, Homo sapiens; identical to SEQ ID NO: 282693
  chr4:184826163-184826238
  hyper

SEQ ID NO: 396908 - DNA, 47 bp, Homo sapiens; identical to SEQ ID NO: 199704
  chr4:184826657-184826704
  hyper

SEQ ID NO: 396909 - DNA, 233 bp, Homo sapiens; identical to SEQ ID NO: 199705
  chr4:184826705-184826938
  hyper

SEQ ID NO: 396910 - DNA, 266 bp, Homo sapiens; identical to SEQ ID NO: 199706
  chr4:184827291-184827557
  hyper

SEQ ID NO: 396911 - DNA, 136 bp, Homo sapiens; identical to SEQ ID NO: 282697
  chr4:184827659-184827795
  hyper

SEQ ID NO: 396912 - DNA, 40 bp, Homo sapiens; identical to SEQ ID NO: 110933
  chr4:184828122-184828162
  hyper

SEQ ID NO: 396913 - DNA, 101 bp, Homo sapiens; identical to SEQ ID NO: 199708
  chr4:185396094-185396195
  hyper

SEQ ID NO: 396914 - DNA, 64 bp, Homo sapiens; identical to SEQ ID NO: 199710
  chr4:185937209-185937273
  hyper

SEQ ID NO: 396915 - DNA, 191 bp, Homo sapiens; identical to SEQ ID NO: 230845
  chr4:185938975-185939166
  hyper

SEQ ID NO: 396916 - DNA, 69 bp, Homo sapiens; identical to SEQ ID NO: 230848
  chr4:185961214-185961283
  hyper

SEQ ID NO: 396917 - DNA, 68 bp, Homo sapiens; identical to SEQ ID NO: 199713
  chr4:186130483-186130551
  hyper

SEQ ID NO: 396918 - DNA, 79 bp, Homo sapiens; identical to SEQ ID NO: 230851
  chr4:186317080-186317159
  hyper

SEQ ID NO: 396919 - DNA, 344 bp, Homo sapiens; identical to SEQ ID NO: 230852
  chr4:186347192-186347536
  hyper

SEQ ID NO: 396920 - DNA, 434 bp, Homo sapiens
  chr4:186456293-186456727
  hyper
aatctctgagccgctccgcagccacttgacggagttgccgccgcccccggagctgggcgccgaagcccgggagccagcagcgccccgtccgcccgccctcgcgcgctttctggccgccctcggccccggggcatccactgcgtccccccggacgccgccggagtccccacctcgcagcaaaagcaagaatgccgacacctaccctggtgatgaccaaaggctggttgaagtctatgccccctgagagcctgaagccccagggcgcagggcccgggaggatcaccgtctggggcatgccgccttcctcccgcccaccgggctctaagtgtccccgcgcagggcagccactccgcgccgggcggcgtcctggccccgacccgggcgggggcgctttatccccgctgggggtgacgtcaccgccccgccgtcctccc

SEQ ID NO: 396921 - DNA, 112 bp, Homo sapiens; identical to SEQ ID NO: 199715
  chr4:186706061-186706173
  hyper

SEQ ID NO: 396922 - DNA, 880 bp, Homo sapiens; identical to SEQ ID NO: 230858
  chr4:187644343-187645223
  hyper

SEQ ID NO: 396923 - DNA, 565 bp, Homo sapiens; identical to SEQ ID NO: 199716
  chr4:187645505-187646070
  hyper

SEQ ID NO: 396924 - DNA, 331 bp, Homo sapiens
  chr4:187646716-187647047
  hyper
tcgccacaggagccgccgagagccagggatggagatttcagacttaggactctgccacgattctactgatccttaagcgccaacagaacgaaatggacatgcctattagctaccacaaatcgaattattttatatgagagagagaaatgtggttcaagttccacatttgtcctttaaataatcgaccctccctaaccctgtccccaaaggctcgtggaaattagggagggggttggggagacggttccagaaacaaaacgctttcctccagcacggcctctacatccagtccacccaagctgatttttgtaactcatataaagaatgggcc

SEQ ID NO: 396925 - DNA, 86 bp, Homo sapiens; identical to SEQ ID NO: 199722
  chr4:190123535-190123621
  hyper

SEQ ID NO: 396926 - DNA, 64 bp, Homo sapiens; identical to SEQ ID NO: 282726
  chr5:343971-344035
  hyper

SEQ ID NO: 396927 - DNA, 207 bp, Homo sapiens; identical to SEQ ID NO: 282727
  chr5:344297-344504
  hyper

SEQ ID NO: 396928 - DNA, 285 bp, Homo sapiens; identical to SEQ ID NO: 199726
  chr5:374579-374864
  hyper

SEQ ID NO: 396929 - DNA, 267 bp, Homo sapiens; identical to SEQ ID NO: 222548
  chr5:377105-377372
  hyper

SEQ ID NO: 396930 - DNA, 35 bp, Homo sapiens; identical to SEQ ID NO: 199731
  chr5:693798-693833
  hyper

SEQ ID NO: 396931 - DNA, 370 bp, Homo sapiens; identical to SEQ ID NO: 388174
  chr5:1064042-1064412
  hyper

SEQ ID NO: 396932 - DNA, 105 bp, Homo sapiens; identical to SEQ ID NO: 222563
  chr5:1294071-1294176
  hyper

SEQ ID NO: 396933 - DNA, 45 bp, Homo sapiens; identical to SEQ ID NO: 199739
  chr5:1345798-1345843
  hyper

SEQ ID NO: 396934 - DNA, 91 bp, Homo sapiens; identical to SEQ ID NO: 282755
  chr5:1852001-1852092
  hyper

SEQ ID NO: 396935 - DNA, 89 bp, Homo sapiens; identical to SEQ ID NO: 282760
  chr5:1882047-1882136
  hyper

SEQ ID NO: 396936 - DNA, 99 bp, Homo sapiens; identical to SEQ ID NO: 111084
  chr5:2741122-2741221
  hyper

SEQ ID NO: 396937 - DNA, 619 bp, Homo sapiens
  chr5:2753746-2754365
  hyper
gactccacatgggacatcctaattcagtccaggacagatatttttaatcaattactatagagctgaaaaacagagagagagagaaagcagccgggttgggcaagccgtcgacagtctgcgacatttttgcgcttcctgggagggaattcctccaagaagaggggtaaatgagaggcccacacgctggatggcaaacacaaacactgtcagatcagatggcaacctttagggttcctttacgatcagatcagtttaaatgaaaaaaaaatcgggtgtaatttttatcaccagggagcactggcctggagtatttccatttctaaagagcggttcccgctgtggtttcattagcatttggggctcatcctccctccccctcccttgacccacccccctccccccgccggacctctgccaggggcagaagagaaaacagccagttattatacaaacatcctcagtttggagctggagtgtctgctctggatacagtcgattctgacatcaattaaatatataaccagacacgtgcagtggcggggagggtcccctcacccagggtgcatctccagaaacgccgcctgcccttccccctctttagctcagtgttgggagtttg

SEQ ID NO: 396938 - DNA, 40 bp, Homo sapiens; identical to SEQ ID NO: 282766
  chr5:2754767-2754807
  hyper

SEQ ID NO: 396939 - DNA, 234 bp, Homo sapiens; identical to SEQ ID NO: 282767
  chr5:2754908-2755142
  hyper

SEQ ID NO: 396940 - DNA, 208 bp, Homo sapiens; identical to SEQ ID NO: 282771
  chr5:3590903-3591111
  hyper

SEQ ID NO: 396941 - DNA, 94 bp, Homo sapiens; identical to SEQ ID NO: 199747
  chr5:3591458-3591552
  hyper

SEQ ID NO: 396942 - DNA, 244 bp, Homo sapiens; identical to SEQ ID NO: 199748
  chr5:3591613-3591857
  hyper

SEQ ID NO: 396943 - DNA, 79 bp, Homo sapiens; identical to SEQ ID NO: 282774
  chr5:3592384-3592463
  hyper

SEQ ID NO: 396944 - DNA, 302 bp, Homo sapiens; identical to SEQ ID NO: 282775
  chr5:3592881-3593183
  hyper

SEQ ID NO: 396945 - DNA, 243 bp, Homo sapiens; identical to SEQ ID NO: 282776
  chr5:3601905-3602148
  hyper

SEQ ID NO: 396946 - DNA, 78 bp, Homo sapiens; identical to SEQ ID NO: 230925
  chr5:6378229-6378307
  hyper

SEQ ID NO: 396947 - DNA, 85 bp, Homo sapiens; identical to SEQ ID NO: 282786
  chr5:7851299-7851384
  hyper

SEQ ID NO: 396948 - DNA, 902 bp, Homo sapiens; identical to SEQ ID NO: 282794
  chr5:10441403-10442305
  hyper

SEQ ID NO: 396949 - DNA, 170 bp, Homo sapiens; identical to SEQ ID NO: 199758
  chr5:10988184-10988354
  hyper

SEQ ID NO: 396950 - DNA, 58 bp, Homo sapiens; identical to SEQ ID NO: 199761
  chr5:14108555-14108613
  hyper

SEQ ID NO: 396951 - DNA, 53 bp, Homo sapiens; identical to SEQ ID NO: 199762
  chr5:14108840-14108893
  hyper

SEQ ID NO: 396952 - DNA, 45 bp, Homo sapiens; identical to SEQ ID NO: 199766
  chr5:14145000-14145045
  hyper

SEQ ID NO: 396953 - DNA, 94 bp, Homo sapiens; identical to SEQ ID NO: 230950
  chr5:14810079-14810173
  hyper

SEQ ID NO: 396954 - DNA, 93 bp, Homo sapiens; identical to SEQ ID NO: 199768
  chr5:15499745-15499838
  hyper

SEQ ID NO: 396955 - DNA, 129 bp, Homo sapiens
  chr5:15499947-15500076
  hyper
tgcccacgcacttaaaataggctgtacttgcagacaaactcaagggattccaaacgacgcctggaagttcatcttatagattgggggccaagcctgtaaaagaacaacagtaaaacagagccaacagga

SEQ ID NO: 396956 - DNA, 214 bp, Homo sapiens; identical to SEQ ID NO: 222589
  chr5:16616869-16617083
  hyper

SEQ ID NO: 396957 - DNA, 31 bp, Homo sapiens; identical to SEQ ID NO: 384061
  chr5:17217142-17217173
  hyper

SEQ ID NO: 396958 - DNA, 76 bp, Homo sapiens; identical to SEQ ID NO: 199779
  chr5:17987028-17987104
  hyper

SEQ ID NO: 396959 - DNA, 84 bp, Homo sapiens; identical to SEQ ID NO: 230960
  chr5:21459584-21459668
  hyper

SEQ ID NO: 396960 - DNA, 120 bp, Homo sapiens
  chr5:29296855-29296975
  hyper
cccatgcccatccggaactctagctggcccgcaagtgcgtgggcagccccggttcccgcctgtgcctctccctacacacctggcaagctgagggagccggctcccgcctcaaccagcaca

SEQ ID NO: 396961 - DNA, 158 bp, Homo sapiens; identical to SEQ ID NO: 230964
  chr5:31532167-31532325
  hyper

SEQ ID NO: 396962 - DNA, 72 bp, Homo sapiens; identical to SEQ ID NO: 282839
  chr5:32713505-32713577
  hyper

SEQ ID NO: 396963 - DNA, 193 bp, Homo sapiens; identical to SEQ ID NO: 230975
  chr5:34007307-34007500
  hyper

SEQ ID NO: 396964 - DNA, 52 bp, Homo sapiens; identical to SEQ ID NO: 199787
  chr5:34008090-34008142
  hyper

SEQ ID NO: 396965 - DNA, 79 bp, Homo sapiens; identical to SEQ ID NO: 199788
  chr5:34486431-34486510
  hyper

SEQ ID NO: 396966 - DNA, 88 bp, Homo sapiens; identical to SEQ ID NO: 230981
  chr5:34929946-34930034
  hyper

SEQ ID NO: 396967 - DNA, 175 bp, Homo sapiens; identical to SEQ ID NO: 282853
  chr5:36066734-36066909
  hyper

SEQ ID NO: 396968 - DNA, 53 bp, Homo sapiens; identical to SEQ ID NO: 230984
  chr5:36151263-36151316
  hyper

SEQ ID NO: 396969 - DNA, 87 bp, Homo sapiens; identical to SEQ ID NO: 230985
  chr5:36152364-36152451
  hyper

SEQ ID NO: 396970 - DNA, 316 bp, Homo sapiens; identical to SEQ ID NO: 230994
  chr5:37370926-37371242
  hyper

SEQ ID NO: 396971 - DNA, 170 bp, Homo sapiens; identical to SEQ ID NO: 282865
  chr5:37371575-37371745
  hyper

SEQ ID NO: 396972 - DNA, 153 bp, Homo sapiens; identical to SEQ ID NO: 230996
  chr5:37379258-37379411
  hyper

SEQ ID NO: 396973 - DNA, 42 bp, Homo sapiens; identical to SEQ ID NO: 199804
  chr5:39424510-39424552
  hyper

SEQ ID NO: 396974 - DNA, 41 bp, Homo sapiens; identical to SEQ ID NO: 199805
  chr5:39424612-39424653
  hyper

SEQ ID NO: 396975 - DNA, 343 bp, Homo sapiens; identical to SEQ ID NO: 231012
  chr5:41904222-41904565
  hyper

SEQ ID NO: 396976 - DNA, 316 bp, Homo sapiens; identical to SEQ ID NO: 231013
  chr5:41925471-41925787
  hyper

SEQ ID NO: 396977 - DNA, 34 bp, Homo sapiens; identical to SEQ ID NO: 199816
  chr5:42993813-42993847
  hyper

SEQ ID NO: 396978 - DNA, 91 bp, Homo sapiens; identical to SEQ ID NO: 199823
  chr5:43040739-43040830
  hyper

SEQ ID NO: 396979 - DNA, 195 bp, Homo sapiens; identical to SEQ ID NO: 199824
  chr5:43041028-43041223
  hyper

SEQ ID NO: 396980 - DNA, 349 bp, Homo sapiens; identical to SEQ ID NO: 231028
  chr5:43041474-43041823
  hyper

SEQ ID NO: 396981 - DNA, 1169 bp, Homo sapiens; identical to SEQ ID NO: 199825
  chr5:43042087-43043256
  hyper

SEQ ID NO: 396982 - DNA, 253 bp, Homo sapiens; identical to SEQ ID NO: 199826
  chr5:43043288-43043541
  hyper

SEQ ID NO: 396983 - DNA, 36 bp, Homo sapiens; identical to SEQ ID NO: 231031
  chr5:43120913-43120949
  hyper

SEQ ID NO: 396984 - DNA, 32 bp, Homo sapiens; identical to SEQ ID NO: 231032
  chr5:43121558-43121590
  hyper

SEQ ID NO: 396985 - DNA, 266 bp, Homo sapiens; identical to SEQ ID NO: 231037
  chr5:43514901-43515167
  hyper

SEQ ID NO: 396986 - DNA, 274 bp, Homo sapiens; identical to SEQ ID NO: 199829
  chr5:44389052-44389326
  hyper

SEQ ID NO: 396987 - DNA, 905 bp, Homo sapiens; identical to SEQ ID NO: 282923
  chr5:50678490-50679395
  hyper

SEQ ID NO: 396988 - DNA, 57 bp, Homo sapiens; identical to SEQ ID NO: 282927
  chr5:50694660-50694717
  hyper

SEQ ID NO: 396989 - DNA, 205 bp, Homo sapiens; identical to SEQ ID NO: 282928
  chr5:50695463-50695668
  hyper

SEQ ID NO: 396990 - DNA, 745 bp, Homo sapiens; identical to SEQ ID NO: 282931
  chr5:52284771-52285516
  hyper

SEQ ID NO: 396991 - DNA, 39 bp, Homo sapiens; identical to SEQ ID NO: 199839
  chr5:52285808-52285847
  hyper

SEQ ID NO: 396992 - DNA, 53 bp, Homo sapiens; identical to SEQ ID NO: 231059
  chr5:52405480-52405533
  hyper

SEQ ID NO: 396993 - DNA, 107 bp, Homo sapiens; identical to SEQ ID NO: 199840
  chr5:52776321-52776428
  hyper

SEQ ID NO: 396994 - DNA, 232 bp, Homo sapiens; identical to SEQ ID NO: 199843
  chr5:53813366-53813598
  hyper

SEQ ID NO: 396995 - DNA, 61 bp, Homo sapiens; identical to SEQ ID NO: 231065
  chr5:54469486-54469547
  hyper

SEQ ID NO: 396996 - DNA, 108 bp, Homo sapiens; identical to SEQ ID NO: 231073
  chr5:54603781-54603889
  hyper

SEQ ID NO: 396997 - DNA, 78 bp, Homo sapiens; identical to SEQ ID NO: 231074
  chr5:54604144-54604222
  hyper

SEQ ID NO: 396998 - DNA, 91 bp, Homo sapiens; identical to SEQ ID NO: 282953
  chr5:54830957-54831048
  hyper

SEQ ID NO: 396999 - DNA, 49 bp, Homo sapiens; identical to SEQ ID NO: 111420
  chr5:54831085-54831134
  hyper

SEQ ID NO: 397000 - DNA, 630 bp, Homo sapiens
  chr5:57755330-57755960
  hyper
aagccgatccccagcgctgccggcgcacaaaagccagagggcaggtgaggagcccacctcgcgctgggatcggacccccgaaaaacccggaagcggcgggcgagggaccccgcgggcttgcccggcttggggtcgcccggacagacctcccgcccgcccggcagcccggcgccctccgcttgtcacctttcccagcactttgccccggcagtagcgcttcccagtcgtggggtcgacgataatccgcgagatctccggccccgagtgcgaatggtggtgatggtggtgaggggccgccgggggcacttgcgcctgggactgaggtggctgcgattcctcggggggctgcggcggccgcttcttcttcgagtccgctccgcaacccttgcccagcgcctgctcgcacattttggtgctggcggctggctggtaggtgatagtccgcaaaagctccatggtcgccttgccgccccgcactgcccgctgccaccccctaggcgcggtcacacgtccgagccggccgtggtcctcgcacccttgcctctggtgccgactagcacccaacaccccggtccacttgtgcgagtgagagcgctcggcgaagtcttatatacggggaggcgggaaggg

SEQ ID NO: 397001 - DNA, 619 bp, Homo sapiens; identical to SEQ ID NO: 222614
  chr5:57755985-57756604
  hyper

SEQ ID NO: 397002 - DNA, 262 bp, Homo sapiens; identical to SEQ ID NO: 231088
  chr5:60458162-60458424
  hyper

SEQ ID NO: 397003 - DNA, 203 bp, Homo sapiens; identical to SEQ ID NO: 199868
  chr5:60626141-60626344
  hyper

SEQ ID NO: 397004 - DNA, 51 bp, Homo sapiens; identical to SEQ ID NO: 231090
  chr5:60627994-60628045
  hyper

SEQ ID NO: 397005 - DNA, 74 bp, Homo sapiens; identical to SEQ ID NO: 231094
  chr5:61708381-61708455
  hyper

SEQ ID NO: 397006 - DNA, 359 bp, Homo sapiens; identical to SEQ ID NO: 388208
  chr5:63255343-63255702
  hyper

SEQ ID NO: 397007 - DNA, 219 bp, Homo sapiens; identical to SEQ ID NO: 199869
  chr5:63257392-63257611
  hyper

SEQ ID NO: 397008 - DNA, 95 bp, Homo sapiens; identical to SEQ ID NO: 199870
  chr5:63257861-63257956
  hyper

SEQ ID NO: 397009 - DNA, 63 bp, Homo sapiens; identical to SEQ ID NO: 231098
  chr5:63462188-63462251
  hyper

SEQ ID NO: 397010 - DNA, 46 bp, Homo sapiens; identical to SEQ ID NO: 231104
  chr5:64859099-64859145
  hyper

SEQ ID NO: 397011 - DNA, 162 bp, Homo sapiens; identical to SEQ ID NO: 231105
  chr5:64920140-64920302
  hyper

SEQ ID NO: 397012 - DNA, 162 bp, Homo sapiens; identical to SEQ ID NO: 199876
  chr5:65017234-65017396
  hyper

SEQ ID NO: 397013 - DNA, 149 bp, Homo sapiens; identical to SEQ ID NO: 231109
  chr5:65439856-65440005
  hyper

SEQ ID NO: 397014 - DNA, 47 bp, Homo sapiens; identical to SEQ ID NO: 231110
  chr5:65891728-65891775
  hyper

SEQ ID NO: 397015 - DNA, 189 bp, Homo sapiens; identical to SEQ ID NO: 199878
  chr5:66124999-66125188
  hyper

SEQ ID NO: 397016 - DNA, 41 bp, Homo sapiens; identical to SEQ ID NO: 199880
  chr5:68179341-68179382
  hyper

SEQ ID NO: 397017 - DNA, 229 bp, Homo sapiens; identical to SEQ ID NO: 231119
  chr5:71616291-71616520
  hyper

SEQ ID NO: 397018 - DNA, 130 bp, Homo sapiens; identical to SEQ ID NO: 199882
  chr5:72113263-72113393
  hyper

SEQ ID NO: 397019 - DNA, 139 bp, Homo sapiens; identical to SEQ ID NO: 283014
  chr5:72511609-72511748
  hyper

SEQ ID NO: 397020 - DNA, 419 bp, Homo sapiens; identical to SEQ ID NO: 283015
  chr5:72511765-72512184
  hyper

SEQ ID NO: 397021 - DNA, 64 bp, Homo sapiens; identical to SEQ ID NO: 283016
  chr5:72526700-72526764
  hyper

SEQ ID NO: 397022 - DNA, 217 bp, Homo sapiens; identical to SEQ ID NO: 283019
  chr5:72597813-72598030
  hyper

SEQ ID NO: 397023 - DNA, 104 bp, Homo sapiens; identical to SEQ ID NO: 283020
  chr5:72598102-72598206
  hyper

SEQ ID NO: 397024 - DNA, 359 bp, Homo sapiens; identical to SEQ ID NO: 231131
  chr5:72607509-72607868
  hyper

SEQ ID NO: 397025 - DNA, 632 bp, Homo sapiens; identical to SEQ ID NO: 283023
  chr5:72676273-72676905
  hyper

SEQ ID NO: 397026 - DNA, 49 bp, Homo sapiens; identical to SEQ ID NO: 111542
  chr5:72678365-72678414
  hyper

SEQ ID NO: 397027 - DNA, 202 bp, Homo sapiens
  chr5:73935786-73935988
  hyper
gacgcagcgcgacattcacccccaggaaagcgctgctttccgcagaggagagaggctgactgtatccttagctcggctcctcgcttccccagcggctcgccccagacattgcaccgcggaggggaggccggtcgacctctccggcgatgcccggcttctgcctgctgtgggagggcagcggcgggcaccgtgatctccgcac

SEQ ID NO: 397028 - DNA, 516 bp, Homo sapiens; identical to SEQ ID NO: 41639
  chr5:73936032-73936548
  hyper

SEQ ID NO: 397029 - DNA, 285 bp, Homo sapiens; identical to SEQ ID NO: 283039
  chr5:73936774-73937059
  hyper

SEQ ID NO: 397030 - DNA, 103 bp, Homo sapiens; identical to SEQ ID NO: 199897
  chr5:74162616-74162719
  hyper

SEQ ID NO: 397031 - DNA, 59 bp, Homo sapiens
  chr5:74348635-74348694
  hyper
cggctccgaaaggcaagcgtcacgaagccgggctcagtagctcccccgggccccctgcg

SEQ ID NO: 397032 - DNA, 217 bp, Homo sapiens
  chr5:74348906-74349123
  hyper
cgttatccaggacacgctccgcgcccgccgcccgctgccctttccccccgctggcctcggggaacttccccgcgtctggccgcaggcggcggctgccgcggggagccccgaagttgcggcgtctgctaggcgcgcgccgggtcgcccacccggcccgtgacgctgtgtccgtccgccgcgcgctctggtggccccggggctcctgcaggcgcggaga

SEQ ID NO: 397033 - DNA, 182 bp, Homo sapiens; identical to SEQ ID NO: 199911
  chr5:76383033-76383215
  hyper

SEQ ID NO: 397034 - DNA, 106 bp, Homo sapiens; identical to SEQ ID NO: 231178
  chr5:76938270-76938376
  hyper

SEQ ID NO: 397035 - DNA, 48 bp, Homo sapiens; identical to SEQ ID NO: 388220
  chr5:77591340-77591388
  hyper

SEQ ID NO: 397036 - DNA, 68 bp, Homo sapiens; identical to SEQ ID NO: 231186
  chr5:77656465-77656533
  hyper

SEQ ID NO: 397037 - DNA, 50 bp, Homo sapiens; identical to SEQ ID NO: 283080
  chr5:77805996-77806046
  hyper

SEQ ID NO: 397038 - DNA, 76 bp, Homo sapiens; identical to SEQ ID NO: 283081
  chr5:77806320-77806396
  hyper

SEQ ID NO: 397039 - DNA, 122 bp, Homo sapiens; identical to SEQ ID NO: 199917
  chr5:78281720-78281842
  hyper

SEQ ID NO: 397040 - DNA, 35 bp, Homo sapiens; identical to SEQ ID NO: 231192
  chr5:78908116-78908151
  hyper

SEQ ID NO: 397041 - DNA, 145 bp, Homo sapiens; identical to SEQ ID NO: 222640
  chr5:79551298-79551443
  hyper

SEQ ID NO: 397042 - DNA, 329 bp, Homo sapiens; identical to SEQ ID NO: 199921
  chr5:79783875-79784204
  hyper

SEQ ID NO: 397043 - DNA, 265 bp, Homo sapiens; identical to SEQ ID NO: 231201
  chr5:80597468-80597733
  hyper

SEQ ID NO: 397044 - DNA, 110 bp, Homo sapiens; identical to SEQ ID NO: 199925
  chr5:82372772-82372882
  hyper

SEQ ID NO: 397045 - DNA, 90 bp, Homo sapiens; identical to SEQ ID NO: 283101
  chr5:83678127-83678217
  hyper

SEQ ID NO: 397046 - DNA, 678 bp, Homo sapiens; identical to SEQ ID NO: 283102
  chr5:83678311-83678989
  hyper

SEQ ID NO: 397047 - DNA, 193 bp, Homo sapiens
  chr5:83679254-83679447
  hyper
tcttttaaatgcttttttctttttaatttaatttgatttttatttttctgtttttattttttcgtgcaattcacagaaggcatcaccctacaagctctcacaacttttccgctcctgtgcggggacgcgaggggtggcttgccccgcactattccccattaccaagagttaacactggtactcggagggggtg

SEQ ID NO: 397048 - DNA, 171 bp, Homo sapiens
  chr5:83680444-83680615
  hyper
gggctcagccctccgctgcgggtgggtcccggcagaggcgcggcgggcggggcgcgggctcccgcggccgccccgggtctgctgcgcgggcaggcagacccaccggcagacaggcggaccgggcgctcggctgtcgctgttctccgcgcggcggctgcggggcttctgact

SEQ ID NO: 397049 - DNA, 44 bp, Homo sapiens; identical to SEQ ID NO: 199932
  chr5:87437944-87437988
  hyper

SEQ ID NO: 397050 - DNA, 175 bp, Homo sapiens; identical to SEQ ID NO: 231214
  chr5:87438273-87438448
  hyper

SEQ ID NO: 397051 - DNA, 365 bp, Homo sapiens; identical to SEQ ID NO: 283131
  chr5:87987787-87988152
  hyper

SEQ ID NO: 397052 - DNA, 67 bp, Homo sapiens; identical to SEQ ID NO: 283132
  chr5:87988651-87988718
  hyper

SEQ ID NO: 397053 - DNA, 43 bp, Homo sapiens; identical to SEQ ID NO: 199942
  chr5:89770671-89770714
  hyper

SEQ ID NO: 397054 - DNA, 121 bp, Homo sapiens; identical to SEQ ID NO: 199945
  chr5:90676143-90676264
  hyper

SEQ ID NO: 397055 - DNA, 49 bp, Homo sapiens; identical to SEQ ID NO: 199946
  chr5:90678446-90678495
  hyper

SEQ ID NO: 397056 - DNA, 283 bp, Homo sapiens; identical to SEQ ID NO: 231245
  chr5:90679120-90679403
  hyper

SEQ ID NO: 397057 - DNA, 100 bp, Homo sapiens; identical to SEQ ID NO: 283146
  chr5:92914942-92915042
  hyper

SEQ ID NO: 397058 - DNA, 317 bp, Homo sapiens; identical to SEQ ID NO: 283147
  chr5:92915128-92915445
  hyper

SEQ ID NO: 397059 - DNA, 242 bp, Homo sapiens; identical to SEQ ID NO: 283148
  chr5:92915595-92915837
  hyper

SEQ ID NO: 397060 - DNA, 443 bp, Homo sapiens; identical to SEQ ID NO: 283149
  chr5:92916165-92916608
  hyper

SEQ ID NO: 397061 - DNA, 102 bp, Homo sapiens; identical to SEQ ID NO: 231249
  chr5:92916848-92916950
  hyper

SEQ ID NO: 397062 - DNA, 62 bp, Homo sapiens; identical to SEQ ID NO: 231254
  chr5:92943194-92943256
  hyper

SEQ ID NO: 397063 - DNA, 44 bp, Homo sapiens; identical to SEQ ID NO: 4111
  chr5:92946750-92946794
  hyper

SEQ ID NO: 397064 - DNA, 382 bp, Homo sapiens; identical to SEQ ID NO: 231259
  chr5:93954161-93954543
  hyper

SEQ ID NO: 397065 - DNA, 129 bp, Homo sapiens; identical to SEQ ID NO: 283160
  chr5:94621134-94621263
  hyper

SEQ ID NO: 397066 - DNA, 152 bp, Homo sapiens; identical to SEQ ID NO: 231261
  chr5:94890673-94890825
  hyper

SEQ ID NO: 397067 - DNA, 236 bp, Homo sapiens; identical to SEQ ID NO: 283168
  chr5:95768384-95768620
  hyper

SEQ ID NO: 397068 - DNA, 147 bp, Homo sapiens; identical to SEQ ID NO: 283169
  chr5:96038225-96038372
  hyper

SEQ ID NO: 397069 - DNA, 375 bp, Homo sapiens; identical to SEQ ID NO: 283170
  chr5:96038415-96038790
  hyper

SEQ ID NO: 397070 - DNA, 95 bp, Homo sapiens; identical to SEQ ID NO: 199956
  chr5:98107032-98107127
  hyper

SEQ ID NO: 397071 - DNA, 208 bp, Homo sapiens; identical to SEQ ID NO: 199957
  chr5:98108684-98108892
  hyper

SEQ ID NO: 397072 - DNA, 368 bp, Homo sapiens; identical to SEQ ID NO: 222647
  chr5:98109213-98109581
  hyper

SEQ ID NO: 397073 - DNA, 263 bp, Homo sapiens; identical to SEQ ID NO: 222648
  chr5:98109927-98110190
  hyper

SEQ ID NO: 397074 - DNA, 224 bp, Homo sapiens; identical to SEQ ID NO: 199963
  chr5:100240289-100240513
  hyper

SEQ ID NO: 397075 - DNA, 102 bp, Homo sapiens; identical to SEQ ID NO: 231286
  chr5:102091104-102091206
  hyper

SEQ ID NO: 397076 - DNA, 518 bp, Homo sapiens; identical to SEQ ID NO: 222651
  chr5:102201407-102201925
  hyper

SEQ ID NO: 397077 - DNA, 125 bp, Homo sapiens; identical to SEQ ID NO: 199968
  chr5:107005046-107005171
  hyper

SEQ ID NO: 397078 - DNA, 227 bp, Homo sapiens; identical to SEQ ID NO: 283190
  chr5:107007427-107007654
  hyper

SEQ ID NO: 397079 - DNA, 102 bp, Homo sapiens; identical to SEQ ID NO: 199971
  chr5:107007963-107008065
  hyper

SEQ ID NO: 397080 - DNA, 56 bp, Homo sapiens
  chr5:110074272-110074328
  hyper
cgggagacaaagctaggtggaacgttattaaccctccacaactccaacctctacta

SEQ ID NO: 397081 - DNA, 214 bp, Homo sapiens; identical to SEQ ID NO: 231295
  chr5:110428255-110428469
  hyper

SEQ ID NO: 397082 - DNA, 110 bp, Homo sapiens; identical to SEQ ID NO: 388238
  chr5:110848376-110848486
  hyper

SEQ ID NO: 397083 - DNA, 38 bp, Homo sapiens; identical to SEQ ID NO: 231299
  chr5:111093185-111093223
  hyper

SEQ ID NO: 397084 - DNA, 78 bp, Homo sapiens; identical to SEQ ID NO: 283200
  chr5:111093930-111094008
  hyper

SEQ ID NO: 397085 - DNA, 99 bp, Homo sapiens; identical to SEQ ID NO: 111818
  chr5:111496549-111496648
  hyper

SEQ ID NO: 397086 - DNA, 232 bp, Homo sapiens; identical to SEQ ID NO: 231307
  chr5:113028782-113029014
  hyper

SEQ ID NO: 397087 - DNA, 34 bp, Homo sapiens; identical to SEQ ID NO: 231311
  chr5:114598419-114598453
  hyper

SEQ ID NO: 397088 - DNA, 289 bp, Homo sapiens; identical to SEQ ID NO: 199993
  chr5:114632026-114632315
  hyper

SEQ ID NO: 397089 - DNA, 180 bp, Homo sapiens; identical to SEQ ID NO: 283224
  chr5:114938164-114938344
  hyper

SEQ ID NO: 397090 - DNA, 107 bp, Homo sapiens; identical to SEQ ID NO: 231314
  chr5:115177406-115177513
  hyper

SEQ ID NO: 397091 - DNA, 146 bp, Homo sapiens; identical to SEQ ID NO: 199994
  chr5:115421021-115421167
  hyper

SEQ ID NO: 397092 - DNA, 378 bp, Homo sapiens; identical to SEQ ID NO: 283228
  chr5:115909339-115909717
  hyper

SEQ ID NO: 397093 - DNA, 285 bp, Homo sapiens; identical to SEQ ID NO: 231323
  chr5:118604723-118605008
  hyper

SEQ ID NO: 397094 - DNA, 76 bp, Homo sapiens; identical to SEQ ID NO: 283239
  chr5:121648493-121648569
  hyper

SEQ ID NO: 397095 - DNA, 59 bp, Homo sapiens; identical to SEQ ID NO: 231333
  chr5:122180920-122180979
  hyper

SEQ ID NO: 397096 - DNA, 117 bp, Homo sapiens; identical to SEQ ID NO: 283242
  chr5:122371100-122371217
  hyper

SEQ ID NO: 397097 - DNA, 193 bp, Homo sapiens; identical to SEQ ID NO: 283243
  chr5:122371257-122371450
  hyper

SEQ ID NO: 397098 - DNA, 134 bp, Homo sapiens; identical to SEQ ID NO: 200003
  chr5:122371731-122371865
  hyper

SEQ ID NO: 397099 - DNA, 77 bp, Homo sapiens; identical to SEQ ID NO: 231345
  chr5:122621428-122621505
  hyper

SEQ ID NO: 397100 - DNA, 52 bp, Homo sapiens; identical to SEQ ID NO: 231346
  chr5:122759250-122759302
  hyper

SEQ ID NO: 397101 - DNA, 115 bp, Homo sapiens; identical to SEQ ID NO: 200024
  chr5:130970643-130970758
  hyper

SEQ ID NO: 397102 - DNA, 79 bp, Homo sapiens; identical to SEQ ID NO: 231367
  chr5:130971007-130971086
  hyper

SEQ ID NO: 397103 - DNA, 66 bp, Homo sapiens; identical to SEQ ID NO: 283283
  chr5:131131878-131131944
  hyper

SEQ ID NO: 397104 - DNA, 31 bp, Homo sapiens; identical to SEQ ID NO: 231369
  chr5:131133364-131133395
  hyper

SEQ ID NO: 397105 - DNA, 390 bp, Homo sapiens; identical to SEQ ID NO: 283285
  chr5:131347237-131347627
  hyper

SEQ ID NO: 397106 - DNA, 286 bp, Homo sapiens; identical to SEQ ID NO: 231373
  chr5:131705174-131705460
  hyper

SEQ ID NO: 397107 - DNA, 82 bp, Homo sapiens; identical to SEQ ID NO: 283295
  chr5:132148851-132148933
  hyper

SEQ ID NO: 397108 - DNA, 83 bp, Homo sapiens; identical to SEQ ID NO: 111981
  chr5:132148947-132149030
  hyper

SEQ ID NO: 397109 - DNA, 63 bp, Homo sapiens; identical to SEQ ID NO: 283298
  chr5:133449610-133449673
  hyper

SEQ ID NO: 397110 - DNA, 329 bp, Homo sapiens; identical to SEQ ID NO: 283299
  chr5:133449924-133450253
  hyper

SEQ ID NO: 397111 - DNA, 129 bp, Homo sapiens; identical to SEQ ID NO: 231388
  chr5:133706907-133707036
  hyper

SEQ ID NO: 397112 - DNA, 154 bp, Homo sapiens; identical to SEQ ID NO: 231391
  chr5:133968282-133968436
  hyper

SEQ ID NO: 397113 - DNA, 356 bp, Homo sapiens; identical to SEQ ID NO: 231394
  chr5:134094187-134094543
  hyper

SEQ ID NO: 397114 - DNA, 49 bp, Homo sapiens; identical to SEQ ID NO: 283317
  chr5:134376163-134376212
  hyper

SEQ ID NO: 397115 - DNA, 182 bp, Homo sapiens; identical to SEQ ID NO: 283318
  chr5:134376375-134376557
  hyper

SEQ ID NO: 397116 - DNA, 219 bp, Homo sapiens; identical to SEQ ID NO: 200039
  chr5:134463605-134463824
  hyper

SEQ ID NO: 397117 - DNA, 204 bp, Homo sapiens; identical to SEQ ID NO: 283323
  chr5:134825179-134825383
  hyper

SEQ ID NO: 397118 - DNA, 209 bp, Homo sapiens; identical to SEQ ID NO: 231411
  chr5:134844204-134844413
  hyper

SEQ ID NO: 397119 - DNA, 239 bp, Homo sapiens; identical to SEQ ID NO: 231420
  chr5:135700986-135701225
  hyper

SEQ ID NO: 397120 - DNA, 152 bp, Homo sapiens; identical to SEQ ID NO: 112064
  chr5:137090063-137090215
  hyper

SEQ ID NO: 397121 - DNA, 225 bp, Homo sapiens; identical to SEQ ID NO: 231424
  chr5:137369084-137369309
  hyper

SEQ ID NO: 397122 - DNA, 161 bp, Homo sapiens; identical to SEQ ID NO: 283341
  chr5:137774493-137774654
  hyper

SEQ ID NO: 397123 - DNA, 106 bp, Homo sapiens; identical to SEQ ID NO: 231430
  chr5:137879232-137879338
  hyper

SEQ ID NO: 397124 - DNA, 60 bp, Homo sapiens; identical to SEQ ID NO: 231431
  chr5:137910697-137910757
  hyper

SEQ ID NO: 397125 - DNA, 113 bp, Homo sapiens; identical to SEQ ID NO: 200053
  chr5:137911538-137911651
  hyper

SEQ ID NO: 397126 - DNA, 252 bp, Homo sapiens; identical to SEQ ID NO: 222696
  chr5:138089667-138089919
  hyper

SEQ ID NO: 397127 - DNA, 376 bp, Homo sapiens; identical to SEQ ID NO: 231433
  chr5:138609205-138609581
  hyper

SEQ ID NO: 397128 - DNA, 124 bp, Homo sapiens; identical to SEQ ID NO: 231434
  chr5:138677832-138677956
  hyper

SEQ ID NO: 397129 - DNA, 36 bp, Homo sapiens; identical to SEQ ID NO: 231435
  chr5:138775186-138775222
  hyper

SEQ ID NO: 397130 - DNA, 1077 bp, Homo sapiens; identical to SEQ ID NO: 388254
  chr5:139016945-139018022
  hyper

SEQ ID NO: 397131 - DNA, 64 bp, Homo sapiens; identical to SEQ ID NO: 200058
  chr5:139039951-139040015
  hyper

SEQ ID NO: 397132 - DNA, 61 bp, Homo sapiens; identical to SEQ ID NO: 200061
  chr5:139091111-139091172
  hyper

SEQ ID NO: 397133 - DNA, 235 bp, Homo sapiens; identical to SEQ ID NO: 283363
  chr5:139143822-139144057
  hyper

SEQ ID NO: 397134 - DNA, 91 bp, Homo sapiens; identical to SEQ ID NO: 283367
  chr5:139283459-139283550
  hyper

SEQ ID NO: 397135 - DNA, 95 bp, Homo sapiens
  chr5:139284463-139284558
  hyper
cttgcggtgggtctccacaacctcgaggcacccccggccgtacaggcgggttgcctgtgcctctcatgcctgcaggtctggcctcagccccgtgg

SEQ ID NO: 397136 - DNA, 111 bp, Homo sapiens; identical to SEQ ID NO: 231453
  chr5:139682661-139682772
  hyper

SEQ ID NO: 397137 - DNA, 63 bp, Homo sapiens; identical to SEQ ID NO: 222706
  chr5:139725675-139725738
  hyper

SEQ ID NO: 397138 - DNA, 169 bp, Homo sapiens; identical to SEQ ID NO: 231454
  chr5:139726535-139726704
  hyper

SEQ ID NO: 397139 - DNA, 422 bp, Homo sapiens; identical to SEQ ID NO: 200069
  chr5:139927089-139927511
  hyper

SEQ ID NO: 397140 - DNA, 34 bp, Homo sapiens; identical to SEQ ID NO: 231460
  chr5:140044228-140044262
  hyper

SEQ ID NO: 397141 - DNA, 533 bp, Homo sapiens; identical to SEQ ID NO: 231470
  chr5:140700004-140700537
  hyper

SEQ ID NO: 397142 - DNA, 134 bp, Homo sapiens; identical to SEQ ID NO: 388260
  chr5:141030966-141031100
  hyper

SEQ ID NO: 397143 - DNA, 80 bp, Homo sapiens; identical to SEQ ID NO: 200078
  chr5:141031150-141031230
  hyper

SEQ ID NO: 397144 - DNA, 68 bp, Homo sapiens; identical to SEQ ID NO: 231478
  chr5:141061849-141061917
  hyper

SEQ ID NO: 397145 - DNA, 881 bp, Homo sapiens; identical to SEQ ID NO: 283402
  chr5:141257149-141258030
  hyper

SEQ ID NO: 397146 - DNA, 61 bp, Homo sapiens; identical to SEQ ID NO: 283405
  chr5:141703944-141704005
  hyper

SEQ ID NO: 397147 - DNA, 265 bp, Homo sapiens; identical to SEQ ID NO: 200082
  chr5:141704448-141704713
  hyper

SEQ ID NO: 397148 - DNA, 341 bp, Homo sapiens; identical to SEQ ID NO: 200084
  chr5:141736299-141736640
  hyper

SEQ ID NO: 397149 - DNA, 255 bp, Homo sapiens; identical to SEQ ID NO: 231491
  chr5:143550289-143550544
  hyper

SEQ ID NO: 397150 - DNA, 75 bp, Homo sapiens; identical to SEQ ID NO: 283417
  chr5:143584759-143584834
  hyper

SEQ ID NO: 397151 - DNA, 202 bp, Homo sapiens; identical to SEQ ID NO: 231499
  chr5:145718089-145718291
  hyper

SEQ ID NO: 397152 - DNA, 165 bp, Homo sapiens; identical to SEQ ID NO: 200096
  chr5:146256762-146256927
  hyper

SEQ ID NO: 397153 - DNA, 148 bp, Homo sapiens; identical to SEQ ID NO: 200097
  chr5:146258482-146258630
  hyper

SEQ ID NO: 397154 - DNA, 66 bp, Homo sapiens; identical to SEQ ID NO: 283425
  chr5:146614040-146614106
  hyper

SEQ ID NO: 397155 - DNA, 158 bp, Homo sapiens; identical to SEQ ID NO: 283426
  chr5:146614481-146614639
  hyper

SEQ ID NO: 397156 - DNA, 150 bp, Homo sapiens; identical to SEQ ID NO: 283427
  chr5:146832504-146832654
  hyper

SEQ ID NO: 397157 - DNA, 322 bp, Homo sapiens; identical to SEQ ID NO: 283428
  chr5:146832690-146833012
  hyper

SEQ ID NO: 397158 - DNA, 48 bp, Homo sapiens; identical to SEQ ID NO: 231509
  chr5:147763270-147763318
  hyper

SEQ ID NO: 397159 - DNA, 87 bp, Homo sapiens; identical to SEQ ID NO: 283438
  chr5:149109659-149109746
  hyper

SEQ ID NO: 397160 - DNA, 192 bp, Homo sapiens; identical to SEQ ID NO: 112268
  chr5:149109802-149109994
  hyper

SEQ ID NO: 397161 - DNA, 476 bp, Homo sapiens; identical to SEQ ID NO: 231515
  chr5:149111288-149111764
  hyper

SEQ ID NO: 397162 - DNA, 254 bp, Homo sapiens; identical to SEQ ID NO: 231516
  chr5:149340038-149340292
  hyper

SEQ ID NO: 397163 - DNA, 32 bp, Homo sapiens; identical to SEQ ID NO: 200109
  chr5:150400618-150400650
  hyper

SEQ ID NO: 397164 - DNA, 41 bp, Homo sapiens; identical to SEQ ID NO: 231531
  chr5:150826986-150827027
  hyper

SEQ ID NO: 397165 - DNA, 227 bp, Homo sapiens; identical to SEQ ID NO: 231534
  chr5:151152045-151152272
  hyper

SEQ ID NO: 397166 - DNA, 36 bp, Homo sapiens; identical to SEQ ID NO: 283464
  chr5:153853519-153853555
  hyper

SEQ ID NO: 397167 - DNA, 52 bp, Homo sapiens; identical to SEQ ID NO: 200119
  chr5:153857881-153857933
  hyper

SEQ ID NO: 397168 - DNA, 315 bp, Homo sapiens; identical to SEQ ID NO: 231548
  chr5:154026798-154027113
  hyper

SEQ ID NO: 397169 - DNA, 57 bp, Homo sapiens; identical to SEQ ID NO: 283477
  chr5:155107331-155107388
  hyper

SEQ ID NO: 397170 - DNA, 64 bp, Homo sapiens; identical to SEQ ID NO: 200127
  chr5:157285888-157285952
  hyper

SEQ ID NO: 397171 - DNA, 108 bp, Homo sapiens; identical to SEQ ID NO: 200128
  chr5:158526600-158526708
  hyper

SEQ ID NO: 397172 - DNA, 345 bp, Homo sapiens; identical to SEQ ID NO: 231564
  chr5:158689916-158690261
  hyper

SEQ ID NO: 397173 - DNA, 166 bp, Homo sapiens; identical to SEQ ID NO: 231565
  chr5:158758339-158758505
  hyper

SEQ ID NO: 397174 - DNA, 73 bp, Homo sapiens; identical to SEQ ID NO: 283501
  chr5:159615598-159615671
  hyper

SEQ ID NO: 397175 - DNA, 143 bp, Homo sapiens; identical to SEQ ID NO: 283502
  chr5:159738773-159738916
  hyper

SEQ ID NO: 397176 - DNA, 132 bp, Homo sapiens; identical to SEQ ID NO: 283503
  chr5:159738917-159739049
  hyper

SEQ ID NO: 397177 - DNA, 247 bp, Homo sapiens; identical to SEQ ID NO: 200133
  chr5:159739186-159739433
  hyper

SEQ ID NO: 397178 - DNA, 173 bp, Homo sapiens; identical to SEQ ID NO: 200134
  chr5:159826416-159826589
  hyper

SEQ ID NO: 397179 - DNA, 360 bp, Homo sapiens; identical to SEQ ID NO: 283511
  chr5:160975998-160976358
  hyper

SEQ ID NO: 397180 - DNA, 43 bp, Homo sapiens; identical to SEQ ID NO: 283514
  chr5:161275109-161275152
  hyper

SEQ ID NO: 397181 - DNA, 223 bp, Homo sapiens; identical to SEQ ID NO: 283515
  chr5:161275590-161275813
  hyper

SEQ ID NO: 397182 - DNA, 357 bp, Homo sapiens; identical to SEQ ID NO: 231583
  chr5:162887185-162887542
  hyper

SEQ ID NO: 397183 - DNA, 118 bp, Homo sapiens; identical to SEQ ID NO: 200138
  chr5:162930156-162930274
  hyper

SEQ ID NO: 397184 - DNA, 63 bp, Homo sapiens; identical to SEQ ID NO: 200139
  chr5:162930320-162930383
  hyper

SEQ ID NO: 397185 - DNA, 46 bp, Homo sapiens; identical to SEQ ID NO: 231586
  chr5:162932441-162932487
  hyper

SEQ ID NO: 397186 - DNA, 152 bp, Homo sapiens; identical to SEQ ID NO: 200142
  chr5:167000608-167000760
  hyper

SEQ ID NO: 397187 - DNA, 377 bp, Homo sapiens; identical to SEQ ID NO: 200144
  chr5:167718952-167719329
  hyper

SEQ ID NO: 397188 - DNA, 247 bp, Homo sapiens; identical to SEQ ID NO: 231591
  chr5:167913520-167913767
  hyper

SEQ ID NO: 397189 - DNA, 44 bp, Homo sapiens; identical to SEQ ID NO: 231596
  chr5:168728508-168728552
  hyper

SEQ ID NO: 397190 - DNA, 134 bp, Homo sapiens; identical to SEQ ID NO: 231597
  chr5:169010586-169010720
  hyper

SEQ ID NO: 397191 - DNA, 64 bp, Homo sapiens; identical to SEQ ID NO: 200148
  chr5:170289638-170289702
  hyper

SEQ ID NO: 397192 - DNA, 42 bp, Homo sapiens; identical to SEQ ID NO: 200149
  chr5:170289734-170289776
  hyper

SEQ ID NO: 397193 - DNA, 105 bp, Homo sapiens; identical to SEQ ID NO: 231609
  chr5:170744958-170745063
  hyper

SEQ ID NO: 397194 - DNA, 115 bp, Homo sapiens; identical to SEQ ID NO: 231611
  chr5:170814440-170814555
  hyper

SEQ ID NO: 397195 - DNA, 1106 bp, Homo sapiens; identical to SEQ ID NO: 231612
  chr5:170845701-170846807
  hyper

SEQ ID NO: 397196 - DNA, 146 bp, Homo sapiens; identical to SEQ ID NO: 200152
  chr5:170847120-170847266
  hyper

SEQ ID NO: 397197 - DNA, 113 bp, Homo sapiens; identical to SEQ ID NO: 200153
  chr5:170847375-170847488
  hyper

SEQ ID NO: 397198 - DNA, 85 bp, Homo sapiens; identical to SEQ ID NO: 200154
  chr5:171541758-171541843
  hyper

SEQ ID NO: 397199 - DNA, 93 bp, Homo sapiens; identical to SEQ ID NO: 283545
  chr5:172068057-172068150
  hyper

SEQ ID NO: 397200 - DNA, 445 bp, Homo sapiens; identical to SEQ ID NO: 231615
  chr5:172068385-172068830
  hyper

SEQ ID NO: 397201 - DNA, 161 bp, Homo sapiens; identical to SEQ ID NO: 200156
  chr5:172197154-172197315
  hyper

SEQ ID NO: 397202 - DNA, 142 bp, Homo sapiens; identical to SEQ ID NO: 222748
  chr5:172386283-172386425
  hyper

SEQ ID NO: 397203 - DNA, 102 bp, Homo sapiens; identical to SEQ ID NO: 283553
  chr5:172444179-172444281
  hyper

SEQ ID NO: 397204 - DNA, 274 bp, Homo sapiens; identical to SEQ ID NO: 231621
  chr5:172483102-172483376
  hyper

SEQ ID NO: 397205 - DNA, 259 bp, Homo sapiens; identical to SEQ ID NO: 283558
  chr5:172663579-172663838
  hyper

SEQ ID NO: 397206 - DNA, 55 bp, Homo sapiens; identical to SEQ ID NO: 283563
  chr5:172710794-172710849
  hyper

SEQ ID NO: 397207 - DNA, 157 bp, Homo sapiens; identical to SEQ ID NO: 283564
  chr5:172710958-172711115
  hyper

SEQ ID NO: 397208 - DNA, 133 bp, Homo sapiens; identical to SEQ ID NO: 200167
  chr5:172721006-172721139
  hyper

SEQ ID NO: 397209 - DNA, 214 bp, Homo sapiens; identical to SEQ ID NO: 200168
  chr5:172755663-172755877
  hyper

SEQ ID NO: 397210 - DNA, 360 bp, Homo sapiens; identical to SEQ ID NO: 231638
  chr5:173314918-173315278
  hyper

SEQ ID NO: 397211 - DNA, 192 bp, Homo sapiens; identical to SEQ ID NO: 200170
  chr5:173345561-173345753
  hyper

SEQ ID NO: 397212 - DNA, 32 bp, Homo sapiens; identical to SEQ ID NO: 231643
  chr5:174147150-174147182
  hyper

SEQ ID NO: 397213 - DNA, 208 bp, Homo sapiens; identical to SEQ ID NO: 283581
  chr5:174159593-174159801
  hyper

SEQ ID NO: 397214 - DNA, 82 bp, Homo sapiens; identical to SEQ ID NO: 283595
  chr5:176046196-176046278
  hyper

SEQ ID NO: 397215 - DNA, 44 bp, Homo sapiens; identical to SEQ ID NO: 200187
  chr5:176074862-176074906
  hyper

SEQ ID NO: 397216 - DNA, 135 bp, Homo sapiens; identical to SEQ ID NO: 283599
  chr5:176237259-176237394
  hyper

SEQ ID NO: 397217 - DNA, 45 bp, Homo sapiens; identical to SEQ ID NO: 231676
  chr5:176433877-176433922
  hyper

SEQ ID NO: 397218 - DNA, 330 bp, Homo sapiens; identical to SEQ ID NO: 231677
  chr5:176449527-176449857
  hyper

SEQ ID NO: 397219 - DNA, 294 bp, Homo sapiens; identical to SEQ ID NO: 200189
  chr5:176738658-176738952
  hyper

SEQ ID NO: 397220 - DNA, 147 bp, Homo sapiens; identical to SEQ ID NO: 222763
  chr5:176830933-176831080
  hyper

SEQ ID NO: 397221 - DNA, 210 bp, Homo sapiens; identical to SEQ ID NO: 231682
  chr5:176853271-176853481
  hyper

SEQ ID NO: 397222 - DNA, 50 bp, Homo sapiens; identical to SEQ ID NO: 200191
  chr5:177019030-177019080
  hyper

SEQ ID NO: 397223 - DNA, 257 bp, Homo sapiens; identical to SEQ ID NO: 283617
  chr5:177540465-177540722
  hyper

SEQ ID NO: 397224 - DNA, 243 bp, Homo sapiens; identical to SEQ ID NO: 42413
  chr5:177540787-177541030
  hyper

SEQ ID NO: 397225 - DNA, 59 bp, Homo sapiens; identical to SEQ ID NO: 231691
  chr5:177558239-177558298
  hyper

SEQ ID NO: 397226 - DNA, 311 bp, Homo sapiens; identical to SEQ ID NO: 231695
  chr5:177706982-177707293
  hyper

SEQ ID NO: 397227 - DNA, 64 bp, Homo sapiens; identical to SEQ ID NO: 283627
  chr5:178054094-178054158
  hyper

SEQ ID NO: 397228 - DNA, 149 bp, Homo sapiens; identical to SEQ ID NO: 112631
  chr5:178054178-178054327
  hyper

SEQ ID NO: 397229 - DNA, 102 bp, Homo sapiens; identical to SEQ ID NO: 231698
  chr5:178287036-178287138
  hyper

SEQ ID NO: 397230 - DNA, 295 bp, Homo sapiens; identical to SEQ ID NO: 283630
  chr5:178322844-178323139
  hyper

SEQ ID NO: 397231 - DNA, 271 bp, Homo sapiens; identical to SEQ ID NO: 283631
  chr5:178323249-178323520
  hyper

SEQ ID NO: 397232 - DNA, 245 bp, Homo sapiens; identical to SEQ ID NO: 283632
  chr5:178367636-178367881
  hyper

SEQ ID NO: 397233 - DNA, 214 bp, Homo sapiens; identical to SEQ ID NO: 200197
  chr5:178423619-178423833
  hyper

SEQ ID NO: 397234 - DNA, 48 bp, Homo sapiens; identical to SEQ ID NO: 231708
  chr5:179233842-179233890
  hyper

SEQ ID NO: 397235 - DNA, 147 bp, Homo sapiens; identical to SEQ ID NO: 222772
  chr5:179234473-179234620
  hyper

SEQ ID NO: 397236 - DNA, 136 bp, Homo sapiens; identical to SEQ ID NO: 200207
  chr5:179781292-179781428
  hyper

SEQ ID NO: 397237 - DNA, 61 bp, Homo sapiens; identical to SEQ ID NO: 200213
  chr5:180595002-180595063
  hyper

SEQ ID NO: 397238 - DNA, 180 bp, Homo sapiens; identical to SEQ ID NO: 231729
  chr5:180600480-180600660
  hyper

SEQ ID NO: 397239 - DNA, 512 bp, Homo sapiens; identical to SEQ ID NO: 231734
  chr5:180670801-180671313
  hyper

SEQ ID NO: 397240 - DNA, 67 bp, Homo sapiens; identical to SEQ ID NO: 283682
  chr6:1316703-1316770
  hyper

SEQ ID NO: 397241 - DNA, 352 bp, Homo sapiens; identical to SEQ ID NO: 283683
  chr6:1316810-1317162
  hyper

SEQ ID NO: 397242 - DNA, 281 bp, Homo sapiens
  chr6:1382712-1382993
  hyper
gaaaggttgcgggacggctttgacgttgattatgtagctgttctcttttcaagtgcgcgcccctccccaccgcagcccgtctggtgtgcgaggattgtgtttgaaagggaggaagcatccttgaagtggtgggtgatggattgtctaaacccttctgggacgttctgggtgggggttttcgaggcagctcatcaataaagacccccctggagagaaggggcggctggagaccagcccccgccgcgcagccccgaggccccaggcctggaacacagtcctcg

SEQ ID NO: 397243 - DNA, 87 bp, Homo sapiens; identical to SEQ ID NO: 200230
  chr6:1439168-1439255
  hyper

SEQ ID NO: 397244 - DNA, 152 bp, Homo sapiens; identical to SEQ ID NO: 384116
  chr6:1610664-1610816
  hyper

SEQ ID NO: 397245 - DNA, 334 bp, Homo sapiens; identical to SEQ ID NO: 200232
  chr6:1610864-1611198
  hyper

SEQ ID NO: 397246 - DNA, 183 bp, Homo sapiens; identical to SEQ ID NO: 231756
  chr6:1612303-1612486
  hyper

SEQ ID NO: 397247 - DNA, 42 bp, Homo sapiens; identical to SEQ ID NO: 200235
  chr6:1614120-1614162
  hyper

SEQ ID NO: 397248 - DNA, 134 bp, Homo sapiens; identical to SEQ ID NO: 283697
  chr6:1619970-1620104
  hyper

SEQ ID NO: 397249 - DNA, 168 bp, Homo sapiens; identical to SEQ ID NO: 231761
  chr6:2764960-2765128
  hyper

SEQ ID NO: 397250 - DNA, 205 bp, Homo sapiens; identical to SEQ ID NO: 231764
  chr6:3118559-3118764
  hyper

SEQ ID NO: 397251 - DNA, 254 bp, Homo sapiens; identical to SEQ ID NO: 200241
  chr6:3162842-3163096
  hyper

SEQ ID NO: 397252 - DNA, 600 bp, Homo sapiens; identical to SEQ ID NO: 222801
  chr6:3456661-3457261
  hyper

SEQ ID NO: 397253 - DNA, 79 bp, Homo sapiens; identical to SEQ ID NO: 388305
  chr6:6000060-6000139
  hyper

SEQ ID NO: 397254 - DNA, 240 bp, Homo sapiens; identical to SEQ ID NO: 222813
  chr6:7541551-7541791
  hyper

SEQ ID NO: 397255 - DNA, 87 bp, Homo sapiens; identical to SEQ ID NO: 283743
  chr6:10383111-10383198
  hyper

SEQ ID NO: 397256 - DNA, 192 bp, Homo sapiens; identical to SEQ ID NO: 200264
  chr6:10391456-10391648
  hyper

SEQ ID NO: 397257 - DNA, 31 bp, Homo sapiens; identical to SEQ ID NO: 200270
  chr6:10414549-10414580
  hyper

SEQ ID NO: 397258 - DNA, 180 bp, Homo sapiens; identical to SEQ ID NO: 231809
  chr6:10529013-10529193
  hyper

SEQ ID NO: 397259 - DNA, 221 bp, Homo sapiens; identical to SEQ ID NO: 231814
  chr6:11232919-11233140
  hyper

SEQ ID NO: 397260 - DNA, 83 bp, Homo sapiens; identical to SEQ ID NO: 283778
  chr6:13488595-13488678
  hyper

SEQ ID NO: 397261 - DNA, 146 bp, Homo sapiens; identical to SEQ ID NO: 200285
  chr6:13574018-13574164
  hyper

SEQ ID NO: 397262 - DNA, 90 bp, Homo sapiens; identical to SEQ ID NO: 231822
  chr6:13614827-13614917
  hyper

SEQ ID NO: 397263 - DNA, 150 bp, Homo sapiens; identical to SEQ ID NO: 231825
  chr6:14117386-14117536
  hyper

SEQ ID NO: 397264 - DNA, 343 bp, Homo sapiens; identical to SEQ ID NO: 231826
  chr6:15663120-15663463
  hyper

SEQ ID NO: 397265 - DNA, 227 bp, Homo sapiens; identical to SEQ ID NO: 231827
  chr6:16129890-16130117
  hyper

SEQ ID NO: 397266 - DNA, 252 bp, Homo sapiens; identical to SEQ ID NO: 231830
  chr6:16761654-16761906
  hyper

SEQ ID NO: 397267 - DNA, 152 bp, Homo sapiens; identical to SEQ ID NO: 200291
  chr6:16763513-16763665
  hyper

SEQ ID NO: 397268 - DNA, 48 bp, Homo sapiens; identical to SEQ ID NO: 200297
  chr6:17393745-17393793
  hyper

SEQ ID NO: 397269 - DNA, 759 bp, Homo sapiens; identical to SEQ ID NO: 112932
  chr6:17393824-17394583
  hyper

SEQ ID NO: 397270 - DNA, 39 bp, Homo sapiens; identical to SEQ ID NO: 200302
  chr6:18278043-18278082
  hyper

SEQ ID NO: 397271 - DNA, 62 bp, Homo sapiens; identical to SEQ ID NO: 200303
  chr6:19691576-19691638
  hyper

SEQ ID NO: 397272 - DNA, 114 bp, Homo sapiens; identical to SEQ ID NO: 283806
  chr6:19692318-19692432
  hyper

SEQ ID NO: 397273 - DNA, 324 bp, Homo sapiens; identical to SEQ ID NO: 200307
  chr6:20401055-20401379
  hyper

SEQ ID NO: 397274 - DNA, 482 bp, Homo sapiens; identical to SEQ ID NO: 231850
  chr6:21595891-21596373
  hyper

SEQ ID NO: 397275 - DNA, 262 bp, Homo sapiens; identical to SEQ ID NO: 231854
  chr6:24403465-24403727
  hyper

SEQ ID NO: 397276 - DNA, 203 bp, Homo sapiens; identical to SEQ ID NO: 231856
  chr6:24667302-24667505
  hyper

SEQ ID NO: 397277 - DNA, 265 bp, Homo sapiens; identical to SEQ ID NO: 231857
  chr6:24721642-24721907
  hyper

SEQ ID NO: 397278 - DNA, 213 bp, Homo sapiens; identical to SEQ ID NO: 231859
  chr6:25278942-25279155
  hyper

SEQ ID NO: 397279 - DNA, 153 bp, Homo sapiens; identical to SEQ ID NO: 283828
  chr6:25652226-25652379
  hyper

SEQ ID NO: 397280 - DNA, 224 bp, Homo sapiens; identical to SEQ ID NO: 283829
  chr6:25652505-25652729
  hyper

SEQ ID NO: 397281 - DNA, 178 bp, Homo sapiens; identical to SEQ ID NO: 283832
  chr6:26021528-26021706
  hyper

SEQ ID NO: 397282 - DNA, 110 bp, Homo sapiens; identical to SEQ ID NO: 283833
  chr6:26022178-26022288
  hyper

SEQ ID NO: 397283 - DNA, 936 bp, Homo sapiens; identical to SEQ ID NO: 200318
  chr6:26031787-26032723
  hyper

SEQ ID NO: 397284 - DNA, 35 bp, Homo sapiens; identical to SEQ ID NO: 200319
  chr6:26032843-26032878
  hyper

SEQ ID NO: 397285 - DNA, 231 bp, Homo sapiens; identical to SEQ ID NO: 231869
  chr6:26056526-26056757
  hyper

SEQ ID NO: 397286 - DNA, 328 bp, Homo sapiens; identical to SEQ ID NO: 200323
  chr6:26126237-26126565
  hyper

SEQ ID NO: 397287 - DNA, 506 bp, Homo sapiens; identical to SEQ ID NO: 231889
  chr6:26223780-26224286
  hyper

SEQ ID NO: 397288 - DNA, 163 bp, Homo sapiens; identical to SEQ ID NO: 231890
  chr6:26224588-26224751
  hyper

SEQ ID NO: 397289 - DNA, 118 bp, Homo sapiens; identical to SEQ ID NO: 200351
  chr6:26383468-26383586
  hyper

SEQ ID NO: 397290 - DNA, 80 bp, Homo sapiens; identical to SEQ ID NO: 200354
  chr6:26521682-26521762
  hyper

SEQ ID NO: 397291 - DNA, 60 bp, Homo sapiens
  chr6:27099525-27099585
  hyper
ccttctcaaaaaaaaaaaaactgattatgttgccataaagggtccctttaaaaaaaaaaa

SEQ ID NO: 397292 - DNA, 43 bp, Homo sapiens; identical to SEQ ID NO: 200362
  chr6:27100142-27100185
  hyper

SEQ ID NO: 397293 - DNA, 118 bp, Homo sapiens; identical to SEQ ID NO: 231927
  chr6:27101539-27101657
  hyper

SEQ ID NO: 397294 - DNA, 38 bp, Homo sapiens; identical to SEQ ID NO: 283909
  chr6:27248068-27248106
  hyper

SEQ ID NO: 397295 - DNA, 120 bp, Homo sapiens; identical to SEQ ID NO: 222837
  chr6:27440466-27440586
  hyper

SEQ ID NO: 397296 - DNA, 59 bp, Homo sapiens; identical to SEQ ID NO: 231948
  chr6:27447357-27447416
  hyper

SEQ ID NO: 397297 - DNA, 31 bp, Homo sapiens; identical to SEQ ID NO: 231958
  chr6:27561177-27561208
  hyper

SEQ ID NO: 397298 - DNA, 79 bp, Homo sapiens; identical to SEQ ID NO: 231967
  chr6:27648346-27648425
  hyper

SEQ ID NO: 397299 - DNA, 103 bp, Homo sapiens; identical to SEQ ID NO: 200381
  chr6:27661581-27661684
  hyper

SEQ ID NO: 397300 - DNA, 124 bp, Homo sapiens; identical to SEQ ID NO: 200387
  chr6:27782099-27782223
  hyper

SEQ ID NO: 397301 - DNA, 438 bp, Homo sapiens; identical to SEQ ID NO: 231976
  chr6:27792190-27792628
  hyper

SEQ ID NO: 397302 - DNA, 271 bp, Homo sapiens; identical to SEQ ID NO: 231980
  chr6:27805258-27805529
  hyper

SEQ ID NO: 397303 - DNA, 40 bp, Homo sapiens
  chr6:27806471-27806511
  hyper
gaagaaaggctccaagaaggcagtgacaaaggcccagaag

SEQ ID NO: 397304 - DNA, 79 bp, Homo sapiens; identical to SEQ ID NO: 231984
  chr6:27833430-27833509
  hyper

SEQ ID NO: 397305 - DNA, 65 bp, Homo sapiens; identical to SEQ ID NO: 200398
  chr6:28109924-28109989
  hyper

SEQ ID NO: 397306 - DNA, 191 bp, Homo sapiens; identical to SEQ ID NO: 200400
  chr6:28220077-28220268
  hyper

SEQ ID NO: 397307 - DNA, 43 bp, Homo sapiens; identical to SEQ ID NO: 200410
  chr6:34113557-34113600
  hyper

SEQ ID NO: 397308 - DNA, 215 bp, Homo sapiens; identical to SEQ ID NO: 222843
  chr6:34359521-34359736
  hyper

SEQ ID NO: 397309 - DNA, 39 bp, Homo sapiens; identical to SEQ ID NO: 200414
  chr6:34405256-34405295
  hyper

SEQ ID NO: 397310 - DNA, 1084 bp, Homo sapiens; identical to SEQ ID NO: 232013
  chr6:35435672-35436756
  hyper

SEQ ID NO: 397311 - DNA, 313 bp, Homo sapiens; identical to SEQ ID NO: 232014
  chr6:35464273-35464586
  hyper

SEQ ID NO: 397312 - DNA, 67 bp, Homo sapiens; identical to SEQ ID NO: 283981
  chr6:35744105-35744172
  hyper

SEQ ID NO: 397313 - DNA, 90 bp, Homo sapiens; identical to SEQ ID NO: 200417
  chr6:35995284-35995374
  hyper

SEQ ID NO: 397314 - DNA, 113 bp, Homo sapiens; identical to SEQ ID NO: 232022
  chr6:36354418-36354531
  hyper

SEQ ID NO: 397315 - DNA, 343 bp, Homo sapiens; identical to SEQ ID NO: 232028
  chr6:36646212-36646555
  hyper

SEQ ID NO: 397316 - DNA, 129 bp, Homo sapiens; identical to SEQ ID NO: 232029
  chr6:36703003-36703132
  hyper

SEQ ID NO: 397317 - DNA, 126 bp, Homo sapiens; identical to SEQ ID NO: 283994
  chr6:36954119-36954245
  hyper

SEQ ID NO: 397318 - DNA, 45 bp, Homo sapiens; identical to SEQ ID NO: 232036
  chr6:37226110-37226155
  hyper

SEQ ID NO: 397319 - DNA, 76 bp, Homo sapiens; identical to SEQ ID NO: 232043
  chr6:38670958-38671034
  hyper

SEQ ID NO: 397320 - DNA, 224 bp, Homo sapiens; identical to SEQ ID NO: 232045
  chr6:39082798-39083022
  hyper

SEQ ID NO: 397321 - DNA, 232 bp, Homo sapiens; identical to SEQ ID NO: 284015
  chr6:41039968-41040200
  hyper

SEQ ID NO: 397322 - DNA, 232 bp, Homo sapiens; identical to SEQ ID NO: 388332
  chr6:41340475-41340707
  hyper

SEQ ID NO: 397323 - DNA, 68 bp, Homo sapiens; identical to SEQ ID NO: 232062
  chr6:41513949-41514017
  hyper

SEQ ID NO: 397324 - DNA, 112 bp, Homo sapiens; identical to SEQ ID NO: 232064
  chr6:41651428-41651540
  hyper

SEQ ID NO: 397325 - DNA, 123 bp, Homo sapiens; identical to SEQ ID NO: 232066
  chr6:41754978-41755101
  hyper

SEQ ID NO: 397326 - DNA, 156 bp, Homo sapiens; identical to SEQ ID NO: 200437
  chr6:41888908-41889064
  hyper

SEQ ID NO: 397327 - DNA, 50 bp, Homo sapiens; identical to SEQ ID NO: 113330
  chr6:42072647-42072697
  hyper

SEQ ID NO: 397328 - DNA, 176 bp, Homo sapiens; identical to SEQ ID NO: 200438
  chr6:42418934-42419110
  hyper

SEQ ID NO: 397329 - DNA, 105 bp, Homo sapiens; identical to SEQ ID NO: 42964
  chr6:42531901-42532006
  hyper

SEQ ID NO: 397330 - DNA, 49 bp, Homo sapiens; identical to SEQ ID NO: 232077
  chr6:42896709-42896758
  hyper

SEQ ID NO: 397331 - DNA, 273 bp, Homo sapiens; identical to SEQ ID NO: 232081
  chr6:42981636-42981909
  hyper

SEQ ID NO: 397332 - DNA, 125 bp, Homo sapiens; identical to SEQ ID NO: 222857
  chr6:43081636-43081761
  hyper

SEQ ID NO: 397333 - DNA, 168 bp, Homo sapiens; identical to SEQ ID NO: 200442
  chr6:43138368-43138536
  hyper

SEQ ID NO: 397334 - DNA, 572 bp, Homo sapiens; identical to SEQ ID NO: 232085
  chr6:43138813-43139385
  hyper

SEQ ID NO: 397335 - DNA, 35 bp, Homo sapiens; identical to SEQ ID NO: 200443
  chr6:43237210-43237245
  hyper

SEQ ID NO: 397336 - DNA, 75 bp, Homo sapiens; identical to SEQ ID NO: 232092
  chr6:43337694-43337769
  hyper

SEQ ID NO: 397337 - DNA, 92 bp, Homo sapiens; identical to SEQ ID NO: 222858
  chr6:43477369-43477461
  hyper

SEQ ID NO: 397338 - DNA, 252 bp, Homo sapiens; identical to SEQ ID NO: 232095
  chr6:43543534-43543786
  hyper

SEQ ID NO: 397339 - DNA, 126 bp, Homo sapiens; identical to SEQ ID NO: 232096
  chr6:43597011-43597137
  hyper

SEQ ID NO: 397340 - DNA, 141 bp, Homo sapiens; identical to SEQ ID NO: 232097
  chr6:43597646-43597787
  hyper

SEQ ID NO: 397341 - DNA, 133 bp, Homo sapiens; identical to SEQ ID NO: 232098
  chr6:43598079-43598212
  hyper

SEQ ID NO: 397342 - DNA, 42 bp, Homo sapiens; identical to SEQ ID NO: 232105
  chr6:44225458-44225500
  hyper

SEQ ID NO: 397343 - DNA, 261 bp, Homo sapiens; identical to SEQ ID NO: 200454
  chr6:44265267-44265528
  hyper

SEQ ID NO: 397344 - DNA, 34 bp, Homo sapiens; identical to SEQ ID NO: 232107
  chr6:44355180-44355214
  hyper

SEQ ID NO: 397345 - DNA, 43 bp, Homo sapiens; identical to SEQ ID NO: 232110
  chr6:45390376-45390419
  hyper

SEQ ID NO: 397346 - DNA, 538 bp, Homo sapiens; identical to SEQ ID NO: 232115
  chr6:46459377-46459915
  hyper

SEQ ID NO: 397347 - DNA, 996 bp, Homo sapiens; identical to SEQ ID NO: 232117
  chr6:47276365-47277361
  hyper

SEQ ID NO: 397348 - DNA, 85 bp, Homo sapiens; identical to SEQ ID NO: 284095
  chr6:50684820-50684905
  hyper

SEQ ID NO: 397349 - DNA, 88 bp, Homo sapiens; identical to SEQ ID NO: 284096
  chr6:50684969-50685057
  hyper

SEQ ID NO: 397350 - DNA, 195 bp, Homo sapiens; identical to SEQ ID NO: 232129
  chr6:50785153-50785348
  hyper

SEQ ID NO: 397351 - DNA, 124 bp, Homo sapiens; identical to SEQ ID NO: 284111
  chr6:50814599-50814723
  hyper

SEQ ID NO: 397352 - DNA, 61 bp, Homo sapiens; identical to SEQ ID NO: 284113
  chr6:50817757-50817818
  hyper

SEQ ID NO: 397353 - DNA, 405 bp, Homo sapiens; identical to SEQ ID NO: 232149
  chr6:52284759-52285164
  hyper

SEQ ID NO: 397354 - DNA, 199 bp, Homo sapiens; identical to SEQ ID NO: 284118
  chr6:52441278-52441477
  hyper

SEQ ID NO: 397355 - DNA, 34 bp, Homo sapiens; identical to SEQ ID NO: 232152
  chr6:52926828-52926862
  hyper

SEQ ID NO: 397356 - DNA, 186 bp, Homo sapiens; identical to SEQ ID NO: 232156
  chr6:53224377-53224563
  hyper

SEQ ID NO: 397357 - DNA, 282 bp, Homo sapiens; identical to SEQ ID NO: 222871
  chr6:53409809-53410091
  hyper

SEQ ID NO: 397358 - DNA, 422 bp, Homo sapiens
  chr6:53660452-53660874
  hyper
attggagaagcgttctggactgttaagtaacttagatccatgctaggtactgacacctggcacttgtgcccggtcaggtgagaagccgggtgattcgggctgtttccatctggaagctacagagcactgcatcctccccccctccactccccggggtcgttcccccaccaagggccgggcgcgcctctcctttagtcaaggcatgtcccggaggaccttgtgacctgggcagcgctcaagcgggccgcactatctcggcatcttgggaggaatgaggaatgtgctccgtgctttatcgcgggtgggcttggccggctggcctgcggtggctgcgggggtggacgcgagatgggcgcaggggagagctgggcctggagcgctaggggcaggtgcccagatgccggccgcccgggccttgccta

SEQ ID NO: 397359 - DNA, 62 bp, Homo sapiens; identical to SEQ ID NO: 113504
  chr6:53660908-53660970
  hyper

SEQ ID NO: 397360 - DNA, 336 bp, Homo sapiens; identical to SEQ ID NO: 113506
  chr6:54711661-54711997
  hyper

SEQ ID NO: 397361 - DNA, 233 bp, Homo sapiens; identical to SEQ ID NO: 232168
  chr6:57087024-57087257
  hyper

SEQ ID NO: 397362 - DNA, 197 bp, Homo sapiens; identical to SEQ ID NO: 284139
  chr6:58149331-58149528
  hyper

SEQ ID NO: 397363 - DNA, 71 bp, Homo sapiens; identical to SEQ ID NO: 232174
  chr6:64345435-64345506
  hyper

SEQ ID NO: 397364 - DNA, 78 bp, Homo sapiens; identical to SEQ ID NO: 232183
  chr6:71377331-71377409
  hyper

SEQ ID NO: 397365 - DNA, 285 bp, Homo sapiens; identical to SEQ ID NO: 232195
  chr6:75911844-75912129
  hyper

SEQ ID NO: 397366 - DNA, 91 bp, Homo sapiens; identical to SEQ ID NO: 284168
  chr6:75914015-75914106
  hyper

SEQ ID NO: 397367 - DNA, 303 bp, Homo sapiens; identical to SEQ ID NO: 284169
  chr6:75914158-75914461
  hyper

SEQ ID NO: 397368 - DNA, 106 bp, Homo sapiens; identical to SEQ ID NO: 200508
  chr6:75914599-75914705
  hyper

SEQ ID NO: 397369 - DNA, 143 bp, Homo sapiens; identical to SEQ ID NO: 200509
  chr6:75914738-75914881
  hyper

SEQ ID NO: 397370 - DNA, 206 bp, Homo sapiens; identical to SEQ ID NO: 200511
  chr6:75916810-75917016
  hyper

SEQ ID NO: 397371 - DNA, 299 bp, Homo sapiens; identical to SEQ ID NO: 232199
  chr6:75994549-75994848
  hyper

SEQ ID NO: 397372 - DNA, 124 bp, Homo sapiens; identical to SEQ ID NO: 200516
  chr6:78175791-78175915
  hyper

SEQ ID NO: 397373 - DNA, 296 bp, Homo sapiens; identical to SEQ ID NO: 200517
  chr6:78176149-78176445
  hyper

SEQ ID NO: 397374 - DNA, 526 bp, Homo sapiens; identical to SEQ ID NO: 232205
  chr6:79788062-79788588
  hyper

SEQ ID NO: 397375 - DNA, 155 bp, Homo sapiens; identical to SEQ ID NO: 284184
  chr6:80246696-80246851
  hyper

SEQ ID NO: 397376 - DNA, 517 bp, Homo sapiens; identical to SEQ ID NO: 113601
  chr6:80246889-80247406
  hyper

SEQ ID NO: 397377 - DNA, 389 bp, Homo sapiens; identical to SEQ ID NO: 200520
  chr6:80340635-80341024
  hyper

SEQ ID NO: 397378 - DNA, 220 bp, Homo sapiens; identical to SEQ ID NO: 200521
  chr6:80341054-80341274
  hyper

SEQ ID NO: 397379 - DNA, 231 bp, Homo sapiens; identical to SEQ ID NO: 200522
  chr6:80341326-80341557
  hyper

SEQ ID NO: 397380 - DNA, 165 bp, Homo sapiens; identical to SEQ ID NO: 232212
  chr6:80816657-80816822
  hyper

SEQ ID NO: 397381 - DNA, 92 bp, Homo sapiens; identical to SEQ ID NO: 284194
  chr6:82461597-82461689
  hyper

SEQ ID NO: 397382 - DNA, 1071 bp, Homo sapiens; identical to SEQ ID NO: 284195
  chr6:82461728-82462799
  hyper

SEQ ID NO: 397383 - DNA, 441 bp, Homo sapiens; identical to SEQ ID NO: 200525
  chr6:82462829-82463270
  hyper

SEQ ID NO: 397384 - DNA, 501 bp, Homo sapiens; identical to SEQ ID NO: 200526
  chr6:82463310-82463811
  hyper

SEQ ID NO: 397385 - DNA, 215 bp, Homo sapiens; identical to SEQ ID NO: 200532
  chr6:83775565-83775780
  hyper

SEQ ID NO: 397386 - DNA, 91 bp, Homo sapiens; identical to SEQ ID NO: 232216
  chr6:83902912-83903003
  hyper

SEQ ID NO: 397387 - DNA, 196 bp, Homo sapiens; identical to SEQ ID NO: 232217
  chr6:83903545-83903741
  hyper

SEQ ID NO: 397388 - DNA, 138 bp, Homo sapiens; identical to SEQ ID NO: 232218
  chr6:84221725-84221863
  hyper

SEQ ID NO: 397389 - DNA, 71 bp, Homo sapiens; identical to SEQ ID NO: 200533
  chr6:84419415-84419486
  hyper

SEQ ID NO: 397390 - DNA, 651 bp, Homo sapiens; identical to SEQ ID NO: 232225
  chr6:84743595-84744246
  hyper

SEQ ID NO: 397391 - DNA, 102 bp, Homo sapiens; identical to SEQ ID NO: 232226
  chr6:84937361-84937463
  hyper

SEQ ID NO: 397392 - DNA, 164 bp, Homo sapiens; identical to SEQ ID NO: 200537
  chr6:85475698-85475862
  hyper

SEQ ID NO: 397393 - DNA, 39 bp, Homo sapiens; identical to SEQ ID NO: 200538
  chr6:85476132-85476171
  hyper

SEQ ID NO: 397394 - DNA, 191 bp, Homo sapiens; identical to SEQ ID NO: 200539
  chr6:85476714-85476905
  hyper

SEQ ID NO: 397395 - DNA, 76 bp, Homo sapiens; identical to SEQ ID NO: 200540
  chr6:85476922-85476998
  hyper

SEQ ID NO: 397396 - DNA, 243 bp, Homo sapiens; identical to SEQ ID NO: 284220
  chr6:85482158-85482401
  hyper

SEQ ID NO: 397397 - DNA, 103 bp, Homo sapiens; identical to SEQ ID NO: 232237
  chr6:86388826-86388929
  hyper

SEQ ID NO: 397398 - DNA, 145 bp, Homo sapiens; identical to SEQ ID NO: 222892
  chr6:87832386-87832531
  hyper

SEQ ID NO: 397399 - DNA, 251 bp, Homo sapiens; identical to SEQ ID NO: 232241
  chr6:88117490-88117741
  hyper

SEQ ID NO: 397400 - DNA, 168 bp, Homo sapiens; identical to SEQ ID NO: 113664
  chr6:88182441-88182609
  hyper

SEQ ID NO: 397401 - DNA, 36 bp, Homo sapiens; identical to SEQ ID NO: 232244
  chr6:88410992-88411028
  hyper

SEQ ID NO: 397402 - DNA, 332 bp, Homo sapiens; identical to SEQ ID NO: 284237
  chr6:89827121-89827453
  hyper

SEQ ID NO: 397403 - DNA, 337 bp, Homo sapiens; identical to SEQ ID NO: 284241
  chr6:90062614-90062951
  hyper

SEQ ID NO: 397404 - DNA, 97 bp, Homo sapiens; identical to SEQ ID NO: 232255
  chr6:90348368-90348465
  hyper

SEQ ID NO: 397405 - DNA, 149 bp, Homo sapiens; identical to SEQ ID NO: 232256
  chr6:90529581-90529730
  hyper

SEQ ID NO: 397406 - DNA, 245 bp, Homo sapiens; identical to SEQ ID NO: 232257
  chr6:90539225-90539470
  hyper

SEQ ID NO: 397407 - DNA, 191 bp, Homo sapiens; identical to SEQ ID NO: 232259
  chr6:91297176-91297367
  hyper

SEQ ID NO: 397408 - DNA, 79 bp, Homo sapiens; identical to SEQ ID NO: 200563
  chr6:96463090-96463169
  hyper

SEQ ID NO: 397409 - DNA, 222 bp, Homo sapiens; identical to SEQ ID NO: 200564
  chr6:96463860-96464082
  hyper

SEQ ID NO: 397410 - DNA, 253 bp, Homo sapiens; identical to SEQ ID NO: 284260
  chr6:96464204-96464457
  hyper

SEQ ID NO: 397411 - DNA, 126 bp, Homo sapiens; identical to SEQ ID NO: 232268
  chr6:97345804-97345930
  hyper

SEQ ID NO: 397412 - DNA, 241 bp, Homo sapiens; identical to SEQ ID NO: 384148
  chr6:99273607-99273848
  hyper

SEQ ID NO: 397413 - DNA, 126 bp, Homo sapiens; identical to SEQ ID NO: 200572
  chr6:99273901-99274027
  hyper

SEQ ID NO: 397414 - DNA, 161 bp, Homo sapiens; identical to SEQ ID NO: 200581
  chr6:99283178-99283339
  hyper

SEQ ID NO: 397415 - DNA, 569 bp, Homo sapiens; identical to SEQ ID NO: 200585
  chr6:99292688-99293257
  hyper

SEQ ID NO: 397416 - DNA, 345 bp, Homo sapiens; identical to SEQ ID NO: 200586
  chr6:99293287-99293632
  hyper

SEQ ID NO: 397417 - DNA, 183 bp, Homo sapiens; identical to SEQ ID NO: 200587
  chr6:99872772-99872955
  hyper

SEQ ID NO: 397418 - DNA, 66 bp, Homo sapiens; identical to SEQ ID NO: 200588
  chr6:99962859-99962925
  hyper

SEQ ID NO: 397419 - DNA, 219 bp, Homo sapiens; identical to SEQ ID NO: 232287
  chr6:99963448-99963667
  hyper

SEQ ID NO: 397420 - DNA, 400 bp, Homo sapiens; identical to SEQ ID NO: 232299
  chr6:100676760-100677160
  hyper

SEQ ID NO: 397421 - DNA, 157 bp, Homo sapiens; identical to SEQ ID NO: 284302
  chr6:100902484-100902641
  hyper

SEQ ID NO: 397422 - DNA, 268 bp, Homo sapiens; identical to SEQ ID NO: 284304
  chr6:100911729-100911997
  hyper

SEQ ID NO: 397423 - DNA, 90 bp, Homo sapiens; identical to SEQ ID NO: 284309
  chr6:101846692-101846782
  hyper

SEQ ID NO: 397424 - DNA, 273 bp, Homo sapiens; identical to SEQ ID NO: 284310
  chr6:101846865-101847138
  hyper

SEQ ID NO: 397425 - DNA, 239 bp, Homo sapiens; identical to SEQ ID NO: 113793
  chr6:101847638-101847877
  hyper

SEQ ID NO: 397426 - DNA, 203 bp, Homo sapiens; identical to SEQ ID NO: 284319
  chr6:105404674-105404877
  hyper

SEQ ID NO: 397427 - DNA, 66 bp, Homo sapiens; identical to SEQ ID NO: 232332
  chr6:107077423-107077489
  hyper

SEQ ID NO: 397428 - DNA, 74 bp, Homo sapiens; identical to SEQ ID NO: 200608
  chr6:107780253-107780327
  hyper

SEQ ID NO: 397429 - DNA, 112 bp, Homo sapiens; identical to SEQ ID NO: 232336
  chr6:108169775-108169887
  hyper

SEQ ID NO: 397430 - DNA, 58 bp, Homo sapiens; identical to SEQ ID NO: 232337
  chr6:108396125-108396183
  hyper

SEQ ID NO: 397431 - DNA, 349 bp, Homo sapiens; identical to SEQ ID NO: 284341
  chr6:108436829-108437178
  hyper

SEQ ID NO: 397432 - DNA, 179 bp, Homo sapiens; identical to SEQ ID NO: 284342
  chr6:108438577-108438756
  hyper

SEQ ID NO: 397433 - DNA, 216 bp, Homo sapiens; identical to SEQ ID NO: 284348
  chr6:108491987-108492203
  hyper

SEQ ID NO: 397434 - DNA, 83 bp, Homo sapiens; identical to SEQ ID NO: 232350
  chr6:108492638-108492721
  hyper

SEQ ID NO: 397435 - DNA, 106 bp, Homo sapiens; identical to SEQ ID NO: 200615
  chr6:108582547-108582653
  hyper

SEQ ID NO: 397436 - DNA, 35 bp, Homo sapiens; identical to SEQ ID NO: 232354
  chr6:108881856-108881891
  hyper

SEQ ID NO: 397437 - DNA, 59 bp, Homo sapiens; identical to SEQ ID NO: 232356
  chr6:109169455-109169514
  hyper

SEQ ID NO: 397438 - DNA, 34 bp, Homo sapiens; identical to SEQ ID NO: 232358
  chr6:109416223-109416257
  hyper

SEQ ID NO: 397439 - DNA, 429 bp, Homo sapiens; identical to SEQ ID NO: 200619
  chr6:109777177-109777606
  hyper

SEQ ID NO: 397440 - DNA, 320 bp, Homo sapiens; identical to SEQ ID NO: 232362
  chr6:110012081-110012401
  hyper

SEQ ID NO: 397441 - DNA, 60 bp, Homo sapiens; identical to SEQ ID NO: 200621
  chr6:110500677-110500737
  hyper

SEQ ID NO: 397442 - DNA, 125 bp, Homo sapiens; identical to SEQ ID NO: 232365
  chr6:110501596-110501721
  hyper

SEQ ID NO: 397443 - DNA, 126 bp, Homo sapiens; identical to SEQ ID NO: 284366
  chr6:111136354-111136480
  hyper

SEQ ID NO: 397444 - DNA, 40 bp, Homo sapiens; identical to SEQ ID NO: 232368
  chr6:111195962-111196002
  hyper

SEQ ID NO: 397445 - DNA, 48 bp, Homo sapiens; identical to SEQ ID NO: 232370
  chr6:111580350-111580398
  hyper

SEQ ID NO: 397446 - DNA, 211 bp, Homo sapiens; identical to SEQ ID NO: 232371
  chr6:111580690-111580901
  hyper

SEQ ID NO: 397447 - DNA, 89 bp, Homo sapiens; identical to SEQ ID NO: 200624
  chr6:111804030-111804119
  hyper

SEQ ID NO: 397448 - DNA, 40 bp, Homo sapiens; identical to SEQ ID NO: 232373
  chr6:111927298-111927338
  hyper

SEQ ID NO: 397449 - DNA, 31 bp, Homo sapiens; identical to SEQ ID NO: 232377
  chr6:114178491-114178522
  hyper

SEQ ID NO: 397450 - DNA, 199 bp, Homo sapiens; identical to SEQ ID NO: 200627
  chr6:114662113-114662312
  hyper

SEQ ID NO: 397451 - DNA, 404 bp, Homo sapiens; identical to SEQ ID NO: 284382
  chr6:114662599-114663003
  hyper

SEQ ID NO: 397452 - DNA, 121 bp, Homo sapiens; identical to SEQ ID NO: 232383
  chr6:116421722-116421843
  hyper

SEQ ID NO: 397453 - DNA, 57 bp, Homo sapiens; identical to SEQ ID NO: 232384
  chr6:116575297-116575354
  hyper

SEQ ID NO: 397454 - DNA, 351 bp, Homo sapiens; identical to SEQ ID NO: 284391
  chr6:117197786-117198137
  hyper

SEQ ID NO: 397455 - DNA, 205 bp, Homo sapiens; identical to SEQ ID NO: 284392
  chr6:117198339-117198544
  hyper

SEQ ID NO: 397456 - DNA, 184 bp, Homo sapiens; identical to SEQ ID NO: 200630
  chr6:117198574-117198758
  hyper

SEQ ID NO: 397457 - DNA, 703 bp, Homo sapiens; identical to SEQ ID NO: 222918
  chr6:117803613-117804316
  hyper

SEQ ID NO: 397458 - DNA, 85 bp, Homo sapiens; identical to SEQ ID NO: 232397
  chr6:118973007-118973092
  hyper

SEQ ID NO: 397459 - DNA, 575 bp, Homo sapiens; identical to SEQ ID NO: 232401
  chr6:119671587-119672162
  hyper

SEQ ID NO: 397460 - DNA, 40 bp, Homo sapiens; identical to SEQ ID NO: 222921
  chr6:119762016-119762056
  hyper

SEQ ID NO: 397461 - DNA, 155 bp, Homo sapiens; identical to SEQ ID NO: 232405
  chr6:122720534-122720689
  hyper

SEQ ID NO: 397462 - DNA, 105 bp, Homo sapiens; identical to SEQ ID NO: 222922
  chr6:123110275-123110380
  hyper

SEQ ID NO: 397463 - DNA, 420 bp, Homo sapiens; identical to SEQ ID NO: 222923
  chr6:123110438-123110858
  hyper

SEQ ID NO: 397464 - DNA, 240 bp, Homo sapiens; identical to SEQ ID NO: 232411
  chr6:124123917-124124157
  hyper

SEQ ID NO: 397465 - DNA, 180 bp, Homo sapiens; identical to SEQ ID NO: 232413
  chr6:125282855-125283035
  hyper

SEQ ID NO: 397466 - DNA, 78 bp, Homo sapiens; identical to SEQ ID NO: 284420
  chr6:125420731-125420809
  hyper

SEQ ID NO: 397467 - DNA, 53 bp, Homo sapiens; identical to SEQ ID NO: 232427
  chr6:127468330-127468383
  hyper

SEQ ID NO: 397468 - DNA, 209 bp, Homo sapiens; identical to SEQ ID NO: 232428
  chr6:127587640-127587849
  hyper

SEQ ID NO: 397469 - DNA, 217 bp, Homo sapiens; identical to SEQ ID NO: 200649
  chr6:128840108-128840325
  hyper

SEQ ID NO: 397470 - DNA, 148 bp, Homo sapiens
  chr6:128840373-128840521
  hyper
acttcagagcccccagaggagagaacgaaagaagcaaccaacctacacgaaggataacaaaactggaggggaacagagggcgggaccgggagagccagggttcacggacttctctgagcggcttgaccgagaacccccagggctacag

SEQ ID NO: 397471 - DNA, 56 bp, Homo sapiens; identical to SEQ ID NO: 284449
  chr6:130339514-130339570
  hyper

SEQ ID NO: 397472 - DNA, 390 bp, Homo sapiens; identical to SEQ ID NO: 284450
  chr6:130339684-130340074
  hyper

SEQ ID NO: 397473 - DNA, 389 bp, Homo sapiens; identical to SEQ ID NO: 284454
  chr6:132128670-132129059
  hyper

SEQ ID NO: 397474 - DNA, 196 bp, Homo sapiens; identical to SEQ ID NO: 232440
  chr6:132129409-132129605
  hyper

SEQ ID NO: 397475 - DNA, 209 bp, Homo sapiens; identical to SEQ ID NO: 200655
  chr6:132271777-132271986
  hyper

SEQ ID NO: 397476 - DNA, 194 bp, Homo sapiens; identical to SEQ ID NO: 284458
  chr6:132721835-132722029
  hyper

SEQ ID NO: 397477 - DNA, 193 bp, Homo sapiens; identical to SEQ ID NO: 222933
  chr6:133146628-133146821
  hyper

SEQ ID NO: 397478 - DNA, 58 bp, Homo sapiens; identical to SEQ ID NO: 232447
  chr6:133890489-133890547
  hyper

SEQ ID NO: 397479 - DNA, 159 bp, Homo sapiens; identical to SEQ ID NO: 232448
  chr6:134175362-134175521
  hyper

SEQ ID NO: 397480 - DNA, 536 bp, Homo sapiens; identical to SEQ ID NO: 232451
  chr6:134212582-134213118
  hyper

SEQ ID NO: 397481 - DNA, 142 bp, Homo sapiens; identical to SEQ ID NO: 200657
  chr6:134216762-134216904
  hyper

SEQ ID NO: 397482 - DNA, 369 bp, Homo sapiens; identical to SEQ ID NO: 200658
  chr6:134217001-134217370
  hyper

SEQ ID NO: 397483 - DNA, 77 bp, Homo sapiens; identical to SEQ ID NO: 200659
  chr6:134217461-134217538
  hyper

SEQ ID NO: 397484 - DNA, 445 bp, Homo sapiens; identical to SEQ ID NO: 232458
  chr6:135502364-135502809
  hyper

SEQ ID NO: 397485 - DNA, 44 bp, Homo sapiens; identical to SEQ ID NO: 200662
  chr6:135503608-135503652
  hyper

SEQ ID NO: 397486 - DNA, 210 bp, Homo sapiens; identical to SEQ ID NO: 232463
  chr6:136610843-136611053
  hyper

SEQ ID NO: 397487 - DNA, 112 bp, Homo sapiens; identical to SEQ ID NO: 232464
  chr6:136611539-136611651
  hyper

SEQ ID NO: 397488 - DNA, 535 bp, Homo sapiens; identical to SEQ ID NO: 222937
  chr6:136870742-136871277
  hyper

SEQ ID NO: 397489 - DNA, 551 bp, Homo sapiens; identical to SEQ ID NO: 200665
  chr6:136871695-136872246
  hyper

SEQ ID NO: 397490 - DNA, 44 bp, Homo sapiens; identical to SEQ ID NO: 232471
  chr6:137365286-137365330
  hyper

SEQ ID NO: 397491 - DNA, 227 bp, Homo sapiens; identical to SEQ ID NO: 284494
  chr6:138428363-138428590
  hyper

SEQ ID NO: 397492 - DNA, 324 bp, Homo sapiens; identical to SEQ ID NO: 232486
  chr6:138914348-138914672
  hyper

SEQ ID NO: 397493 - DNA, 402 bp, Homo sapiens
  chr6:139013361-139013763
  hyper
caattcccaccctccgcgcccactctctcgaggtagccaagaccctccaggagtccgaaagtcacagagcgctctgcgcccctgccacctgcccagcctcccgctggggtccggcagtccccactggagaccccgacatcgcggggctccgcggcccccgcgccgacccagggccgccagggggcgggcgggagcagctctccgggtgcctcccccgccggttcccctcccccggcccgccggccactcacggattttcactcggcggtggtccaggcgcgcagcggcggcttgcagggcgtcgaggcggcggtgcagcgcggcggtgcggtggcccagcgcggccgcctggccctcgagctcgccgaagatgtccccggcgcagcgcgacaggtcggccag

SEQ ID NO: 397494 - DNA, 236 bp, Homo sapiens; identical to SEQ ID NO: 232491
  chr6:139349617-139349853
  hyper

SEQ ID NO: 397495 - DNA, 294 bp, Homo sapiens; identical to SEQ ID NO: 232492
  chr6:139350905-139351199
  hyper

SEQ ID NO: 397496 - DNA, 303 bp, Homo sapiens
  chr6:139695068-139695371
  hyper
tatggtctgccatttccagtcctggaagtgaaaagggcagataatgagacccgcgccacacgtgtcgcccaccacagcgcaccccacttttgctcgcctctgccccccaggattcccgggcgcacgtcggctgcgaaccaccacccccaagatcccactaacagcctgtgcacccgggctagccaccacggaagagctaccactcataacacagccggacgctgcacaaacagccccttcccctgcgatcgggcggggggacccgagcccacaccccctttgctccccgaagtggcctaataa

SEQ ID NO: 397497 - DNA, 447 bp, Homo sapiens; identical to SEQ ID NO: 232496
  chr6:139695584-139696031
  hyper

SEQ ID NO: 397498 - DNA, 264 bp, Homo sapiens; identical to SEQ ID NO: 232498
  chr6:142468183-142468447
  hyper

SEQ ID NO: 397499 - DNA, 54 bp, Homo sapiens
  chr6:142622529-142622583
  hyper
agacagaaaagttaagtaaagaaagtggcagaaaagtgaagcaaagcaacagcc

SEQ ID NO: 397500 - DNA, 93 bp, Homo sapiens; identical to SEQ ID NO: 232502
  chr6:143266222-143266315
  hyper

SEQ ID NO: 397501 - DNA, 458 bp, Homo sapiens; identical to SEQ ID NO: 232506
  chr6:143771538-143771996
  hyper

SEQ ID NO: 397502 - DNA, 713 bp, Homo sapiens; identical to SEQ ID NO: 222946
  chr6:143998943-143999656
  hyper

SEQ ID NO: 397503 - DNA, 314 bp, Homo sapiens; identical to SEQ ID NO: 232507
  chr6:144164206-144164520
  hyper

SEQ ID NO: 397504 - DNA, 358 bp, Homo sapiens; identical to SEQ ID NO: 200685
  chr6:144384552-144384910
  hyper

SEQ ID NO: 397505 - DNA, 46 bp, Homo sapiens; identical to SEQ ID NO: 200686
  chr6:144537939-144537985
  hyper

SEQ ID NO: 397506 - DNA, 262 bp, Homo sapiens; identical to SEQ ID NO: 232511
  chr6:144607118-144607380
  hyper

SEQ ID NO: 397507 - DNA, 304 bp, Homo sapiens; identical to SEQ ID NO: 232513
  chr6:146285325-146285629
  hyper

SEQ ID NO: 397508 - DNA, 471 bp, Homo sapiens; identical to SEQ ID NO: 284529
  chr6:146348676-146349147
  hyper

SEQ ID NO: 397509 - DNA, 63 bp, Homo sapiens; identical to SEQ ID NO: 284530
  chr6:146349296-146349359
  hyper

SEQ ID NO: 397510 - DNA, 570 bp, Homo sapiens; identical to SEQ ID NO: 284534
  chr6:147828685-147829255
  hyper

SEQ ID NO: 397511 - DNA, 258 bp, Homo sapiens; identical to SEQ ID NO: 284535
  chr6:147829501-147829759
  hyper

SEQ ID NO: 397512 - DNA, 241 bp, Homo sapiens; identical to SEQ ID NO: 284536
  chr6:147829798-147830039
  hyper

SEQ ID NO: 397513 - DNA, 349 bp, Homo sapiens; identical to SEQ ID NO: 284537
  chr6:147830113-147830462
  hyper

SEQ ID NO: 397514 - DNA, 189 bp, Homo sapiens; identical to SEQ ID NO: 232522
  chr6:149637867-149638056
  hyper

SEQ ID NO: 397515 - DNA, 48 bp, Homo sapiens; identical to SEQ ID NO: 232523
  chr6:149867345-149867393
  hyper

SEQ ID NO: 397516 - DNA, 135 bp, Homo sapiens; identical to SEQ ID NO: 200701
  chr6:150072001-150072136
  hyper

SEQ ID NO: 397517 - DNA, 195 bp, Homo sapiens; identical to SEQ ID NO: 222953
  chr6:150185446-150185641
  hyper

SEQ ID NO: 397518 - DNA, 648 bp, Homo sapiens; identical to SEQ ID NO: 232532
  chr6:150259501-150260149
  hyper

SEQ ID NO: 397519 - DNA, 659 bp, Homo sapiens; identical to SEQ ID NO: 284557
  chr6:150262844-150263503
  hyper

SEQ ID NO: 397520 - DNA, 70 bp, Homo sapiens; identical to SEQ ID NO: 232539
  chr6:150336633-150336703
  hyper

SEQ ID NO: 397521 - DNA, 82 bp, Homo sapiens; identical to SEQ ID NO: 200706
  chr6:150920982-150921064
  hyper

SEQ ID NO: 397522 - DNA, 57 bp, Homo sapiens; identical to SEQ ID NO: 232549
  chr6:153022495-153022552
  hyper

SEQ ID NO: 397523 - DNA, 193 bp, Homo sapiens; identical to SEQ ID NO: 232550
  chr6:153304117-153304310
  hyper

SEQ ID NO: 397524 - DNA, 244 bp, Homo sapiens; identical to SEQ ID NO: 200716
  chr6:154360330-154360574
  hyper

SEQ ID NO: 397525 - DNA, 45 bp, Homo sapiens; identical to SEQ ID NO: 284579
  chr6:154830547-154830592
  hyper

SEQ ID NO: 397526 - DNA, 602 bp, Homo sapiens
  chr6:154830765-154831367
  hyper
ctgggcaggcggcatggacgaggtcccgcgggagtcacccacacaaaggcaccttgtgcctctgcactcgggcccccgggtcgccgggcaccgcaccggggccaggcagggagagcgccccccggcccgagtgccgagtcccgagatcggcatccccagccctcaaccgccacagaaaggccacccctactccctggtttaaagatagggctcccctcggcttgccacaatccgcaccctggaaaggaagagctcggagcaggtacgagagataggagcgcacaggccactcggcagaagtttgcattgtcaccgggctgtgccctcaccgcttctcgccgggaggaagggccaagtaccctcttccccagctcctcgtccgccccatccccgaggctggaggactccggacccccccaaggcccgcgcacctctagtccagtccaccacttgtttggggctccacttggtcacgggttccatggtaaaccgcttcgcctctcgctgggctggagagtcgcagataaagtgctgctgcctgcgctccggtgccccttcccgggagggcgcgcccgcggctgctcccctgcgcccgagcgact

SEQ ID NO: 397527 - DNA, 46 bp, Homo sapiens; identical to SEQ ID NO: 232557
  chr6:154831607-154831653
  hyper

SEQ ID NO: 397528 - DNA, 341 bp, Homo sapiens; identical to SEQ ID NO: 232559
  chr6:157098324-157098665
  hyper

SEQ ID NO: 397529 - DNA, 84 bp, Homo sapiens; identical to SEQ ID NO: 232562
  chr6:157745202-157745286
  hyper

SEQ ID NO: 397530 - DNA, 59 bp, Homo sapiens; identical to SEQ ID NO: 200718
  chr6:157802884-157802943
  hyper

SEQ ID NO: 397531 - DNA, 168 bp, Homo sapiens; identical to SEQ ID NO: 222962
  chr6:157803299-157803467
  hyper

SEQ ID NO: 397532 - DNA, 571 bp, Homo sapiens; identical to SEQ ID NO: 284588
  chr6:158244130-158244701
  hyper

SEQ ID NO: 397533 - DNA, 42 bp, Homo sapiens; identical to SEQ ID NO: 232569
  chr6:159421501-159421543
  hyper

SEQ ID NO: 397534 - DNA, 58 bp, Homo sapiens; identical to SEQ ID NO: 232573
  chr6:160112589-160112647
  hyper

SEQ ID NO: 397535 - DNA, 137 bp, Homo sapiens; identical to SEQ ID NO: 232576
  chr6:160389587-160389724
  hyper

SEQ ID NO: 397536 - DNA, 80 bp, Homo sapiens; identical to SEQ ID NO: 200735
  chr6:161413419-161413499
  hyper

SEQ ID NO: 397537 - DNA, 120 bp, Homo sapiens; identical to SEQ ID NO: 232586
  chr6:164377731-164377851
  hyper

SEQ ID NO: 397538 - DNA, 163 bp, Homo sapiens; identical to SEQ ID NO: 232590
  chr6:166188884-166189047
  hyper

SEQ ID NO: 397539 - DNA, 75 bp, Homo sapiens; identical to SEQ ID NO: 284629
  chr6:166400480-166400555
  hyper

SEQ ID NO: 397540 - DNA, 434 bp, Homo sapiens; identical to SEQ ID NO: 284630
  chr6:166401500-166401934
  hyper

SEQ ID NO: 397541 - DNA, 49 bp, Homo sapiens; identical to SEQ ID NO: 284644
  chr6:167276260-167276309
  hyper

SEQ ID NO: 397542 - DNA, 33 bp, Homo sapiens; identical to SEQ ID NO: 200752
  chr6:168227910-168227943
  hyper

SEQ ID NO: 397543 - DNA, 84 bp, Homo sapiens; identical to SEQ ID NO: 200753
  chr6:168228222-168228306
  hyper

SEQ ID NO: 397544 - DNA, 33 bp, Homo sapiens; identical to SEQ ID NO: 200754
  chr6:168228539-168228572
  hyper

SEQ ID NO: 397545 - DNA, 575 bp, Homo sapiens
  chr6:168720072-168720647
  hyper
gctcctgcagcgcggccagcgccgcctccagctgctgctcggggccgtggaggccgtgggggccgcagggcgcggcgggcgcgggcgggggctgcagggccagggcgccccgtacccgctcctgctgcgtggctcgcagcccctgcagctcctgcagccccgcgaacgccgcgcgcaacctcgcgcccaacctacggcggtcccagcccgcggaccccgggggtccgcccggcgtccacatctcccgggcagggtcccggcctcccgaaccccacgagcggcgccggaggcccagcgcgcgcggatcccgagctgtgtcgcgggtcctcctgcgcctcctctctccgcccccggctccgcaggtcgccaaggtgggctggaatctgtggccaggcgcggagggcggggtctgcacgcgccccgaggtcaccgcggcctcccccggacccgccccgccgaccccccagggcccctcgccggctgcgggcagggcgggcgcacccagaccccggggccagctgagcgcctccgtgacttcagcggggagggccagccgggaggaggagcccggggga

SEQ ID NO: 397546 - DNA, 329 bp, Homo sapiens; identical to SEQ ID NO: 284652
  chr6:168842518-168842847
  hyper

SEQ ID NO: 397547 - DNA, 441 bp, Homo sapiens; identical to SEQ ID NO: 232619
  chr6:170599640-170600081
  hyper

SEQ ID NO: 397548 - DNA, 155 bp, Homo sapiens; identical to SEQ ID NO: 232620
  chr6:170604989-170605144
  hyper

SEQ ID NO: 397549 - DNA, 136 bp, Homo sapiens; identical to SEQ ID NO: 232621
  chr6:170615733-170615869
  hyper

SEQ ID NO: 397550 - DNA, 43 bp, Homo sapiens; identical to SEQ ID NO: 200760
  chr6:170862217-170862260
  hyper

SEQ ID NO: 397551 - DNA, 101 bp, Homo sapiens; identical to SEQ ID NO: 232626
  chr7:362170-362271
  hyper

SEQ ID NO: 397552 - DNA, 212 bp, Homo sapiens; identical to SEQ ID NO: 284684
  chr7:560342-560554
  hyper

SEQ ID NO: 397553 - DNA, 35 bp, Homo sapiens; identical to SEQ ID NO: 200771
  chr7:560650-560685
  hyper

SEQ ID NO: 397554 - DNA, 51 bp, Homo sapiens; identical to SEQ ID NO: 200772
  chr7:560731-560782
  hyper

SEQ ID NO: 397555 - DNA, 332 bp, Homo sapiens; identical to SEQ ID NO: 284697
  chr7:1069637-1069969
  hyper

SEQ ID NO: 397556 - DNA, 56 bp, Homo sapiens; identical to SEQ ID NO: 232642
  chr7:1268389-1268445
  hyper

SEQ ID NO: 397557 - DNA, 157 bp, Homo sapiens; identical to SEQ ID NO: 284710
  chr7:1278131-1278288
  hyper

SEQ ID NO: 397558 - DNA, 46 bp, Homo sapiens; identical to SEQ ID NO: 284711
  chr7:1279053-1279099
  hyper

SEQ ID NO: 397559 - DNA, 356 bp, Homo sapiens; identical to SEQ ID NO: 284713
  chr7:1282150-1282506
  hyper

SEQ ID NO: 397560 - DNA, 119 bp, Homo sapiens; identical to SEQ ID NO: 200783
  chr7:1283941-1284060
  hyper

SEQ ID NO: 397561 - DNA, 400 bp, Homo sapiens; identical to SEQ ID NO: 232660
  chr7:1572209-1572609
  hyper

SEQ ID NO: 397562 - DNA, 283 bp, Homo sapiens; identical to SEQ ID NO: 388417
  chr7:1707336-1707619
  hyper

SEQ ID NO: 397563 - DNA, 72 bp, Homo sapiens
  chr7:1710370-1710442
  hyper
cccttcccggaaattagggggctgtcctcacctcctggccgagtcgctgacccctccccaggctcgcatcgc

SEQ ID NO: 397564 - DNA, 46 bp, Homo sapiens; identical to SEQ ID NO: 232667
  chr7:2018721-2018767
  hyper

SEQ ID NO: 397565 - DNA, 359 bp, Homo sapiens; identical to SEQ ID NO: 232669
  chr7:2443784-2444143
  hyper

SEQ ID NO: 397566 - DNA, 77 bp, Homo sapiens; identical to SEQ ID NO: 223010
  chr7:2555344-2555421
  hyper

SEQ ID NO: 397567 - DNA, 81 bp, Homo sapiens; identical to SEQ ID NO: 232674
  chr7:2595523-2595604
  hyper

SEQ ID NO: 397568 - DNA, 50 bp, Homo sapiens; identical to SEQ ID NO: 200795
  chr7:4770079-4770129
  hyper

SEQ ID NO: 397569 - DNA, 203 bp, Homo sapiens; identical to SEQ ID NO: 200798
  chr7:5085238-5085441
  hyper

SEQ ID NO: 397570 - DNA, 83 bp, Homo sapiens; identical to SEQ ID NO: 232684
  chr7:5125291-5125374
  hyper

SEQ ID NO: 397571 - DNA, 880 bp, Homo sapiens; identical to SEQ ID NO: 200799
  chr7:5459600-5460480
  hyper

SEQ ID NO: 397572 - DNA, 859 bp, Homo sapiens; identical to SEQ ID NO: 284756
  chr7:5460573-5461432
  hyper

SEQ ID NO: 397573 - DNA, 221 bp, Homo sapiens; identical to SEQ ID NO: 200801
  chr7:5462090-5462311
  hyper

SEQ ID NO: 397574 - DNA, 93 bp, Homo sapiens; identical to SEQ ID NO: 232689
  chr7:5463270-5463363
  hyper

SEQ ID NO: 397575 - DNA, 419 bp, Homo sapiens; identical to SEQ ID NO: 200802
  chr7:5464580-5464999
  hyper

SEQ ID NO: 397576 - DNA, 1428 bp, Homo sapiens; identical to SEQ ID NO: 284760
  chr7:5465049-5466477
  hyper

SEQ ID NO: 397577 - DNA, 92 bp, Homo sapiens
  chr7:5466507-5466599
  hyper
aagcgaagtagtagtggctgcagcccgggtgcccccattcgtaaaggggagcctctaggacatccctaactaggcttcagggtccagggaaa

SEQ ID NO: 397578 - DNA, 54 bp, Homo sapiens; identical to SEQ ID NO: 284763
  chr7:5526404-5526458
  hyper

SEQ ID NO: 397579 - DNA, 120 bp, Homo sapiens; identical to SEQ ID NO: 232693
  chr7:5595699-5595819
  hyper

SEQ ID NO: 397580 - DNA, 141 bp, Homo sapiens; identical to SEQ ID NO: 232694
  chr7:5602625-5602766
  hyper

SEQ ID NO: 397581 - DNA, 148 bp, Homo sapiens; identical to SEQ ID NO: 232697
  chr7:6098848-6098996
  hyper

SEQ ID NO: 397582 - DNA, 61 bp, Homo sapiens; identical to SEQ ID NO: 232698
  chr7:6144353-6144414
  hyper

SEQ ID NO: 397583 - DNA, 90 bp, Homo sapiens; identical to SEQ ID NO: 232705
  chr7:6677419-6677509
  hyper

SEQ ID NO: 397584 - DNA, 71 bp, Homo sapiens; identical to SEQ ID NO: 284782
  chr7:6966984-6967055
  hyper

SEQ ID NO: 397585 - DNA, 68 bp, Homo sapiens; identical to SEQ ID NO: 232707
  chr7:7222007-7222075
  hyper

SEQ ID NO: 397586 - DNA, 257 bp, Homo sapiens; identical to SEQ ID NO: 232708
  chr7:7606359-7606616
  hyper

SEQ ID NO: 397587 - DNA, 77 bp, Homo sapiens; identical to SEQ ID NO: 284787
  chr7:8301294-8301371
  hyper

SEQ ID NO: 397588 - DNA, 68 bp, Homo sapiens; identical to SEQ ID NO: 200815
  chr7:8480572-8480640
  hyper

SEQ ID NO: 397589 - DNA, 151 bp, Homo sapiens; identical to SEQ ID NO: 200816
  chr7:8481159-8481310
  hyper

SEQ ID NO: 397590 - DNA, 138 bp, Homo sapiens; identical to SEQ ID NO: 232719
  chr7:10979885-10980023
  hyper

SEQ ID NO: 397591 - DNA, 69 bp, Homo sapiens; identical to SEQ ID NO: 232720
  chr7:10980264-10980333
  hyper

SEQ ID NO: 397592 - DNA, 233 bp, Homo sapiens; identical to SEQ ID NO: 232724
  chr7:12250503-12250736
  hyper

SEQ ID NO: 397593 - DNA, 149 bp, Homo sapiens; identical to SEQ ID NO: 200821
  chr7:12610063-12610212
  hyper

SEQ ID NO: 397594 - DNA, 97 bp, Homo sapiens; identical to SEQ ID NO: 200822
  chr7:12610242-12610339
  hyper

SEQ ID NO: 397595 - DNA, 160 bp, Homo sapiens; identical to SEQ ID NO: 200823
  chr7:12610476-12610636
  hyper

SEQ ID NO: 397596 - DNA, 121 bp, Homo sapiens; identical to SEQ ID NO: 114645
  chr7:12610726-12610847
  hyper

SEQ ID NO: 397597 - DNA, 1160 bp, Homo sapiens; identical to SEQ ID NO: 200824
  chr7:12726287-12727447
  hyper

SEQ ID NO: 397598 - DNA, 52 bp, Homo sapiens
  chr7:14029441-14029493
  hyper
gggtctccctcgcccctctgccctagggggtgctcggccggtaggcgctggg

SEQ ID NO: 397599 - DNA, 330 bp, Homo sapiens; identical to SEQ ID NO: 200827
  chr7:14029555-14029885
  hyper

SEQ ID NO: 397600 - DNA, 929 bp, Homo sapiens; identical to SEQ ID NO: 284810
  chr7:14030269-14031198
  hyper

SEQ ID NO: 397601 - DNA, 58 bp, Homo sapiens; identical to SEQ ID NO: 232731
  chr7:15727422-15727480
  hyper

SEQ ID NO: 397602 - DNA, 499 bp, Homo sapiens; identical to SEQ ID NO: 232733
  chr7:16685459-16685958
  hyper

SEQ ID NO: 397603 - DNA, 79 bp, Homo sapiens
  chr7:20826019-20826098
  hyper
gggctgcagaatttttttttaagggttaggggaagaatctgcactttgcccagaaggaaaaacttgctctctttacccc

SEQ ID NO: 397604 - DNA, 40 bp, Homo sapiens; identical to SEQ ID NO: 284839
  chr7:20828444-20828484
  hyper

SEQ ID NO: 397605 - DNA, 50 bp, Homo sapiens; identical to SEQ ID NO: 200849
  chr7:20833039-20833089
  hyper

SEQ ID NO: 397606 - DNA, 102 bp, Homo sapiens; identical to SEQ ID NO: 200850
  chr7:20833543-20833645
  hyper

SEQ ID NO: 397607 - DNA, 51 bp, Homo sapiens; identical to SEQ ID NO: 232762
  chr7:22143358-22143409
  hyper

SEQ ID NO: 397608 - DNA, 149 bp, Homo sapiens; identical to SEQ ID NO: 232771
  chr7:23636896-23637045
  hyper

SEQ ID NO: 397609 - DNA, 146 bp, Homo sapiens; identical to SEQ ID NO: 200870
  chr7:24323183-24323329
  hyper

SEQ ID NO: 397610 - DNA, 139 bp, Homo sapiens
  chr7:24323343-24323482
  hyper
cgctagtcgtggagatgccccaccacaaagaggattcaggtgcttcctactccggcacccagtgggttggtagtcctgttggcaggagacaagaatcgtctgggctgctcctatctctggcaggactagacggggcgtg

SEQ ID NO: 397611 - DNA, 55 bp, Homo sapiens; identical to SEQ ID NO: 232775
  chr7:24323662-24323717
  hyper

SEQ ID NO: 397612 - DNA, 211 bp, Homo sapiens; identical to SEQ ID NO: 284873
  chr7:24324754-24324965
  hyper

SEQ ID NO: 397613 - DNA, 302 bp, Homo sapiens; identical to SEQ ID NO: 232778
  chr7:24612554-24612856
  hyper

SEQ ID NO: 397614 - DNA, 96 bp, Homo sapiens; identical to SEQ ID NO: 232782
  chr7:25165221-25165317
  hyper

SEQ ID NO: 397615 - DNA, 200 bp, Homo sapiens; identical to SEQ ID NO: 223050
  chr7:25219900-25220100
  hyper

SEQ ID NO: 397616 - DNA, 181 bp, Homo sapiens; identical to SEQ ID NO: 232792
  chr7:25935087-25935268
  hyper

SEQ ID NO: 397617 - DNA, 252 bp, Homo sapiens; identical to SEQ ID NO: 232797
  chr7:26240889-26241141
  hyper

SEQ ID NO: 397618 - DNA, 477 bp, Homo sapiens; identical to SEQ ID NO: 284901
  chr7:27191584-27192061
  hyper

SEQ ID NO: 397619 - DNA, 320 bp, Homo sapiens; identical to SEQ ID NO: 284902
  chr7:27192098-27192418
  hyper

SEQ ID NO: 397620 - DNA, 281 bp, Homo sapiens; identical to SEQ ID NO: 200896
  chr7:27227348-27227629
  hyper

SEQ ID NO: 397621 - DNA, 632 bp, Homo sapiens; identical to SEQ ID NO: 284913
  chr7:27228044-27228676
  hyper

SEQ ID NO: 397622 - DNA, 172 bp, Homo sapiens; identical to SEQ ID NO: 284915
  chr7:27237358-27237530
  hyper

SEQ ID NO: 397623 - DNA, 362 bp, Homo sapiens
  chr7:27279795-27280157
  hyper
ggtggaaaggggcgggggtgggtgtggttccctaggctcctaagactggccagtcagctttgaaagagcggggcagaagtcgggagagggctggggaaggctttgggctgaggggatgtgtccctgaagcttcagatctggagcccaagggaggcaacctccctctgaaaagccggtcctcagctccatccagccctctccgcgggatgtaagccctgctccgtagggcccgacccaggaagcagactaagtggcactccttgatctctcactcctactcggctttcatctcacccagaagaaaagcggatcaaacagaggattcccattgaatgcagagctgggggcggggtggggagcca

SEQ ID NO: 397624 - DNA, 32 bp, Homo sapiens; identical to SEQ ID NO: 200909
  chr7:27288913-27288945
  hyper

SEQ ID NO: 397625 - DNA, 59 bp, Homo sapiens; identical to SEQ ID NO: 200910
  chr7:28725632-28725691
  hyper

SEQ ID NO: 397626 - DNA, 41 bp, Homo sapiens
  chr7:29602676-29602717
  hyper
aaaaaaaaaaagtactcttatgtgaccaggagtgcaatccc

SEQ ID NO: 397627 - DNA, 369 bp, Homo sapiens; identical to SEQ ID NO: 200920
  chr7:29724332-29724701
  hyper

SEQ ID NO: 397628 - DNA, 208 bp, Homo sapiens
  chr7:30029494-30029702
  hyper
ccccggcccccggggccccgccgcaccccgcgcgtctggctgcacgggccgcggcgctgctcaccgtcgagtagggagggggcctgggagctggaggagcggccgagagggcgtatctcgccgcagaaagtggccccctctttgctagatttttatttcttggttgtggctctcaaaagggaaaacccgggcttcaaggagccaggcc

SEQ ID NO: 397629 - DNA, 217 bp, Homo sapiens; identical to SEQ ID NO: 232842
  chr7:30065744-30065961
  hyper

SEQ ID NO: 397630 - DNA, 76 bp, Homo sapiens; identical to SEQ ID NO: 284958
  chr7:31232602-31232678
  hyper

SEQ ID NO: 397631 - DNA, 191 bp, Homo sapiens; identical to SEQ ID NO: 200932
  chr7:31232718-31232909
  hyper

SEQ ID NO: 397632 - DNA, 48 bp, Homo sapiens; identical to SEQ ID NO: 200933
  chr7:31232939-31232987
  hyper

SEQ ID NO: 397633 - DNA, 263 bp, Homo sapiens; identical to SEQ ID NO: 200934
  chr7:31375702-31375965
  hyper

SEQ ID NO: 397634 - DNA, 109 bp, Homo sapiens; identical to SEQ ID NO: 200935
  chr7:31376218-31376327
  hyper

SEQ ID NO: 397635 - DNA, 40 bp, Homo sapiens; identical to SEQ ID NO: 232857
  chr7:32468314-32468354
  hyper

SEQ ID NO: 397636 - DNA, 55 bp, Homo sapiens; identical to SEQ ID NO: 284973
  chr7:35298172-35298227
  hyper

SEQ ID NO: 397637 - DNA, 257 bp, Homo sapiens; identical to SEQ ID NO: 232875
  chr7:35734777-35735034
  hyper

SEQ ID NO: 397638 - DNA, 206 bp, Homo sapiens; identical to SEQ ID NO: 232880
  chr7:37873162-37873368
  hyper

SEQ ID NO: 397639 - DNA, 109 bp, Homo sapiens; identical to SEQ ID NO: 232887
  chr7:40174396-40174505
  hyper

SEQ ID NO: 397640 - DNA, 119 bp, Homo sapiens; identical to SEQ ID NO: 114938
  chr7:40174877-40174996
  hyper

SEQ ID NO: 397641 - DNA, 265 bp, Homo sapiens; identical to SEQ ID NO: 232897
  chr7:42951543-42951808
  hyper

SEQ ID NO: 397642 - DNA, 109 bp, Homo sapiens; identical to SEQ ID NO: 200957
  chr7:43153584-43153693
  hyper

SEQ ID NO: 397643 - DNA, 108 bp, Homo sapiens; identical to SEQ ID NO: 200958
  chr7:43622286-43622394
  hyper

SEQ ID NO: 397644 - DNA, 107 bp, Homo sapiens; identical to SEQ ID NO: 232901
  chr7:43769000-43769107
  hyper

SEQ ID NO: 397645 - DNA, 232 bp, Homo sapiens; identical to SEQ ID NO: 232907
  chr7:44240366-44240598
  hyper

SEQ ID NO: 397646 - DNA, 191 bp, Homo sapiens; identical to SEQ ID NO: 232911
  chr7:44645927-44646118
  hyper

SEQ ID NO: 397647 - DNA, 623 bp, Homo sapiens; identical to SEQ ID NO: 223093
  chr7:45026005-45026628
  hyper

SEQ ID NO: 397648 - DNA, 182 bp, Homo sapiens; identical to SEQ ID NO: 200963
  chr7:45927932-45928114
  hyper

SEQ ID NO: 397649 - DNA, 202 bp, Homo sapiens; identical to SEQ ID NO: 200964
  chr7:45928147-45928349
  hyper

SEQ ID NO: 397650 - DNA, 180 bp, Homo sapiens; identical to SEQ ID NO: 285025
  chr7:45961576-45961756
  hyper

SEQ ID NO: 397651 - DNA, 277 bp, Homo sapiens; identical to SEQ ID NO: 285026
  chr7:45961974-45962251
  hyper

SEQ ID NO: 397652 - DNA, 262 bp, Homo sapiens; identical to SEQ ID NO: 200969
  chr7:48127995-48128257
  hyper

SEQ ID NO: 397653 - DNA, 67 bp, Homo sapiens; identical to SEQ ID NO: 200977
  chr7:54610336-54610403
  hyper

SEQ ID NO: 397654 - DNA, 199 bp, Homo sapiens; identical to SEQ ID NO: 285044
  chr7:54731845-54732044
  hyper

SEQ ID NO: 397655 - DNA, 169 bp, Homo sapiens; identical to SEQ ID NO: 232936
  chr7:56019824-56019993
  hyper

SEQ ID NO: 397656 - DNA, 211 bp, Homo sapiens; identical to SEQ ID NO: 232938
  chr7:56174011-56174222
  hyper

SEQ ID NO: 397657 - DNA, 44 bp, Homo sapiens; identical to SEQ ID NO: 285054
  chr7:56355744-56355788
  hyper

SEQ ID NO: 397658 - DNA, 318 bp, Homo sapiens; identical to SEQ ID NO: 232944
  chr7:63774383-63774701
  hyper

SEQ ID NO: 397659 - DNA, 46 bp, Homo sapiens; identical to SEQ ID NO: 285059
  chr7:64030435-64030481
  hyper

SEQ ID NO: 397660 - DNA, 357 bp, Homo sapiens; identical to SEQ ID NO: 285062
  chr7:64348611-64348968
  hyper

SEQ ID NO: 397661 - DNA, 135 bp, Homo sapiens; identical to SEQ ID NO: 285066
  chr7:64700148-64700283
  hyper

SEQ ID NO: 397662 - DNA, 120 bp, Homo sapiens; identical to SEQ ID NO: 200991
  chr7:64974034-64974154
  hyper

SEQ ID NO: 397663 - DNA, 104 bp, Homo sapiens; identical to SEQ ID NO: 232957
  chr7:66093260-66093364
  hyper

SEQ ID NO: 397664 - DNA, 551 bp, Homo sapiens; identical to SEQ ID NO: 232959
  chr7:66386845-66387396
  hyper

SEQ ID NO: 397665 - DNA, 39 bp, Homo sapiens; identical to SEQ ID NO: 285090
  chr7:70597451-70597490
  hyper

SEQ ID NO: 397666 - DNA, 177 bp, Homo sapiens; identical to SEQ ID NO: 201006
  chr7:70597658-70597835
  hyper

SEQ ID NO: 397667 - DNA, 88 bp, Homo sapiens; identical to SEQ ID NO: 223123
  chr7:71198521-71198609
  hyper

SEQ ID NO: 397668 - DNA, 37 bp, Homo sapiens; identical to SEQ ID NO: 201007
  chr7:71217332-71217369
  hyper

SEQ ID NO: 397669 - DNA, 97 bp, Homo sapiens; identical to SEQ ID NO: 232977
  chr7:77167676-77167773
  hyper

SEQ ID NO: 397670 - DNA, 178 bp, Homo sapiens; identical to SEQ ID NO: 232978
  chr7:77325999-77326177
  hyper

SEQ ID NO: 397671 - DNA, 36 bp, Homo sapiens; identical to SEQ ID NO: 201012
  chr7:77649269-77649305
  hyper

SEQ ID NO: 397672 - DNA, 235 bp, Homo sapiens; identical to SEQ ID NO: 201013
  chr7:79081510-79081745
  hyper

SEQ ID NO: 397673 - DNA, 102 bp, Homo sapiens; identical to SEQ ID NO: 285120
  chr7:84815039-84815141
  hyper

SEQ ID NO: 397674 - DNA, 266 bp, Homo sapiens; identical to SEQ ID NO: 285121
  chr7:84815451-84815717
  hyper

SEQ ID NO: 397675 - DNA, 41 bp, Homo sapiens; identical to SEQ ID NO: 201024
  chr7:84816488-84816529
  hyper

SEQ ID NO: 397676 - DNA, 164 bp, Homo sapiens; identical to SEQ ID NO: 201025
  chr7:86273044-86273208
  hyper

SEQ ID NO: 397677 - DNA, 155 bp, Homo sapiens; identical to SEQ ID NO: 232995
  chr7:86781443-86781598
  hyper

SEQ ID NO: 397678 - DNA, 60 bp, Homo sapiens; identical to SEQ ID NO: 232996
  chr7:86782566-86782626
  hyper

SEQ ID NO: 397679 - DNA, 109 bp, Homo sapiens; identical to SEQ ID NO: 201027
  chr7:86849527-86849636
  hyper

SEQ ID NO: 397680 - DNA, 277 bp, Homo sapiens; identical to SEQ ID NO: 232998
  chr7:86974660-86974937
  hyper

SEQ ID NO: 397681 - DNA, 31 bp, Homo sapiens; identical to SEQ ID NO: 201028
  chr7:87104710-87104741
  hyper

SEQ ID NO: 397682 - DNA, 67 bp, Homo sapiens; identical to SEQ ID NO: 233002
  chr7:87505447-87505514
  hyper

SEQ ID NO: 397683 - DNA, 203 bp, Homo sapiens; identical to SEQ ID NO: 233005
  chr7:87849003-87849206
  hyper

SEQ ID NO: 397684 - DNA, 194 bp, Homo sapiens; identical to SEQ ID NO: 201041
  chr7:90893324-90893518
  hyper

SEQ ID NO: 397685 - DNA, 311 bp, Homo sapiens; identical to SEQ ID NO: 233018
  chr7:91569809-91570120
  hyper

SEQ ID NO: 397686 - DNA, 381 bp, Homo sapiens; identical to SEQ ID NO: 233019
  chr7:91763723-91764104
  hyper

SEQ ID NO: 397687 - DNA, 49 bp, Homo sapiens; identical to SEQ ID NO: 233020
  chr7:91875200-91875249
  hyper

SEQ ID NO: 397688 - DNA, 1229 bp, Homo sapiens; identical to SEQ ID NO: 44386
  chr7:92462187-92463416
  hyper

SEQ ID NO: 397689 - DNA, 247 bp, Homo sapiens; identical to SEQ ID NO: 201045
  chr7:92463701-92463948
  hyper

SEQ ID NO: 397690 - DNA, 205 bp, Homo sapiens; identical to SEQ ID NO: 223143
  chr7:92464934-92465139
  hyper

SEQ ID NO: 397691 - DNA, 46 bp, Homo sapiens; identical to SEQ ID NO: 384190
  chr7:93203796-93203842
  hyper

SEQ ID NO: 397692 - DNA, 311 bp, Homo sapiens
  chr7:95064267-95064578
  hyper
cgggagccgggcgcgctgcctcgctccggcctggccagcagctccgtgggcggtgccatcttcccggctcgatggtgccggccgcgctccgccccgtcctccgcctaggccgagtccctgcgtcggggccgcggaggctccgccctgggcctggccctggtctttgtcctcacaaacctatttccccagataccttcgggacggcccggacacgccttacattaggctcatgatgtgaaactttgaattccttcacttcctttttcaaacaacccacccgaaaccctctagcagcccgcatacctttctcg

SEQ ID NO: 397693 - DNA, 211 bp, Homo sapiens; identical to SEQ ID NO: 285174
  chr7:95401814-95402025
  hyper

SEQ ID NO: 397694 - DNA, 202 bp, Homo sapiens; identical to SEQ ID NO: 285177
  chr7:96626212-96626414
  hyper

SEQ ID NO: 397695 - DNA, 117 bp, Homo sapiens; identical to SEQ ID NO: 285184
  chr7:96639201-96639318
  hyper

SEQ ID NO: 397696 - DNA, 150 bp, Homo sapiens; identical to SEQ ID NO: 285185
  chr7:96639348-96639498
  hyper

SEQ ID NO: 397697 - DNA, 147 bp, Homo sapiens; identical to SEQ ID NO: 285188
  chr7:96652430-96652577
  hyper

SEQ ID NO: 397698 - DNA, 188 bp, Homo sapiens; identical to SEQ ID NO: 201057
  chr7:97361999-97362187
  hyper

SEQ ID NO: 397699 - DNA, 674 bp, Homo sapiens; identical to SEQ ID NO: 223150
  chr7:97501249-97501923
  hyper

SEQ ID NO: 397700 - DNA, 51 bp, Homo sapiens; identical to SEQ ID NO: 233060
  chr7:98030099-98030150
  hyper

SEQ ID NO: 397701 - DNA, 145 bp, Homo sapiens; identical to SEQ ID NO: 233063
  chr7:98923236-98923381
  hyper

SEQ ID NO: 397702 - DNA, 231 bp, Homo sapiens; identical to SEQ ID NO: 233064
  chr7:99006252-99006483
  hyper

SEQ ID NO: 397703 - DNA, 127 bp, Homo sapiens; identical to SEQ ID NO: 115320
  chr7:99097908-99098035
  hyper

SEQ ID NO: 397704 - DNA, 119 bp, Homo sapiens; identical to SEQ ID NO: 233067
  chr7:99102377-99102496
  hyper

SEQ ID NO: 397705 - DNA, 489 bp, Homo sapiens; identical to SEQ ID NO: 285205
  chr7:99149422-99149911
  hyper

SEQ ID NO: 397706 - DNA, 74 bp, Homo sapiens; identical to SEQ ID NO: 223155
  chr7:99613133-99613207
  hyper

SEQ ID NO: 397707 - DNA, 140 bp, Homo sapiens; identical to SEQ ID NO: 201066
  chr7:99679773-99679913
  hyper

SEQ ID NO: 397708 - DNA, 334 bp, Homo sapiens; identical to SEQ ID NO: 285212
  chr7:99698203-99698537
  hyper

SEQ ID NO: 397709 - DNA, 226 bp, Homo sapiens; identical to SEQ ID NO: 233075
  chr7:99699434-99699660
  hyper

SEQ ID NO: 397710 - DNA, 52 bp, Homo sapiens; identical to SEQ ID NO: 233076
  chr7:99717143-99717195
  hyper

SEQ ID NO: 397711 - DNA, 169 bp, Homo sapiens; identical to SEQ ID NO: 285215
  chr7:99725637-99725806
  hyper

SEQ ID NO: 397712 - DNA, 237 bp, Homo sapiens; identical to SEQ ID NO: 233084
  chr7:100271101-100271338
  hyper

SEQ ID NO: 397713 - DNA, 141 bp, Homo sapiens; identical to SEQ ID NO: 201074
  chr7:100303156-100303297
  hyper

SEQ ID NO: 397714 - DNA, 428 bp, Homo sapiens
  chr7:100424341-100424769
  hyper
agttcggggagcccgggcaggggaatgtcccgggtcgtagccagactccatctctttcccaaacaaaagaaaactccactacccgtcgggcgcctcttccccgcccccctcccgttccagcactatcggtccgaagtgtttgggactgcagtgcccgggtaggggtagtcagaggccggcccctccactccgaggcccagatgttgggggggaggtcccaggagtgacggggtgcgcccccccccgcaaggaaactcaccttccaaagctgcggccaacgaagcccagcagagcagcacccggagctccatggcgccgcctcactcgggtaggatccgaactgagtttggggggccctcgcccccccaggtctgactctccctgggcgggtggacgccgatactccgcgcgggactcctcgtcggggc

SEQ ID NO: 397715 - DNA, 240 bp, Homo sapiens; identical to SEQ ID NO: 223158
  chr7:100424796-100425036
  hyper

SEQ ID NO: 397716 - DNA, 47 bp, Homo sapiens; identical to SEQ ID NO: 233090
  chr7:100609061-100609108
  hyper

SEQ ID NO: 397717 - DNA, 104 bp, Homo sapiens; identical to SEQ ID NO: 223160
  chr7:100609394-100609498
  hyper

SEQ ID NO: 397718 - DNA, 233 bp, Homo sapiens; identical to SEQ ID NO: 233093
  chr7:100728513-100728746
  hyper

SEQ ID NO: 397719 - DNA, 272 bp, Homo sapiens
  chr7:100806065-100806337
  hyper
gcccccggtcacccgcgggtgagctctgggagttcgggctcaggacccgggaggggggtctggcaggtcccgacgcagcccggggacaggggcagggccaaggggcagggccggggcgcatgcaaacaccgagggggagcgggcaacacggaggggggcgccggcgcgcgcgcgcggcgggggcgcgcgggggcgggaccgggaagggcagtcacgggcgccggagcagcacgtgctcgatgtaattctccagctcctcctgctcctgcagc

SEQ ID NO: 397720 - DNA, 101 bp, Homo sapiens; identical to SEQ ID NO: 201080
  chr7:100808059-100808160
  hyper

SEQ ID NO: 397721 - DNA, 41 bp, Homo sapiens; identical to SEQ ID NO: 233099
  chr7:100809971-100810012
  hyper

SEQ ID NO: 397722 - DNA, 83 bp, Homo sapiens; identical to SEQ ID NO: 233106
  chr7:101268843-101268926
  hyper

SEQ ID NO: 397723 - DNA, 159 bp, Homo sapiens; identical to SEQ ID NO: 223164
  chr7:101457610-101457769
  hyper

SEQ ID NO: 397724 - DNA, 467 bp, Homo sapiens; identical to SEQ ID NO: 201087
  chr7:101458246-101458713
  hyper

SEQ ID NO: 397725 - DNA, 190 bp, Homo sapiens; identical to SEQ ID NO: 201088
  chr7:101459183-101459373
  hyper

SEQ ID NO: 397726 - DNA, 166 bp, Homo sapiens; identical to SEQ ID NO: 201090
  chr7:101499970-101500136
  hyper

SEQ ID NO: 397727 - DNA, 67 bp, Homo sapiens; identical to SEQ ID NO: 201097
  chr7:101758486-101758553
  hyper

SEQ ID NO: 397728 - DNA, 189 bp, Homo sapiens; identical to SEQ ID NO: 201100
  chr7:101821748-101821937
  hyper

SEQ ID NO: 397729 - DNA, 97 bp, Homo sapiens; identical to SEQ ID NO: 201103
  chr7:101838786-101838883
  hyper

SEQ ID NO: 397730 - DNA, 672 bp, Homo sapiens; identical to SEQ ID NO: 201104
  chr7:101839913-101840585
  hyper

SEQ ID NO: 397731 - DNA, 66 bp, Homo sapiens; identical to SEQ ID NO: 201105
  chr7:101842081-101842147
  hyper

SEQ ID NO: 397732 - DNA, 102 bp, Homo sapiens; identical to SEQ ID NO: 201106
  chr7:101843350-101843452
  hyper

SEQ ID NO: 397733 - DNA, 845 bp, Homo sapiens; identical to SEQ ID NO: 201107
  chr7:101844639-101845484
  hyper

SEQ ID NO: 397734 - DNA, 57 bp, Homo sapiens; identical to SEQ ID NO: 201109
  chr7:101848393-101848450
  hyper

SEQ ID NO: 397735 - DNA, 303 bp, Homo sapiens; identical to SEQ ID NO: 201110
  chr7:101870646-101870949
  hyper

SEQ ID NO: 397736 - DNA, 189 bp, Homo sapiens; identical to SEQ ID NO: 201111
  chr7:101877331-101877520
  hyper

SEQ ID NO: 397737 - DNA, 265 bp, Homo sapiens; identical to SEQ ID NO: 201112
  chr7:101882599-101882864
  hyper

SEQ ID NO: 397738 - DNA, 67 bp, Homo sapiens; identical to SEQ ID NO: 201115
  chr7:101917514-101917581
  hyper

SEQ ID NO: 397739 - DNA, 84 bp, Homo sapiens; identical to SEQ ID NO: 201118
  chr7:101923328-101923412
  hyper

SEQ ID NO: 397740 - DNA, 57 bp, Homo sapiens; identical to SEQ ID NO: 201119
  chr7:101924095-101924152
  hyper

SEQ ID NO: 397741 - DNA, 81 bp, Homo sapiens; identical to SEQ ID NO: 201120
  chr7:101925131-101925212
  hyper

SEQ ID NO: 397742 - DNA, 65 bp, Homo sapiens; identical to SEQ ID NO: 201121
  chr7:101926003-101926068
  hyper

SEQ ID NO: 397743 - DNA, 346 bp, Homo sapiens; identical to SEQ ID NO: 233112
  chr7:102104793-102105139
  hyper

SEQ ID NO: 397744 - DNA, 230 bp, Homo sapiens; identical to SEQ ID NO: 233113
  chr7:102389177-102389407
  hyper

SEQ ID NO: 397745 - DNA, 142 bp, Homo sapiens; identical to SEQ ID NO: 233114
  chr7:102789382-102789524
  hyper

SEQ ID NO: 397746 - DNA, 544 bp, Homo sapiens; identical to SEQ ID NO: 285294
  chr7:102920838-102921382
  hyper

SEQ ID NO: 397747 - DNA, 87 bp, Homo sapiens; identical to SEQ ID NO: 233116
  chr7:102985260-102985347
  hyper

SEQ ID NO: 397748 - DNA, 101 bp, Homo sapiens; identical to SEQ ID NO: 201125
  chr7:103631018-103631119
  hyper

SEQ ID NO: 397749 - DNA, 278 bp, Homo sapiens; identical to SEQ ID NO: 233126
  chr7:104654732-104655010
  hyper

SEQ ID NO: 397750 - DNA, 137 bp, Homo sapiens; identical to SEQ ID NO: 201127
  chr7:105331662-105331799
  hyper

SEQ ID NO: 397751 - DNA, 411 bp, Homo sapiens; identical to SEQ ID NO: 201129
  chr7:106508245-106508656
  hyper

SEQ ID NO: 397752 - DNA, 186 bp, Homo sapiens; identical to SEQ ID NO: 201134
  chr7:107302345-107302531
  hyper

SEQ ID NO: 397753 - DNA, 94 bp, Homo sapiens; identical to SEQ ID NO: 233137
  chr7:107383748-107383842
  hyper

SEQ ID NO: 397754 - DNA, 89 bp, Homo sapiens; identical to SEQ ID NO: 233139
  chr7:107531675-107531764
  hyper

SEQ ID NO: 397755 - DNA, 71 bp, Homo sapiens; identical to SEQ ID NO: 384205
  chr7:107642740-107642811
  hyper

SEQ ID NO: 397756 - DNA, 76 bp, Homo sapiens; identical to SEQ ID NO: 201138
  chr7:107643995-107644071
  hyper

SEQ ID NO: 397757 - DNA, 253 bp, Homo sapiens; identical to SEQ ID NO: 233149
  chr7:112579978-112580231
  hyper

SEQ ID NO: 397758 - DNA, 41 bp, Homo sapiens; identical to SEQ ID NO: 201150
  chr7:115850424-115850465
  hyper

SEQ ID NO: 397759 - DNA, 387 bp, Homo sapiens; identical to SEQ ID NO: 285346
  chr7:116166325-116166712
  hyper

SEQ ID NO: 397760 - DNA, 77 bp, Homo sapiens; identical to SEQ ID NO: 233160
  chr7:116503304-116503381
  hyper

SEQ ID NO: 397761 - DNA, 183 bp, Homo sapiens; identical to SEQ ID NO: 285354
  chr7:117513849-117514032
  hyper

SEQ ID NO: 397762 - DNA, 548 bp, Homo sapiens; identical to SEQ ID NO: 201158
  chr7:120497836-120498384
  hyper

SEQ ID NO: 397763 - DNA, 140 bp, Homo sapiens; identical to SEQ ID NO: 233171
  chr7:120627988-120628128
  hyper

SEQ ID NO: 397764 - DNA, 532 bp, Homo sapiens; identical to SEQ ID NO: 201159
  chr7:120628558-120629090
  hyper

SEQ ID NO: 397765 - DNA, 130 bp, Homo sapiens; identical to SEQ ID NO: 201162
  chr7:121513393-121513523
  hyper

SEQ ID NO: 397766 - DNA, 130 bp, Homo sapiens; identical to SEQ ID NO: 201163
  chr7:121863466-121863596
  hyper

SEQ ID NO: 397767 - DNA, 67 bp, Homo sapiens; identical to SEQ ID NO: 233180
  chr7:121943301-121943368
  hyper

SEQ ID NO: 397768 - DNA, 468 bp, Homo sapiens
  chr7:122525746-122526214
  hyper
tccggccagagctgcgcctgccgggtgcaaccgcggcgcggccggcgctgtcggtctctgtctcacggatggtgagctgacagctcctgccagcccaggcggggaggaggagaagaggtgtccgctgcagccgcatacccggcgggtgaaagcaccgtcttgtccccaaagattcctctgccctcagagactaacaaaaatacggtgtcctgcgtttcgcagaaggacgggaggcgtcccagagctctcccgggagaaaaacccagggagaagtggtggtaggaggcgcccggtcccgcaactcaccttctgctgcctccgggccatgtcggtgggctgcttggcgttgaaggggtacgcgatgcacctcacgacgaagacgtagagctgcaggcggatcctccgctcctgctcatcgtccagctgccgctggggctcgtctcgcccctcgctgagcacagaggggct

SEQ ID NO: 397769 - DNA, 116 bp, Homo sapiens; identical to SEQ ID NO: 201169
  chr7:122527423-122527539
  hyper

SEQ ID NO: 397770 - DNA, 46 bp, Homo sapiens; identical to SEQ ID NO: 201173
  chr7:124405510-124405556
  hyper

SEQ ID NO: 397771 - DNA, 219 bp, Homo sapiens; identical to SEQ ID NO: 285387
  chr7:124406227-124406446
  hyper

SEQ ID NO: 397772 - DNA, 653 bp, Homo sapiens; identical to SEQ ID NO: 285401
  chr7:127775616-127776269
  hyper

SEQ ID NO: 397773 - DNA, 45 bp, Homo sapiens; identical to SEQ ID NO: 285402
  chr7:127776410-127776455
  hyper

SEQ ID NO: 397774 - DNA, 251 bp, Homo sapiens; identical to SEQ ID NO: 233209
  chr7:128001888-128002139
  hyper

SEQ ID NO: 397775 - DNA, 143 bp, Homo sapiens; identical to SEQ ID NO: 233213
  chr7:128379663-128379806
  hyper

SEQ ID NO: 397776 - DNA, 104 bp, Homo sapiens; identical to SEQ ID NO: 223223
  chr7:128509606-128509710
  hyper

SEQ ID NO: 397777 - DNA, 55 bp, Homo sapiens; identical to SEQ ID NO: 201181
  chr7:128579008-128579063
  hyper

SEQ ID NO: 397778 - DNA, 318 bp, Homo sapiens; identical to SEQ ID NO: 233218
  chr7:128695028-128695346
  hyper

SEQ ID NO: 397779 - DNA, 52 bp, Homo sapiens; identical to SEQ ID NO: 201182
  chr7:128784405-128784457
  hyper

SEQ ID NO: 397780 - DNA, 119 bp, Homo sapiens; identical to SEQ ID NO: 233227
  chr7:129709789-129709908
  hyper

SEQ ID NO: 397781 - DNA, 37 bp, Homo sapiens; identical to SEQ ID NO: 233232
  chr7:130791783-130791820
  hyper

SEQ ID NO: 397782 - DNA, 282 bp, Homo sapiens; identical to SEQ ID NO: 233233
  chr7:130794764-130795046
  hyper

SEQ ID NO: 397783 - DNA, 95 bp, Homo sapiens; identical to SEQ ID NO: 233234
  chr7:131012269-131012364
  hyper

SEQ ID NO: 397784 - DNA, 38 bp, Homo sapiens; identical to SEQ ID NO: 285434
  chr7:132262442-132262480
  hyper

SEQ ID NO: 397785 - DNA, 59 bp, Homo sapiens; identical to SEQ ID NO: 201191
  chr7:132340334-132340393
  hyper

SEQ ID NO: 397786 - DNA, 121 bp, Homo sapiens; identical to SEQ ID NO: 233246
  chr7:134001194-134001315
  hyper

SEQ ID NO: 397787 - DNA, 57 bp, Homo sapiens; identical to SEQ ID NO: 233257
  chr7:137685726-137685783
  hyper

SEQ ID NO: 397788 - DNA, 100 bp, Homo sapiens; identical to SEQ ID NO: 201199
  chr7:138665269-138665369
  hyper

SEQ ID NO: 397789 - DNA, 176 bp, Homo sapiens; identical to SEQ ID NO: 233260
  chr7:138666618-138666794
  hyper

SEQ ID NO: 397790 - DNA, 115 bp, Homo sapiens; identical to SEQ ID NO: 233261
  chr7:138794419-138794534
  hyper

SEQ ID NO: 397791 - DNA, 32 bp, Homo sapiens; identical to SEQ ID NO: 233262
  chr7:138818580-138818612
  hyper

SEQ ID NO: 397792 - DNA, 437 bp, Homo sapiens; identical to SEQ ID NO: 223234
  chr7:139478051-139478488
  hyper

SEQ ID NO: 397793 - DNA, 179 bp, Homo sapiens; identical to SEQ ID NO: 115791
  chr7:140098296-140098475
  hyper

SEQ ID NO: 397794 - DNA, 86 bp, Homo sapiens; identical to SEQ ID NO: 233271
  chr7:140373221-140373307
  hyper

SEQ ID NO: 397795 - DNA, 37 bp, Homo sapiens; identical to SEQ ID NO: 233272
  chr7:140624448-140624485
  hyper

SEQ ID NO: 397796 - DNA, 287 bp, Homo sapiens; identical to SEQ ID NO: 233273
  chr7:140714398-140714685
  hyper

SEQ ID NO: 397797 - DNA, 144 bp, Homo sapiens; identical to SEQ ID NO: 285478
  chr7:143579479-143579623
  hyper

SEQ ID NO: 397798 - DNA, 195 bp, Homo sapiens; identical to SEQ ID NO: 285479
  chr7:143580095-143580290
  hyper

SEQ ID NO: 397799 - DNA, 308 bp, Homo sapiens; identical to SEQ ID NO: 233284
  chr7:143599064-143599372
  hyper

SEQ ID NO: 397800 - DNA, 257 bp, Homo sapiens; identical to SEQ ID NO: 223241
  chr7:144100839-144101096
  hyper

SEQ ID NO: 397801 - DNA, 152 bp, Homo sapiens; identical to SEQ ID NO: 201215
  chr7:145981901-145982053
  hyper

SEQ ID NO: 397802 - DNA, 71 bp, Homo sapiens; identical to SEQ ID NO: 201219
  chr7:148508741-148508812
  hyper

SEQ ID NO: 397803 - DNA, 184 bp, Homo sapiens; identical to SEQ ID NO: 201220
  chr7:148511050-148511234
  hyper

SEQ ID NO: 397804 - DNA, 107 bp, Homo sapiens; identical to SEQ ID NO: 201221
  chr7:148512014-148512121
  hyper

SEQ ID NO: 397805 - DNA, 34 bp, Homo sapiens; identical to SEQ ID NO: 201222
  chr7:148513818-148513852
  hyper

SEQ ID NO: 397806 - DNA, 76 bp, Homo sapiens; identical to SEQ ID NO: 201224
  chr7:148515086-148515162
  hyper

SEQ ID NO: 397807 - DNA, 119 bp, Homo sapiens; identical to SEQ ID NO: 201226
  chr7:148526816-148526935
  hyper

SEQ ID NO: 397808 - DNA, 240 bp, Homo sapiens; identical to SEQ ID NO: 233290
  chr7:148762866-148763106
  hyper

SEQ ID NO: 397809 - DNA, 53 bp, Homo sapiens; identical to SEQ ID NO: 233293
  chr7:148936558-148936611
  hyper

SEQ ID NO: 397810 - DNA, 266 bp, Homo sapiens; identical to SEQ ID NO: 285502
  chr7:148959355-148959621
  hyper

SEQ ID NO: 397811 - DNA, 358 bp, Homo sapiens; identical to SEQ ID NO: 201229
  chr7:148982135-148982493
  hyper

SEQ ID NO: 397812 - DNA, 202 bp, Homo sapiens; identical to SEQ ID NO: 233297
  chr7:149157616-149157818
  hyper

SEQ ID NO: 397813 - DNA, 185 bp, Homo sapiens; identical to SEQ ID NO: 233299
  chr7:149535232-149535417
  hyper

SEQ ID NO: 397814 - DNA, 105 bp, Homo sapiens; identical to SEQ ID NO: 223258
  chr7:150497095-150497200
  hyper

SEQ ID NO: 397815 - DNA, 144 bp, Homo sapiens; identical to SEQ ID NO: 233310
  chr7:150498059-150498203
  hyper

SEQ ID NO: 397816 - DNA, 165 bp, Homo sapiens; identical to SEQ ID NO: 233319
  chr7:150754922-150755087
  hyper

SEQ ID NO: 397817 - DNA, 152 bp, Homo sapiens; identical to SEQ ID NO: 233321
  chr7:150757073-150757225
  hyper

SEQ ID NO: 397818 - DNA, 115 bp, Homo sapiens; identical to SEQ ID NO: 201239
  chr7:150778108-150778223
  hyper

SEQ ID NO: 397819 - DNA, 588 bp, Homo sapiens; identical to SEQ ID NO: 285530
  chr7:150864924-150865512
  hyper

SEQ ID NO: 397820 - DNA, 33 bp, Homo sapiens; identical to SEQ ID NO: 201242
  chr7:150869804-150869837
  hyper

SEQ ID NO: 397821 - DNA, 252 bp, Homo sapiens; identical to SEQ ID NO: 233326
  chr7:150929281-150929533
  hyper

SEQ ID NO: 397822 - DNA, 64 bp, Homo sapiens; identical to SEQ ID NO: 223266
  chr7:150948746-150948810
  hyper

SEQ ID NO: 397823 - DNA, 111 bp, Homo sapiens; identical to SEQ ID NO: 233327
  chr7:150974357-150974468
  hyper

SEQ ID NO: 397824 - DNA, 152 bp, Homo sapiens; identical to SEQ ID NO: 223269
  chr7:151217153-151217305
  hyper

SEQ ID NO: 397825 - DNA, 168 bp, Homo sapiens; identical to SEQ ID NO: 233336
  chr7:152161044-152161212
  hyper

SEQ ID NO: 397826 - DNA, 159 bp, Homo sapiens; identical to SEQ ID NO: 233337
  chr7:152161898-152162057
  hyper

SEQ ID NO: 397827 - DNA, 119 bp, Homo sapiens; identical to SEQ ID NO: 233338
  chr7:152373449-152373568
  hyper

SEQ ID NO: 397828 - DNA, 94 bp, Homo sapiens; identical to SEQ ID NO: 233341
  chr7:152890309-152890403
  hyper

SEQ ID NO: 397829 - DNA, 65 bp, Homo sapiens; identical to SEQ ID NO: 201249
  chr7:154705761-154705826
  hyper

SEQ ID NO: 397830 - DNA, 208 bp, Homo sapiens; identical to SEQ ID NO: 201250
  chr7:155168321-155168529
  hyper

SEQ ID NO: 397831 - DNA, 35 bp, Homo sapiens; identical to SEQ ID NO: 201251
  chr7:155170943-155170978
  hyper

SEQ ID NO: 397832 - DNA, 62 bp, Homo sapiens; identical to SEQ ID NO: 201256
  chr7:155264017-155264079
  hyper

SEQ ID NO: 397833 - DNA, 290 bp, Homo sapiens; identical to SEQ ID NO: 201257
  chr7:155264356-155264646
  hyper

SEQ ID NO: 397834 - DNA, 151 bp, Homo sapiens; identical to SEQ ID NO: 285563
  chr7:155283784-155283935
  hyper

SEQ ID NO: 397835 - DNA, 140 bp, Homo sapiens; identical to SEQ ID NO: 233375
  chr7:155437084-155437224
  hyper

SEQ ID NO: 397836 - DNA, 57 bp, Homo sapiens; identical to SEQ ID NO: 285567
  chr7:155580355-155580412
  hyper

SEQ ID NO: 397837 - DNA, 46 bp, Homo sapiens; identical to SEQ ID NO: 233382
  chr7:156742210-156742256
  hyper

SEQ ID NO: 397838 - DNA, 338 bp, Homo sapiens; identical to SEQ ID NO: 201263
  chr7:156792492-156792830
  hyper

SEQ ID NO: 397839 - DNA, 972 bp, Homo sapiens
  chr7:156802750-156803722
  hyper
gcccaggaagcccggcttgggcagcagcgcgcagtgcgcggccagcaggcgcggcggcgacgggctctcggcgcgcaggcggtcggcgggcgcagccggcggctccgaggacgcggggctgcagctgccgctagtcccgccgctcgccccgccgccgccgccgccacctccggtgccagatgcggcggcggcgagcgacgtgaccaaggccagcggcgcgctctgcgcagaggcggctcgtggggggtccaccgccagcagggcgtcgatgcggaaatttttggatttttccatcggctcgtttggggctggcgctcagggcccggtggcgggcgacgcggccgtgtgcgggctcgcggagtcagtgcgtgcggtgcaagcccgggggctcggtattgttatggtggttatttgccaataatcaaagtcgccgccggaaactcagccgagggtgaccatggtcccggcgcctcctccgtgcgggccccgccccgggccgcgctcgcacaaactcccacgcgagtgcttccccgcgtccgggcccgggagcccggttctttgcgctgcagccctcaggcgaccgcgcggaggccgctgccgccgtggtggggacccgcgcccctccgcgcacttgaagctcagcgcggcttccgattggcgcgcgcagcgggggcccggggagggccgcgggctccgccattggccgaggggcgcacctgtcaccgtcccggccgcccgccgccccgcccccgcgccgcgaggtcctaagcagcccgggctgttgcgcggcgctggcgggcggggacaccaacggggagtggatactccgaggctcaacctggggcctctgcccgccctcccctgggtgcggagccggacggcgggcactggcaacccccgggcccctggagagccccgcggcggcccaagacccgctcccgagacacgtgggcccctccggacttggttggt

SEQ ID NO: 397840 - DNA, 818 bp, Homo sapiens; identical to SEQ ID NO: 285585
  chr7:156803796-156804614
  hyper

SEQ ID NO: 397841 - DNA, 92 bp, Homo sapiens; identical to SEQ ID NO: 233398
  chr7:156815538-156815630
  hyper

SEQ ID NO: 397842 - DNA, 76 bp, Homo sapiens; identical to SEQ ID NO: 233400
  chr7:157129624-157129700
  hyper

SEQ ID NO: 397843 - DNA, 333 bp, Homo sapiens; identical to SEQ ID NO: 201270
  chr7:157130634-157130967
  hyper

SEQ ID NO: 397844 - DNA, 45 bp, Homo sapiens; identical to SEQ ID NO: 285597
  chr7:157486671-157486716
  hyper

SEQ ID NO: 397845 - DNA, 76 bp, Homo sapiens; identical to SEQ ID NO: 233411
  chr8:356768-356844
  hyper

SEQ ID NO: 397846 - DNA, 46 bp, Homo sapiens; identical to SEQ ID NO: 201277
  chr8:494135-494181
  hyper

SEQ ID NO: 397847 - DNA, 93 bp, Homo sapiens; identical to SEQ ID NO: 285610
  chr8:495072-495165
  hyper

SEQ ID NO: 397848 - DNA, 72 bp, Homo sapiens; identical to SEQ ID NO: 285630
  chr8:8559447-8559519
  hyper

SEQ ID NO: 397849 - DNA, 110 bp, Homo sapiens; identical to SEQ ID NO: 285631
  chr8:8559542-8559652
  hyper

SEQ ID NO: 397850 - DNA, 167 bp, Homo sapiens; identical to SEQ ID NO: 223304
  chr8:8750284-8750451
  hyper

SEQ ID NO: 397851 - DNA, 139 bp, Homo sapiens; identical to SEQ ID NO: 223305
  chr8:8750520-8750659
  hyper

SEQ ID NO: 397852 - DNA, 462 bp, Homo sapiens; identical to SEQ ID NO: 223306
  chr8:8820810-8821272
  hyper

SEQ ID NO: 397853 - DNA, 33 bp, Homo sapiens; identical to SEQ ID NO: 285635
  chr8:9756515-9756548
  hyper

SEQ ID NO: 397854 - DNA, 54 bp, Homo sapiens; identical to SEQ ID NO: 233437
  chr8:10872634-10872688
  hyper

SEQ ID NO: 397855 - DNA, 124 bp, Homo sapiens; identical to SEQ ID NO: 285649
  chr8:11206068-11206192
  hyper

SEQ ID NO: 397856 - DNA, 174 bp, Homo sapiens; identical to SEQ ID NO: 201300
  chr8:11536631-11536805
  hyper

SEQ ID NO: 397857 - DNA, 200 bp, Homo sapiens; identical to SEQ ID NO: 388523
  chr8:11537283-11537483
  hyper

SEQ ID NO: 397858 - DNA, 146 bp, Homo sapiens; identical to SEQ ID NO: 233447
  chr8:11539330-11539476
  hyper

SEQ ID NO: 397859 - DNA, 290 bp, Homo sapiens; identical to SEQ ID NO: 285661
  chr8:11557848-11558138
  hyper

SEQ ID NO: 397860 - DNA, 37 bp, Homo sapiens; identical to SEQ ID NO: 45110
  chr8:11559706-11559743
  hyper

SEQ ID NO: 397861 - DNA, 152 bp, Homo sapiens; identical to SEQ ID NO: 233456
  chr8:11801273-11801425
  hyper

SEQ ID NO: 397862 - DNA, 208 bp, Homo sapiens
  chr8:12990178-12990386
  hyper
gaccgatccggagcccgcctggtgcgctggcccgcggtccccaggcaaaaggtaatcaagagtcactcctccaaaattcaaactccctccccaaactgcgagtcctgctatccccacaccacctccaagaaaatccggagactctgcagaaagcgtttaaagagcacagaacaggcaccgacttgacaaggcggggtgacactttctc

SEQ ID NO: 397863 - DNA, 68 bp, Homo sapiens; identical to SEQ ID NO: 201312
  chr8:12990431-12990499
  hyper

SEQ ID NO: 397864 - DNA, 157 bp, Homo sapiens; identical to SEQ ID NO: 285673
  chr8:12991337-12991494
  hyper

SEQ ID NO: 397865 - DNA, 43 bp, Homo sapiens; identical to SEQ ID NO: 233460
  chr8:13424066-13424109
  hyper

SEQ ID NO: 397866 - DNA, 220 bp, Homo sapiens; identical to SEQ ID NO: 201314
  chr8:15095136-15095356
  hyper

SEQ ID NO: 397867 - DNA, 226 bp, Homo sapiens; identical to SEQ ID NO: 285677
  chr8:15397991-15398217
  hyper

SEQ ID NO: 397868 - DNA, 128 bp, Homo sapiens; identical to SEQ ID NO: 201317
  chr8:17013473-17013601
  hyper

SEQ ID NO: 397869 - DNA, 363 bp, Homo sapiens; identical to SEQ ID NO: 388527
  chr8:17434563-17434926
  hyper

SEQ ID NO: 397870 - DNA, 373 bp, Homo sapiens; identical to SEQ ID NO: 233471
  chr8:17942225-17942598
  hyper

SEQ ID NO: 397871 - DNA, 70 bp, Homo sapiens; identical to SEQ ID NO: 233475
  chr8:19125228-19125298
  hyper

SEQ ID NO: 397872 - DNA, 56 bp, Homo sapiens; identical to SEQ ID NO: 285693
  chr8:19615264-19615320
  hyper

SEQ ID NO: 397873 - DNA, 58 bp, Homo sapiens
  chr8:19798019-19798077
  hyper
atgtctcagacctgtccgcaatggaggcagcctgcttaattcgaacctcgattcagta

SEQ ID NO: 397874 - DNA, 241 bp, Homo sapiens; identical to SEQ ID NO: 233483
  chr8:21776837-21777078
  hyper

SEQ ID NO: 397875 - DNA, 363 bp, Homo sapiens; identical to SEQ ID NO: 233484
  chr8:21779567-21779930
  hyper

SEQ ID NO: 397876 - DNA, 82 bp, Homo sapiens; identical to SEQ ID NO: 285701
  chr8:21868699-21868781
  hyper

SEQ ID NO: 397877 - DNA, 124 bp, Homo sapiens; identical to SEQ ID NO: 201326
  chr8:21906319-21906443
  hyper

SEQ ID NO: 397878 - DNA, 100 bp, Homo sapiens; identical to SEQ ID NO: 201327
  chr8:21987761-21987861
  hyper

SEQ ID NO: 397879 - DNA, 337 bp, Homo sapiens; identical to SEQ ID NO: 201328
  chr8:21988075-21988412
  hyper

SEQ ID NO: 397880 - DNA, 206 bp, Homo sapiens; identical to SEQ ID NO: 201329
  chr8:21988468-21988674
  hyper

SEQ ID NO: 397881 - DNA, 328 bp, Homo sapiens; identical to SEQ ID NO: 233488
  chr8:22102411-22102739
  hyper

SEQ ID NO: 397882 - DNA, 451 bp, Homo sapiens; identical to SEQ ID NO: 233489
  chr8:22224959-22225410
  hyper

SEQ ID NO: 397883 - DNA, 78 bp, Homo sapiens; identical to SEQ ID NO: 384230
  chr8:22408681-22408759
  hyper

SEQ ID NO: 397884 - DNA, 44 bp, Homo sapiens; identical to SEQ ID NO: 388535
  chr8:22409076-22409120
  hyper

SEQ ID NO: 397885 - DNA, 70 bp, Homo sapiens; identical to SEQ ID NO: 201331
  chr8:22419405-22419475
  hyper

SEQ ID NO: 397886 - DNA, 217 bp, Homo sapiens; identical to SEQ ID NO: 223331
  chr8:22550331-22550548
  hyper

SEQ ID NO: 397887 - DNA, 568 bp, Homo sapiens; identical to SEQ ID NO: 285723
  chr8:22722724-22723292
  hyper

SEQ ID NO: 397888 - DNA, 309 bp, Homo sapiens; identical to SEQ ID NO: 223333
  chr8:22925472-22925781
  hyper

SEQ ID NO: 397889 - DNA, 201 bp, Homo sapiens; identical to SEQ ID NO: 285730
  chr8:23261046-23261247
  hyper

SEQ ID NO: 397890 - DNA, 76 bp, Homo sapiens; identical to SEQ ID NO: 285731
  chr8:23261271-23261347
  hyper

SEQ ID NO: 397891 - DNA, 144 bp, Homo sapiens; identical to SEQ ID NO: 233506
  chr8:23386286-23386430
  hyper

SEQ ID NO: 397892 - DNA, 44 bp, Homo sapiens; identical to SEQ ID NO: 201339
  chr8:23539860-23539904
  hyper

SEQ ID NO: 397893 - DNA, 47 bp, Homo sapiens; identical to SEQ ID NO: 233508
  chr8:23540842-23540889
  hyper

SEQ ID NO: 397894 - DNA, 60 bp, Homo sapiens; identical to SEQ ID NO: 201342
  chr8:23572273-23572333
  hyper

SEQ ID NO: 397895 - DNA, 121 bp, Homo sapiens; identical to SEQ ID NO: 285741
  chr8:24272711-24272832
  hyper

SEQ ID NO: 397896 - DNA, 300 bp, Homo sapiens
  chr8:24772304-24772604
  hyper
ggtgcgcggcaccaaggagtccctggagcggcagctcagcgacatcgaggagcgccacaaccacgacctcagcagctaccaggtaggaaccgcggctgcgcggccagcctgcgccagcgccagcgccgcgcgcccccgacacttgggctcgtgcccaggcgccctctccgccgcgctccctggtggccgctcgctagagcacgcgcgccgcagacctagggtatttgcggatcagcgtcctcgcccatctcatcctccacactccgcccccacccacctgccccagctgctaagggtctt

SEQ ID NO: 397897 - DNA, 477 bp, Homo sapiens; identical to SEQ ID NO: 285743
  chr8:24772741-24773218
  hyper

SEQ ID NO: 397898 - DNA, 121 bp, Homo sapiens; identical to SEQ ID NO: 233525
  chr8:25316378-25316499
  hyper

SEQ ID NO: 397899 - DNA, 636 bp, Homo sapiens; identical to SEQ ID NO: 233528
  chr8:25899444-25900080
  hyper

SEQ ID NO: 397900 - DNA, 144 bp, Homo sapiens; identical to SEQ ID NO: 285758
  chr8:25902185-25902329
  hyper

SEQ ID NO: 397901 - DNA, 155 bp, Homo sapiens; identical to SEQ ID NO: 285762
  chr8:25905838-25905993
  hyper

SEQ ID NO: 397902 - DNA, 231 bp, Homo sapiens; identical to SEQ ID NO: 285763
  chr8:25906743-25906974
  hyper

SEQ ID NO: 397903 - DNA, 50 bp, Homo sapiens; identical to SEQ ID NO: 201356
  chr8:26370013-26370063
  hyper

SEQ ID NO: 397904 - DNA, 166 bp, Homo sapiens; identical to SEQ ID NO: 201357
  chr8:26370101-26370267
  hyper

SEQ ID NO: 397905 - DNA, 205 bp, Homo sapiens; identical to SEQ ID NO: 201359
  chr8:26371212-26371417
  hyper

SEQ ID NO: 397906 - DNA, 270 bp, Homo sapiens; identical to SEQ ID NO: 201360
  chr8:26372150-26372420
  hyper

SEQ ID NO: 397907 - DNA, 64 bp, Homo sapiens; identical to SEQ ID NO: 223345
  chr8:26435020-26435084
  hyper

SEQ ID NO: 397908 - DNA, 38 bp, Homo sapiens; identical to SEQ ID NO: 285784
  chr8:27449813-27449851
  hyper

SEQ ID NO: 397909 - DNA, 181 bp, Homo sapiens; identical to SEQ ID NO: 285785
  chr8:27449881-27450062
  hyper

SEQ ID NO: 397910 - DNA, 90 bp, Homo sapiens; identical to SEQ ID NO: 233553
  chr8:27472371-27472461
  hyper

SEQ ID NO: 397911 - DNA, 31 bp, Homo sapiens; identical to SEQ ID NO: 233555
  chr8:27950284-27950315
  hyper

SEQ ID NO: 397912 - DNA, 226 bp, Homo sapiens; identical to SEQ ID NO: 285789
  chr8:28242659-28242885
  hyper

SEQ ID NO: 397913 - DNA, 113 bp, Homo sapiens; identical to SEQ ID NO: 233558
  chr8:28352545-28352658
  hyper

SEQ ID NO: 397914 - DNA, 126 bp, Homo sapiens; identical to SEQ ID NO: 201369
  chr8:28560085-28560211
  hyper

SEQ ID NO: 397915 - DNA, 562 bp, Homo sapiens; identical to SEQ ID NO: 233560
  chr8:28747285-28747847
  hyper

SEQ ID NO: 397916 - DNA, 288 bp, Homo sapiens; identical to SEQ ID NO: 223352
  chr8:28748909-28749197
  hyper

SEQ ID NO: 397917 - DNA, 62 bp, Homo sapiens; identical to SEQ ID NO: 201371
  chr8:29120734-29120796
  hyper

SEQ ID NO: 397918 - DNA, 84 bp, Homo sapiens; identical to SEQ ID NO: 201375
  chr8:30241417-30241501
  hyper

SEQ ID NO: 397919 - DNA, 1018 bp, Homo sapiens; identical to SEQ ID NO: 201376
  chr8:30241612-30242630
  hyper

SEQ ID NO: 397920 - DNA, 361 bp, Homo sapiens; identical to SEQ ID NO: 201377
  chr8:30242697-30243058
  hyper

SEQ ID NO: 397921 - DNA, 154 bp, Homo sapiens
  chr8:30243175-30243329
  hyper
taatagataactcatcagccacattcttctctgctgagtcaaagaccccgagcctgggcggtgaacgcttgtgattttaggggccgtgcagctgaggggagcagagtaagagggttaaaaacgcagcaattcaccaaatgctcatcgagggtat

SEQ ID NO: 397922 - DNA, 385 bp, Homo sapiens; identical to SEQ ID NO: 233572
  chr8:30601508-30601893
  hyper

SEQ ID NO: 397923 - DNA, 34 bp, Homo sapiens; identical to SEQ ID NO: 285808
  chr8:30890058-30890092
  hyper

SEQ ID NO: 397924 - DNA, 274 bp, Homo sapiens; identical to SEQ ID NO: 201381
  chr8:31497152-31497426
  hyper

SEQ ID NO: 397925 - DNA, 43 bp, Homo sapiens; identical to SEQ ID NO: 233580
  chr8:33330280-33330323
  hyper

SEQ ID NO: 397926 - DNA, 35 bp, Homo sapiens; identical to SEQ ID NO: 285817
  chr8:35093916-35093951
  hyper

SEQ ID NO: 397927 - DNA, 157 bp, Homo sapiens; identical to SEQ ID NO: 285818
  chr8:37552160-37552317
  hyper

SEQ ID NO: 397928 - DNA, 91 bp, Homo sapiens
  chr8:37552811-37552902
  hyper
ggcggcctctgggagaggcttgaactccagcgtcccagagcccgcgccgtgcgatccctcccaccccaccccaccccaccccaccccacct

SEQ ID NO: 397929 - DNA, 62 bp, Homo sapiens; identical to SEQ ID NO: 233594
  chr8:37963270-37963332
  hyper

SEQ ID NO: 397930 - DNA, 42 bp, Homo sapiens; identical to SEQ ID NO: 233596
  chr8:38034153-38034195
  hyper

SEQ ID NO: 397931 - DNA, 43 bp, Homo sapiens; identical to SEQ ID NO: 201393
  chr8:38089777-38089820
  hyper

SEQ ID NO: 397932 - DNA, 103 bp, Homo sapiens; identical to SEQ ID NO: 285838
  chr8:38615060-38615163
  hyper

SEQ ID NO: 397933 - DNA, 124 bp, Homo sapiens; identical to SEQ ID NO: 233605
  chr8:38645089-38645213
  hyper

SEQ ID NO: 397934 - DNA, 140 bp, Homo sapiens; identical to SEQ ID NO: 233608
  chr8:40809174-40809314
  hyper

SEQ ID NO: 397935 - DNA, 264 bp, Homo sapiens; identical to SEQ ID NO: 201397
  chr8:41168154-41168418
  hyper

SEQ ID NO: 397936 - DNA, 39 bp, Homo sapiens; identical to SEQ ID NO: 233613
  chr8:41347781-41347820
  hyper

SEQ ID NO: 397937 - DNA, 114 bp, Homo sapiens; identical to SEQ ID NO: 233620
  chr8:42010325-42010439
  hyper

SEQ ID NO: 397938 - DNA, 34 bp, Homo sapiens; identical to SEQ ID NO: 201399
  chr8:42040329-42040363
  hyper

SEQ ID NO: 397939 - DNA, 380 bp, Homo sapiens; identical to SEQ ID NO: 223369
  chr8:42996735-42997115
  hyper

SEQ ID NO: 397940 - DNA, 60 bp, Homo sapiens; identical to SEQ ID NO: 285853
  chr8:48100697-48100757
  hyper

SEQ ID NO: 397941 - DNA, 96 bp, Homo sapiens; identical to SEQ ID NO: 116566
  chr8:48100826-48100922
  hyper

SEQ ID NO: 397942 - DNA, 76 bp, Homo sapiens; identical to SEQ ID NO: 201400
  chr8:48604790-48604866
  hyper

SEQ ID NO: 397943 - DNA, 662 bp, Homo sapiens
  chr8:48649775-48650437
  hyper
ggcggctctggctgcgccagggcagggcgcgctccgctccgggccgtcgggtctgaggtatgggtcgttgctgagtctctcccgccccggccgcgcgttaccggcagtctgctgtcccggcggccggcaggaagggcgggctgggcagctgcttgaagaactgccggaggccggccaggtcccgcgtgagctgctccacgcgctggtgcagcttctcgttctcagccgacagctccaccaacttctgctgcatctcctggttgcgccgcttggccttgtcgcggctcttgcgcacggcgatgttgttgcgctcgcgccgctgccggtactcggggctgccgcggtccgggcccctcttgccggcgctcttctcccgggcggggccgggcgcgggggtctgcctggggctgctgcgcggcggctccggcgacgtgggcggggtgggctgccctgcggccgccaagctcaccacggtctgtgcgcacgcggccacctgcgcgggcaacagcgagccgggcgcgtcgccgtcgccccagtcgggctcgcgcttgagcaggcggggagcggcagggcccgggcccaaggggcgcgcggggccgccgggaagaagctccaggggccccgcgccgcccgccttgtgattgctgttgaagaggtcggcg

SEQ ID NO: 397944 - DNA, 240 bp, Homo sapiens; identical to SEQ ID NO: 223372
  chr8:48650853-48651093
  hyper

SEQ ID NO: 397945 - DNA, 50 bp, Homo sapiens; identical to SEQ ID NO: 201403
  chr8:48872787-48872837
  hyper

SEQ ID NO: 397946 - DNA, 50 bp, Homo sapiens; identical to SEQ ID NO: 233631
  chr8:49292489-49292539
  hyper

SEQ ID NO: 397947 - DNA, 68 bp, Homo sapiens; identical to SEQ ID NO: 285862
  chr8:49647749-49647817
  hyper

SEQ ID NO: 397948 - DNA, 68 bp, Homo sapiens; identical to SEQ ID NO: 285863
  chr8:49647853-49647921
  hyper

SEQ ID NO: 397949 - DNA, 86 bp, Homo sapiens; identical to SEQ ID NO: 233641
  chr8:52811697-52811783
  hyper

SEQ ID NO: 397950 - DNA, 75 bp, Homo sapiens; identical to SEQ ID NO: 201410
  chr8:54754915-54754990
  hyper

SEQ ID NO: 397951 - DNA, 293 bp, Homo sapiens; identical to SEQ ID NO: 233650
  chr8:54755405-54755698
  hyper

SEQ ID NO: 397952 - DNA, 124 bp, Homo sapiens; identical to SEQ ID NO: 233664
  chr8:56987181-56987305
  hyper

SEQ ID NO: 397953 - DNA, 39 bp, Homo sapiens; identical to SEQ ID NO: 285882
  chr8:57025552-57025591
  hyper

SEQ ID NO: 397954 - DNA, 91 bp, Homo sapiens; identical to SEQ ID NO: 201417
  chr8:57906841-57906932
  hyper

SEQ ID NO: 397955 - DNA, 1143 bp, Homo sapiens; identical to SEQ ID NO: 285898
  chr8:62626290-62627433
  hyper

SEQ ID NO: 397956 - DNA, 255 bp, Homo sapiens; identical to SEQ ID NO: 233682
  chr8:63951628-63951883
  hyper

SEQ ID NO: 397957 - DNA, 185 bp, Homo sapiens; identical to SEQ ID NO: 201430
  chr8:63998150-63998335
  hyper

SEQ ID NO: 397958 - DNA, 314 bp, Homo sapiens; identical to SEQ ID NO: 285901
  chr8:63998568-63998882
  hyper

SEQ ID NO: 397959 - DNA, 72 bp, Homo sapiens; identical to SEQ ID NO: 384250
  chr8:65283690-65283762
  hyper

SEQ ID NO: 397960 - DNA, 157 bp, Homo sapiens; identical to SEQ ID NO: 285903
  chr8:65285899-65286056
  hyper

SEQ ID NO: 397961 - DNA, 93 bp, Homo sapiens; identical to SEQ ID NO: 388576
  chr8:65490370-65490463
  hyper

SEQ ID NO: 397962 - DNA, 216 bp, Homo sapiens; identical to SEQ ID NO: 285907
  chr8:65490493-65490709
  hyper

SEQ ID NO: 397963 - DNA, 67 bp, Homo sapiens; identical to SEQ ID NO: 45459
  chr8:65490762-65490829
  hyper

SEQ ID NO: 397964 - DNA, 133 bp, Homo sapiens; identical to SEQ ID NO: 116701
  chr8:65491294-65491427
  hyper

SEQ ID NO: 397965 - DNA, 183 bp, Homo sapiens; identical to SEQ ID NO: 233703
  chr8:66546065-66546248
  hyper

SEQ ID NO: 397966 - DNA, 162 bp, Homo sapiens; identical to SEQ ID NO: 233704
  chr8:66546468-66546630
  hyper

SEQ ID NO: 397967 - DNA, 42 bp, Homo sapiens; identical to SEQ ID NO: 285925
  chr8:67090411-67090453
  hyper

SEQ ID NO: 397968 - DNA, 43 bp, Homo sapiens; identical to SEQ ID NO: 201442
  chr8:67837266-67837309
  hyper

SEQ ID NO: 397969 - DNA, 221 bp, Homo sapiens; identical to SEQ ID NO: 116746
  chr8:67974225-67974446
  hyper

SEQ ID NO: 397970 - DNA, 143 bp, Homo sapiens; identical to SEQ ID NO: 233718
  chr8:68256145-68256288
  hyper

SEQ ID NO: 397971 - DNA, 45 bp, Homo sapiens; identical to SEQ ID NO: 201443
  chr8:68863998-68864043
  hyper

SEQ ID NO: 397972 - DNA, 60 bp, Homo sapiens; identical to SEQ ID NO: 201444
  chr8:68864119-68864179
  hyper

SEQ ID NO: 397973 - DNA, 276 bp, Homo sapiens; identical to SEQ ID NO: 201445
  chr8:68864195-68864471
  hyper

SEQ ID NO: 397974 - DNA, 318 bp, Homo sapiens; identical to SEQ ID NO: 116751
  chr8:68864942-68865260
  hyper

SEQ ID NO: 397975 - DNA, 73 bp, Homo sapiens; identical to SEQ ID NO: 285943
  chr8:70945214-70945287
  hyper

SEQ ID NO: 397976 - DNA, 44 bp, Homo sapiens; identical to SEQ ID NO: 201454
  chr8:71315999-71316043
  hyper

SEQ ID NO: 397977 - DNA, 396 bp, Homo sapiens; identical to SEQ ID NO: 233733
  chr8:72466618-72467014
  hyper

SEQ ID NO: 397978 - DNA, 77 bp, Homo sapiens; identical to SEQ ID NO: 201455
  chr8:72470259-72470336
  hyper

SEQ ID NO: 397979 - DNA, 218 bp, Homo sapiens; identical to SEQ ID NO: 285950
  chr8:72470835-72471053
  hyper

SEQ ID NO: 397980 - DNA, 33 bp, Homo sapiens; identical to SEQ ID NO: 285951
  chr8:72471083-72471116
  hyper

SEQ ID NO: 397981 - DNA, 37 bp, Homo sapiens; identical to SEQ ID NO: 285952
  chr8:72471195-72471232
  hyper

SEQ ID NO: 397982 - DNA, 209 bp, Homo sapiens; identical to SEQ ID NO: 201458
  chr8:72917126-72917335
  hyper

SEQ ID NO: 397983 - DNA, 164 bp, Homo sapiens; identical to SEQ ID NO: 201459
  chr8:72917515-72917679
  hyper

SEQ ID NO: 397984 - DNA, 96 bp, Homo sapiens; identical to SEQ ID NO: 201460
  chr8:72917709-72917805
  hyper

SEQ ID NO: 397985 - DNA, 93 bp, Homo sapiens; identical to SEQ ID NO: 285963
  chr8:73450590-73450683
  hyper

SEQ ID NO: 397986 - DNA, 165 bp, Homo sapiens; identical to SEQ ID NO: 201467
  chr8:74791235-74791400
  hyper

SEQ ID NO: 397987 - DNA, 244 bp, Homo sapiens; identical to SEQ ID NO: 233747
  chr8:74888248-74888492
  hyper

SEQ ID NO: 397988 - DNA, 92 bp, Homo sapiens; identical to SEQ ID NO: 201468
  chr8:75232542-75232634
  hyper

SEQ ID NO: 397989 - DNA, 267 bp, Homo sapiens; identical to SEQ ID NO: 201469
  chr8:75232671-75232938
  hyper

SEQ ID NO: 397990 - DNA, 628 bp, Homo sapiens; identical to SEQ ID NO: 201470
  chr8:75233098-75233726
  hyper

SEQ ID NO: 397991 - DNA, 280 bp, Homo sapiens; identical to SEQ ID NO: 233752
  chr8:76318950-76319230
  hyper

SEQ ID NO: 397992 - DNA, 419 bp, Homo sapiens; identical to SEQ ID NO: 201475
  chr8:76319437-76319856
  hyper

SEQ ID NO: 397993 - DNA, 316 bp, Homo sapiens; identical to SEQ ID NO: 201476
  chr8:76319920-76320236
  hyper

SEQ ID NO: 397994 - DNA, 85 bp, Homo sapiens; identical to SEQ ID NO: 285983
  chr8:76320292-76320377
  hyper

SEQ ID NO: 397995 - DNA, 44 bp, Homo sapiens; identical to SEQ ID NO: 285984
  chr8:77586691-77586735
  hyper

SEQ ID NO: 397996 - DNA, 556 bp, Homo sapiens; identical to SEQ ID NO: 233760
  chr8:79716726-79717282
  hyper

SEQ ID NO: 397997 - DNA, 231 bp, Homo sapiens; identical to SEQ ID NO: 285989
  chr8:80677512-80677743
  hyper

SEQ ID NO: 397998 - DNA, 235 bp, Homo sapiens; identical to SEQ ID NO: 285990
  chr8:80677781-80678016
  hyper

SEQ ID NO: 397999 - DNA, 289 bp, Homo sapiens; identical to SEQ ID NO: 116839
  chr8:80942045-80942334
  hyper

SEQ ID NO: 398000 - DNA, 287 bp, Homo sapiens
  chr8:81490259-81490546
  hyper
tcggaattccctccgcggccggcgcctcccctccgggggcctggctcgcagcccgtggggacgagggcctgcacgtccccgggggactgagggctgctctgggtgaggatgggaaggcgggtgccgcttccgagggctcctctcgccaagggagagagccctagacccgttcccggggcgctgctcttcccgggctggggtgggctgcagcggcggcaggacctcgccccctcccggccgcccgcacccccgcgcctcctcctagggcccggtgtcccacgggcctg

SEQ ID NO: 398001 - DNA, 178 bp, Homo sapiens; identical to SEQ ID NO: 223429
  chr8:81785467-81785645
  hyper

SEQ ID NO: 398002 - DNA, 74 bp, Homo sapiens; identical to SEQ ID NO: 233777
  chr8:82692881-82692955
  hyper

SEQ ID NO: 398003 - DNA, 132 bp, Homo sapiens; identical to SEQ ID NO: 201492
  chr8:85094384-85094516
  hyper

SEQ ID NO: 398004 - DNA, 118 bp, Homo sapiens; identical to SEQ ID NO: 45583
  chr8:85094922-85095040
  hyper

SEQ ID NO: 398005 - DNA, 250 bp, Homo sapiens; identical to SEQ ID NO: 286014
  chr8:86132759-86133009
  hyper

SEQ ID NO: 398006 - DNA, 57 bp, Homo sapiens; identical to SEQ ID NO: 116870
  chr8:86350926-86350983
  hyper

SEQ ID NO: 398007 - DNA, 219 bp, Homo sapiens; identical to SEQ ID NO: 233791
  chr8:90770542-90770761
  hyper

SEQ ID NO: 398008 - DNA, 153 bp, Homo sapiens; identical to SEQ ID NO: 233793
  chr8:90996934-90997087
  hyper

SEQ ID NO: 398009 - DNA, 198 bp, Homo sapiens; identical to SEQ ID NO: 233794
  chr8:91012993-91013191
  hyper

SEQ ID NO: 398010 - DNA, 238 bp, Homo sapiens; identical to SEQ ID NO: 233801
  chr8:92082264-92082502
  hyper

SEQ ID NO: 398011 - DNA, 82 bp, Homo sapiens; identical to SEQ ID NO: 286028
  chr8:93113864-93113946
  hyper

SEQ ID NO: 398012 - DNA, 242 bp, Homo sapiens; identical to SEQ ID NO: 201502
  chr8:93115140-93115382
  hyper

SEQ ID NO: 398013 - DNA, 209 bp, Homo sapiens; identical to SEQ ID NO: 201506
  chr8:94929137-94929346
  hyper

SEQ ID NO: 398014 - DNA, 163 bp, Homo sapiens; identical to SEQ ID NO: 201513
  chr8:95653853-95654016
  hyper

SEQ ID NO: 398015 - DNA, 416 bp, Homo sapiens; identical to SEQ ID NO: 286045
  chr8:95654337-95654753
  hyper

SEQ ID NO: 398016 - DNA, 52 bp, Homo sapiens; identical to SEQ ID NO: 233811
  chr8:95835299-95835351
  hyper

SEQ ID NO: 398017 - DNA, 454 bp, Homo sapiens; identical to SEQ ID NO: 233812
  chr8:96146528-96146982
  hyper

SEQ ID NO: 398018 - DNA, 73 bp, Homo sapiens; identical to SEQ ID NO: 286050
  chr8:97165551-97165624
  hyper

SEQ ID NO: 398019 - DNA, 33 bp, Homo sapiens; identical to SEQ ID NO: 233825
  chr8:97657330-97657363
  hyper

SEQ ID NO: 398020 - DNA, 191 bp, Homo sapiens; identical to SEQ ID NO: 233828
  chr8:98657023-98657214
  hyper

SEQ ID NO: 398021 - DNA, 54 bp, Homo sapiens; identical to SEQ ID NO: 223447
  chr8:99837477-99837531
  hyper

SEQ ID NO: 398022 - DNA, 274 bp, Homo sapiens
  chr8:99953787-99954061
  hyper
gagtgggagaggcgcgcggtccgagtgggagaggctgagagtcaactccagggaagtctgtgtctgacacctgctcgctgcttagctggcagagcctcctgggtgggccggggggcaggggcctgcgctgcgcgccccctcctcctccacctcctcctccgcgtttcctgtccctggccttcatcccggcctcccggggcgtaaacttgcagcggttggggttcaggcagccgctgctcgcgcgcccctcgtcagttagccatttccctgagag

SEQ ID NO: 398023 - DNA, 100 bp, Homo sapiens; identical to SEQ ID NO: 201533
  chr8:99963900-99964000
  hyper

SEQ ID NO: 398024 - DNA, 433 bp, Homo sapiens; identical to SEQ ID NO: 233851
  chr8:101170171-101170604
  hyper

SEQ ID NO: 398025 - DNA, 107 bp, Homo sapiens; identical to SEQ ID NO: 233852
  chr8:101322699-101322806
  hyper

SEQ ID NO: 398026 - DNA, 82 bp, Homo sapiens; identical to SEQ ID NO: 233853
  chr8:101572036-101572118
  hyper

SEQ ID NO: 398027 - DNA, 43 bp, Homo sapiens; identical to SEQ ID NO: 201539
  chr8:101920619-101920662
  hyper

SEQ ID NO: 398028 - DNA, 90 bp, Homo sapiens; identical to SEQ ID NO: 233860
  chr8:102038370-102038460
  hyper

SEQ ID NO: 398029 - DNA, 270 bp, Homo sapiens; identical to SEQ ID NO: 233864
  chr8:103136687-103136957
  hyper

SEQ ID NO: 398030 - DNA, 231 bp, Homo sapiens; identical to SEQ ID NO: 233865
  chr8:103424261-103424492
  hyper

SEQ ID NO: 398031 - DNA, 276 bp, Homo sapiens; identical to SEQ ID NO: 233866
  chr8:103667886-103668162
  hyper

SEQ ID NO: 398032 - DNA, 31 bp, Homo sapiens; identical to SEQ ID NO: 201547
  chr8:103876453-103876484
  hyper

SEQ ID NO: 398033 - DNA, 189 bp, Homo sapiens; identical to SEQ ID NO: 233869
  chr8:104033104-104033293
  hyper

SEQ ID NO: 398034 - DNA, 79 bp, Homo sapiens; identical to SEQ ID NO: 233873
  chr8:104427306-104427385
  hyper

SEQ ID NO: 398035 - DNA, 42 bp, Homo sapiens; identical to SEQ ID NO: 388611
  chr8:106331801-106331843
  hyper

SEQ ID NO: 398036 - DNA, 166 bp, Homo sapiens; identical to SEQ ID NO: 233885
  chr8:109260968-109261134
  hyper

SEQ ID NO: 398037 - DNA, 45 bp, Homo sapiens; identical to SEQ ID NO: 201564
  chr8:110704144-110704189
  hyper

SEQ ID NO: 398038 - DNA, 218 bp, Homo sapiens; identical to SEQ ID NO: 233898
  chr8:116680622-116680840
  hyper

SEQ ID NO: 398039 - DNA, 391 bp, Homo sapiens; identical to SEQ ID NO: 233900
  chr8:117767860-117768251
  hyper

SEQ ID NO: 398040 - DNA, 84 bp, Homo sapiens; identical to SEQ ID NO: 201572
  chr8:117861184-117861268
  hyper

SEQ ID NO: 398041 - DNA, 161 bp, Homo sapiens; identical to SEQ ID NO: 201573
  chr8:117862856-117863017
  hyper

SEQ ID NO: 398042 - DNA, 149 bp, Homo sapiens; identical to SEQ ID NO: 201574
  chr8:117864186-117864335
  hyper

SEQ ID NO: 398043 - DNA, 224 bp, Homo sapiens; identical to SEQ ID NO: 201576
  chr8:117866483-117866707
  hyper

SEQ ID NO: 398044 - DNA, 123 bp, Homo sapiens; identical to SEQ ID NO: 201577
  chr8:117868404-117868527
  hyper

SEQ ID NO: 398045 - DNA, 107 bp, Homo sapiens; identical to SEQ ID NO: 201580
  chr8:117870590-117870697
  hyper

SEQ ID NO: 398046 - DNA, 112 bp, Homo sapiens; identical to SEQ ID NO: 201581
  chr8:117874067-117874179
  hyper

SEQ ID NO: 398047 - DNA, 130 bp, Homo sapiens; identical to SEQ ID NO: 201582
  chr8:117875368-117875498
  hyper

SEQ ID NO: 398048 - DNA, 114 bp, Homo sapiens; identical to SEQ ID NO: 201584
  chr8:117886849-117886963
  hyper

SEQ ID NO: 398049 - DNA, 121 bp, Homo sapiens
  chr8:117887066-117887187
  hyper
cggcaggatgtttacggtcaaaatggtacctgtgcgcctgcgcagccagcccaagcccccccctccccccagaaggagcggcgcaggcgcaatgactatttccttttctttggaacccgcc

SEQ ID NO: 398050 - DNA, 175 bp, Homo sapiens; identical to SEQ ID NO: 233907
  chr8:120844818-120844993
  hyper

SEQ ID NO: 398051 - DNA, 117 bp, Homo sapiens; identical to SEQ ID NO: 233910
  chr8:121457554-121457671
  hyper

SEQ ID NO: 398052 - DNA, 261 bp, Homo sapiens; identical to SEQ ID NO: 201593
  chr8:122651465-122651726
  hyper

SEQ ID NO: 398053 - DNA, 49 bp, Homo sapiens; identical to SEQ ID NO: 233915
  chr8:122653605-122653654
  hyper

SEQ ID NO: 398054 - DNA, 188 bp, Homo sapiens; identical to SEQ ID NO: 233916
  chr8:123792666-123792854
  hyper

SEQ ID NO: 398055 - DNA, 178 bp, Homo sapiens; identical to SEQ ID NO: 233918
  chr8:124054654-124054832
  hyper

SEQ ID NO: 398056 - DNA, 158 bp, Homo sapiens; identical to SEQ ID NO: 233924
  chr8:125385116-125385274
  hyper

SEQ ID NO: 398057 - DNA, 194 bp, Homo sapiens; identical to SEQ ID NO: 201597
  chr8:127569427-127569621
  hyper

SEQ ID NO: 398058 - DNA, 261 bp, Homo sapiens
  chr8:127569676-127569937
  hyper
cgaaaccaactccagggtcatttgcacaggtccccggacaggggctgaggctacctgttgggagaggaaggcaagaaagccatgcaggagcccctccgtgaaaagggcgttttgttccgaaaaagaatcggtgggggctcagcacctggagccattttagggggaagtctcgggtgtagcgagctttccctcgtttctccacctgtaaggtcacggtcacaggagactgggcaactcctgttctccctgtccccagccctt

SEQ ID NO: 398059 - DNA, 126 bp, Homo sapiens; identical to SEQ ID NO: 233934
  chr8:128749400-128749526
  hyper

SEQ ID NO: 398060 - DNA, 364 bp, Homo sapiens; identical to SEQ ID NO: 201605
  chr8:134232709-134233073
  hyper

SEQ ID NO: 398061 - DNA, 224 bp, Homo sapiens; identical to SEQ ID NO: 233944
  chr8:134308718-134308942
  hyper

SEQ ID NO: 398062 - DNA, 144 bp, Homo sapiens; identical to SEQ ID NO: 201607
  chr8:134465706-134465850
  hyper

SEQ ID NO: 398063 - DNA, 37 bp, Homo sapiens; identical to SEQ ID NO: 233950
  chr8:135844538-135844575
  hyper

SEQ ID NO: 398064 - DNA, 81 bp, Homo sapiens; identical to SEQ ID NO: 201611
  chr8:141644414-141644495
  hyper

SEQ ID NO: 398065 - DNA, 145 bp, Homo sapiens; identical to SEQ ID NO: 233958
  chr8:141647528-141647673
  hyper

SEQ ID NO: 398066 - DNA, 622 bp, Homo sapiens; identical to SEQ ID NO: 388619
  chr8:142010302-142010924
  hyper

SEQ ID NO: 398067 - DNA, 63 bp, Homo sapiens; identical to SEQ ID NO: 233960
  chr8:142012004-142012067
  hyper

SEQ ID NO: 398068 - DNA, 57 bp, Homo sapiens; identical to SEQ ID NO: 233965
  chr8:142140082-142140139
  hyper

SEQ ID NO: 398069 - DNA, 105 bp, Homo sapiens; identical to SEQ ID NO: 223505
  chr8:142297652-142297757
  hyper

SEQ ID NO: 398070 - DNA, 137 bp, Homo sapiens; identical to SEQ ID NO: 223508
  chr8:142425663-142425800
  hyper

SEQ ID NO: 398071 - DNA, 49 bp, Homo sapiens; identical to SEQ ID NO: 286234
  chr8:143592687-143592736
  hyper

SEQ ID NO: 398072 - DNA, 240 bp, Homo sapiens; identical to SEQ ID NO: 233981
  chr8:144162347-144162587
  hyper

SEQ ID NO: 398073 - DNA, 273 bp, Homo sapiens; identical to SEQ ID NO: 233985
  chr8:144373098-144373371
  hyper

SEQ ID NO: 398074 - DNA, 96 bp, Homo sapiens; identical to SEQ ID NO: 286245
  chr8:144503284-144503380
  hyper

SEQ ID NO: 398075 - DNA, 96 bp, Homo sapiens; identical to SEQ ID NO: 286246
  chr8:144503726-144503822
  hyper

SEQ ID NO: 398076 - DNA, 268 bp, Homo sapiens; identical to SEQ ID NO: 201627
  chr8:144508751-144509019
  hyper

SEQ ID NO: 398077 - DNA, 303 bp, Homo sapiens; identical to SEQ ID NO: 384271
  chr8:144512510-144512813
  hyper

SEQ ID NO: 398078 - DNA, 65 bp, Homo sapiens; identical to SEQ ID NO: 201628
  chr8:144594949-144595014
  hyper

SEQ ID NO: 398079 - DNA, 170 bp, Homo sapiens; identical to SEQ ID NO: 201629
  chr8:144614411-144614581
  hyper

SEQ ID NO: 398080 - DNA, 281 bp, Homo sapiens; identical to SEQ ID NO: 233992
  chr8:144635847-144636128
  hyper

SEQ ID NO: 398081 - DNA, 56 bp, Homo sapiens
  chr8:144640321-144640377
  hyper
cagagttttaagaaaaaccacaaagtgctatgaagtttgaggctaccaggatgggg

SEQ ID NO: 398082 - DNA, 200 bp, Homo sapiens; identical to SEQ ID NO: 233997
  chr8:145149554-145149754
  hyper

SEQ ID NO: 398083 - DNA, 477 bp, Homo sapiens; identical to SEQ ID NO: 223529
  chr8:145726121-145726598
  hyper

SEQ ID NO: 398084 - DNA, 95 bp, Homo sapiens; identical to SEQ ID NO: 201639
  chr8:145910220-145910315
  hyper

SEQ ID NO: 398085 - DNA, 104 bp, Homo sapiens; identical to SEQ ID NO: 223531
  chr8:145910677-145910781
  hyper

SEQ ID NO: 398086 - DNA, 94 bp, Homo sapiens; identical to SEQ ID NO: 234008
  chr8:145981131-145981225
  hyper

SEQ ID NO: 398087 - DNA, 79 bp, Homo sapiens; identical to SEQ ID NO: 234009
  chr8:146052022-146052101
  hyper

SEQ ID NO: 398088 - DNA, 36 bp, Homo sapiens; identical to SEQ ID NO: 201641
  chr8:146078071-146078107
  hyper

SEQ ID NO: 398089 - DNA, 69 bp, Homo sapiens; identical to SEQ ID NO: 234011
  chr8:146278304-146278373
  hyper

SEQ ID NO: 398090 - DNA, 138 bp, Homo sapiens; identical to SEQ ID NO: 286284
  chr9:706973-707111
  hyper

SEQ ID NO: 398091 - DNA, 239 bp, Homo sapiens; identical to SEQ ID NO: 45981
  chr9:707165-707404
  hyper

SEQ ID NO: 398092 - DNA, 214 bp, Homo sapiens; identical to SEQ ID NO: 286288
  chr9:971638-971852
  hyper

SEQ ID NO: 398093 - DNA, 87 bp, Homo sapiens; identical to SEQ ID NO: 286289
  chr9:974427-974514
  hyper

SEQ ID NO: 398094 - DNA, 47 bp, Homo sapiens; identical to SEQ ID NO: 286290
  chr9:975070-975117
  hyper

SEQ ID NO: 398095 - DNA, 114 bp, Homo sapiens; identical to SEQ ID NO: 388630
  chr9:975167-975281
  hyper

SEQ ID NO: 398096 - DNA, 263 bp, Homo sapiens; identical to SEQ ID NO: 286293
  chr9:1049910-1050173
  hyper

SEQ ID NO: 398097 - DNA, 283 bp, Homo sapiens; identical to SEQ ID NO: 46004
  chr9:1050390-1050673
  hyper

SEQ ID NO: 398098 - DNA, 98 bp, Homo sapiens; identical to SEQ ID NO: 286297
  chr9:2621195-2621293
  hyper

SEQ ID NO: 398099 - DNA, 207 bp, Homo sapiens; identical to SEQ ID NO: 286298
  chr9:2621726-2621933
  hyper

SEQ ID NO: 398100 - DNA, 686 bp, Homo sapiens; identical to SEQ ID NO: 286299
  chr9:2622256-2622942
  hyper

SEQ ID NO: 398101 - DNA, 438 bp, Homo sapiens; identical to SEQ ID NO: 201650
  chr9:2623022-2623460
  hyper

SEQ ID NO: 398102 - DNA, 99 bp, Homo sapiens; identical to SEQ ID NO: 201655
  chr9:5022028-5022127
  hyper

SEQ ID NO: 398103 - DNA, 248 bp, Homo sapiens; identical to SEQ ID NO: 201656
  chr9:5054640-5054888
  hyper

SEQ ID NO: 398104 - DNA, 82 bp, Homo sapiens; identical to SEQ ID NO: 201657
  chr9:5069924-5070006
  hyper

SEQ ID NO: 398105 - DNA, 99 bp, Homo sapiens; identical to SEQ ID NO: 201659
  chr9:5081712-5081811
  hyper

SEQ ID NO: 398106 - DNA, 248 bp, Homo sapiens; identical to SEQ ID NO: 234037
  chr9:6414082-6414330
  hyper

SEQ ID NO: 398107 - DNA, 150 bp, Homo sapiens; identical to SEQ ID NO: 388631
  chr9:12776013-12776163
  hyper

SEQ ID NO: 398108 - DNA, 369 bp, Homo sapiens; identical to SEQ ID NO: 286321
  chr9:12776216-12776585
  hyper

SEQ ID NO: 398109 - DNA, 335 bp, Homo sapiens; identical to SEQ ID NO: 201668
  chr9:13034172-13034507
  hyper

SEQ ID NO: 398110 - DNA, 186 bp, Homo sapiens; identical to SEQ ID NO: 286326
  chr9:13568805-13568991
  hyper

SEQ ID NO: 398111 - DNA, 63 bp, Homo sapiens; identical to SEQ ID NO: 286327
  chr9:13569061-13569124
  hyper

SEQ ID NO: 398112 - DNA, 50 bp, Homo sapiens; identical to SEQ ID NO: 234051
  chr9:14322293-14322343
  hyper

SEQ ID NO: 398113 - DNA, 77 bp, Homo sapiens; identical to SEQ ID NO: 234052
  chr9:14347274-14347351
  hyper

SEQ ID NO: 398114 - DNA, 308 bp, Homo sapiens; identical to SEQ ID NO: 286339
  chr9:16870325-16870633
  hyper

SEQ ID NO: 398115 - DNA, 38 bp, Homo sapiens; identical to SEQ ID NO: 286341
  chr9:17134993-17135031
  hyper

SEQ ID NO: 398116 - DNA, 62 bp, Homo sapiens; identical to SEQ ID NO: 286342
  chr9:17579748-17579810
  hyper

SEQ ID NO: 398117 - DNA, 301 bp, Homo sapiens; identical to SEQ ID NO: 234064
  chr9:18473916-18474217
  hyper

SEQ ID NO: 398118 - DNA, 149 bp, Homo sapiens; identical to SEQ ID NO: 234066
  chr9:19229764-19229913
  hyper

SEQ ID NO: 398119 - DNA, 149 bp, Homo sapiens; identical to SEQ ID NO: 234069
  chr9:20621410-20621559
  hyper

SEQ ID NO: 398120 - DNA, 33 bp, Homo sapiens; identical to SEQ ID NO: 234070
  chr9:20622339-20622372
  hyper

SEQ ID NO: 398121 - DNA, 35 bp, Homo sapiens; identical to SEQ ID NO: 223568
  chr9:21032003-21032038
  hyper

SEQ ID NO: 398122 - DNA, 90 bp, Homo sapiens; identical to SEQ ID NO: 286361
  chr9:22005969-22006059
  hyper

SEQ ID NO: 398123 - DNA, 59 bp, Homo sapiens; identical to SEQ ID NO: 388639
  chr9:22447429-22447488
  hyper

SEQ ID NO: 398124 - DNA, 37 bp, Homo sapiens; identical to SEQ ID NO: 234086
  chr9:23830865-23830902
  hyper

SEQ ID NO: 398125 - DNA, 92 bp, Homo sapiens; identical to SEQ ID NO: 286373
  chr9:25677513-25677605
  hyper

SEQ ID NO: 398126 - DNA, 206 bp, Homo sapiens; identical to SEQ ID NO: 388641
  chr9:25677627-25677833
  hyper

SEQ ID NO: 398127 - DNA, 150 bp, Homo sapiens; identical to SEQ ID NO: 384275
  chr9:25677903-25678053
  hyper

SEQ ID NO: 398128 - DNA, 386 bp, Homo sapiens
  chr9:25678127-25678513
  hyper
ccgctcctccagctgctgtcgggcgccgtccgcgcggcctcgccagcccacgccgccgccgccgccgctggggctgcccccaccacgagcccggccggagcggcctggccctcggccgtccgcagcaccgtccccgccgcagcaactcccgcgcctagtggcgccaccacgcatgcgccacatcggtcccatcccaaccgcgccgccagccccgtgggctgaggggccgcgcggccaggcgcgggcaagttcggggctggcagggcggccggggtgacgacggaggaggagaggaggtcgcgggcggcggctgctggcttagagccaaaggaggccgggaatttgcccagactgaggcgtgtcctgtctcctgtggtggagctgcc

SEQ ID NO: 398129 - DNA, 688 bp, Homo sapiens; identical to SEQ ID NO: 234093
  chr9:26892268-26892956
  hyper

SEQ ID NO: 398130 - DNA, 63 bp, Homo sapiens; identical to SEQ ID NO: 234094
  chr9:26956461-26956524
  hyper

SEQ ID NO: 398131 - DNA, 225 bp, Homo sapiens; identical to SEQ ID NO: 234100
  chr9:33166527-33166752
  hyper

SEQ ID NO: 398132 - DNA, 85 bp, Homo sapiens; identical to SEQ ID NO: 234101
  chr9:33290497-33290582
  hyper

SEQ ID NO: 398133 - DNA, 60 bp, Homo sapiens; identical to SEQ ID NO: 286384
  chr9:33524278-33524338
  hyper

SEQ ID NO: 398134 - DNA, 51 bp, Homo sapiens; identical to SEQ ID NO: 201695
  chr9:34377388-34377439
  hyper

SEQ ID NO: 398135 - DNA, 155 bp, Homo sapiens; identical to SEQ ID NO: 234109
  chr9:34458519-34458674
  hyper

SEQ ID NO: 398136 - DNA, 291 bp, Homo sapiens; identical to SEQ ID NO: 286391
  chr9:34589598-34589889
  hyper

SEQ ID NO: 398137 - DNA, 77 bp, Homo sapiens; identical to SEQ ID NO: 201697
  chr9:34646925-34647002
  hyper

SEQ ID NO: 398138 - DNA, 172 bp, Homo sapiens; identical to SEQ ID NO: 286399
  chr9:34957704-34957876
  hyper

SEQ ID NO: 398139 - DNA, 345 bp, Homo sapiens; identical to SEQ ID NO: 286400
  chr9:34958128-34958473
  hyper

SEQ ID NO: 398140 - DNA, 36 bp, Homo sapiens; identical to SEQ ID NO: 234116
  chr9:34989007-34989043
  hyper

SEQ ID NO: 398141 - DNA, 228 bp, Homo sapiens; identical to SEQ ID NO: 234117
  chr9:35096044-35096272
  hyper

SEQ ID NO: 398142 - DNA, 179 bp, Homo sapiens; identical to SEQ ID NO: 201700
  chr9:35116361-35116540
  hyper

SEQ ID NO: 398143 - DNA, 131 bp, Homo sapiens; identical to SEQ ID NO: 201703
  chr9:35489689-35489820
  hyper

SEQ ID NO: 398144 - DNA, 46 bp, Homo sapiens; identical to SEQ ID NO: 234121
  chr9:35490107-35490153
  hyper

SEQ ID NO: 398145 - DNA, 59 bp, Homo sapiens; identical to SEQ ID NO: 286409
  chr9:35617365-35617424
  hyper

SEQ ID NO: 398146 - DNA, 73 bp, Homo sapiens; identical to SEQ ID NO: 234125
  chr9:35676258-35676331
  hyper

SEQ ID NO: 398147 - DNA, 231 bp, Homo sapiens; identical to SEQ ID NO: 234127
  chr9:35815225-35815456
  hyper

SEQ ID NO: 398148 - DNA, 998 bp, Homo sapiens; identical to SEQ ID NO: 234129
  chr9:36136266-36137264
  hyper

SEQ ID NO: 398149 - DNA, 220 bp, Homo sapiens; identical to SEQ ID NO: 234132
  chr9:36572867-36573087
  hyper

SEQ ID NO: 398150 - DNA, 50 bp, Homo sapiens; identical to SEQ ID NO: 201709
  chr9:37030790-37030840
  hyper

SEQ ID NO: 398151 - DNA, 104 bp, Homo sapiens; identical to SEQ ID NO: 234149
  chr9:37485788-37485892
  hyper

SEQ ID NO: 398152 - DNA, 95 bp, Homo sapiens; identical to SEQ ID NO: 201712
  chr9:38067583-38067678
  hyper

SEQ ID NO: 398153 - DNA, 413 bp, Homo sapiens; identical to SEQ ID NO: 201713
  chr9:38067708-38068121
  hyper

SEQ ID NO: 398154 - DNA, 749 bp, Homo sapiens; identical to SEQ ID NO: 201714
  chr9:38068158-38068907
  hyper

SEQ ID NO: 398155 - DNA, 42 bp, Homo sapiens
  chr9:38620839-38620881
  hyper
gctgacaggggccctccgcagccaccggggatgggactgggg

SEQ ID NO: 398156 - DNA, 477 bp, Homo sapiens; identical to SEQ ID NO: 234161
  chr9:71319341-71319818
  hyper

SEQ ID NO: 398157 - DNA, 42 bp, Homo sapiens; identical to SEQ ID NO: 223596
  chr9:71736563-71736605
  hyper

SEQ ID NO: 398158 - DNA, 308 bp, Homo sapiens; identical to SEQ ID NO: 234165
  chr9:71736985-71737293
  hyper

SEQ ID NO: 398159 - DNA, 189 bp, Homo sapiens; identical to SEQ ID NO: 234170
  chr9:72435610-72435799
  hyper

SEQ ID NO: 398160 - DNA, 73 bp, Homo sapiens; identical to SEQ ID NO: 234171
  chr9:72874193-72874266
  hyper

SEQ ID NO: 398161 - DNA, 270 bp, Homo sapiens
  chr9:73027584-73027854
  hyper
ccggggacaattaaggagagagtgagctttccgccaatgcacatttaaattatttaaagagttaaaccgcatcttatccaacatgtttgcaccctttcggccgagtgcagtgtcccgaacgcccaggaacgctgcctggccaaaggttaactaaccccagagctccgggggagagggcgacgccgctaacctgtatgcactctgtaatgggctttgagatgggaggattttccatagactttcccacagccactgtaggggcacttgtgc

SEQ ID NO: 398162 - DNA, 733 bp, Homo sapiens; identical to SEQ ID NO: 201726
  chr9:73028305-73029038
  hyper

SEQ ID NO: 398163 - DNA, 254 bp, Homo sapiens; identical to SEQ ID NO: 234174
  chr9:73033410-73033664
  hyper

SEQ ID NO: 398164 - DNA, 35 bp, Homo sapiens; identical to SEQ ID NO: 234175
  chr9:74382903-74382938
  hyper

SEQ ID NO: 398165 - DNA, 49 bp, Homo sapiens; identical to SEQ ID NO: 201730
  chr9:74979547-74979596
  hyper

SEQ ID NO: 398166 - DNA, 32 bp, Homo sapiens; identical to SEQ ID NO: 234178
  chr9:74980723-74980755
  hyper

SEQ ID NO: 398167 - DNA, 118 bp, Homo sapiens; identical to SEQ ID NO: 286468
  chr9:77114952-77115070
  hyper

SEQ ID NO: 398168 - DNA, 77 bp, Homo sapiens; identical to SEQ ID NO: 234186
  chr9:77567960-77568037
  hyper

SEQ ID NO: 398169 - DNA, 284 bp, Homo sapiens
  chr9:80912480-80912764
  hyper
gcacctgcagacgcccgggctgtgccatctcctgggccggtccgggggctggggcggggcgaaaaagaaaaagctctgatctctgccttcgcctcgcgcagctgtgcggcgagcccgggcagtgtggagcggatgcatgaatggacatagtgtgaatgagtgatgaacgggaatgaaccgatgacaggttttgcatatgcagtggatcacgttagctgaaagggattgcaaacttaaaggtccgcgtgtgcgtgcccccctacgccttacaccagtgtttgctt

SEQ ID NO: 398170 - DNA, 505 bp, Homo sapiens
  chr9:82186172-82186677
  hyper
gaaggtgtctgggttgggagacgggtgggcgggaggacgagactcggaagaagatcttttgaccagcccccaggctcaccgctccctccaccctctttattttgccgccaccaccaccaccaccaccaacacctaattctgaagatgcagccagggcagcagcaacagcagcagccgccgattctcccagccccacgttactttgattgacagctgaacaaatgttttcccggttcgaacgctcgcgctaaggaacgtcagccaaggcgaagctccgccttgggcgggccatctccgccccgcctccgccaacctcattcctcttcgttaattggtcggagctacaggcgacgcccggcccccacgtgggtttcagctgggttggctcctccccgctggcttgccatttgtcagcagtgaaatgatgggcactaacacagaacggcgattaatgttcagccacctctgattggttggtggagacgcctaccgcaacgggggtggg

SEQ ID NO: 398171 - DNA, 387 bp, Homo sapiens; identical to SEQ ID NO: 388659
  chr9:82187860-82188247
  hyper

SEQ ID NO: 398172 - DNA, 140 bp, Homo sapiens
  chr9:84303026-84303166
  hyper
gcgagaaggtccgccgggcctcagaagccaccagtctccctaccgcccgggagaagcgcctccccaacgatcctggccccccaccaccacccagccgcgcctcaccgggtgccggctctgcgggaacatcgctctggcgg

SEQ ID NO: 398173 - DNA, 196 bp, Homo sapiens; identical to SEQ ID NO: 234211
  chr9:84304433-84304629
  hyper

SEQ ID NO: 398174 - DNA, 346 bp, Homo sapiens; identical to SEQ ID NO: 388661
  chr9:85677094-85677440
  hyper

SEQ ID NO: 398175 - DNA, 116 bp, Homo sapiens
  chr9:86152964-86153080
  hyper
gtgtgccccgcgccctcgcccggttccacgcgcacctggatgtggcaggagatctccgagtcgtccagcagccggatggtgcatctcatctcctggctgagcgatttgacgctgga

SEQ ID NO: 398176 - DNA, 339 bp, Homo sapiens; identical to SEQ ID NO: 201757
  chr9:86238306-86238645
  hyper

SEQ ID NO: 398177 - DNA, 305 bp, Homo sapiens; identical to SEQ ID NO: 286527
  chr9:90589287-90589592
  hyper

SEQ ID NO: 398178 - DNA, 44 bp, Homo sapiens; identical to SEQ ID NO: 286528
  chr9:90589776-90589820
  hyper

SEQ ID NO: 398179 - DNA, 183 bp, Homo sapiens; identical to SEQ ID NO: 234234
  chr9:92220603-92220786
  hyper

SEQ ID NO: 398180 - DNA, 31 bp, Homo sapiens; identical to SEQ ID NO: 234236
  chr9:93563762-93563793
  hyper

SEQ ID NO: 398181 - DNA, 275 bp, Homo sapiens; identical to SEQ ID NO: 286539
  chr9:93564135-93564410
  hyper

SEQ ID NO: 398182 - DNA, 130 bp, Homo sapiens; identical to SEQ ID NO: 234244
  chr9:95056116-95056246
  hyper

SEQ ID NO: 398183 - DNA, 65 bp, Homo sapiens; identical to SEQ ID NO: 286550
  chr9:95709628-95709693
  hyper

SEQ ID NO: 398184 - DNA, 383 bp, Homo sapiens; identical to SEQ ID NO: 201791
  chr9:96714479-96714862
  hyper

SEQ ID NO: 398185 - DNA, 255 bp, Homo sapiens; identical to SEQ ID NO: 234264
  chr9:96929092-96929347
  hyper

SEQ ID NO: 398186 - DNA, 405 bp, Homo sapiens; identical to SEQ ID NO: 223634
  chr9:97810932-97811337
  hyper

SEQ ID NO: 398187 - DNA, 60 bp, Homo sapiens; identical to SEQ ID NO: 223636
  chr9:98189305-98189365
  hyper

SEQ ID NO: 398188 - DNA, 151 bp, Homo sapiens; identical to SEQ ID NO: 234270
  chr9:98637318-98637469
  hyper

SEQ ID NO: 398189 - DNA, 491 bp, Homo sapiens; identical to SEQ ID NO: 286578
  chr9:99145529-99146020
  hyper

SEQ ID NO: 398190 - DNA, 238 bp, Homo sapiens; identical to SEQ ID NO: 117890
  chr9:99181499-99181737
  hyper

SEQ ID NO: 398191 - DNA, 155 bp, Homo sapiens; identical to SEQ ID NO: 286580
  chr9:99380838-99380993
  hyper

SEQ ID NO: 398192 - DNA, 426 bp, Homo sapiens; identical to SEQ ID NO: 286581
  chr9:99381077-99381503
  hyper

SEQ ID NO: 398193 - DNA, 629 bp, Homo sapiens; identical to SEQ ID NO: 201802
  chr9:99381680-99382309
  hyper

SEQ ID NO: 398194 - DNA, 409 bp, Homo sapiens; identical to SEQ ID NO: 201804
  chr9:99417397-99417806
  hyper

SEQ ID NO: 398195 - DNA, 74 bp, Homo sapiens; identical to SEQ ID NO: 286585
  chr9:99449021-99449095
  hyper

SEQ ID NO: 398196 - DNA, 121 bp, Homo sapiens; identical to SEQ ID NO: 201805
  chr9:99539844-99539965
  hyper

SEQ ID NO: 398197 - DNA, 646 bp, Homo sapiens; identical to SEQ ID NO: 286587
  chr9:99540006-99540652
  hyper

SEQ ID NO: 398198 - DNA, 450 bp, Homo sapiens; identical to SEQ ID NO: 201807
  chr9:99801107-99801557
  hyper

SEQ ID NO: 398199 - DNA, 229 bp, Homo sapiens; identical to SEQ ID NO: 234288
  chr9:100459620-100459849
  hyper

SEQ ID NO: 398200 - DNA, 78 bp, Homo sapiens; identical to SEQ ID NO: 286601
  chr9:101472009-101472087
  hyper

SEQ ID NO: 398201 - DNA, 64 bp, Homo sapiens; identical to SEQ ID NO: 201814
  chr9:101558886-101558950
  hyper

SEQ ID NO: 398202 - DNA, 55 bp, Homo sapiens; identical to SEQ ID NO: 286606
  chr9:101706896-101706951
  hyper

SEQ ID NO: 398203 - DNA, 74 bp, Homo sapiens; identical to SEQ ID NO: 201819
  chr9:103190036-103190110
  hyper

SEQ ID NO: 398204 - DNA, 36 bp, Homo sapiens; identical to SEQ ID NO: 201822
  chr9:103791704-103791740
  hyper

SEQ ID NO: 398205 - DNA, 227 bp, Homo sapiens; identical to SEQ ID NO: 234311
  chr9:104161277-104161504
  hyper

SEQ ID NO: 398206 - DNA, 330 bp, Homo sapiens; identical to SEQ ID NO: 234315
  chr9:108455719-108456049
  hyper

SEQ ID NO: 398207 - DNA, 349 bp, Homo sapiens; identical to SEQ ID NO: 286626
  chr9:109624113-109624462
  hyper

SEQ ID NO: 398208 - DNA, 164 bp, Homo sapiens; identical to SEQ ID NO: 201828
  chr9:109624564-109624728
  hyper

SEQ ID NO: 398209 - DNA, 267 bp, Homo sapiens
  chr9:110250832-110251099
  hyper
ggaattggcacaccgaggctctctcggtgcgctctcgccacggggccgcctacgcgctaaactcactctggcccagccagtgtctggggacgcggccacctcccgcccggtggcccgagagcgcccgccctaccgacagcgcgcccggggactggtgaagacccggcttgcgccccaggcggctccgcagtgctcgcaccacgggcatacacagctgagccaaggacacggaagctatcccgggaaggttgcggagtccgcgcggtg

SEQ ID NO: 398210 - DNA, 259 bp, Homo sapiens; identical to SEQ ID NO: 201831
  chr9:110251129-110251388
  hyper

SEQ ID NO: 398211 - DNA, 44 bp, Homo sapiens; identical to SEQ ID NO: 201832
  chr9:110251418-110251462
  hyper

SEQ ID NO: 398212 - DNA, 88 bp, Homo sapiens; identical to SEQ ID NO: 234331
  chr9:113017848-113017936
  hyper

SEQ ID NO: 398213 - DNA, 269 bp, Homo sapiens; identical to SEQ ID NO: 201847
  chr9:114360505-114360774
  hyper

SEQ ID NO: 398214 - DNA, 109 bp, Homo sapiens; identical to SEQ ID NO: 286654
  chr9:114361074-114361183
  hyper

SEQ ID NO: 398215 - DNA, 341 bp, Homo sapiens; identical to SEQ ID NO: 201848
  chr9:114361444-114361785
  hyper

SEQ ID NO: 398216 - DNA, 238 bp, Homo sapiens; identical to SEQ ID NO: 286656
  chr9:114361815-114362053
  hyper

SEQ ID NO: 398217 - DNA, 43 bp, Homo sapiens; identical to SEQ ID NO: 234337
  chr9:115095506-115095549
  hyper

SEQ ID NO: 398218 - DNA, 232 bp, Homo sapiens; identical to SEQ ID NO: 201850
  chr9:115774339-115774571
  hyper

SEQ ID NO: 398219 - DNA, 137 bp, Homo sapiens; identical to SEQ ID NO: 234344
  chr9:116163725-116163862
  hyper

SEQ ID NO: 398220 - DNA, 232 bp, Homo sapiens; identical to SEQ ID NO: 234346
  chr9:116638746-116638978
  hyper

SEQ ID NO: 398221 - DNA, 161 bp, Homo sapiens; identical to SEQ ID NO: 234357
  chr9:120249908-120250069
  hyper

SEQ ID NO: 398222 - DNA, 162 bp, Homo sapiens; identical to SEQ ID NO: 286681
  chr9:122130811-122130973
  hyper

SEQ ID NO: 398223 - DNA, 334 bp, Homo sapiens; identical to SEQ ID NO: 234360
  chr9:123883882-123884216
  hyper

SEQ ID NO: 398224 - DNA, 253 bp, Homo sapiens; identical to SEQ ID NO: 201860
  chr9:124361930-124362183
  hyper

SEQ ID NO: 398225 - DNA, 35 bp, Homo sapiens; identical to SEQ ID NO: 201861
  chr9:124362324-124362359
  hyper

SEQ ID NO: 398226 - DNA, 63 bp, Homo sapiens; identical to SEQ ID NO: 286691
  chr9:124981571-124981634
  hyper

SEQ ID NO: 398227 - DNA, 140 bp, Homo sapiens; identical to SEQ ID NO: 118090
  chr9:124981877-124982017
  hyper

SEQ ID NO: 398228 - DNA, 165 bp, Homo sapiens; identical to SEQ ID NO: 286698
  chr9:126762044-126762209
  hyper

SEQ ID NO: 398229 - DNA, 299 bp, Homo sapiens; identical to SEQ ID NO: 286699
  chr9:126762231-126762530
  hyper

SEQ ID NO: 398230 - DNA, 67 bp, Homo sapiens; identical to SEQ ID NO: 286700
  chr9:126762606-126762673
  hyper

SEQ ID NO: 398231 - DNA, 127 bp, Homo sapiens; identical to SEQ ID NO: 286705
  chr9:126775917-126776044
  hyper

SEQ ID NO: 398232 - DNA, 45 bp, Homo sapiens; identical to SEQ ID NO: 286706
  chr9:126776386-126776431
  hyper

SEQ ID NO: 398233 - DNA, 94 bp, Homo sapiens; identical to SEQ ID NO: 286717
  chr9:126794701-126794795
  hyper

SEQ ID NO: 398234 - DNA, 39 bp, Homo sapiens; identical to SEQ ID NO: 201871
  chr9:126872740-126872779
  hyper

SEQ ID NO: 398235 - DNA, 278 bp, Homo sapiens; identical to SEQ ID NO: 286720
  chr9:127215312-127215590
  hyper

SEQ ID NO: 398236 - DNA, 124 bp, Homo sapiens; identical to SEQ ID NO: 286721
  chr9:127215678-127215802
  hyper

SEQ ID NO: 398237 - DNA, 127 bp, Homo sapiens; identical to SEQ ID NO: 201874
  chr9:127534416-127534543
  hyper

SEQ ID NO: 398238 - DNA, 96 bp, Homo sapiens; identical to SEQ ID NO: 234395
  chr9:127905903-127905999
  hyper

SEQ ID NO: 398239 - DNA, 248 bp, Homo sapiens; identical to SEQ ID NO: 234396
  chr9:127962948-127963196
  hyper

SEQ ID NO: 398240 - DNA, 33 bp, Homo sapiens; identical to SEQ ID NO: 384294
  chr9:129373385-129373418
  hyper

SEQ ID NO: 398241 - DNA, 110 bp, Homo sapiens; identical to SEQ ID NO: 286734
  chr9:129375185-129375295
  hyper

SEQ ID NO: 398242 - DNA, 166 bp, Homo sapiens; identical to SEQ ID NO: 234406
  chr9:129384573-129384739
  hyper

SEQ ID NO: 398243 - DNA, 62 bp, Homo sapiens; identical to SEQ ID NO: 286739
  chr9:129385810-129385872
  hyper

SEQ ID NO: 398244 - DNA, 520 bp, Homo sapiens
  chr9:129386782-129387302
  hyper
gacccttttcccgcctgagaaacgtgcgaagtccctcagctcctggaggcaaccaggcggcccgaaagccgagttcccggcgcggatgctagggccgaccccagccccctccctcctgcgccccagcccgagggcggcgagtggcaggtttttttttatcttgtttttttttttttggatttggtttgcaggggggaaatgtggttgtatcaatccacaaatatttactcttaacagacttgtatctgtggagatttcgaacaaagacagtttagggggattacaaaaaccctaaaccccgtttttctcccggacttggtgctttaaatgccaattataggcgagccatatccaacagcaacggggaaaggcgagcaggctccggggagggaggtggggggagagtccggccattaaatgtaacttttcattatgaaaaggatttcgccggttttatcttctaataagattatgtcacgaacacaagtacctaggatggtgctgagtgacagggctctgt

SEQ ID NO: 398245 - DNA, 361 bp, Homo sapiens; identical to SEQ ID NO: 234410
  chr9:129439099-129439460
  hyper

SEQ ID NO: 398246 - DNA, 209 bp, Homo sapiens; identical to SEQ ID NO: 234414
  chr9:130308066-130308275
  hyper

SEQ ID NO: 398247 - DNA, 336 bp, Homo sapiens; identical to SEQ ID NO: 234415
  chr9:130330786-130331122
  hyper

SEQ ID NO: 398248 - DNA, 36 bp, Homo sapiens; identical to SEQ ID NO: 223681
  chr9:130374657-130374693
  hyper

SEQ ID NO: 398249 - DNA, 203 bp, Homo sapiens; identical to SEQ ID NO: 234417
  chr9:130477657-130477860
  hyper

SEQ ID NO: 398250 - DNA, 141 bp, Homo sapiens; identical to SEQ ID NO: 286753
  chr9:130616612-130616753
  hyper

SEQ ID NO: 398251 - DNA, 376 bp, Homo sapiens; identical to SEQ ID NO: 201890
  chr9:130679368-130679744
  hyper

SEQ ID NO: 398252 - DNA, 220 bp, Homo sapiens; identical to SEQ ID NO: 286764
  chr9:131183034-131183254
  hyper

SEQ ID NO: 398253 - DNA, 251 bp, Homo sapiens; identical to SEQ ID NO: 234426
  chr9:131486506-131486757
  hyper

SEQ ID NO: 398254 - DNA, 86 bp, Homo sapiens; identical to SEQ ID NO: 234427
  chr9:131709401-131709487
  hyper

SEQ ID NO: 398255 - DNA, 80 bp, Homo sapiens; identical to SEQ ID NO: 234437
  chr9:132200925-132201005
  hyper

SEQ ID NO: 398256 - DNA, 34 bp, Homo sapiens; identical to SEQ ID NO: 223691
  chr9:132222864-132222898
  hyper

SEQ ID NO: 398257 - DNA, 551 bp, Homo sapiens; identical to SEQ ID NO: 286787
  chr9:132330680-132331231
  hyper

SEQ ID NO: 398258 - DNA, 217 bp, Homo sapiens; identical to SEQ ID NO: 388691
  chr9:132331336-132331553
  hyper

SEQ ID NO: 398259 - DNA, 174 bp, Homo sapiens; identical to SEQ ID NO: 201903
  chr9:132373579-132373753
  hyper

SEQ ID NO: 398260 - DNA, 162 bp, Homo sapiens; identical to SEQ ID NO: 234443
  chr9:132387303-132387465
  hyper

SEQ ID NO: 398261 - DNA, 65 bp, Homo sapiens; identical to SEQ ID NO: 286791
  chr9:132427556-132427621
  hyper

SEQ ID NO: 398262 - DNA, 475 bp, Homo sapiens; identical to SEQ ID NO: 234447
  chr9:132499948-132500423
  hyper

SEQ ID NO: 398263 - DNA, 181 bp, Homo sapiens; identical to SEQ ID NO: 286805
  chr9:133319785-133319966
  hyper

SEQ ID NO: 398264 - DNA, 55 bp, Homo sapiens; identical to SEQ ID NO: 286806
  chr9:133320002-133320057
  hyper

SEQ ID NO: 398265 - DNA, 331 bp, Homo sapiens; identical to SEQ ID NO: 286807
  chr9:133540728-133541059
  hyper

SEQ ID NO: 398266 - DNA, 274 bp, Homo sapiens; identical to SEQ ID NO: 234461
  chr9:133568977-133569251
  hyper

SEQ ID NO: 398267 - DNA, 496 bp, Homo sapiens; identical to SEQ ID NO: 286814
  chr9:133972138-133972634
  hyper

SEQ ID NO: 398268 - DNA, 173 bp, Homo sapiens; identical to SEQ ID NO: 201913
  chr9:134158023-134158196
  hyper

SEQ ID NO: 398269 - DNA, 65 bp, Homo sapiens; identical to SEQ ID NO: 286829
  chr9:135465126-135465191
  hyper

SEQ ID NO: 398270 - DNA, 115 bp, Homo sapiens; identical to SEQ ID NO: 201923
  chr9:136856335-136856450
  hyper

SEQ ID NO: 398271 - DNA, 62 bp, Homo sapiens; identical to SEQ ID NO: 201925
  chr9:137967132-137967194
  hyper

SEQ ID NO: 398272 - DNA, 98 bp, Homo sapiens; identical to SEQ ID NO: 234501
  chr9:139334408-139334506
  hyper

SEQ ID NO: 398273 - DNA, 119 bp, Homo sapiens; identical to SEQ ID NO: 201932
  chr9:139377007-139377126
  hyper

SEQ ID NO: 398274 - DNA, 105 bp, Homo sapiens; identical to SEQ ID NO: 223731
  chr9:139580674-139580779
  hyper

SEQ ID NO: 398275 - DNA, 243 bp, Homo sapiens; identical to SEQ ID NO: 286857
  chr9:139606720-139606963
  hyper

SEQ ID NO: 398276 - DNA, 102 bp, Homo sapiens; identical to SEQ ID NO: 234507
  chr9:139621210-139621312
  hyper

SEQ ID NO: 398277 - DNA, 155 bp, Homo sapiens; identical to SEQ ID NO: 201937
  chr9:139838241-139838396
  hyper

SEQ ID NO: 398278 - DNA, 98 bp, Homo sapiens; identical to SEQ ID NO: 201942
  chr9:140195121-140195219
  hyper

SEQ ID NO: 398279 - DNA, 614 bp, Homo sapiens; identical to SEQ ID NO: 201943
  chr9:140195552-140196166
  hyper

SEQ ID NO: 398280 - DNA, 290 bp, Homo sapiens
  chr9:140196196-140196486
  hyper
cgtcgatgaccgactggtgcagcgccgtctggccctcgggcccgaacgagttcacgttgaactcgcagttggtcatgttctgcagcagcgactgcagctcctgcgtgttgcccttgcgcacagcctcctggaagatgcgctgcgtctgcggcgcggagcaggtggacagctcggcctggctcatgctgccgccgggcgcgggccgcgggccgggccggggctcagcgcgggcggcggctgcggcgcgggcccccggctgtctcggggcgcgcctcggcgcatggagggcg

SEQ ID NO: 398281 - DNA, 387 bp, Homo sapiens; identical to SEQ ID NO: 223741
  chr9:140445746-140446133
  hyper

SEQ ID NO: 398282 - DNA, 122 bp, Homo sapiens; identical to SEQ ID NO: 201948
  chr9:140473437-140473559
  hyper

SEQ ID NO: 398283 - DNA, 162 bp, Homo sapiens; identical to SEQ ID NO: 234527
  chr9:140500666-140500828
  hyper

SEQ ID NO: 398284 - DNA, 152 bp, Homo sapiens; identical to SEQ ID NO: 234532
  chr10:1094292-1094444
  hyper

SEQ ID NO: 398285 - DNA, 99 bp, Homo sapiens; identical to SEQ ID NO: 201958
  chr10:3239495-3239594
  hyper

SEQ ID NO: 398286 - DNA, 238 bp, Homo sapiens; identical to SEQ ID NO: 201961
  chr10:5454341-5454579
  hyper

SEQ ID NO: 398287 - DNA, 195 bp, Homo sapiens; identical to SEQ ID NO: 234545
  chr10:5708645-5708840
  hyper

SEQ ID NO: 398288 - DNA, 202 bp, Homo sapiens; identical to SEQ ID NO: 234559
  chr10:7829457-7829659
  hyper

SEQ ID NO: 398289 - DNA, 114 bp, Homo sapiens; identical to SEQ ID NO: 286921
  chr10:8078243-8078357
  hyper

SEQ ID NO: 398290 - DNA, 75 bp, Homo sapiens; identical to SEQ ID NO: 286922
  chr10:8079315-8079390
  hyper

SEQ ID NO: 398291 - DNA, 62 bp, Homo sapiens; identical to SEQ ID NO: 234566
  chr10:8079998-8080060
  hyper

SEQ ID NO: 398292 - DNA, 371 bp, Homo sapiens; identical to SEQ ID NO: 286925
  chr10:8082851-8083222
  hyper

SEQ ID NO: 398293 - DNA, 117 bp, Homo sapiens; identical to SEQ ID NO: 286927
  chr10:8086740-8086857
  hyper

SEQ ID NO: 398294 - DNA, 601 bp, Homo sapiens; identical to SEQ ID NO: 286928
  chr10:8090758-8091359
  hyper

SEQ ID NO: 398295 - DNA, 53 bp, Homo sapiens; identical to SEQ ID NO: 286937
  chr10:8374272-8374325
  hyper

SEQ ID NO: 398296 - DNA, 870 bp, Homo sapiens; identical to SEQ ID NO: 286943
  chr10:11865127-11865997
  hyper

SEQ ID NO: 398297 - DNA, 82 bp, Homo sapiens; identical to SEQ ID NO: 234587
  chr10:13141818-13141900
  hyper

SEQ ID NO: 398298 - DNA, 241 bp, Homo sapiens; identical to SEQ ID NO: 201985
  chr10:13341387-13341628
  hyper

SEQ ID NO: 398299 - DNA, 33 bp, Homo sapiens; identical to SEQ ID NO: 201986
  chr10:13629001-13629034
  hyper

SEQ ID NO: 398300 - DNA, 277 bp, Homo sapiens; identical to SEQ ID NO: 286957
  chr10:14215913-14216190
  hyper

SEQ ID NO: 398301 - DNA, 114 bp, Homo sapiens; identical to SEQ ID NO: 234593
  chr10:14879967-14880081
  hyper

SEQ ID NO: 398302 - DNA, 342 bp, Homo sapiens; identical to SEQ ID NO: 234596
  chr10:15481461-15481803
  hyper

SEQ ID NO: 398303 - DNA, 52 bp, Homo sapiens; identical to SEQ ID NO: 201992
  chr10:17243812-17243864
  hyper

SEQ ID NO: 398304 - DNA, 282 bp, Homo sapiens; identical to SEQ ID NO: 384306
  chr10:21463291-21463573
  hyper

SEQ ID NO: 398305 - DNA, 421 bp, Homo sapiens; identical to SEQ ID NO: 286982
  chr10:21783758-21784179
  hyper

SEQ ID NO: 398306 - DNA, 334 bp, Homo sapiens; identical to SEQ ID NO: 286983
  chr10:21784246-21784580
  hyper

SEQ ID NO: 398307 - DNA, 154 bp, Homo sapiens; identical to SEQ ID NO: 234612
  chr10:21785547-21785701
  hyper

SEQ ID NO: 398308 - DNA, 153 bp, Homo sapiens; identical to SEQ ID NO: 223775
  chr10:21805907-21806060
  hyper

SEQ ID NO: 398309 - DNA, 129 bp, Homo sapiens; identical to SEQ ID NO: 234615
  chr10:21822289-21822418
  hyper

SEQ ID NO: 398310 - DNA, 240 bp, Homo sapiens; identical to SEQ ID NO: 286993
  chr10:22032716-22032956
  hyper

SEQ ID NO: 398311 - DNA, 266 bp, Homo sapiens; identical to SEQ ID NO: 234620
  chr10:22519355-22519621
  hyper

SEQ ID NO: 398312 - DNA, 966 bp, Homo sapiens; identical to SEQ ID NO: 287001
  chr10:22614079-22615045
  hyper

SEQ ID NO: 398313 - DNA, 184 bp, Homo sapiens; identical to SEQ ID NO: 234627
  chr10:22726716-22726900
  hyper

SEQ ID NO: 398314 - DNA, 41 bp, Homo sapiens; identical to SEQ ID NO: 234629
  chr10:23001787-23001828
  hyper

SEQ ID NO: 398315 - DNA, 96 bp, Homo sapiens; identical to SEQ ID NO: 287007
  chr10:23460471-23460567
  hyper

SEQ ID NO: 398316 - DNA, 71 bp, Homo sapiens; identical to SEQ ID NO: 287008
  chr10:23491090-23491161
  hyper

SEQ ID NO: 398317 - DNA, 92 bp, Homo sapiens; identical to SEQ ID NO: 287009
  chr10:23491237-23491329
  hyper

SEQ ID NO: 398318 - DNA, 180 bp, Homo sapiens; identical to SEQ ID NO: 223789
  chr10:25011198-25011378
  hyper

SEQ ID NO: 398319 - DNA, 239 bp, Homo sapiens; identical to SEQ ID NO: 234647
  chr10:25011795-25012034
  hyper

SEQ ID NO: 398320 - DNA, 49 bp, Homo sapiens; identical to SEQ ID NO: 234649
  chr10:25305303-25305352
  hyper

SEQ ID NO: 398321 - DNA, 112 bp, Homo sapiens; identical to SEQ ID NO: 287016
  chr10:25463329-25463441
  hyper

SEQ ID NO: 398322 - DNA, 65 bp, Homo sapiens; identical to SEQ ID NO: 287020
  chr10:26055994-26056059
  hyper

SEQ ID NO: 398323 - DNA, 70 bp, Homo sapiens; identical to SEQ ID NO: 287028
  chr10:27529644-27529714
  hyper

SEQ ID NO: 398324 - DNA, 35 bp, Homo sapiens; identical to SEQ ID NO: 287036
  chr10:28957388-28957423
  hyper

SEQ ID NO: 398325 - DNA, 420 bp, Homo sapiens; identical to SEQ ID NO: 287037
  chr10:28965881-28966301
  hyper

SEQ ID NO: 398326 - DNA, 51 bp, Homo sapiens; identical to SEQ ID NO: 234674
  chr10:28966786-28966837
  hyper

SEQ ID NO: 398327 - DNA, 78 bp, Homo sapiens; identical to SEQ ID NO: 202031
  chr10:29738055-29738133
  hyper

SEQ ID NO: 398328 - DNA, 70 bp, Homo sapiens; identical to SEQ ID NO: 234682
  chr10:30722681-30722751
  hyper

SEQ ID NO: 398329 - DNA, 69 bp, Homo sapiens; identical to SEQ ID NO: 202038
  chr10:32217899-32217968
  hyper

SEQ ID NO: 398330 - DNA, 106 bp, Homo sapiens; identical to SEQ ID NO: 234690
  chr10:32345462-32345568
  hyper

SEQ ID NO: 398331 - DNA, 32 bp, Homo sapiens
  chr10:33623806-33623838
  hyper
gggagacagaggagtttcaccaactgcacccc

SEQ ID NO: 398332 - DNA, 94 bp, Homo sapiens
  chr10:35104766-35104860
  hyper
gagcctctccgcccgcggggactcgagcctgcagcttgctcggctgggtttctgccctgcccgctccctagctctgctgcagggccggcagcgg

SEQ ID NO: 398333 - DNA, 35 bp, Homo sapiens; identical to SEQ ID NO: 384311
  chr10:35105213-35105248
  hyper

SEQ ID NO: 398334 - DNA, 334 bp, Homo sapiens; identical to SEQ ID NO: 234695
  chr10:35415501-35415835
  hyper

SEQ ID NO: 398335 - DNA, 225 bp, Homo sapiens; identical to SEQ ID NO: 287076
  chr10:38299277-38299502
  hyper

SEQ ID NO: 398336 - DNA, 307 bp, Homo sapiens; identical to SEQ ID NO: 234702
  chr10:43133483-43133790
  hyper

SEQ ID NO: 398337 - DNA, 258 bp, Homo sapiens; identical to SEQ ID NO: 202052
  chr10:43428636-43428894
  hyper

SEQ ID NO: 398338 - DNA, 36 bp, Homo sapiens; identical to SEQ ID NO: 202053
  chr10:43429438-43429474
  hyper

SEQ ID NO: 398339 - DNA, 255 bp, Homo sapiens; identical to SEQ ID NO: 234717
  chr10:43932226-43932481
  hyper

SEQ ID NO: 398340 - DNA, 254 bp, Homo sapiens
  chr10:44879396-44879650
  hyper
ggttttgttttgtgtgttcagaggcaacagtttattttggtttgcatcggtgtcctgtgacagcgcagcgagtttctcttcagcgaaagaaaagaaaaaagccctctcccagtgaaacgggacaccacggttcccagtggcccagggccttggagattgaactttgctgcagctctcattctggggcaaagcgcttggccagctggtgacaaaagagcctgtctgcaggtgtgtttggggagctggggaggggg

SEQ ID NO: 398341 - DNA, 281 bp, Homo sapiens; identical to SEQ ID NO: 234722
  chr10:45470472-45470753
  hyper

SEQ ID NO: 398342 - DNA, 50 bp, Homo sapiens; identical to SEQ ID NO: 202066
  chr10:49514479-49514529
  hyper

SEQ ID NO: 398343 - DNA, 33 bp, Homo sapiens; identical to SEQ ID NO: 287105
  chr10:49731361-49731394
  hyper

SEQ ID NO: 398344 - DNA, 128 bp, Homo sapiens; identical to SEQ ID NO: 287112
  chr10:50819280-50819408
  hyper

SEQ ID NO: 398345 - DNA, 167 bp, Homo sapiens; identical to SEQ ID NO: 202075
  chr10:52750721-52750888
  hyper

SEQ ID NO: 398346 - DNA, 281 bp, Homo sapiens; identical to SEQ ID NO: 202076
  chr10:52751102-52751383
  hyper

SEQ ID NO: 398347 - DNA, 233 bp, Homo sapiens; identical to SEQ ID NO: 202077
  chr10:52751562-52751795
  hyper

SEQ ID NO: 398348 - DNA, 64 bp, Homo sapiens; identical to SEQ ID NO: 287122
  chr10:52751961-52752025
  hyper

SEQ ID NO: 398349 - DNA, 280 bp, Homo sapiens; identical to SEQ ID NO: 202079
  chr10:52834081-52834361
  hyper

SEQ ID NO: 398350 - DNA, 109 bp, Homo sapiens; identical to SEQ ID NO: 202080
  chr10:52834756-52834865
  hyper

SEQ ID NO: 398351 - DNA, 339 bp, Homo sapiens; identical to SEQ ID NO: 388733
  chr10:54073859-54074198
  hyper

SEQ ID NO: 398352 - DNA, 296 bp, Homo sapiens; identical to SEQ ID NO: 287128
  chr10:54074418-54074714
  hyper

SEQ ID NO: 398353 - DNA, 457 bp, Homo sapiens; identical to SEQ ID NO: 202082
  chr10:57390676-57391133
  hyper

SEQ ID NO: 398354 - DNA, 57 bp, Homo sapiens; identical to SEQ ID NO: 234750
  chr10:58121111-58121168
  hyper

SEQ ID NO: 398355 - DNA, 496 bp, Homo sapiens; identical to SEQ ID NO: 287137
  chr10:61121994-61122490
  hyper

SEQ ID NO: 398356 - DNA, 95 bp, Homo sapiens; identical to SEQ ID NO: 287138
  chr10:61122636-61122731
  hyper

SEQ ID NO: 398357 - DNA, 206 bp, Homo sapiens; identical to SEQ ID NO: 223828
  chr10:64028003-64028209
  hyper

SEQ ID NO: 398358 - DNA, 43 bp, Homo sapiens; identical to SEQ ID NO: 234765
  chr10:64564430-64564473
  hyper

SEQ ID NO: 398359 - DNA, 238 bp, Homo sapiens; identical to SEQ ID NO: 234766
  chr10:64576165-64576403
  hyper

SEQ ID NO: 398360 - DNA, 82 bp, Homo sapiens; identical to SEQ ID NO: 234768
  chr10:65029101-65029183
  hyper

SEQ ID NO: 398361 - DNA, 115 bp, Homo sapiens; identical to SEQ ID NO: 234769
  chr10:65225530-65225645
  hyper

SEQ ID NO: 398362 - DNA, 396 bp, Homo sapiens; identical to SEQ ID NO: 234772
  chr10:68687786-68688182
  hyper

SEQ ID NO: 398363 - DNA, 457 bp, Homo sapiens; identical to SEQ ID NO: 234773
  chr10:69523830-69524287
  hyper

SEQ ID NO: 398364 - DNA, 80 bp, Homo sapiens; identical to SEQ ID NO: 202096
  chr10:69834887-69834967
  hyper

SEQ ID NO: 398365 - DNA, 120 bp, Homo sapiens; identical to SEQ ID NO: 234776
  chr10:69835218-69835338
  hyper

SEQ ID NO: 398366 - DNA, 71 bp, Homo sapiens; identical to SEQ ID NO: 234777
  chr10:69991508-69991579
  hyper

SEQ ID NO: 398367 - DNA, 152 bp, Homo sapiens; identical to SEQ ID NO: 119025
  chr10:70091480-70091632
  hyper

SEQ ID NO: 398368 - DNA, 436 bp, Homo sapiens; identical to SEQ ID NO: 234779
  chr10:70092802-70093238
  hyper

SEQ ID NO: 398369 - DNA, 139 bp, Homo sapiens; identical to SEQ ID NO: 234780
  chr10:70166193-70166332
  hyper

SEQ ID NO: 398370 - DNA, 32 bp, Homo sapiens; identical to SEQ ID NO: 234781
  chr10:70167001-70167033
  hyper

SEQ ID NO: 398371 - DNA, 352 bp, Homo sapiens; identical to SEQ ID NO: 234786
  chr10:70748247-70748599
  hyper

SEQ ID NO: 398372 - DNA, 324 bp, Homo sapiens; identical to SEQ ID NO: 234787
  chr10:70748846-70749170
  hyper

SEQ ID NO: 398373 - DNA, 112 bp, Homo sapiens; identical to SEQ ID NO: 202103
  chr10:71211454-71211566
  hyper

SEQ ID NO: 398374 - DNA, 109 bp, Homo sapiens; identical to SEQ ID NO: 287182
  chr10:71327766-71327875
  hyper

SEQ ID NO: 398375 - DNA, 74 bp, Homo sapiens; identical to SEQ ID NO: 287183
  chr10:71328699-71328773
  hyper

SEQ ID NO: 398376 - DNA, 188 bp, Homo sapiens; identical to SEQ ID NO: 287185
  chr10:71334639-71334827
  hyper

SEQ ID NO: 398377 - DNA, 86 bp, Homo sapiens; identical to SEQ ID NO: 287186
  chr10:71334956-71335042
  hyper

SEQ ID NO: 398378 - DNA, 493 bp, Homo sapiens; identical to SEQ ID NO: 287187
  chr10:71336491-71336984
  hyper

SEQ ID NO: 398379 - DNA, 58 bp, Homo sapiens
  chr10:71892801-71892859
  hyper
gagccattcagacttggtttaaagtgtcctttcagcatactttaaagcaaaaaagaga

SEQ ID NO: 398380 - DNA, 388 bp, Homo sapiens; identical to SEQ ID NO: 234805
  chr10:71906296-71906684
  hyper

SEQ ID NO: 398381 - DNA, 89 bp, Homo sapiens; identical to SEQ ID NO: 287206
  chr10:72972345-72972434
  hyper

SEQ ID NO: 398382 - DNA, 271 bp, Homo sapiens; identical to SEQ ID NO: 287207
  chr10:72972543-72972814
  hyper

SEQ ID NO: 398383 - DNA, 180 bp, Homo sapiens; identical to SEQ ID NO: 287208
  chr10:72972950-72973130
  hyper

SEQ ID NO: 398384 - DNA, 43 bp, Homo sapiens; identical to SEQ ID NO: 202114
  chr10:72973180-72973223
  hyper

SEQ ID NO: 398385 - DNA, 217 bp, Homo sapiens; identical to SEQ ID NO: 287210
  chr10:72973382-72973599
  hyper

SEQ ID NO: 398386 - DNA, 100 bp, Homo sapiens; identical to SEQ ID NO: 384319
  chr10:73848222-73848322
  hyper

SEQ ID NO: 398387 - DNA, 294 bp, Homo sapiens; identical to SEQ ID NO: 223842
  chr10:74032607-74032901
  hyper

SEQ ID NO: 398388 - DNA, 69 bp, Homo sapiens; identical to SEQ ID NO: 234825
  chr10:74386146-74386215
  hyper

SEQ ID NO: 398389 - DNA, 33 bp, Homo sapiens; identical to SEQ ID NO: 234828
  chr10:75007237-75007270
  hyper

SEQ ID NO: 398390 - DNA, 84 bp, Homo sapiens; identical to SEQ ID NO: 234830
  chr10:75012575-75012659
  hyper

SEQ ID NO: 398391 - DNA, 284 bp, Homo sapiens; identical to SEQ ID NO: 234832
  chr10:75173746-75174030
  hyper

SEQ ID NO: 398392 - DNA, 179 bp, Homo sapiens; identical to SEQ ID NO: 202129
  chr10:75385748-75385927
  hyper

SEQ ID NO: 398393 - DNA, 141 bp, Homo sapiens; identical to SEQ ID NO: 223844
  chr10:75408169-75408310
  hyper

SEQ ID NO: 398394 - DNA, 157 bp, Homo sapiens; identical to SEQ ID NO: 234836
  chr10:75504289-75504446
  hyper

SEQ ID NO: 398395 - DNA, 95 bp, Homo sapiens; identical to SEQ ID NO: 234838
  chr10:75542070-75542165
  hyper

SEQ ID NO: 398396 - DNA, 39 bp, Homo sapiens; identical to SEQ ID NO: 202131
  chr10:75639673-75639712
  hyper

SEQ ID NO: 398397 - DNA, 113 bp, Homo sapiens; identical to SEQ ID NO: 202134
  chr10:75671364-75671477
  hyper

SEQ ID NO: 398398 - DNA, 161 bp, Homo sapiens; identical to SEQ ID NO: 234842
  chr10:75910774-75910935
  hyper

SEQ ID NO: 398399 - DNA, 103 bp, Homo sapiens; identical to SEQ ID NO: 234844
  chr10:76586294-76586397
  hyper

SEQ ID NO: 398400 - DNA, 206 bp, Homo sapiens; identical to SEQ ID NO: 202135
  chr10:76970482-76970688
  hyper

SEQ ID NO: 398401 - DNA, 294 bp, Homo sapiens; identical to SEQ ID NO: 223845
  chr10:77054513-77054807
  hyper

SEQ ID NO: 398402 - DNA, 253 bp, Homo sapiens; identical to SEQ ID NO: 287259
  chr10:79471071-79471324
  hyper

SEQ ID NO: 398403 - DNA, 220 bp, Homo sapiens; identical to SEQ ID NO: 202149
  chr10:79685704-79685924
  hyper

SEQ ID NO: 398404 - DNA, 469 bp, Homo sapiens; identical to SEQ ID NO: 223850
  chr10:79686575-79687044
  hyper

SEQ ID NO: 398405 - DNA, 115 bp, Homo sapiens; identical to SEQ ID NO: 202151
  chr10:80733746-80733861
  hyper

SEQ ID NO: 398406 - DNA, 197 bp, Homo sapiens; identical to SEQ ID NO: 234857
  chr10:80828742-80828939
  hyper

SEQ ID NO: 398407 - DNA, 189 bp, Homo sapiens; identical to SEQ ID NO: 287268
  chr10:80830746-80830935
  hyper

SEQ ID NO: 398408 - DNA, 57 bp, Homo sapiens; identical to SEQ ID NO: 234859
  chr10:81107046-81107103
  hyper

SEQ ID NO: 398409 - DNA, 250 bp, Homo sapiens; identical to SEQ ID NO: 234860
  chr10:81107654-81107904
  hyper

SEQ ID NO: 398410 - DNA, 62 bp, Homo sapiens; identical to SEQ ID NO: 287273
  chr10:81664375-81664437
  hyper

SEQ ID NO: 398411 - DNA, 107 bp, Homo sapiens; identical to SEQ ID NO: 287274
  chr10:81741259-81741366
  hyper

SEQ ID NO: 398412 - DNA, 349 bp, Homo sapiens; identical to SEQ ID NO: 202154
  chr10:81741931-81742280
  hyper

SEQ ID NO: 398413 - DNA, 146 bp, Homo sapiens; identical to SEQ ID NO: 202156
  chr10:82213597-82213743
  hyper

SEQ ID NO: 398414 - DNA, 130 bp, Homo sapiens; identical to SEQ ID NO: 202159
  chr10:85899676-85899806
  hyper

SEQ ID NO: 398415 - DNA, 42 bp, Homo sapiens; identical to SEQ ID NO: 202161
  chr10:86088147-86088189
  hyper

SEQ ID NO: 398416 - DNA, 56 bp, Homo sapiens; identical to SEQ ID NO: 223859
  chr10:87493570-87493626
  hyper

SEQ ID NO: 398417 - DNA, 58 bp, Homo sapiens; identical to SEQ ID NO: 202162
  chr10:88124922-88124980
  hyper

SEQ ID NO: 398418 - DNA, 82 bp, Homo sapiens; identical to SEQ ID NO: 287290
  chr10:88224575-88224657
  hyper

SEQ ID NO: 398419 - DNA, 383 bp, Homo sapiens; identical to SEQ ID NO: 202164
  chr10:88515316-88515699
  hyper

SEQ ID NO: 398420 - DNA, 469 bp, Homo sapiens; identical to SEQ ID NO: 234881
  chr10:89577722-89578191
  hyper

SEQ ID NO: 398421 - DNA, 232 bp, Homo sapiens; identical to SEQ ID NO: 234883
  chr10:89623143-89623375
  hyper

SEQ ID NO: 398422 - DNA, 156 bp, Homo sapiens; identical to SEQ ID NO: 234887
  chr10:90749778-90749934
  hyper

SEQ ID NO: 398423 - DNA, 79 bp, Homo sapiens; identical to SEQ ID NO: 47395
  chr10:90750154-90750233
  hyper

SEQ ID NO: 398424 - DNA, 35 bp, Homo sapiens; identical to SEQ ID NO: 234889
  chr10:90750878-90750913
  hyper

SEQ ID NO: 398425 - DNA, 219 bp, Homo sapiens; identical to SEQ ID NO: 234897
  chr10:92631512-92631731
  hyper

SEQ ID NO: 398426 - DNA, 177 bp, Homo sapiens; identical to SEQ ID NO: 234898
  chr10:92979925-92980102
  hyper

SEQ ID NO: 398427 - DNA, 188 bp, Homo sapiens; identical to SEQ ID NO: 202177
  chr10:94000529-94000717
  hyper

SEQ ID NO: 398428 - DNA, 155 bp, Homo sapiens; identical to SEQ ID NO: 234911
  chr10:94459542-94459697
  hyper

SEQ ID NO: 398429 - DNA, 1229 bp, Homo sapiens
  chr10:96162374-96163603
  hyper
tgggtccggaggatgccggagcctgctcgggaagaaaccccaagttgctcccggtgcctgcgccggaccccgtgggccaggacaggaaggtaatccgggccacgggcggctttggcggaggcgtcggcgctgtggagccgccggaggaggctgacgaggaggaggaggctgacgaggaggaggagacgccgcctcggcagctccttcagcgttacctcgcggcggccggggagcagctggagccggggctctgctactgtccgctccccgctggccaggccggcgccccgccgccctcggcagccccacgatcggacgcctgcctgctgggctcgggctccaaacaccgcggcgcggaggtggctgatggccgcgcgccgcggcacgaaggcatgaccaacggcgactcgggttttctgccgggccgggactgtcgcgatctggaagaggctcgcgggctggcgcgcgccggcggccgggagtcgcgccgccgccgcccctacggccgccttcgcctggaggggcctggcgacgaggacgcggacggcgcgggaagcccgtccgattgggcctctccgcttgaggacccgctgcggagctgctgcctggtggccgcggacgcccaggagcccgagggcgcgggcagcgactcgggggacagccccgccagcagctgcagcagtagcgaggactcagagcagcggggagtcggcgccgggggtcccgaggagggcgcgccccctgccacctcggccgagaggactaatgggggtgcggagccgcgcctgggcttttctgacattcacttcaactctcgcaacacgttccaggtgagccgcggtcagagcgcccgcgatcacctgcccccggcggggccgccggtgcccttgcccgccgcggagcagggtcctgcgggggcttcggcccgggctcgacggagtggcggcttcgcggacttcttcaccaggtacagcgcaggctgcatgggactcggggcgggtccggggccggggccggagccggggtcttggtgggagtcggagccggagccggagccggagcggagagcttggtcggccgcttccgtgccagccccacacgcgtcaggacttagctttgatttgtcactggaggaagaggaactgggtcggctttgtgtttctataggagaagttgtgagctctgtggacagcgagtctttctgttgccttgtccgcgggaggctgtac

SEQ ID NO: 398430 - DNA, 42 bp, Homo sapiens; identical to SEQ ID NO: 234927
  chr10:97321201-97321243
  hyper

SEQ ID NO: 398431 - DNA, 144 bp, Homo sapiens; identical to SEQ ID NO: 234928
  chr10:97416708-97416852
  hyper

SEQ ID NO: 398432 - DNA, 47 bp, Homo sapiens; identical to SEQ ID NO: 234935
  chr10:98841573-98841620
  hyper

SEQ ID NO: 398433 - DNA, 37 bp, Homo sapiens; identical to SEQ ID NO: 202198
  chr10:98945010-98945047
  hyper

SEQ ID NO: 398434 - DNA, 220 bp, Homo sapiens; identical to SEQ ID NO: 202199
  chr10:98945252-98945472
  hyper

SEQ ID NO: 398435 - DNA, 60 bp, Homo sapiens; identical to SEQ ID NO: 202200
  chr10:98945746-98945806
  hyper

SEQ ID NO: 398436 - DNA, 214 bp, Homo sapiens; identical to SEQ ID NO: 234939
  chr10:99052454-99052668
  hyper

SEQ ID NO: 398437 - DNA, 34 bp, Homo sapiens; identical to SEQ ID NO: 234942
  chr10:99093445-99093479
  hyper

SEQ ID NO: 398438 - DNA, 49 bp, Homo sapiens; identical to SEQ ID NO: 234943
  chr10:99185972-99186021
  hyper

SEQ ID NO: 398439 - DNA, 228 bp, Homo sapiens; identical to SEQ ID NO: 234944
  chr10:99258429-99258657
  hyper

SEQ ID NO: 398440 - DNA, 336 bp, Homo sapiens; identical to SEQ ID NO: 223881
  chr10:99259373-99259709
  hyper

SEQ ID NO: 398441 - DNA, 84 bp, Homo sapiens; identical to SEQ ID NO: 234945
  chr10:99400380-99400464
  hyper

SEQ ID NO: 398442 - DNA, 231 bp, Homo sapiens; identical to SEQ ID NO: 234946
  chr10:99473543-99473774
  hyper

SEQ ID NO: 398443 - DNA, 71 bp, Homo sapiens; identical to SEQ ID NO: 202203
  chr10:99496833-99496904
  hyper

SEQ ID NO: 398444 - DNA, 176 bp, Homo sapiens; identical to SEQ ID NO: 287376
  chr10:100991731-100991907
  hyper

SEQ ID NO: 398445 - DNA, 83 bp, Homo sapiens
  chr10:100992799-100992882
  hyper
gcctgagcttaagtggattcctactttctttcttttaatgtccgagttgattttcctttttcactatattgtaaaaactgcat

SEQ ID NO: 398446 - DNA, 206 bp, Homo sapiens; identical to SEQ ID NO: 287379
  chr10:100992916-100993122
  hyper

SEQ ID NO: 398447 - DNA, 93 bp, Homo sapiens; identical to SEQ ID NO: 202210
  chr10:101190597-101190690
  hyper

SEQ ID NO: 398448 - DNA, 264 bp, Homo sapiens; identical to SEQ ID NO: 287389
  chr10:101296800-101297064
  hyper

SEQ ID NO: 398449 - DNA, 236 bp, Homo sapiens; identical to SEQ ID NO: 287390
  chr10:101297130-101297366
  hyper

SEQ ID NO: 398450 - DNA, 111 bp, Homo sapiens; identical to SEQ ID NO: 202212
  chr10:101381346-101381457
  hyper

SEQ ID NO: 398451 - DNA, 501 bp, Homo sapiens; identical to SEQ ID NO: 234971
  chr10:101945663-101946164
  hyper

SEQ ID NO: 398452 - DNA, 388 bp, Homo sapiens; identical to SEQ ID NO: 234972
  chr10:102046129-102046517
  hyper

SEQ ID NO: 398453 - DNA, 52 bp, Homo sapiens; identical to SEQ ID NO: 234975
  chr10:102133791-102133843
  hyper

SEQ ID NO: 398454 - DNA, 705 bp, Homo sapiens; identical to SEQ ID NO: 234978
  chr10:102415928-102416633
  hyper

SEQ ID NO: 398455 - DNA, 98 bp, Homo sapiens; identical to SEQ ID NO: 202216
  chr10:102441134-102441232
  hyper

SEQ ID NO: 398456 - DNA, 101 bp, Homo sapiens; identical to SEQ ID NO: 234991
  chr10:102497995-102498096
  hyper

SEQ ID NO: 398457 - DNA, 181 bp, Homo sapiens; identical to SEQ ID NO: 287410
  chr10:102504567-102504748
  hyper

SEQ ID NO: 398458 - DNA, 112 bp, Homo sapiens; identical to SEQ ID NO: 234995
  chr10:102505252-102505364
  hyper

SEQ ID NO: 398459 - DNA, 263 bp, Homo sapiens; identical to SEQ ID NO: 235002
  chr10:102671979-102672242
  hyper

SEQ ID NO: 398460 - DNA, 189 bp, Homo sapiens; identical to SEQ ID NO: 235004
  chr10:102758641-102758830
  hyper

SEQ ID NO: 398461 - DNA, 381 bp, Homo sapiens; identical to SEQ ID NO: 287423
  chr10:102802620-102803001
  hyper

SEQ ID NO: 398462 - DNA, 403 bp, Homo sapiens; identical to SEQ ID NO: 235008
  chr10:102809890-102810293
  hyper

SEQ ID NO: 398463 - DNA, 204 bp, Homo sapiens; identical to SEQ ID NO: 235009
  chr10:102826290-102826494
  hyper

SEQ ID NO: 398464 - DNA, 120 bp, Homo sapiens; identical to SEQ ID NO: 202233
  chr10:102973524-102973644
  hyper

SEQ ID NO: 398465 - DNA, 221 bp, Homo sapiens; identical to SEQ ID NO: 287428
  chr10:102975334-102975555
  hyper

SEQ ID NO: 398466 - DNA, 270 bp, Homo sapiens; identical to SEQ ID NO: 287429
  chr10:102975880-102976150
  hyper

SEQ ID NO: 398467 - DNA, 234 bp, Homo sapiens; identical to SEQ ID NO: 287430
  chr10:102976180-102976414
  hyper

SEQ ID NO: 398468 - DNA, 325 bp, Homo sapiens; identical to SEQ ID NO: 287431
  chr10:102976669-102976994
  hyper

SEQ ID NO: 398469 - DNA, 71 bp, Homo sapiens; identical to SEQ ID NO: 287433
  chr10:102984234-102984305
  hyper

SEQ ID NO: 398470 - DNA, 244 bp, Homo sapiens; identical to SEQ ID NO: 287434
  chr10:102984541-102984785
  hyper

SEQ ID NO: 398471 - DNA, 164 bp, Homo sapiens; identical to SEQ ID NO: 287439
  chr10:103052147-103052311
  hyper

SEQ ID NO: 398472 - DNA, 199 bp, Homo sapiens; identical to SEQ ID NO: 287440
  chr10:103052440-103052639
  hyper

SEQ ID NO: 398473 - DNA, 138 bp, Homo sapiens; identical to SEQ ID NO: 235034
  chr10:103329326-103329464
  hyper

SEQ ID NO: 398474 - DNA, 439 bp, Homo sapiens; identical to SEQ ID NO: 235035
  chr10:103347719-103348158
  hyper

SEQ ID NO: 398475 - DNA, 140 bp, Homo sapiens; identical to SEQ ID NO: 202240
  chr10:103543156-103543296
  hyper

SEQ ID NO: 398476 - DNA, 31 bp, Homo sapiens; identical to SEQ ID NO: 235041
  chr10:103575733-103575764
  hyper

SEQ ID NO: 398477 - DNA, 31 bp, Homo sapiens; identical to SEQ ID NO: 202241
  chr10:103576004-103576035
  hyper

SEQ ID NO: 398478 - DNA, 257 bp, Homo sapiens; identical to SEQ ID NO: 235043
  chr10:103600530-103600787
  hyper

SEQ ID NO: 398479 - DNA, 198 bp, Homo sapiens; identical to SEQ ID NO: 287452
  chr10:103824903-103825101
  hyper

SEQ ID NO: 398480 - DNA, 116 bp, Homo sapiens; identical to SEQ ID NO: 235046
  chr10:103880250-103880366
  hyper

SEQ ID NO: 398481 - DNA, 174 bp, Homo sapiens; identical to SEQ ID NO: 235047
  chr10:103892295-103892469
  hyper

SEQ ID NO: 398482 - DNA, 199 bp, Homo sapiens; identical to SEQ ID NO: 202242
  chr10:103912112-103912311
  hyper

SEQ ID NO: 398483 - DNA, 31 bp, Homo sapiens; identical to SEQ ID NO: 235050
  chr10:104005226-104005257
  hyper

SEQ ID NO: 398484 - DNA, 217 bp, Homo sapiens; identical to SEQ ID NO: 202243
  chr10:104178852-104179069
  hyper

SEQ ID NO: 398485 - DNA, 99 bp, Homo sapiens; identical to SEQ ID NO: 235053
  chr10:104179457-104179556
  hyper

SEQ ID NO: 398486 - DNA, 292 bp, Homo sapiens; identical to SEQ ID NO: 235054
  chr10:104181705-104181997
  hyper

SEQ ID NO: 398487 - DNA, 111 bp, Homo sapiens; identical to SEQ ID NO: 235055
  chr10:104192423-104192534
  hyper

SEQ ID NO: 398488 - DNA, 46 bp, Homo sapiens; identical to SEQ ID NO: 202244
  chr10:104220986-104221032
  hyper

SEQ ID NO: 398489 - DNA, 142 bp, Homo sapiens; identical to SEQ ID NO: 235059
  chr10:104262487-104262629
  hyper

SEQ ID NO: 398490 - DNA, 64 bp, Homo sapiens; identical to SEQ ID NO: 235062
  chr10:104474416-104474480
  hyper

SEQ ID NO: 398491 - DNA, 235 bp, Homo sapiens; identical to SEQ ID NO: 235063
  chr10:104613987-104614222
  hyper

SEQ ID NO: 398492 - DNA, 249 bp, Homo sapiens; identical to SEQ ID NO: 287479
  chr10:105615413-105615662
  hyper

SEQ ID NO: 398493 - DNA, 64 bp, Homo sapiens; identical to SEQ ID NO: 202247
  chr10:105615718-105615782
  hyper

SEQ ID NO: 398494 - DNA, 256 bp, Homo sapiens; identical to SEQ ID NO: 235073
  chr10:105727531-105727787
  hyper

SEQ ID NO: 398495 - DNA, 31 bp, Homo sapiens; identical to SEQ ID NO: 287483
  chr10:106014281-106014312
  hyper

SEQ ID NO: 398496 - DNA, 343 bp, Homo sapiens; identical to SEQ ID NO: 287484
  chr10:106014356-106014699
  hyper

SEQ ID NO: 398497 - DNA, 158 bp, Homo sapiens; identical to SEQ ID NO: 235076
  chr10:106014939-106015097
  hyper

SEQ ID NO: 398498 - DNA, 88 bp, Homo sapiens; identical to SEQ ID NO: 287486
  chr10:106034508-106034596
  hyper

SEQ ID NO: 398499 - DNA, 110 bp, Homo sapiens; identical to SEQ ID NO: 287487
  chr10:106034651-106034761
  hyper

SEQ ID NO: 398500 - DNA, 198 bp, Homo sapiens
  chr10:106098190-106098388
  hyper
ggctctactgaacttcagagttactcatttcctggatgtcacaaaaactttttcctccttataagaacaaaacacccgcctctacccgcggccccggaagctccttaaggaggaccgtgtgggtttcggtggttgggcccaggatccgccgggaagaccttcccagtgagcccccagaaacttccccggcacggcaga

SEQ ID NO: 398501 - DNA, 138 bp, Homo sapiens; identical to SEQ ID NO: 235079
  chr10:106098568-106098706
  hyper

SEQ ID NO: 398502 - DNA, 102 bp, Homo sapiens; identical to SEQ ID NO: 223913
  chr10:106098946-106099048
  hyper

SEQ ID NO: 398503 - DNA, 173 bp, Homo sapiens; identical to SEQ ID NO: 202252
  chr10:109674972-109675145
  hyper

SEQ ID NO: 398504 - DNA, 149 bp, Homo sapiens; identical to SEQ ID NO: 235090
  chr10:111683213-111683362
  hyper

SEQ ID NO: 398505 - DNA, 98 bp, Homo sapiens; identical to SEQ ID NO: 202255
  chr10:111768340-111768438
  hyper

SEQ ID NO: 398506 - DNA, 48 bp, Homo sapiens; identical to SEQ ID NO: 202256
  chr10:111968983-111969031
  hyper

SEQ ID NO: 398507 - DNA, 46 bp, Homo sapiens; identical to SEQ ID NO: 202257
  chr10:111969325-111969371
  hyper

SEQ ID NO: 398508 - DNA, 249 bp, Homo sapiens; identical to SEQ ID NO: 235095
  chr10:112064510-112064759
  hyper

SEQ ID NO: 398509 - DNA, 76 bp, Homo sapiens; identical to SEQ ID NO: 202262
  chr10:112328695-112328771
  hyper

SEQ ID NO: 398510 - DNA, 39 bp, Homo sapiens; identical to SEQ ID NO: 202263
  chr10:112333464-112333503
  hyper

SEQ ID NO: 398511 - DNA, 80 bp, Homo sapiens; identical to SEQ ID NO: 202266
  chr10:112337592-112337672
  hyper

SEQ ID NO: 398512 - DNA, 81 bp, Homo sapiens; identical to SEQ ID NO: 202270
  chr10:112342319-112342400
  hyper

SEQ ID NO: 398513 - DNA, 214 bp, Homo sapiens; identical to SEQ ID NO: 202273
  chr10:112343940-112344154
  hyper

SEQ ID NO: 398514 - DNA, 387 bp, Homo sapiens; identical to SEQ ID NO: 202274
  chr10:112349362-112349749
  hyper

SEQ ID NO: 398515 - DNA, 151 bp, Homo sapiens; identical to SEQ ID NO: 202277
  chr10:112352830-112352981
  hyper

SEQ ID NO: 398516 - DNA, 153 bp, Homo sapiens; identical to SEQ ID NO: 202278
  chr10:112356155-112356308
  hyper

SEQ ID NO: 398517 - DNA, 152 bp, Homo sapiens; identical to SEQ ID NO: 202279
  chr10:112357896-112358048
  hyper

SEQ ID NO: 398518 - DNA, 159 bp, Homo sapiens; identical to SEQ ID NO: 202280
  chr10:112359411-112359570
  hyper

SEQ ID NO: 398519 - DNA, 109 bp, Homo sapiens; identical to SEQ ID NO: 202282
  chr10:112360779-112360888
  hyper

SEQ ID NO: 398520 - DNA, 542 bp, Homo sapiens; identical to SEQ ID NO: 202283
  chr10:112361394-112361936
  hyper

SEQ ID NO: 398521 - DNA, 817 bp, Homo sapiens; identical to SEQ ID NO: 202284
  chr10:112362231-112363048
  hyper

SEQ ID NO: 398522 - DNA, 404 bp, Homo sapiens; identical to SEQ ID NO: 202285
  chr10:112363988-112364392
  hyper

SEQ ID NO: 398523 - DNA, 106 bp, Homo sapiens; identical to SEQ ID NO: 202289
  chr10:112631244-112631350
  hyper

SEQ ID NO: 398524 - DNA, 69 bp, Homo sapiens; identical to SEQ ID NO: 235101
  chr10:112678715-112678784
  hyper

SEQ ID NO: 398525 - DNA, 136 bp, Homo sapiens; identical to SEQ ID NO: 235102
  chr10:112678992-112679128
  hyper

SEQ ID NO: 398526 - DNA, 181 bp, Homo sapiens; identical to SEQ ID NO: 287541
  chr10:114206543-114206724
  hyper

SEQ ID NO: 398527 - DNA, 33 bp, Homo sapiens; identical to SEQ ID NO: 202295
  chr10:114709864-114709897
  hyper

SEQ ID NO: 398528 - DNA, 56 bp, Homo sapiens; identical to SEQ ID NO: 223949
  chr10:114710115-114710171
  hyper

SEQ ID NO: 398529 - DNA, 262 bp, Homo sapiens; identical to SEQ ID NO: 235110
  chr10:115614294-115614556
  hyper

SEQ ID NO: 398530 - DNA, 64 bp, Homo sapiens; identical to SEQ ID NO: 235113
  chr10:115804304-115804368
  hyper

SEQ ID NO: 398531 - DNA, 112 bp, Homo sapiens; identical to SEQ ID NO: 388803
  chr10:115804427-115804539
  hyper

SEQ ID NO: 398532 - DNA, 40 bp, Homo sapiens; identical to SEQ ID NO: 388804
  chr10:115805287-115805327
  hyper

SEQ ID NO: 398533 - DNA, 161 bp, Homo sapiens; identical to SEQ ID NO: 235116
  chr10:115933903-115934064
  hyper

SEQ ID NO: 398534 - DNA, 130 bp, Homo sapiens
  chr10:116164444-116164574
  hyper
gaggctgacagtcggctcttgagtcggtgcgcgcccgcggccccgctcgccgcccccggccgccttggcactcccttcacgtcttgactccgggggcgtcgagagggaacgagactgggacgttcccaaa

SEQ ID NO: 398535 - DNA, 85 bp, Homo sapiens; identical to SEQ ID NO: 202302
  chr10:116164654-116164739
  hyper

SEQ ID NO: 398536 - DNA, 369 bp, Homo sapiens; identical to SEQ ID NO: 235120
  chr10:116286487-116286856
  hyper

SEQ ID NO: 398537 - DNA, 175 bp, Homo sapiens; identical to SEQ ID NO: 287567
  chr10:116391551-116391726
  hyper

SEQ ID NO: 398538 - DNA, 204 bp, Homo sapiens; identical to SEQ ID NO: 287568
  chr10:116391813-116392017
  hyper

SEQ ID NO: 398539 - DNA, 43 bp, Homo sapiens; identical to SEQ ID NO: 235123
  chr10:116581330-116581373
  hyper

SEQ ID NO: 398540 - DNA, 74 bp, Homo sapiens; identical to SEQ ID NO: 287572
  chr10:116852172-116852246
  hyper

SEQ ID NO: 398541 - DNA, 185 bp, Homo sapiens
  chr10:116852441-116852626
  hyper
tcgctgaccccacaacgtggtcggactgcggtgcctttaaggcttttgcctgctgcacatgctcagctctttgtgtgttgttggagtttttctctcttaagagaaaaagaagaaataggcaggaggatggggcggaggaagggggaagcgctagggaaaaagcgttgcacttttgcagctgcaga

SEQ ID NO: 398542 - DNA, 82 bp, Homo sapiens; identical to SEQ ID NO: 202306
  chr10:118034168-118034250
  hyper

SEQ ID NO: 398543 - DNA, 295 bp, Homo sapiens; identical to SEQ ID NO: 388809
  chr10:118764187-118764482
  hyper

SEQ ID NO: 398544 - DNA, 141 bp, Homo sapiens; identical to SEQ ID NO: 223957
  chr10:118764980-118765121
  hyper

SEQ ID NO: 398545 - DNA, 308 bp, Homo sapiens; identical to SEQ ID NO: 202311
  chr10:119256046-119256354
  hyper

SEQ ID NO: 398546 - DNA, 87 bp, Homo sapiens; identical to SEQ ID NO: 202314
  chr10:119295683-119295770
  hyper

SEQ ID NO: 398547 - DNA, 31 bp, Homo sapiens; identical to SEQ ID NO: 202315
  chr10:119295809-119295840
  hyper

SEQ ID NO: 398548 - DNA, 37 bp, Homo sapiens; identical to SEQ ID NO: 202316
  chr10:119295872-119295909
  hyper

SEQ ID NO: 398549 - DNA, 41 bp, Homo sapiens; identical to SEQ ID NO: 202317
  chr10:119295951-119295992
  hyper

SEQ ID NO: 398550 - DNA, 39 bp, Homo sapiens; identical to SEQ ID NO: 202318
  chr10:119296131-119296170
  hyper

SEQ ID NO: 398551 - DNA, 60 bp, Homo sapiens; identical to SEQ ID NO: 202323
  chr10:119301840-119301900
  hyper

SEQ ID NO: 398552 - DNA, 95 bp, Homo sapiens; identical to SEQ ID NO: 202324
  chr10:119302046-119302141
  hyper

SEQ ID NO: 398553 - DNA, 147 bp, Homo sapiens; identical to SEQ ID NO: 202325
  chr10:119302266-119302413
  hyper

SEQ ID NO: 398554 - DNA, 89 bp, Homo sapiens
  chr10:119303861-119303950
  hyper
ggtctggtttttgtttttctttctttctttaaaaaaaaaaaaaaagaacctggtcaggaaactgtcttagagggaaatatctgttcgtg

SEQ ID NO: 398555 - DNA, 97 bp, Homo sapiens; identical to SEQ ID NO: 287602
  chr10:119305284-119305381
  hyper

SEQ ID NO: 398556 - DNA, 141 bp, Homo sapiens; identical to SEQ ID NO: 202328
  chr10:119305975-119306116
  hyper

SEQ ID NO: 398557 - DNA, 57 bp, Homo sapiens; identical to SEQ ID NO: 287604
  chr10:119306372-119306429
  hyper

SEQ ID NO: 398558 - DNA, 141 bp, Homo sapiens; identical to SEQ ID NO: 235153
  chr10:119309782-119309923
  hyper

SEQ ID NO: 398559 - DNA, 112 bp, Homo sapiens; identical to SEQ ID NO: 202330
  chr10:119310263-119310375
  hyper

SEQ ID NO: 398560 - DNA, 223 bp, Homo sapiens; identical to SEQ ID NO: 235158
  chr10:119805618-119805841
  hyper

SEQ ID NO: 398561 - DNA, 73 bp, Homo sapiens; identical to SEQ ID NO: 235159
  chr10:119806446-119806519
  hyper

SEQ ID NO: 398562 - DNA, 418 bp, Homo sapiens; identical to SEQ ID NO: 223964
  chr10:120514800-120515218
  hyper

SEQ ID NO: 398563 - DNA, 127 bp, Homo sapiens; identical to SEQ ID NO: 235164
  chr10:121356665-121356792
  hyper

SEQ ID NO: 398564 - DNA, 106 bp, Homo sapiens; identical to SEQ ID NO: 202335
  chr10:121632626-121632732
  hyper

SEQ ID NO: 398565 - DNA, 819 bp, Homo sapiens; identical to SEQ ID NO: 202342
  chr10:123872187-123873006
  hyper

SEQ ID NO: 398566 - DNA, 442 bp, Homo sapiens; identical to SEQ ID NO: 287633
  chr10:123873040-123873482
  hyper

SEQ ID NO: 398567 - DNA, 373 bp, Homo sapiens
  chr10:124134589-124134962
  hyper
gtcttcttcccgtgggtccccgattgttttcccgacgtcagccctcagcggcgcccggcgggggagggcgggaggcccgcggcggtcgcggggccgacgagctcctcggcgtctccgccccccgagaaatcccgctcggggcgcggtgcgcgcagctgcccggggattcccggtggcgccggtcggagcgcctccctccagggctgtgcccgcggggcgcgcgtccccgggcatcctttcctggtgtttaatgcattttggcttcaggacttgccgaggccgaagccggctccgccctgggccctgaagtcgggcggtgtccgcgatttacctccgcaccttcggggcaggtggccagaggcagcgttgaaag

SEQ ID NO: 398568 - DNA, 35 bp, Homo sapiens; identical to SEQ ID NO: 235179
  chr10:124768241-124768276
  hyper

SEQ ID NO: 398569 - DNA, 133 bp, Homo sapiens; identical to SEQ ID NO: 287645
  chr10:124904007-124904140
  hyper

SEQ ID NO: 398570 - DNA, 118 bp, Homo sapiens; identical to SEQ ID NO: 287654
  chr10:126847239-126847357
  hyper

SEQ ID NO: 398571 - DNA, 59 bp, Homo sapiens; identical to SEQ ID NO: 235204
  chr10:126850346-126850405
  hyper

SEQ ID NO: 398572 - DNA, 153 bp, Homo sapiens; identical to SEQ ID NO: 202363
  chr10:128593608-128593761
  hyper

SEQ ID NO: 398573 - DNA, 98 bp, Homo sapiens; identical to SEQ ID NO: 384355
  chr10:128593793-128593891
  hyper

SEQ ID NO: 398574 - DNA, 421 bp, Homo sapiens; identical to SEQ ID NO: 287671
  chr10:129705208-129705629
  hyper

SEQ ID NO: 398575 - DNA, 181 bp, Homo sapiens; identical to SEQ ID NO: 202368
  chr10:129706031-129706212
  hyper

SEQ ID NO: 398576 - DNA, 348 bp, Homo sapiens; identical to SEQ ID NO: 287674
  chr10:129948377-129948725
  hyper

SEQ ID NO: 398577 - DNA, 36 bp, Homo sapiens; identical to SEQ ID NO: 287675
  chr10:129948755-129948791
  hyper

SEQ ID NO: 398578 - DNA, 160 bp, Homo sapiens; identical to SEQ ID NO: 287681
  chr10:133999363-133999523
  hyper

SEQ ID NO: 398579 - DNA, 357 bp, Homo sapiens; identical to SEQ ID NO: 235236
  chr10:134210965-134211322
  hyper

SEQ ID NO: 398580 - DNA, 116 bp, Homo sapiens; identical to SEQ ID NO: 287691
  chr10:134597971-134598087
  hyper

SEQ ID NO: 398581 - DNA, 92 bp, Homo sapiens; identical to SEQ ID NO: 235242
  chr10:134650441-134650533
  hyper

SEQ ID NO: 398582 - DNA, 216 bp, Homo sapiens; identical to SEQ ID NO: 287701
  chr10:135050910-135051126
  hyper

SEQ ID NO: 398583 - DNA, 97 bp, Homo sapiens; identical to SEQ ID NO: 47990
  chr10:135071117-135071214
  hyper

SEQ ID NO: 398584 - DNA, 42 bp, Homo sapiens; identical to SEQ ID NO: 120067
  chr10:135121725-135121767
  hyper

SEQ ID NO: 398585 - DNA, 456 bp, Homo sapiens; identical to SEQ ID NO: 287708
  chr10:135149869-135150325
  hyper

SEQ ID NO: 398586 - DNA, 229 bp, Homo sapiens; identical to SEQ ID NO: 235260
  chr11:207667-207896
  hyper

SEQ ID NO: 398587 - DNA, 138 bp, Homo sapiens; identical to SEQ ID NO: 224009
  chr11:450011-450149
  hyper

SEQ ID NO: 398588 - DNA, 107 bp, Homo sapiens; identical to SEQ ID NO: 224010
  chr11:450172-450279
  hyper

SEQ ID NO: 398589 - DNA, 182 bp, Homo sapiens; identical to SEQ ID NO: 202391
  chr11:518712-518894
  hyper

SEQ ID NO: 398590 - DNA, 61 bp, Homo sapiens; identical to SEQ ID NO: 287725
  chr11:518933-518994
  hyper

SEQ ID NO: 398591 - DNA, 106 bp, Homo sapiens; identical to SEQ ID NO: 235270
  chr11:568188-568294
  hyper

SEQ ID NO: 398592 - DNA, 60 bp, Homo sapiens; identical to SEQ ID NO: 235272
  chr11:576422-576482
  hyper

SEQ ID NO: 398593 - DNA, 151 bp, Homo sapiens; identical to SEQ ID NO: 120121
  chr11:639682-639833
  hyper

SEQ ID NO: 398594 - DNA, 67 bp, Homo sapiens; identical to SEQ ID NO: 202395
  chr11:809683-809750
  hyper

SEQ ID NO: 398595 - DNA, 473 bp, Homo sapiens; identical to SEQ ID NO: 287743
  chr11:1357818-1358291
  hyper

SEQ ID NO: 398596 - DNA, 52 bp, Homo sapiens; identical to SEQ ID NO: 287744
  chr11:1358332-1358384
  hyper

SEQ ID NO: 398597 - DNA, 498 bp, Homo sapiens; identical to SEQ ID NO: 224022
  chr11:1592747-1593245
  hyper

SEQ ID NO: 398598 - DNA, 95 bp, Homo sapiens; identical to SEQ ID NO: 202401
  chr11:1593577-1593672
  hyper

SEQ ID NO: 398599 - DNA, 152 bp, Homo sapiens; identical to SEQ ID NO: 287751
  chr11:1769712-1769864
  hyper

SEQ ID NO: 398600 - DNA, 216 bp, Homo sapiens; identical to SEQ ID NO: 235288
  chr11:1968629-1968845
  hyper

SEQ ID NO: 398601 - DNA, 65 bp, Homo sapiens; identical to SEQ ID NO: 224026
  chr11:2554360-2554425
  hyper

SEQ ID NO: 398602 - DNA, 64 bp, Homo sapiens; identical to SEQ ID NO: 202409
  chr11:2554454-2554518
  hyper

SEQ ID NO: 398603 - DNA, 347 bp, Homo sapiens
  chr11:2905510-2905857
  hyper
tacgtcgccgcgcaatgtgctgtgtaagcatttccccttgtcccgcggccaagccccccggggccgccgccgcgcttaaccccctccacgccgtgctcacggcgcccggccgcgcccggggaggggctcccgcggccgggggcgaaaactgcgctcccggggggtcgcggccgggattcagcctcccaccccgcccgcgcgaagccgctggagggcacaacaacggggcggggaggggggtaagggcgcagccgcgccctgagcgctgcgggccctttaatgccacgggaggaggcgggaacccagcgaggcccccgagggctggggggaccggccggccggacaaa

SEQ ID NO: 398604 - DNA, 433 bp, Homo sapiens; identical to SEQ ID NO: 224029
  chr11:2951691-2952124
  hyper

SEQ ID NO: 398605 - DNA, 297 bp, Homo sapiens; identical to SEQ ID NO: 235302
  chr11:3013495-3013792
  hyper

SEQ ID NO: 398606 - DNA, 140 bp, Homo sapiens; identical to SEQ ID NO: 202415
  chr11:3014088-3014228
  hyper

SEQ ID NO: 398607 - DNA, 299 bp, Homo sapiens; identical to SEQ ID NO: 235304
  chr11:3078596-3078895
  hyper

SEQ ID NO: 398608 - DNA, 235 bp, Homo sapiens; identical to SEQ ID NO: 235308
  chr11:3224437-3224672
  hyper

SEQ ID NO: 398609 - DNA, 74 bp, Homo sapiens; identical to SEQ ID NO: 287785
  chr11:6281090-6281164
  hyper

SEQ ID NO: 398610 - DNA, 157 bp, Homo sapiens; identical to SEQ ID NO: 287786
  chr11:6341237-6341394
  hyper

SEQ ID NO: 398611 - DNA, 285 bp, Homo sapiens; identical to SEQ ID NO: 287787
  chr11:6341484-6341769
  hyper

SEQ ID NO: 398612 - DNA, 41 bp, Homo sapiens; identical to SEQ ID NO: 202420
  chr11:6440456-6440497
  hyper

SEQ ID NO: 398613 - DNA, 105 bp, Homo sapiens; identical to SEQ ID NO: 202421
  chr11:6502787-6502892
  hyper

SEQ ID NO: 398614 - DNA, 177 bp, Homo sapiens; identical to SEQ ID NO: 287793
  chr11:6677036-6677213
  hyper

SEQ ID NO: 398615 - DNA, 349 bp, Homo sapiens; identical to SEQ ID NO: 235321
  chr11:6704608-6704957
  hyper

SEQ ID NO: 398616 - DNA, 107 bp, Homo sapiens; identical to SEQ ID NO: 202424
  chr11:7272753-7272860
  hyper

SEQ ID NO: 398617 - DNA, 40 bp, Homo sapiens; identical to SEQ ID NO: 202425
  chr11:8103155-8103195
  hyper

SEQ ID NO: 398618 - DNA, 49 bp, Homo sapiens; identical to SEQ ID NO: 235335
  chr11:8704467-8704516
  hyper

SEQ ID NO: 398619 - DNA, 884 bp, Homo sapiens; identical to SEQ ID NO: 235341
  chr11:9286204-9287088
  hyper

SEQ ID NO: 398620 - DNA, 268 bp, Homo sapiens; identical to SEQ ID NO: 235344
  chr11:9482341-9482609
  hyper

SEQ ID NO: 398621 - DNA, 577 bp, Homo sapiens; identical to SEQ ID NO: 224046
  chr11:9685464-9686041
  hyper

SEQ ID NO: 398622 - DNA, 123 bp, Homo sapiens; identical to SEQ ID NO: 202436
  chr11:10316353-10316476
  hyper

SEQ ID NO: 398623 - DNA, 159 bp, Homo sapiens; identical to SEQ ID NO: 235352
  chr11:10562151-10562310
  hyper

SEQ ID NO: 398624 - DNA, 304 bp, Homo sapiens; identical to SEQ ID NO: 287846
  chr11:13298519-13298823
  hyper

SEQ ID NO: 398625 - DNA, 80 bp, Homo sapiens; identical to SEQ ID NO: 235368
  chr11:13485189-13485269
  hyper

SEQ ID NO: 398626 - DNA, 396 bp, Homo sapiens; identical to SEQ ID NO: 235372
  chr11:14541533-14541929
  hyper

SEQ ID NO: 398627 - DNA, 137 bp, Homo sapiens; identical to SEQ ID NO: 235373
  chr11:14542171-14542308
  hyper

SEQ ID NO: 398628 - DNA, 251 bp, Homo sapiens; identical to SEQ ID NO: 202457
  chr11:15671676-15671927
  hyper

SEQ ID NO: 398629 - DNA, 57 bp, Homo sapiens; identical to SEQ ID NO: 235378
  chr11:16627948-16628005
  hyper

SEQ ID NO: 398630 - DNA, 180 bp, Homo sapiens; identical to SEQ ID NO: 287868
  chr11:16632670-16632850
  hyper

SEQ ID NO: 398631 - DNA, 112 bp, Homo sapiens; identical to SEQ ID NO: 202462
  chr11:16759951-16760063
  hyper

SEQ ID NO: 398632 - DNA, 151 bp, Homo sapiens
  chr11:17498265-17498416
  hyper
cctggtccacccggtaggcggccgagtggttctcgctgccgcagaaggccaggggcatggcggcgcgggcgcgggctgggctcgggctcagctggctccgctggctccgcgcgcctgccgcgcctctgtcccttgcagctccgccgcccgg

SEQ ID NO: 398633 - DNA, 260 bp, Homo sapiens; identical to SEQ ID NO: 224059
  chr11:17498486-17498746
  hyper

SEQ ID NO: 398634 - DNA, 81 bp, Homo sapiens; identical to SEQ ID NO: 287885
  chr11:17741187-17741268
  hyper

SEQ ID NO: 398635 - DNA, 81 bp, Homo sapiens; identical to SEQ ID NO: 287886
  chr11:17741598-17741679
  hyper

SEQ ID NO: 398636 - DNA, 156 bp, Homo sapiens; identical to SEQ ID NO: 287892
  chr11:18034650-18034806
  hyper

SEQ ID NO: 398637 - DNA, 114 bp, Homo sapiens; identical to SEQ ID NO: 48214
  chr11:18034821-18034935
  hyper

SEQ ID NO: 398638 - DNA, 107 bp, Homo sapiens; identical to SEQ ID NO: 235402
  chr11:18343666-18343773
  hyper

SEQ ID NO: 398639 - DNA, 1228 bp, Homo sapiens; identical to SEQ ID NO: 235403
  chr11:18415860-18417088
  hyper

SEQ ID NO: 398640 - DNA, 240 bp, Homo sapiens; identical to SEQ ID NO: 235405
  chr11:18548581-18548821
  hyper

SEQ ID NO: 398641 - DNA, 54 bp, Homo sapiens; identical to SEQ ID NO: 235406
  chr11:18610408-18610462
  hyper

SEQ ID NO: 398642 - DNA, 32 bp, Homo sapiens; identical to SEQ ID NO: 235407
  chr11:18656064-18656096
  hyper

SEQ ID NO: 398643 - DNA, 36 bp, Homo sapiens; identical to SEQ ID NO: 202477
  chr11:18742610-18742646
  hyper

SEQ ID NO: 398644 - DNA, 313 bp, Homo sapiens; identical to SEQ ID NO: 202478
  chr11:18743161-18743474
  hyper

SEQ ID NO: 398645 - DNA, 115 bp, Homo sapiens; identical to SEQ ID NO: 202479
  chr11:18743577-18743692
  hyper

SEQ ID NO: 398646 - DNA, 201 bp, Homo sapiens; identical to SEQ ID NO: 287904
  chr11:18814051-18814252
  hyper

SEQ ID NO: 398647 - DNA, 225 bp, Homo sapiens; identical to SEQ ID NO: 287909
  chr11:19735484-19735709
  hyper

SEQ ID NO: 398648 - DNA, 143 bp, Homo sapiens; identical to SEQ ID NO: 287915
  chr11:20184147-20184290
  hyper

SEQ ID NO: 398649 - DNA, 89 bp, Homo sapiens; identical to SEQ ID NO: 235434
  chr11:20689751-20689840
  hyper

SEQ ID NO: 398650 - DNA, 110 bp, Homo sapiens; identical to SEQ ID NO: 287925
  chr11:22363209-22363319
  hyper

SEQ ID NO: 398651 - DNA, 137 bp, Homo sapiens; identical to SEQ ID NO: 287926
  chr11:22646583-22646720
  hyper

SEQ ID NO: 398652 - DNA, 133 bp, Homo sapiens; identical to SEQ ID NO: 202489
  chr11:22850852-22850985
  hyper

SEQ ID NO: 398653 - DNA, 117 bp, Homo sapiens; identical to SEQ ID NO: 235449
  chr11:27384895-27385012
  hyper

SEQ ID NO: 398654 - DNA, 32 bp, Homo sapiens; identical to SEQ ID NO: 235453
  chr11:27722046-27722078
  hyper

SEQ ID NO: 398655 - DNA, 216 bp, Homo sapiens; identical to SEQ ID NO: 287940
  chr11:27743203-27743419
  hyper

SEQ ID NO: 398656 - DNA, 147 bp, Homo sapiens; identical to SEQ ID NO: 235459
  chr11:28129838-28129985
  hyper

SEQ ID NO: 398657 - DNA, 233 bp, Homo sapiens; identical to SEQ ID NO: 235468
  chr11:31391279-31391512
  hyper

SEQ ID NO: 398658 - DNA, 231 bp, Homo sapiens; identical to SEQ ID NO: 235469
  chr11:31531543-31531774
  hyper

SEQ ID NO: 398659 - DNA, 90 bp, Homo sapiens; identical to SEQ ID NO: 235486
  chr11:31836598-31836688
  hyper

SEQ ID NO: 398660 - DNA, 279 bp, Homo sapiens
  chr11:33890957-33891236
  hyper
ggcgggggcgctccctttgtggcgcggggctggccggctgccggggctcggaccccctcgggtgctcgggcgccgccgccgccgccgccgtcgccgccgctcctgcgcctccgcttgctccggcgctccgccggcgagctcgcccctccgcgctcaaggacagtcaccgcgctcccttcaaacgccaaagagagagagcgaatcaccgggctgcgggcgcgccgcggccgaggcgggggccggggcgcgcagcctggctccaggcggctgcagctgctg

SEQ ID NO: 398661 - DNA, 88 bp, Homo sapiens; identical to SEQ ID NO: 287981
  chr11:35441758-35441846
  hyper

SEQ ID NO: 398662 - DNA, 70 bp, Homo sapiens; identical to SEQ ID NO: 388861
  chr11:35640429-35640499
  hyper

SEQ ID NO: 398663 - DNA, 56 bp, Homo sapiens
  chr11:35641617-35641673
  hyper
aaacttcagcttttcacccacctgcccctttctttcaatcccacgctgtttccttt

SEQ ID NO: 398664 - DNA, 79 bp, Homo sapiens; identical to SEQ ID NO: 202520
  chr11:36397978-36398057
  hyper

SEQ ID NO: 398665 - DNA, 223 bp, Homo sapiens; identical to SEQ ID NO: 202521
  chr11:36398477-36398700
  hyper

SEQ ID NO: 398666 - DNA, 199 bp, Homo sapiens; identical to SEQ ID NO: 235526
  chr11:36531740-36531939
  hyper

SEQ ID NO: 398667 - DNA, 411 bp, Homo sapiens; identical to SEQ ID NO: 235527
  chr11:36616034-36616445
  hyper

SEQ ID NO: 398668 - DNA, 131 bp, Homo sapiens; identical to SEQ ID NO: 388863
  chr11:40315285-40315416
  hyper

SEQ ID NO: 398669 - DNA, 214 bp, Homo sapiens; identical to SEQ ID NO: 235529
  chr11:43333313-43333527
  hyper

SEQ ID NO: 398670 - DNA, 103 bp, Homo sapiens
  chr11:43965360-43965463
  hyper
gatctttttacctggatatgtctgtgaggctcctgaaaggagacaaataaagtcaatatatttgcacagtgcagttttccaggctcttgactttttgcacctt

SEQ ID NO: 398671 - DNA, 128 bp, Homo sapiens; identical to SEQ ID NO: 202530
  chr11:44087990-44088118
  hyper

SEQ ID NO: 398672 - DNA, 374 bp, Homo sapiens; identical to SEQ ID NO: 288019
  chr11:45307446-45307820
  hyper

SEQ ID NO: 398673 - DNA, 155 bp, Homo sapiens; identical to SEQ ID NO: 202536
  chr11:45307857-45308012
  hyper

SEQ ID NO: 398674 - DNA, 77 bp, Homo sapiens; identical to SEQ ID NO: 288023
  chr11:45686160-45686237
  hyper

SEQ ID NO: 398675 - DNA, 152 bp, Homo sapiens; identical to SEQ ID NO: 288024
  chr11:45687045-45687197
  hyper

SEQ ID NO: 398676 - DNA, 217 bp, Homo sapiens; identical to SEQ ID NO: 202539
  chr11:45907277-45907494
  hyper

SEQ ID NO: 398677 - DNA, 45 bp, Homo sapiens; identical to SEQ ID NO: 235565
  chr11:46141117-46141162
  hyper

SEQ ID NO: 398678 - DNA, 62 bp, Homo sapiens; identical to SEQ ID NO: 202540
  chr11:46264958-46265020
  hyper

SEQ ID NO: 398679 - DNA, 77 bp, Homo sapiens; identical to SEQ ID NO: 288037
  chr11:46412965-46413042
  hyper

SEQ ID NO: 398680 - DNA, 161 bp, Homo sapiens
  chr11:46413304-46413465
  hyper
ccgcagctcccggcgctgtggctccgactcgcgctcacgctcgcacttttccccgagccgcgtgatgtcacgaggaagcagccaatcgtggcggggccgcgccgcccgccccgggccggtcacccggcggcgacgcgcgggggtcaacacccgaggcgtcg

SEQ ID NO: 398681 - DNA, 333 bp, Homo sapiens; identical to SEQ ID NO: 224102
  chr11:46564032-46564365
  hyper

SEQ ID NO: 398682 - DNA, 182 bp, Homo sapiens; identical to SEQ ID NO: 224103
  chr11:46848281-46848463
  hyper

SEQ ID NO: 398683 - DNA, 246 bp, Homo sapiens; identical to SEQ ID NO: 235580
  chr11:47279142-47279388
  hyper

SEQ ID NO: 398684 - DNA, 154 bp, Homo sapiens; identical to SEQ ID NO: 235584
  chr11:47664236-47664390
  hyper

SEQ ID NO: 398685 - DNA, 32 bp, Homo sapiens; identical to SEQ ID NO: 235585
  chr11:47789176-47789208
  hyper

SEQ ID NO: 398686 - DNA, 231 bp, Homo sapiens; identical to SEQ ID NO: 235589
  chr11:57103415-57103646
  hyper

SEQ ID NO: 398687 - DNA, 78 bp, Homo sapiens; identical to SEQ ID NO: 235593
  chr11:57298238-57298316
  hyper

SEQ ID NO: 398688 - DNA, 136 bp, Homo sapiens; identical to SEQ ID NO: 288065
  chr11:57414486-57414622
  hyper

SEQ ID NO: 398689 - DNA, 109 bp, Homo sapiens; identical to SEQ ID NO: 202550
  chr11:57425067-57425176
  hyper

SEQ ID NO: 398690 - DNA, 51 bp, Homo sapiens; identical to SEQ ID NO: 202551
  chr11:57434928-57434979
  hyper

SEQ ID NO: 398691 - DNA, 429 bp, Homo sapiens; identical to SEQ ID NO: 235604
  chr11:58912103-58912532
  hyper

SEQ ID NO: 398692 - DNA, 45 bp, Homo sapiens; identical to SEQ ID NO: 235613
  chr11:60737965-60738010
  hyper

SEQ ID NO: 398693 - DNA, 155 bp, Homo sapiens; identical to SEQ ID NO: 48499
  chr11:60775226-60775381
  hyper

SEQ ID NO: 398694 - DNA, 306 bp, Homo sapiens; identical to SEQ ID NO: 235614
  chr11:60928909-60929215
  hyper

SEQ ID NO: 398695 - DNA, 128 bp, Homo sapiens; identical to SEQ ID NO: 202560
  chr11:61159724-61159852
  hyper

SEQ ID NO: 398696 - DNA, 224 bp, Homo sapiens; identical to SEQ ID NO: 235618
  chr11:61160436-61160660
  hyper

SEQ ID NO: 398697 - DNA, 406 bp, Homo sapiens; identical to SEQ ID NO: 235624
  chr11:61447552-61447958
  hyper

SEQ ID NO: 398698 - DNA, 342 bp, Homo sapiens
  chr11:61520025-61520367
  hyper
cggcgggcggggcgcgtggggcgggcaggggccgggccagggacgcgcggggggcaagcgcggcggcggaccgggcgggaccgtagccggagcccagccgggactgtcgcgcgggccgcgccggcgatgccgcgcccccgggccgggctgtagcggggccgcggctggagtgtgcgccgggcaggcgggacatggaggtggtggacgagacggaggcgctgcagcgcttcttcgaaggtgagagaccgcgggctggcggcggcgaccctctggcgctgggaacccccggctgatctccccgggaactggggctcctcgctgtgtttccgcctcctctggctg

SEQ ID NO: 398699 - DNA, 372 bp, Homo sapiens; identical to SEQ ID NO: 288103
  chr11:61582809-61583181
  hyper

SEQ ID NO: 398700 - DNA, 265 bp, Homo sapiens; identical to SEQ ID NO: 288104
  chr11:61583629-61583894
  hyper

SEQ ID NO: 398701 - DNA, 679 bp, Homo sapiens; identical to SEQ ID NO: 288105
  chr11:61584126-61584805
  hyper

SEQ ID NO: 398702 - DNA, 35 bp, Homo sapiens; identical to SEQ ID NO: 235631
  chr11:61735124-61735159
  hyper

SEQ ID NO: 398703 - DNA, 164 bp, Homo sapiens; identical to SEQ ID NO: 224119
  chr11:62192262-62192426
  hyper

SEQ ID NO: 398704 - DNA, 468 bp, Homo sapiens; identical to SEQ ID NO: 202568
  chr11:62313646-62314114
  hyper

SEQ ID NO: 398705 - DNA, 301 bp, Homo sapiens; identical to SEQ ID NO: 235634
  chr11:62314747-62315048
  hyper

SEQ ID NO: 398706 - DNA, 32 bp, Homo sapiens; identical to SEQ ID NO: 202569
  chr11:62359274-62359306
  hyper

SEQ ID NO: 398707 - DNA, 232 bp, Homo sapiens; identical to SEQ ID NO: 235639
  chr11:62413282-62413514
  hyper

SEQ ID NO: 398708 - DNA, 68 bp, Homo sapiens; identical to SEQ ID NO: 235640
  chr11:62414222-62414290
  hyper

SEQ ID NO: 398709 - DNA, 395 bp, Homo sapiens; identical to SEQ ID NO: 235641
  chr11:62420564-62420959
  hyper

SEQ ID NO: 398710 - DNA, 304 bp, Homo sapiens; identical to SEQ ID NO: 288124
  chr11:62432819-62433123
  hyper

SEQ ID NO: 398711 - DNA, 231 bp, Homo sapiens; identical to SEQ ID NO: 48540
  chr11:62433206-62433437
  hyper

SEQ ID NO: 398712 - DNA, 239 bp, Homo sapiens; identical to SEQ ID NO: 224123
  chr11:62473884-62474123
  hyper

SEQ ID NO: 398713 - DNA, 118 bp, Homo sapiens; identical to SEQ ID NO: 288128
  chr11:62476910-62477028
  hyper

SEQ ID NO: 398714 - DNA, 208 bp, Homo sapiens; identical to SEQ ID NO: 120837
  chr11:62477103-62477311
  hyper

SEQ ID NO: 398715 - DNA, 249 bp, Homo sapiens; identical to SEQ ID NO: 235645
  chr11:62495747-62495996
  hyper

SEQ ID NO: 398716 - DNA, 410 bp, Homo sapiens; identical to SEQ ID NO: 235649
  chr11:62572860-62573270
  hyper

SEQ ID NO: 398717 - DNA, 105 bp, Homo sapiens; identical to SEQ ID NO: 288136
  chr11:62609872-62609977
  hyper

SEQ ID NO: 398718 - DNA, 610 bp, Homo sapiens; identical to SEQ ID NO: 235651
  chr11:62623424-62624034
  hyper

SEQ ID NO: 398719 - DNA, 206 bp, Homo sapiens; identical to SEQ ID NO: 202576
  chr11:63258404-63258610
  hyper

SEQ ID NO: 398720 - DNA, 54 bp, Homo sapiens; identical to SEQ ID NO: 202577
  chr11:63258770-63258824
  hyper

SEQ ID NO: 398721 - DNA, 239 bp, Homo sapiens; identical to SEQ ID NO: 235653
  chr11:63448768-63449007
  hyper

SEQ ID NO: 398722 - DNA, 209 bp, Homo sapiens; identical to SEQ ID NO: 235654
  chr11:63580539-63580748
  hyper

SEQ ID NO: 398723 - DNA, 144 bp, Homo sapiens; identical to SEQ ID NO: 235655
  chr11:63606383-63606527
  hyper

SEQ ID NO: 398724 - DNA, 106 bp, Homo sapiens; identical to SEQ ID NO: 202578
  chr11:63655734-63655840
  hyper

SEQ ID NO: 398725 - DNA, 69 bp, Homo sapiens; identical to SEQ ID NO: 235664
  chr11:63993861-63993930
  hyper

SEQ ID NO: 398726 - DNA, 71 bp, Homo sapiens; identical to SEQ ID NO: 235665
  chr11:64008118-64008189
  hyper

SEQ ID NO: 398727 - DNA, 166 bp, Homo sapiens; identical to SEQ ID NO: 235672
  chr11:64084952-64085118
  hyper

SEQ ID NO: 398728 - DNA, 202 bp, Homo sapiens; identical to SEQ ID NO: 288163
  chr11:64410436-64410638
  hyper

SEQ ID NO: 398729 - DNA, 96 bp, Homo sapiens; identical to SEQ ID NO: 202588
  chr11:64512084-64512180
  hyper

SEQ ID NO: 398730 - DNA, 153 bp, Homo sapiens
  chr11:64512196-64512349
  hyper
cgcgctcgcccactcactcttgggacctgccgcaaggagcccgcaccggcctggccgaccccacctccgtgcgctcccgcccgccggcctcgctgcggctgcggctcccgcccgctctccacgccgcggccccgctccccgccgccccgcccc

SEQ ID NO: 398731 - DNA, 246 bp, Homo sapiens; identical to SEQ ID NO: 235681
  chr11:64578117-64578363
  hyper

SEQ ID NO: 398732 - DNA, 198 bp, Homo sapiens; identical to SEQ ID NO: 224132
  chr11:64698945-64699143
  hyper

SEQ ID NO: 398733 - DNA, 263 bp, Homo sapiens; identical to SEQ ID NO: 235684
  chr11:64863597-64863860
  hyper

SEQ ID NO: 398734 - DNA, 215 bp, Homo sapiens; identical to SEQ ID NO: 235685
  chr11:64885145-64885360
  hyper

SEQ ID NO: 398735 - DNA, 76 bp, Homo sapiens; identical to SEQ ID NO: 235686
  chr11:64889776-64889852
  hyper

SEQ ID NO: 398736 - DNA, 164 bp, Homo sapiens; identical to SEQ ID NO: 235688
  chr11:64949024-64949188
  hyper

SEQ ID NO: 398737 - DNA, 90 bp, Homo sapiens; identical to SEQ ID NO: 235691
  chr11:65081963-65082053
  hyper

SEQ ID NO: 398738 - DNA, 73 bp, Homo sapiens; identical to SEQ ID NO: 235692
  chr11:65121847-65121920
  hyper

SEQ ID NO: 398739 - DNA, 91 bp, Homo sapiens; identical to SEQ ID NO: 224135
  chr11:65147933-65148024
  hyper

SEQ ID NO: 398740 - DNA, 98 bp, Homo sapiens; identical to SEQ ID NO: 202592
  chr11:65189906-65190004
  hyper

SEQ ID NO: 398741 - DNA, 82 bp, Homo sapiens; identical to SEQ ID NO: 288190
  chr11:65197599-65197681
  hyper

SEQ ID NO: 398742 - DNA, 210 bp, Homo sapiens; identical to SEQ ID NO: 235701
  chr11:65266388-65266598
  hyper

SEQ ID NO: 398743 - DNA, 241 bp, Homo sapiens; identical to SEQ ID NO: 235702
  chr11:65266934-65267175
  hyper

SEQ ID NO: 398744 - DNA, 324 bp, Homo sapiens; identical to SEQ ID NO: 235703
  chr11:65267949-65268273
  hyper

SEQ ID NO: 398745 - DNA, 105 bp, Homo sapiens; identical to SEQ ID NO: 202597
  chr11:65339689-65339794
  hyper

SEQ ID NO: 398746 - DNA, 173 bp, Homo sapiens; identical to SEQ ID NO: 202598
  chr11:65342125-65342298
  hyper

SEQ ID NO: 398747 - DNA, 476 bp, Homo sapiens; identical to SEQ ID NO: 235706
  chr11:65343104-65343580
  hyper

SEQ ID NO: 398748 - DNA, 144 bp, Homo sapiens; identical to SEQ ID NO: 202602
  chr11:65419839-65419983
  hyper

SEQ ID NO: 398749 - DNA, 89 bp, Homo sapiens; identical to SEQ ID NO: 235713
  chr11:65655412-65655501
  hyper

SEQ ID NO: 398750 - DNA, 57 bp, Homo sapiens; identical to SEQ ID NO: 235717
  chr11:65667910-65667967
  hyper

SEQ ID NO: 398751 - DNA, 777 bp, Homo sapiens; identical to SEQ ID NO: 235721
  chr11:66035253-66036030
  hyper

SEQ ID NO: 398752 - DNA, 106 bp, Homo sapiens; identical to SEQ ID NO: 202611
  chr11:66049841-66049947
  hyper

SEQ ID NO: 398753 - DNA, 235 bp, Homo sapiens; identical to SEQ ID NO: 235725
  chr11:66139091-66139326
  hyper

SEQ ID NO: 398754 - DNA, 43 bp, Homo sapiens; identical to SEQ ID NO: 202614
  chr11:66186290-66186333
  hyper

SEQ ID NO: 398755 - DNA, 199 bp, Homo sapiens; identical to SEQ ID NO: 235729
  chr11:66206305-66206504
  hyper

SEQ ID NO: 398756 - DNA, 35 bp, Homo sapiens; identical to SEQ ID NO: 235732
  chr11:66314197-66314232
  hyper

SEQ ID NO: 398757 - DNA, 270 bp, Homo sapiens; identical to SEQ ID NO: 235733
  chr11:66335704-66335974
  hyper

SEQ ID NO: 398758 - DNA, 263 bp, Homo sapiens; identical to SEQ ID NO: 235734
  chr11:66346491-66346754
  hyper

SEQ ID NO: 398759 - DNA, 351 bp, Homo sapiens; identical to SEQ ID NO: 235735
  chr11:66445298-66445649
  hyper

SEQ ID NO: 398760 - DNA, 89 bp, Homo sapiens; identical to SEQ ID NO: 235742
  chr11:67007554-67007643
  hyper

SEQ ID NO: 398761 - DNA, 105 bp, Homo sapiens; identical to SEQ ID NO: 224150
  chr11:67141093-67141198
  hyper

SEQ ID NO: 398762 - DNA, 234 bp, Homo sapiens; identical to SEQ ID NO: 202629
  chr11:67210770-67211004
  hyper

SEQ ID NO: 398763 - DNA, 102 bp, Homo sapiens; identical to SEQ ID NO: 235748
  chr11:67211231-67211333
  hyper

SEQ ID NO: 398764 - DNA, 115 bp, Homo sapiens; identical to SEQ ID NO: 235750
  chr11:67236852-67236967
  hyper

SEQ ID NO: 398765 - DNA, 375 bp, Homo sapiens; identical to SEQ ID NO: 202632
  chr11:67271842-67272217
  hyper

SEQ ID NO: 398766 - DNA, 97 bp, Homo sapiens; identical to SEQ ID NO: 235753
  chr11:67276281-67276378
  hyper

SEQ ID NO: 398767 - DNA, 95 bp, Homo sapiens; identical to SEQ ID NO: 202634
  chr11:67777602-67777697
  hyper

SEQ ID NO: 398768 - DNA, 45 bp, Homo sapiens; identical to SEQ ID NO: 235756
  chr11:68039639-68039684
  hyper

SEQ ID NO: 398769 - DNA, 110 bp, Homo sapiens; identical to SEQ ID NO: 224156
  chr11:68080104-68080214
  hyper

SEQ ID NO: 398770 - DNA, 190 bp, Homo sapiens; identical to SEQ ID NO: 235761
  chr11:68518786-68518976
  hyper

SEQ ID NO: 398771 - DNA, 289 bp, Homo sapiens; identical to SEQ ID NO: 235766
  chr11:68816177-68816466
  hyper

SEQ ID NO: 398772 - DNA, 507 bp, Homo sapiens; identical to SEQ ID NO: 235769
  chr11:69453701-69454208
  hyper

SEQ ID NO: 398773 - DNA, 103 bp, Homo sapiens; identical to SEQ ID NO: 202648
  chr11:70117685-70117788
  hyper

SEQ ID NO: 398774 - DNA, 217 bp, Homo sapiens; identical to SEQ ID NO: 235777
  chr11:71163705-71163922
  hyper

SEQ ID NO: 398775 - DNA, 367 bp, Homo sapiens; identical to SEQ ID NO: 235782
  chr11:71791551-71791918
  hyper

SEQ ID NO: 398776 - DNA, 241 bp, Homo sapiens; identical to SEQ ID NO: 288300
  chr11:72301342-72301583
  hyper

SEQ ID NO: 398777 - DNA, 106 bp, Homo sapiens; identical to SEQ ID NO: 202652
  chr11:72492447-72492553
  hyper

SEQ ID NO: 398778 - DNA, 114 bp, Homo sapiens; identical to SEQ ID NO: 202653
  chr11:72929153-72929267
  hyper

SEQ ID NO: 398779 - DNA, 139 bp, Homo sapiens; identical to SEQ ID NO: 224163
  chr11:73088003-73088142
  hyper

SEQ ID NO: 398780 - DNA, 280 bp, Homo sapiens; identical to SEQ ID NO: 235802
  chr11:73372054-73372334
  hyper

SEQ ID NO: 398781 - DNA, 209 bp, Homo sapiens; identical to SEQ ID NO: 235803
  chr11:73472197-73472406
  hyper

SEQ ID NO: 398782 - DNA, 31 bp, Homo sapiens; identical to SEQ ID NO: 202661
  chr11:74204886-74204917
  hyper

SEQ ID NO: 398783 - DNA, 116 bp, Homo sapiens; identical to SEQ ID NO: 288324
  chr11:74394637-74394753
  hyper

SEQ ID NO: 398784 - DNA, 58 bp, Homo sapiens; identical to SEQ ID NO: 235815
  chr11:74851768-74851826
  hyper

SEQ ID NO: 398785 - DNA, 714 bp, Homo sapiens; identical to SEQ ID NO: 202664
  chr11:75062273-75062987
  hyper

SEQ ID NO: 398786 - DNA, 253 bp, Homo sapiens; identical to SEQ ID NO: 224171
  chr11:75921931-75922184
  hyper

SEQ ID NO: 398787 - DNA, 374 bp, Homo sapiens; identical to SEQ ID NO: 202669
  chr11:76494603-76494977
  hyper

SEQ ID NO: 398788 - DNA, 151 bp, Homo sapiens; identical to SEQ ID NO: 202670
  chr11:76510330-76510481
  hyper

SEQ ID NO: 398789 - DNA, 82 bp, Homo sapiens; identical to SEQ ID NO: 235830
  chr11:77300373-77300455
  hyper

SEQ ID NO: 398790 - DNA, 240 bp, Homo sapiens; identical to SEQ ID NO: 235831
  chr11:77348586-77348826
  hyper

SEQ ID NO: 398791 - DNA, 374 bp, Homo sapiens; identical to SEQ ID NO: 235834
  chr11:77899551-77899925
  hyper

SEQ ID NO: 398792 - DNA, 50 bp, Homo sapiens; identical to SEQ ID NO: 235836
  chr11:78128410-78128460
  hyper

SEQ ID NO: 398793 - DNA, 233 bp, Homo sapiens; identical to SEQ ID NO: 288350
  chr11:78673318-78673551
  hyper

SEQ ID NO: 398794 - DNA, 100 bp, Homo sapiens; identical to SEQ ID NO: 288351
  chr11:79148548-79148648
  hyper

SEQ ID NO: 398795 - DNA, 150 bp, Homo sapiens; identical to SEQ ID NO: 288352
  chr11:79148661-79148811
  hyper

SEQ ID NO: 398796 - DNA, 101 bp, Homo sapiens; identical to SEQ ID NO: 288353
  chr11:79149015-79149116
  hyper

SEQ ID NO: 398797 - DNA, 254 bp, Homo sapiens; identical to SEQ ID NO: 235845
  chr11:82782800-82783054
  hyper

SEQ ID NO: 398798 - DNA, 111 bp, Homo sapiens; identical to SEQ ID NO: 235846
  chr11:82867865-82867976
  hyper

SEQ ID NO: 398799 - DNA, 230 bp, Homo sapiens; identical to SEQ ID NO: 235853
  chr11:85359003-85359233
  hyper

SEQ ID NO: 398800 - DNA, 182 bp, Homo sapiens; identical to SEQ ID NO: 235854
  chr11:85521825-85522007
  hyper

SEQ ID NO: 398801 - DNA, 160 bp, Homo sapiens; identical to SEQ ID NO: 202676
  chr11:85780826-85780986
  hyper

SEQ ID NO: 398802 - DNA, 221 bp, Homo sapiens; identical to SEQ ID NO: 202677
  chr11:85955560-85955781
  hyper

SEQ ID NO: 398803 - DNA, 662 bp, Homo sapiens; identical to SEQ ID NO: 224180
  chr11:86511379-86512041
  hyper

SEQ ID NO: 398804 - DNA, 283 bp, Homo sapiens; identical to SEQ ID NO: 224181
  chr11:86513414-86513697
  hyper

SEQ ID NO: 398805 - DNA, 390 bp, Homo sapiens; identical to SEQ ID NO: 235861
  chr11:86665886-86666276
  hyper

SEQ ID NO: 398806 - DNA, 44 bp, Homo sapiens; identical to SEQ ID NO: 202683
  chr11:87908223-87908267
  hyper

SEQ ID NO: 398807 - DNA, 220 bp, Homo sapiens; identical to SEQ ID NO: 202684
  chr11:87908484-87908704
  hyper

SEQ ID NO: 398808 - DNA, 148 bp, Homo sapiens; identical to SEQ ID NO: 235863
  chr11:88070647-88070795
  hyper

SEQ ID NO: 398809 - DNA, 65 bp, Homo sapiens; identical to SEQ ID NO: 202690
  chr11:92675309-92675374
  hyper

SEQ ID NO: 398810 - DNA, 101 bp, Homo sapiens; identical to SEQ ID NO: 202691
  chr11:93861765-93861866
  hyper

SEQ ID NO: 398811 - DNA, 201 bp, Homo sapiens; identical to SEQ ID NO: 235876
  chr11:94227397-94227598
  hyper

SEQ ID NO: 398812 - DNA, 571 bp, Homo sapiens; identical to SEQ ID NO: 288392
  chr11:94277135-94277706
  hyper

SEQ ID NO: 398813 - DNA, 429 bp, Homo sapiens; identical to SEQ ID NO: 388916
  chr11:96123256-96123685
  hyper

SEQ ID NO: 398814 - DNA, 33 bp, Homo sapiens; identical to SEQ ID NO: 235885
  chr11:100557940-100557973
  hyper

SEQ ID NO: 398815 - DNA, 429 bp, Homo sapiens; identical to SEQ ID NO: 288406
  chr11:100999719-101000148
  hyper

SEQ ID NO: 398816 - DNA, 448 bp, Homo sapiens; identical to SEQ ID NO: 288407
  chr11:101000222-101000670
  hyper

SEQ ID NO: 398817 - DNA, 206 bp, Homo sapiens; identical to SEQ ID NO: 384396
  chr11:101453848-101454054
  hyper

SEQ ID NO: 398818 - DNA, 39 bp, Homo sapiens; identical to SEQ ID NO: 288410
  chr11:101454747-101454786
  hyper

SEQ ID NO: 398819 - DNA, 38 bp, Homo sapiens; identical to SEQ ID NO: 235889
  chr11:101785493-101785531
  hyper

SEQ ID NO: 398820 - DNA, 195 bp, Homo sapiens
  chr11:101982576-101982771
  hyper
gtaagcatttattttcctcgcggctcaggcgatttcggaatacaggtttcgggcttcccctgcccagactttcctggaagttgtttatggagttctttcacccctgctcttcccttgtgtgttggaacttgggccggcttgctcttatcaaacttagtaggtcgcgtgttggtttcccagttgtagactattatt

SEQ ID NO: 398821 - DNA, 31 bp, Homo sapiens; identical to SEQ ID NO: 202708
  chr11:102323923-102323954
  hyper

SEQ ID NO: 398822 - DNA, 35 bp, Homo sapiens; identical to SEQ ID NO: 202710
  chr11:102980488-102980523
  hyper

SEQ ID NO: 398823 - DNA, 116 bp, Homo sapiens; identical to SEQ ID NO: 235897
  chr11:105893007-105893123
  hyper

SEQ ID NO: 398824 - DNA, 523 bp, Homo sapiens; identical to SEQ ID NO: 235898
  chr11:105948198-105948721
  hyper

SEQ ID NO: 398825 - DNA, 127 bp, Homo sapiens; identical to SEQ ID NO: 235901
  chr11:107328545-107328672
  hyper

SEQ ID NO: 398826 - DNA, 127 bp, Homo sapiens; identical to SEQ ID NO: 235904
  chr11:107992141-107992268
  hyper

SEQ ID NO: 398827 - DNA, 127 bp, Homo sapiens; identical to SEQ ID NO: 235905
  chr11:108092858-108092985
  hyper

SEQ ID NO: 398828 - DNA, 133 bp, Homo sapiens; identical to SEQ ID NO: 202714
  chr11:108093204-108093337
  hyper

SEQ ID NO: 398829 - DNA, 49 bp, Homo sapiens; identical to SEQ ID NO: 121412
  chr11:108093385-108093434
  hyper

SEQ ID NO: 398830 - DNA, 644 bp, Homo sapiens; identical to SEQ ID NO: 288429
  chr11:108368605-108369249
  hyper

SEQ ID NO: 398831 - DNA, 90 bp, Homo sapiens; identical to SEQ ID NO: 235909
  chr11:108535765-108535855
  hyper

SEQ ID NO: 398832 - DNA, 232 bp, Homo sapiens; identical to SEQ ID NO: 235913
  chr11:110300415-110300647
  hyper

SEQ ID NO: 398833 - DNA, 144 bp, Homo sapiens; identical to SEQ ID NO: 288442
  chr11:113258498-113258642
  hyper

SEQ ID NO: 398834 - DNA, 251 bp, Homo sapiens; identical to SEQ ID NO: 235926
  chr11:113644420-113644671
  hyper

SEQ ID NO: 398835 - DNA, 130 bp, Homo sapiens; identical to SEQ ID NO: 202727
  chr11:113932120-113932250
  hyper

SEQ ID NO: 398836 - DNA, 246 bp, Homo sapiens; identical to SEQ ID NO: 235930
  chr11:114271097-114271343
  hyper

SEQ ID NO: 398837 - DNA, 211 bp, Homo sapiens; identical to SEQ ID NO: 235932
  chr11:115372960-115373171
  hyper

SEQ ID NO: 398838 - DNA, 288 bp, Homo sapiens; identical to SEQ ID NO: 288458
  chr11:116450735-116451023
  hyper

SEQ ID NO: 398839 - DNA, 123 bp, Homo sapiens; identical to SEQ ID NO: 288459
  chr11:116451190-116451313
  hyper

SEQ ID NO: 398840 - DNA, 253 bp, Homo sapiens; identical to SEQ ID NO: 235939
  chr11:116643719-116643972
  hyper

SEQ ID NO: 398841 - DNA, 88 bp, Homo sapiens; identical to SEQ ID NO: 288462
  chr11:116706882-116706970
  hyper

SEQ ID NO: 398842 - DNA, 505 bp, Homo sapiens; identical to SEQ ID NO: 235942
  chr11:117014686-117015191
  hyper

SEQ ID NO: 398843 - DNA, 526 bp, Homo sapiens
  chr11:117186458-117186984
  hyper
ggcagcactcccgcgcccatccacagcaggagccagggcagggcttgggccatggtgggccccggccttcgggccctctgggctcgcactggcccacgtccgtccctggcgcctgcccccaagtctgggtggtgctggtggcttctcaggagagggagcttgggggcatcaggacgccagggcctgcagggccctgggccagcccccgggtccgggctgtggagagcggtcaggggagatccgcagagcacgggagcaggggagaggctgggatccggagcccgctacatcggcacggcggcggccagcctgggcagcgggcgcgggctcccggcggggctgggaggggcgggcatggcgggccggtggcggcttccctggtccccccggcgggcggcggcgcgggcaggggcaagggctccgggctcctgcggctgcgttggctgctcaggccaccataatccagctcgcggctcgcagctcccgggcgggctggggaggcggaaagacttgtggcggcggctgt

SEQ ID NO: 398844 - DNA, 65 bp, Homo sapiens; identical to SEQ ID NO: 235947
  chr11:117198410-117198475
  hyper

SEQ ID NO: 398845 - DNA, 250 bp, Homo sapiens; identical to SEQ ID NO: 224203
  chr11:117352704-117352954
  hyper

SEQ ID NO: 398846 - DNA, 88 bp, Homo sapiens; identical to SEQ ID NO: 202733
  chr11:118023499-118023587
  hyper

SEQ ID NO: 398847 - DNA, 46 bp, Homo sapiens; identical to SEQ ID NO: 235954
  chr11:118230310-118230356
  hyper

SEQ ID NO: 398848 - DNA, 62 bp, Homo sapiens; identical to SEQ ID NO: 235958
  chr11:118799388-118799450
  hyper

SEQ ID NO: 398849 - DNA, 130 bp, Homo sapiens; identical to SEQ ID NO: 235959
  chr11:118800838-118800968
  hyper

SEQ ID NO: 398850 - DNA, 124 bp, Homo sapiens; identical to SEQ ID NO: 235960
  chr11:118811078-118811202
  hyper

SEQ ID NO: 398851 - DNA, 188 bp, Homo sapiens; identical to SEQ ID NO: 235961
  chr11:118972865-118973053
  hyper

SEQ ID NO: 398852 - DNA, 140 bp, Homo sapiens; identical to SEQ ID NO: 235962
  chr11:118977772-118977912
  hyper

SEQ ID NO: 398853 - DNA, 83 bp, Homo sapiens; identical to SEQ ID NO: 202737
  chr11:119142431-119142514
  hyper

SEQ ID NO: 398854 - DNA, 106 bp, Homo sapiens; identical to SEQ ID NO: 202738
  chr11:119144575-119144681
  hyper

SEQ ID NO: 398855 - DNA, 291 bp, Homo sapiens; identical to SEQ ID NO: 202742
  chr11:119148945-119149236
  hyper

SEQ ID NO: 398856 - DNA, 158 bp, Homo sapiens; identical to SEQ ID NO: 202743
  chr11:119149265-119149423
  hyper

SEQ ID NO: 398857 - DNA, 492 bp, Homo sapiens; identical to SEQ ID NO: 202744
  chr11:119155748-119156240
  hyper

SEQ ID NO: 398858 - DNA, 86 bp, Homo sapiens; identical to SEQ ID NO: 202746
  chr11:119168098-119168184
  hyper

SEQ ID NO: 398859 - DNA, 402 bp, Homo sapiens; identical to SEQ ID NO: 235967
  chr11:119252460-119252862
  hyper

SEQ ID NO: 398860 - DNA, 269 bp, Homo sapiens; identical to SEQ ID NO: 202753
  chr11:119598243-119598512
  hyper

SEQ ID NO: 398861 - DNA, 57 bp, Homo sapiens; identical to SEQ ID NO: 202755
  chr11:119600032-119600089
  hyper

SEQ ID NO: 398862 - DNA, 67 bp, Homo sapiens; identical to SEQ ID NO: 235977
  chr11:120195891-120195958
  hyper

SEQ ID NO: 398863 - DNA, 142 bp, Homo sapiens; identical to SEQ ID NO: 202758
  chr11:120206447-120206589
  hyper

SEQ ID NO: 398864 - DNA, 271 bp, Homo sapiens; identical to SEQ ID NO: 288522
  chr11:120382097-120382368
  hyper

SEQ ID NO: 398865 - DNA, 206 bp, Homo sapiens; identical to SEQ ID NO: 288523
  chr11:120382448-120382654
  hyper

SEQ ID NO: 398866 - DNA, 189 bp, Homo sapiens; identical to SEQ ID NO: 235981
  chr11:121163483-121163672
  hyper

SEQ ID NO: 398867 - DNA, 206 bp, Homo sapiens; identical to SEQ ID NO: 235985
  chr11:122526547-122526753
  hyper

SEQ ID NO: 398868 - DNA, 95 bp, Homo sapiens; identical to SEQ ID NO: 235987
  chr11:122849414-122849509
  hyper

SEQ ID NO: 398869 - DNA, 133 bp, Homo sapiens; identical to SEQ ID NO: 288536
  chr11:122854782-122854915
  hyper

SEQ ID NO: 398870 - DNA, 238 bp, Homo sapiens; identical to SEQ ID NO: 202766
  chr11:122855057-122855295
  hyper

SEQ ID NO: 398871 - DNA, 234 bp, Homo sapiens; identical to SEQ ID NO: 288538
  chr11:122855432-122855666
  hyper

SEQ ID NO: 398872 - DNA, 203 bp, Homo sapiens; identical to SEQ ID NO: 288540
  chr11:123066197-123066400
  hyper

SEQ ID NO: 398873 - DNA, 244 bp, Homo sapiens; identical to SEQ ID NO: 288541
  chr11:123066463-123066707
  hyper

SEQ ID NO: 398874 - DNA, 42 bp, Homo sapiens; identical to SEQ ID NO: 384411
  chr11:124709075-124709117
  hyper

SEQ ID NO: 398875 - DNA, 249 bp, Homo sapiens; identical to SEQ ID NO: 202775
  chr11:124709233-124709482
  hyper

SEQ ID NO: 398876 - DNA, 210 bp, Homo sapiens; identical to SEQ ID NO: 202776
  chr11:124709856-124710066
  hyper

SEQ ID NO: 398877 - DNA, 41 bp, Homo sapiens; identical to SEQ ID NO: 236009
  chr11:125034413-125034454
  hyper

SEQ ID NO: 398878 - DNA, 179 bp, Homo sapiens; identical to SEQ ID NO: 236016
  chr11:125812008-125812187
  hyper

SEQ ID NO: 398879 - DNA, 56 bp, Homo sapiens; identical to SEQ ID NO: 202779
  chr11:125932494-125932550
  hyper

SEQ ID NO: 398880 - DNA, 436 bp, Homo sapiens; identical to SEQ ID NO: 8456
  chr11:125932556-125932992
  hyper

SEQ ID NO: 398881 - DNA, 105 bp, Homo sapiens; identical to SEQ ID NO: 224241
  chr11:125933223-125933328
  hyper

SEQ ID NO: 398882 - DNA, 207 bp, Homo sapiens; identical to SEQ ID NO: 236017
  chr11:126081471-126081678
  hyper

SEQ ID NO: 398883 - DNA, 70 bp, Homo sapiens; identical to SEQ ID NO: 288567
  chr11:126138755-126138825
  hyper

SEQ ID NO: 398884 - DNA, 156 bp, Homo sapiens; identical to SEQ ID NO: 121658
  chr11:126138866-126139022
  hyper

SEQ ID NO: 398885 - DNA, 53 bp, Homo sapiens; identical to SEQ ID NO: 236019
  chr11:126152945-126152998
  hyper

SEQ ID NO: 398886 - DNA, 506 bp, Homo sapiens; identical to SEQ ID NO: 236020
  chr11:126225361-126225867
  hyper

SEQ ID NO: 398887 - DNA, 126 bp, Homo sapiens; identical to SEQ ID NO: 236023
  chr11:128418568-128418694
  hyper

SEQ ID NO: 398888 - DNA, 570 bp, Homo sapiens; identical to SEQ ID NO: 288580
  chr11:129245103-129245673
  hyper

SEQ ID NO: 398889 - DNA, 111 bp, Homo sapiens; identical to SEQ ID NO: 288581
  chr11:129245959-129246070
  hyper

SEQ ID NO: 398890 - DNA, 334 bp, Homo sapiens; identical to SEQ ID NO: 288582
  chr11:129246129-129246463
  hyper

SEQ ID NO: 398891 - DNA, 226 bp, Homo sapiens; identical to SEQ ID NO: 288583
  chr11:129685680-129685906
  hyper

SEQ ID NO: 398892 - DNA, 286 bp, Homo sapiens; identical to SEQ ID NO: 288584
  chr11:129685938-129686224
  hyper

SEQ ID NO: 398893 - DNA, 266 bp, Homo sapiens; identical to SEQ ID NO: 236037
  chr11:129793271-129793537
  hyper

SEQ ID NO: 398894 - DNA, 171 bp, Homo sapiens; identical to SEQ ID NO: 202790
  chr11:130029947-130030118
  hyper

SEQ ID NO: 398895 - DNA, 288 bp, Homo sapiens; identical to SEQ ID NO: 288592
  chr11:130298420-130298708
  hyper

SEQ ID NO: 398896 - DNA, 563 bp, Homo sapiens; identical to SEQ ID NO: 236044
  chr11:130786091-130786654
  hyper

SEQ ID NO: 398897 - DNA, 172 bp, Homo sapiens; identical to SEQ ID NO: 288600
  chr11:132813317-132813489
  hyper

SEQ ID NO: 398898 - DNA, 157 bp, Homo sapiens; identical to SEQ ID NO: 288602
  chr11:132864209-132864366
  hyper

SEQ ID NO: 398899 - DNA, 157 bp, Homo sapiens; identical to SEQ ID NO: 236052
  chr11:133797628-133797785
  hyper

SEQ ID NO: 398900 - DNA, 36 bp, Homo sapiens; identical to SEQ ID NO: 236058
  chr11:134094348-134094384
  hyper

SEQ ID NO: 398901 - DNA, 180 bp, Homo sapiens; identical to SEQ ID NO: 224260
  chr11:134282478-134282658
  hyper

SEQ ID NO: 398902 - DNA, 220 bp, Homo sapiens
  chr12:569750-569970
  hyper
gcggcggcggcggctcctgcgttggggggacccgcctctcatcccatcctcagacccgatttcccacccatttctccctcaggtgcccggcgtcgccccgcgcgtactcggggagagctgcgggcgggggaagccgcggggccgagcgcagaattcccgagcccgggcctgcccgccggccacgtgggtccggggcaccctgggggctcctcgcgtctcc

SEQ ID NO: 398903 - DNA, 209 bp, Homo sapiens; identical to SEQ ID NO: 202807
  chr12:694940-695149
  hyper

SEQ ID NO: 398904 - DNA, 285 bp, Homo sapiens; identical to SEQ ID NO: 288638
  chr12:2113105-2113390
  hyper

SEQ ID NO: 398905 - DNA, 457 bp, Homo sapiens; identical to SEQ ID NO: 121775
  chr12:2113432-2113889
  hyper

SEQ ID NO: 398906 - DNA, 73 bp, Homo sapiens; identical to SEQ ID NO: 202820
  chr12:2163510-2163583
  hyper

SEQ ID NO: 398907 - DNA, 32 bp, Homo sapiens; identical to SEQ ID NO: 236084
  chr12:2904079-2904111
  hyper

SEQ ID NO: 398908 - DNA, 52 bp, Homo sapiens; identical to SEQ ID NO: 236088
  chr12:3068385-3068437
  hyper

SEQ ID NO: 398909 - DNA, 142 bp, Homo sapiens; identical to SEQ ID NO: 202827
  chr12:3129463-3129605
  hyper

SEQ ID NO: 398910 - DNA, 72 bp, Homo sapiens; identical to SEQ ID NO: 384418
  chr12:3601270-3601342
  hyper

SEQ ID NO: 398911 - DNA, 101 bp, Homo sapiens; identical to SEQ ID NO: 202831
  chr12:3601377-3601478
  hyper

SEQ ID NO: 398912 - DNA, 70 bp, Homo sapiens; identical to SEQ ID NO: 288662
  chr12:3862298-3862368
  hyper

SEQ ID NO: 398913 - DNA, 125 bp, Homo sapiens; identical to SEQ ID NO: 202847
  chr12:4918558-4918683
  hyper

SEQ ID NO: 398914 - DNA, 176 bp, Homo sapiens; identical to SEQ ID NO: 202848
  chr12:4918713-4918889
  hyper

SEQ ID NO: 398915 - DNA, 171 bp, Homo sapiens; identical to SEQ ID NO: 236106
  chr12:4967026-4967197
  hyper

SEQ ID NO: 398916 - DNA, 54 bp, Homo sapiens; identical to SEQ ID NO: 202850
  chr12:5131854-5131908
  hyper

SEQ ID NO: 398917 - DNA, 97 bp, Homo sapiens; identical to SEQ ID NO: 288683
  chr12:5152818-5152915
  hyper

SEQ ID NO: 398918 - DNA, 285 bp, Homo sapiens; identical to SEQ ID NO: 236111
  chr12:5540359-5540644
  hyper

SEQ ID NO: 398919 - DNA, 317 bp, Homo sapiens; identical to SEQ ID NO: 224284
  chr12:6309398-6309715
  hyper

SEQ ID NO: 398920 - DNA, 184 bp, Homo sapiens; identical to SEQ ID NO: 202855
  chr12:6387950-6388134
  hyper

SEQ ID NO: 398921 - DNA, 216 bp, Homo sapiens; identical to SEQ ID NO: 202863
  chr12:6560780-6560996
  hyper

SEQ ID NO: 398922 - DNA, 224 bp, Homo sapiens; identical to SEQ ID NO: 236123
  chr12:6561338-6561562
  hyper

SEQ ID NO: 398923 - DNA, 259 bp, Homo sapiens; identical to SEQ ID NO: 236126
  chr12:6772303-6772562
  hyper

SEQ ID NO: 398924 - DNA, 339 bp, Homo sapiens; identical to SEQ ID NO: 236127
  chr12:6798812-6799151
  hyper

SEQ ID NO: 398925 - DNA, 54 bp, Homo sapiens; identical to SEQ ID NO: 236129
  chr12:6862687-6862741
  hyper

SEQ ID NO: 398926 - DNA, 45 bp, Homo sapiens; identical to SEQ ID NO: 236132
  chr12:7342757-7342802
  hyper

SEQ ID NO: 398927 - DNA, 159 bp, Homo sapiens; identical to SEQ ID NO: 236139
  chr12:10517105-10517264
  hyper

SEQ ID NO: 398928 - DNA, 155 bp, Homo sapiens; identical to SEQ ID NO: 236140
  chr12:10517555-10517710
  hyper

SEQ ID NO: 398929 - DNA, 33 bp, Homo sapiens; identical to SEQ ID NO: 236144
  chr12:11803181-11803214
  hyper

SEQ ID NO: 398930 - DNA, 198 bp, Homo sapiens; identical to SEQ ID NO: 202872
  chr12:11905383-11905581
  hyper

SEQ ID NO: 398931 - DNA, 165 bp, Homo sapiens; identical to SEQ ID NO: 202873
  chr12:11992073-11992238
  hyper

SEQ ID NO: 398932 - DNA, 217 bp, Homo sapiens; identical to SEQ ID NO: 224295
  chr12:12006278-12006495
  hyper

SEQ ID NO: 398933 - DNA, 546 bp, Homo sapiens; identical to SEQ ID NO: 202875
  chr12:12022357-12022903
  hyper

SEQ ID NO: 398934 - DNA, 2801 bp, Homo sapiens; identical to SEQ ID NO: 202878
  chr12:12043874-12046675
  hyper

SEQ ID NO: 398935 - DNA, 1481 bp, Homo sapiens; identical to SEQ ID NO: 202879
  chr12:12046855-12048336
  hyper

SEQ ID NO: 398936 - DNA, 444 bp, Homo sapiens; identical to SEQ ID NO: 288734
  chr12:12419476-12419920
  hyper

SEQ ID NO: 398937 - DNA, 625 bp, Homo sapiens; identical to SEQ ID NO: 121923
  chr12:12419964-12420589
  hyper

SEQ ID NO: 398938 - DNA, 206 bp, Homo sapiens; identical to SEQ ID NO: 236147
  chr12:12510050-12510256
  hyper

SEQ ID NO: 398939 - DNA, 59 bp, Homo sapiens; identical to SEQ ID NO: 288740
  chr12:12869129-12869188
  hyper

SEQ ID NO: 398940 - DNA, 103 bp, Homo sapiens; identical to SEQ ID NO: 236151
  chr12:12876593-12876696
  hyper

SEQ ID NO: 398941 - DNA, 127 bp, Homo sapiens; identical to SEQ ID NO: 236152
  chr12:12877617-12877744
  hyper

SEQ ID NO: 398942 - DNA, 443 bp, Homo sapiens; identical to SEQ ID NO: 236154
  chr12:13044060-13044503
  hyper

SEQ ID NO: 398943 - DNA, 94 bp, Homo sapiens; identical to SEQ ID NO: 236155
  chr12:13069330-13069424
  hyper

SEQ ID NO: 398944 - DNA, 93 bp, Homo sapiens; identical to SEQ ID NO: 224308
  chr12:13154241-13154334
  hyper

SEQ ID NO: 398945 - DNA, 257 bp, Homo sapiens; identical to SEQ ID NO: 236162
  chr12:14520248-14520505
  hyper

SEQ ID NO: 398946 - DNA, 150 bp, Homo sapiens; identical to SEQ ID NO: 236165
  chr12:14924062-14924212
  hyper

SEQ ID NO: 398947 - DNA, 41 bp, Homo sapiens; identical to SEQ ID NO: 202891
  chr12:15475222-15475263
  hyper

SEQ ID NO: 398948 - DNA, 354 bp, Homo sapiens; identical to SEQ ID NO: 202892
  chr12:15475336-15475690
  hyper

SEQ ID NO: 398949 - DNA, 60 bp, Homo sapiens; identical to SEQ ID NO: 202893
  chr12:15475691-15475751
  hyper

SEQ ID NO: 398950 - DNA, 292 bp, Homo sapiens; identical to SEQ ID NO: 236171
  chr12:16064519-16064811
  hyper

SEQ ID NO: 398951 - DNA, 72 bp, Homo sapiens; identical to SEQ ID NO: 202903
  chr12:20521072-20521144
  hyper

SEQ ID NO: 398952 - DNA, 267 bp, Homo sapiens; identical to SEQ ID NO: 202904
  chr12:20521841-20522108
  hyper

SEQ ID NO: 398953 - DNA, 182 bp, Homo sapiens; identical to SEQ ID NO: 202905
  chr12:20522891-20523073
  hyper

SEQ ID NO: 398954 - DNA, 162 bp, Homo sapiens; identical to SEQ ID NO: 202906
  chr12:20523117-20523279
  hyper

SEQ ID NO: 398955 - DNA, 637 bp, Homo sapiens; identical to SEQ ID NO: 236180
  chr12:21590454-21591091
  hyper

SEQ ID NO: 398956 - DNA, 86 bp, Homo sapiens; identical to SEQ ID NO: 236185
  chr12:22199508-22199594
  hyper

SEQ ID NO: 398957 - DNA, 137 bp, Homo sapiens; identical to SEQ ID NO: 226549
  chr12:22529506-22529643
  hyper

SEQ ID NO: 398958 - DNA, 199 bp, Homo sapiens; identical to SEQ ID NO: 236189
  chr12:24103311-24103510
  hyper

SEQ ID NO: 398959 - DNA, 308 bp, Homo sapiens; identical to SEQ ID NO: 202916
  chr12:25347959-25348267
  hyper

SEQ ID NO: 398960 - DNA, 223 bp, Homo sapiens; identical to SEQ ID NO: 236199
  chr12:25348633-25348856
  hyper

SEQ ID NO: 398961 - DNA, 259 bp, Homo sapiens; identical to SEQ ID NO: 202917
  chr12:25404339-25404598
  hyper

SEQ ID NO: 398962 - DNA, 142 bp, Homo sapiens; identical to SEQ ID NO: 224326
  chr12:25538253-25538395
  hyper

SEQ ID NO: 398963 - DNA, 232 bp, Homo sapiens; identical to SEQ ID NO: 236201
  chr12:26277911-26278143
  hyper

SEQ ID NO: 398964 - DNA, 448 bp, Homo sapiens; identical to SEQ ID NO: 202919
  chr12:26379638-26380086
  hyper

SEQ ID NO: 398965 - DNA, 88 bp, Homo sapiens; identical to SEQ ID NO: 202920
  chr12:26986791-26986879
  hyper

SEQ ID NO: 398966 - DNA, 136 bp, Homo sapiens; identical to SEQ ID NO: 236205
  chr12:27091342-27091478
  hyper

SEQ ID NO: 398967 - DNA, 93 bp, Homo sapiens; identical to SEQ ID NO: 236208
  chr12:27397408-27397501
  hyper

SEQ ID NO: 398968 - DNA, 106 bp, Homo sapiens; identical to SEQ ID NO: 288808
  chr12:27486689-27486795
  hyper

SEQ ID NO: 398969 - DNA, 210 bp, Homo sapiens; identical to SEQ ID NO: 288812
  chr12:28123786-28123996
  hyper

SEQ ID NO: 398970 - DNA, 105 bp, Homo sapiens; identical to SEQ ID NO: 224329
  chr12:29301531-29301636
  hyper

SEQ ID NO: 398971 - DNA, 251 bp, Homo sapiens; identical to SEQ ID NO: 236221
  chr12:31479082-31479333
  hyper

SEQ ID NO: 398972 - DNA, 138 bp, Homo sapiens; identical to SEQ ID NO: 236222
  chr12:32112315-32112453
  hyper

SEQ ID NO: 398973 - DNA, 33 bp, Homo sapiens; identical to SEQ ID NO: 202931
  chr12:33048899-33048932
  hyper

SEQ ID NO: 398974 - DNA, 136 bp, Homo sapiens; identical to SEQ ID NO: 202937
  chr12:33592092-33592228
  hyper

SEQ ID NO: 398975 - DNA, 58 bp, Homo sapiens
  chr12:33592320-33592378
  hyper
ccctggctgcccctgtcccgagggaagatgcccgagcacttctcccactccacctggc

SEQ ID NO: 398976 - DNA, 166 bp, Homo sapiens; identical to SEQ ID NO: 236235
  chr12:39836134-39836300
  hyper

SEQ ID NO: 398977 - DNA, 86 bp, Homo sapiens; identical to SEQ ID NO: 202949
  chr12:41087106-41087192
  hyper

SEQ ID NO: 398978 - DNA, 120 bp, Homo sapiens; identical to SEQ ID NO: 236243
  chr12:44200419-44200539
  hyper

SEQ ID NO: 398979 - DNA, 165 bp, Homo sapiens; identical to SEQ ID NO: 236248
  chr12:45609639-45609804
  hyper

SEQ ID NO: 398980 - DNA, 150 bp, Homo sapiens; identical to SEQ ID NO: 236249
  chr12:46120764-46120914
  hyper

SEQ ID NO: 398981 - DNA, 130 bp, Homo sapiens; identical to SEQ ID NO: 236250
  chr12:46123555-46123685
  hyper

SEQ ID NO: 398982 - DNA, 481 bp, Homo sapiens; identical to SEQ ID NO: 202963
  chr12:49351242-49351723
  hyper

SEQ ID NO: 398983 - DNA, 527 bp, Homo sapiens; identical to SEQ ID NO: 288887
  chr12:49371614-49372141
  hyper

SEQ ID NO: 398984 - DNA, 76 bp, Homo sapiens; identical to SEQ ID NO: 288888
  chr12:49372236-49372312
  hyper

SEQ ID NO: 398985 - DNA, 48 bp, Homo sapiens; identical to SEQ ID NO: 202970
  chr12:49524764-49524812
  hyper

SEQ ID NO: 398986 - DNA, 97 bp, Homo sapiens; identical to SEQ ID NO: 236278
  chr12:49525460-49525557
  hyper

SEQ ID NO: 398987 - DNA, 66 bp, Homo sapiens; identical to SEQ ID NO: 288902
  chr12:49689031-49689097
  hyper

SEQ ID NO: 398988 - DNA, 151 bp, Homo sapiens; identical to SEQ ID NO: 122218
  chr12:49689134-49689285
  hyper

SEQ ID NO: 398989 - DNA, 171 bp, Homo sapiens; identical to SEQ ID NO: 288904
  chr12:49690392-49690563
  hyper

SEQ ID NO: 398990 - DNA, 61 bp, Homo sapiens; identical to SEQ ID NO: 388989
  chr12:49690601-49690662
  hyper

SEQ ID NO: 398991 - DNA, 66 bp, Homo sapiens; identical to SEQ ID NO: 236284
  chr12:49731138-49731204
  hyper

SEQ ID NO: 398992 - DNA, 197 bp, Homo sapiens; identical to SEQ ID NO: 236287
  chr12:49740982-49741179
  hyper

SEQ ID NO: 398993 - DNA, 301 bp, Homo sapiens; identical to SEQ ID NO: 202975
  chr12:49761541-49761842
  hyper

SEQ ID NO: 398994 - DNA, 544 bp, Homo sapiens; identical to SEQ ID NO: 236291
  chr12:49961430-49961974
  hyper

SEQ ID NO: 398995 - DNA, 182 bp, Homo sapiens; identical to SEQ ID NO: 236292
  chr12:50016479-50016661
  hyper

SEQ ID NO: 398996 - DNA, 201 bp, Homo sapiens; identical to SEQ ID NO: 236298
  chr12:50361387-50361588
  hyper

SEQ ID NO: 398997 - DNA, 78 bp, Homo sapiens; identical to SEQ ID NO: 202978
  chr12:50419370-50419448
  hyper

SEQ ID NO: 398998 - DNA, 106 bp, Homo sapiens; identical to SEQ ID NO: 288925
  chr12:50426642-50426748
  hyper

SEQ ID NO: 398999 - DNA, 122 bp, Homo sapiens; identical to SEQ ID NO: 236301
  chr12:50505850-50505972
  hyper

SEQ ID NO: 399000 - DNA, 95 bp, Homo sapiens; identical to SEQ ID NO: 236304
  chr12:50926642-50926737
  hyper

SEQ ID NO: 399001 - DNA, 41 bp, Homo sapiens; identical to SEQ ID NO: 236308
  chr12:51477513-51477554
  hyper

SEQ ID NO: 399002 - DNA, 32 bp, Homo sapiens; identical to SEQ ID NO: 224358
  chr12:51610959-51610991
  hyper

SEQ ID NO: 399003 - DNA, 309 bp, Homo sapiens
  chr12:51818792-51819101
  hyper
gagccggacggcgtcctcagctatcaggtagggccccgcctcccgcgcctcccgctcctccccggggcgcagcctcctcatcctctgcccaccctccttccttctgcccccgagcccaggcttcccaggccgctccctgagggcgaggggaggccagcccgggacaccagggggcgctccgggcggttggggaccaggccagggctgcgagagagtgaccttgggccgaacctgggatctggcccatctctgccgcatcccttgcgccgcccgcccaggagccctgacagccggcgggcggcgacctct

SEQ ID NO: 399004 - DNA, 149 bp, Homo sapiens; identical to SEQ ID NO: 288943
  chr12:52416804-52416953
  hyper

SEQ ID NO: 399005 - DNA, 179 bp, Homo sapiens; identical to SEQ ID NO: 288944
  chr12:52416985-52417164
  hyper

SEQ ID NO: 399006 - DNA, 192 bp, Homo sapiens; identical to SEQ ID NO: 236318
  chr12:52464067-52464259
  hyper

SEQ ID NO: 399007 - DNA, 51 bp, Homo sapiens; identical to SEQ ID NO: 236321
  chr12:52627539-52627590
  hyper

SEQ ID NO: 399008 - DNA, 74 bp, Homo sapiens; identical to SEQ ID NO: 288953
  chr12:53004326-53004400
  hyper

SEQ ID NO: 399009 - DNA, 70 bp, Homo sapiens; identical to SEQ ID NO: 288955
  chr12:53107929-53107999
  hyper

SEQ ID NO: 399010 - DNA, 313 bp, Homo sapiens; identical to SEQ ID NO: 202988
  chr12:53135226-53135539
  hyper

SEQ ID NO: 399011 - DNA, 192 bp, Homo sapiens; identical to SEQ ID NO: 236331
  chr12:53297370-53297562
  hyper

SEQ ID NO: 399012 - DNA, 373 bp, Homo sapiens; identical to SEQ ID NO: 236334
  chr12:53472778-53473151
  hyper

SEQ ID NO: 399013 - DNA, 236 bp, Homo sapiens; identical to SEQ ID NO: 236335
  chr12:53574316-53574552
  hyper

SEQ ID NO: 399014 - DNA, 66 bp, Homo sapiens; identical to SEQ ID NO: 236336
  chr12:53607267-53607333
  hyper

SEQ ID NO: 399015 - DNA, 176 bp, Homo sapiens; identical to SEQ ID NO: 202993
  chr12:53714987-53715163
  hyper

SEQ ID NO: 399016 - DNA, 216 bp, Homo sapiens; identical to SEQ ID NO: 236340
  chr12:53718312-53718528
  hyper

SEQ ID NO: 399017 - DNA, 145 bp, Homo sapiens; identical to SEQ ID NO: 236343
  chr12:53835282-53835427
  hyper

SEQ ID NO: 399018 - DNA, 97 bp, Homo sapiens; identical to SEQ ID NO: 202996
  chr12:53894678-53894775
  hyper

SEQ ID NO: 399019 - DNA, 136 bp, Homo sapiens; identical to SEQ ID NO: 236346
  chr12:53895055-53895191
  hyper

SEQ ID NO: 399020 - DNA, 56 bp, Homo sapiens; identical to SEQ ID NO: 202998
  chr12:54120862-54120918
  hyper

SEQ ID NO: 399021 - DNA, 183 bp, Homo sapiens; identical to SEQ ID NO: 288988
  chr12:54332040-54332223
  hyper

SEQ ID NO: 399022 - DNA, 36 bp, Homo sapiens; identical to SEQ ID NO: 288992
  chr12:54345236-54345272
  hyper

SEQ ID NO: 399023 - DNA, 336 bp, Homo sapiens; identical to SEQ ID NO: 203004
  chr12:54346835-54347171
  hyper

SEQ ID NO: 399024 - DNA, 45 bp, Homo sapiens; identical to SEQ ID NO: 236369
  chr12:54347924-54347969
  hyper

SEQ ID NO: 399025 - DNA, 107 bp, Homo sapiens; identical to SEQ ID NO: 236371
  chr12:54350138-54350245
  hyper

SEQ ID NO: 399026 - DNA, 53 bp, Homo sapiens; identical to SEQ ID NO: 122404
  chr12:54351375-54351428
  hyper

SEQ ID NO: 399027 - DNA, 288 bp, Homo sapiens
  chr12:54377239-54377527
  hyper
ctggggcctaaacagcctaaccttgccctggataacccccatgctgaggccacggtgaccctgcatatgaaaacacaaaaccatttcaaatctcccctggccggtcctgcaagcaaatcatacactccacatttccttccagttttccggaggttcaggaacccctgcgtcttctctctccacccctggatggggaaattcggcggatttctttctgcggtcttctagccgcagcgggcttgggcctccttagaaacggtctagcctcctcactcctccactccaggg

SEQ ID NO: 399028 - DNA, 256 bp, Homo sapiens; identical to SEQ ID NO: 203011
  chr12:54388855-54389111
  hyper

SEQ ID NO: 399029 - DNA, 134 bp, Homo sapiens; identical to SEQ ID NO: 203013
  chr12:54392869-54393003
  hyper

SEQ ID NO: 399030 - DNA, 63 bp, Homo sapiens; identical to SEQ ID NO: 203016
  chr12:54408253-54408316
  hyper

SEQ ID NO: 399031 - DNA, 122 bp, Homo sapiens; identical to SEQ ID NO: 289032
  chr12:54424624-54424746
  hyper

SEQ ID NO: 399032 - DNA, 101 bp, Homo sapiens; identical to SEQ ID NO: 236405
  chr12:54582781-54582882
  hyper

SEQ ID NO: 399033 - DNA, 88 bp, Homo sapiens; identical to SEQ ID NO: 236407
  chr12:54674339-54674427
  hyper

SEQ ID NO: 399034 - DNA, 41 bp, Homo sapiens; identical to SEQ ID NO: 203030
  chr12:54686414-54686455
  hyper

SEQ ID NO: 399035 - DNA, 277 bp, Homo sapiens; identical to SEQ ID NO: 289049
  chr12:54812879-54813156
  hyper

SEQ ID NO: 399036 - DNA, 78 bp, Homo sapiens; identical to SEQ ID NO: 236411
  chr12:55413596-55413674
  hyper

SEQ ID NO: 399037 - DNA, 404 bp, Homo sapiens; identical to SEQ ID NO: 236414
  chr12:56137579-56137983
  hyper

SEQ ID NO: 399038 - DNA, 96 bp, Homo sapiens; identical to SEQ ID NO: 236416
  chr12:56211700-56211796
  hyper

SEQ ID NO: 399039 - DNA, 42 bp, Homo sapiens; identical to SEQ ID NO: 224382
  chr12:56326151-56326193
  hyper

SEQ ID NO: 399040 - DNA, 151 bp, Homo sapiens; identical to SEQ ID NO: 203036
  chr12:56390556-56390707
  hyper

SEQ ID NO: 399041 - DNA, 226 bp, Homo sapiens; identical to SEQ ID NO: 236420
  chr12:56401112-56401338
  hyper

SEQ ID NO: 399042 - DNA, 79 bp, Homo sapiens; identical to SEQ ID NO: 289066
  chr12:56473739-56473818
  hyper

SEQ ID NO: 399043 - DNA, 131 bp, Homo sapiens; identical to SEQ ID NO: 289067
  chr12:56473838-56473969
  hyper

SEQ ID NO: 399044 - DNA, 75 bp, Homo sapiens
  chr12:56473998-56474073
  hyper
cggttcaggtggctcttgcctcgatgtcctagcctaggggcccccgggccggacttggctgggctcccttcaccc

SEQ ID NO: 399045 - DNA, 64 bp, Homo sapiens; identical to SEQ ID NO: 236426
  chr12:56522028-56522092
  hyper

SEQ ID NO: 399046 - DNA, 120 bp, Homo sapiens; identical to SEQ ID NO: 203040
  chr12:56552005-56552125
  hyper

SEQ ID NO: 399047 - DNA, 83 bp, Homo sapiens; identical to SEQ ID NO: 236428
  chr12:56614495-56614578
  hyper

SEQ ID NO: 399048 - DNA, 236 bp, Homo sapiens; identical to SEQ ID NO: 236431
  chr12:56652044-56652280
  hyper

SEQ ID NO: 399049 - DNA, 332 bp, Homo sapiens; identical to SEQ ID NO: 236440
  chr12:57472541-57472873
  hyper

SEQ ID NO: 399050 - DNA, 239 bp, Homo sapiens; identical to SEQ ID NO: 289089
  chr12:57504764-57505003
  hyper

SEQ ID NO: 399051 - DNA, 35 bp, Homo sapiens; identical to SEQ ID NO: 236443
  chr12:57521847-57521882
  hyper

SEQ ID NO: 399052 - DNA, 245 bp, Homo sapiens; identical to SEQ ID NO: 203049
  chr12:57634396-57634641
  hyper

SEQ ID NO: 399053 - DNA, 167 bp, Homo sapiens; identical to SEQ ID NO: 236451
  chr12:57855186-57855353
  hyper

SEQ ID NO: 399054 - DNA, 188 bp, Homo sapiens; identical to SEQ ID NO: 203051
  chr12:57941136-57941324
  hyper

SEQ ID NO: 399055 - DNA, 229 bp, Homo sapiens; identical to SEQ ID NO: 236456
  chr12:57998567-57998796
  hyper

SEQ ID NO: 399056 - DNA, 36 bp, Homo sapiens; identical to SEQ ID NO: 289108
  chr12:58158676-58158712
  hyper

SEQ ID NO: 399057 - DNA, 173 bp, Homo sapiens; identical to SEQ ID NO: 203053
  chr12:58158778-58158951
  hyper

SEQ ID NO: 399058 - DNA, 251 bp, Homo sapiens; identical to SEQ ID NO: 203054
  chr12:58159038-58159289
  hyper

SEQ ID NO: 399059 - DNA, 147 bp, Homo sapiens; identical to SEQ ID NO: 203055
  chr12:58159346-58159493
  hyper

SEQ ID NO: 399060 - DNA, 31 bp, Homo sapiens; identical to SEQ ID NO: 289112
  chr12:58159870-58159901
  hyper

SEQ ID NO: 399061 - DNA, 217 bp, Homo sapiens; identical to SEQ ID NO: 236467
  chr12:58239310-58239527
  hyper

SEQ ID NO: 399062 - DNA, 188 bp, Homo sapiens; identical to SEQ ID NO: 203059
  chr12:59313474-59313662
  hyper

SEQ ID NO: 399063 - DNA, 180 bp, Homo sapiens; identical to SEQ ID NO: 224390
  chr12:59989688-59989868
  hyper

SEQ ID NO: 399064 - DNA, 31 bp, Homo sapiens; identical to SEQ ID NO: 236474
  chr12:59991053-59991084
  hyper

SEQ ID NO: 399065 - DNA, 175 bp, Homo sapiens; identical to SEQ ID NO: 203064
  chr12:62586338-62586513
  hyper

SEQ ID NO: 399066 - DNA, 318 bp, Homo sapiens; identical to SEQ ID NO: 384445
  chr12:63328404-63328722
  hyper

SEQ ID NO: 399067 - DNA, 214 bp, Homo sapiens; identical to SEQ ID NO: 236480
  chr12:63328941-63329155
  hyper

SEQ ID NO: 399068 - DNA, 110 bp, Homo sapiens; identical to SEQ ID NO: 203073
  chr12:64238195-64238305
  hyper

SEQ ID NO: 399069 - DNA, 98 bp, Homo sapiens; identical to SEQ ID NO: 203074
  chr12:64238524-64238622
  hyper

SEQ ID NO: 399070 - DNA, 314 bp, Homo sapiens; identical to SEQ ID NO: 236489
  chr12:65174361-65174675
  hyper

SEQ ID NO: 399071 - DNA, 53 bp, Homo sapiens; identical to SEQ ID NO: 289144
  chr12:65514782-65514835
  hyper

SEQ ID NO: 399072 - DNA, 272 bp, Homo sapiens; identical to SEQ ID NO: 289145
  chr12:65564381-65564653
  hyper

SEQ ID NO: 399073 - DNA, 50 bp, Homo sapiens; identical to SEQ ID NO: 49821
  chr12:65564722-65564772
  hyper

SEQ ID NO: 399074 - DNA, 302 bp, Homo sapiens; identical to SEQ ID NO: 289149
  chr12:66216562-66216864
  hyper

SEQ ID NO: 399075 - DNA, 85 bp, Homo sapiens; identical to SEQ ID NO: 203082
  chr12:66216924-66217009
  hyper

SEQ ID NO: 399076 - DNA, 362 bp, Homo sapiens; identical to SEQ ID NO: 389030
  chr12:66218128-66218490
  hyper

SEQ ID NO: 399077 - DNA, 238 bp, Homo sapiens; identical to SEQ ID NO: 236499
  chr12:66563705-66563943
  hyper

SEQ ID NO: 399078 - DNA, 34 bp, Homo sapiens; identical to SEQ ID NO: 203089
  chr12:68617124-68617158
  hyper

SEQ ID NO: 399079 - DNA, 64 bp, Homo sapiens; identical to SEQ ID NO: 224404
  chr12:69080591-69080655
  hyper

SEQ ID NO: 399080 - DNA, 152 bp, Homo sapiens; identical to SEQ ID NO: 236507
  chr12:69548454-69548606
  hyper

SEQ ID NO: 399081 - DNA, 165 bp, Homo sapiens; identical to SEQ ID NO: 236508
  chr12:69550940-69551105
  hyper

SEQ ID NO: 399082 - DNA, 358 bp, Homo sapiens; identical to SEQ ID NO: 236509
  chr12:69724879-69725237
  hyper

SEQ ID NO: 399083 - DNA, 207 bp, Homo sapiens; identical to SEQ ID NO: 236510
  chr12:70133407-70133614
  hyper

SEQ ID NO: 399084 - DNA, 97 bp, Homo sapiens; identical to SEQ ID NO: 203097
  chr12:71004045-71004142
  hyper

SEQ ID NO: 399085 - DNA, 175 bp, Homo sapiens; identical to SEQ ID NO: 289176
  chr12:71314193-71314368
  hyper

SEQ ID NO: 399086 - DNA, 310 bp, Homo sapiens; identical to SEQ ID NO: 289177
  chr12:71833003-71833313
  hyper

SEQ ID NO: 399087 - DNA, 128 bp, Homo sapiens; identical to SEQ ID NO: 236517
  chr12:72148402-72148530
  hyper

SEQ ID NO: 399088 - DNA, 116 bp, Homo sapiens; identical to SEQ ID NO: 203102
  chr12:72332525-72332641
  hyper

SEQ ID NO: 399089 - DNA, 77 bp, Homo sapiens; identical to SEQ ID NO: 203103
  chr12:72332696-72332773
  hyper

SEQ ID NO: 399090 - DNA, 60 bp, Homo sapiens; identical to SEQ ID NO: 203104
  chr12:72666465-72666525
  hyper

SEQ ID NO: 399091 - DNA, 276 bp, Homo sapiens; identical to SEQ ID NO: 289185
  chr12:72667682-72667958
  hyper

SEQ ID NO: 399092 - DNA, 146 bp, Homo sapiens; identical to SEQ ID NO: 236526
  chr12:75905415-75905561
  hyper

SEQ ID NO: 399093 - DNA, 217 bp, Homo sapiens; identical to SEQ ID NO: 236529
  chr12:76742083-76742300
  hyper

SEQ ID NO: 399094 - DNA, 218 bp, Homo sapiens; identical to SEQ ID NO: 236530
  chr12:76952933-76953151
  hyper

SEQ ID NO: 399095 - DNA, 304 bp, Homo sapiens; identical to SEQ ID NO: 236531
  chr12:76953529-76953833
  hyper

SEQ ID NO: 399096 - DNA, 334 bp, Homo sapiens
  chr12:83080990-83081324
  hyper
cgagtcccactcctcacctaggacgccccaaactgccatgggttagggtggggatcgcgacccgcgcgaaagaccagccctgcgcttccgccgggggacgcggagcccaaacgccgctcaccgcttgcgggcgccgggcatggggagtgtggtgtgagcccgcacccggggaggacgcaggagctgcggagacgggcgcgaggaggaggagaggagtcgtggattggaaggacccgagggagggagggtggggaagcgagggaaaagtgaagctgggaggagaaggcggcggaaggtggagattgatgcttctgttttttgttgccgctgctgc

SEQ ID NO: 399097 - DNA, 169 bp, Homo sapiens; identical to SEQ ID NO: 236547
  chr12:85668062-85668231
  hyper

SEQ ID NO: 399098 - DNA, 276 bp, Homo sapiens; identical to SEQ ID NO: 236552
  chr12:89746244-89746520
  hyper

SEQ ID NO: 399099 - DNA, 237 bp, Homo sapiens; identical to SEQ ID NO: 236554
  chr12:89919819-89920056
  hyper

SEQ ID NO: 399100 - DNA, 91 bp, Homo sapiens; identical to SEQ ID NO: 49909
  chr12:91775751-91775842
  hyper

SEQ ID NO: 399101 - DNA, 255 bp, Homo sapiens; identical to SEQ ID NO: 236559
  chr12:93835925-93836180
  hyper

SEQ ID NO: 399102 - DNA, 64 bp, Homo sapiens; identical to SEQ ID NO: 203132
  chr12:93985620-93985684
  hyper

SEQ ID NO: 399103 - DNA, 153 bp, Homo sapiens; identical to SEQ ID NO: 203136
  chr12:95397472-95397625
  hyper

SEQ ID NO: 399104 - DNA, 88 bp, Homo sapiens; identical to SEQ ID NO: 203137
  chr12:96183452-96183540
  hyper

SEQ ID NO: 399105 - DNA, 122 bp, Homo sapiens; identical to SEQ ID NO: 203141
  chr12:96252231-96252353
  hyper

SEQ ID NO: 399106 - DNA, 33 bp, Homo sapiens; identical to SEQ ID NO: 224420
  chr12:96618052-96618085
  hyper

SEQ ID NO: 399107 - DNA, 97 bp, Homo sapiens; identical to SEQ ID NO: 236576
  chr12:96794233-96794330
  hyper

SEQ ID NO: 399108 - DNA, 79 bp, Homo sapiens; identical to SEQ ID NO: 236578
  chr12:97300789-97300868
  hyper

SEQ ID NO: 399109 - DNA, 390 bp, Homo sapiens; identical to SEQ ID NO: 236579
  chr12:97379542-97379932
  hyper

SEQ ID NO: 399110 - DNA, 103 bp, Homo sapiens; identical to SEQ ID NO: 236581
  chr12:98987129-98987232
  hyper

SEQ ID NO: 399111 - DNA, 84 bp, Homo sapiens; identical to SEQ ID NO: 236583
  chr12:99038221-99038305
  hyper

SEQ ID NO: 399112 - DNA, 356 bp, Homo sapiens; identical to SEQ ID NO: 122851
  chr12:99139525-99139881
  hyper

SEQ ID NO: 399113 - DNA, 63 bp, Homo sapiens; identical to SEQ ID NO: 236589
  chr12:100660779-100660842
  hyper

SEQ ID NO: 399114 - DNA, 603 bp, Homo sapiens; identical to SEQ ID NO: 203146
  chr12:102455400-102456003
  hyper

SEQ ID NO: 399115 - DNA, 115 bp, Homo sapiens; identical to SEQ ID NO: 289274
  chr12:103350083-103350198
  hyper

SEQ ID NO: 399116 - DNA, 294 bp, Homo sapiens; identical to SEQ ID NO: 289275
  chr12:103350622-103350916
  hyper

SEQ ID NO: 399117 - DNA, 212 bp, Homo sapiens; identical to SEQ ID NO: 203151
  chr12:103355123-103355335
  hyper

SEQ ID NO: 399118 - DNA, 67 bp, Homo sapiens; identical to SEQ ID NO: 236612
  chr12:104532325-104532392
  hyper

SEQ ID NO: 399119 - DNA, 100 bp, Homo sapiens; identical to SEQ ID NO: 203160
  chr12:105477920-105478020
  hyper

SEQ ID NO: 399120 - DNA, 104 bp, Homo sapiens; identical to SEQ ID NO: 289294
  chr12:105478419-105478523
  hyper

SEQ ID NO: 399121 - DNA, 180 bp, Homo sapiens; identical to SEQ ID NO: 224429
  chr12:106532708-106532888
  hyper

SEQ ID NO: 399122 - DNA, 103 bp, Homo sapiens; identical to SEQ ID NO: 289298
  chr12:106533276-106533379
  hyper

SEQ ID NO: 399123 - DNA, 264 bp, Homo sapiens; identical to SEQ ID NO: 203162
  chr12:106640992-106641256
  hyper

SEQ ID NO: 399124 - DNA, 95 bp, Homo sapiens; identical to SEQ ID NO: 236625
  chr12:106695918-106696013
  hyper

SEQ ID NO: 399125 - DNA, 37 bp, Homo sapiens; identical to SEQ ID NO: 236626
  chr12:106751649-106751686
  hyper

SEQ ID NO: 399126 - DNA, 142 bp, Homo sapiens; identical to SEQ ID NO: 224433
  chr12:107167936-107168078
  hyper

SEQ ID NO: 399127 - DNA, 140 bp, Homo sapiens; identical to SEQ ID NO: 236635
  chr12:107349516-107349656
  hyper

SEQ ID NO: 399128 - DNA, 93 bp, Homo sapiens; identical to SEQ ID NO: 236637
  chr12:107488134-107488227
  hyper

SEQ ID NO: 399129 - DNA, 38 bp, Homo sapiens; identical to SEQ ID NO: 289316
  chr12:108079429-108079467
  hyper

SEQ ID NO: 399130 - DNA, 115 bp, Homo sapiens; identical to SEQ ID NO: 122946
  chr12:108079515-108079630
  hyper

SEQ ID NO: 399131 - DNA, 41 bp, Homo sapiens; identical to SEQ ID NO: 226552
  chr12:108298348-108298389
  hyper

SEQ ID NO: 399132 - DNA, 186 bp, Homo sapiens; identical to SEQ ID NO: 289321
  chr12:108523022-108523208
  hyper

SEQ ID NO: 399133 - DNA, 173 bp, Homo sapiens; identical to SEQ ID NO: 289322
  chr12:108523439-108523612
  hyper

SEQ ID NO: 399134 - DNA, 92 bp, Homo sapiens; identical to SEQ ID NO: 236644
  chr12:108908840-108908932
  hyper

SEQ ID NO: 399135 - DNA, 121 bp, Homo sapiens; identical to SEQ ID NO: 203172
  chr12:108956083-108956204
  hyper

SEQ ID NO: 399136 - DNA, 116 bp, Homo sapiens; identical to SEQ ID NO: 203175
  chr12:109250887-109251003
  hyper

SEQ ID NO: 399137 - DNA, 98 bp, Homo sapiens; identical to SEQ ID NO: 203176
  chr12:109535377-109535475
  hyper

SEQ ID NO: 399138 - DNA, 589 bp, Homo sapiens; identical to SEQ ID NO: 289331
  chr12:109746919-109747508
  hyper

SEQ ID NO: 399139 - DNA, 136 bp, Homo sapiens; identical to SEQ ID NO: 236653
  chr12:109747913-109748049
  hyper

SEQ ID NO: 399140 - DNA, 175 bp, Homo sapiens; identical to SEQ ID NO: 236654
  chr12:109915370-109915545
  hyper

SEQ ID NO: 399141 - DNA, 268 bp, Homo sapiens; identical to SEQ ID NO: 236655
  chr12:110011228-110011496
  hyper

SEQ ID NO: 399142 - DNA, 680 bp, Homo sapiens; identical to SEQ ID NO: 236656
  chr12:110337997-110338677
  hyper

SEQ ID NO: 399143 - DNA, 200 bp, Homo sapiens; identical to SEQ ID NO: 236659
  chr12:110906303-110906503
  hyper

SEQ ID NO: 399144 - DNA, 48 bp, Homo sapiens; identical to SEQ ID NO: 289339
  chr12:110939787-110939835
  hyper

SEQ ID NO: 399145 - DNA, 102 bp, Homo sapiens; identical to SEQ ID NO: 122993
  chr12:110939888-110939990
  hyper

SEQ ID NO: 399146 - DNA, 100 bp, Homo sapiens; identical to SEQ ID NO: 236668
  chr12:111843201-111843301
  hyper

SEQ ID NO: 399147 - DNA, 57 bp, Homo sapiens; identical to SEQ ID NO: 236670
  chr12:112036146-112036203
  hyper

SEQ ID NO: 399148 - DNA, 181 bp, Homo sapiens; identical to SEQ ID NO: 236671
  chr12:112123544-112123725
  hyper

SEQ ID NO: 399149 - DNA, 55 bp, Homo sapiens; identical to SEQ ID NO: 236675
  chr12:112856480-112856535
  hyper

SEQ ID NO: 399150 - DNA, 35 bp, Homo sapiens; identical to SEQ ID NO: 203186
  chr12:112884177-112884212
  hyper

SEQ ID NO: 399151 - DNA, 58 bp, Homo sapiens; identical to SEQ ID NO: 203187
  chr12:112915451-112915509
  hyper

SEQ ID NO: 399152 - DNA, 49 bp, Homo sapiens; identical to SEQ ID NO: 203189
  chr12:112926827-112926876
  hyper

SEQ ID NO: 399153 - DNA, 65 bp, Homo sapiens; identical to SEQ ID NO: 203190
  chr12:112926914-112926979
  hyper

SEQ ID NO: 399154 - DNA, 190 bp, Homo sapiens; identical to SEQ ID NO: 203191
  chr12:113229230-113229420
  hyper

SEQ ID NO: 399155 - DNA, 137 bp, Homo sapiens; identical to SEQ ID NO: 289366
  chr12:113229494-113229631
  hyper

SEQ ID NO: 399156 - DNA, 141 bp, Homo sapiens; identical to SEQ ID NO: 236680
  chr12:113658922-113659063
  hyper

SEQ ID NO: 399157 - DNA, 157 bp, Homo sapiens; identical to SEQ ID NO: 289372
  chr12:113903571-113903728
  hyper

SEQ ID NO: 399158 - DNA, 161 bp, Homo sapiens; identical to SEQ ID NO: 289380
  chr12:113917065-113917226
  hyper

SEQ ID NO: 399159 - DNA, 165 bp, Homo sapiens; identical to SEQ ID NO: 236698
  chr12:114404167-114404332
  hyper

SEQ ID NO: 399160 - DNA, 31 bp, Homo sapiens; identical to SEQ ID NO: 236700
  chr12:114837908-114837939
  hyper

SEQ ID NO: 399161 - DNA, 34 bp, Homo sapiens; identical to SEQ ID NO: 203200
  chr12:114841183-114841217
  hyper

SEQ ID NO: 399162 - DNA, 147 bp, Homo sapiens; identical to SEQ ID NO: 203201
  chr12:114841493-114841640
  hyper

SEQ ID NO: 399163 - DNA, 142 bp, Homo sapiens; identical to SEQ ID NO: 289387
  chr12:114843805-114843947
  hyper

SEQ ID NO: 399164 - DNA, 142 bp, Homo sapiens; identical to SEQ ID NO: 289394
  chr12:114882413-114882555
  hyper

SEQ ID NO: 399165 - DNA, 370 bp, Homo sapiens; identical to SEQ ID NO: 289395
  chr12:114882646-114883016
  hyper

SEQ ID NO: 399166 - DNA, 109 bp, Homo sapiens; identical to SEQ ID NO: 203209
  chr12:114883302-114883411
  hyper

SEQ ID NO: 399167 - DNA, 318 bp, Homo sapiens; identical to SEQ ID NO: 289397
  chr12:114886562-114886880
  hyper

SEQ ID NO: 399168 - DNA, 83 bp, Homo sapiens; identical to SEQ ID NO: 289398
  chr12:114917591-114917674
  hyper

SEQ ID NO: 399169 - DNA, 74 bp, Homo sapiens; identical to SEQ ID NO: 203211
  chr12:114939043-114939117
  hyper

SEQ ID NO: 399170 - DNA, 203 bp, Homo sapiens; identical to SEQ ID NO: 236725
  chr12:116713913-116714116
  hyper

SEQ ID NO: 399171 - DNA, 143 bp, Homo sapiens; identical to SEQ ID NO: 236726
  chr12:116714176-116714319
  hyper

SEQ ID NO: 399172 - DNA, 228 bp, Homo sapiens; identical to SEQ ID NO: 236733
  chr12:117348613-117348841
  hyper

SEQ ID NO: 399173 - DNA, 151 bp, Homo sapiens; identical to SEQ ID NO: 203225
  chr12:117628333-117628484
  hyper

SEQ ID NO: 399174 - DNA, 41 bp, Homo sapiens; identical to SEQ ID NO: 236737
  chr12:117797360-117797401
  hyper

SEQ ID NO: 399175 - DNA, 170 bp, Homo sapiens; identical to SEQ ID NO: 289434
  chr12:119418346-119418516
  hyper

SEQ ID NO: 399176 - DNA, 59 bp, Homo sapiens; identical to SEQ ID NO: 203227
  chr12:119419899-119419958
  hyper

SEQ ID NO: 399177 - DNA, 182 bp, Homo sapiens; identical to SEQ ID NO: 236750
  chr12:120105358-120105540
  hyper

SEQ ID NO: 399178 - DNA, 253 bp, Homo sapiens; identical to SEQ ID NO: 236751
  chr12:120315130-120315383
  hyper

SEQ ID NO: 399179 - DNA, 477 bp, Homo sapiens; identical to SEQ ID NO: 236753
  chr12:120638748-120639225
  hyper

SEQ ID NO: 399180 - DNA, 117 bp, Homo sapiens; identical to SEQ ID NO: 236754
  chr12:120703715-120703832
  hyper

SEQ ID NO: 399181 - DNA, 52 bp, Homo sapiens; identical to SEQ ID NO: 236755
  chr12:120729780-120729832
  hyper

SEQ ID NO: 399182 - DNA, 76 bp, Homo sapiens; identical to SEQ ID NO: 236756
  chr12:120739996-120740072
  hyper

SEQ ID NO: 399183 - DNA, 133 bp, Homo sapiens; identical to SEQ ID NO: 236757
  chr12:120763473-120763606
  hyper

SEQ ID NO: 399184 - DNA, 42 bp, Homo sapiens; identical to SEQ ID NO: 236759
  chr12:120884034-120884076
  hyper

SEQ ID NO: 399185 - DNA, 171 bp, Homo sapiens; identical to SEQ ID NO: 236765
  chr12:122124826-122124997
  hyper

SEQ ID NO: 399186 - DNA, 73 bp, Homo sapiens; identical to SEQ ID NO: 289458
  chr12:122231274-122231347
  hyper

SEQ ID NO: 399187 - DNA, 140 bp, Homo sapiens; identical to SEQ ID NO: 236770
  chr12:122242481-122242621
  hyper

SEQ ID NO: 399188 - DNA, 110 bp, Homo sapiens; identical to SEQ ID NO: 236772
  chr12:122459495-122459605
  hyper

SEQ ID NO: 399189 - DNA, 90 bp, Homo sapiens; identical to SEQ ID NO: 236775
  chr12:122710555-122710645
  hyper

SEQ ID NO: 399190 - DNA, 95 bp, Homo sapiens; identical to SEQ ID NO: 224473
  chr12:122907734-122907829
  hyper

SEQ ID NO: 399191 - DNA, 152 bp, Homo sapiens; identical to SEQ ID NO: 236778
  chr12:123319202-123319354
  hyper

SEQ ID NO: 399192 - DNA, 178 bp, Homo sapiens; identical to SEQ ID NO: 203244
  chr12:123451028-123451206
  hyper

SEQ ID NO: 399193 - DNA, 409 bp, Homo sapiens; identical to SEQ ID NO: 236783
  chr12:123459138-123459547
  hyper

SEQ ID NO: 399194 - DNA, 41 bp, Homo sapiens; identical to SEQ ID NO: 236785
  chr12:123717762-123717803
  hyper

SEQ ID NO: 399195 - DNA, 34 bp, Homo sapiens; identical to SEQ ID NO: 236786
  chr12:123755169-123755203
  hyper

SEQ ID NO: 399196 - DNA, 319 bp, Homo sapiens; identical to SEQ ID NO: 289485
  chr12:124017664-124017983
  hyper

SEQ ID NO: 399197 - DNA, 66 bp, Homo sapiens; identical to SEQ ID NO: 236793
  chr12:124068852-124068918
  hyper

SEQ ID NO: 399198 - DNA, 99 bp, Homo sapiens; identical to SEQ ID NO: 203251
  chr12:125198344-125198443
  hyper

SEQ ID NO: 399199 - DNA, 192 bp, Homo sapiens; identical to SEQ ID NO: 289502
  chr12:127211385-127211577
  hyper

SEQ ID NO: 399200 - DNA, 116 bp, Homo sapiens; identical to SEQ ID NO: 236817
  chr12:128753739-128753855
  hyper

SEQ ID NO: 399201 - DNA, 86 bp, Homo sapiens; identical to SEQ ID NO: 203256
  chr12:130387117-130387203
  hyper

SEQ ID NO: 399202 - DNA, 36 bp, Homo sapiens; identical to SEQ ID NO: 384475
  chr12:130498862-130498898
  hyper

SEQ ID NO: 399203 - DNA, 86 bp, Homo sapiens; identical to SEQ ID NO: 236823
  chr12:130498947-130499033
  hyper

SEQ ID NO: 399204 - DNA, 276 bp, Homo sapiens; identical to SEQ ID NO: 289515
  chr12:131199583-131199859
  hyper

SEQ ID NO: 399205 - DNA, 324 bp, Homo sapiens; identical to SEQ ID NO: 289516
  chr12:131200007-131200331
  hyper

SEQ ID NO: 399206 - DNA, 176 bp, Homo sapiens; identical to SEQ ID NO: 289517
  chr12:131200645-131200821
  hyper

SEQ ID NO: 399207 - DNA, 214 bp, Homo sapiens; identical to SEQ ID NO: 289518
  chr12:131201142-131201356
  hyper

SEQ ID NO: 399208 - DNA, 333 bp, Homo sapiens; identical to SEQ ID NO: 236834
  chr12:132195265-132195598
  hyper

SEQ ID NO: 399209 - DNA, 50 bp, Homo sapiens; identical to SEQ ID NO: 224491
  chr12:132480346-132480396
  hyper

SEQ ID NO: 399210 - DNA, 42 bp, Homo sapiens; identical to SEQ ID NO: 236838
  chr12:132628953-132628995
  hyper

SEQ ID NO: 399211 - DNA, 150 bp, Homo sapiens; identical to SEQ ID NO: 236839
  chr12:133136379-133136529
  hyper

SEQ ID NO: 399212 - DNA, 442 bp, Homo sapiens; identical to SEQ ID NO: 226553
  chr12:133443618-133444060
  hyper

SEQ ID NO: 399213 - DNA, 81 bp, Homo sapiens; identical to SEQ ID NO: 236849
  chr13:20207704-20207785
  hyper

SEQ ID NO: 399214 - DNA, 41 bp, Homo sapiens; identical to SEQ ID NO: 289539
  chr13:20532066-20532107
  hyper

SEQ ID NO: 399215 - DNA, 153 bp, Homo sapiens; identical to SEQ ID NO: 236853
  chr13:20711077-20711230
  hyper

SEQ ID NO: 399216 - DNA, 147 bp, Homo sapiens; identical to SEQ ID NO: 389081
  chr13:20766940-20767087
  hyper

SEQ ID NO: 399217 - DNA, 420 bp, Homo sapiens; identical to SEQ ID NO: 224500
  chr13:21099646-21100066
  hyper

SEQ ID NO: 399218 - DNA, 38 bp, Homo sapiens; identical to SEQ ID NO: 236861
  chr13:21141043-21141081
  hyper

SEQ ID NO: 399219 - DNA, 105 bp, Homo sapiens; identical to SEQ ID NO: 224501
  chr13:21141668-21141773
  hyper

SEQ ID NO: 399220 - DNA, 113 bp, Homo sapiens
  chr13:21635643-21635756
  hyper
cttcccggggcgctcacgccgcggttccaaagcgcagacccaagtgggacattcgctacattgttggcattccacgggcgtcacgtgaccccgcctcccgcgtcactctcggc

SEQ ID NO: 399221 - DNA, 228 bp, Homo sapiens; identical to SEQ ID NO: 9203
  chr13:21635777-21636005
  hyper

SEQ ID NO: 399222 - DNA, 247 bp, Homo sapiens; identical to SEQ ID NO: 236866
  chr13:21714415-21714662
  hyper

SEQ ID NO: 399223 - DNA, 147 bp, Homo sapiens; identical to SEQ ID NO: 236867
  chr13:21750215-21750362
  hyper

SEQ ID NO: 399224 - DNA, 68 bp, Homo sapiens; identical to SEQ ID NO: 203279
  chr13:21872166-21872234
  hyper

SEQ ID NO: 399225 - DNA, 178 bp, Homo sapiens; identical to SEQ ID NO: 236869
  chr13:21872501-21872679
  hyper

SEQ ID NO: 399226 - DNA, 400 bp, Homo sapiens; identical to SEQ ID NO: 289563
  chr13:22244999-22245399
  hyper

SEQ ID NO: 399227 - DNA, 132 bp, Homo sapiens; identical to SEQ ID NO: 236875
  chr13:22248800-22248932
  hyper

SEQ ID NO: 399228 - DNA, 223 bp, Homo sapiens; identical to SEQ ID NO: 203284
  chr13:23949731-23949954
  hyper

SEQ ID NO: 399229 - DNA, 227 bp, Homo sapiens; identical to SEQ ID NO: 289568
  chr13:24152955-24153182
  hyper

SEQ ID NO: 399230 - DNA, 202 bp, Homo sapiens; identical to SEQ ID NO: 289569
  chr13:24153336-24153538
  hyper

SEQ ID NO: 399231 - DNA, 302 bp, Homo sapiens; identical to SEQ ID NO: 289570
  chr13:24153751-24154053
  hyper

SEQ ID NO: 399232 - DNA, 152 bp, Homo sapiens; identical to SEQ ID NO: 289571
  chr13:24154123-24154275
  hyper

SEQ ID NO: 399233 - DNA, 132 bp, Homo sapiens; identical to SEQ ID NO: 203285
  chr13:24553697-24553829
  hyper

SEQ ID NO: 399234 - DNA, 308 bp, Homo sapiens; identical to SEQ ID NO: 236890
  chr13:25497030-25497338
  hyper

SEQ ID NO: 399235 - DNA, 190 bp, Homo sapiens; identical to SEQ ID NO: 203287
  chr13:25497658-25497848
  hyper

SEQ ID NO: 399236 - DNA, 48 bp, Homo sapiens; identical to SEQ ID NO: 203289
  chr13:25861519-25861567
  hyper

SEQ ID NO: 399237 - DNA, 93 bp, Homo sapiens; identical to SEQ ID NO: 203290
  chr13:25946858-25946951
  hyper

SEQ ID NO: 399238 - DNA, 94 bp, Homo sapiens; identical to SEQ ID NO: 289582
  chr13:26624294-26624388
  hyper

SEQ ID NO: 399239 - DNA, 178 bp, Homo sapiens; identical to SEQ ID NO: 236908
  chr13:27335041-27335219
  hyper

SEQ ID NO: 399240 - DNA, 275 bp, Homo sapiens; identical to SEQ ID NO: 203294
  chr13:27744759-27745034
  hyper

SEQ ID NO: 399241 - DNA, 203 bp, Homo sapiens; identical to SEQ ID NO: 236911
  chr13:28194643-28194846
  hyper

SEQ ID NO: 399242 - DNA, 58 bp, Homo sapiens; identical to SEQ ID NO: 289593
  chr13:28364282-28364340
  hyper

SEQ ID NO: 399243 - DNA, 236 bp, Homo sapiens; identical to SEQ ID NO: 203297
  chr13:28371461-28371697
  hyper

SEQ ID NO: 399244 - DNA, 281 bp, Homo sapiens; identical to SEQ ID NO: 289597
  chr13:28396896-28397177
  hyper

SEQ ID NO: 399245 - DNA, 120 bp, Homo sapiens; identical to SEQ ID NO: 389096
  chr13:28494087-28494207
  hyper

SEQ ID NO: 399246 - DNA, 508 bp, Homo sapiens; identical to SEQ ID NO: 289601
  chr13:28494265-28494773
  hyper

SEQ ID NO: 399247 - DNA, 263 bp, Homo sapiens; identical to SEQ ID NO: 289602
  chr13:28495754-28496017
  hyper

SEQ ID NO: 399248 - DNA, 210 bp, Homo sapiens; identical to SEQ ID NO: 203312
  chr13:28608023-28608233
  hyper

SEQ ID NO: 399249 - DNA, 167 bp, Homo sapiens; identical to SEQ ID NO: 203313
  chr13:28608355-28608522
  hyper

SEQ ID NO: 399250 - DNA, 106 bp, Homo sapiens; identical to SEQ ID NO: 203314
  chr13:28636040-28636146
  hyper

SEQ ID NO: 399251 - DNA, 224 bp, Homo sapiens; identical to SEQ ID NO: 236938
  chr13:28712328-28712552
  hyper

SEQ ID NO: 399252 - DNA, 215 bp, Homo sapiens; identical to SEQ ID NO: 236947
  chr13:30002457-30002672
  hyper

SEQ ID NO: 399253 - DNA, 94 bp, Homo sapiens; identical to SEQ ID NO: 236951
  chr13:30982774-30982868
  hyper

SEQ ID NO: 399254 - DNA, 236 bp, Homo sapiens; identical to SEQ ID NO: 236952
  chr13:31039902-31040138
  hyper

SEQ ID NO: 399255 - DNA, 274 bp, Homo sapiens; identical to SEQ ID NO: 224533
  chr13:32889530-32889804
  hyper

SEQ ID NO: 399256 - DNA, 115 bp, Homo sapiens; identical to SEQ ID NO: 224538
  chr13:32900635-32900750
  hyper

SEQ ID NO: 399257 - DNA, 146 bp, Homo sapiens; identical to SEQ ID NO: 224540
  chr13:32905055-32905201
  hyper

SEQ ID NO: 399258 - DNA, 1116 bp, Homo sapiens; identical to SEQ ID NO: 224541
  chr13:32906408-32907524
  hyper

SEQ ID NO: 399259 - DNA, 96 bp, Homo sapiens; identical to SEQ ID NO: 224543
  chr13:32918694-32918790
  hyper

SEQ ID NO: 399260 - DNA, 70 bp, Homo sapiens; identical to SEQ ID NO: 224544
  chr13:32920963-32921033
  hyper

SEQ ID NO: 399261 - DNA, 182 bp, Homo sapiens; identical to SEQ ID NO: 224546
  chr13:32930564-32930746
  hyper

SEQ ID NO: 399262 - DNA, 188 bp, Homo sapiens; identical to SEQ ID NO: 224547
  chr13:32931878-32932066
  hyper

SEQ ID NO: 399263 - DNA, 171 bp, Homo sapiens; identical to SEQ ID NO: 224548
  chr13:32936659-32936830
  hyper

SEQ ID NO: 399264 - DNA, 355 bp, Homo sapiens; identical to SEQ ID NO: 224549
  chr13:32937315-32937670
  hyper

SEQ ID NO: 399265 - DNA, 199 bp, Homo sapiens; identical to SEQ ID NO: 224553
  chr13:32953453-32953652
  hyper

SEQ ID NO: 399266 - DNA, 396 bp, Homo sapiens; identical to SEQ ID NO: 224554
  chr13:32953886-32954282
  hyper

SEQ ID NO: 399267 - DNA, 515 bp, Homo sapiens; identical to SEQ ID NO: 224558
  chr13:32973294-32973809
  hyper

SEQ ID NO: 399268 - DNA, 431 bp, Homo sapiens; identical to SEQ ID NO: 236955
  chr13:33001996-33002427
  hyper

SEQ ID NO: 399269 - DNA, 74 bp, Homo sapiens; identical to SEQ ID NO: 236957
  chr13:33590393-33590467
  hyper

SEQ ID NO: 399270 - DNA, 218 bp, Homo sapiens; identical to SEQ ID NO: 203322
  chr13:33924391-33924609
  hyper

SEQ ID NO: 399271 - DNA, 130 bp, Homo sapiens; identical to SEQ ID NO: 203323
  chr13:33924790-33924920
  hyper

SEQ ID NO: 399272 - DNA, 157 bp, Homo sapiens; identical to SEQ ID NO: 289669
  chr13:37004574-37004731
  hyper

SEQ ID NO: 399273 - DNA, 38 bp, Homo sapiens; identical to SEQ ID NO: 289671
  chr13:37247935-37247973
  hyper

SEQ ID NO: 399274 - DNA, 193 bp, Homo sapiens; identical to SEQ ID NO: 203331
  chr13:37248319-37248512
  hyper

SEQ ID NO: 399275 - DNA, 32 bp, Homo sapiens; identical to SEQ ID NO: 289674
  chr13:37493431-37493463
  hyper

SEQ ID NO: 399276 - DNA, 165 bp, Homo sapiens; identical to SEQ ID NO: 289675
  chr13:37493530-37493695
  hyper

SEQ ID NO: 399277 - DNA, 101 bp, Homo sapiens; identical to SEQ ID NO: 289676
  chr13:37493903-37494004
  hyper

SEQ ID NO: 399278 - DNA, 1233 bp, Homo sapiens; identical to SEQ ID NO: 236979
  chr13:40176535-40177768
  hyper

SEQ ID NO: 399279 - DNA, 88 bp, Homo sapiens; identical to SEQ ID NO: 236982
  chr13:41345169-41345257
  hyper

SEQ ID NO: 399280 - DNA, 147 bp, Homo sapiens; identical to SEQ ID NO: 236983
  chr13:41345437-41345584
  hyper

SEQ ID NO: 399281 - DNA, 277 bp, Homo sapiens; identical to SEQ ID NO: 236985
  chr13:41706714-41706991
  hyper

SEQ ID NO: 399282 - DNA, 271 bp, Homo sapiens; identical to SEQ ID NO: 224568
  chr13:41767821-41768092
  hyper

SEQ ID NO: 399283 - DNA, 172 bp, Homo sapiens; identical to SEQ ID NO: 236987
  chr13:41885138-41885310
  hyper

SEQ ID NO: 399284 - DNA, 162 bp, Homo sapiens; identical to SEQ ID NO: 224571
  chr13:42615145-42615307
  hyper

SEQ ID NO: 399285 - DNA, 180 bp, Homo sapiens; identical to SEQ ID NO: 224572
  chr13:42615560-42615740
  hyper

SEQ ID NO: 399286 - DNA, 174 bp, Homo sapiens; identical to SEQ ID NO: 203345
  chr13:43148495-43148669
  hyper

SEQ ID NO: 399287 - DNA, 473 bp, Homo sapiens; identical to SEQ ID NO: 203346
  chr13:43148698-43149171
  hyper

SEQ ID NO: 399288 - DNA, 43 bp, Homo sapiens; identical to SEQ ID NO: 203347
  chr13:43149172-43149215
  hyper

SEQ ID NO: 399289 - DNA, 34 bp, Homo sapiens; identical to SEQ ID NO: 289709
  chr13:43149333-43149367
  hyper

SEQ ID NO: 399290 - DNA, 205 bp, Homo sapiens; identical to SEQ ID NO: 203350
  chr13:44453169-44453374
  hyper

SEQ ID NO: 399291 - DNA, 205 bp, Homo sapiens; identical to SEQ ID NO: 224576
  chr13:44991619-44991824
  hyper

SEQ ID NO: 399292 - DNA, 31 bp, Homo sapiens; identical to SEQ ID NO: 237002
  chr13:45694566-45694597
  hyper

SEQ ID NO: 399293 - DNA, 37 bp, Homo sapiens; identical to SEQ ID NO: 237010
  chr13:46756059-46756096
  hyper

SEQ ID NO: 399294 - DNA, 318 bp, Homo sapiens; identical to SEQ ID NO: 237013
  chr13:48807036-48807354
  hyper

SEQ ID NO: 399295 - DNA, 499 bp, Homo sapiens; identical to SEQ ID NO: 237016
  chr13:50018030-50018529
  hyper

SEQ ID NO: 399296 - DNA, 88 bp, Homo sapiens; identical to SEQ ID NO: 237018
  chr13:50264906-50264994
  hyper

SEQ ID NO: 399297 - DNA, 47 bp, Homo sapiens; identical to SEQ ID NO: 203366
  chr13:51086772-51086819
  hyper

SEQ ID NO: 399298 - DNA, 121 bp, Homo sapiens; identical to SEQ ID NO: 237031
  chr13:52028195-52028316
  hyper

SEQ ID NO: 399299 - DNA, 257 bp, Homo sapiens; identical to SEQ ID NO: 237032
  chr13:52159090-52159347
  hyper

SEQ ID NO: 399300 - DNA, 124 bp, Homo sapiens; identical to SEQ ID NO: 237033
  chr13:52377716-52377840
  hyper

SEQ ID NO: 399301 - DNA, 291 bp, Homo sapiens; identical to SEQ ID NO: 224578
  chr13:52585269-52585560
  hyper

SEQ ID NO: 399302 - DNA, 223 bp, Homo sapiens; identical to SEQ ID NO: 237034
  chr13:52586275-52586498
  hyper

SEQ ID NO: 399303 - DNA, 545 bp, Homo sapiens; identical to SEQ ID NO: 289760
  chr13:52702767-52703312
  hyper

SEQ ID NO: 399304 - DNA, 71 bp, Homo sapiens; identical to SEQ ID NO: 123817
  chr13:52703361-52703432
  hyper

SEQ ID NO: 399305 - DNA, 649 bp, Homo sapiens; identical to SEQ ID NO: 237036
  chr13:52733271-52733920
  hyper

SEQ ID NO: 399306 - DNA, 58 bp, Homo sapiens; identical to SEQ ID NO: 237038
  chr13:53024891-53024949
  hyper

SEQ ID NO: 399307 - DNA, 256 bp, Homo sapiens; identical to SEQ ID NO: 237039
  chr13:53029197-53029453
  hyper

SEQ ID NO: 399308 - DNA, 110 bp, Homo sapiens; identical to SEQ ID NO: 289774
  chr13:53775438-53775548
  hyper

SEQ ID NO: 399309 - DNA, 352 bp, Homo sapiens; identical to SEQ ID NO: 203379
  chr13:58205443-58205795
  hyper

SEQ ID NO: 399310 - DNA, 404 bp, Homo sapiens; identical to SEQ ID NO: 289782
  chr13:61988789-61989193
  hyper

SEQ ID NO: 399311 - DNA, 225 bp, Homo sapiens; identical to SEQ ID NO: 203382
  chr13:61989329-61989554
  hyper

SEQ ID NO: 399312 - DNA, 243 bp, Homo sapiens; identical to SEQ ID NO: 224584
  chr13:67799457-67799700
  hyper

SEQ ID NO: 399313 - DNA, 32 bp, Homo sapiens; identical to SEQ ID NO: 224585
  chr13:67801107-67801139
  hyper

SEQ ID NO: 399314 - DNA, 117 bp, Homo sapiens; identical to SEQ ID NO: 289798
  chr13:73632748-73632865
  hyper

SEQ ID NO: 399315 - DNA, 69 bp, Homo sapiens; identical to SEQ ID NO: 123880
  chr13:73632890-73632959
  hyper

SEQ ID NO: 399316 - DNA, 101 bp, Homo sapiens; identical to SEQ ID NO: 237072
  chr13:76123767-76123868
  hyper

SEQ ID NO: 399317 - DNA, 171 bp, Homo sapiens; identical to SEQ ID NO: 203393
  chr13:77901202-77901373
  hyper

SEQ ID NO: 399318 - DNA, 44 bp, Homo sapiens; identical to SEQ ID NO: 203396
  chr13:79980677-79980721
  hyper

SEQ ID NO: 399319 - DNA, 42 bp, Homo sapiens; identical to SEQ ID NO: 237088
  chr13:80055214-80055256
  hyper

SEQ ID NO: 399320 - DNA, 50 bp, Homo sapiens; identical to SEQ ID NO: 237089
  chr13:80055634-80055684
  hyper

SEQ ID NO: 399321 - DNA, 724 bp, Homo sapiens; identical to SEQ ID NO: 237090
  chr13:80913011-80913735
  hyper

SEQ ID NO: 399322 - DNA, 79 bp, Homo sapiens; identical to SEQ ID NO: 203397
  chr13:80914000-80914079
  hyper

SEQ ID NO: 399323 - DNA, 437 bp, Homo sapiens; identical to SEQ ID NO: 289830
  chr13:80914144-80914581
  hyper

SEQ ID NO: 399324 - DNA, 928 bp, Homo sapiens; identical to SEQ ID NO: 289831
  chr13:80914613-80915541
  hyper

SEQ ID NO: 399325 - DNA, 93 bp, Homo sapiens; identical to SEQ ID NO: 203401
  chr13:80915582-80915675
  hyper

SEQ ID NO: 399326 - DNA, 499 bp, Homo sapiens; identical to SEQ ID NO: 203402
  chr13:80916947-80917446
  hyper

SEQ ID NO: 399327 - DNA, 226 bp, Homo sapiens; identical to SEQ ID NO: 289836
  chr13:84456480-84456706
  hyper

SEQ ID NO: 399328 - DNA, 251 bp, Homo sapiens; identical to SEQ ID NO: 289837
  chr13:88326061-88326312
  hyper

SEQ ID NO: 399329 - DNA, 353 bp, Homo sapiens; identical to SEQ ID NO: 237100
  chr13:92001426-92001779
  hyper

SEQ ID NO: 399330 - DNA, 166 bp, Homo sapiens; identical to SEQ ID NO: 237107
  chr13:95354380-95354546
  hyper

SEQ ID NO: 399331 - DNA, 114 bp, Homo sapiens
  chr13:95354726-95354840
  hyper
cacccgcaacctcccgcaccccaggttcccaaaatctgaatctgtatcctagagtggaggcagcgtctagaaagcaaagaaacggtgtccaaagaccccggagagttgagtgag

SEQ ID NO: 399332 - DNA, 166 bp, Homo sapiens
  chr13:95355116-95355282
  hyper
cgggagaaaacctagtccccgaaaaggaagaacagcaatccggacaagcagttggcgcctttgtcccgccagccccttctccaaccagcccaaagttgggcagctgctgcgaaggagggtaagggcgatgatcagaagggggctgattgatgcccccaggcgctcg

SEQ ID NO: 399333 - DNA, 194 bp, Homo sapiens; identical to SEQ ID NO: 289858
  chr13:99128923-99129117
  hyper

SEQ ID NO: 399334 - DNA, 249 bp, Homo sapiens; identical to SEQ ID NO: 237130
  chr13:99739203-99739452
  hyper

SEQ ID NO: 399335 - DNA, 100 bp, Homo sapiens; identical to SEQ ID NO: 237132
  chr13:99852544-99852644
  hyper

SEQ ID NO: 399336 - DNA, 82 bp, Homo sapiens; identical to SEQ ID NO: 237133
  chr13:99853142-99853224
  hyper

SEQ ID NO: 399337 - DNA, 201 bp, Homo sapiens; identical to SEQ ID NO: 237134
  chr13:100153680-100153881
  hyper

SEQ ID NO: 399338 - DNA, 112 bp, Homo sapiens; identical to SEQ ID NO: 237135
  chr13:100259205-100259317
  hyper

SEQ ID NO: 399339 - DNA, 45 bp, Homo sapiens
  chr13:100622177-100622222
  hyper
gaattacttattcatagaaaaaaaaaagggggggagagaaaaaaa

SEQ ID NO: 399340 - DNA, 272 bp, Homo sapiens; identical to SEQ ID NO: 203435
  chr13:100642614-100642886
  hyper

SEQ ID NO: 399341 - DNA, 268 bp, Homo sapiens; identical to SEQ ID NO: 289889
  chr13:103054731-103054999
  hyper

SEQ ID NO: 399342 - DNA, 193 bp, Homo sapiens; identical to SEQ ID NO: 237167
  chr13:107185497-107185690
  hyper

SEQ ID NO: 399343 - DNA, 216 bp, Homo sapiens; identical to SEQ ID NO: 203443
  chr13:107186448-107186664
  hyper

SEQ ID NO: 399344 - DNA, 84 bp, Homo sapiens; identical to SEQ ID NO: 237176
  chr13:108868007-108868091
  hyper

SEQ ID NO: 399345 - DNA, 668 bp, Homo sapiens; identical to SEQ ID NO: 289909
  chr13:110437578-110438246
  hyper

SEQ ID NO: 399346 - DNA, 634 bp, Homo sapiens; identical to SEQ ID NO: 289910
  chr13:110438287-110438921
  hyper

SEQ ID NO: 399347 - DNA, 267 bp, Homo sapiens
  chr13:110438956-110439223
  hyper
agaagagcaaaacaacatgtgactcggcgttacgcaggcacacacagcgcggccgccccgccccgctgcctcgcattggcgccgcgccccccgacggacggcgcgctcggccaatcggcgcggcgctcgcgggggcgggccgcgcgcccccgccccgcccccctttctccccgggccgcgtttcccgccgtcccctccccctcccgcgaaggccccggcccggccgggcggggtggggcggccccggcctcattaatcagcggcttg

SEQ ID NO: 399348 - DNA, 186 bp, Homo sapiens; identical to SEQ ID NO: 237180
  chr13:110790766-110790952
  hyper

SEQ ID NO: 399349 - DNA, 215 bp, Homo sapiens
  chr13:110960694-110960909
  hyper
gtcggcctttcacgggaactgggaacttaaaatgtagcctgaggcaccgttttcgttgctttgggcaaagctgcagccgtagaggccaggaaagtgtgtcagtcactaggcagtgagacgccaggcttagggcgaaaaaagttttcctggaactcgggagctggtggggagtctctgtcacggactgagggttttttgtgtttttaaatgggagt

SEQ ID NO: 399350 - DNA, 54 bp, Homo sapiens; identical to SEQ ID NO: 289915
  chr13:110961130-110961184
  hyper

SEQ ID NO: 399351 - DNA, 481 bp, Homo sapiens
  chr13:111213552-111214033
  hyper
acgagtgggaaaccccgagaaggaggcatttgctgtccgaggccgggaccctgtgcgcggccgggtgccctgctggaagccccgcgccccccgtccccggcggagccccagggcggtgtggctcatgcggcgccggcctcacctgcggtgtcccagatggagatgttgtaggagcgccactgcttcaggtagaaggcgccgcccaccgtgctgaccgtgtccgggaagcgccgctccatataccgctgcagcagcgacgtcttccccacgttcatgtcccccaggagcacgatcttgctgtcgggcttcctcatcttcccgtaagaacccccagcgcccccgcgccctctccccgaggctggccggctcgtgcgccctgggcgcagctggaggagcggaccccggactcgccgggacccggattctcgtgaacgctccgggaccttcgcctccggacgcccgggagctcaagagaggaagc

SEQ ID NO: 399352 - DNA, 78 bp, Homo sapiens; identical to SEQ ID NO: 237186
  chr13:111267965-111268043
  hyper

SEQ ID NO: 399353 - DNA, 58 bp, Homo sapiens; identical to SEQ ID NO: 237187
  chr13:111268659-111268717
  hyper

SEQ ID NO: 399354 - DNA, 150 bp, Homo sapiens; identical to SEQ ID NO: 203457
  chr13:111358789-111358939
  hyper

SEQ ID NO: 399355 - DNA, 210 bp, Homo sapiens; identical to SEQ ID NO: 289920
  chr13:111365469-111365679
  hyper

SEQ ID NO: 399356 - DNA, 100 bp, Homo sapiens; identical to SEQ ID NO: 237212
  chr13:113295149-113295249
  hyper

SEQ ID NO: 399357 - DNA, 47 bp, Homo sapiens; identical to SEQ ID NO: 289938
  chr13:113807345-113807392
  hyper

SEQ ID NO: 399358 - DNA, 465 bp, Homo sapiens; identical to SEQ ID NO: 124157
  chr13:113807542-113808007
  hyper

SEQ ID NO: 399359 - DNA, 313 bp, Homo sapiens; identical to SEQ ID NO: 237217
  chr13:113862929-113863242
  hyper

SEQ ID NO: 399360 - DNA, 87 bp, Homo sapiens; identical to SEQ ID NO: 203465
  chr13:113951225-113951312
  hyper

SEQ ID NO: 399361 - DNA, 179 bp, Homo sapiens; identical to SEQ ID NO: 289945
  chr13:114145958-114146137
  hyper

SEQ ID NO: 399362 - DNA, 234 bp, Homo sapiens
  chr13:114285627-114285861
  hyper
ttgggggtcacgctctgccctgtcctgttcttgcttgcttgggtcgtccgaagtttcttgttgcttttgtctaattggagaagatgcctgtgactgacaagaggaagatgagccacattcagaaccggtggggtgatgccgtcaccgtgacaaaagcgtccaccgctggacgtttttcctgctccgtcatggctgctcactgtggttaaggaaattcagcagtggctgcggata

SEQ ID NO: 399363 - DNA, 138 bp, Homo sapiens; identical to SEQ ID NO: 237222
  chr13:114566904-114567042
  hyper

SEQ ID NO: 399364 - DNA, 87 bp, Homo sapiens; identical to SEQ ID NO: 237226
  chr14:20922851-20922938
  hyper

SEQ ID NO: 399365 - DNA, 239 bp, Homo sapiens; identical to SEQ ID NO: 237227
  chr14:20929632-20929871
  hyper

SEQ ID NO: 399366 - DNA, 407 bp, Homo sapiens; identical to SEQ ID NO: 237228
  chr14:20937480-20937887
  hyper

SEQ ID NO: 399367 - DNA, 88 bp, Homo sapiens; identical to SEQ ID NO: 203481
  chr14:21101235-21101323
  hyper

SEQ ID NO: 399368 - DNA, 41 bp, Homo sapiens; identical to SEQ ID NO: 237235
  chr14:21101619-21101660
  hyper

SEQ ID NO: 399369 - DNA, 138 bp, Homo sapiens; identical to SEQ ID NO: 289964
  chr14:21121262-21121400
  hyper

SEQ ID NO: 399370 - DNA, 119 bp, Homo sapiens; identical to SEQ ID NO: 289965
  chr14:21121460-21121579
  hyper

SEQ ID NO: 399371 - DNA, 107 bp, Homo sapiens; identical to SEQ ID NO: 237237
  chr14:21131529-21131636
  hyper

SEQ ID NO: 399372 - DNA, 198 bp, Homo sapiens
  chr14:21150255-21150453
  hyper
gggtctgggcatatttggagtagagatcaaggttccacttctgaaacgggaagagccagcaatggccgctccggccaggcgtccagaagagagatgcacgttgtgaggcaaggtttcatgtgccagtggggttttgggaaattaagggcccgactttaggggcgagacttgggtcactaaatttgattttaacgcaga

SEQ ID NO: 399373 - DNA, 552 bp, Homo sapiens; identical to SEQ ID NO: 237241
  chr14:21152235-21152787
  hyper

SEQ ID NO: 399374 - DNA, 159 bp, Homo sapiens; identical to SEQ ID NO: 237244
  chr14:21458483-21458642
  hyper

SEQ ID NO: 399375 - DNA, 153 bp, Homo sapiens; identical to SEQ ID NO: 203486
  chr14:21493030-21493183
  hyper

SEQ ID NO: 399376 - DNA, 64 bp, Homo sapiens; identical to SEQ ID NO: 203487
  chr14:21539066-21539130
  hyper

SEQ ID NO: 399377 - DNA, 301 bp, Homo sapiens; identical to SEQ ID NO: 237250
  chr14:21905266-21905567
  hyper

SEQ ID NO: 399378 - DNA, 240 bp, Homo sapiens; identical to SEQ ID NO: 237253
  chr14:21979450-21979690
  hyper

SEQ ID NO: 399379 - DNA, 381 bp, Homo sapiens; identical to SEQ ID NO: 289985
  chr14:21994388-21994769
  hyper

SEQ ID NO: 399380 - DNA, 162 bp, Homo sapiens; identical to SEQ ID NO: 237256
  chr14:23057965-23058127
  hyper

SEQ ID NO: 399381 - DNA, 177 bp, Homo sapiens; identical to SEQ ID NO: 237258
  chr14:23067565-23067742
  hyper

SEQ ID NO: 399382 - DNA, 223 bp, Homo sapiens; identical to SEQ ID NO: 289994
  chr14:23355821-23356044
  hyper

SEQ ID NO: 399383 - DNA, 38 bp, Homo sapiens; identical to SEQ ID NO: 237263
  chr14:23388823-23388861
  hyper

SEQ ID NO: 399384 - DNA, 285 bp, Homo sapiens; identical to SEQ ID NO: 237264
  chr14:23398577-23398862
  hyper

SEQ ID NO: 399385 - DNA, 204 bp, Homo sapiens; identical to SEQ ID NO: 289998
  chr14:23450224-23450428
  hyper

SEQ ID NO: 399386 - DNA, 107 bp, Homo sapiens; identical to SEQ ID NO: 203495
  chr14:23450746-23450853
  hyper

SEQ ID NO: 399387 - DNA, 737 bp, Homo sapiens; identical to SEQ ID NO: 237266
  chr14:23450883-23451620
  hyper

SEQ ID NO: 399388 - DNA, 186 bp, Homo sapiens; identical to SEQ ID NO: 237268
  chr14:23503914-23504100
  hyper

SEQ ID NO: 399389 - DNA, 35 bp, Homo sapiens; identical to SEQ ID NO: 237270
  chr14:23540715-23540750
  hyper

SEQ ID NO: 399390 - DNA, 244 bp, Homo sapiens; identical to SEQ ID NO: 237271
  chr14:23755249-23755493
  hyper

SEQ ID NO: 399391 - DNA, 144 bp, Homo sapiens; identical to SEQ ID NO: 237273
  chr14:23772082-23772226
  hyper

SEQ ID NO: 399392 - DNA, 188 bp, Homo sapiens; identical to SEQ ID NO: 203499
  chr14:23776071-23776259
  hyper

SEQ ID NO: 399393 - DNA, 67 bp, Homo sapiens; identical to SEQ ID NO: 203500
  chr14:23821317-23821384
  hyper

SEQ ID NO: 399394 - DNA, 87 bp, Homo sapiens; identical to SEQ ID NO: 290012
  chr14:23822193-23822280
  hyper

SEQ ID NO: 399395 - DNA, 51 bp, Homo sapiens; identical to SEQ ID NO: 237278
  chr14:23938810-23938861
  hyper

SEQ ID NO: 399396 - DNA, 285 bp, Homo sapiens; identical to SEQ ID NO: 290016
  chr14:24024866-24025151
  hyper

SEQ ID NO: 399397 - DNA, 105 bp, Homo sapiens; identical to SEQ ID NO: 124289
  chr14:24025214-24025319
  hyper

SEQ ID NO: 399398 - DNA, 36 bp, Homo sapiens; identical to SEQ ID NO: 237281
  chr14:24025555-24025591
  hyper

SEQ ID NO: 399399 - DNA, 574 bp, Homo sapiens; identical to SEQ ID NO: 237282
  chr14:24036495-24037069
  hyper

SEQ ID NO: 399400 - DNA, 223 bp, Homo sapiens; identical to SEQ ID NO: 237286
  chr14:24605551-24605774
  hyper

SEQ ID NO: 399401 - DNA, 72 bp, Homo sapiens; identical to SEQ ID NO: 237289
  chr14:24658235-24658307
  hyper

SEQ ID NO: 399402 - DNA, 120 bp, Homo sapiens; identical to SEQ ID NO: 203503
  chr14:24685267-24685387
  hyper

SEQ ID NO: 399403 - DNA, 225 bp, Homo sapiens; identical to SEQ ID NO: 237293
  chr14:24702080-24702305
  hyper

SEQ ID NO: 399404 - DNA, 143 bp, Homo sapiens; identical to SEQ ID NO: 237294
  chr14:24711905-24712048
  hyper

SEQ ID NO: 399405 - DNA, 42 bp, Homo sapiens; identical to SEQ ID NO: 237296
  chr14:24768607-24768649
  hyper

SEQ ID NO: 399406 - DNA, 91 bp, Homo sapiens; identical to SEQ ID NO: 237297
  chr14:24769098-24769189
  hyper

SEQ ID NO: 399407 - DNA, 194 bp, Homo sapiens; identical to SEQ ID NO: 290037
  chr14:24837550-24837744
  hyper

SEQ ID NO: 399408 - DNA, 82 bp, Homo sapiens; identical to SEQ ID NO: 290038
  chr14:24837824-24837906
  hyper

SEQ ID NO: 399409 - DNA, 313 bp, Homo sapiens; identical to SEQ ID NO: 290040
  chr14:25518669-25518982
  hyper

SEQ ID NO: 399410 - DNA, 71 bp, Homo sapiens; identical to SEQ ID NO: 290054
  chr14:29242908-29242979
  hyper

SEQ ID NO: 399411 - DNA, 247 bp, Homo sapiens; identical to SEQ ID NO: 203512
  chr14:30396133-30396380
  hyper

SEQ ID NO: 399412 - DNA, 412 bp, Homo sapiens; identical to SEQ ID NO: 290057
  chr14:30396508-30396920
  hyper

SEQ ID NO: 399413 - DNA, 183 bp, Homo sapiens; identical to SEQ ID NO: 203514
  chr14:31027986-31028169
  hyper

SEQ ID NO: 399414 - DNA, 362 bp, Homo sapiens; identical to SEQ ID NO: 237323
  chr14:31091325-31091687
  hyper

SEQ ID NO: 399415 - DNA, 118 bp, Homo sapiens; identical to SEQ ID NO: 237325
  chr14:31494513-31494631
  hyper

SEQ ID NO: 399416 - DNA, 169 bp, Homo sapiens; identical to SEQ ID NO: 237328
  chr14:31889898-31890067
  hyper

SEQ ID NO: 399417 - DNA, 136 bp, Homo sapiens; identical to SEQ ID NO: 237329
  chr14:32030565-32030701
  hyper

SEQ ID NO: 399418 - DNA, 324 bp, Homo sapiens; identical to SEQ ID NO: 237331
  chr14:32670301-32670625
  hyper

SEQ ID NO: 399419 - DNA, 106 bp, Homo sapiens; identical to SEQ ID NO: 290070
  chr14:32670851-32670957
  hyper

SEQ ID NO: 399420 - DNA, 298 bp, Homo sapiens; identical to SEQ ID NO: 124376
  chr14:32670996-32671294
  hyper

SEQ ID NO: 399421 - DNA, 459 bp, Homo sapiens; identical to SEQ ID NO: 290082
  chr14:34529232-34529691
  hyper

SEQ ID NO: 399422 - DNA, 156 bp, Homo sapiens; identical to SEQ ID NO: 203521
  chr14:35008736-35008892
  hyper

SEQ ID NO: 399423 - DNA, 116 bp, Homo sapiens; identical to SEQ ID NO: 290086
  chr14:35591558-35591674
  hyper

SEQ ID NO: 399424 - DNA, 151 bp, Homo sapiens; identical to SEQ ID NO: 124397
  chr14:35591704-35591855
  hyper

SEQ ID NO: 399425 - DNA, 52 bp, Homo sapiens; identical to SEQ ID NO: 237345
  chr14:35874140-35874192
  hyper

SEQ ID NO: 399426 - DNA, 122 bp, Homo sapiens; identical to SEQ ID NO: 203524
  chr14:36005014-36005136
  hyper

SEQ ID NO: 399427 - DNA, 51 bp, Homo sapiens; identical to SEQ ID NO: 290100
  chr14:36981788-36981839
  hyper

SEQ ID NO: 399428 - DNA, 275 bp, Homo sapiens; identical to SEQ ID NO: 290102
  chr14:36988153-36988428
  hyper

SEQ ID NO: 399429 - DNA, 91 bp, Homo sapiens; identical to SEQ ID NO: 290103
  chr14:36988460-36988551
  hyper

SEQ ID NO: 399430 - DNA, 225 bp, Homo sapiens; identical to SEQ ID NO: 290104
  chr14:36988644-36988869
  hyper

SEQ ID NO: 399431 - DNA, 99 bp, Homo sapiens; identical to SEQ ID NO: 290114
  chr14:37133569-37133668
  hyper

SEQ ID NO: 399432 - DNA, 590 bp, Homo sapiens; identical to SEQ ID NO: 290117
  chr14:37641120-37641710
  hyper

SEQ ID NO: 399433 - DNA, 200 bp, Homo sapiens; identical to SEQ ID NO: 203537
  chr14:37641762-37641962
  hyper

SEQ ID NO: 399434 - DNA, 100 bp, Homo sapiens; identical to SEQ ID NO: 203544
  chr14:38058220-38058320
  hyper

SEQ ID NO: 399435 - DNA, 316 bp, Homo sapiens
  chr14:38063549-38063865
  hyper
ctagcgccacccagcggttttagagaaggagcacacttctccccaaatagggcttttgaagaacaagttttacaaaatttagaaatcgtttcattattgagacacccaacttggcggcagagcgctttaatcagaagacgtctgcgaattaaacggtgggacgaagaggtcgccttgtgggtatgctccggctttctcagagttgcttccaactcgcaccggcgctcgcccgcccgctgcaccccgggcccggctcctgctcccgctcgctgctgggaagaggcaagcgcttcctagagccgctgttttcaaagcc

SEQ ID NO: 399436 - DNA, 137 bp, Homo sapiens
  chr14:38064858-38064995
  hyper
ggagactgggcttagagaccttgtgggataactgaccccggggtccctccccagaggtacacgccaccttccgagcgcgggctgcggcccagtctcgcgcccctcctgctctttgcttcctccctcctgattcctga

SEQ ID NO: 399437 - DNA, 643 bp, Homo sapiens; identical to SEQ ID NO: 203552
  chr14:38065025-38065668
  hyper

SEQ ID NO: 399438 - DNA, 213 bp, Homo sapiens; identical to SEQ ID NO: 224682
  chr14:39735565-39735778
  hyper

SEQ ID NO: 399439 - DNA, 85 bp, Homo sapiens; identical to SEQ ID NO: 237395
  chr14:45553394-45553479
  hyper

SEQ ID NO: 399440 - DNA, 34 bp, Homo sapiens; identical to SEQ ID NO: 237397
  chr14:45722603-45722637
  hyper

SEQ ID NO: 399441 - DNA, 115 bp, Homo sapiens; identical to SEQ ID NO: 237402
  chr14:50329599-50329714
  hyper

SEQ ID NO: 399442 - DNA, 256 bp, Homo sapiens; identical to SEQ ID NO: 237403
  chr14:50359202-50359458
  hyper

SEQ ID NO: 399443 - DNA, 239 bp, Homo sapiens; identical to SEQ ID NO: 237406
  chr14:50698773-50699012
  hyper

SEQ ID NO: 399444 - DNA, 205 bp, Homo sapiens; identical to SEQ ID NO: 237407
  chr14:50778818-50779023
  hyper

SEQ ID NO: 399445 - DNA, 1663 bp, Homo sapiens; identical to SEQ ID NO: 290168
  chr14:52117843-52119506
  hyper

SEQ ID NO: 399446 - DNA, 39 bp, Homo sapiens; identical to SEQ ID NO: 290169
  chr14:52119545-52119584
  hyper

SEQ ID NO: 399447 - DNA, 146 bp, Homo sapiens; identical to SEQ ID NO: 290174
  chr14:52536504-52536650
  hyper

SEQ ID NO: 399448 - DNA, 88 bp, Homo sapiens; identical to SEQ ID NO: 290177
  chr14:52780743-52780831
  hyper

SEQ ID NO: 399449 - DNA, 40 bp, Homo sapiens; identical to SEQ ID NO: 203584
  chr14:53161604-53161644
  hyper

SEQ ID NO: 399450 - DNA, 82 bp, Homo sapiens; identical to SEQ ID NO: 237425
  chr14:53162609-53162691
  hyper

SEQ ID NO: 399451 - DNA, 169 bp, Homo sapiens; identical to SEQ ID NO: 203586
  chr14:53196918-53197087
  hyper

SEQ ID NO: 399452 - DNA, 544 bp, Homo sapiens; identical to SEQ ID NO: 237428
  chr14:53257754-53258298
  hyper

SEQ ID NO: 399453 - DNA, 40 bp, Homo sapiens; identical to SEQ ID NO: 237430
  chr14:53619297-53619337
  hyper

SEQ ID NO: 399454 - DNA, 71 bp, Homo sapiens; identical to SEQ ID NO: 237431
  chr14:53619544-53619615
  hyper

SEQ ID NO: 399455 - DNA, 76 bp, Homo sapiens; identical to SEQ ID NO: 203591
  chr14:54430607-54430683
  hyper

SEQ ID NO: 399456 - DNA, 290 bp, Homo sapiens; identical to SEQ ID NO: 237436
  chr14:54908014-54908304
  hyper

SEQ ID NO: 399457 - DNA, 44 bp, Homo sapiens; identical to SEQ ID NO: 290201
  chr14:55032358-55032402
  hyper

SEQ ID NO: 399458 - DNA, 576 bp, Homo sapiens; identical to SEQ ID NO: 237438
  chr14:55367881-55368457
  hyper

SEQ ID NO: 399459 - DNA, 155 bp, Homo sapiens; identical to SEQ ID NO: 224693
  chr14:56047824-56047979
  hyper

SEQ ID NO: 399460 - DNA, 110 bp, Homo sapiens; identical to SEQ ID NO: 203600
  chr14:57272911-57273021
  hyper

SEQ ID NO: 399461 - DNA, 206 bp, Homo sapiens; identical to SEQ ID NO: 290214
  chr14:57277241-57277447
  hyper

SEQ ID NO: 399462 - DNA, 39 bp, Homo sapiens; identical to SEQ ID NO: 237453
  chr14:57281266-57281305
  hyper

SEQ ID NO: 399463 - DNA, 513 bp, Homo sapiens; identical to SEQ ID NO: 237455
  chr14:57735567-57736080
  hyper

SEQ ID NO: 399464 - DNA, 172 bp, Homo sapiens; identical to SEQ ID NO: 237461
  chr14:59655229-59655401
  hyper

SEQ ID NO: 399465 - DNA, 40 bp, Homo sapiens; identical to SEQ ID NO: 237471
  chr14:60972828-60972868
  hyper

SEQ ID NO: 399466 - DNA, 281 bp, Homo sapiens; identical to SEQ ID NO: 203612
  chr14:61108286-61108567
  hyper

SEQ ID NO: 399467 - DNA, 188 bp, Homo sapiens; identical to SEQ ID NO: 237499
  chr14:62229157-62229345
  hyper

SEQ ID NO: 399468 - DNA, 31 bp, Homo sapiens; identical to SEQ ID NO: 203629
  chr14:63511825-63511856
  hyper

SEQ ID NO: 399469 - DNA, 533 bp, Homo sapiens; identical to SEQ ID NO: 237504
  chr14:64108074-64108607
  hyper

SEQ ID NO: 399470 - DNA, 35 bp, Homo sapiens; identical to SEQ ID NO: 224711
  chr14:64182960-64182995
  hyper

SEQ ID NO: 399471 - DNA, 221 bp, Homo sapiens; identical to SEQ ID NO: 290271
  chr14:64760852-64761073
  hyper

SEQ ID NO: 399472 - DNA, 61 bp, Homo sapiens; identical to SEQ ID NO: 389191
  chr14:64761254-64761315
  hyper

SEQ ID NO: 399473 - DNA, 138 bp, Homo sapiens; identical to SEQ ID NO: 237510
  chr14:65008388-65008526
  hyper

SEQ ID NO: 399474 - DNA, 117 bp, Homo sapiens
  chr14:65171561-65171678
  hyper
gaggagggcctggaactgtgttggctgcttcccgggccaccctgccgcagagtgcgcgagcgcaggagggtcgtatggggagactttttctgtctttttttccctccactccggaaa

SEQ ID NO: 399475 - DNA, 183 bp, Homo sapiens; identical to SEQ ID NO: 203641
  chr14:65171770-65171953
  hyper

SEQ ID NO: 399476 - DNA, 271 bp, Homo sapiens; identical to SEQ ID NO: 237514
  chr14:65346619-65346890
  hyper

SEQ ID NO: 399477 - DNA, 34 bp, Homo sapiens; identical to SEQ ID NO: 237518
  chr14:65569329-65569363
  hyper

SEQ ID NO: 399478 - DNA, 181 bp, Homo sapiens; identical to SEQ ID NO: 237519
  chr14:65569737-65569918
  hyper

SEQ ID NO: 399479 - DNA, 288 bp, Homo sapiens; identical to SEQ ID NO: 237521
  chr14:66974387-66974675
  hyper

SEQ ID NO: 399480 - DNA, 74 bp, Homo sapiens; identical to SEQ ID NO: 237522
  chr14:66974895-66974969
  hyper

SEQ ID NO: 399481 - DNA, 429 bp, Homo sapiens; identical to SEQ ID NO: 237523
  chr14:66975358-66975787
  hyper

SEQ ID NO: 399482 - DNA, 32 bp, Homo sapiens; identical to SEQ ID NO: 237528
  chr14:67982132-67982164
  hyper

SEQ ID NO: 399483 - DNA, 37 bp, Homo sapiens; identical to SEQ ID NO: 237529
  chr14:68067076-68067113
  hyper

SEQ ID NO: 399484 - DNA, 435 bp, Homo sapiens; identical to SEQ ID NO: 237530
  chr14:68086297-68086732
  hyper

SEQ ID NO: 399485 - DNA, 126 bp, Homo sapiens; identical to SEQ ID NO: 203647
  chr14:68141650-68141776
  hyper

SEQ ID NO: 399486 - DNA, 293 bp, Homo sapiens; identical to SEQ ID NO: 237533
  chr14:68283048-68283341
  hyper

SEQ ID NO: 399487 - DNA, 56 bp, Homo sapiens; identical to SEQ ID NO: 237535
  chr14:69260259-69260315
  hyper

SEQ ID NO: 399488 - DNA, 515 bp, Homo sapiens; identical to SEQ ID NO: 224715
  chr14:69444793-69445308
  hyper

SEQ ID NO: 399489 - DNA, 104 bp, Homo sapiens; identical to SEQ ID NO: 203653
  chr14:69618203-69618307
  hyper

SEQ ID NO: 399490 - DNA, 312 bp, Homo sapiens; identical to SEQ ID NO: 237540
  chr14:69620502-69620814
  hyper

SEQ ID NO: 399491 - DNA, 95 bp, Homo sapiens; identical to SEQ ID NO: 203654
  chr14:69658738-69658833
  hyper

SEQ ID NO: 399492 - DNA, 362 bp, Homo sapiens; identical to SEQ ID NO: 203655
  chr14:69864916-69865278
  hyper

SEQ ID NO: 399493 - DNA, 143 bp, Homo sapiens; identical to SEQ ID NO: 290320
  chr14:69950636-69950779
  hyper

SEQ ID NO: 399494 - DNA, 74 bp, Homo sapiens; identical to SEQ ID NO: 290321
  chr14:69951034-69951108
  hyper

SEQ ID NO: 399495 - DNA, 518 bp, Homo sapiens; identical to SEQ ID NO: 290322
  chr14:69951336-69951854
  hyper

SEQ ID NO: 399496 - DNA, 65 bp, Homo sapiens; identical to SEQ ID NO: 124847
  chr14:70039199-70039264
  hyper

SEQ ID NO: 399497 - DNA, 365 bp, Homo sapiens; identical to SEQ ID NO: 203656
  chr14:70193443-70193808
  hyper

SEQ ID NO: 399498 - DNA, 380 bp, Homo sapiens; identical to SEQ ID NO: 237555
  chr14:70826032-70826412
  hyper

SEQ ID NO: 399499 - DNA, 60 bp, Homo sapiens; identical to SEQ ID NO: 224724
  chr14:71108798-71108858
  hyper

SEQ ID NO: 399500 - DNA, 129 bp, Homo sapiens; identical to SEQ ID NO: 237557
  chr14:71786797-71786926
  hyper

SEQ ID NO: 399501 - DNA, 47 bp, Homo sapiens; identical to SEQ ID NO: 237558
  chr14:71787538-71787585
  hyper

SEQ ID NO: 399502 - DNA, 107 bp, Homo sapiens; identical to SEQ ID NO: 237563
  chr14:73361733-73361840
  hyper

SEQ ID NO: 399503 - DNA, 469 bp, Homo sapiens
  chr14:73393144-73393613
  hyper
cctaactggctgacgctacaccttggtctttccgggtccttgcacgcttcgctccaactcctgcagagctgagccggaggggaatccggaagggacacgctgaacaggtaagactgtgctgcctggggtgcctactggcatcgattcgagggctgccgcgctcccgctgcagagctcggggtgggagacaggcgcggcgaggaaggccagggaaaggggcggggaggggcggggaggagtgagcacgtggaacgccggcgccaccgggcctaggtggcagctgggccggcgcgctccgcccgttctggggcgcgtggggccctccggccggatcagtgctgcaaccgtaaacacgcagggagggcaccccgagtgtcgccgctgagggcgtttctctaagcgcttctctgagacctgctgctgaaggccccacccgacacctggcgggggctgggctgcgggccttggg

SEQ ID NO: 399504 - DNA, 42 bp, Homo sapiens; identical to SEQ ID NO: 237566
  chr14:73925198-73925240
  hyper

SEQ ID NO: 399505 - DNA, 144 bp, Homo sapiens; identical to SEQ ID NO: 237568
  chr14:74180377-74180521
  hyper

SEQ ID NO: 399506 - DNA, 137 bp, Homo sapiens; identical to SEQ ID NO: 237569
  chr14:74180761-74180898
  hyper

SEQ ID NO: 399507 - DNA, 44 bp, Homo sapiens; identical to SEQ ID NO: 203664
  chr14:74225613-74225657
  hyper

SEQ ID NO: 399508 - DNA, 116 bp, Homo sapiens; identical to SEQ ID NO: 203666
  chr14:74252875-74252991
  hyper

SEQ ID NO: 399509 - DNA, 390 bp, Homo sapiens; identical to SEQ ID NO: 237577
  chr14:74318399-74318789
  hyper

SEQ ID NO: 399510 - DNA, 69 bp, Homo sapiens; identical to SEQ ID NO: 237579
  chr14:74551628-74551697
  hyper

SEQ ID NO: 399511 - DNA, 58 bp, Homo sapiens; identical to SEQ ID NO: 203670
  chr14:74709107-74709165
  hyper

SEQ ID NO: 399512 - DNA, 222 bp, Homo sapiens; identical to SEQ ID NO: 237584
  chr14:74724285-74724507
  hyper

SEQ ID NO: 399513 - DNA, 44 bp, Homo sapiens; identical to SEQ ID NO: 237586
  chr14:74959041-74959085
  hyper

SEQ ID NO: 399514 - DNA, 259 bp, Homo sapiens; identical to SEQ ID NO: 290364
  chr14:74960116-74960375
  hyper

SEQ ID NO: 399515 - DNA, 144 bp, Homo sapiens; identical to SEQ ID NO: 203671
  chr14:75179349-75179493
  hyper

SEQ ID NO: 399516 - DNA, 106 bp, Homo sapiens; identical to SEQ ID NO: 237591
  chr14:75229919-75230025
  hyper

SEQ ID NO: 399517 - DNA, 145 bp, Homo sapiens; identical to SEQ ID NO: 203673
  chr14:75230400-75230545
  hyper

SEQ ID NO: 399518 - DNA, 163 bp, Homo sapiens; identical to SEQ ID NO: 237593
  chr14:75348311-75348474
  hyper

SEQ ID NO: 399519 - DNA, 124 bp, Homo sapiens; identical to SEQ ID NO: 237594
  chr14:75349046-75349170
  hyper

SEQ ID NO: 399520 - DNA, 734 bp, Homo sapiens; identical to SEQ ID NO: 237595
  chr14:75469162-75469896
  hyper

SEQ ID NO: 399521 - DNA, 196 bp, Homo sapiens; identical to SEQ ID NO: 203675
  chr14:75743668-75743864
  hyper

SEQ ID NO: 399522 - DNA, 355 bp, Homo sapiens; identical to SEQ ID NO: 237601
  chr14:75745344-75745699
  hyper

SEQ ID NO: 399523 - DNA, 208 bp, Homo sapiens; identical to SEQ ID NO: 237604
  chr14:76044577-76044785
  hyper

SEQ ID NO: 399524 - DNA, 68 bp, Homo sapiens; identical to SEQ ID NO: 203679
  chr14:77227531-77227599
  hyper

SEQ ID NO: 399525 - DNA, 482 bp, Homo sapiens; identical to SEQ ID NO: 290390
  chr14:77422360-77422842
  hyper

SEQ ID NO: 399526 - DNA, 282 bp, Homo sapiens; identical to SEQ ID NO: 237617
  chr14:77499644-77499926
  hyper

SEQ ID NO: 399527 - DNA, 568 bp, Homo sapiens; identical to SEQ ID NO: 290397
  chr14:77605688-77606256
  hyper

SEQ ID NO: 399528 - DNA, 88 bp, Homo sapiens; identical to SEQ ID NO: 384533
  chr14:77736779-77736867
  hyper

SEQ ID NO: 399529 - DNA, 97 bp, Homo sapiens; identical to SEQ ID NO: 290401
  chr14:77736883-77736980
  hyper

SEQ ID NO: 399530 - DNA, 55 bp, Homo sapiens; identical to SEQ ID NO: 203688
  chr14:78266694-78266749
  hyper

SEQ ID NO: 399531 - DNA, 233 bp, Homo sapiens; identical to SEQ ID NO: 290409
  chr14:79745242-79745475
  hyper

SEQ ID NO: 399532 - DNA, 223 bp, Homo sapiens; identical to SEQ ID NO: 290410
  chr14:79745557-79745780
  hyper

SEQ ID NO: 399533 - DNA, 332 bp, Homo sapiens; identical to SEQ ID NO: 237630
  chr14:81421283-81421615
  hyper

SEQ ID NO: 399534 - DNA, 139 bp, Homo sapiens; identical to SEQ ID NO: 203692
  chr14:81901893-81902032
  hyper

SEQ ID NO: 399535 - DNA, 52 bp, Homo sapiens
  chr14:81902236-81902288
  hyper
ggggcgcggcgccaacccggggtttcaggcgaggggagtgtaggggaagcac

SEQ ID NO: 399536 - DNA, 148 bp, Homo sapiens; identical to SEQ ID NO: 237634
  chr14:82000298-82000446
  hyper

SEQ ID NO: 399537 - DNA, 102 bp, Homo sapiens; identical to SEQ ID NO: 203697
  chr14:85998186-85998288
  hyper

SEQ ID NO: 399538 - DNA, 154 bp, Homo sapiens; identical to SEQ ID NO: 237640
  chr14:88851824-88851978
  hyper

SEQ ID NO: 399539 - DNA, 782 bp, Homo sapiens; identical to SEQ ID NO: 203701
  chr14:89020631-89021413
  hyper

SEQ ID NO: 399540 - DNA, 352 bp, Homo sapiens; identical to SEQ ID NO: 237642
  chr14:89029588-89029940
  hyper

SEQ ID NO: 399541 - DNA, 725 bp, Homo sapiens; identical to SEQ ID NO: 290430
  chr14:89290490-89291215
  hyper

SEQ ID NO: 399542 - DNA, 144 bp, Homo sapiens; identical to SEQ ID NO: 290432
  chr14:89494054-89494198
  hyper

SEQ ID NO: 399543 - DNA, 238 bp, Homo sapiens; identical to SEQ ID NO: 203703
  chr14:89506861-89507099
  hyper

SEQ ID NO: 399544 - DNA, 182 bp, Homo sapiens; identical to SEQ ID NO: 224749
  chr14:90167708-90167890
  hyper

SEQ ID NO: 399545 - DNA, 673 bp, Homo sapiens
  chr14:90422122-90422795
  hyper
agaccaggtttccccagccccgtcctgggtaaacacccggcgggctttaggacccagcggtgggctctccggaaggggaaggggccgggcctcgaggcacaagccgctgccgccagggtttgaactgcgcgcatgcgcggcggccgccgaaggggcgggatccgaggcaagcgttggttctgtgcgcctcaggtacgtgttgggcggcagtgggcgcggactcggtgcggtctctcgcgggctgcggtcgggcccgggatcctgctcctggccgagtcgcggtgcgcgggctgctggggtccggcagggctggaggcggaccgcgaggaagcggcgcggccgggaagatggggcagggtcgcctcggccccggggcctcggtttcctccgatcacagcgcctcagggggcgcgcacgggcgctgcggagacctgtgtcctgccggggcgcggcgctaggggcccctgctcgggtttttattcccagacctaagcttacaggtgcgtggtcccagaaagtgagtaggaaagcgcccaccacgtgccaggcgcttaagctttctgtgctcggtttcccagtataggaggacggtcacggtacgtagtatagagttgtcctgagggtgaagcgagtttacacttggtgaggcgcttcgaatcgtgcctggccggcc

SEQ ID NO: 399546 - DNA, 255 bp, Homo sapiens; identical to SEQ ID NO: 237659
  chr14:90723211-90723466
  hyper

SEQ ID NO: 399547 - DNA, 335 bp, Homo sapiens; identical to SEQ ID NO: 237670
  chr14:91976580-91976915
  hyper

SEQ ID NO: 399548 - DNA, 147 bp, Homo sapiens; identical to SEQ ID NO: 203725
  chr14:93582647-93582794
  hyper

SEQ ID NO: 399549 - DNA, 192 bp, Homo sapiens; identical to SEQ ID NO: 290470
  chr14:93896833-93897025
  hyper

SEQ ID NO: 399550 - DNA, 47 bp, Homo sapiens; identical to SEQ ID NO: 203727
  chr14:93897078-93897125
  hyper

SEQ ID NO: 399551 - DNA, 144 bp, Homo sapiens; identical to SEQ ID NO: 290473
  chr14:94254150-94254294
  hyper

SEQ ID NO: 399552 - DNA, 260 bp, Homo sapiens; identical to SEQ ID NO: 237688
  chr14:94492880-94493140
  hyper

SEQ ID NO: 399553 - DNA, 260 bp, Homo sapiens; identical to SEQ ID NO: 203729
  chr14:94547568-94547828
  hyper

SEQ ID NO: 399554 - DNA, 46 bp, Homo sapiens; identical to SEQ ID NO: 290486
  chr14:95237576-95237622
  hyper

SEQ ID NO: 399555 - DNA, 85 bp, Homo sapiens; identical to SEQ ID NO: 290487
  chr14:95237782-95237867
  hyper

SEQ ID NO: 399556 - DNA, 302 bp, Homo sapiens; identical to SEQ ID NO: 290488
  chr14:95237922-95238224
  hyper

SEQ ID NO: 399557 - DNA, 274 bp, Homo sapiens; identical to SEQ ID NO: 290496
  chr14:95932315-95932589
  hyper

SEQ ID NO: 399558 - DNA, 114 bp, Homo sapiens; identical to SEQ ID NO: 237707
  chr14:97050713-97050827
  hyper

SEQ ID NO: 399559 - DNA, 643 bp, Homo sapiens; identical to SEQ ID NO: 389231
  chr14:100069898-100070541
  hyper

SEQ ID NO: 399560 - DNA, 420 bp, Homo sapiens; identical to SEQ ID NO: 224775
  chr14:100070591-100071011
  hyper

SEQ ID NO: 399561 - DNA, 240 bp, Homo sapiens; identical to SEQ ID NO: 224776
  chr14:100071337-100071577
  hyper

SEQ ID NO: 399562 - DNA, 76 bp, Homo sapiens; identical to SEQ ID NO: 237723
  chr14:100150429-100150505
  hyper

SEQ ID NO: 399563 - DNA, 248 bp, Homo sapiens; identical to SEQ ID NO: 290532
  chr14:100625926-100626174
  hyper

SEQ ID NO: 399564 - DNA, 64 bp, Homo sapiens; identical to SEQ ID NO: 125211
  chr14:100626295-100626359
  hyper

SEQ ID NO: 399565 - DNA, 224 bp, Homo sapiens; identical to SEQ ID NO: 237727
  chr14:100688018-100688242
  hyper

SEQ ID NO: 399566 - DNA, 402 bp, Homo sapiens; identical to SEQ ID NO: 290536
  chr14:100771908-100772310
  hyper

SEQ ID NO: 399567 - DNA, 176 bp, Homo sapiens
  chr14:101034236-101034412
  hyper
gctccactcacctgagtttctccatgtctgcggcagaggcctgcgagaaaccaaacgagagggtcagcaggcaggaggcgtgcgctccgcggccgcgccgggcagagccgggcacagcgggcacggccgggcaaccccgcggggccccgtccgtgggaagcccggcgccgcgcgtc

SEQ ID NO: 399568 - DNA, 76 bp, Homo sapiens; identical to SEQ ID NO: 290539
  chr14:101034471-101034547
  hyper

SEQ ID NO: 399569 - DNA, 178 bp, Homo sapiens; identical to SEQ ID NO: 290542
  chr14:101192969-101193147
  hyper

SEQ ID NO: 399570 - DNA, 52 bp, Homo sapiens; identical to SEQ ID NO: 290544
  chr14:101923286-101923338
  hyper

SEQ ID NO: 399571 - DNA, 228 bp, Homo sapiens; identical to SEQ ID NO: 290549
  chr14:102029161-102029389
  hyper

SEQ ID NO: 399572 - DNA, 141 bp, Homo sapiens; identical to SEQ ID NO: 237743
  chr14:102605815-102605956
  hyper

SEQ ID NO: 399573 - DNA, 241 bp, Homo sapiens; identical to SEQ ID NO: 237745
  chr14:102771431-102771672
  hyper

SEQ ID NO: 399574 - DNA, 231 bp, Homo sapiens; identical to SEQ ID NO: 237751
  chr14:103057881-103058112
  hyper

SEQ ID NO: 399575 - DNA, 55 bp, Homo sapiens; identical to SEQ ID NO: 384547
  chr14:103430379-103430434
  hyper

SEQ ID NO: 399576 - DNA, 124 bp, Homo sapiens; identical to SEQ ID NO: 290568
  chr14:103430509-103430633
  hyper

SEQ ID NO: 399577 - DNA, 77 bp, Homo sapiens; identical to SEQ ID NO: 203771
  chr14:103541957-103542034
  hyper

SEQ ID NO: 399578 - DNA, 38 bp, Homo sapiens; identical to SEQ ID NO: 237757
  chr14:103571012-103571050
  hyper

SEQ ID NO: 399579 - DNA, 219 bp, Homo sapiens; identical to SEQ ID NO: 290575
  chr14:103593755-103593974
  hyper

SEQ ID NO: 399580 - DNA, 289 bp, Homo sapiens; identical to SEQ ID NO: 290576
  chr14:103594004-103594293
  hyper

SEQ ID NO: 399581 - DNA, 361 bp, Homo sapiens; identical to SEQ ID NO: 237769
  chr14:104029513-104029874
  hyper

SEQ ID NO: 399582 - DNA, 119 bp, Homo sapiens; identical to SEQ ID NO: 290588
  chr14:104094604-104094723
  hyper

SEQ ID NO: 399583 - DNA, 125 bp, Homo sapiens; identical to SEQ ID NO: 290592
  chr14:104601612-104601737
  hyper

SEQ ID NO: 399584 - DNA, 337 bp, Homo sapiens; identical to SEQ ID NO: 290602
  chr14:105195466-105195803
  hyper

SEQ ID NO: 399585 - DNA, 180 bp, Homo sapiens; identical to SEQ ID NO: 224803
  chr14:105269059-105269239
  hyper

SEQ ID NO: 399586 - DNA, 199 bp, Homo sapiens; identical to SEQ ID NO: 237782
  chr14:105332329-105332528
  hyper

SEQ ID NO: 399587 - DNA, 44 bp, Homo sapiens; identical to SEQ ID NO: 203790
  chr14:105511922-105511966
  hyper

SEQ ID NO: 399588 - DNA, 220 bp, Homo sapiens; identical to SEQ ID NO: 237788
  chr14:105559994-105560214
  hyper

SEQ ID NO: 399589 - DNA, 155 bp, Homo sapiens; identical to SEQ ID NO: 290617
  chr14:105647609-105647764
  hyper

SEQ ID NO: 399590 - DNA, 75 bp, Homo sapiens; identical to SEQ ID NO: 237791
  chr14:105781910-105781985
  hyper

SEQ ID NO: 399591 - DNA, 202 bp, Homo sapiens; identical to SEQ ID NO: 224811
  chr15:20478123-20478325
  hyper

SEQ ID NO: 399592 - DNA, 677 bp, Homo sapiens; identical to SEQ ID NO: 203796
  chr15:22893131-22893808
  hyper

SEQ ID NO: 399593 - DNA, 127 bp, Homo sapiens; identical to SEQ ID NO: 290627
  chr15:27016782-27016909
  hyper

SEQ ID NO: 399594 - DNA, 39 bp, Homo sapiens; identical to SEQ ID NO: 290628
  chr15:27016944-27016983
  hyper

SEQ ID NO: 399595 - DNA, 192 bp, Homo sapiens; identical to SEQ ID NO: 203797
  chr15:27017019-27017211
  hyper

SEQ ID NO: 399596 - DNA, 77 bp, Homo sapiens; identical to SEQ ID NO: 290630
  chr15:27017828-27017905
  hyper

SEQ ID NO: 399597 - DNA, 67 bp, Homo sapiens; identical to SEQ ID NO: 290632
  chr15:27216000-27216067
  hyper

SEQ ID NO: 399598 - DNA, 49 bp, Homo sapiens; identical to SEQ ID NO: 237807
  chr15:28344695-28344744
  hyper

SEQ ID NO: 399599 - DNA, 119 bp, Homo sapiens; identical to SEQ ID NO: 125411
  chr15:29033933-29034052
  hyper

SEQ ID NO: 399600 - DNA, 58 bp, Homo sapiens; identical to SEQ ID NO: 203807
  chr15:29864126-29864184
  hyper

SEQ ID NO: 399601 - DNA, 45 bp, Homo sapiens; identical to SEQ ID NO: 203808
  chr15:29966982-29967027
  hyper

SEQ ID NO: 399602 - DNA, 131 bp, Homo sapiens; identical to SEQ ID NO: 203813
  chr15:31507691-31507822
  hyper

SEQ ID NO: 399603 - DNA, 99 bp, Homo sapiens; identical to SEQ ID NO: 389247
  chr15:33603879-33603978
  hyper

SEQ ID NO: 399604 - DNA, 257 bp, Homo sapiens; identical to SEQ ID NO: 237830
  chr15:34394021-34394278
  hyper

SEQ ID NO: 399605 - DNA, 100 bp, Homo sapiens; identical to SEQ ID NO: 290673
  chr15:34807388-34807488
  hyper

SEQ ID NO: 399606 - DNA, 65 bp, Homo sapiens; identical to SEQ ID NO: 203827
  chr15:35280590-35280655
  hyper

SEQ ID NO: 399607 - DNA, 42 bp, Homo sapiens; identical to SEQ ID NO: 237840
  chr15:35280893-35280935
  hyper

SEQ ID NO: 399608 - DNA, 272 bp, Homo sapiens; identical to SEQ ID NO: 237843
  chr15:37179523-37179795
  hyper

SEQ ID NO: 399609 - DNA, 508 bp, Homo sapiens; identical to SEQ ID NO: 237845
  chr15:37391107-37391615
  hyper

SEQ ID NO: 399610 - DNA, 679 bp, Homo sapiens; identical to SEQ ID NO: 224830
  chr15:37393563-37394242
  hyper

SEQ ID NO: 399611 - DNA, 456 bp, Homo sapiens; identical to SEQ ID NO: 237850
  chr15:38543234-38543690
  hyper

SEQ ID NO: 399612 - DNA, 63 bp, Homo sapiens; identical to SEQ ID NO: 237851
  chr15:38746261-38746324
  hyper

SEQ ID NO: 399613 - DNA, 344 bp, Homo sapiens; identical to SEQ ID NO: 203835
  chr15:40074971-40075315
  hyper

SEQ ID NO: 399614 - DNA, 357 bp, Homo sapiens; identical to SEQ ID NO: 290701
  chr15:40212244-40212601
  hyper

SEQ ID NO: 399615 - DNA, 470 bp, Homo sapiens; identical to SEQ ID NO: 290702
  chr15:40212954-40213424
  hyper

SEQ ID NO: 399616 - DNA, 148 bp, Homo sapiens; identical to SEQ ID NO: 237856
  chr15:40225953-40226101
  hyper

SEQ ID NO: 399617 - DNA, 171 bp, Homo sapiens; identical to SEQ ID NO: 237857
  chr15:40401049-40401220
  hyper

SEQ ID NO: 399618 - DNA, 36 bp, Homo sapiens; identical to SEQ ID NO: 203836
  chr15:40559555-40559591
  hyper

SEQ ID NO: 399619 - DNA, 50 bp, Homo sapiens; identical to SEQ ID NO: 125537
  chr15:40651001-40651051
  hyper

SEQ ID NO: 399620 - DNA, 54 bp, Homo sapiens; identical to SEQ ID NO: 237860
  chr15:40698353-40698407
  hyper

SEQ ID NO: 399621 - DNA, 156 bp, Homo sapiens; identical to SEQ ID NO: 224840
  chr15:41136285-41136441
  hyper

SEQ ID NO: 399622 - DNA, 34 bp, Homo sapiens; identical to SEQ ID NO: 237872
  chr15:41851950-41851984
  hyper

SEQ ID NO: 399623 - DNA, 200 bp, Homo sapiens; identical to SEQ ID NO: 224842
  chr15:42112223-42112423
  hyper

SEQ ID NO: 399624 - DNA, 160 bp, Homo sapiens; identical to SEQ ID NO: 203847
  chr15:42119937-42120097
  hyper

SEQ ID NO: 399625 - DNA, 71 bp, Homo sapiens; identical to SEQ ID NO: 237877
  chr15:42349322-42349393
  hyper

SEQ ID NO: 399626 - DNA, 200 bp, Homo sapiens; identical to SEQ ID NO: 237878
  chr15:42565687-42565887
  hyper

SEQ ID NO: 399627 - DNA, 97 bp, Homo sapiens; identical to SEQ ID NO: 203849
  chr15:42841085-42841182
  hyper

SEQ ID NO: 399628 - DNA, 88 bp, Homo sapiens; identical to SEQ ID NO: 203850
  chr15:43394990-43395078
  hyper

SEQ ID NO: 399629 - DNA, 101 bp, Homo sapiens; identical to SEQ ID NO: 203851
  chr15:43397760-43397861
  hyper

SEQ ID NO: 399630 - DNA, 95 bp, Homo sapiens; identical to SEQ ID NO: 237886
  chr15:43425869-43425964
  hyper

SEQ ID NO: 399631 - DNA, 68 bp, Homo sapiens; identical to SEQ ID NO: 237889
  chr15:43785355-43785423
  hyper

SEQ ID NO: 399632 - DNA, 49 bp, Homo sapiens; identical to SEQ ID NO: 203854
  chr15:44068769-44068818
  hyper

SEQ ID NO: 399633 - DNA, 57 bp, Homo sapiens; identical to SEQ ID NO: 237896
  chr15:44580503-44580560
  hyper

SEQ ID NO: 399634 - DNA, 79 bp, Homo sapiens; identical to SEQ ID NO: 237898
  chr15:45003638-45003717
  hyper

SEQ ID NO: 399635 - DNA, 488 bp, Homo sapiens; identical to SEQ ID NO: 290765
  chr15:45408666-45409154
  hyper

SEQ ID NO: 399636 - DNA, 161 bp, Homo sapiens; identical to SEQ ID NO: 290766
  chr15:45409211-45409372
  hyper

SEQ ID NO: 399637 - DNA, 92 bp, Homo sapiens; identical to SEQ ID NO: 203856
  chr15:45459390-45459482
  hyper

SEQ ID NO: 399638 - DNA, 165 bp, Homo sapiens; identical to SEQ ID NO: 237912
  chr15:45815255-45815420
  hyper

SEQ ID NO: 399639 - DNA, 31 bp, Homo sapiens; identical to SEQ ID NO: 237913
  chr15:45879207-45879238
  hyper

SEQ ID NO: 399640 - DNA, 247 bp, Homo sapiens; identical to SEQ ID NO: 290780
  chr15:47476468-47476715
  hyper

SEQ ID NO: 399641 - DNA, 190 bp, Homo sapiens; identical to SEQ ID NO: 237918
  chr15:48483066-48483256
  hyper

SEQ ID NO: 399642 - DNA, 50 bp, Homo sapiens; identical to SEQ ID NO: 290790
  chr15:48483906-48483956
  hyper

SEQ ID NO: 399643 - DNA, 156 bp, Homo sapiens; identical to SEQ ID NO: 237920
  chr15:48623408-48623564
  hyper

SEQ ID NO: 399644 - DNA, 135 bp, Homo sapiens; identical to SEQ ID NO: 237924
  chr15:49255861-49255996
  hyper

SEQ ID NO: 399645 - DNA, 227 bp, Homo sapiens; identical to SEQ ID NO: 237925
  chr15:49447914-49448141
  hyper

SEQ ID NO: 399646 - DNA, 34 bp, Homo sapiens; identical to SEQ ID NO: 203873
  chr15:49448552-49448586
  hyper

SEQ ID NO: 399647 - DNA, 99 bp, Homo sapiens; identical to SEQ ID NO: 237927
  chr15:50716741-50716840
  hyper

SEQ ID NO: 399648 - DNA, 79 bp, Homo sapiens; identical to SEQ ID NO: 203874
  chr15:51058036-51058115
  hyper

SEQ ID NO: 399649 - DNA, 62 bp, Homo sapiens; identical to SEQ ID NO: 237930
  chr15:51200800-51200862
  hyper

SEQ ID NO: 399650 - DNA, 115 bp, Homo sapiens; identical to SEQ ID NO: 290807
  chr15:51633851-51633966
  hyper

SEQ ID NO: 399651 - DNA, 153 bp, Homo sapiens; identical to SEQ ID NO: 290808
  chr15:51634175-51634328
  hyper

SEQ ID NO: 399652 - DNA, 237 bp, Homo sapiens; identical to SEQ ID NO: 237934
  chr15:51915459-51915696
  hyper

SEQ ID NO: 399653 - DNA, 126 bp, Homo sapiens; identical to SEQ ID NO: 203875
  chr15:51973520-51973646
  hyper

SEQ ID NO: 399654 - DNA, 47 bp, Homo sapiens; identical to SEQ ID NO: 290811
  chr15:51974094-51974141
  hyper

SEQ ID NO: 399655 - DNA, 264 bp, Homo sapiens; identical to SEQ ID NO: 203876
  chr15:52028982-52029246
  hyper

SEQ ID NO: 399656 - DNA, 193 bp, Homo sapiens; identical to SEQ ID NO: 237938
  chr15:52121766-52121959
  hyper

SEQ ID NO: 399657 - DNA, 510 bp, Homo sapiens; identical to SEQ ID NO: 389272
  chr15:52820415-52820925
  hyper

SEQ ID NO: 399658 - DNA, 126 bp, Homo sapiens; identical to SEQ ID NO: 203883
  chr15:53091078-53091204
  hyper

SEQ ID NO: 399659 - DNA, 486 bp, Homo sapiens; identical to SEQ ID NO: 237955
  chr15:55489070-55489556
  hyper

SEQ ID NO: 399660 - DNA, 79 bp, Homo sapiens; identical to SEQ ID NO: 290832
  chr15:56035510-56035589
  hyper

SEQ ID NO: 399661 - DNA, 82 bp, Homo sapiens; identical to SEQ ID NO: 125767
  chr15:56035677-56035759
  hyper

SEQ ID NO: 399662 - DNA, 404 bp, Homo sapiens; identical to SEQ ID NO: 237959
  chr15:56657423-56657827
  hyper

SEQ ID NO: 399663 - DNA, 340 bp, Homo sapiens; identical to SEQ ID NO: 224859
  chr15:57210212-57210552
  hyper

SEQ ID NO: 399664 - DNA, 151 bp, Homo sapiens; identical to SEQ ID NO: 203890
  chr15:57883948-57884099
  hyper

SEQ ID NO: 399665 - DNA, 32 bp, Homo sapiens; identical to SEQ ID NO: 237964
  chr15:57998720-57998752
  hyper

SEQ ID NO: 399666 - DNA, 255 bp, Homo sapiens; identical to SEQ ID NO: 237968
  chr15:59225884-59226139
  hyper

SEQ ID NO: 399667 - DNA, 453 bp, Homo sapiens; identical to SEQ ID NO: 203893
  chr15:59397170-59397623
  hyper

SEQ ID NO: 399668 - DNA, 170 bp, Homo sapiens; identical to SEQ ID NO: 237971
  chr15:59664777-59664947
  hyper

SEQ ID NO: 399669 - DNA, 219 bp, Homo sapiens; identical to SEQ ID NO: 237980
  chr15:60771301-60771520
  hyper

SEQ ID NO: 399670 - DNA, 97 bp, Homo sapiens; identical to SEQ ID NO: 203912
  chr15:62456139-62456236
  hyper

SEQ ID NO: 399671 - DNA, 204 bp, Homo sapiens; identical to SEQ ID NO: 389283
  chr15:62456395-62456599
  hyper

SEQ ID NO: 399672 - DNA, 208 bp, Homo sapiens; identical to SEQ ID NO: 237988
  chr15:62683364-62683572
  hyper

SEQ ID NO: 399673 - DNA, 105 bp, Homo sapiens; identical to SEQ ID NO: 224869
  chr15:63130456-63130561
  hyper

SEQ ID NO: 399674 - DNA, 129 bp, Homo sapiens; identical to SEQ ID NO: 290879
  chr15:63334348-63334477
  hyper

SEQ ID NO: 399675 - DNA, 201 bp, Homo sapiens; identical to SEQ ID NO: 290880
  chr15:63334720-63334921
  hyper

SEQ ID NO: 399676 - DNA, 37 bp, Homo sapiens; identical to SEQ ID NO: 237992
  chr15:63449921-63449958
  hyper

SEQ ID NO: 399677 - DNA, 98 bp, Homo sapiens; identical to SEQ ID NO: 237997
  chr15:64126646-64126744
  hyper

SEQ ID NO: 399678 - DNA, 336 bp, Homo sapiens; identical to SEQ ID NO: 238000
  chr15:64455663-64455999
  hyper

SEQ ID NO: 399679 - DNA, 414 bp, Homo sapiens; identical to SEQ ID NO: 238001
  chr15:64648210-64648624
  hyper

SEQ ID NO: 399680 - DNA, 56 bp, Homo sapiens; identical to SEQ ID NO: 203922
  chr15:65067772-65067828
  hyper

SEQ ID NO: 399681 - DNA, 79 bp, Homo sapiens; identical to SEQ ID NO: 203923
  chr15:65281790-65281869
  hyper

SEQ ID NO: 399682 - DNA, 110 bp, Homo sapiens; identical to SEQ ID NO: 203924
  chr15:65321808-65321918
  hyper

SEQ ID NO: 399683 - DNA, 38 bp, Homo sapiens; identical to SEQ ID NO: 238010
  chr15:65426171-65426209
  hyper

SEQ ID NO: 399684 - DNA, 39 bp, Homo sapiens; identical to SEQ ID NO: 290902
  chr15:65477569-65477608
  hyper

SEQ ID NO: 399685 - DNA, 188 bp, Homo sapiens; identical to SEQ ID NO: 238012
  chr15:65578946-65579134
  hyper

SEQ ID NO: 399686 - DNA, 89 bp, Homo sapiens; identical to SEQ ID NO: 290904
  chr15:65647775-65647864
  hyper

SEQ ID NO: 399687 - DNA, 241 bp, Homo sapiens; identical to SEQ ID NO: 290905
  chr15:65648151-65648392
  hyper

SEQ ID NO: 399688 - DNA, 44 bp, Homo sapiens; identical to SEQ ID NO: 238014
  chr15:65669009-65669053
  hyper

SEQ ID NO: 399689 - DNA, 390 bp, Homo sapiens; identical to SEQ ID NO: 203925
  chr15:65670244-65670634
  hyper

SEQ ID NO: 399690 - DNA, 210 bp, Homo sapiens; identical to SEQ ID NO: 389292
  chr15:65714831-65715041
  hyper

SEQ ID NO: 399691 - DNA, 141 bp, Homo sapiens; identical to SEQ ID NO: 238024
  chr15:66585520-66585661
  hyper

SEQ ID NO: 399692 - DNA, 65 bp, Homo sapiens; identical to SEQ ID NO: 203928
  chr15:66586477-66586542
  hyper

SEQ ID NO: 399693 - DNA, 108 bp, Homo sapiens; identical to SEQ ID NO: 238027
  chr15:66797136-66797244
  hyper

SEQ ID NO: 399694 - DNA, 197 bp, Homo sapiens; identical to SEQ ID NO: 238031
  chr15:66995980-66996177
  hyper

SEQ ID NO: 399695 - DNA, 102 bp, Homo sapiens; identical to SEQ ID NO: 238032
  chr15:67058139-67058241
  hyper

SEQ ID NO: 399696 - DNA, 165 bp, Homo sapiens; identical to SEQ ID NO: 203934
  chr15:68112674-68112839
  hyper

SEQ ID NO: 399697 - DNA, 71 bp, Homo sapiens; identical to SEQ ID NO: 224883
  chr15:68177208-68177279
  hyper

SEQ ID NO: 399698 - DNA, 40 bp, Homo sapiens; identical to SEQ ID NO: 203941
  chr15:68521278-68521318
  hyper

SEQ ID NO: 399699 - DNA, 46 bp, Homo sapiens; identical to SEQ ID NO: 238052
  chr15:68598773-68598819
  hyper

SEQ ID NO: 399700 - DNA, 173 bp, Homo sapiens; identical to SEQ ID NO: 238057
  chr15:69111353-69111526
  hyper

SEQ ID NO: 399701 - DNA, 127 bp, Homo sapiens; identical to SEQ ID NO: 238058
  chr15:69113815-69113942
  hyper

SEQ ID NO: 399702 - DNA, 68 bp, Homo sapiens; identical to SEQ ID NO: 203947
  chr15:69591245-69591313
  hyper

SEQ ID NO: 399703 - DNA, 82 bp, Homo sapiens; identical to SEQ ID NO: 238066
  chr15:69706605-69706687
  hyper

SEQ ID NO: 399704 - DNA, 180 bp, Homo sapiens; identical to SEQ ID NO: 238068
  chr15:70388517-70388697
  hyper

SEQ ID NO: 399705 - DNA, 76 bp, Homo sapiens; identical to SEQ ID NO: 203948
  chr15:70391279-70391355
  hyper

SEQ ID NO: 399706 - DNA, 231 bp, Homo sapiens; identical to SEQ ID NO: 238073
  chr15:72072597-72072828
  hyper

SEQ ID NO: 399707 - DNA, 309 bp, Homo sapiens; identical to SEQ ID NO: 203961
  chr15:72522193-72522502
  hyper

SEQ ID NO: 399708 - DNA, 216 bp, Homo sapiens
  chr15:72523039-72523255
  hyper
gaccagacttaaggaggaagaggggaaaacgagcacggaacaggcggcgcggagaaaggggaagcaagggtggaatcaatcacgagggaccgagagaaggcaggcgaggatggaggcgcattgaggattggggcaggaggaagaggatgggaccagaatgagggggtagggctggggcgggaaaggagccggcggacccgcctgatctggaaggaa

SEQ ID NO: 399709 - DNA, 101 bp, Homo sapiens; identical to SEQ ID NO: 203965
  chr15:72978671-72978772
  hyper

SEQ ID NO: 399710 - DNA, 164 bp, Homo sapiens; identical to SEQ ID NO: 224892
  chr15:73344008-73344172
  hyper

SEQ ID NO: 399711 - DNA, 283 bp, Homo sapiens; identical to SEQ ID NO: 290986
  chr15:73611203-73611486
  hyper

SEQ ID NO: 399712 - DNA, 412 bp, Homo sapiens; identical to SEQ ID NO: 290989
  chr15:74045243-74045655
  hyper

SEQ ID NO: 399713 - DNA, 176 bp, Homo sapiens; identical to SEQ ID NO: 291004
  chr15:74912313-74912489
  hyper

SEQ ID NO: 399714 - DNA, 45 bp, Homo sapiens; identical to SEQ ID NO: 238102
  chr15:75018660-75018705
  hyper

SEQ ID NO: 399715 - DNA, 226 bp, Homo sapiens; identical to SEQ ID NO: 238107
  chr15:75165610-75165836
  hyper

SEQ ID NO: 399716 - DNA, 127 bp, Homo sapiens; identical to SEQ ID NO: 238109
  chr15:75249802-75249929
  hyper

SEQ ID NO: 399717 - DNA, 158 bp, Homo sapiens; identical to SEQ ID NO: 238111
  chr15:75316097-75316255
  hyper

SEQ ID NO: 399718 - DNA, 91 bp, Homo sapiens; identical to SEQ ID NO: 203980
  chr15:75495098-75495189
  hyper

SEQ ID NO: 399719 - DNA, 373 bp, Homo sapiens; identical to SEQ ID NO: 238114
  chr15:75639263-75639636
  hyper

SEQ ID NO: 399720 - DNA, 290 bp, Homo sapiens
  chr15:75640520-75640810
  hyper
cgcccgcctcgtcctggcccctgccctgacccgggggcggccgcggggatgtccggtccgtggggcaggcccggttctcgctgcggccaagcggccgattcggccgctcccgccgctcccccgcgccaggccgagcttcgctctttccctcggtggtgagcggccagatccaggcgggtcctaagtgtggggggaggggggcgcagggaggggcggccacgcgatcctaagaccctttcagatggtgggagagcctggagaaagagacagcgtgtgcggagggggtgctc

SEQ ID NO: 399721 - DNA, 104 bp, Homo sapiens; identical to SEQ ID NO: 224899
  chr15:75640871-75640975
  hyper

SEQ ID NO: 399722 - DNA, 210 bp, Homo sapiens; identical to SEQ ID NO: 238116
  chr15:75661045-75661255
  hyper

SEQ ID NO: 399723 - DNA, 182 bp, Homo sapiens; identical to SEQ ID NO: 238119
  chr15:75932855-75933037
  hyper

SEQ ID NO: 399724 - DNA, 356 bp, Homo sapiens; identical to SEQ ID NO: 291026
  chr15:75939285-75939641
  hyper

SEQ ID NO: 399725 - DNA, 73 bp, Homo sapiens; identical to SEQ ID NO: 52299
  chr15:75939671-75939744
  hyper

SEQ ID NO: 399726 - DNA, 58 bp, Homo sapiens; identical to SEQ ID NO: 238121
  chr15:76136832-76136890
  hyper

SEQ ID NO: 399727 - DNA, 115 bp, Homo sapiens; identical to SEQ ID NO: 238133
  chr15:77924998-77925113
  hyper

SEQ ID NO: 399728 - DNA, 53 bp, Homo sapiens; identical to SEQ ID NO: 291046
  chr15:77925412-77925465
  hyper

SEQ ID NO: 399729 - DNA, 67 bp, Homo sapiens; identical to SEQ ID NO: 291047
  chr15:77925725-77925792
  hyper

SEQ ID NO: 399730 - DNA, 143 bp, Homo sapiens; identical to SEQ ID NO: 291049
  chr15:78110977-78111120
  hyper

SEQ ID NO: 399731 - DNA, 80 bp, Homo sapiens; identical to SEQ ID NO: 291050
  chr15:78111210-78111290
  hyper

SEQ ID NO: 399732 - DNA, 186 bp, Homo sapiens; identical to SEQ ID NO: 291051
  chr15:78112377-78112563
  hyper

SEQ ID NO: 399733 - DNA, 110 bp, Homo sapiens; identical to SEQ ID NO: 203991
  chr15:79603182-79603292
  hyper

SEQ ID NO: 399734 - DNA, 75 bp, Homo sapiens; identical to SEQ ID NO: 203992
  chr15:79723976-79724051
  hyper

SEQ ID NO: 399735 - DNA, 55 bp, Homo sapiens; identical to SEQ ID NO: 203995
  chr15:80285825-80285880
  hyper

SEQ ID NO: 399736 - DNA, 35 bp, Homo sapiens; identical to SEQ ID NO: 203996
  chr15:80351965-80352000
  hyper

SEQ ID NO: 399737 - DNA, 157 bp, Homo sapiens; identical to SEQ ID NO: 238153
  chr15:80445215-80445372
  hyper

SEQ ID NO: 399738 - DNA, 206 bp, Homo sapiens; identical to SEQ ID NO: 291066
  chr15:80543997-80544203
  hyper

SEQ ID NO: 399739 - DNA, 105 bp, Homo sapiens; identical to SEQ ID NO: 238157
  chr15:81282496-81282601
  hyper

SEQ ID NO: 399740 - DNA, 162 bp, Homo sapiens; identical to SEQ ID NO: 238160
  chr15:81616530-81616692
  hyper

SEQ ID NO: 399741 - DNA, 51 bp, Homo sapiens; identical to SEQ ID NO: 204004
  chr15:82338056-82338107
  hyper

SEQ ID NO: 399742 - DNA, 300 bp, Homo sapiens; identical to SEQ ID NO: 224913
  chr15:83654649-83654949
  hyper

SEQ ID NO: 399743 - DNA, 36 bp, Homo sapiens
  chr15:84034342-84034378
  hyper
ttagggaatgataaatcagcaggcgggacagttccc

SEQ ID NO: 399744 - DNA, 86 bp, Homo sapiens; identical to SEQ ID NO: 291091
  chr15:84034412-84034498
  hyper

SEQ ID NO: 399745 - DNA, 96 bp, Homo sapiens; identical to SEQ ID NO: 204013
  chr15:84115617-84115713
  hyper

SEQ ID NO: 399746 - DNA, 139 bp, Homo sapiens; identical to SEQ ID NO: 204014
  chr15:84116949-84117088
  hyper

SEQ ID NO: 399747 - DNA, 60 bp, Homo sapiens; identical to SEQ ID NO: 291094
  chr15:84322262-84322322
  hyper

SEQ ID NO: 399748 - DNA, 577 bp, Homo sapiens; identical to SEQ ID NO: 291096
  chr15:85143661-85144238
  hyper

SEQ ID NO: 399749 - DNA, 148 bp, Homo sapiens; identical to SEQ ID NO: 204015
  chr15:85200368-85200516
  hyper

SEQ ID NO: 399750 - DNA, 123 bp, Homo sapiens; identical to SEQ ID NO: 291099
  chr15:85258869-85258992
  hyper

SEQ ID NO: 399751 - DNA, 99 bp, Homo sapiens; identical to SEQ ID NO: 238183
  chr15:85525474-85525573
  hyper

SEQ ID NO: 399752 - DNA, 56 bp, Homo sapiens; identical to SEQ ID NO: 126306
  chr15:85923617-85923673
  hyper

SEQ ID NO: 399753 - DNA, 98 bp, Homo sapiens; identical to SEQ ID NO: 238185
  chr15:86126184-86126282
  hyper

SEQ ID NO: 399754 - DNA, 68 bp, Homo sapiens; identical to SEQ ID NO: 238189
  chr15:89010447-89010515
  hyper

SEQ ID NO: 399755 - DNA, 265 bp, Homo sapiens; identical to SEQ ID NO: 238190
  chr15:89010954-89011219
  hyper

SEQ ID NO: 399756 - DNA, 397 bp, Homo sapiens; identical to SEQ ID NO: 238197
  chr15:89787063-89787460
  hyper

SEQ ID NO: 399757 - DNA, 257 bp, Homo sapiens; identical to SEQ ID NO: 238198
  chr15:89877892-89878149
  hyper

SEQ ID NO: 399758 - DNA, 251 bp, Homo sapiens; identical to SEQ ID NO: 238199
  chr15:89878847-89879098
  hyper

SEQ ID NO: 399759 - DNA, 124 bp, Homo sapiens; identical to SEQ ID NO: 204023
  chr15:89902214-89902338
  hyper

SEQ ID NO: 399760 - DNA, 345 bp, Homo sapiens; identical to SEQ ID NO: 291120
  chr15:89905400-89905745
  hyper

SEQ ID NO: 399761 - DNA, 234 bp, Homo sapiens; identical to SEQ ID NO: 291121
  chr15:89905890-89906124
  hyper

SEQ ID NO: 399762 - DNA, 91 bp, Homo sapiens; identical to SEQ ID NO: 291131
  chr15:90198066-90198157
  hyper

SEQ ID NO: 399763 - DNA, 49 bp, Homo sapiens; identical to SEQ ID NO: 291132
  chr15:90198414-90198463
  hyper

SEQ ID NO: 399764 - DNA, 37 bp, Homo sapiens; identical to SEQ ID NO: 238220
  chr15:90234210-90234247
  hyper

SEQ ID NO: 399765 - DNA, 322 bp, Homo sapiens; identical to SEQ ID NO: 291134
  chr15:90293566-90293888
  hyper

SEQ ID NO: 399766 - DNA, 81 bp, Homo sapiens; identical to SEQ ID NO: 204034
  chr15:90634777-90634858
  hyper

SEQ ID NO: 399767 - DNA, 60 bp, Homo sapiens; identical to SEQ ID NO: 291143
  chr15:90891947-90892007
  hyper

SEQ ID NO: 399768 - DNA, 33 bp, Homo sapiens; identical to SEQ ID NO: 238227
  chr15:91072783-91072816
  hyper

SEQ ID NO: 399769 - DNA, 72 bp, Homo sapiens; identical to SEQ ID NO: 204036
  chr15:91414358-91414430
  hyper

SEQ ID NO: 399770 - DNA, 164 bp, Homo sapiens; identical to SEQ ID NO: 204037
  chr15:91475572-91475736
  hyper

SEQ ID NO: 399771 - DNA, 143 bp, Homo sapiens; identical to SEQ ID NO: 238236
  chr15:93353296-93353439
  hyper

SEQ ID NO: 399772 - DNA, 229 bp, Homo sapiens; identical to SEQ ID NO: 238237
  chr15:93363550-93363779
  hyper

SEQ ID NO: 399773 - DNA, 974 bp, Homo sapiens; identical to SEQ ID NO: 238238
  chr15:93443566-93444540
  hyper

SEQ ID NO: 399774 - DNA, 210 bp, Homo sapiens; identical to SEQ ID NO: 291159
  chr15:93615691-93615901
  hyper

SEQ ID NO: 399775 - DNA, 300 bp, Homo sapiens; identical to SEQ ID NO: 384586
  chr15:94774274-94774574
  hyper

SEQ ID NO: 399776 - DNA, 102 bp, Homo sapiens; identical to SEQ ID NO: 291162
  chr15:95388253-95388355
  hyper

SEQ ID NO: 399777 - DNA, 377 bp, Homo sapiens; identical to SEQ ID NO: 389321
  chr15:96873421-96873798
  hyper

SEQ ID NO: 399778 - DNA, 89 bp, Homo sapiens; identical to SEQ ID NO: 291169
  chr15:96876448-96876537
  hyper

SEQ ID NO: 399779 - DNA, 199 bp, Homo sapiens; identical to SEQ ID NO: 204047
  chr15:96876621-96876820
  hyper

SEQ ID NO: 399780 - DNA, 133 bp, Homo sapiens; identical to SEQ ID NO: 204051
  chr15:96903477-96903610
  hyper

SEQ ID NO: 399781 - DNA, 517 bp, Homo sapiens; identical to SEQ ID NO: 291177
  chr15:96952092-96952609
  hyper

SEQ ID NO: 399782 - DNA, 200 bp, Homo sapiens; identical to SEQ ID NO: 291184
  chr15:98503355-98503555
  hyper

SEQ ID NO: 399783 - DNA, 268 bp, Homo sapiens; identical to SEQ ID NO: 291185
  chr15:98503609-98503877
  hyper

SEQ ID NO: 399784 - DNA, 168 bp, Homo sapiens; identical to SEQ ID NO: 291186
  chr15:98503946-98504114
  hyper

SEQ ID NO: 399785 - DNA, 560 bp, Homo sapiens; identical to SEQ ID NO: 291187
  chr15:98504228-98504788
  hyper

SEQ ID NO: 399786 - DNA, 510 bp, Homo sapiens; identical to SEQ ID NO: 291193
  chr15:99191216-99191726
  hyper

SEQ ID NO: 399787 - DNA, 210 bp, Homo sapiens; identical to SEQ ID NO: 126471
  chr15:99191748-99191958
  hyper

SEQ ID NO: 399788 - DNA, 570 bp, Homo sapiens; identical to SEQ ID NO: 224952
  chr15:99192162-99192732
  hyper

SEQ ID NO: 399789 - DNA, 51 bp, Homo sapiens
  chr15:99193687-99193738
  hyper
gccactgggtccccagttcagagggctctgggatggtctcccagtttctcc

SEQ ID NO: 399790 - DNA, 52 bp, Homo sapiens; identical to SEQ ID NO: 238266
  chr15:99791471-99791523
  hyper

SEQ ID NO: 399791 - DNA, 42 bp, Homo sapiens; identical to SEQ ID NO: 204068
  chr15:100273862-100273904
  hyper

SEQ ID NO: 399792 - DNA, 48 bp, Homo sapiens; identical to SEQ ID NO: 224955
  chr15:100273946-100273994
  hyper

SEQ ID NO: 399793 - DNA, 246 bp, Homo sapiens; identical to SEQ ID NO: 238271
  chr15:101142345-101142591
  hyper

SEQ ID NO: 399794 - DNA, 270 bp, Homo sapiens; identical to SEQ ID NO: 238273
  chr15:101419539-101419809
  hyper

SEQ ID NO: 399795 - DNA, 309 bp, Homo sapiens; identical to SEQ ID NO: 291208
  chr15:101420039-101420348
  hyper

SEQ ID NO: 399796 - DNA, 67 bp, Homo sapiens; identical to SEQ ID NO: 291209
  chr15:101421003-101421070
  hyper

SEQ ID NO: 399797 - DNA, 154 bp, Homo sapiens; identical to SEQ ID NO: 224959
  chr15:101791012-101791166
  hyper

SEQ ID NO: 399798 - DNA, 92 bp, Homo sapiens; identical to SEQ ID NO: 238279
  chr15:101835856-101835948
  hyper

SEQ ID NO: 399799 - DNA, 126 bp, Homo sapiens; identical to SEQ ID NO: 238287
  chr16:231282-231408
  hyper

SEQ ID NO: 399800 - DNA, 83 bp, Homo sapiens; identical to SEQ ID NO: 204074
  chr16:475426-475509
  hyper

SEQ ID NO: 399801 - DNA, 50 bp, Homo sapiens; identical to SEQ ID NO: 204077
  chr16:717960-718010
  hyper

SEQ ID NO: 399802 - DNA, 104 bp, Homo sapiens; identical to SEQ ID NO: 204078
  chr16:755704-755808
  hyper

SEQ ID NO: 399803 - DNA, 105 bp, Homo sapiens; identical to SEQ ID NO: 224977
  chr16:778111-778216
  hyper

SEQ ID NO: 399804 - DNA, 144 bp, Homo sapiens; identical to SEQ ID NO: 291244
  chr16:1384098-1384242
  hyper

SEQ ID NO: 399805 - DNA, 42 bp, Homo sapiens; identical to SEQ ID NO: 238305
  chr16:1402306-1402348
  hyper

SEQ ID NO: 399806 - DNA, 243 bp, Homo sapiens; identical to SEQ ID NO: 204080
  chr16:1429037-1429280
  hyper

SEQ ID NO: 399807 - DNA, 434 bp, Homo sapiens; identical to SEQ ID NO: 224987
  chr16:1660449-1660883
  hyper

SEQ ID NO: 399808 - DNA, 65 bp, Homo sapiens; identical to SEQ ID NO: 204083
  chr16:1875917-1875982
  hyper

SEQ ID NO: 399809 - DNA, 153 bp, Homo sapiens; identical to SEQ ID NO: 291253
  chr16:1877136-1877289
  hyper

SEQ ID NO: 399810 - DNA, 74 bp, Homo sapiens; identical to SEQ ID NO: 238314
  chr16:2033652-2033726
  hyper

SEQ ID NO: 399811 - DNA, 171 bp, Homo sapiens; identical to SEQ ID NO: 238316
  chr16:2054057-2054228
  hyper

SEQ ID NO: 399812 - DNA, 170 bp, Homo sapiens; identical to SEQ ID NO: 238318
  chr16:2097196-2097366
  hyper

SEQ ID NO: 399813 - DNA, 268 bp, Homo sapiens; identical to SEQ ID NO: 291276
  chr16:2521459-2521727
  hyper

SEQ ID NO: 399814 - DNA, 119 bp, Homo sapiens; identical to SEQ ID NO: 291277
  chr16:2521857-2521976
  hyper

SEQ ID NO: 399815 - DNA, 71 bp, Homo sapiens; identical to SEQ ID NO: 291280
  chr16:3068100-3068171
  hyper

SEQ ID NO: 399816 - DNA, 239 bp, Homo sapiens; identical to SEQ ID NO: 238336
  chr16:3086764-3087003
  hyper

SEQ ID NO: 399817 - DNA, 37 bp, Homo sapiens; identical to SEQ ID NO: 291287
  chr16:3097009-3097046
  hyper

SEQ ID NO: 399818 - DNA, 146 bp, Homo sapiens; identical to SEQ ID NO: 204093
  chr16:3184680-3184826
  hyper

SEQ ID NO: 399819 - DNA, 235 bp, Homo sapiens; identical to SEQ ID NO: 126708
  chr16:3184880-3185115
  hyper

SEQ ID NO: 399820 - DNA, 32 bp, Homo sapiens; identical to SEQ ID NO: 238340
  chr16:3200663-3200695
  hyper

SEQ ID NO: 399821 - DNA, 63 bp, Homo sapiens; identical to SEQ ID NO: 238351
  chr16:3766893-3766956
  hyper

SEQ ID NO: 399822 - DNA, 171 bp, Homo sapiens; identical to SEQ ID NO: 238352
  chr16:3767713-3767884
  hyper

SEQ ID NO: 399823 - DNA, 1007 bp, Homo sapiens
  chr16:3781555-3782562
  hyper
gcctgcagaataggcaggtggctgagcctgatggccctgatgccttgggatggaacaaaattggtgacacgttgcatgatgtcacccaactggtccacttggtttcctgggggccacttccctcccaccacagacctgcacacgggcccacgcccgccagctgcgagtctttccctcctcccggccagaggcacggctgcagcaccgcagcccacgcctacctccttgtgcttctccatggtggcatacagcttctgggacaggtcattggacacgttgggcatgctgggcttcttcttgttggcgcggctgatgctgcttttgttcttgttggttttcttgttgttcttcttcttggcattcttgctgtcgccctgactgccctgcaacaacacgcaaggctgtgagaccaggcaagtgcccctccacacttggcacggacgcccagctcccaggccgtgggcatcaggaagctcaggccaaagtaggtcaccaccaggcagaccccatacgtgaacggctacaggtggctgtaggtgctgcagccttcgggacagagcagggcctgtcctcggccaggctggtgtcattatcagctttatgccacgctgcctctaaaggggaaaagagacccagagtgcgagttcagaaattaacaaatgagggcagtgggggctgtttccactgtgccacaaccagatgcggaagattccacgtcacaactgtggtcagcagctgtctgccttgaggaaggctctacacacccgagaaagcatgagagcttccaggagacaggaaagctgctgatgggaaaagcagctgccccatcaagagcagggactctgaggcccctgcggggtccactcaaggcccacggagagcaggctggctccctgctggggccatcagtgctgcgcctgactggctgaaggtgggcttgctctcagcccacaggctcctcctctggaaagaacgcaggattaccactcacttacactttaacagag

SEQ ID NO: 399824 - DNA, 161 bp, Homo sapiens; identical to SEQ ID NO: 238353
  chr16:3931230-3931391
  hyper

SEQ ID NO: 399825 - DNA, 111 bp, Homo sapiens; identical to SEQ ID NO: 225001
  chr16:3989147-3989258
  hyper

SEQ ID NO: 399826 - DNA, 219 bp, Homo sapiens; identical to SEQ ID NO: 238360
  chr16:4475918-4476137
  hyper

SEQ ID NO: 399827 - DNA, 156 bp, Homo sapiens; identical to SEQ ID NO: 238361
  chr16:4526213-4526369
  hyper

SEQ ID NO: 399828 - DNA, 119 bp, Homo sapiens; identical to SEQ ID NO: 291316
  chr16:4588823-4588942
  hyper

SEQ ID NO: 399829 - DNA, 46 bp, Homo sapiens; identical to SEQ ID NO: 238363
  chr16:4665023-4665069
  hyper

SEQ ID NO: 399830 - DNA, 140 bp, Homo sapiens; identical to SEQ ID NO: 238365
  chr16:4743270-4743410
  hyper

SEQ ID NO: 399831 - DNA, 215 bp, Homo sapiens; identical to SEQ ID NO: 225008
  chr16:4852975-4853190
  hyper

SEQ ID NO: 399832 - DNA, 48 bp, Homo sapiens; identical to SEQ ID NO: 204111
  chr16:6070019-6070067
  hyper

SEQ ID NO: 399833 - DNA, 185 bp, Homo sapiens; identical to SEQ ID NO: 204112
  chr16:6070269-6070454
  hyper

SEQ ID NO: 399834 - DNA, 54 bp, Homo sapiens; identical to SEQ ID NO: 204113
  chr16:7354124-7354178
  hyper

SEQ ID NO: 399835 - DNA, 150 bp, Homo sapiens; identical to SEQ ID NO: 204114
  chr16:7354238-7354388
  hyper

SEQ ID NO: 399836 - DNA, 45 bp, Homo sapiens; identical to SEQ ID NO: 52800
  chr16:7354699-7354744
  hyper

SEQ ID NO: 399837 - DNA, 91 bp, Homo sapiens; identical to SEQ ID NO: 291342
  chr16:9229669-9229760
  hyper

SEQ ID NO: 399838 - DNA, 101 bp, Homo sapiens; identical to SEQ ID NO: 238389
  chr16:10837591-10837692
  hyper

SEQ ID NO: 399839 - DNA, 416 bp, Homo sapiens; identical to SEQ ID NO: 225015
  chr16:11348663-11349079
  hyper

SEQ ID NO: 399840 - DNA, 36 bp, Homo sapiens; identical to SEQ ID NO: 238391
  chr16:11351144-11351180
  hyper

SEQ ID NO: 399841 - DNA, 78 bp, Homo sapiens; identical to SEQ ID NO: 291351
  chr16:11439013-11439091
  hyper

SEQ ID NO: 399842 - DNA, 147 bp, Homo sapiens; identical to SEQ ID NO: 126824
  chr16:11439156-11439303
  hyper

SEQ ID NO: 399843 - DNA, 110 bp, Homo sapiens; identical to SEQ ID NO: 238395
  chr16:11944971-11945081
  hyper

SEQ ID NO: 399844 - DNA, 91 bp, Homo sapiens; identical to SEQ ID NO: 238404
  chr16:14727905-14727996
  hyper

SEQ ID NO: 399845 - DNA, 115 bp, Homo sapiens; identical to SEQ ID NO: 238407
  chr16:15737214-15737329
  hyper

SEQ ID NO: 399846 - DNA, 32 bp, Homo sapiens; identical to SEQ ID NO: 291366
  chr16:15951337-15951369
  hyper

SEQ ID NO: 399847 - DNA, 33 bp, Homo sapiens; identical to SEQ ID NO: 238409
  chr16:15982613-15982646
  hyper

SEQ ID NO: 399848 - DNA, 103 bp, Homo sapiens; identical to SEQ ID NO: 204127
  chr16:16155950-16156053
  hyper

SEQ ID NO: 399849 - DNA, 71 bp, Homo sapiens; identical to SEQ ID NO: 238412
  chr16:17510577-17510648
  hyper

SEQ ID NO: 399850 - DNA, 234 bp, Homo sapiens; identical to SEQ ID NO: 238413
  chr16:18812906-18813140
  hyper

SEQ ID NO: 399851 - DNA, 392 bp, Homo sapiens; identical to SEQ ID NO: 291372
  chr16:18995158-18995550
  hyper

SEQ ID NO: 399852 - DNA, 142 bp, Homo sapiens; identical to SEQ ID NO: 204131
  chr16:19421882-19422024
  hyper

SEQ ID NO: 399853 - DNA, 217 bp, Homo sapiens; identical to SEQ ID NO: 204132
  chr16:19422166-19422383
  hyper

SEQ ID NO: 399854 - DNA, 143 bp, Homo sapiens; identical to SEQ ID NO: 225024
  chr16:20817490-20817633
  hyper

SEQ ID NO: 399855 - DNA, 57 bp, Homo sapiens; identical to SEQ ID NO: 238431
  chr16:22308550-22308607
  hyper

SEQ ID NO: 399856 - DNA, 59 bp, Homo sapiens; identical to SEQ ID NO: 204136
  chr16:23159923-23159982
  hyper

SEQ ID NO: 399857 - DNA, 143 bp, Homo sapiens; identical to SEQ ID NO: 238439
  chr16:23568685-23568828
  hyper

SEQ ID NO: 399858 - DNA, 97 bp, Homo sapiens; identical to SEQ ID NO: 204138
  chr16:23766000-23766097
  hyper

SEQ ID NO: 399859 - DNA, 103 bp, Homo sapiens; identical to SEQ ID NO: 204139
  chr16:23766130-23766233
  hyper

SEQ ID NO: 399860 - DNA, 44 bp, Homo sapiens; identical to SEQ ID NO: 204140
  chr16:24354628-24354672
  hyper

SEQ ID NO: 399861 - DNA, 191 bp, Homo sapiens; identical to SEQ ID NO: 238446
  chr16:24550403-24550594
  hyper

SEQ ID NO: 399862 - DNA, 137 bp, Homo sapiens; identical to SEQ ID NO: 238447
  chr16:24551563-24551700
  hyper

SEQ ID NO: 399863 - DNA, 231 bp, Homo sapiens; identical to SEQ ID NO: 238449
  chr16:25025361-25025592
  hyper

SEQ ID NO: 399864 - DNA, 83 bp, Homo sapiens; identical to SEQ ID NO: 238451
  chr16:25123186-25123269
  hyper

SEQ ID NO: 399865 - DNA, 143 bp, Homo sapiens; identical to SEQ ID NO: 204142
  chr16:27121251-27121394
  hyper

SEQ ID NO: 399866 - DNA, 54 bp, Homo sapiens; identical to SEQ ID NO: 204143
  chr16:27215267-27215321
  hyper

SEQ ID NO: 399867 - DNA, 290 bp, Homo sapiens; identical to SEQ ID NO: 204145
  chr16:27413511-27413801
  hyper

SEQ ID NO: 399868 - DNA, 403 bp, Homo sapiens; identical to SEQ ID NO: 238461
  chr16:28502991-28503394
  hyper

SEQ ID NO: 399869 - DNA, 307 bp, Homo sapiens; identical to SEQ ID NO: 238462
  chr16:28874813-28875120
  hyper

SEQ ID NO: 399870 - DNA, 93 bp, Homo sapiens; identical to SEQ ID NO: 204149
  chr16:28936699-28936792
  hyper

SEQ ID NO: 399871 - DNA, 79 bp, Homo sapiens; identical to SEQ ID NO: 204150
  chr16:29606232-29606311
  hyper

SEQ ID NO: 399872 - DNA, 156 bp, Homo sapiens; identical to SEQ ID NO: 238466
  chr16:29691162-29691318
  hyper

SEQ ID NO: 399873 - DNA, 35 bp, Homo sapiens; identical to SEQ ID NO: 225043
  chr16:29691806-29691841
  hyper

SEQ ID NO: 399874 - DNA, 124 bp, Homo sapiens; identical to SEQ ID NO: 238467
  chr16:29721781-29721905
  hyper

SEQ ID NO: 399875 - DNA, 231 bp, Homo sapiens; identical to SEQ ID NO: 238471
  chr16:29827281-29827512
  hyper

SEQ ID NO: 399876 - DNA, 504 bp, Homo sapiens; identical to SEQ ID NO: 238472
  chr16:29874494-29874998
  hyper

SEQ ID NO: 399877 - DNA, 112 bp, Homo sapiens; identical to SEQ ID NO: 204155
  chr16:29888512-29888624
  hyper

SEQ ID NO: 399878 - DNA, 74 bp, Homo sapiens; identical to SEQ ID NO: 204156
  chr16:29888772-29888846
  hyper

SEQ ID NO: 399879 - DNA, 240 bp, Homo sapiens; identical to SEQ ID NO: 238476
  chr16:29973075-29973315
  hyper

SEQ ID NO: 399880 - DNA, 129 bp, Homo sapiens; identical to SEQ ID NO: 238477
  chr16:29984757-29984886
  hyper

SEQ ID NO: 399881 - DNA, 193 bp, Homo sapiens; identical to SEQ ID NO: 238478
  chr16:29985280-29985473
  hyper

SEQ ID NO: 399882 - DNA, 342 bp, Homo sapiens; identical to SEQ ID NO: 238479
  chr16:30006505-30006847
  hyper

SEQ ID NO: 399883 - DNA, 206 bp, Homo sapiens; identical to SEQ ID NO: 238480
  chr16:30007370-30007576
  hyper

SEQ ID NO: 399884 - DNA, 285 bp, Homo sapiens; identical to SEQ ID NO: 238482
  chr16:30075774-30076059
  hyper

SEQ ID NO: 399885 - DNA, 125 bp, Homo sapiens; identical to SEQ ID NO: 238484
  chr16:30103514-30103639
  hyper

SEQ ID NO: 399886 - DNA, 809 bp, Homo sapiens; identical to SEQ ID NO: 238487
  chr16:30411405-30412214
  hyper

SEQ ID NO: 399887 - DNA, 220 bp, Homo sapiens; identical to SEQ ID NO: 238489
  chr16:30545486-30545706
  hyper

SEQ ID NO: 399888 - DNA, 177 bp, Homo sapiens; identical to SEQ ID NO: 204161
  chr16:30583154-30583331
  hyper

SEQ ID NO: 399889 - DNA, 689 bp, Homo sapiens; identical to SEQ ID NO: 291456
  chr16:30596384-30597073
  hyper

SEQ ID NO: 399890 - DNA, 78 bp, Homo sapiens; identical to SEQ ID NO: 238495
  chr16:30669805-30669883
  hyper

SEQ ID NO: 399891 - DNA, 379 bp, Homo sapiens; identical to SEQ ID NO: 238496
  chr16:30670364-30670743
  hyper

SEQ ID NO: 399892 - DNA, 76 bp, Homo sapiens; identical to SEQ ID NO: 204164
  chr16:30786651-30786727
  hyper

SEQ ID NO: 399893 - DNA, 231 bp, Homo sapiens; identical to SEQ ID NO: 204165
  chr16:30787247-30787478
  hyper

SEQ ID NO: 399894 - DNA, 472 bp, Homo sapiens; identical to SEQ ID NO: 238500
  chr16:30798319-30798791
  hyper

SEQ ID NO: 399895 - DNA, 216 bp, Homo sapiens; identical to SEQ ID NO: 238506
  chr16:31044530-31044746
  hyper

SEQ ID NO: 399896 - DNA, 212 bp, Homo sapiens; identical to SEQ ID NO: 238507
  chr16:31085565-31085777
  hyper

SEQ ID NO: 399897 - DNA, 104 bp, Homo sapiens; identical to SEQ ID NO: 225053
  chr16:31117288-31117392
  hyper

SEQ ID NO: 399898 - DNA, 188 bp, Homo sapiens; identical to SEQ ID NO: 238510
  chr16:31191155-31191343
  hyper

SEQ ID NO: 399899 - DNA, 403 bp, Homo sapiens; identical to SEQ ID NO: 291484
  chr16:31453960-31454363
  hyper

SEQ ID NO: 399900 - DNA, 175 bp, Homo sapiens; identical to SEQ ID NO: 384603
  chr16:31498818-31498993
  hyper

SEQ ID NO: 399901 - DNA, 603 bp, Homo sapiens; identical to SEQ ID NO: 238520
  chr16:31885057-31885660
  hyper

SEQ ID NO: 399902 - DNA, 188 bp, Homo sapiens; identical to SEQ ID NO: 127168
  chr16:49889658-49889846
  hyper

SEQ ID NO: 399903 - DNA, 236 bp, Homo sapiens; identical to SEQ ID NO: 238538
  chr16:50775657-50775893
  hyper

SEQ ID NO: 399904 - DNA, 44 bp, Homo sapiens; identical to SEQ ID NO: 238539
  chr16:50840618-50840662
  hyper

SEQ ID NO: 399905 - DNA, 195 bp, Homo sapiens; identical to SEQ ID NO: 238545
  chr16:52579148-52579343
  hyper

SEQ ID NO: 399906 - DNA, 319 bp, Homo sapiens
  chr16:52580392-52580711
  hyper
ggggagagctggacagagacgaaggctcaaaggtagaagagacatgggaggaaagaggccaaagaaaagtgcagcaggcggtgagcccgagcgcggggcgcgcccaggatggggaggtggcccccgccccccggcccaccggcccagcccggtcaccttgctgtagccgtagtaccccaggcactgcgcgaagtccaggctggcagggtccccggccgccgcggggtagaacctcacatccatgccgaagctgggcccggggccgggggccgggactggggttcgccggggccgggacccgcctcctcgccgccgctag

SEQ ID NO: 399907 - DNA, 152 bp, Homo sapiens; identical to SEQ ID NO: 291522
  chr16:52581020-52581172
  hyper

SEQ ID NO: 399908 - DNA, 307 bp, Homo sapiens; identical to SEQ ID NO: 238550
  chr16:53537311-53537618
  hyper

SEQ ID NO: 399909 - DNA, 401 bp, Homo sapiens; identical to SEQ ID NO: 238551
  chr16:53737492-53737893
  hyper

SEQ ID NO: 399910 - DNA, 90 bp, Homo sapiens; identical to SEQ ID NO: 238552
  chr16:53738159-53738249
  hyper

SEQ ID NO: 399911 - DNA, 61 bp, Homo sapiens; identical to SEQ ID NO: 238556
  chr16:54404674-54404735
  hyper

SEQ ID NO: 399912 - DNA, 138 bp, Homo sapiens; identical to SEQ ID NO: 204211
  chr16:55499096-55499234
  hyper

SEQ ID NO: 399913 - DNA, 113 bp, Homo sapiens; identical to SEQ ID NO: 291569
  chr16:56701843-56701956
  hyper

SEQ ID NO: 399914 - DNA, 71 bp, Homo sapiens; identical to SEQ ID NO: 291570
  chr16:56702221-56702292
  hyper

SEQ ID NO: 399915 - DNA, 97 bp, Homo sapiens; identical to SEQ ID NO: 238582
  chr16:56763915-56764012
  hyper

SEQ ID NO: 399916 - DNA, 360 bp, Homo sapiens; identical to SEQ ID NO: 291576
  chr16:57126699-57127059
  hyper

SEQ ID NO: 399917 - DNA, 336 bp, Homo sapiens; identical to SEQ ID NO: 238588
  chr16:57496650-57496986
  hyper

SEQ ID NO: 399918 - DNA, 145 bp, Homo sapiens; identical to SEQ ID NO: 238590
  chr16:57570647-57570792
  hyper

SEQ ID NO: 399919 - DNA, 241 bp, Homo sapiens; identical to SEQ ID NO: 238592
  chr16:58035172-58035413
  hyper

SEQ ID NO: 399920 - DNA, 206 bp, Homo sapiens; identical to SEQ ID NO: 238594
  chr16:58059307-58059513
  hyper

SEQ ID NO: 399921 - DNA, 366 bp, Homo sapiens; identical to SEQ ID NO: 204228
  chr16:58060638-58061004
  hyper

SEQ ID NO: 399922 - DNA, 193 bp, Homo sapiens; identical to SEQ ID NO: 204229
  chr16:58061107-58061300
  hyper

SEQ ID NO: 399923 - DNA, 212 bp, Homo sapiens; identical to SEQ ID NO: 291593
  chr16:58548939-58549151
  hyper

SEQ ID NO: 399924 - DNA, 876 bp, Homo sapiens; identical to SEQ ID NO: 291594
  chr16:58549238-58550114
  hyper

SEQ ID NO: 399925 - DNA, 76 bp, Homo sapiens; identical to SEQ ID NO: 204233
  chr16:62068387-62068463
  hyper

SEQ ID NO: 399926 - DNA, 284 bp, Homo sapiens
  chr16:62068548-62068832
  hyper
agcagctgatctgattagcagctcgggcgcgctaagggattgtcgaatcatgcctcctaaggaggaaactcttgtggaatcttcaggaaagggtggtaaagttgaaaggacctttcctccctcccgctgtcttggtgataagctctatcgtttaattggtgctgaagtgagcagctgccagcccgattttccattacggactaatattgtgcgtttgcaacaataaacaattaatgtggtttgatttcttacatttagcaacccaagcaaacagctgccatctc

SEQ ID NO: 399927 - DNA, 457 bp, Homo sapiens
  chr16:62070246-62070703
  hyper
ggagcttggaggaggcagggagattccaaataaatccactaattctgggctgagcgctccggcgtgcgagcccgcctgcctgccaaatgtaactgtgaagtgatgtggaaaagtgagccgggtgcctcccctgacggatctcattgggcagagcgcagaggcaggtctaccacttggaaattcatgtaagcagtcccccctccccgccccctccccgccttcccccttcgctctcccgcgctggctcgatcgctctctttccccctacccaagtgggcgcacaacttttcgctcctcgctcccgagcaagccccgcgcgtctctgccgccagagccacgaggtgaagatgcgcccttccgcgcggtgcgcgcagcccgctgaggaccgagctcctggataagtgggctggcagataataacagcatgcggatgaggtacctgcgagctttctctcta

SEQ ID NO: 399928 - DNA, 50 bp, Homo sapiens; identical to SEQ ID NO: 238609
  chr16:66914767-66914817
  hyper

SEQ ID NO: 399929 - DNA, 203 bp, Homo sapiens; identical to SEQ ID NO: 291611
  chr16:67183854-67184057
  hyper

SEQ ID NO: 399930 - DNA, 152 bp, Homo sapiens; identical to SEQ ID NO: 238618
  chr16:67218041-67218193
  hyper

SEQ ID NO: 399931 - DNA, 74 bp, Homo sapiens; identical to SEQ ID NO: 204250
  chr16:67280819-67280893
  hyper

SEQ ID NO: 399932 - DNA, 141 bp, Homo sapiens; identical to SEQ ID NO: 238622
  chr16:67281140-67281281
  hyper

SEQ ID NO: 399933 - DNA, 345 bp, Homo sapiens; identical to SEQ ID NO: 238627
  chr16:67465267-67465612
  hyper

SEQ ID NO: 399934 - DNA, 164 bp, Homo sapiens; identical to SEQ ID NO: 238630
  chr16:67753296-67753460
  hyper

SEQ ID NO: 399935 - DNA, 39 bp, Homo sapiens; identical to SEQ ID NO: 204258
  chr16:67876117-67876156
  hyper

SEQ ID NO: 399936 - DNA, 76 bp, Homo sapiens; identical to SEQ ID NO: 238638
  chr16:68057151-68057227
  hyper

SEQ ID NO: 399937 - DNA, 57 bp, Homo sapiens; identical to SEQ ID NO: 204267
  chr16:68298829-68298886
  hyper

SEQ ID NO: 399938 - DNA, 566 bp, Homo sapiens; identical to SEQ ID NO: 238641
  chr16:68344575-68345141
  hyper

SEQ ID NO: 399939 - DNA, 730 bp, Homo sapiens
  chr16:69139815-69140545
  hyper
ccgtcttgccttggcagctggtcccagggcgattgcagagccgcgtggccttcggccccactcgggggacccagcttcggagagggcgcaggggctgcgagtcttgcgagccggagccgcgtccacccgggactaggcgtccccgccgagcgctggcttgtggcgctccctgggaccgcgcggggtcgggggtgcgcccgcgggggccctcccactctggtcaactttcccggccccagggccgggggaggcgcctctcctggcgggcacgcgccgggtacttaagggcggctcggctgggcaggcggcagtcggagcgcgcggcggcgcggagcggagcgggaggaggggcatggagccgccgcgggcctgctgagctccggagcgcggcagccggcggcacggtgagcgcgggccggccggcacccaggaggggagggccgcgcggggctgcgccgaggccggggcgcgccgggtggcaggggtgcctctcgccgagccccccgcacccggccagctcccagccctgcgggcgccgcgtccggcgcggggaggcgggttgggggcggcggcagccccgggcttcccggcggccgttcctgcagccccctccccactgacccctcctccctttcttcctgcatcctctcctcttccagcctcgcctccctcctccccggcggctcctgttttgtgaatgaattaggaggcggacgccggtgcggggctc

SEQ ID NO: 399940 - DNA, 86 bp, Homo sapiens; identical to SEQ ID NO: 238650
  chr16:69166893-69166979
  hyper

SEQ ID NO: 399941 - DNA, 205 bp, Homo sapiens; identical to SEQ ID NO: 238651
  chr16:69373484-69373689
  hyper

SEQ ID NO: 399942 - DNA, 255 bp, Homo sapiens; identical to SEQ ID NO: 238653
  chr16:69458315-69458570
  hyper

SEQ ID NO: 399943 - DNA, 94 bp, Homo sapiens; identical to SEQ ID NO: 238655
  chr16:70333388-70333482
  hyper

SEQ ID NO: 399944 - DNA, 64 bp, Homo sapiens; identical to SEQ ID NO: 238656
  chr16:70380544-70380608
  hyper

SEQ ID NO: 399945 - DNA, 457 bp, Homo sapiens; identical to SEQ ID NO: 238657
  chr16:70415351-70415808
  hyper

SEQ ID NO: 399946 - DNA, 105 bp, Homo sapiens; identical to SEQ ID NO: 225109
  chr16:70472498-70472603
  hyper

SEQ ID NO: 399947 - DNA, 361 bp, Homo sapiens; identical to SEQ ID NO: 238659
  chr16:70473302-70473663
  hyper

SEQ ID NO: 399948 - DNA, 33 bp, Homo sapiens; identical to SEQ ID NO: 238662
  chr16:70835271-70835304
  hyper

SEQ ID NO: 399949 - DNA, 130 bp, Homo sapiens; identical to SEQ ID NO: 204278
  chr16:71323303-71323433
  hyper

SEQ ID NO: 399950 - DNA, 31 bp, Homo sapiens; identical to SEQ ID NO: 238666
  chr16:71496369-71496400
  hyper

SEQ ID NO: 399951 - DNA, 141 bp, Homo sapiens; identical to SEQ ID NO: 238668
  chr16:71841910-71842051
  hyper

SEQ ID NO: 399952 - DNA, 141 bp, Homo sapiens; identical to SEQ ID NO: 238669
  chr16:71842652-71842793
  hyper

SEQ ID NO: 399953 - DNA, 187 bp, Homo sapiens; identical to SEQ ID NO: 238670
  chr16:71880267-71880454
  hyper

SEQ ID NO: 399954 - DNA, 249 bp, Homo sapiens; identical to SEQ ID NO: 238671
  chr16:72127405-72127654
  hyper

SEQ ID NO: 399955 - DNA, 208 bp, Homo sapiens; identical to SEQ ID NO: 238672
  chr16:72127870-72128078
  hyper

SEQ ID NO: 399956 - DNA, 208 bp, Homo sapiens; identical to SEQ ID NO: 204280
  chr16:72699010-72699218
  hyper

SEQ ID NO: 399957 - DNA, 334 bp, Homo sapiens; identical to SEQ ID NO: 291692
  chr16:73091551-73091885
  hyper

SEQ ID NO: 399958 - DNA, 217 bp, Homo sapiens; identical to SEQ ID NO: 53263
  chr16:73091900-73092117
  hyper

SEQ ID NO: 399959 - DNA, 166 bp, Homo sapiens; identical to SEQ ID NO: 291694
  chr16:73092380-73092546
  hyper

SEQ ID NO: 399960 - DNA, 37 bp, Homo sapiens; identical to SEQ ID NO: 204284
  chr16:74352126-74352163
  hyper

SEQ ID NO: 399961 - DNA, 161 bp, Homo sapiens; identical to SEQ ID NO: 238676
  chr16:74640802-74640963
  hyper

SEQ ID NO: 399962 - DNA, 166 bp, Homo sapiens; identical to SEQ ID NO: 204286
  chr16:74700794-74700960
  hyper

SEQ ID NO: 399963 - DNA, 79 bp, Homo sapiens; identical to SEQ ID NO: 225115
  chr16:74808949-74809028
  hyper

SEQ ID NO: 399964 - DNA, 40 bp, Homo sapiens; identical to SEQ ID NO: 204287
  chr16:75018963-75019003
  hyper

SEQ ID NO: 399965 - DNA, 45 bp, Homo sapiens; identical to SEQ ID NO: 204288
  chr16:75032744-75032789
  hyper

SEQ ID NO: 399966 - DNA, 90 bp, Homo sapiens; identical to SEQ ID NO: 238680
  chr16:75267942-75268032
  hyper

SEQ ID NO: 399967 - DNA, 110 bp, Homo sapiens; identical to SEQ ID NO: 291709
  chr16:75285279-75285389
  hyper

SEQ ID NO: 399968 - DNA, 306 bp, Homo sapiens; identical to SEQ ID NO: 53284
  chr16:75285434-75285740
  hyper

SEQ ID NO: 399969 - DNA, 161 bp, Homo sapiens; identical to SEQ ID NO: 225119
  chr16:75299751-75299912
  hyper

SEQ ID NO: 399970 - DNA, 176 bp, Homo sapiens; identical to SEQ ID NO: 291713
  chr16:75529727-75529903
  hyper

SEQ ID NO: 399971 - DNA, 68 bp, Homo sapiens; identical to SEQ ID NO: 204295
  chr16:75681563-75681631
  hyper

SEQ ID NO: 399972 - DNA, 104 bp, Homo sapiens; identical to SEQ ID NO: 225125
  chr16:77747330-77747434
  hyper

SEQ ID NO: 399973 - DNA, 40 bp, Homo sapiens; identical to SEQ ID NO: 225127
  chr16:78139962-78140002
  hyper

SEQ ID NO: 399974 - DNA, 32 bp, Homo sapiens; identical to SEQ ID NO: 225129
  chr16:78425003-78425035
  hyper

SEQ ID NO: 399975 - DNA, 103 bp, Homo sapiens; identical to SEQ ID NO: 204305
  chr16:79636191-79636294
  hyper

SEQ ID NO: 399976 - DNA, 115 bp, Homo sapiens
  chr16:79804693-79804808
  hyper
gctgtcccagccaggaaaacaaaccaagagacccttcacaccccagccctaagttttctttcttaccctgcctaccctccccctttccctttgcaacttgtcaccattcccagct

SEQ ID NO: 399977 - DNA, 396 bp, Homo sapiens; identical to SEQ ID NO: 291742
  chr16:80966003-80966399
  hyper

SEQ ID NO: 399978 - DNA, 74 bp, Homo sapiens; identical to SEQ ID NO: 291743
  chr16:80966431-80966505
  hyper

SEQ ID NO: 399979 - DNA, 126 bp, Homo sapiens; identical to SEQ ID NO: 238708
  chr16:81130106-81130232
  hyper

SEQ ID NO: 399980 - DNA, 161 bp, Homo sapiens; identical to SEQ ID NO: 204316
  chr16:81812592-81812753
  hyper

SEQ ID NO: 399981 - DNA, 155 bp, Homo sapiens; identical to SEQ ID NO: 238713
  chr16:82204032-82204187
  hyper

SEQ ID NO: 399982 - DNA, 97 bp, Homo sapiens; identical to SEQ ID NO: 225138
  chr16:85143894-85143991
  hyper

SEQ ID NO: 399983 - DNA, 149 bp, Homo sapiens
  chr16:85589963-85590112
  hyper
taccaggtaagcgagccgtgcgcctccctgggtcccgcgcggcgccggcgcgcccgggaccctccctcacccgacccccctccgccagacccccgagccagggtcggggcattgggtccgccggtgccccccgcagacgcgcgcggcct

SEQ ID NO: 399984 - DNA, 95 bp, Homo sapiens; identical to SEQ ID NO: 291775
  chr16:86320170-86320265
  hyper

SEQ ID NO: 399985 - DNA, 49 bp, Homo sapiens; identical to SEQ ID NO: 204327
  chr16:86321068-86321117
  hyper

SEQ ID NO: 399986 - DNA, 439 bp, Homo sapiens; identical to SEQ ID NO: 291777
  chr16:86334431-86334870
  hyper

SEQ ID NO: 399987 - DNA, 112 bp, Homo sapiens; identical to SEQ ID NO: 238742
  chr16:86597561-86597673
  hyper

SEQ ID NO: 399988 - DNA, 237 bp, Homo sapiens; identical to SEQ ID NO: 238749
  chr16:87350811-87351048
  hyper

SEQ ID NO: 399989 - DNA, 76 bp, Homo sapiens; identical to SEQ ID NO: 389392
  chr16:87635461-87635537
  hyper

SEQ ID NO: 399990 - DNA, 83 bp, Homo sapiens; identical to SEQ ID NO: 238756
  chr16:87695288-87695371
  hyper

SEQ ID NO: 399991 - DNA, 130 bp, Homo sapiens; identical to SEQ ID NO: 225161
  chr16:88031994-88032124
  hyper

SEQ ID NO: 399992 - DNA, 174 bp, Homo sapiens; identical to SEQ ID NO: 238760
  chr16:88522425-88522599
  hyper

SEQ ID NO: 399993 - DNA, 91 bp, Homo sapiens; identical to SEQ ID NO: 225166
  chr16:88721558-88721649
  hyper

SEQ ID NO: 399994 - DNA, 182 bp, Homo sapiens; identical to SEQ ID NO: 291810
  chr16:88752793-88752975
  hyper

SEQ ID NO: 399995 - DNA, 133 bp, Homo sapiens; identical to SEQ ID NO: 225167
  chr16:88764923-88765056
  hyper

SEQ ID NO: 399996 - DNA, 114 bp, Homo sapiens; identical to SEQ ID NO: 204339
  chr16:88851818-88851932
  hyper

SEQ ID NO: 399997 - DNA, 507 bp, Homo sapiens; identical to SEQ ID NO: 204340
  chr16:88878527-88879034
  hyper

SEQ ID NO: 399998 - DNA, 139 bp, Homo sapiens; identical to SEQ ID NO: 225177
  chr16:89627717-89627856
  hyper

SEQ ID NO: 399999 - DNA, 32 bp, Homo sapiens; identical to SEQ ID NO: 238772
  chr16:89787466-89787498
  hyper

SEQ ID NO: 400000 - DNA, 94 bp, Homo sapiens; identical to SEQ ID NO: 238774
  chr16:89882314-89882408
  hyper

SEQ ID NO: 400001 - DNA, 152 bp, Homo sapiens; identical to SEQ ID NO: 225178
  chr16:89894420-89894572
  hyper

SEQ ID NO: 400002 - DNA, 50 bp, Homo sapiens; identical to SEQ ID NO: 238777
  chr16:89984233-89984283
  hyper

SEQ ID NO: 400003 - DNA, 253 bp, Homo sapiens; identical to SEQ ID NO: 238780
  chr16:89990062-89990315
  hyper

SEQ ID NO: 400004 - DNA, 123 bp, Homo sapiens; identical to SEQ ID NO: 204354
  chr16:90085456-90085579
  hyper

SEQ ID NO: 400005 - DNA, 72 bp, Homo sapiens; identical to SEQ ID NO: 53511
  chr16:90086126-90086198
  hyper

SEQ ID NO: 400006 - DNA, 45 bp, Homo sapiens; identical to SEQ ID NO: 225179
  chr16:90087050-90087095
  hyper

SEQ ID NO: 400007 - DNA, 59 bp, Homo sapiens; identical to SEQ ID NO: 389401
  chr17:523856-523915
  hyper

SEQ ID NO: 400008 - DNA, 91 bp, Homo sapiens; identical to SEQ ID NO: 291848
  chr17:655679-655770
  hyper

SEQ ID NO: 400009 - DNA, 90 bp, Homo sapiens; identical to SEQ ID NO: 127827
  chr17:655880-655970
  hyper

SEQ ID NO: 400010 - DNA, 84 bp, Homo sapiens; identical to SEQ ID NO: 225185
  chr17:883202-883286
  hyper

SEQ ID NO: 400011 - DNA, 73 bp, Homo sapiens; identical to SEQ ID NO: 225186
  chr17:1132222-1132295
  hyper

SEQ ID NO: 400012 - DNA, 182 bp, Homo sapiens; identical to SEQ ID NO: 204363
  chr17:1420195-1420377
  hyper

SEQ ID NO: 400013 - DNA, 360 bp, Homo sapiens; identical to SEQ ID NO: 225188
  chr17:1613330-1613690
  hyper

SEQ ID NO: 400014 - DNA, 146 bp, Homo sapiens; identical to SEQ ID NO: 225192
  chr17:2156718-2156864
  hyper

SEQ ID NO: 400015 - DNA, 91 bp, Homo sapiens; identical to SEQ ID NO: 204368
  chr17:2206903-2206994
  hyper

SEQ ID NO: 400016 - DNA, 72 bp, Homo sapiens; identical to SEQ ID NO: 238807
  chr17:2627362-2627434
  hyper

SEQ ID NO: 400017 - DNA, 258 bp, Homo sapiens; identical to SEQ ID NO: 238813
  chr17:3539485-3539743
  hyper

SEQ ID NO: 400018 - DNA, 290 bp, Homo sapiens; identical to SEQ ID NO: 238820
  chr17:4046209-4046499
  hyper

SEQ ID NO: 400019 - DNA, 148 bp, Homo sapiens; identical to SEQ ID NO: 204378
  chr17:4402640-4402788
  hyper

SEQ ID NO: 400020 - DNA, 98 bp, Homo sapiens; identical to SEQ ID NO: 238823
  chr17:4607657-4607755
  hyper

SEQ ID NO: 400021 - DNA, 172 bp, Homo sapiens; identical to SEQ ID NO: 238826
  chr17:4843519-4843691
  hyper

SEQ ID NO: 400022 - DNA, 105 bp, Homo sapiens; identical to SEQ ID NO: 238828
  chr17:4871286-4871391
  hyper

SEQ ID NO: 400023 - DNA, 239 bp, Homo sapiens; identical to SEQ ID NO: 225204
  chr17:4938733-4938972
  hyper

SEQ ID NO: 400024 - DNA, 394 bp, Homo sapiens; identical to SEQ ID NO: 238834
  chr17:5322761-5323155
  hyper

SEQ ID NO: 400025 - DNA, 106 bp, Homo sapiens; identical to SEQ ID NO: 204384
  chr17:5389578-5389684
  hyper

SEQ ID NO: 400026 - DNA, 196 bp, Homo sapiens; identical to SEQ ID NO: 238837
  chr17:5972267-5972463
  hyper

SEQ ID NO: 400027 - DNA, 317 bp, Homo sapiens; identical to SEQ ID NO: 238843
  chr17:6459172-6459489
  hyper

SEQ ID NO: 400028 - DNA, 241 bp, Homo sapiens; identical to SEQ ID NO: 238846
  chr17:6544040-6544281
  hyper

SEQ ID NO: 400029 - DNA, 389 bp, Homo sapiens; identical to SEQ ID NO: 238847
  chr17:6554828-6555217
  hyper

SEQ ID NO: 400030 - DNA, 273 bp, Homo sapiens; identical to SEQ ID NO: 238852
  chr17:6915580-6915853
  hyper

SEQ ID NO: 400031 - DNA, 237 bp, Homo sapiens; identical to SEQ ID NO: 291929
  chr17:6945870-6946107
  hyper

SEQ ID NO: 400032 - DNA, 37 bp, Homo sapiens; identical to SEQ ID NO: 291930
  chr17:6946175-6946212
  hyper

SEQ ID NO: 400033 - DNA, 51 bp, Homo sapiens; identical to SEQ ID NO: 291931
  chr17:6946491-6946542
  hyper

SEQ ID NO: 400034 - DNA, 166 bp, Homo sapiens; identical to SEQ ID NO: 291932
  chr17:7137843-7138009
  hyper

SEQ ID NO: 400035 - DNA, 105 bp, Homo sapiens; identical to SEQ ID NO: 238858
  chr17:7145849-7145954
  hyper

SEQ ID NO: 400036 - DNA, 67 bp, Homo sapiens; identical to SEQ ID NO: 204392
  chr17:7146588-7146655
  hyper

SEQ ID NO: 400037 - DNA, 258 bp, Homo sapiens; identical to SEQ ID NO: 238860
  chr17:7155207-7155465
  hyper

SEQ ID NO: 400038 - DNA, 133 bp, Homo sapiens; identical to SEQ ID NO: 204394
  chr17:7184885-7185018
  hyper

SEQ ID NO: 400039 - DNA, 491 bp, Homo sapiens; identical to SEQ ID NO: 238868
  chr17:7284208-7284699
  hyper

SEQ ID NO: 400040 - DNA, 102 bp, Homo sapiens; identical to SEQ ID NO: 238869
  chr17:7307383-7307485
  hyper

SEQ ID NO: 400041 - DNA, 274 bp, Homo sapiens; identical to SEQ ID NO: 225215
  chr17:7340607-7340881
  hyper

SEQ ID NO: 400042 - DNA, 201 bp, Homo sapiens; identical to SEQ ID NO: 238873
  chr17:7475777-7475978
  hyper

SEQ ID NO: 400043 - DNA, 385 bp, Homo sapiens; identical to SEQ ID NO: 291954
  chr17:7486279-7486664
  hyper

SEQ ID NO: 400044 - DNA, 287 bp, Homo sapiens; identical to SEQ ID NO: 225217
  chr17:7486947-7487234
  hyper

SEQ ID NO: 400045 - DNA, 165 bp, Homo sapiens; identical to SEQ ID NO: 204402
  chr17:7571719-7571884
  hyper

SEQ ID NO: 400046 - DNA, 773 bp, Homo sapiens; identical to SEQ ID NO: 204403
  chr17:7572184-7572957
  hyper

SEQ ID NO: 400047 - DNA, 329 bp, Homo sapiens; identical to SEQ ID NO: 204409
  chr17:7590625-7590954
  hyper

SEQ ID NO: 400048 - DNA, 138 bp, Homo sapiens; identical to SEQ ID NO: 238877
  chr17:7591824-7591962
  hyper

SEQ ID NO: 400049 - DNA, 53 bp, Homo sapiens; identical to SEQ ID NO: 238878
  chr17:7621507-7621560
  hyper

SEQ ID NO: 400050 - DNA, 49 bp, Homo sapiens; identical to SEQ ID NO: 204411
  chr17:7744964-7745013
  hyper

SEQ ID NO: 400051 - DNA, 41 bp, Homo sapiens; identical to SEQ ID NO: 238883
  chr17:7791235-7791276
  hyper

SEQ ID NO: 400052 - DNA, 55 bp, Homo sapiens; identical to SEQ ID NO: 238884
  chr17:7835479-7835534
  hyper

SEQ ID NO: 400053 - DNA, 199 bp, Homo sapiens; identical to SEQ ID NO: 238885
  chr17:7905914-7906113
  hyper

SEQ ID NO: 400054 - DNA, 433 bp, Homo sapiens; identical to SEQ ID NO: 291977
  chr17:7975836-7976269
  hyper

SEQ ID NO: 400055 - DNA, 320 bp, Homo sapiens; identical to SEQ ID NO: 291978
  chr17:7976318-7976638
  hyper

SEQ ID NO: 400056 - DNA, 56 bp, Homo sapiens; identical to SEQ ID NO: 238888
  chr17:8021862-8021918
  hyper

SEQ ID NO: 400057 - DNA, 40 bp, Homo sapiens; identical to SEQ ID NO: 238890
  chr17:8022550-8022590
  hyper

SEQ ID NO: 400058 - DNA, 211 bp, Homo sapiens; identical to SEQ ID NO: 238891
  chr17:8026217-8026428
  hyper

SEQ ID NO: 400059 - DNA, 63 bp, Homo sapiens; identical to SEQ ID NO: 291983
  chr17:8027809-8027872
  hyper

SEQ ID NO: 400060 - DNA, 127 bp, Homo sapiens; identical to SEQ ID NO: 291984
  chr17:8027922-8028049
  hyper

SEQ ID NO: 400061 - DNA, 43 bp, Homo sapiens; identical to SEQ ID NO: 204418
  chr17:8280080-8280123
  hyper

SEQ ID NO: 400062 - DNA, 149 bp, Homo sapiens; identical to SEQ ID NO: 238899
  chr17:8287112-8287261
  hyper

SEQ ID NO: 400063 - DNA, 213 bp, Homo sapiens; identical to SEQ ID NO: 291992
  chr17:8532948-8533161
  hyper

SEQ ID NO: 400064 - DNA, 192 bp, Homo sapiens; identical to SEQ ID NO: 204420
  chr17:8533199-8533391
  hyper

SEQ ID NO: 400065 - DNA, 168 bp, Homo sapiens; identical to SEQ ID NO: 291994
  chr17:8533392-8533560
  hyper

SEQ ID NO: 400066 - DNA, 33 bp, Homo sapiens; identical to SEQ ID NO: 225226
  chr17:8759640-8759673
  hyper

SEQ ID NO: 400067 - DNA, 37 bp, Homo sapiens; identical to SEQ ID NO: 204422
  chr17:8869471-8869508
  hyper

SEQ ID NO: 400068 - DNA, 218 bp, Homo sapiens; identical to SEQ ID NO: 204423
  chr17:8907838-8908056
  hyper

SEQ ID NO: 400069 - DNA, 530 bp, Homo sapiens; identical to SEQ ID NO: 292002
  chr17:8925060-8925590
  hyper

SEQ ID NO: 400070 - DNA, 227 bp, Homo sapiens; identical to SEQ ID NO: 292003
  chr17:8925833-8926060
  hyper

SEQ ID NO: 400071 - DNA, 41 bp, Homo sapiens; identical to SEQ ID NO: 204428
  chr17:10600737-10600778
  hyper

SEQ ID NO: 400072 - DNA, 50 bp, Homo sapiens
  chr17:10633595-10633645
  hyper
gggaggggagagaggaagaaagagaaagaaagaaaaagaaagaaggaaag

SEQ ID NO: 400073 - DNA, 135 bp, Homo sapiens; identical to SEQ ID NO: 204432
  chr17:12877185-12877320
  hyper

SEQ ID NO: 400074 - DNA, 109 bp, Homo sapiens; identical to SEQ ID NO: 204434
  chr17:13505656-13505765
  hyper

SEQ ID NO: 400075 - DNA, 122 bp, Homo sapiens; identical to SEQ ID NO: 204438
  chr17:15164530-15164652
  hyper

SEQ ID NO: 400076 - DNA, 164 bp, Homo sapiens; identical to SEQ ID NO: 292033
  chr17:15164715-15164879
  hyper

SEQ ID NO: 400077 - DNA, 67 bp, Homo sapiens; identical to SEQ ID NO: 292036
  chr17:15821030-15821097
  hyper

SEQ ID NO: 400078 - DNA, 57 bp, Homo sapiens; identical to SEQ ID NO: 225243
  chr17:16395229-16395286
  hyper

SEQ ID NO: 400079 - DNA, 86 bp, Homo sapiens; identical to SEQ ID NO: 238936
  chr17:16439419-16439505
  hyper

SEQ ID NO: 400080 - DNA, 271 bp, Homo sapiens; identical to SEQ ID NO: 292051
  chr17:16440043-16440314
  hyper

SEQ ID NO: 400081 - DNA, 113 bp, Homo sapiens; identical to SEQ ID NO: 238941
  chr17:17184594-17184707
  hyper

SEQ ID NO: 400082 - DNA, 75 bp, Homo sapiens; identical to SEQ ID NO: 292056
  chr17:17204069-17204144
  hyper

SEQ ID NO: 400083 - DNA, 38 bp, Homo sapiens; identical to SEQ ID NO: 292057
  chr17:17204211-17204249
  hyper

SEQ ID NO: 400084 - DNA, 144 bp, Homo sapiens; identical to SEQ ID NO: 238951
  chr17:18086430-18086574
  hyper

SEQ ID NO: 400085 - DNA, 230 bp, Homo sapiens; identical to SEQ ID NO: 238956
  chr17:18761717-18761947
  hyper

SEQ ID NO: 400086 - DNA, 66 bp, Homo sapiens; identical to SEQ ID NO: 384641
  chr17:18908242-18908308
  hyper

SEQ ID NO: 400087 - DNA, 111 bp, Homo sapiens; identical to SEQ ID NO: 238959
  chr17:19141268-19141379
  hyper

SEQ ID NO: 400088 - DNA, 45 bp, Homo sapiens; identical to SEQ ID NO: 238960
  chr17:19141603-19141648
  hyper

SEQ ID NO: 400089 - DNA, 144 bp, Homo sapiens; identical to SEQ ID NO: 204460
  chr17:19265481-19265625
  hyper

SEQ ID NO: 400090 - DNA, 240 bp, Homo sapiens; identical to SEQ ID NO: 238965
  chr17:19552168-19552408
  hyper

SEQ ID NO: 400091 - DNA, 224 bp, Homo sapiens; identical to SEQ ID NO: 292082
  chr17:19648279-19648503
  hyper

SEQ ID NO: 400092 - DNA, 265 bp, Homo sapiens; identical to SEQ ID NO: 292083
  chr17:19770124-19770389
  hyper

SEQ ID NO: 400093 - DNA, 246 bp, Homo sapiens; identical to SEQ ID NO: 204463
  chr17:20059180-20059426
  hyper

SEQ ID NO: 400094 - DNA, 69 bp, Homo sapiens; identical to SEQ ID NO: 238973
  chr17:20945959-20946028
  hyper

SEQ ID NO: 400095 - DNA, 132 bp, Homo sapiens; identical to SEQ ID NO: 204464
  chr17:21030040-21030172
  hyper

SEQ ID NO: 400096 - DNA, 111 bp, Homo sapiens; identical to SEQ ID NO: 238977
  chr17:21187754-21187865
  hyper

SEQ ID NO: 400097 - DNA, 212 bp, Homo sapiens; identical to SEQ ID NO: 204465
  chr17:21189752-21189964
  hyper

SEQ ID NO: 400098 - DNA, 202 bp, Homo sapiens; identical to SEQ ID NO: 204466
  chr17:25659906-25660108
  hyper

SEQ ID NO: 400099 - DNA, 38 bp, Homo sapiens; identical to SEQ ID NO: 238980
  chr17:26220451-26220489
  hyper

SEQ ID NO: 400100 - DNA, 60 bp, Homo sapiens; identical to SEQ ID NO: 238983
  chr17:26879852-26879912
  hyper

SEQ ID NO: 400101 - DNA, 334 bp, Homo sapiens; identical to SEQ ID NO: 238985
  chr17:26926091-26926425
  hyper

SEQ ID NO: 400102 - DNA, 326 bp, Homo sapiens; identical to SEQ ID NO: 238987
  chr17:26988802-26989128
  hyper

SEQ ID NO: 400103 - DNA, 72 bp, Homo sapiens; identical to SEQ ID NO: 238989
  chr17:27039397-27039469
  hyper

SEQ ID NO: 400104 - DNA, 448 bp, Homo sapiens; identical to SEQ ID NO: 238993
  chr17:27181909-27182357
  hyper

SEQ ID NO: 400105 - DNA, 304 bp, Homo sapiens; identical to SEQ ID NO: 238994
  chr17:27230104-27230408
  hyper

SEQ ID NO: 400106 - DNA, 87 bp, Homo sapiens; identical to SEQ ID NO: 292117
  chr17:27333201-27333288
  hyper

SEQ ID NO: 400107 - DNA, 74 bp, Homo sapiens
  chr17:27940964-27941038
  hyper
gcatttctgttcactaaccccactccaggacactgcccctgaagcctttgcatctctgctcttcactcctgggg

SEQ ID NO: 400108 - DNA, 903 bp, Homo sapiens; identical to SEQ ID NO: 292123
  chr17:27942512-27943415
  hyper

SEQ ID NO: 400109 - DNA, 325 bp, Homo sapiens; identical to SEQ ID NO: 239003
  chr17:28256763-28257088
  hyper

SEQ ID NO: 400110 - DNA, 329 bp, Homo sapiens; identical to SEQ ID NO: 239004
  chr17:28443742-28444071
  hyper

SEQ ID NO: 400111 - DNA, 242 bp, Homo sapiens; identical to SEQ ID NO: 204481
  chr17:28563016-28563258
  hyper

SEQ ID NO: 400112 - DNA, 98 bp, Homo sapiens; identical to SEQ ID NO: 292129
  chr17:28563901-28563999
  hyper

SEQ ID NO: 400113 - DNA, 107 bp, Homo sapiens; identical to SEQ ID NO: 292130
  chr17:28705456-28705563
  hyper

SEQ ID NO: 400114 - DNA, 488 bp, Homo sapiens; identical to SEQ ID NO: 128356
  chr17:29421899-29422387
  hyper

SEQ ID NO: 400115 - DNA, 59 bp, Homo sapiens; identical to SEQ ID NO: 204485
  chr17:29422762-29422821
  hyper

SEQ ID NO: 400116 - DNA, 144 bp, Homo sapiens; identical to SEQ ID NO: 204486
  chr17:29483000-29483144
  hyper

SEQ ID NO: 400117 - DNA, 91 bp, Homo sapiens; identical to SEQ ID NO: 204487
  chr17:29486027-29486118
  hyper

SEQ ID NO: 400118 - DNA, 191 bp, Homo sapiens; identical to SEQ ID NO: 204488
  chr17:29490203-29490394
  hyper

SEQ ID NO: 400119 - DNA, 109 bp, Homo sapiens; identical to SEQ ID NO: 204489
  chr17:29496908-29497017
  hyper

SEQ ID NO: 400120 - DNA, 68 bp, Homo sapiens; identical to SEQ ID NO: 204490
  chr17:29508439-29508507
  hyper

SEQ ID NO: 400121 - DNA, 174 bp, Homo sapiens; identical to SEQ ID NO: 204493
  chr17:29527439-29527613
  hyper

SEQ ID NO: 400122 - DNA, 123 bp, Homo sapiens; identical to SEQ ID NO: 204494
  chr17:29528054-29528177
  hyper

SEQ ID NO: 400123 - DNA, 75 bp, Homo sapiens; identical to SEQ ID NO: 204495
  chr17:29528428-29528503
  hyper

SEQ ID NO: 400124 - DNA, 59 bp, Homo sapiens; identical to SEQ ID NO: 204497
  chr17:29541468-29541527
  hyper

SEQ ID NO: 400125 - DNA, 47 bp, Homo sapiens; identical to SEQ ID NO: 204498
  chr17:29541556-29541603
  hyper

SEQ ID NO: 400126 - DNA, 136 bp, Homo sapiens; identical to SEQ ID NO: 204499
  chr17:29546009-29546145
  hyper

SEQ ID NO: 400127 - DNA, 156 bp, Homo sapiens; identical to SEQ ID NO: 204502
  chr17:29552112-29552268
  hyper

SEQ ID NO: 400128 - DNA, 250 bp, Homo sapiens; identical to SEQ ID NO: 204503
  chr17:29553452-29553702
  hyper

SEQ ID NO: 400129 - DNA, 74 bp, Homo sapiens; identical to SEQ ID NO: 204504
  chr17:29554235-29554309
  hyper

SEQ ID NO: 400130 - DNA, 84 bp, Homo sapiens; identical to SEQ ID NO: 204505
  chr17:29554540-29554624
  hyper

SEQ ID NO: 400131 - DNA, 441 bp, Homo sapiens; identical to SEQ ID NO: 204506
  chr17:29556042-29556483
  hyper

SEQ ID NO: 400132 - DNA, 123 bp, Homo sapiens; identical to SEQ ID NO: 204508
  chr17:29557277-29557400
  hyper

SEQ ID NO: 400133 - DNA, 117 bp, Homo sapiens; identical to SEQ ID NO: 204510
  chr17:29559090-29559207
  hyper

SEQ ID NO: 400134 - DNA, 514 bp, Homo sapiens; identical to SEQ ID NO: 204511
  chr17:29559717-29560231
  hyper

SEQ ID NO: 400135 - DNA, 136 bp, Homo sapiens; identical to SEQ ID NO: 204514
  chr17:29576001-29576137
  hyper

SEQ ID NO: 400136 - DNA, 63 bp, Homo sapiens; identical to SEQ ID NO: 204515
  chr17:29579955-29580018
  hyper

SEQ ID NO: 400137 - DNA, 147 bp, Homo sapiens; identical to SEQ ID NO: 204518
  chr17:29587386-29587533
  hyper

SEQ ID NO: 400138 - DNA, 111 bp, Homo sapiens; identical to SEQ ID NO: 204520
  chr17:29592246-29592357
  hyper

SEQ ID NO: 400139 - DNA, 203 bp, Homo sapiens; identical to SEQ ID NO: 204523
  chr17:29657313-29657516
  hyper

SEQ ID NO: 400140 - DNA, 582 bp, Homo sapiens; identical to SEQ ID NO: 204525
  chr17:29663350-29663932
  hyper

SEQ ID NO: 400141 - DNA, 215 bp, Homo sapiens; identical to SEQ ID NO: 204526
  chr17:29664385-29664600
  hyper

SEQ ID NO: 400142 - DNA, 141 bp, Homo sapiens; identical to SEQ ID NO: 204529
  chr17:29667522-29667663
  hyper

SEQ ID NO: 400143 - DNA, 123 bp, Homo sapiens; identical to SEQ ID NO: 204534
  chr17:29683477-29683600
  hyper

SEQ ID NO: 400144 - DNA, 410 bp, Homo sapiens; identical to SEQ ID NO: 204535
  chr17:29683977-29684387
  hyper

SEQ ID NO: 400145 - DNA, 143 bp, Homo sapiens; identical to SEQ ID NO: 204536
  chr17:29685497-29685640
  hyper

SEQ ID NO: 400146 - DNA, 47 bp, Homo sapiens; identical to SEQ ID NO: 204537
  chr17:29685986-29686033
  hyper

SEQ ID NO: 400147 - DNA, 217 bp, Homo sapiens; identical to SEQ ID NO: 204538
  chr17:29687504-29687721
  hyper

SEQ ID NO: 400148 - DNA, 266 bp, Homo sapiens; identical to SEQ ID NO: 239016
  chr17:30469088-30469354
  hyper

SEQ ID NO: 400149 - DNA, 68 bp, Homo sapiens; identical to SEQ ID NO: 239017
  chr17:30592873-30592941
  hyper

SEQ ID NO: 400150 - DNA, 792 bp, Homo sapiens; identical to SEQ ID NO: 239018
  chr17:30593241-30594033
  hyper

SEQ ID NO: 400151 - DNA, 89 bp, Homo sapiens; identical to SEQ ID NO: 204542
  chr17:30813422-30813511
  hyper

SEQ ID NO: 400152 - DNA, 105 bp, Homo sapiens; identical to SEQ ID NO: 225322
  chr17:31203740-31203845
  hyper

SEQ ID NO: 400153 - DNA, 57 bp, Homo sapiens; identical to SEQ ID NO: 204546
  chr17:31254914-31254971
  hyper

SEQ ID NO: 400154 - DNA, 377 bp, Homo sapiens; identical to SEQ ID NO: 204547
  chr17:31255335-31255712
  hyper

SEQ ID NO: 400155 - DNA, 539 bp, Homo sapiens; identical to SEQ ID NO: 292208
  chr17:33288351-33288890
  hyper

SEQ ID NO: 400156 - DNA, 166 bp, Homo sapiens; identical to SEQ ID NO: 292209
  chr17:33288988-33289154
  hyper

SEQ ID NO: 400157 - DNA, 387 bp, Homo sapiens; identical to SEQ ID NO: 239039
  chr17:33787454-33787841
  hyper

SEQ ID NO: 400158 - DNA, 252 bp, Homo sapiens; identical to SEQ ID NO: 239041
  chr17:33905430-33905682
  hyper

SEQ ID NO: 400159 - DNA, 222 bp, Homo sapiens; identical to SEQ ID NO: 292223
  chr17:35241874-35242096
  hyper

SEQ ID NO: 400160 - DNA, 456 bp, Homo sapiens; identical to SEQ ID NO: 292228
  chr17:35716404-35716860
  hyper

SEQ ID NO: 400161 - DNA, 64 bp, Homo sapiens; identical to SEQ ID NO: 239062
  chr17:35849757-35849821
  hyper

SEQ ID NO: 400162 - DNA, 424 bp, Homo sapiens; identical to SEQ ID NO: 239063
  chr17:35969347-35969771
  hyper

SEQ ID NO: 400163 - DNA, 171 bp, Homo sapiens; identical to SEQ ID NO: 239072
  chr17:36735071-36735242
  hyper

SEQ ID NO: 400164 - DNA, 46 bp, Homo sapiens; identical to SEQ ID NO: 11164
  chr17:36762362-36762408
  hyper

SEQ ID NO: 400165 - DNA, 450 bp, Homo sapiens; identical to SEQ ID NO: 204570
  chr17:36905017-36905467
  hyper

SEQ ID NO: 400166 - DNA, 834 bp, Homo sapiens; identical to SEQ ID NO: 204571
  chr17:36905507-36906341
  hyper

SEQ ID NO: 400167 - DNA, 249 bp, Homo sapiens; identical to SEQ ID NO: 239078
  chr17:36981592-36981841
  hyper

SEQ ID NO: 400168 - DNA, 239 bp, Homo sapiens; identical to SEQ ID NO: 292253
  chr17:37307753-37307992
  hyper

SEQ ID NO: 400169 - DNA, 147 bp, Homo sapiens; identical to SEQ ID NO: 204574
  chr17:37310273-37310420
  hyper

SEQ ID NO: 400170 - DNA, 146 bp, Homo sapiens; identical to SEQ ID NO: 292264
  chr17:37762839-37762985
  hyper

SEQ ID NO: 400171 - DNA, 211 bp, Homo sapiens; identical to SEQ ID NO: 292265
  chr17:37764307-37764518
  hyper

SEQ ID NO: 400172 - DNA, 52 bp, Homo sapiens; identical to SEQ ID NO: 204587
  chr17:37823746-37823798
  hyper

SEQ ID NO: 400173 - DNA, 525 bp, Homo sapiens; identical to SEQ ID NO: 292272
  chr17:37823945-37824470
  hyper

SEQ ID NO: 400174 - DNA, 63 bp, Homo sapiens; identical to SEQ ID NO: 204589
  chr17:37856349-37856412
  hyper

SEQ ID NO: 400175 - DNA, 322 bp, Homo sapiens; identical to SEQ ID NO: 204590
  chr17:37856726-37857048
  hyper

SEQ ID NO: 400176 - DNA, 39 bp, Homo sapiens; identical to SEQ ID NO: 204593
  chr17:38228513-38228552
  hyper

SEQ ID NO: 400177 - DNA, 37 bp, Homo sapiens; identical to SEQ ID NO: 204594
  chr17:38228861-38228898
  hyper

SEQ ID NO: 400178 - DNA, 83 bp, Homo sapiens; identical to SEQ ID NO: 292285
  chr17:38255680-38255763
  hyper

SEQ ID NO: 400179 - DNA, 56 bp, Homo sapiens; identical to SEQ ID NO: 128592
  chr17:38255830-38255886
  hyper

SEQ ID NO: 400180 - DNA, 119 bp, Homo sapiens; identical to SEQ ID NO: 239111
  chr17:38256918-38257037
  hyper

SEQ ID NO: 400181 - DNA, 89 bp, Homo sapiens; identical to SEQ ID NO: 239113
  chr17:38296368-38296457
  hyper

SEQ ID NO: 400182 - DNA, 109 bp, Homo sapiens; identical to SEQ ID NO: 239115
  chr17:38375105-38375214
  hyper

SEQ ID NO: 400183 - DNA, 165 bp, Homo sapiens; identical to SEQ ID NO: 239116
  chr17:38443942-38444107
  hyper

SEQ ID NO: 400184 - DNA, 89 bp, Homo sapiens; identical to SEQ ID NO: 239121
  chr17:38574211-38574300
  hyper

SEQ ID NO: 400185 - DNA, 203 bp, Homo sapiens; identical to SEQ ID NO: 239122
  chr17:38599494-38599697
  hyper

SEQ ID NO: 400186 - DNA, 159 bp, Homo sapiens; identical to SEQ ID NO: 204600
  chr17:38604453-38604612
  hyper

SEQ ID NO: 400187 - DNA, 137 bp, Homo sapiens; identical to SEQ ID NO: 239124
  chr17:38739098-38739235
  hyper

SEQ ID NO: 400188 - DNA, 264 bp, Homo sapiens; identical to SEQ ID NO: 239125
  chr17:38804062-38804326
  hyper

SEQ ID NO: 400189 - DNA, 565 bp, Homo sapiens; identical to SEQ ID NO: 239127
  chr17:40306686-40307251
  hyper

SEQ ID NO: 400190 - DNA, 517 bp, Homo sapiens; identical to SEQ ID NO: 292311
  chr17:40428745-40429262
  hyper

SEQ ID NO: 400191 - DNA, 56 bp, Homo sapiens; identical to SEQ ID NO: 292312
  chr17:40441311-40441367
  hyper

SEQ ID NO: 400192 - DNA, 58 bp, Homo sapiens; identical to SEQ ID NO: 239132
  chr17:40540529-40540587
  hyper

SEQ ID NO: 400193 - DNA, 162 bp, Homo sapiens; identical to SEQ ID NO: 225354
  chr17:40575277-40575439
  hyper

SEQ ID NO: 400194 - DNA, 115 bp, Homo sapiens; identical to SEQ ID NO: 239136
  chr17:40610751-40610866
  hyper

SEQ ID NO: 400195 - DNA, 63 bp, Homo sapiens; identical to SEQ ID NO: 239137
  chr17:40713961-40714024
  hyper

SEQ ID NO: 400196 - DNA, 121 bp, Homo sapiens; identical to SEQ ID NO: 239143
  chr17:40925326-40925447
  hyper

SEQ ID NO: 400197 - DNA, 59 bp, Homo sapiens; identical to SEQ ID NO: 239145
  chr17:40932939-40932998
  hyper

SEQ ID NO: 400198 - DNA, 56 bp, Homo sapiens; identical to SEQ ID NO: 239146
  chr17:40985217-40985273
  hyper

SEQ ID NO: 400199 - DNA, 191 bp, Homo sapiens; identical to SEQ ID NO: 239147
  chr17:41116341-41116532
  hyper

SEQ ID NO: 400200 - DNA, 32 bp, Homo sapiens; identical to SEQ ID NO: 292337
  chr17:41203102-41203134
  hyper

SEQ ID NO: 400201 - DNA, 38 bp, Homo sapiens; identical to SEQ ID NO: 292338
  chr17:41209114-41209152
  hyper

SEQ ID NO: 400202 - DNA, 311 bp, Homo sapiens; identical to SEQ ID NO: 225365
  chr17:41222944-41223255
  hyper

SEQ ID NO: 400203 - DNA, 172 bp, Homo sapiens; identical to SEQ ID NO: 225368
  chr17:41234420-41234592
  hyper

SEQ ID NO: 400204 - DNA, 89 bp, Homo sapiens; identical to SEQ ID NO: 225369
  chr17:41242960-41243049
  hyper

SEQ ID NO: 400205 - DNA, 77 bp, Homo sapiens; identical to SEQ ID NO: 225371
  chr17:41247862-41247939
  hyper

SEQ ID NO: 400206 - DNA, 106 bp, Homo sapiens; identical to SEQ ID NO: 225373
  chr17:41251791-41251897
  hyper

SEQ ID NO: 400207 - DNA, 140 bp, Homo sapiens; identical to SEQ ID NO: 225374
  chr17:41256138-41256278
  hyper

SEQ ID NO: 400208 - DNA, 78 bp, Homo sapiens; identical to SEQ ID NO: 225376
  chr17:41258472-41258550
  hyper

SEQ ID NO: 400209 - DNA, 57 bp, Homo sapiens; identical to SEQ ID NO: 292353
  chr17:41276075-41276132
  hyper

SEQ ID NO: 400210 - DNA, 92 bp, Homo sapiens; identical to SEQ ID NO: 239150
  chr17:41323035-41323127
  hyper

SEQ ID NO: 400211 - DNA, 120 bp, Homo sapiens; identical to SEQ ID NO: 239151
  chr17:41393018-41393138
  hyper

SEQ ID NO: 400212 - DNA, 330 bp, Homo sapiens; identical to SEQ ID NO: 239152
  chr17:41446506-41446836
  hyper

SEQ ID NO: 400213 - DNA, 85 bp, Homo sapiens; identical to SEQ ID NO: 204612
  chr17:41624075-41624160
  hyper

SEQ ID NO: 400214 - DNA, 296 bp, Homo sapiens; identical to SEQ ID NO: 239159
  chr17:41977937-41978233
  hyper

SEQ ID NO: 400215 - DNA, 122 bp, Homo sapiens; identical to SEQ ID NO: 292372
  chr17:42015411-42015533
  hyper

SEQ ID NO: 400216 - DNA, 291 bp, Homo sapiens; identical to SEQ ID NO: 292373
  chr17:42015571-42015862
  hyper

SEQ ID NO: 400217 - DNA, 125 bp, Homo sapiens; identical to SEQ ID NO: 239166
  chr17:42072190-42072315
  hyper

SEQ ID NO: 400218 - DNA, 111 bp, Homo sapiens; identical to SEQ ID NO: 204627
  chr17:42264411-42264522
  hyper

SEQ ID NO: 400219 - DNA, 343 bp, Homo sapiens; identical to SEQ ID NO: 225385
  chr17:42287964-42288307
  hyper

SEQ ID NO: 400220 - DNA, 614 bp, Homo sapiens; identical to SEQ ID NO: 292390
  chr17:42298856-42299470
  hyper

SEQ ID NO: 400221 - DNA, 232 bp, Homo sapiens; identical to SEQ ID NO: 204628
  chr17:42386109-42386341
  hyper

SEQ ID NO: 400222 - DNA, 62 bp, Homo sapiens; identical to SEQ ID NO: 239182
  chr17:42422395-42422457
  hyper

SEQ ID NO: 400223 - DNA, 44 bp, Homo sapiens; identical to SEQ ID NO: 239183
  chr17:42441403-42441447
  hyper

SEQ ID NO: 400224 - DNA, 445 bp, Homo sapiens; identical to SEQ ID NO: 239185
  chr17:42633725-42634170
  hyper

SEQ ID NO: 400225 - DNA, 64 bp, Homo sapiens; identical to SEQ ID NO: 239186
  chr17:42635073-42635137
  hyper

SEQ ID NO: 400226 - DNA, 100 bp, Homo sapiens; identical to SEQ ID NO: 204635
  chr17:42635760-42635860
  hyper

SEQ ID NO: 400227 - DNA, 57 bp, Homo sapiens; identical to SEQ ID NO: 239188
  chr17:42635890-42635947
  hyper

SEQ ID NO: 400228 - DNA, 201 bp, Homo sapiens; identical to SEQ ID NO: 239190
  chr17:42766993-42767194
  hyper

SEQ ID NO: 400229 - DNA, 119 bp, Homo sapiens; identical to SEQ ID NO: 292409
  chr17:43044389-43044508
  hyper

SEQ ID NO: 400230 - DNA, 178 bp, Homo sapiens; identical to SEQ ID NO: 204640
  chr17:43239156-43239334
  hyper

SEQ ID NO: 400231 - DNA, 60 bp, Homo sapiens; identical to SEQ ID NO: 239207
  chr17:45000263-45000323
  hyper

SEQ ID NO: 400232 - DNA, 154 bp, Homo sapiens; identical to SEQ ID NO: 204647
  chr17:45056851-45057005
  hyper

SEQ ID NO: 400233 - DNA, 37 bp, Homo sapiens; identical to SEQ ID NO: 239211
  chr17:45401134-45401171
  hyper

SEQ ID NO: 400234 - DNA, 39 bp, Homo sapiens; identical to SEQ ID NO: 204651
  chr17:45609732-45609771
  hyper

SEQ ID NO: 400235 - DNA, 166 bp, Homo sapiens; identical to SEQ ID NO: 239214
  chr17:45772372-45772538
  hyper

SEQ ID NO: 400236 - DNA, 162 bp, Homo sapiens; identical to SEQ ID NO: 239218
  chr17:46048350-46048512
  hyper

SEQ ID NO: 400237 - DNA, 199 bp, Homo sapiens; identical to SEQ ID NO: 239222
  chr17:46178731-46178930
  hyper

SEQ ID NO: 400238 - DNA, 151 bp, Homo sapiens; identical to SEQ ID NO: 204668
  chr17:46689520-46689671
  hyper

SEQ ID NO: 400239 - DNA, 66 bp, Homo sapiens; identical to SEQ ID NO: 389489
  chr17:46696472-46696538
  hyper

SEQ ID NO: 400240 - DNA, 266 bp, Homo sapiens; identical to SEQ ID NO: 292462
  chr17:46696643-46696909
  hyper

SEQ ID NO: 400241 - DNA, 269 bp, Homo sapiens; identical to SEQ ID NO: 292463
  chr17:46702260-46702529
  hyper

SEQ ID NO: 400242 - DNA, 1174 bp, Homo sapiens; identical to SEQ ID NO: 204672
  chr17:46702755-46703929
  hyper

SEQ ID NO: 400243 - DNA, 109 bp, Homo sapiens; identical to SEQ ID NO: 204673
  chr17:46703959-46704068
  hyper

SEQ ID NO: 400244 - DNA, 32 bp, Homo sapiens; identical to SEQ ID NO: 292469
  chr17:46724904-46724936
  hyper

SEQ ID NO: 400245 - DNA, 85 bp, Homo sapiens; identical to SEQ ID NO: 239251
  chr17:46805459-46805544
  hyper

SEQ ID NO: 400246 - DNA, 204 bp, Homo sapiens; identical to SEQ ID NO: 204680
  chr17:46816036-46816240
  hyper

SEQ ID NO: 400247 - DNA, 43 bp, Homo sapiens; identical to SEQ ID NO: 239263
  chr17:46891977-46892020
  hyper

SEQ ID NO: 400248 - DNA, 225 bp, Homo sapiens; identical to SEQ ID NO: 239264
  chr17:46894280-46894505
  hyper

SEQ ID NO: 400249 - DNA, 199 bp, Homo sapiens; identical to SEQ ID NO: 204686
  chr17:46985398-46985597
  hyper

SEQ ID NO: 400250 - DNA, 53 bp, Homo sapiens; identical to SEQ ID NO: 292495
  chr17:47547746-47547799
  hyper

SEQ ID NO: 400251 - DNA, 154 bp, Homo sapiens; identical to SEQ ID NO: 204695
  chr17:47865600-47865754
  hyper

SEQ ID NO: 400252 - DNA, 85 bp, Homo sapiens; identical to SEQ ID NO: 384670
  chr17:47928527-47928612
  hyper

SEQ ID NO: 400253 - DNA, 173 bp, Homo sapiens; identical to SEQ ID NO: 225421
  chr17:47929093-47929266
  hyper

SEQ ID NO: 400254 - DNA, 135 bp, Homo sapiens; identical to SEQ ID NO: 292509
  chr17:48041904-48042039
  hyper

SEQ ID NO: 400255 - DNA, 94 bp, Homo sapiens; identical to SEQ ID NO: 204698
  chr17:48042984-48043078
  hyper

SEQ ID NO: 400256 - DNA, 545 bp, Homo sapiens; identical to SEQ ID NO: 292513
  chr17:48072070-48072615
  hyper

SEQ ID NO: 400257 - DNA, 243 bp, Homo sapiens; identical to SEQ ID NO: 239298
  chr17:48133662-48133905
  hyper

SEQ ID NO: 400258 - DNA, 243 bp, Homo sapiens; identical to SEQ ID NO: 239299
  chr17:48172654-48172897
  hyper

SEQ ID NO: 400259 - DNA, 202 bp, Homo sapiens; identical to SEQ ID NO: 292517
  chr17:48206096-48206298
  hyper

SEQ ID NO: 400260 - DNA, 88 bp, Homo sapiens; identical to SEQ ID NO: 292518
  chr17:48207630-48207718
  hyper

SEQ ID NO: 400261 - DNA, 100 bp, Homo sapiens; identical to SEQ ID NO: 292519
  chr17:48207748-48207848
  hyper

SEQ ID NO: 400262 - DNA, 177 bp, Homo sapiens; identical to SEQ ID NO: 204703
  chr17:48278764-48278941
  hyper

SEQ ID NO: 400263 - DNA, 39 bp, Homo sapiens; identical to SEQ ID NO: 204705
  chr17:48585621-48585660
  hyper

SEQ ID NO: 400264 - DNA, 437 bp, Homo sapiens; identical to SEQ ID NO: 292527
  chr17:48637269-48637706
  hyper

SEQ ID NO: 400265 - DNA, 96 bp, Homo sapiens; identical to SEQ ID NO: 292528
  chr17:48637777-48637873
  hyper

SEQ ID NO: 400266 - DNA, 138 bp, Homo sapiens; identical to SEQ ID NO: 239311
  chr17:48638580-48638718
  hyper

SEQ ID NO: 400267 - DNA, 104 bp, Homo sapiens; identical to SEQ ID NO: 239314
  chr17:48785241-48785345
  hyper

SEQ ID NO: 400268 - DNA, 45 bp, Homo sapiens; identical to SEQ ID NO: 239315
  chr17:48796758-48796803
  hyper

SEQ ID NO: 400269 - DNA, 37 bp, Homo sapiens; identical to SEQ ID NO: 204709
  chr17:48997201-48997238
  hyper

SEQ ID NO: 400270 - DNA, 87 bp, Homo sapiens
  chr17:49022343-49022430
  hyper
gtgtctgcccaaaggggtgccctctcccaagccagtgggggccagccagccctggttggggcagcacctgcacaggtggtcccagaa

SEQ ID NO: 400271 - DNA, 115 bp, Homo sapiens; identical to SEQ ID NO: 204711
  chr17:49028000-49028115
  hyper

SEQ ID NO: 400272 - DNA, 188 bp, Homo sapiens; identical to SEQ ID NO: 292542
  chr17:49337243-49337431
  hyper

SEQ ID NO: 400273 - DNA, 39 bp, Homo sapiens; identical to SEQ ID NO: 239328
  chr17:54670214-54670253
  hyper

SEQ ID NO: 400274 - DNA, 169 bp, Homo sapiens; identical to SEQ ID NO: 239333
  chr17:54857395-54857564
  hyper

SEQ ID NO: 400275 - DNA, 84 bp, Homo sapiens; identical to SEQ ID NO: 239334
  chr17:54857791-54857875
  hyper

SEQ ID NO: 400276 - DNA, 130 bp, Homo sapiens; identical to SEQ ID NO: 239337
  chr17:55055244-55055374
  hyper

SEQ ID NO: 400277 - DNA, 50 bp, Homo sapiens; identical to SEQ ID NO: 239338
  chr17:55162841-55162891
  hyper

SEQ ID NO: 400278 - DNA, 119 bp, Homo sapiens; identical to SEQ ID NO: 239340
  chr17:55927364-55927483
  hyper

SEQ ID NO: 400279 - DNA, 420 bp, Homo sapiens; identical to SEQ ID NO: 204720
  chr17:55938684-55939104
  hyper

SEQ ID NO: 400280 - DNA, 462 bp, Homo sapiens; identical to SEQ ID NO: 225439
  chr17:56032083-56032545
  hyper

SEQ ID NO: 400281 - DNA, 167 bp, Homo sapiens; identical to SEQ ID NO: 239342
  chr17:56084355-56084522
  hyper

SEQ ID NO: 400282 - DNA, 75 bp, Homo sapiens; identical to SEQ ID NO: 239343
  chr17:56084800-56084875
  hyper

SEQ ID NO: 400283 - DNA, 38 bp, Homo sapiens; identical to SEQ ID NO: 292569
  chr17:56234840-56234878
  hyper

SEQ ID NO: 400284 - DNA, 107 bp, Homo sapiens; identical to SEQ ID NO: 239346
  chr17:56296749-56296856
  hyper

SEQ ID NO: 400285 - DNA, 153 bp, Homo sapiens
  chr17:56429846-56429999
  hyper
gggctgtttgatctgggctggtggccctgggcgtcggtcctgttccccgatggtaacccgaagtttgtttttttttgttttgtctccccgttttagaagcattgggggcagtgaatccactgtctccctctggattgtctctgcagagaccga

SEQ ID NO: 400286 - DNA, 469 bp, Homo sapiens; identical to SEQ ID NO: 239357
  chr17:57784633-57785102
  hyper

SEQ ID NO: 400287 - DNA, 242 bp, Homo sapiens; identical to SEQ ID NO: 204730
  chr17:58700868-58701110
  hyper

SEQ ID NO: 400288 - DNA, 125 bp, Homo sapiens; identical to SEQ ID NO: 204731
  chr17:58711213-58711338
  hyper

SEQ ID NO: 400289 - DNA, 1530 bp, Homo sapiens; identical to SEQ ID NO: 204734
  chr17:58740342-58741872
  hyper

SEQ ID NO: 400290 - DNA, 144 bp, Homo sapiens; identical to SEQ ID NO: 239368
  chr17:58754612-58754756
  hyper

SEQ ID NO: 400291 - DNA, 33 bp, Homo sapiens; identical to SEQ ID NO: 384678
  chr17:59475183-59475216
  hyper

SEQ ID NO: 400292 - DNA, 259 bp, Homo sapiens; identical to SEQ ID NO: 292598
  chr17:59535267-59535526
  hyper

SEQ ID NO: 400293 - DNA, 32 bp, Homo sapiens; identical to SEQ ID NO: 239381
  chr17:59941038-59941070
  hyper

SEQ ID NO: 400294 - DNA, 192 bp, Homo sapiens; identical to SEQ ID NO: 292604
  chr17:60781450-60781642
  hyper

SEQ ID NO: 400295 - DNA, 54 bp, Homo sapiens; identical to SEQ ID NO: 239385
  chr17:61043210-61043264
  hyper

SEQ ID NO: 400296 - DNA, 224 bp, Homo sapiens; identical to SEQ ID NO: 239396
  chr17:61920536-61920760
  hyper

SEQ ID NO: 400297 - DNA, 178 bp, Homo sapiens; identical to SEQ ID NO: 239397
  chr17:61921000-61921178
  hyper

SEQ ID NO: 400298 - DNA, 164 bp, Homo sapiens; identical to SEQ ID NO: 239399
  chr17:62075060-62075224
  hyper

SEQ ID NO: 400299 - DNA, 62 bp, Homo sapiens; identical to SEQ ID NO: 204753
  chr17:62915906-62915968
  hyper

SEQ ID NO: 400300 - DNA, 75 bp, Homo sapiens; identical to SEQ ID NO: 239404
  chr17:62971851-62971926
  hyper

SEQ ID NO: 400301 - DNA, 366 bp, Homo sapiens; identical to SEQ ID NO: 389519
  chr17:63556529-63556895
  hyper

SEQ ID NO: 400302 - DNA, 114 bp, Homo sapiens; identical to SEQ ID NO: 239406
  chr17:63557135-63557249
  hyper

SEQ ID NO: 400303 - DNA, 173 bp, Homo sapiens; identical to SEQ ID NO: 225472
  chr17:64298539-64298712
  hyper

SEQ ID NO: 400304 - DNA, 165 bp, Homo sapiens; identical to SEQ ID NO: 239411
  chr17:65713844-65714009
  hyper

SEQ ID NO: 400305 - DNA, 104 bp, Homo sapiens; identical to SEQ ID NO: 292646
  chr17:67410686-67410790
  hyper

SEQ ID NO: 400306 - DNA, 404 bp, Homo sapiens; identical to SEQ ID NO: 239418
  chr17:70115369-70115773
  hyper

SEQ ID NO: 400307 - DNA, 79 bp, Homo sapiens; identical to SEQ ID NO: 239420
  chr17:70116991-70117070
  hyper

SEQ ID NO: 400308 - DNA, 51 bp, Homo sapiens; identical to SEQ ID NO: 204765
  chr17:70270193-70270244
  hyper

SEQ ID NO: 400309 - DNA, 271 bp, Homo sapiens; identical to SEQ ID NO: 292656
  chr17:70587739-70588010
  hyper

SEQ ID NO: 400310 - DNA, 41 bp, Homo sapiens; identical to SEQ ID NO: 384684
  chr17:70588131-70588172
  hyper

SEQ ID NO: 400311 - DNA, 43 bp, Homo sapiens; identical to SEQ ID NO: 239425
  chr17:71128278-71128321
  hyper

SEQ ID NO: 400312 - DNA, 253 bp, Homo sapiens; identical to SEQ ID NO: 239430
  chr17:71228588-71228841
  hyper

SEQ ID NO: 400313 - DNA, 114 bp, Homo sapiens; identical to SEQ ID NO: 239438
  chr17:72199626-72199740
  hyper

SEQ ID NO: 400314 - DNA, 449 bp, Homo sapiens; identical to SEQ ID NO: 389524
  chr17:72208668-72209117
  hyper

SEQ ID NO: 400315 - DNA, 51 bp, Homo sapiens; identical to SEQ ID NO: 239440
  chr17:72209566-72209617
  hyper

SEQ ID NO: 400316 - DNA, 532 bp, Homo sapiens; identical to SEQ ID NO: 239449
  chr17:72733408-72733940
  hyper

SEQ ID NO: 400317 - DNA, 227 bp, Homo sapiens
  chr17:72856714-72856941
  hyper
gaagcccccagagaccggcgcaggcggctggtgcgcagccagggcccagcgccaggtcttgctcgcccagtgccctctctgcctacccttccctttgcgctctggaagcccgggagccgggcacgggccagcatctgcaagatgccactactctggaagcccactccgattctcccaggtcgcaggaaggagagagctaggctggggcaaaggagatggggcagagc

SEQ ID NO: 400318 - DNA, 183 bp, Homo sapiens; identical to SEQ ID NO: 239456
  chr17:72968521-72968704
  hyper

SEQ ID NO: 400319 - DNA, 127 bp, Homo sapiens; identical to SEQ ID NO: 204782
  chr17:72968954-72969081
  hyper

SEQ ID NO: 400320 - DNA, 116 bp, Homo sapiens; identical to SEQ ID NO: 54574
  chr17:73008759-73008875
  hyper

SEQ ID NO: 400321 - DNA, 99 bp, Homo sapiens; identical to SEQ ID NO: 239460
  chr17:73009128-73009227
  hyper

SEQ ID NO: 400322 - DNA, 82 bp, Homo sapiens; identical to SEQ ID NO: 239464
  chr17:73105914-73105996
  hyper

SEQ ID NO: 400323 - DNA, 232 bp, Homo sapiens; identical to SEQ ID NO: 239465
  chr17:73127281-73127513
  hyper

SEQ ID NO: 400324 - DNA, 252 bp, Homo sapiens; identical to SEQ ID NO: 239466
  chr17:73127892-73128144
  hyper

SEQ ID NO: 400325 - DNA, 248 bp, Homo sapiens; identical to SEQ ID NO: 239467
  chr17:73150719-73150967
  hyper

SEQ ID NO: 400326 - DNA, 296 bp, Homo sapiens; identical to SEQ ID NO: 239469
  chr17:73257643-73257939
  hyper

SEQ ID NO: 400327 - DNA, 33 bp, Homo sapiens; identical to SEQ ID NO: 204792
  chr17:73521010-73521043
  hyper

SEQ ID NO: 400328 - DNA, 98 bp, Homo sapiens; identical to SEQ ID NO: 239473
  chr17:73522040-73522138
  hyper

SEQ ID NO: 400329 - DNA, 245 bp, Homo sapiens; identical to SEQ ID NO: 239475
  chr17:73663127-73663372
  hyper

SEQ ID NO: 400330 - DNA, 121 bp, Homo sapiens; identical to SEQ ID NO: 204796
  chr17:73781201-73781322
  hyper

SEQ ID NO: 400331 - DNA, 45 bp, Homo sapiens; identical to SEQ ID NO: 225503
  chr17:73874667-73874712
  hyper

SEQ ID NO: 400332 - DNA, 38 bp, Homo sapiens; identical to SEQ ID NO: 239479
  chr17:73937163-73937201
  hyper

SEQ ID NO: 400333 - DNA, 56 bp, Homo sapiens; identical to SEQ ID NO: 204797
  chr17:73993576-73993632
  hyper

SEQ ID NO: 400334 - DNA, 162 bp, Homo sapiens; identical to SEQ ID NO: 239481
  chr17:74068653-74068815
  hyper

SEQ ID NO: 400335 - DNA, 131 bp, Homo sapiens; identical to SEQ ID NO: 204799
  chr17:74072580-74072711
  hyper

SEQ ID NO: 400336 - DNA, 150 bp, Homo sapiens; identical to SEQ ID NO: 239488
  chr17:74261114-74261264
  hyper

SEQ ID NO: 400337 - DNA, 172 bp, Homo sapiens; identical to SEQ ID NO: 239490
  chr17:74379765-74379937
  hyper

SEQ ID NO: 400338 - DNA, 261 bp, Homo sapiens; identical to SEQ ID NO: 239492
  chr17:74381538-74381799
  hyper

SEQ ID NO: 400339 - DNA, 46 bp, Homo sapiens; identical to SEQ ID NO: 204803
  chr17:74581701-74581747
  hyper

SEQ ID NO: 400340 - DNA, 77 bp, Homo sapiens; identical to SEQ ID NO: 239496
  chr17:74722035-74722112
  hyper

SEQ ID NO: 400341 - DNA, 232 bp, Homo sapiens; identical to SEQ ID NO: 204805
  chr17:74732973-74733205
  hyper

SEQ ID NO: 400342 - DNA, 189 bp, Homo sapiens; identical to SEQ ID NO: 239498
  chr17:74734106-74734295
  hyper

SEQ ID NO: 400343 - DNA, 135 bp, Homo sapiens; identical to SEQ ID NO: 292748
  chr17:75953609-75953744
  hyper

SEQ ID NO: 400344 - DNA, 471 bp, Homo sapiens; identical to SEQ ID NO: 204812
  chr17:75953982-75954453
  hyper

SEQ ID NO: 400345 - DNA, 157 bp, Homo sapiens; identical to SEQ ID NO: 225520
  chr17:76349231-76349388
  hyper

SEQ ID NO: 400346 - DNA, 57 bp, Homo sapiens; identical to SEQ ID NO: 239514
  chr17:76374528-76374585
  hyper

SEQ ID NO: 400347 - DNA, 274 bp, Homo sapiens; identical to SEQ ID NO: 204816
  chr17:76921081-76921355
  hyper

SEQ ID NO: 400348 - DNA, 130 bp, Homo sapiens; identical to SEQ ID NO: 54663
  chr17:76921422-76921552
  hyper

SEQ ID NO: 400349 - DNA, 104 bp, Homo sapiens; identical to SEQ ID NO: 54664
  chr17:76921859-76921963
  hyper

SEQ ID NO: 400350 - DNA, 120 bp, Homo sapiens; identical to SEQ ID NO: 239518
  chr17:76967524-76967644
  hyper

SEQ ID NO: 400351 - DNA, 80 bp, Homo sapiens; identical to SEQ ID NO: 225522
  chr17:77070949-77071029
  hyper

SEQ ID NO: 400352 - DNA, 188 bp, Homo sapiens; identical to SEQ ID NO: 239526
  chr17:77770287-77770475
  hyper

SEQ ID NO: 400353 - DNA, 174 bp, Homo sapiens; identical to SEQ ID NO: 204822
  chr17:77771456-77771630
  hyper

SEQ ID NO: 400354 - DNA, 386 bp, Homo sapiens; identical to SEQ ID NO: 225527
  chr17:77774854-77775240
  hyper

SEQ ID NO: 400355 - DNA, 125 bp, Homo sapiens; identical to SEQ ID NO: 239534
  chr17:77813857-77813982
  hyper

SEQ ID NO: 400356 - DNA, 417 bp, Homo sapiens; identical to SEQ ID NO: 239536
  chr17:77816435-77816852
  hyper

SEQ ID NO: 400357 - DNA, 100 bp, Homo sapiens; identical to SEQ ID NO: 204832
  chr17:78009418-78009518
  hyper

SEQ ID NO: 400358 - DNA, 474 bp, Homo sapiens
  chr17:78010029-78010503
  hyper
gtaggacccctggagaagggcaccggagccccctagggcaggagatggaaaagcgctcgccatgcgcggggtccccggcccccggtgcccccagcccgcctgccattcccgggcgcttagcagtccggggtccccaggtgcccggcaggtcccttcgggacctcgagccgcccgctgggcacacgctgacgccgctgtcgctttacagaaattgagcgcagccgaggcgggacccgggcgcagagagcgataaaggaaaagcatggtcgtgctctaatcattacagtctaagggacgacacgtcgagacggcgcgcgcctctgcgtgcgtggagatggcacaaaggccgcgccgcccccggcggcccccgccctcgcagcgcgcgtggtcccggcccggccggatgttgacagcgtcgcctagcaacgggaaatggcggaaccgggcggcgcggcgggccggtaagccgggccg

SEQ ID NO: 400359 - DNA, 53 bp, Homo sapiens; identical to SEQ ID NO: 204834
  chr17:78010812-78010865
  hyper

SEQ ID NO: 400360 - DNA, 52 bp, Homo sapiens; identical to SEQ ID NO: 292794
  chr17:78011046-78011098
  hyper

SEQ ID NO: 400361 - DNA, 136 bp, Homo sapiens; identical to SEQ ID NO: 225537
  chr17:78388546-78388682
  hyper

SEQ ID NO: 400362 - DNA, 90 bp, Homo sapiens; identical to SEQ ID NO: 225538
  chr17:78389461-78389551
  hyper

SEQ ID NO: 400363 - DNA, 496 bp, Homo sapiens; identical to SEQ ID NO: 292798
  chr17:78428377-78428873
  hyper

SEQ ID NO: 400364 - DNA, 54 bp, Homo sapiens
  chr17:78450959-78451013
  hyper
cgtgtgctattgagaagccgccgggcagcctgggtacagggacttcccacgggt

SEQ ID NO: 400365 - DNA, 180 bp, Homo sapiens; identical to SEQ ID NO: 204843
  chr17:79319124-79319304
  hyper

SEQ ID NO: 400366 - DNA, 71 bp, Homo sapiens; identical to SEQ ID NO: 129557
  chr17:79650872-79650943
  hyper

SEQ ID NO: 400367 - DNA, 82 bp, Homo sapiens; identical to SEQ ID NO: 292813
  chr17:79762672-79762754
  hyper

SEQ ID NO: 400368 - DNA, 42 bp, Homo sapiens; identical to SEQ ID NO: 239559
  chr17:79849415-79849457
  hyper

SEQ ID NO: 400369 - DNA, 47 bp, Homo sapiens; identical to SEQ ID NO: 239560
  chr17:79884793-79884840
  hyper

SEQ ID NO: 400370 - DNA, 187 bp, Homo sapiens; identical to SEQ ID NO: 204844
  chr17:79885890-79886077
  hyper

SEQ ID NO: 400371 - DNA, 36 bp, Homo sapiens; identical to SEQ ID NO: 239564
  chr17:79981250-79981286
  hyper

SEQ ID NO: 400372 - DNA, 40 bp, Homo sapiens; identical to SEQ ID NO: 204847
  chr17:79989900-79989940
  hyper

SEQ ID NO: 400373 - DNA, 174 bp, Homo sapiens; identical to SEQ ID NO: 239567
  chr17:80291220-80291394
  hyper

SEQ ID NO: 400374 - DNA, 62 bp, Homo sapiens; identical to SEQ ID NO: 292833
  chr17:80291597-80291659
  hyper

SEQ ID NO: 400375 - DNA, 246 bp, Homo sapiens; identical to SEQ ID NO: 292834
  chr17:80291702-80291948
  hyper

SEQ ID NO: 400376 - DNA, 202 bp, Homo sapiens
  chr17:80656845-80657047
  hyper
ggggtgggggcgatcagggggtggggccgggtgtttacactctcgcgtgcgcccgtgagcgccacgaactcgctcccacggtcgtcgggtctgcacgccccgagtcgggaggggcgaggggcggtgcagggtcccagcgtggggcctccccacctgcccaccagggagacctcgggtgcctggccgggtggggctcggggtc

SEQ ID NO: 400377 - DNA, 100 bp, Homo sapiens; identical to SEQ ID NO: 204851
  chr17:80657094-80657194
  hyper

SEQ ID NO: 400378 - DNA, 82 bp, Homo sapiens; identical to SEQ ID NO: 239579
  chr18:268117-268199
  hyper

SEQ ID NO: 400379 - DNA, 53 bp, Homo sapiens; identical to SEQ ID NO: 292849
  chr18:499314-499367
  hyper

SEQ ID NO: 400380 - DNA, 46 bp, Homo sapiens; identical to SEQ ID NO: 292850
  chr18:499482-499528
  hyper

SEQ ID NO: 400381 - DNA, 246 bp, Homo sapiens
  chr18:499558-499804
  hyper
tttcgcacccacgcagggctgtgttatcctagcacagaaccagcaactctcacacgaagccttgtgtaaacaccacgcgggcccattcctgaacgactctttgatgcctccgctgcggttacttatctcatacataaatcaggattccgctgacaaatctccgtgtttccactaaacagaaggctgccctgcagtccttctcgtgcttctttctaaagtacgataacatctgacacttccataaac

SEQ ID NO: 400382 - DNA, 31 bp, Homo sapiens; identical to SEQ ID NO: 239582
  chr18:658431-658462
  hyper

SEQ ID NO: 400383 - DNA, 265 bp, Homo sapiens
  chr18:906932-907197
  hyper
aaacaccctggtttcaccctcagctattttcaagttcccgtgtgcctggcactttctccgtgcgagaagcaccggagggtgcggacgcgccacagtctgagccgccgccgaactggctaagtttaggggcatttattattcatgttcctgccagatcctcgcctgcccaaaatagaaaccgaggttctccgtgacctacatctgctcggagaagggctcccctgggctcggaggctggggtgggggtggctgaggagttggcccc

SEQ ID NO: 400384 - DNA, 285 bp, Homo sapiens; identical to SEQ ID NO: 292858
  chr18:2571378-2571663
  hyper

SEQ ID NO: 400385 - DNA, 136 bp, Homo sapiens; identical to SEQ ID NO: 204861
  chr18:2907034-2907170
  hyper

SEQ ID NO: 400386 - DNA, 419 bp, Homo sapiens; identical to SEQ ID NO: 239592
  chr18:3246159-3246578
  hyper

SEQ ID NO: 400387 - DNA, 59 bp, Homo sapiens; identical to SEQ ID NO: 204864
  chr18:3262505-3262564
  hyper

SEQ ID NO: 400388 - DNA, 631 bp, Homo sapiens; identical to SEQ ID NO: 204865
  chr18:3447898-3448529
  hyper

SEQ ID NO: 400389 - DNA, 90 bp, Homo sapiens; identical to SEQ ID NO: 292875
  chr18:4455561-4455651
  hyper

SEQ ID NO: 400390 - DNA, 47 bp, Homo sapiens; identical to SEQ ID NO: 292876
  chr18:4455681-4455728
  hyper

SEQ ID NO: 400391 - DNA, 48 bp, Homo sapiens; identical to SEQ ID NO: 292882
  chr18:6414079-6414127
  hyper

SEQ ID NO: 400392 - DNA, 41 bp, Homo sapiens; identical to SEQ ID NO: 292888
  chr18:7116449-7116490
  hyper

SEQ ID NO: 400393 - DNA, 134 bp, Homo sapiens; identical to SEQ ID NO: 204879
  chr18:7116637-7116771
  hyper

SEQ ID NO: 400394 - DNA, 200 bp, Homo sapiens; identical to SEQ ID NO: 292896
  chr18:8367259-8367459
  hyper

SEQ ID NO: 400395 - DNA, 100 bp, Homo sapiens; identical to SEQ ID NO: 204889
  chr18:9913711-9913811
  hyper

SEQ ID NO: 400396 - DNA, 95 bp, Homo sapiens; identical to SEQ ID NO: 292908
  chr18:10032590-10032685
  hyper

SEQ ID NO: 400397 - DNA, 36 bp, Homo sapiens; identical to SEQ ID NO: 129750
  chr18:10032841-10032877
  hyper

SEQ ID NO: 400398 - DNA, 68 bp, Homo sapiens; identical to SEQ ID NO: 239634
  chr18:10525828-10525896
  hyper

SEQ ID NO: 400399 - DNA, 123 bp, Homo sapiens; identical to SEQ ID NO: 292914
  chr18:11689067-11689190
  hyper

SEQ ID NO: 400400 - DNA, 575 bp, Homo sapiens; identical to SEQ ID NO: 292915
  chr18:11689220-11689795
  hyper

SEQ ID NO: 400401 - DNA, 269 bp, Homo sapiens; identical to SEQ ID NO: 292916
  chr18:11689834-11690103
  hyper

SEQ ID NO: 400402 - DNA, 681 bp, Homo sapiens; identical to SEQ ID NO: 384702
  chr18:12308216-12308897
  hyper

SEQ ID NO: 400403 - DNA, 125 bp, Homo sapiens; identical to SEQ ID NO: 384703
  chr18:12308927-12309052
  hyper

SEQ ID NO: 400404 - DNA, 32 bp, Homo sapiens; identical to SEQ ID NO: 239657
  chr18:19321116-19321148
  hyper

SEQ ID NO: 400405 - DNA, 112 bp, Homo sapiens; identical to SEQ ID NO: 292942
  chr18:19745613-19745725
  hyper

SEQ ID NO: 400406 - DNA, 383 bp, Homo sapiens; identical to SEQ ID NO: 239668
  chr18:21033058-21033441
  hyper

SEQ ID NO: 400407 - DNA, 175 bp, Homo sapiens; identical to SEQ ID NO: 239669
  chr18:21083481-21083656
  hyper

SEQ ID NO: 400408 - DNA, 389 bp, Homo sapiens; identical to SEQ ID NO: 389559
  chr18:21242427-21242816
  hyper

SEQ ID NO: 400409 - DNA, 138 bp, Homo sapiens; identical to SEQ ID NO: 204920
  chr18:21242871-21243009
  hyper

SEQ ID NO: 400410 - DNA, 211 bp, Homo sapiens; identical to SEQ ID NO: 239673
  chr18:21594007-21594218
  hyper

SEQ ID NO: 400411 - DNA, 325 bp, Homo sapiens; identical to SEQ ID NO: 292972
  chr18:21977677-21978002
  hyper

SEQ ID NO: 400412 - DNA, 90 bp, Homo sapiens; identical to SEQ ID NO: 292973
  chr18:21978034-21978124
  hyper

SEQ ID NO: 400413 - DNA, 247 bp, Homo sapiens; identical to SEQ ID NO: 204927
  chr18:22006301-22006548
  hyper

SEQ ID NO: 400414 - DNA, 102 bp, Homo sapiens; identical to SEQ ID NO: 292975
  chr18:22006775-22006877
  hyper

SEQ ID NO: 400415 - DNA, 105 bp, Homo sapiens; identical to SEQ ID NO: 225614
  chr18:22653839-22653944
  hyper

SEQ ID NO: 400416 - DNA, 39 bp, Homo sapiens; identical to SEQ ID NO: 239680
  chr18:22932062-22932101
  hyper

SEQ ID NO: 400417 - DNA, 268 bp, Homo sapiens; identical to SEQ ID NO: 239685
  chr18:24129548-24129816
  hyper

SEQ ID NO: 400418 - DNA, 59 bp, Homo sapiens; identical to SEQ ID NO: 239689
  chr18:24236254-24236313
  hyper

SEQ ID NO: 400419 - DNA, 124 bp, Homo sapiens; identical to SEQ ID NO: 292991
  chr18:28622874-28622998
  hyper

SEQ ID NO: 400420 - DNA, 177 bp, Homo sapiens; identical to SEQ ID NO: 292992
  chr18:28680887-28681064
  hyper

SEQ ID NO: 400421 - DNA, 781 bp, Homo sapiens; identical to SEQ ID NO: 204934
  chr18:28681213-28681994
  hyper

SEQ ID NO: 400422 - DNA, 217 bp, Homo sapiens; identical to SEQ ID NO: 204935
  chr18:28682029-28682246
  hyper

SEQ ID NO: 400423 - DNA, 73 bp, Homo sapiens; identical to SEQ ID NO: 54990
  chr18:28682286-28682359
  hyper

SEQ ID NO: 400424 - DNA, 36 bp, Homo sapiens; identical to SEQ ID NO: 204939
  chr18:29265160-29265196
  hyper

SEQ ID NO: 400425 - DNA, 211 bp, Homo sapiens; identical to SEQ ID NO: 239697
  chr18:29599218-29599429
  hyper

SEQ ID NO: 400426 - DNA, 1425 bp, Homo sapiens; identical to SEQ ID NO: 293003
  chr18:30050221-30051646
  hyper

SEQ ID NO: 400427 - DNA, 263 bp, Homo sapiens; identical to SEQ ID NO: 293007
  chr18:30352257-30352520
  hyper

SEQ ID NO: 400428 - DNA, 178 bp, Homo sapiens; identical to SEQ ID NO: 55008
  chr18:31803673-31803851
  hyper

SEQ ID NO: 400429 - DNA, 78 bp, Homo sapiens; identical to SEQ ID NO: 239714
  chr18:33530497-33530575
  hyper

SEQ ID NO: 400430 - DNA, 40 bp, Homo sapiens; identical to SEQ ID NO: 239715
  chr18:33709430-33709470
  hyper

SEQ ID NO: 400431 - DNA, 240 bp, Homo sapiens; identical to SEQ ID NO: 225630
  chr18:33766971-33767211
  hyper

SEQ ID NO: 400432 - DNA, 52 bp, Homo sapiens; identical to SEQ ID NO: 293038
  chr18:35104466-35104518
  hyper

SEQ ID NO: 400433 - DNA, 68 bp, Homo sapiens; identical to SEQ ID NO: 204963
  chr18:39172188-39172256
  hyper

SEQ ID NO: 400434 - DNA, 67 bp, Homo sapiens; identical to SEQ ID NO: 204969
  chr18:42531892-42531959
  hyper

SEQ ID NO: 400435 - DNA, 198 bp, Homo sapiens; identical to SEQ ID NO: 239736
  chr18:43678499-43678697
  hyper

SEQ ID NO: 400436 - DNA, 36 bp, Homo sapiens; identical to SEQ ID NO: 239737
  chr18:43753517-43753553
  hyper

SEQ ID NO: 400437 - DNA, 53 bp, Homo sapiens; identical to SEQ ID NO: 293057
  chr18:44676978-44677031
  hyper

SEQ ID NO: 400438 - DNA, 196 bp, Homo sapiens; identical to SEQ ID NO: 129980
  chr18:44677055-44677251
  hyper

SEQ ID NO: 400439 - DNA, 241 bp, Homo sapiens; identical to SEQ ID NO: 239747
  chr18:44702531-44702772
  hyper

SEQ ID NO: 400440 - DNA, 76 bp, Homo sapiens; identical to SEQ ID NO: 293066
  chr18:44790495-44790571
  hyper

SEQ ID NO: 400441 - DNA, 273 bp, Homo sapiens; identical to SEQ ID NO: 204981
  chr18:46065116-46065389
  hyper

SEQ ID NO: 400442 - DNA, 179 bp, Homo sapiens; identical to SEQ ID NO: 239766
  chr18:46065664-46065843
  hyper

SEQ ID NO: 400443 - DNA, 671 bp, Homo sapiens; identical to SEQ ID NO: 239767
  chr18:46066503-46067174
  hyper

SEQ ID NO: 400444 - DNA, 104 bp, Homo sapiens; identical to SEQ ID NO: 204986
  chr18:46501913-46502017
  hyper

SEQ ID NO: 400445 - DNA, 296 bp, Homo sapiens; identical to SEQ ID NO: 239777
  chr18:48723995-48724291
  hyper

SEQ ID NO: 400446 - DNA, 70 bp, Homo sapiens; identical to SEQ ID NO: 204995
  chr18:49866290-49866360
  hyper

SEQ ID NO: 400447 - DNA, 426 bp, Homo sapiens; identical to SEQ ID NO: 293098
  chr18:49866421-49866847
  hyper

SEQ ID NO: 400448 - DNA, 79 bp, Homo sapiens; identical to SEQ ID NO: 239781
  chr18:51795698-51795777
  hyper

SEQ ID NO: 400449 - DNA, 40 bp, Homo sapiens; identical to SEQ ID NO: 205004
  chr18:53257761-53257801
  hyper

SEQ ID NO: 400450 - DNA, 65 bp, Homo sapiens; identical to SEQ ID NO: 239797
  chr18:55289330-55289395
  hyper

SEQ ID NO: 400451 - DNA, 245 bp, Homo sapiens; identical to SEQ ID NO: 239800
  chr18:55710765-55711010
  hyper

SEQ ID NO: 400452 - DNA, 235 bp, Homo sapiens; identical to SEQ ID NO: 239801
  chr18:56807204-56807439
  hyper

SEQ ID NO: 400453 - DNA, 45 bp, Homo sapiens; identical to SEQ ID NO: 205016
  chr18:56887424-56887469
  hyper

SEQ ID NO: 400454 - DNA, 202 bp, Homo sapiens; identical to SEQ ID NO: 205017
  chr18:56887502-56887704
  hyper

SEQ ID NO: 400455 - DNA, 80 bp, Homo sapiens; identical to SEQ ID NO: 293134
  chr18:56934820-56934900
  hyper

SEQ ID NO: 400456 - DNA, 163 bp, Homo sapiens; identical to SEQ ID NO: 239813
  chr18:57567942-57568105
  hyper

SEQ ID NO: 400457 - DNA, 60 bp, Homo sapiens; identical to SEQ ID NO: 293143
  chr18:59000631-59000691
  hyper

SEQ ID NO: 400458 - DNA, 164 bp, Homo sapiens; identical to SEQ ID NO: 205025
  chr18:59992238-59992402
  hyper

SEQ ID NO: 400459 - DNA, 95 bp, Homo sapiens; identical to SEQ ID NO: 225665
  chr18:60191979-60192074
  hyper

SEQ ID NO: 400460 - DNA, 53 bp, Homo sapiens; identical to SEQ ID NO: 239822
  chr18:60382505-60382558
  hyper

SEQ ID NO: 400461 - DNA, 1435 bp, Homo sapiens; identical to SEQ ID NO: 205030
  chr18:60382939-60384374
  hyper

SEQ ID NO: 400462 - DNA, 150 bp, Homo sapiens; identical to SEQ ID NO: 239823
  chr18:60805530-60805680
  hyper

SEQ ID NO: 400463 - DNA, 84 bp, Homo sapiens; identical to SEQ ID NO: 293170
  chr18:70208929-70209013
  hyper

SEQ ID NO: 400464 - DNA, 211 bp, Homo sapiens; identical to SEQ ID NO: 239840
  chr18:71815059-71815270
  hyper

SEQ ID NO: 400465 - DNA, 442 bp, Homo sapiens; identical to SEQ ID NO: 293177
  chr18:72124285-72124727
  hyper

SEQ ID NO: 400466 - DNA, 33 bp, Homo sapiens; identical to SEQ ID NO: 239846
  chr18:72265004-72265037
  hyper

SEQ ID NO: 400467 - DNA, 219 bp, Homo sapiens; identical to SEQ ID NO: 239853
  chr18:74206708-74206927
  hyper

SEQ ID NO: 400468 - DNA, 129 bp, Homo sapiens; identical to SEQ ID NO: 205045
  chr18:74843247-74843376
  hyper

SEQ ID NO: 400469 - DNA, 356 bp, Homo sapiens; identical to SEQ ID NO: 293196
  chr18:77193428-77193784
  hyper

SEQ ID NO: 400470 - DNA, 158 bp, Homo sapiens; identical to SEQ ID NO: 205049
  chr18:77710773-77710931
  hyper

SEQ ID NO: 400471 - DNA, 135 bp, Homo sapiens; identical to SEQ ID NO: 225693
  chr18:77794468-77794603
  hyper

SEQ ID NO: 400472 - DNA, 78 bp, Homo sapiens; identical to SEQ ID NO: 293210
  chr19:294976-295054
  hyper

SEQ ID NO: 400473 - DNA, 102 bp, Homo sapiens; identical to SEQ ID NO: 130225
  chr19:384078-384180
  hyper

SEQ ID NO: 400474 - DNA, 41 bp, Homo sapiens; identical to SEQ ID NO: 205062
  chr19:507106-507147
  hyper

SEQ ID NO: 400475 - DNA, 159 bp, Homo sapiens; identical to SEQ ID NO: 239877
  chr19:633641-633800
  hyper

SEQ ID NO: 400476 - DNA, 88 bp, Homo sapiens; identical to SEQ ID NO: 239880
  chr19:676322-676410
  hyper

SEQ ID NO: 400477 - DNA, 132 bp, Homo sapiens; identical to SEQ ID NO: 293228
  chr19:680400-680532
  hyper

SEQ ID NO: 400478 - DNA, 83 bp, Homo sapiens; identical to SEQ ID NO: 239884
  chr19:982965-983048
  hyper

SEQ ID NO: 400479 - DNA, 31 bp, Homo sapiens; identical to SEQ ID NO: 239885
  chr19:984152-984183
  hyper

SEQ ID NO: 400480 - DNA, 36 bp, Homo sapiens; identical to SEQ ID NO: 239888
  chr19:1041004-1041040
  hyper

SEQ ID NO: 400481 - DNA, 33 bp, Homo sapiens; identical to SEQ ID NO: 225706
  chr19:1173617-1173650
  hyper

SEQ ID NO: 400482 - DNA, 195 bp, Homo sapiens; identical to SEQ ID NO: 239890
  chr19:1237439-1237634
  hyper

SEQ ID NO: 400483 - DNA, 204 bp, Homo sapiens; identical to SEQ ID NO: 239893
  chr19:1269059-1269263
  hyper

SEQ ID NO: 400484 - DNA, 47 bp, Homo sapiens; identical to SEQ ID NO: 293254
  chr19:1401653-1401700
  hyper

SEQ ID NO: 400485 - DNA, 242 bp, Homo sapiens; identical to SEQ ID NO: 205074
  chr19:1438211-1438453
  hyper

SEQ ID NO: 400486 - DNA, 126 bp, Homo sapiens; identical to SEQ ID NO: 205077
  chr19:1469945-1470071
  hyper

SEQ ID NO: 400487 - DNA, 92 bp, Homo sapiens; identical to SEQ ID NO: 55315
  chr19:1470383-1470475
  hyper

SEQ ID NO: 400488 - DNA, 202 bp, Homo sapiens; identical to SEQ ID NO: 239904
  chr19:1507917-1508119
  hyper

SEQ ID NO: 400489 - DNA, 183 bp, Homo sapiens; identical to SEQ ID NO: 205082
  chr19:1546217-1546400
  hyper

SEQ ID NO: 400490 - DNA, 375 bp, Homo sapiens; identical to SEQ ID NO: 205083
  chr19:1567149-1567524
  hyper

SEQ ID NO: 400491 - DNA, 99 bp, Homo sapiens; identical to SEQ ID NO: 205084
  chr19:1567554-1567653
  hyper

SEQ ID NO: 400492 - DNA, 89 bp, Homo sapiens; identical to SEQ ID NO: 239906
  chr19:1605604-1605693
  hyper

SEQ ID NO: 400493 - DNA, 37 bp, Homo sapiens; identical to SEQ ID NO: 239907
  chr19:1672517-1672554
  hyper

SEQ ID NO: 400494 - DNA, 149 bp, Homo sapiens; identical to SEQ ID NO: 239913
  chr19:1752192-1752341
  hyper

SEQ ID NO: 400495 - DNA, 335 bp, Homo sapiens; identical to SEQ ID NO: 293293
  chr19:1763934-1764269
  hyper

SEQ ID NO: 400496 - DNA, 295 bp, Homo sapiens; identical to SEQ ID NO: 239923
  chr19:1812452-1812747
  hyper

SEQ ID NO: 400497 - DNA, 34 bp, Homo sapiens; identical to SEQ ID NO: 239924
  chr19:1848728-1848762
  hyper

SEQ ID NO: 400498 - DNA, 170 bp, Homo sapiens; identical to SEQ ID NO: 293307
  chr19:1876315-1876485
  hyper

SEQ ID NO: 400499 - DNA, 156 bp, Homo sapiens; identical to SEQ ID NO: 130373
  chr19:1876538-1876694
  hyper

SEQ ID NO: 400500 - DNA, 206 bp, Homo sapiens; identical to SEQ ID NO: 389612
  chr19:2168903-2169109
  hyper

SEQ ID NO: 400501 - DNA, 49 bp, Homo sapiens; identical to SEQ ID NO: 239938
  chr19:2269132-2269181
  hyper

SEQ ID NO: 400502 - DNA, 120 bp, Homo sapiens; identical to SEQ ID NO: 239942
  chr19:2328966-2329086
  hyper

SEQ ID NO: 400503 - DNA, 314 bp, Homo sapiens; identical to SEQ ID NO: 239950
  chr19:2740072-2740386
  hyper

SEQ ID NO: 400504 - DNA, 438 bp, Homo sapiens
  chr19:2944614-2945052
  hyper
ccagaaactacccctcgagcccctgaccgcttttgctgtcaccccagactgcccccagccctacccctcggccgctgtgaccacgtccccggggcccaggcgctcgtcgtgcgccgccccgcgcgtccctcagctttctccggctgcgaactcgggcggaagccggttcctgccgccccacctcgccctgggcccgggctcggctcccgcccggcactcaccatgtcccgcccgctcctgggctctccagggttagcgccccgcggtccagcgaccggcgcaggtgagcacgacaggacacctgagccgctcggggtaggcggggaagcgcgcaaggcagaggggaactcggcttaccgtcctcggggtctgattggacagatctcgggaagtggagactctgattggacagtgctgtcgactccgcacccctgattg

SEQ ID NO: 400505 - DNA, 632 bp, Homo sapiens; identical to SEQ ID NO: 205109
  chr19:2950418-2951050
  hyper

SEQ ID NO: 400506 - DNA, 141 bp, Homo sapiens; identical to SEQ ID NO: 205110
  chr19:2977372-2977513
  hyper

SEQ ID NO: 400507 - DNA, 211 bp, Homo sapiens; identical to SEQ ID NO: 239958
  chr19:3036207-3036418
  hyper

SEQ ID NO: 400508 - DNA, 87 bp, Homo sapiens; identical to SEQ ID NO: 205112
  chr19:3094304-3094391
  hyper

SEQ ID NO: 400509 - DNA, 143 bp, Homo sapiens; identical to SEQ ID NO: 225731
  chr19:3094777-3094920
  hyper

SEQ ID NO: 400510 - DNA, 217 bp, Homo sapiens; identical to SEQ ID NO: 239961
  chr19:3098866-3099083
  hyper

SEQ ID NO: 400511 - DNA, 185 bp, Homo sapiens; identical to SEQ ID NO: 239962
  chr19:3275828-3276013
  hyper

SEQ ID NO: 400512 - DNA, 38 bp, Homo sapiens; identical to SEQ ID NO: 239966
  chr19:3500930-3500968
  hyper

SEQ ID NO: 400513 - DNA, 269 bp, Homo sapiens; identical to SEQ ID NO: 293353
  chr19:3585428-3585697
  hyper

SEQ ID NO: 400514 - DNA, 489 bp, Homo sapiens; identical to SEQ ID NO: 225737
  chr19:3606743-3607232
  hyper

SEQ ID NO: 400515 - DNA, 72 bp, Homo sapiens; identical to SEQ ID NO: 293357
  chr19:3671894-3671966
  hyper

SEQ ID NO: 400516 - DNA, 56 bp, Homo sapiens; identical to SEQ ID NO: 130472
  chr19:3672066-3672122
  hyper

SEQ ID NO: 400517 - DNA, 72 bp, Homo sapiens; identical to SEQ ID NO: 239970
  chr19:3700599-3700671
  hyper

SEQ ID NO: 400518 - DNA, 188 bp, Homo sapiens; identical to SEQ ID NO: 239973
  chr19:3762567-3762755
  hyper

SEQ ID NO: 400519 - DNA, 52 bp, Homo sapiens; identical to SEQ ID NO: 293364
  chr19:3801382-3801434
  hyper

SEQ ID NO: 400520 - DNA, 181 bp, Homo sapiens; identical to SEQ ID NO: 293365
  chr19:3801708-3801889
  hyper

SEQ ID NO: 400521 - DNA, 178 bp, Homo sapiens; identical to SEQ ID NO: 205118
  chr19:3970722-3970900
  hyper

SEQ ID NO: 400522 - DNA, 87 bp, Homo sapiens; identical to SEQ ID NO: 239981
  chr19:4066804-4066891
  hyper

SEQ ID NO: 400523 - DNA, 38 bp, Homo sapiens; identical to SEQ ID NO: 293379
  chr19:4246831-4246869
  hyper

SEQ ID NO: 400524 - DNA, 212 bp, Homo sapiens; identical to SEQ ID NO: 130509
  chr19:4246926-4247138
  hyper

SEQ ID NO: 400525 - DNA, 124 bp, Homo sapiens; identical to SEQ ID NO: 239984
  chr19:4278961-4279085
  hyper

SEQ ID NO: 400526 - DNA, 149 bp, Homo sapiens; identical to SEQ ID NO: 239986
  chr19:4402295-4402444
  hyper

SEQ ID NO: 400527 - DNA, 185 bp, Homo sapiens; identical to SEQ ID NO: 205128
  chr19:4471582-4471767
  hyper

SEQ ID NO: 400528 - DNA, 452 bp, Homo sapiens; identical to SEQ ID NO: 293390
  chr19:4580776-4581228
  hyper

SEQ ID NO: 400529 - DNA, 166 bp, Homo sapiens; identical to SEQ ID NO: 239991
  chr19:4636194-4636360
  hyper

SEQ ID NO: 400530 - DNA, 179 bp, Homo sapiens; identical to SEQ ID NO: 239993
  chr19:4669764-4669943
  hyper

SEQ ID NO: 400531 - DNA, 77 bp, Homo sapiens; identical to SEQ ID NO: 205131
  chr19:4769517-4769594
  hyper

SEQ ID NO: 400532 - DNA, 131 bp, Homo sapiens; identical to SEQ ID NO: 293396
  chr19:4815776-4815907
  hyper

SEQ ID NO: 400533 - DNA, 132 bp, Homo sapiens; identical to SEQ ID NO: 239999
  chr19:4867954-4868086
  hyper

SEQ ID NO: 400534 - DNA, 38 bp, Homo sapiens; identical to SEQ ID NO: 240001
  chr19:5313531-5313569
  hyper

SEQ ID NO: 400535 - DNA, 154 bp, Homo sapiens; identical to SEQ ID NO: 240012
  chr19:5892118-5892272
  hyper

SEQ ID NO: 400536 - DNA, 776 bp, Homo sapiens; identical to SEQ ID NO: 205141
  chr19:6110226-6111002
  hyper

SEQ ID NO: 400537 - DNA, 199 bp, Homo sapiens; identical to SEQ ID NO: 205142
  chr19:6464135-6464334
  hyper

SEQ ID NO: 400538 - DNA, 75 bp, Homo sapiens; identical to SEQ ID NO: 205143
  chr19:6464628-6464703
  hyper

SEQ ID NO: 400539 - DNA, 237 bp, Homo sapiens; identical to SEQ ID NO: 240022
  chr19:6737655-6737892
  hyper

SEQ ID NO: 400540 - DNA, 213 bp, Homo sapiens; identical to SEQ ID NO: 240023
  chr19:6739799-6740012
  hyper

SEQ ID NO: 400541 - DNA, 253 bp, Homo sapiens; identical to SEQ ID NO: 240026
  chr19:7069469-7069722
  hyper

SEQ ID NO: 400542 - DNA, 74 bp, Homo sapiens; identical to SEQ ID NO: 293432
  chr19:7197429-7197503
  hyper

SEQ ID NO: 400543 - DNA, 776 bp, Homo sapiens
  chr19:7293746-7294522
  hyper
tggggtcctctccccatcgcggcgctccccgcccacgcccgcgcccccagactcaccctctccggggtacaggtggcccgcggcgcccagtagcagcgcggccaccgccaccagcagcggcgcggccgccgccccccgccggcccccggtggccatggctgcgggagcgcggggtctcctcggatcagagcgcgcggcgctggcccgcgggggtcatgctccgaggcggccacccaagaggcgctgggggccgcgcgtccttctcttccacgcccgcgacccgcgggccgcagcccccctgccggggagggcccagaggcagccccgggaagggcgcgcgcggcttcgccagctacaaatactgagcggaggcccttgcggtggtggccccgaccccccggccgctgcggcccgggccccgtcccaggatctcggggcccggagctccgcgctgcgcccgggactgtctctcggctctcggccccgcgcgctctgggtcgcgatctgcgggctccgggacagagggacgcgcggaccgacggactagctgactggcgggcgggcacctgggctggcgggtggcgggcgggcggcgggagagagggctgctcgggcccgtaaacaacgcggcccgtcagctgggccccgtgcgggccgcgggaaaaggcggcgcggatctggcctaggaagggactctgcgcccgggagaggcccaggagagggagggaaagcttgcaggggagggaggtgccgcccggccccgccccgccccgccc

SEQ ID NO: 400544 - DNA, 242 bp, Homo sapiens; identical to SEQ ID NO: 293435
  chr19:7553842-7554084
  hyper

SEQ ID NO: 400545 - DNA, 172 bp, Homo sapiens; identical to SEQ ID NO: 293436
  chr19:7565792-7565964
  hyper

SEQ ID NO: 400546 - DNA, 90 bp, Homo sapiens; identical to SEQ ID NO: 293437
  chr19:7566243-7566333
  hyper

SEQ ID NO: 400547 - DNA, 186 bp, Homo sapiens; identical to SEQ ID NO: 240034
  chr19:7598773-7598959
  hyper

SEQ ID NO: 400548 - DNA, 540 bp, Homo sapiens; identical to SEQ ID NO: 225765
  chr19:7677148-7677688
  hyper

SEQ ID NO: 400549 - DNA, 314 bp, Homo sapiens; identical to SEQ ID NO: 240038
  chr19:7702164-7702478
  hyper

SEQ ID NO: 400550 - DNA, 153 bp, Homo sapiens; identical to SEQ ID NO: 240049
  chr19:7982945-7983098
  hyper

SEQ ID NO: 400551 - DNA, 170 bp, Homo sapiens; identical to SEQ ID NO: 205157
  chr19:7990126-7990296
  hyper

SEQ ID NO: 400552 - DNA, 48 bp, Homo sapiens; identical to SEQ ID NO: 205160
  chr19:8273923-8273971
  hyper

SEQ ID NO: 400553 - DNA, 182 bp, Homo sapiens; identical to SEQ ID NO: 240053
  chr19:8432388-8432570
  hyper

SEQ ID NO: 400554 - DNA, 160 bp, Homo sapiens; identical to SEQ ID NO: 293471
  chr19:9434651-9434811
  hyper

SEQ ID NO: 400555 - DNA, 237 bp, Homo sapiens; identical to SEQ ID NO: 293472
  chr19:9434969-9435206
  hyper

SEQ ID NO: 400556 - DNA, 59 bp, Homo sapiens; identical to SEQ ID NO: 240062
  chr19:9649432-9649491
  hyper

SEQ ID NO: 400557 - DNA, 123 bp, Homo sapiens; identical to SEQ ID NO: 205166
  chr19:9879601-9879724
  hyper

SEQ ID NO: 400558 - DNA, 76 bp, Homo sapiens; identical to SEQ ID NO: 205167
  chr19:10024728-10024804
  hyper

SEQ ID NO: 400559 - DNA, 50 bp, Homo sapiens; identical to SEQ ID NO: 240071
  chr19:10216840-10216890
  hyper

SEQ ID NO: 400560 - DNA, 262 bp, Homo sapiens; identical to SEQ ID NO: 225775
  chr19:10252656-10252918
  hyper

SEQ ID NO: 400561 - DNA, 166 bp, Homo sapiens; identical to SEQ ID NO: 240072
  chr19:10305760-10305926
  hyper

SEQ ID NO: 400562 - DNA, 146 bp, Homo sapiens; identical to SEQ ID NO: 240074
  chr19:10342109-10342255
  hyper

SEQ ID NO: 400563 - DNA, 184 bp, Homo sapiens; identical to SEQ ID NO: 225777
  chr19:10363159-10363343
  hyper

SEQ ID NO: 400564 - DNA, 87 bp, Homo sapiens; identical to SEQ ID NO: 240077
  chr19:10380738-10380825
  hyper

SEQ ID NO: 400565 - DNA, 316 bp, Homo sapiens; identical to SEQ ID NO: 240086
  chr19:10491159-10491475
  hyper

SEQ ID NO: 400566 - DNA, 145 bp, Homo sapiens; identical to SEQ ID NO: 225785
  chr19:10589794-10589939
  hyper

SEQ ID NO: 400567 - DNA, 251 bp, Homo sapiens; identical to SEQ ID NO: 240094
  chr19:10654404-10654655
  hyper

SEQ ID NO: 400568 - DNA, 369 bp, Homo sapiens; identical to SEQ ID NO: 240096
  chr19:10679763-10680132
  hyper

SEQ ID NO: 400569 - DNA, 537 bp, Homo sapiens; identical to SEQ ID NO: 240100
  chr19:10828651-10829188
  hyper

SEQ ID NO: 400570 - DNA, 77 bp, Homo sapiens; identical to SEQ ID NO: 240101
  chr19:10946959-10947036
  hyper

SEQ ID NO: 400571 - DNA, 139 bp, Homo sapiens; identical to SEQ ID NO: 240102
  chr19:11039290-11039429
  hyper

SEQ ID NO: 400572 - DNA, 460 bp, Homo sapiens; identical to SEQ ID NO: 205181
  chr19:11200842-11201302
  hyper

SEQ ID NO: 400573 - DNA, 266 bp, Homo sapiens; identical to SEQ ID NO: 225793
  chr19:11308102-11308368
  hyper

SEQ ID NO: 400574 - DNA, 42 bp, Homo sapiens; identical to SEQ ID NO: 225794
  chr19:11373072-11373114
  hyper

SEQ ID NO: 400575 - DNA, 512 bp, Homo sapiens; identical to SEQ ID NO: 240109
  chr19:11486038-11486550
  hyper

SEQ ID NO: 400576 - DNA, 40 bp, Homo sapiens; identical to SEQ ID NO: 293534
  chr19:11532654-11532694
  hyper

SEQ ID NO: 400577 - DNA, 179 bp, Homo sapiens; identical to SEQ ID NO: 240115
  chr19:11545952-11546131
  hyper

SEQ ID NO: 400578 - DNA, 358 bp, Homo sapiens; identical to SEQ ID NO: 240117
  chr19:11639727-11640085
  hyper

SEQ ID NO: 400579 - DNA, 223 bp, Homo sapiens; identical to SEQ ID NO: 240119
  chr19:11750896-11751119
  hyper

SEQ ID NO: 400580 - DNA, 132 bp, Homo sapiens; identical to SEQ ID NO: 240121
  chr19:11849763-11849895
  hyper

SEQ ID NO: 400581 - DNA, 91 bp, Homo sapiens
  chr19:11999391-11999482
  hyper
ggctcaagacagtttggttttattcattttagagagacaggaattgcagggaaaatcatgaattagtgcctggaaggtgtaatttccttag

SEQ ID NO: 400582 - DNA, 79 bp, Homo sapiens; identical to SEQ ID NO: 293563
  chr19:12305760-12305839
  hyper

SEQ ID NO: 400583 - DNA, 204 bp, Homo sapiens; identical to SEQ ID NO: 293574
  chr19:12605963-12606167
  hyper

SEQ ID NO: 400584 - DNA, 135 bp, Homo sapiens; identical to SEQ ID NO: 293575
  chr19:12606511-12606646
  hyper

SEQ ID NO: 400585 - DNA, 248 bp, Homo sapiens; identical to SEQ ID NO: 240140
  chr19:12662263-12662511
  hyper

SEQ ID NO: 400586 - DNA, 132 bp, Homo sapiens; identical to SEQ ID NO: 225804
  chr19:12707774-12707906
  hyper

SEQ ID NO: 400587 - DNA, 267 bp, Homo sapiens; identical to SEQ ID NO: 240144
  chr19:12777553-12777820
  hyper

SEQ ID NO: 400588 - DNA, 261 bp, Homo sapiens; identical to SEQ ID NO: 240146
  chr19:12848078-12848339
  hyper

SEQ ID NO: 400589 - DNA, 86 bp, Homo sapiens; identical to SEQ ID NO: 205211
  chr19:12885894-12885980
  hyper

SEQ ID NO: 400590 - DNA, 237 bp, Homo sapiens; identical to SEQ ID NO: 205212
  chr19:12899529-12899766
  hyper

SEQ ID NO: 400591 - DNA, 251 bp, Homo sapiens; identical to SEQ ID NO: 240150
  chr19:12902439-12902690
  hyper

SEQ ID NO: 400592 - DNA, 36 bp, Homo sapiens; identical to SEQ ID NO: 240152
  chr19:12917228-12917264
  hyper

SEQ ID NO: 400593 - DNA, 40 bp, Homo sapiens; identical to SEQ ID NO: 240160
  chr19:13002468-13002508
  hyper

SEQ ID NO: 400594 - DNA, 98 bp, Homo sapiens; identical to SEQ ID NO: 205217
  chr19:13029775-13029873
  hyper

SEQ ID NO: 400595 - DNA, 51 bp, Homo sapiens; identical to SEQ ID NO: 384755
  chr19:13030316-13030367
  hyper

SEQ ID NO: 400596 - DNA, 513 bp, Homo sapiens; identical to SEQ ID NO: 205219
  chr19:13049935-13050448
  hyper

SEQ ID NO: 400597 - DNA, 828 bp, Homo sapiens; identical to SEQ ID NO: 205220
  chr19:13050858-13051686
  hyper

SEQ ID NO: 400598 - DNA, 54 bp, Homo sapiens; identical to SEQ ID NO: 240163
  chr19:13068137-13068191
  hyper

SEQ ID NO: 400599 - DNA, 144 bp, Homo sapiens; identical to SEQ ID NO: 384757
  chr19:13106028-13106172
  hyper

SEQ ID NO: 400600 - DNA, 194 bp, Homo sapiens; identical to SEQ ID NO: 240168
  chr19:13260761-13260955
  hyper

SEQ ID NO: 400601 - DNA, 154 bp, Homo sapiens; identical to SEQ ID NO: 225818
  chr19:13264169-13264323
  hyper

SEQ ID NO: 400602 - DNA, 326 bp, Homo sapiens; identical to SEQ ID NO: 240171
  chr19:13264660-13264986
  hyper

SEQ ID NO: 400603 - DNA, 62 bp, Homo sapiens; identical to SEQ ID NO: 205232
  chr19:13274019-13274081
  hyper

SEQ ID NO: 400604 - DNA, 195 bp, Homo sapiens; identical to SEQ ID NO: 205233
  chr19:13954425-13954620
  hyper

SEQ ID NO: 400605 - DNA, 234 bp, Homo sapiens; identical to SEQ ID NO: 293630
  chr19:14089418-14089652
  hyper

SEQ ID NO: 400606 - DNA, 57 bp, Homo sapiens; identical to SEQ ID NO: 293631
  chr19:14089812-14089869
  hyper

SEQ ID NO: 400607 - DNA, 174 bp, Homo sapiens; identical to SEQ ID NO: 205236
  chr19:14202317-14202491
  hyper

SEQ ID NO: 400608 - DNA, 443 bp, Homo sapiens; identical to SEQ ID NO: 225828
  chr19:14516821-14517264
  hyper

SEQ ID NO: 400609 - DNA, 81 bp, Homo sapiens; identical to SEQ ID NO: 205237
  chr19:14583720-14583801
  hyper

SEQ ID NO: 400610 - DNA, 205 bp, Homo sapiens; identical to SEQ ID NO: 293639
  chr19:14586138-14586343
  hyper

SEQ ID NO: 400611 - DNA, 140 bp, Homo sapiens; identical to SEQ ID NO: 240189
  chr19:14682852-14682992
  hyper

SEQ ID NO: 400612 - DNA, 46 bp, Homo sapiens; identical to SEQ ID NO: 205241
  chr19:14887561-14887607
  hyper

SEQ ID NO: 400613 - DNA, 36 bp, Homo sapiens; identical to SEQ ID NO: 293646
  chr19:15091053-15091089
  hyper

SEQ ID NO: 400614 - DNA, 37 bp, Homo sapiens; identical to SEQ ID NO: 205242
  chr19:15121588-15121625
  hyper

SEQ ID NO: 400615 - DNA, 87 bp, Homo sapiens; identical to SEQ ID NO: 293653
  chr19:15479821-15479908
  hyper

SEQ ID NO: 400616 - DNA, 117 bp, Homo sapiens; identical to SEQ ID NO: 240201
  chr19:15490556-15490673
  hyper

SEQ ID NO: 400617 - DNA, 307 bp, Homo sapiens; identical to SEQ ID NO: 240202
  chr19:15529685-15529992
  hyper

SEQ ID NO: 400618 - DNA, 36 bp, Homo sapiens; identical to SEQ ID NO: 226560
  chr19:15694860-15694896
  hyper

SEQ ID NO: 400619 - DNA, 256 bp, Homo sapiens; identical to SEQ ID NO: 293662
  chr19:16222189-16222445
  hyper

SEQ ID NO: 400620 - DNA, 88 bp, Homo sapiens; identical to SEQ ID NO: 240209
  chr19:16583044-16583132
  hyper

SEQ ID NO: 400621 - DNA, 409 bp, Homo sapiens; identical to SEQ ID NO: 240210
  chr19:16606941-16607350
  hyper

SEQ ID NO: 400622 - DNA, 105 bp, Homo sapiens; identical to SEQ ID NO: 225840
  chr19:16638141-16638246
  hyper

SEQ ID NO: 400623 - DNA, 76 bp, Homo sapiens; identical to SEQ ID NO: 225842
  chr19:17137592-17137668
  hyper

SEQ ID NO: 400624 - DNA, 223 bp, Homo sapiens; identical to SEQ ID NO: 240216
  chr19:17356102-17356325
  hyper

SEQ ID NO: 400625 - DNA, 265 bp, Homo sapiens; identical to SEQ ID NO: 225844
  chr19:17357470-17357735
  hyper

SEQ ID NO: 400626 - DNA, 146 bp, Homo sapiens; identical to SEQ ID NO: 240217
  chr19:17378082-17378228
  hyper

SEQ ID NO: 400627 - DNA, 160 bp, Homo sapiens; identical to SEQ ID NO: 240224
  chr19:17581046-17581206
  hyper

SEQ ID NO: 400628 - DNA, 186 bp, Homo sapiens; identical to SEQ ID NO: 240225
  chr19:17607095-17607281
  hyper

SEQ ID NO: 400629 - DNA, 330 bp, Homo sapiens; identical to SEQ ID NO: 293692
  chr19:17799069-17799399
  hyper

SEQ ID NO: 400630 - DNA, 171 bp, Homo sapiens; identical to SEQ ID NO: 240235
  chr19:17970699-17970870
  hyper

SEQ ID NO: 400631 - DNA, 93 bp, Homo sapiens; identical to SEQ ID NO: 293696
  chr19:17982693-17982786
  hyper

SEQ ID NO: 400632 - DNA, 34 bp, Homo sapiens; identical to SEQ ID NO: 12152
  chr19:17983839-17983873
  hyper

SEQ ID NO: 400633 - DNA, 303 bp, Homo sapiens; identical to SEQ ID NO: 240238
  chr19:18043467-18043770
  hyper

SEQ ID NO: 400634 - DNA, 89 bp, Homo sapiens; identical to SEQ ID NO: 205272
  chr19:18062904-18062993
  hyper

SEQ ID NO: 400635 - DNA, 209 bp, Homo sapiens; identical to SEQ ID NO: 240251
  chr19:18335915-18336124
  hyper

SEQ ID NO: 400636 - DNA, 217 bp, Homo sapiens
  chr19:18336505-18336722
  hyper
tgcagcgcaagcagctgccgggcgcaggcgcgcgctcagcctgggactcccgaacgccctgcctcgaaaaccccctcaattcaggtcttcctccgtggacacccagagttcattgtgaggcccccagggcatctctttgctggcactgggacaggatgctggtgggagggggcaccaagggaaggagtgccccttccccctcctcccactgccagga

SEQ ID NO: 400637 - DNA, 112 bp, Homo sapiens; identical to SEQ ID NO: 240253
  chr19:18343303-18343415
  hyper

SEQ ID NO: 400638 - DNA, 199 bp, Homo sapiens; identical to SEQ ID NO: 293713
  chr19:18344017-18344216
  hyper

SEQ ID NO: 400639 - DNA, 330 bp, Homo sapiens; identical to SEQ ID NO: 205279
  chr19:18420497-18420827
  hyper

SEQ ID NO: 400640 - DNA, 40 bp, Homo sapiens; identical to SEQ ID NO: 205280
  chr19:18547990-18548030
  hyper

SEQ ID NO: 400641 - DNA, 238 bp, Homo sapiens; identical to SEQ ID NO: 240259
  chr19:18632770-18633008
  hyper

SEQ ID NO: 400642 - DNA, 150 bp, Homo sapiens; identical to SEQ ID NO: 240261
  chr19:18705872-18706022
  hyper

SEQ ID NO: 400643 - DNA, 374 bp, Homo sapiens; identical to SEQ ID NO: 240265
  chr19:18717411-18717785
  hyper

SEQ ID NO: 400644 - DNA, 111 bp, Homo sapiens; identical to SEQ ID NO: 240277
  chr19:19174943-19175054
  hyper

SEQ ID NO: 400645 - DNA, 31 bp, Homo sapiens; identical to SEQ ID NO: 240282
  chr19:19626942-19626973
  hyper

SEQ ID NO: 400646 - DNA, 84 bp, Homo sapiens; identical to SEQ ID NO: 205289
  chr19:19651027-19651111
  hyper

SEQ ID NO: 400647 - DNA, 145 bp, Homo sapiens; identical to SEQ ID NO: 205309
  chr19:20188872-20189017
  hyper

SEQ ID NO: 400648 - DNA, 52 bp, Homo sapiens
  chr19:21512074-21512126
  hyper
cagagccacagagtctgggcctctaggagcagaggacaaacagcagtgaaga

SEQ ID NO: 400649 - DNA, 170 bp, Homo sapiens; identical to SEQ ID NO: 205319
  chr19:21769119-21769289
  hyper

SEQ ID NO: 400650 - DNA, 83 bp, Homo sapiens; identical to SEQ ID NO: 293782
  chr19:21769600-21769683
  hyper

SEQ ID NO: 400651 - DNA, 99 bp, Homo sapiens; identical to SEQ ID NO: 293785
  chr19:22610387-22610486
  hyper

SEQ ID NO: 400652 - DNA, 92 bp, Homo sapiens; identical to SEQ ID NO: 293786
  chr19:22610883-22610975
  hyper

SEQ ID NO: 400653 - DNA, 185 bp, Homo sapiens; identical to SEQ ID NO: 293787
  chr19:22611005-22611190
  hyper

SEQ ID NO: 400654 - DNA, 42 bp, Homo sapiens; identical to SEQ ID NO: 131204
  chr19:22611241-22611283
  hyper

SEQ ID NO: 400655 - DNA, 117 bp, Homo sapiens; identical to SEQ ID NO: 293789
  chr19:22817085-22817202
  hyper

SEQ ID NO: 400656 - DNA, 87 bp, Homo sapiens; identical to SEQ ID NO: 205322
  chr19:23299824-23299911
  hyper

SEQ ID NO: 400657 - DNA, 40 bp, Homo sapiens
  chr19:23432793-23432833
  hyper
ctgcccagagagggctccaggtcagggcacagtcactggg

SEQ ID NO: 400658 - DNA, 221 bp, Homo sapiens; identical to SEQ ID NO: 293801
  chr19:23653859-23654080
  hyper

SEQ ID NO: 400659 - DNA, 283 bp, Homo sapiens; identical to SEQ ID NO: 205334
  chr19:23869882-23870165
  hyper

SEQ ID NO: 400660 - DNA, 75 bp, Homo sapiens; identical to SEQ ID NO: 205336
  chr19:28284060-28284135
  hyper

SEQ ID NO: 400661 - DNA, 235 bp, Homo sapiens; identical to SEQ ID NO: 240349
  chr19:30096855-30097090
  hyper

SEQ ID NO: 400662 - DNA, 33 bp, Homo sapiens; identical to SEQ ID NO: 293816
  chr19:31210819-31210852
  hyper

SEQ ID NO: 400663 - DNA, 46 bp, Homo sapiens; identical to SEQ ID NO: 293820
  chr19:32532872-32532918
  hyper

SEQ ID NO: 400664 - DNA, 41 bp, Homo sapiens; identical to SEQ ID NO: 293821
  chr19:32533002-32533043
  hyper

SEQ ID NO: 400665 - DNA, 80 bp, Homo sapiens; identical to SEQ ID NO: 240371
  chr19:33167934-33168014
  hyper

SEQ ID NO: 400666 - DNA, 39 bp, Homo sapiens; identical to SEQ ID NO: 205350
  chr19:33555231-33555270
  hyper

SEQ ID NO: 400667 - DNA, 1022 bp, Homo sapiens; identical to SEQ ID NO: 384772
  chr19:33790839-33791861
  hyper

SEQ ID NO: 400668 - DNA, 71 bp, Homo sapiens
  chr19:33794329-33794400
  hyper
gagggaggagacaaacttaactctggggccgggattccgaggcgggggccgcagccctcgaggcccgaagc

SEQ ID NO: 400669 - DNA, 112 bp, Homo sapiens; identical to SEQ ID NO: 205359
  chr19:34175322-34175434
  hyper

SEQ ID NO: 400670 - DNA, 158 bp, Homo sapiens; identical to SEQ ID NO: 225896
  chr19:34287808-34287966
  hyper

SEQ ID NO: 400671 - DNA, 82 bp, Homo sapiens
  chr19:34288005-34288087
  hyper
ttgtccctctgctgggcggcgggggctggcggcgcgggggtgcccagcacaaaggcctggtgcaagagtggggttgcccacg

SEQ ID NO: 400672 - DNA, 85 bp, Homo sapiens; identical to SEQ ID NO: 240386
  chr19:34919058-34919143
  hyper

SEQ ID NO: 400673 - DNA, 149 bp, Homo sapiens; identical to SEQ ID NO: 205364
  chr19:35168260-35168409
  hyper

SEQ ID NO: 400674 - DNA, 542 bp, Homo sapiens; identical to SEQ ID NO: 240392
  chr19:35417688-35418230
  hyper

SEQ ID NO: 400675 - DNA, 405 bp, Homo sapiens; identical to SEQ ID NO: 240404
  chr19:36164097-36164502
  hyper

SEQ ID NO: 400676 - DNA, 194 bp, Homo sapiens; identical to SEQ ID NO: 205372
  chr19:36236368-36236562
  hyper

SEQ ID NO: 400677 - DNA, 197 bp, Homo sapiens; identical to SEQ ID NO: 240407
  chr19:36248725-36248922
  hyper

SEQ ID NO: 400678 - DNA, 88 bp, Homo sapiens; identical to SEQ ID NO: 293875
  chr19:36360475-36360563
  hyper

SEQ ID NO: 400679 - DNA, 101 bp, Homo sapiens; identical to SEQ ID NO: 293876
  chr19:36361310-36361411
  hyper

SEQ ID NO: 400680 - DNA, 68 bp, Homo sapiens; identical to SEQ ID NO: 240419
  chr19:36427554-36427622
  hyper

SEQ ID NO: 400681 - DNA, 188 bp, Homo sapiens; identical to SEQ ID NO: 240421
  chr19:36485952-36486140
  hyper

SEQ ID NO: 400682 - DNA, 214 bp, Homo sapiens; identical to SEQ ID NO: 240423
  chr19:36705178-36705392
  hyper

SEQ ID NO: 400683 - DNA, 113 bp, Homo sapiens; identical to SEQ ID NO: 225912
  chr19:37262887-37263000
  hyper

SEQ ID NO: 400684 - DNA, 57 bp, Homo sapiens; identical to SEQ ID NO: 225920
  chr19:38398221-38398278
  hyper

SEQ ID NO: 400685 - DNA, 126 bp, Homo sapiens; identical to SEQ ID NO: 205392
  chr19:38700328-38700454
  hyper

SEQ ID NO: 400686 - DNA, 40 bp, Homo sapiens; identical to SEQ ID NO: 205393
  chr19:38700557-38700597
  hyper

SEQ ID NO: 400687 - DNA, 41 bp, Homo sapiens; identical to SEQ ID NO: 240466
  chr19:38806820-38806861
  hyper

SEQ ID NO: 400688 - DNA, 34 bp, Homo sapiens; identical to SEQ ID NO: 240467
  chr19:38852095-38852129
  hyper

SEQ ID NO: 400689 - DNA, 427 bp, Homo sapiens; identical to SEQ ID NO: 240468
  chr19:38865006-38865433
  hyper

SEQ ID NO: 400690 - DNA, 41 bp, Homo sapiens; identical to SEQ ID NO: 240470
  chr19:38878539-38878580
  hyper

SEQ ID NO: 400691 - DNA, 676 bp, Homo sapiens; identical to SEQ ID NO: 240475
  chr19:39322018-39322694
  hyper

SEQ ID NO: 400692 - DNA, 117 bp, Homo sapiens; identical to SEQ ID NO: 240486
  chr19:39818898-39819015
  hyper

SEQ ID NO: 400693 - DNA, 258 bp, Homo sapiens; identical to SEQ ID NO: 240487
  chr19:39881951-39882209
  hyper

SEQ ID NO: 400694 - DNA, 32 bp, Homo sapiens; identical to SEQ ID NO: 205407
  chr19:39898001-39898033
  hyper

SEQ ID NO: 400695 - DNA, 72 bp, Homo sapiens; identical to SEQ ID NO: 131504
  chr19:39898533-39898605
  hyper

SEQ ID NO: 400696 - DNA, 107 bp, Homo sapiens; identical to SEQ ID NO: 240489
  chr19:39902955-39903062
  hyper

SEQ ID NO: 400697 - DNA, 710 bp, Homo sapiens; identical to SEQ ID NO: 240492
  chr19:39988486-39989196
  hyper

SEQ ID NO: 400698 - DNA, 98 bp, Homo sapiens; identical to SEQ ID NO: 293965
  chr19:39992838-39992936
  hyper

SEQ ID NO: 400699 - DNA, 39 bp, Homo sapiens; identical to SEQ ID NO: 205410
  chr19:40022937-40022976
  hyper

SEQ ID NO: 400700 - DNA, 227 bp, Homo sapiens; identical to SEQ ID NO: 240499
  chr19:40336895-40337122
  hyper

SEQ ID NO: 400701 - DNA, 121 bp, Homo sapiens; identical to SEQ ID NO: 293973
  chr19:40722968-40723089
  hyper

SEQ ID NO: 400702 - DNA, 301 bp, Homo sapiens; identical to SEQ ID NO: 293974
  chr19:40723125-40723426
  hyper

SEQ ID NO: 400703 - DNA, 66 bp, Homo sapiens; identical to SEQ ID NO: 240502
  chr19:40732062-40732128
  hyper

SEQ ID NO: 400704 - DNA, 409 bp, Homo sapiens; identical to SEQ ID NO: 240503
  chr19:40791307-40791716
  hyper

SEQ ID NO: 400705 - DNA, 75 bp, Homo sapiens; identical to SEQ ID NO: 240505
  chr19:40910078-40910153
  hyper

SEQ ID NO: 400706 - DNA, 36 bp, Homo sapiens; identical to SEQ ID NO: 240517
  chr19:41082735-41082771
  hyper

SEQ ID NO: 400707 - DNA, 46 bp, Homo sapiens; identical to SEQ ID NO: 240524
  chr19:41120296-41120342
  hyper

SEQ ID NO: 400708 - DNA, 73 bp, Homo sapiens; identical to SEQ ID NO: 205430
  chr19:41222270-41222343
  hyper

SEQ ID NO: 400709 - DNA, 106 bp, Homo sapiens; identical to SEQ ID NO: 205431
  chr19:41223422-41223528
  hyper

SEQ ID NO: 400710 - DNA, 33 bp, Homo sapiens; identical to SEQ ID NO: 225936
  chr19:41304119-41304152
  hyper

SEQ ID NO: 400711 - DNA, 104 bp, Homo sapiens; identical to SEQ ID NO: 225938
  chr19:41860206-41860310
  hyper

SEQ ID NO: 400712 - DNA, 370 bp, Homo sapiens; identical to SEQ ID NO: 205446
  chr19:42680242-42680612
  hyper

SEQ ID NO: 400713 - DNA, 116 bp, Homo sapiens; identical to SEQ ID NO: 205448
  chr19:42774659-42774775
  hyper

SEQ ID NO: 400714 - DNA, 194 bp, Homo sapiens; identical to SEQ ID NO: 240553
  chr19:42806829-42807023
  hyper

SEQ ID NO: 400715 - DNA, 344 bp, Homo sapiens; identical to SEQ ID NO: 240554
  chr19:42830248-42830592
  hyper

SEQ ID NO: 400716 - DNA, 597 bp, Homo sapiens; identical to SEQ ID NO: 240555
  chr19:42901074-42901671
  hyper

SEQ ID NO: 400717 - DNA, 171 bp, Homo sapiens; identical to SEQ ID NO: 294036
  chr19:42906199-42906370
  hyper

SEQ ID NO: 400718 - DNA, 359 bp, Homo sapiens; identical to SEQ ID NO: 240560
  chr19:44008462-44008821
  hyper

SEQ ID NO: 400719 - DNA, 272 bp, Homo sapiens; identical to SEQ ID NO: 205451
  chr19:44029739-44030011
  hyper

SEQ ID NO: 400720 - DNA, 233 bp, Homo sapiens; identical to SEQ ID NO: 240563
  chr19:44031371-44031604
  hyper

SEQ ID NO: 400721 - DNA, 222 bp, Homo sapiens; identical to SEQ ID NO: 240565
  chr19:44100424-44100646
  hyper

SEQ ID NO: 400722 - DNA, 172 bp, Homo sapiens; identical to SEQ ID NO: 240567
  chr19:44144236-44144408
  hyper

SEQ ID NO: 400723 - DNA, 362 bp, Homo sapiens; identical to SEQ ID NO: 240568
  chr19:44174057-44174419
  hyper

SEQ ID NO: 400724 - DNA, 129 bp, Homo sapiens; identical to SEQ ID NO: 240571
  chr19:44439732-44439861
  hyper

SEQ ID NO: 400725 - DNA, 212 bp, Homo sapiens; identical to SEQ ID NO: 205457
  chr19:44506686-44506898
  hyper

SEQ ID NO: 400726 - DNA, 72 bp, Homo sapiens; identical to SEQ ID NO: 205458
  chr19:44507929-44508001
  hyper

SEQ ID NO: 400727 - DNA, 250 bp, Homo sapiens; identical to SEQ ID NO: 205461
  chr19:44617149-44617399
  hyper

SEQ ID NO: 400728 - DNA, 364 bp, Homo sapiens; identical to SEQ ID NO: 240579
  chr19:44617607-44617971
  hyper

SEQ ID NO: 400729 - DNA, 195 bp, Homo sapiens; identical to SEQ ID NO: 240581
  chr19:44669064-44669259
  hyper

SEQ ID NO: 400730 - DNA, 327 bp, Homo sapiens; identical to SEQ ID NO: 240584
  chr19:44808916-44809243
  hyper

SEQ ID NO: 400731 - DNA, 60 bp, Homo sapiens; identical to SEQ ID NO: 205471
  chr19:45281278-45281338
  hyper

SEQ ID NO: 400732 - DNA, 368 bp, Homo sapiens; identical to SEQ ID NO: 294084
  chr19:45347906-45348274
  hyper

SEQ ID NO: 400733 - DNA, 55 bp, Homo sapiens; identical to SEQ ID NO: 240592
  chr19:45348808-45348863
  hyper

SEQ ID NO: 400734 - DNA, 77 bp, Homo sapiens; identical to SEQ ID NO: 294092
  chr19:45681393-45681470
  hyper

SEQ ID NO: 400735 - DNA, 62 bp, Homo sapiens; identical to SEQ ID NO: 205478
  chr19:45755078-45755140
  hyper

SEQ ID NO: 400736 - DNA, 61 bp, Homo sapiens; identical to SEQ ID NO: 240600
  chr19:45844196-45844257
  hyper

SEQ ID NO: 400737 - DNA, 465 bp, Homo sapiens; identical to SEQ ID NO: 240601
  chr19:45873582-45874047
  hyper

SEQ ID NO: 400738 - DNA, 34 bp, Homo sapiens; identical to SEQ ID NO: 240604
  chr19:45908310-45908344
  hyper

SEQ ID NO: 400739 - DNA, 38 bp, Homo sapiens; identical to SEQ ID NO: 240605
  chr19:45927243-45927281
  hyper

SEQ ID NO: 400740 - DNA, 239 bp, Homo sapiens; identical to SEQ ID NO: 205482
  chr19:46142560-46142799
  hyper

SEQ ID NO: 400741 - DNA, 33 bp, Homo sapiens; identical to SEQ ID NO: 225958
  chr19:46273813-46273846
  hyper

SEQ ID NO: 400742 - DNA, 35 bp, Homo sapiens; identical to SEQ ID NO: 240620
  chr19:46295860-46295895
  hyper

SEQ ID NO: 400743 - DNA, 55 bp, Homo sapiens; identical to SEQ ID NO: 240621
  chr19:46357489-46357544
  hyper

SEQ ID NO: 400744 - DNA, 47 bp, Homo sapiens; identical to SEQ ID NO: 240622
  chr19:46357574-46357621
  hyper

SEQ ID NO: 400745 - DNA, 222 bp, Homo sapiens; identical to SEQ ID NO: 240624
  chr19:46389400-46389622
  hyper

SEQ ID NO: 400746 - DNA, 240 bp, Homo sapiens
  chr19:46405055-46405295
  hyper
gccgtctggcgcatggggggcgccggcgctgcgggcaaagggcgcacggggctggctggggttcggggtccccccgccgccgcctctcccagaccgccgggccgagagctccttagtccccgggggcaggagtgggggcggggggcgggcgggggcgacgggcacccgggtaagtcggaagcgcctaagagtagctgacaccggctgagcgcttggctcggacttcgcgcggcgcgaagt

SEQ ID NO: 400747 - DNA, 192 bp, Homo sapiens; identical to SEQ ID NO: 240638
  chr19:46991213-46991405
  hyper

SEQ ID NO: 400748 - DNA, 364 bp, Homo sapiens; identical to SEQ ID NO: 240645
  chr19:47217682-47218046
  hyper

SEQ ID NO: 400749 - DNA, 751 bp, Homo sapiens; identical to SEQ ID NO: 294146
  chr19:47258852-47259603
  hyper

SEQ ID NO: 400750 - DNA, 117 bp, Homo sapiens; identical to SEQ ID NO: 205503
  chr19:47363286-47363403
  hyper

SEQ ID NO: 400751 - DNA, 43 bp, Homo sapiens; identical to SEQ ID NO: 205504
  chr19:47494573-47494616
  hyper

SEQ ID NO: 400752 - DNA, 69 bp, Homo sapiens; identical to SEQ ID NO: 294152
  chr19:47522920-47522989
  hyper

SEQ ID NO: 400753 - DNA, 152 bp, Homo sapiens; identical to SEQ ID NO: 225972
  chr19:47730760-47730912
  hyper

SEQ ID NO: 400754 - DNA, 216 bp, Homo sapiens; identical to SEQ ID NO: 205507
  chr19:47910163-47910379
  hyper

SEQ ID NO: 400755 - DNA, 142 bp, Homo sapiens; identical to SEQ ID NO: 294169
  chr19:47925411-47925553
  hyper

SEQ ID NO: 400756 - DNA, 41 bp, Homo sapiens; identical to SEQ ID NO: 294170
  chr19:47925592-47925633
  hyper

SEQ ID NO: 400757 - DNA, 165 bp, Homo sapiens; identical to SEQ ID NO: 294172
  chr19:47951123-47951288
  hyper

SEQ ID NO: 400758 - DNA, 175 bp, Homo sapiens; identical to SEQ ID NO: 294173
  chr19:47951318-47951493
  hyper

SEQ ID NO: 400759 - DNA, 300 bp, Homo sapiens; identical to SEQ ID NO: 240668
  chr19:48018496-48018796
  hyper

SEQ ID NO: 400760 - DNA, 141 bp, Homo sapiens; identical to SEQ ID NO: 240669
  chr19:48103693-48103834
  hyper

SEQ ID NO: 400761 - DNA, 169 bp, Homo sapiens; identical to SEQ ID NO: 205511
  chr19:48613936-48614105
  hyper

SEQ ID NO: 400762 - DNA, 105 bp, Homo sapiens; identical to SEQ ID NO: 225979
  chr19:48823631-48823736
  hyper

SEQ ID NO: 400763 - DNA, 250 bp, Homo sapiens; identical to SEQ ID NO: 294187
  chr19:48867042-48867292
  hyper

SEQ ID NO: 400764 - DNA, 142 bp, Homo sapiens; identical to SEQ ID NO: 131903
  chr19:48867354-48867496
  hyper

SEQ ID NO: 400765 - DNA, 179 bp, Homo sapiens; identical to SEQ ID NO: 240683
  chr19:48972233-48972412
  hyper

SEQ ID NO: 400766 - DNA, 183 bp, Homo sapiens; identical to SEQ ID NO: 294193
  chr19:48994398-48994581
  hyper

SEQ ID NO: 400767 - DNA, 216 bp, Homo sapiens; identical to SEQ ID NO: 205516
  chr19:49141163-49141379
  hyper

SEQ ID NO: 400768 - DNA, 97 bp, Homo sapiens; identical to SEQ ID NO: 240691
  chr19:49217819-49217916
  hyper

SEQ ID NO: 400769 - DNA, 153 bp, Homo sapiens; identical to SEQ ID NO: 205522
  chr19:49314168-49314321
  hyper

SEQ ID NO: 400770 - DNA, 210 bp, Homo sapiens; identical to SEQ ID NO: 205523
  chr19:49436772-49436982
  hyper

SEQ ID NO: 400771 - DNA, 205 bp, Homo sapiens; identical to SEQ ID NO: 240698
  chr19:49474212-49474417
  hyper

SEQ ID NO: 400772 - DNA, 170 bp, Homo sapiens; identical to SEQ ID NO: 240699
  chr19:49496546-49496716
  hyper

SEQ ID NO: 400773 - DNA, 222 bp, Homo sapiens; identical to SEQ ID NO: 240705
  chr19:49654220-49654442
  hyper

SEQ ID NO: 400774 - DNA, 108 bp, Homo sapiens; identical to SEQ ID NO: 205530
  chr19:49926734-49926842
  hyper

SEQ ID NO: 400775 - DNA, 192 bp, Homo sapiens; identical to SEQ ID NO: 240714
  chr19:49954990-49955182
  hyper

SEQ ID NO: 400776 - DNA, 82 bp, Homo sapiens; identical to SEQ ID NO: 240716
  chr19:49999403-49999485
  hyper

SEQ ID NO: 400777 - DNA, 104 bp, Homo sapiens; identical to SEQ ID NO: 240721
  chr19:50169139-50169243
  hyper

SEQ ID NO: 400778 - DNA, 194 bp, Homo sapiens; identical to SEQ ID NO: 205534
  chr19:50321281-50321475
  hyper

SEQ ID NO: 400779 - DNA, 182 bp, Homo sapiens; identical to SEQ ID NO: 294240
  chr19:50651066-50651248
  hyper

SEQ ID NO: 400780 - DNA, 190 bp, Homo sapiens; identical to SEQ ID NO: 294241
  chr19:50651358-50651548
  hyper

SEQ ID NO: 400781 - DNA, 240 bp, Homo sapiens; identical to SEQ ID NO: 205544
  chr19:50871938-50872178
  hyper

SEQ ID NO: 400782 - DNA, 32 bp, Homo sapiens; identical to SEQ ID NO: 240743
  chr19:51142309-51142341
  hyper

SEQ ID NO: 400783 - DNA, 49 bp, Homo sapiens; identical to SEQ ID NO: 294269
  chr19:51171779-51171828
  hyper

SEQ ID NO: 400784 - DNA, 42 bp, Homo sapiens; identical to SEQ ID NO: 132051
  chr19:51171949-51171991
  hyper

SEQ ID NO: 400785 - DNA, 86 bp, Homo sapiens; identical to SEQ ID NO: 294273
  chr19:51199194-51199280
  hyper

SEQ ID NO: 400786 - DNA, 31 bp, Homo sapiens; identical to SEQ ID NO: 240750
  chr19:51221589-51221620
  hyper

SEQ ID NO: 400787 - DNA, 58 bp, Homo sapiens; identical to SEQ ID NO: 240763
  chr19:51870568-51870626
  hyper

SEQ ID NO: 400788 - DNA, 164 bp, Homo sapiens; identical to SEQ ID NO: 240764
  chr19:51897346-51897510
  hyper

SEQ ID NO: 400789 - DNA, 384 bp, Homo sapiens; identical to SEQ ID NO: 294293
  chr19:52407644-52408028
  hyper

SEQ ID NO: 400790 - DNA, 144 bp, Homo sapiens; identical to SEQ ID NO: 294294
  chr19:52408242-52408386
  hyper

SEQ ID NO: 400791 - DNA, 97 bp, Homo sapiens; identical to SEQ ID NO: 294297
  chr19:52489406-52489503
  hyper

SEQ ID NO: 400792 - DNA, 177 bp, Homo sapiens; identical to SEQ ID NO: 294298
  chr19:52489533-52489710
  hyper

SEQ ID NO: 400793 - DNA, 367 bp, Homo sapiens; identical to SEQ ID NO: 294299
  chr19:52489782-52490149
  hyper

SEQ ID NO: 400794 - DNA, 92 bp, Homo sapiens; identical to SEQ ID NO: 294300
  chr19:52490237-52490329
  hyper

SEQ ID NO: 400795 - DNA, 190 bp, Homo sapiens; identical to SEQ ID NO: 240776
  chr19:52642997-52643187
  hyper

SEQ ID NO: 400796 - DNA, 58 bp, Homo sapiens; identical to SEQ ID NO: 240778
  chr19:52693145-52693203
  hyper

SEQ ID NO: 400797 - DNA, 159 bp, Homo sapiens; identical to SEQ ID NO: 240792
  chr19:53360444-53360603
  hyper

SEQ ID NO: 400798 - DNA, 135 bp, Homo sapiens; identical to SEQ ID NO: 294339
  chr19:53561218-53561353
  hyper

SEQ ID NO: 400799 - DNA, 162 bp, Homo sapiens; identical to SEQ ID NO: 205579
  chr19:53561825-53561987
  hyper

SEQ ID NO: 400800 - DNA, 64 bp, Homo sapiens; identical to SEQ ID NO: 205588
  chr19:53758247-53758311
  hyper

SEQ ID NO: 400801 - DNA, 146 bp, Homo sapiens; identical to SEQ ID NO: 294356
  chr19:53869408-53869554
  hyper

SEQ ID NO: 400802 - DNA, 127 bp, Homo sapiens; identical to SEQ ID NO: 294357
  chr19:53934757-53934884
  hyper

SEQ ID NO: 400803 - DNA, 59 bp, Homo sapiens; identical to SEQ ID NO: 205590
  chr19:54024884-54024943
  hyper

SEQ ID NO: 400804 - DNA, 45 bp, Homo sapiens; identical to SEQ ID NO: 226019
  chr19:54206968-54207013
  hyper

SEQ ID NO: 400805 - DNA, 210 bp, Homo sapiens
  chr19:54371779-54371989
  hyper
gaggggggtgttaagatccagccccgtgcttccgaagtgcagaaggagctgggaaaggaggagaagacagggctgcgtcccgcacctctgggtgccgagagccgaagctggggttccggggcccgattctcagcgtgagcgatgggtgtggcgtctggagtggacgagggaggacactgaggggctgggtgtggcccggagagtcgggtg

SEQ ID NO: 400806 - DNA, 277 bp, Homo sapiens; identical to SEQ ID NO: 294364
  chr19:54372055-54372332
  hyper

SEQ ID NO: 400807 - DNA, 224 bp, Homo sapiens; identical to SEQ ID NO: 294365
  chr19:54372400-54372624
  hyper

SEQ ID NO: 400808 - DNA, 281 bp, Homo sapiens; identical to SEQ ID NO: 294366
  chr19:54372682-54372963
  hyper

SEQ ID NO: 400809 - DNA, 325 bp, Homo sapiens; identical to SEQ ID NO: 294367
  chr19:54382389-54382714
  hyper

SEQ ID NO: 400810 - DNA, 194 bp, Homo sapiens; identical to SEQ ID NO: 294368
  chr19:54382804-54382998
  hyper

SEQ ID NO: 400811 - DNA, 96 bp, Homo sapiens; identical to SEQ ID NO: 205601
  chr19:55691680-55691776
  hyper

SEQ ID NO: 400812 - DNA, 189 bp, Homo sapiens; identical to SEQ ID NO: 240833
  chr19:55770718-55770907
  hyper

SEQ ID NO: 400813 - DNA, 249 bp, Homo sapiens; identical to SEQ ID NO: 240834
  chr19:55851026-55851275
  hyper

SEQ ID NO: 400814 - DNA, 204 bp, Homo sapiens; identical to SEQ ID NO: 240837
  chr19:55919626-55919830
  hyper

SEQ ID NO: 400815 - DNA, 82 bp, Homo sapiens; identical to SEQ ID NO: 294387
  chr19:55951859-55951941
  hyper

SEQ ID NO: 400816 - DNA, 81 bp, Homo sapiens; identical to SEQ ID NO: 294388
  chr19:55951980-55952061
  hyper

SEQ ID NO: 400817 - DNA, 256 bp, Homo sapiens; identical to SEQ ID NO: 294391
  chr19:55962684-55962940
  hyper

SEQ ID NO: 400818 - DNA, 63 bp, Homo sapiens; identical to SEQ ID NO: 294392
  chr19:55963044-55963107
  hyper

SEQ ID NO: 400819 - DNA, 36 bp, Homo sapiens; identical to SEQ ID NO: 294393
  chr19:55963296-55963332
  hyper

SEQ ID NO: 400820 - DNA, 38 bp, Homo sapiens; identical to SEQ ID NO: 240844
  chr19:55987549-55987587
  hyper

SEQ ID NO: 400821 - DNA, 276 bp, Homo sapiens; identical to SEQ ID NO: 240847
  chr19:56111238-56111514
  hyper

SEQ ID NO: 400822 - DNA, 85 bp, Homo sapiens; identical to SEQ ID NO: 240850
  chr19:56633034-56633119
  hyper

SEQ ID NO: 400823 - DNA, 102 bp, Homo sapiens; identical to SEQ ID NO: 294410
  chr19:57050186-57050288
  hyper

SEQ ID NO: 400824 - DNA, 35 bp, Homo sapiens; identical to SEQ ID NO: 294411
  chr19:57050428-57050463
  hyper

SEQ ID NO: 400825 - DNA, 141 bp, Homo sapiens; identical to SEQ ID NO: 294412
  chr19:57050493-57050634
  hyper

SEQ ID NO: 400826 - DNA, 83 bp, Homo sapiens; identical to SEQ ID NO: 205625
  chr19:57901385-57901468
  hyper

SEQ ID NO: 400827 - DNA, 459 bp, Homo sapiens; identical to SEQ ID NO: 294432
  chr19:57988571-57989030
  hyper

SEQ ID NO: 400828 - DNA, 223 bp, Homo sapiens; identical to SEQ ID NO: 205635
  chr19:58175983-58176206
  hyper

SEQ ID NO: 400829 - DNA, 77 bp, Homo sapiens; identical to SEQ ID NO: 205642
  chr19:58331143-58331220
  hyper

SEQ ID NO: 400830 - DNA, 34 bp, Homo sapiens; identical to SEQ ID NO: 240904
  chr19:58789724-58789758
  hyper

SEQ ID NO: 400831 - DNA, 89 bp, Homo sapiens; identical to SEQ ID NO: 240906
  chr19:58838428-58838517
  hyper

SEQ ID NO: 400832 - DNA, 332 bp, Homo sapiens; identical to SEQ ID NO: 294464
  chr19:58874184-58874516
  hyper

SEQ ID NO: 400833 - DNA, 113 bp, Homo sapiens; identical to SEQ ID NO: 240908
  chr19:58892481-58892594
  hyper

SEQ ID NO: 400834 - DNA, 398 bp, Homo sapiens; identical to SEQ ID NO: 240909
  chr19:58898386-58898784
  hyper

SEQ ID NO: 400835 - DNA, 379 bp, Homo sapiens; identical to SEQ ID NO: 56778
  chr19:58919475-58919854
  hyper

SEQ ID NO: 400836 - DNA, 71 bp, Homo sapiens; identical to SEQ ID NO: 226057
  chr19:58920316-58920387
  hyper

SEQ ID NO: 400837 - DNA, 284 bp, Homo sapiens; identical to SEQ ID NO: 240912
  chr19:58987608-58987892
  hyper

SEQ ID NO: 400838 - DNA, 308 bp, Homo sapiens; identical to SEQ ID NO: 205651
  chr19:59066308-59066616
  hyper

SEQ ID NO: 400839 - DNA, 64 bp, Homo sapiens; identical to SEQ ID NO: 240917
  chr19:59084981-59085045
  hyper

SEQ ID NO: 400840 - DNA, 426 bp, Homo sapiens; identical to SEQ ID NO: 240922
  chr20:524229-524655
  hyper

SEQ ID NO: 400841 - DNA, 280 bp, Homo sapiens; identical to SEQ ID NO: 294487
  chr20:865713-865993
  hyper

SEQ ID NO: 400842 - DNA, 286 bp, Homo sapiens; identical to SEQ ID NO: 240929
  chr20:1165689-1165975
  hyper

SEQ ID NO: 400843 - DNA, 328 bp, Homo sapiens; identical to SEQ ID NO: 240933
  chr20:1372854-1373182
  hyper

SEQ ID NO: 400844 - DNA, 487 bp, Homo sapiens; identical to SEQ ID NO: 205664
  chr20:2188036-2188523
  hyper

SEQ ID NO: 400845 - DNA, 236 bp, Homo sapiens; identical to SEQ ID NO: 294500
  chr20:2444432-2444668
  hyper

SEQ ID NO: 400846 - DNA, 165 bp, Homo sapiens; identical to SEQ ID NO: 240943
  chr20:2723863-2724028
  hyper

SEQ ID NO: 400847 - DNA, 152 bp, Homo sapiens; identical to SEQ ID NO: 240949
  chr20:2821253-2821405
  hyper

SEQ ID NO: 400848 - DNA, 66 bp, Homo sapiens; identical to SEQ ID NO: 294519
  chr20:3063059-3063125
  hyper

SEQ ID NO: 400849 - DNA, 94 bp, Homo sapiens; identical to SEQ ID NO: 294520
  chr20:3063391-3063485
  hyper

SEQ ID NO: 400850 - DNA, 260 bp, Homo sapiens; identical to SEQ ID NO: 205673
  chr20:3154656-3154916
  hyper

SEQ ID NO: 400851 - DNA, 230 bp, Homo sapiens; identical to SEQ ID NO: 240960
  chr20:3451349-3451579
  hyper

SEQ ID NO: 400852 - DNA, 97 bp, Homo sapiens; identical to SEQ ID NO: 294537
  chr20:3759182-3759279
  hyper

SEQ ID NO: 400853 - DNA, 57 bp, Homo sapiens; identical to SEQ ID NO: 205681
  chr20:3766679-3766736
  hyper

SEQ ID NO: 400854 - DNA, 32 bp, Homo sapiens; identical to SEQ ID NO: 240967
  chr20:3767611-3767643
  hyper

SEQ ID NO: 400855 - DNA, 113 bp, Homo sapiens; identical to SEQ ID NO: 294540
  chr20:3801039-3801152
  hyper

SEQ ID NO: 400856 - DNA, 171 bp, Homo sapiens; identical to SEQ ID NO: 132507
  chr20:3801162-3801333
  hyper

SEQ ID NO: 400857 - DNA, 237 bp, Homo sapiens; identical to SEQ ID NO: 240970
  chr20:4130007-4130244
  hyper

SEQ ID NO: 400858 - DNA, 390 bp, Homo sapiens; identical to SEQ ID NO: 240976
  chr20:5107246-5107636
  hyper

SEQ ID NO: 400859 - DNA, 42 bp, Homo sapiens; identical to SEQ ID NO: 240984
  chr20:5931595-5931637
  hyper

SEQ ID NO: 400860 - DNA, 90 bp, Homo sapiens; identical to SEQ ID NO: 294555
  chr20:6032595-6032685
  hyper

SEQ ID NO: 400861 - DNA, 75 bp, Homo sapiens
  chr20:9049781-9049856
  hyper
gcgcgtacacactgggtctccaggcagcggccgtcgccgcatccccggcagcagctccaggcaaagtgacaggta

SEQ ID NO: 400862 - DNA, 64 bp, Homo sapiens; identical to SEQ ID NO: 294570
  chr20:9495962-9496026
  hyper

SEQ ID NO: 400863 - DNA, 144 bp, Homo sapiens; identical to SEQ ID NO: 226087
  chr20:10653880-10654024
  hyper

SEQ ID NO: 400864 - DNA, 1019 bp, Homo sapiens; identical to SEQ ID NO: 205705
  chr20:10654669-10655688
  hyper

SEQ ID NO: 400865 - DNA, 453 bp, Homo sapiens; identical to SEQ ID NO: 389761
  chr20:11871901-11872354
  hyper

SEQ ID NO: 400866 - DNA, 440 bp, Homo sapiens; identical to SEQ ID NO: 294585
  chr20:11872384-11872824
  hyper

SEQ ID NO: 400867 - DNA, 130 bp, Homo sapiens; identical to SEQ ID NO: 241011
  chr20:13765649-13765779
  hyper

SEQ ID NO: 400868 - DNA, 187 bp, Homo sapiens; identical to SEQ ID NO: 205715
  chr20:17661564-17661751
  hyper

SEQ ID NO: 400869 - DNA, 105 bp, Homo sapiens; identical to SEQ ID NO: 241024
  chr20:18118330-18118435
  hyper

SEQ ID NO: 400870 - DNA, 295 bp, Homo sapiens; identical to SEQ ID NO: 241026
  chr20:18268964-18269259
  hyper

SEQ ID NO: 400871 - DNA, 60 bp, Homo sapiens; identical to SEQ ID NO: 241028
  chr20:18448016-18448076
  hyper

SEQ ID NO: 400872 - DNA, 157 bp, Homo sapiens; identical to SEQ ID NO: 241029
  chr20:18477825-18477982
  hyper

SEQ ID NO: 400873 - DNA, 107 bp, Homo sapiens; identical to SEQ ID NO: 241031
  chr20:18547799-18547906
  hyper

SEQ ID NO: 400874 - DNA, 180 bp, Homo sapiens; identical to SEQ ID NO: 205724
  chr20:19738432-19738612
  hyper

SEQ ID NO: 400875 - DNA, 72 bp, Homo sapiens; identical to SEQ ID NO: 241037
  chr20:19997708-19997780
  hyper

SEQ ID NO: 400876 - DNA, 40 bp, Homo sapiens; identical to SEQ ID NO: 241038
  chr20:19998405-19998445
  hyper

SEQ ID NO: 400877 - DNA, 120 bp, Homo sapiens; identical to SEQ ID NO: 205729
  chr20:20693388-20693508
  hyper

SEQ ID NO: 400878 - DNA, 105 bp, Homo sapiens; identical to SEQ ID NO: 384811
  chr20:21495255-21495360
  hyper

SEQ ID NO: 400879 - DNA, 202 bp, Homo sapiens; identical to SEQ ID NO: 205733
  chr20:21501158-21501360
  hyper

SEQ ID NO: 400880 - DNA, 347 bp, Homo sapiens; identical to SEQ ID NO: 294642
  chr20:21681908-21682255
  hyper

SEQ ID NO: 400881 - DNA, 56 bp, Homo sapiens; identical to SEQ ID NO: 294643
  chr20:21683255-21683311
  hyper

SEQ ID NO: 400882 - DNA, 31 bp, Homo sapiens
  chr20:22558923-22558954
  hyper
gacccctcatccttccaagtcatgcactttc

SEQ ID NO: 400883 - DNA, 49 bp, Homo sapiens
  chr20:22559924-22559973
  hyper
ggccctgcctctcggctccttcgccacgggagccttttatgtgataatg

SEQ ID NO: 400884 - DNA, 64 bp, Homo sapiens; identical to SEQ ID NO: 294655
  chr20:22560142-22560206
  hyper

SEQ ID NO: 400885 - DNA, 116 bp, Homo sapiens; identical to SEQ ID NO: 294656
  chr20:22562393-22562509
  hyper

SEQ ID NO: 400886 - DNA, 94 bp, Homo sapiens
  chr20:22563238-22563332
  hyper
cggatggagttctgccagcgctgctggttctgccggtagaaggggaagaggtccatgatccactggtagatctcgctcagcgtcagcatcttgt

SEQ ID NO: 400887 - DNA, 113 bp, Homo sapiens; identical to SEQ ID NO: 294680
  chr20:26188699-26188812
  hyper

SEQ ID NO: 400888 - DNA, 60 bp, Homo sapiens; identical to SEQ ID NO: 294681
  chr20:26189532-26189592
  hyper

SEQ ID NO: 400889 - DNA, 87 bp, Homo sapiens; identical to SEQ ID NO: 294683
  chr20:30062956-30063043
  hyper

SEQ ID NO: 400890 - DNA, 247 bp, Homo sapiens; identical to SEQ ID NO: 241107
  chr20:30310626-30310873
  hyper

SEQ ID NO: 400891 - DNA, 304 bp, Homo sapiens; identical to SEQ ID NO: 205758
  chr20:30457820-30458124
  hyper

SEQ ID NO: 400892 - DNA, 54 bp, Homo sapiens; identical to SEQ ID NO: 205759
  chr20:30458610-30458664
  hyper

SEQ ID NO: 400893 - DNA, 70 bp, Homo sapiens; identical to SEQ ID NO: 12901
  chr20:30458690-30458760
  hyper

SEQ ID NO: 400894 - DNA, 43 bp, Homo sapiens; identical to SEQ ID NO: 294694
  chr20:30583025-30583068
  hyper

SEQ ID NO: 400895 - DNA, 98 bp, Homo sapiens; identical to SEQ ID NO: 241115
  chr20:30795269-30795367
  hyper

SEQ ID NO: 400896 - DNA, 386 bp, Homo sapiens; identical to SEQ ID NO: 205768
  chr20:30959966-30960352
  hyper

SEQ ID NO: 400897 - DNA, 104 bp, Homo sapiens; identical to SEQ ID NO: 205770
  chr20:31017140-31017244
  hyper

SEQ ID NO: 400898 - DNA, 359 bp, Homo sapiens; identical to SEQ ID NO: 205772
  chr20:31019123-31019482
  hyper

SEQ ID NO: 400899 - DNA, 106 bp, Homo sapiens; identical to SEQ ID NO: 205773
  chr20:31020682-31020788
  hyper

SEQ ID NO: 400900 - DNA, 634 bp, Homo sapiens; identical to SEQ ID NO: 205774
  chr20:31021086-31021720
  hyper

SEQ ID NO: 400901 - DNA, 116 bp, Homo sapiens; identical to SEQ ID NO: 241116
  chr20:31072615-31072731
  hyper

SEQ ID NO: 400902 - DNA, 349 bp, Homo sapiens; identical to SEQ ID NO: 241122
  chr20:32262417-32262766
  hyper

SEQ ID NO: 400903 - DNA, 104 bp, Homo sapiens; identical to SEQ ID NO: 205782
  chr20:32700168-32700272
  hyper

SEQ ID NO: 400904 - DNA, 88 bp, Homo sapiens; identical to SEQ ID NO: 241126
  chr20:32891251-32891339
  hyper

SEQ ID NO: 400905 - DNA, 33 bp, Homo sapiens; identical to SEQ ID NO: 241129
  chr20:33292057-33292090
  hyper

SEQ ID NO: 400906 - DNA, 398 bp, Homo sapiens; identical to SEQ ID NO: 241131
  chr20:33460460-33460858
  hyper

SEQ ID NO: 400907 - DNA, 452 bp, Homo sapiens; identical to SEQ ID NO: 226131
  chr20:33464343-33464795
  hyper

SEQ ID NO: 400908 - DNA, 163 bp, Homo sapiens; identical to SEQ ID NO: 226134
  chr20:34680201-34680364
  hyper

SEQ ID NO: 400909 - DNA, 210 bp, Homo sapiens; identical to SEQ ID NO: 241142
  chr20:34824292-34824502
  hyper

SEQ ID NO: 400910 - DNA, 101 bp, Homo sapiens; identical to SEQ ID NO: 241145
  chr20:35374567-35374668
  hyper

SEQ ID NO: 400911 - DNA, 215 bp, Homo sapiens; identical to SEQ ID NO: 294750
  chr20:35491515-35491730
  hyper

SEQ ID NO: 400912 - DNA, 251 bp, Homo sapiens; identical to SEQ ID NO: 241149
  chr20:35724155-35724406
  hyper

SEQ ID NO: 400913 - DNA, 147 bp, Homo sapiens; identical to SEQ ID NO: 241152
  chr20:36529851-36529998
  hyper

SEQ ID NO: 400914 - DNA, 35 bp, Homo sapiens; identical to SEQ ID NO: 241157
  chr20:36793594-36793629
  hyper

SEQ ID NO: 400915 - DNA, 115 bp, Homo sapiens; identical to SEQ ID NO: 205800
  chr20:37075186-37075301
  hyper

SEQ ID NO: 400916 - DNA, 126 bp, Homo sapiens; identical to SEQ ID NO: 241162
  chr20:37101359-37101485
  hyper

SEQ ID NO: 400917 - DNA, 170 bp, Homo sapiens; identical to SEQ ID NO: 205809
  chr20:39968625-39968795
  hyper

SEQ ID NO: 400918 - DNA, 35 bp, Homo sapiens; identical to SEQ ID NO: 241181
  chr20:39969365-39969400
  hyper

SEQ ID NO: 400919 - DNA, 204 bp, Homo sapiens; identical to SEQ ID NO: 205810
  chr20:40247056-40247260
  hyper

SEQ ID NO: 400920 - DNA, 159 bp, Homo sapiens; identical to SEQ ID NO: 241186
  chr20:42219373-42219532
  hyper

SEQ ID NO: 400921 - DNA, 163 bp, Homo sapiens; identical to SEQ ID NO: 205812
  chr20:42296100-42296263
  hyper

SEQ ID NO: 400922 - DNA, 46 bp, Homo sapiens; identical to SEQ ID NO: 241199
  chr20:43514296-43514342
  hyper

SEQ ID NO: 400923 - DNA, 119 bp, Homo sapiens; identical to SEQ ID NO: 241200
  chr20:43538513-43538632
  hyper

SEQ ID NO: 400924 - DNA, 81 bp, Homo sapiens; identical to SEQ ID NO: 241202
  chr20:43594829-43594910
  hyper

SEQ ID NO: 400925 - DNA, 318 bp, Homo sapiens; identical to SEQ ID NO: 241207
  chr20:44044572-44044890
  hyper

SEQ ID NO: 400926 - DNA, 87 bp, Homo sapiens; identical to SEQ ID NO: 241211
  chr20:44441534-44441621
  hyper

SEQ ID NO: 400927 - DNA, 159 bp, Homo sapiens; identical to SEQ ID NO: 241213
  chr20:44462158-44462317
  hyper

SEQ ID NO: 400928 - DNA, 73 bp, Homo sapiens; identical to SEQ ID NO: 226157
  chr20:44462767-44462840
  hyper

SEQ ID NO: 400929 - DNA, 77 bp, Homo sapiens; identical to SEQ ID NO: 294810
  chr20:44519218-44519295
  hyper

SEQ ID NO: 400930 - DNA, 149 bp, Homo sapiens; identical to SEQ ID NO: 241216
  chr20:44600903-44601052
  hyper

SEQ ID NO: 400931 - DNA, 45 bp, Homo sapiens; identical to SEQ ID NO: 205820
  chr20:44639093-44639138
  hyper

SEQ ID NO: 400932 - DNA, 169 bp, Homo sapiens; identical to SEQ ID NO: 241221
  chr20:44651084-44651253
  hyper

SEQ ID NO: 400933 - DNA, 268 bp, Homo sapiens; identical to SEQ ID NO: 294820
  chr20:44660337-44660605
  hyper

SEQ ID NO: 400934 - DNA, 319 bp, Homo sapiens; identical to SEQ ID NO: 241228
  chr20:44718496-44718815
  hyper

SEQ ID NO: 400935 - DNA, 71 bp, Homo sapiens; identical to SEQ ID NO: 241236
  chr20:45035361-45035432
  hyper

SEQ ID NO: 400936 - DNA, 79 bp, Homo sapiens; identical to SEQ ID NO: 205828
  chr20:45142272-45142351
  hyper

SEQ ID NO: 400937 - DNA, 142 bp, Homo sapiens; identical to SEQ ID NO: 241239
  chr20:45440169-45440311
  hyper

SEQ ID NO: 400938 - DNA, 149 bp, Homo sapiens; identical to SEQ ID NO: 205829
  chr20:45985481-45985630
  hyper

SEQ ID NO: 400939 - DNA, 47 bp, Homo sapiens; identical to SEQ ID NO: 294835
  chr20:46413279-46413326
  hyper

SEQ ID NO: 400940 - DNA, 480 bp, Homo sapiens; identical to SEQ ID NO: 294836
  chr20:46413619-46414099
  hyper

SEQ ID NO: 400941 - DNA, 230 bp, Homo sapiens; identical to SEQ ID NO: 294837
  chr20:46414405-46414635
  hyper

SEQ ID NO: 400942 - DNA, 223 bp, Homo sapiens; identical to SEQ ID NO: 205831
  chr20:46414914-46415137
  hyper

SEQ ID NO: 400943 - DNA, 74 bp, Homo sapiens; identical to SEQ ID NO: 205832
  chr20:46415520-46415594
  hyper

SEQ ID NO: 400944 - DNA, 31 bp, Homo sapiens; identical to SEQ ID NO: 241249
  chr20:47805122-47805153
  hyper

SEQ ID NO: 400945 - DNA, 97 bp, Homo sapiens; identical to SEQ ID NO: 226172
  chr20:48194980-48195077
  hyper

SEQ ID NO: 400946 - DNA, 164 bp, Homo sapiens; identical to SEQ ID NO: 205838
  chr20:48330532-48330696
  hyper

SEQ ID NO: 400947 - DNA, 131 bp, Homo sapiens; identical to SEQ ID NO: 205840
  chr20:48729833-48729964
  hyper

SEQ ID NO: 400948 - DNA, 166 bp, Homo sapiens; identical to SEQ ID NO: 294856
  chr20:49410874-49411040
  hyper

SEQ ID NO: 400949 - DNA, 67 bp, Homo sapiens; identical to SEQ ID NO: 294858
  chr20:49575842-49575909
  hyper

SEQ ID NO: 400950 - DNA, 143 bp, Homo sapiens; identical to SEQ ID NO: 294859
  chr20:49575939-49576082
  hyper

SEQ ID NO: 400951 - DNA, 382 bp, Homo sapiens; identical to SEQ ID NO: 241268
  chr20:50179176-50179558
  hyper

SEQ ID NO: 400952 - DNA, 119 bp, Homo sapiens; identical to SEQ ID NO: 241275
  chr20:50808101-50808220
  hyper

SEQ ID NO: 400953 - DNA, 98 bp, Homo sapiens; identical to SEQ ID NO: 241276
  chr20:50808683-50808781
  hyper

SEQ ID NO: 400954 - DNA, 266 bp, Homo sapiens; identical to SEQ ID NO: 241277
  chr20:51588707-51588973
  hyper

SEQ ID NO: 400955 - DNA, 402 bp, Homo sapiens; identical to SEQ ID NO: 294878
  chr20:52790210-52790612
  hyper

SEQ ID NO: 400956 - DNA, 196 bp, Homo sapiens; identical to SEQ ID NO: 241286
  chr20:54934323-54934519
  hyper

SEQ ID NO: 400957 - DNA, 871 bp, Homo sapiens; identical to SEQ ID NO: 241287
  chr20:54966815-54967686
  hyper

SEQ ID NO: 400958 - DNA, 457 bp, Homo sapiens; identical to SEQ ID NO: 241297
  chr20:55926142-55926599
  hyper

SEQ ID NO: 400959 - DNA, 145 bp, Homo sapiens; identical to SEQ ID NO: 205870
  chr20:55966824-55966969
  hyper

SEQ ID NO: 400960 - DNA, 224 bp, Homo sapiens; identical to SEQ ID NO: 226188
  chr20:56811736-56811960
  hyper

SEQ ID NO: 400961 - DNA, 57 bp, Homo sapiens; identical to SEQ ID NO: 241307
  chr20:56964789-56964846
  hyper

SEQ ID NO: 400962 - DNA, 208 bp, Homo sapiens; identical to SEQ ID NO: 226190
  chr20:57414593-57414801
  hyper

SEQ ID NO: 400963 - DNA, 158 bp, Homo sapiens; identical to SEQ ID NO: 205875
  chr20:57415180-57415338
  hyper

SEQ ID NO: 400964 - DNA, 100 bp, Homo sapiens; identical to SEQ ID NO: 205878
  chr20:57466877-57466977
  hyper

SEQ ID NO: 400965 - DNA, 63 bp, Homo sapiens; identical to SEQ ID NO: 241315
  chr20:57556038-57556101
  hyper

SEQ ID NO: 400966 - DNA, 674 bp, Homo sapiens; identical to SEQ ID NO: 241317
  chr20:57581889-57582563
  hyper

SEQ ID NO: 400967 - DNA, 57 bp, Homo sapiens; identical to SEQ ID NO: 205883
  chr20:57797335-57797392
  hyper

SEQ ID NO: 400968 - DNA, 135 bp, Homo sapiens; identical to SEQ ID NO: 205888
  chr20:58090760-58090895
  hyper

SEQ ID NO: 400969 - DNA, 90 bp, Homo sapiens; identical to SEQ ID NO: 294933
  chr20:58152282-58152372
  hyper

SEQ ID NO: 400970 - DNA, 75 bp, Homo sapiens; identical to SEQ ID NO: 294934
  chr20:58152388-58152463
  hyper

SEQ ID NO: 400971 - DNA, 285 bp, Homo sapiens; identical to SEQ ID NO: 294939
  chr20:58514845-58515130
  hyper

SEQ ID NO: 400972 - DNA, 93 bp, Homo sapiens; identical to SEQ ID NO: 241330
  chr20:60813107-60813200
  hyper

SEQ ID NO: 400973 - DNA, 243 bp, Homo sapiens; identical to SEQ ID NO: 205894
  chr20:60941671-60941914
  hyper

SEQ ID NO: 400974 - DNA, 117 bp, Homo sapiens; identical to SEQ ID NO: 133295
  chr20:60981936-60982053
  hyper

SEQ ID NO: 400975 - DNA, 61 bp, Homo sapiens; identical to SEQ ID NO: 241335
  chr20:61274240-61274301
  hyper

SEQ ID NO: 400976 - DNA, 51 bp, Homo sapiens
  chr20:61447619-61447670
  hyper
tggcgacccctgagcttctgggaaatggacatggccagcaccgccttcagg

SEQ ID NO: 400977 - DNA, 36 bp, Homo sapiens
  chr20:61447763-61447799
  hyper
gtctgggtttggagtctggtcttagccggtagcaac

SEQ ID NO: 400978 - DNA, 148 bp, Homo sapiens; identical to SEQ ID NO: 241340
  chr20:61557990-61558138
  hyper

SEQ ID NO: 400979 - DNA, 103 bp, Homo sapiens; identical to SEQ ID NO: 294961
  chr20:61583882-61583985
  hyper

SEQ ID NO: 400980 - DNA, 316 bp, Homo sapiens; identical to SEQ ID NO: 294962
  chr20:61584015-61584331
  hyper

SEQ ID NO: 400981 - DNA, 93 bp, Homo sapiens; identical to SEQ ID NO: 205900
  chr20:61733167-61733260
  hyper

SEQ ID NO: 400982 - DNA, 249 bp, Homo sapiens; identical to SEQ ID NO: 294967
  chr20:61759828-61760077
  hyper

SEQ ID NO: 400983 - DNA, 42 bp, Homo sapiens; identical to SEQ ID NO: 226226
  chr20:62152087-62152129
  hyper

SEQ ID NO: 400984 - DNA, 176 bp, Homo sapiens; identical to SEQ ID NO: 294981
  chr20:62283519-62283695
  hyper

SEQ ID NO: 400985 - DNA, 651 bp, Homo sapiens; identical to SEQ ID NO: 294982
  chr20:62283836-62284487
  hyper

SEQ ID NO: 400986 - DNA, 69 bp, Homo sapiens; identical to SEQ ID NO: 294983
  chr20:62284615-62284684
  hyper

SEQ ID NO: 400987 - DNA, 209 bp, Homo sapiens; identical to SEQ ID NO: 241362
  chr20:62289788-62289997
  hyper

SEQ ID NO: 400988 - DNA, 419 bp, Homo sapiens; identical to SEQ ID NO: 241369
  chr20:62496242-62496661
  hyper

SEQ ID NO: 400989 - DNA, 361 bp, Homo sapiens; identical to SEQ ID NO: 226233
  chr20:62525784-62526145
  hyper

SEQ ID NO: 400990 - DNA, 83 bp, Homo sapiens; identical to SEQ ID NO: 241370
  chr20:62661737-62661820
  hyper

SEQ ID NO: 400991 - DNA, 79 bp, Homo sapiens; identical to SEQ ID NO: 241371
  chr20:62669743-62669822
  hyper

SEQ ID NO: 400992 - DNA, 205 bp, Homo sapiens; identical to SEQ ID NO: 294999
  chr20:62673632-62673837
  hyper

SEQ ID NO: 400993 - DNA, 322 bp, Homo sapiens; identical to SEQ ID NO: 295000
  chr20:62679894-62680216
  hyper

SEQ ID NO: 400994 - DNA, 53 bp, Homo sapiens; identical to SEQ ID NO: 241376
  chr20:62715743-62715796
  hyper

SEQ ID NO: 400995 - DNA, 57 bp, Homo sapiens; identical to SEQ ID NO: 241382
  chr21:16437726-16437783
  hyper

SEQ ID NO: 400996 - DNA, 268 bp, Homo sapiens; identical to SEQ ID NO: 295016
  chr21:16438267-16438535
  hyper

SEQ ID NO: 400997 - DNA, 1361 bp, Homo sapiens; identical to SEQ ID NO: 295019
  chr21:18885047-18886408
  hyper

SEQ ID NO: 400998 - DNA, 98 bp, Homo sapiens; identical to SEQ ID NO: 295021
  chr21:18985373-18985471
  hyper

SEQ ID NO: 400999 - DNA, 155 bp, Homo sapiens; identical to SEQ ID NO: 205939
  chr21:28217933-28218088
  hyper

SEQ ID NO: 401000 - DNA, 83 bp, Homo sapiens; identical to SEQ ID NO: 205942
  chr21:28338753-28338836
  hyper

SEQ ID NO: 401001 - DNA, 275 bp, Homo sapiens; identical to SEQ ID NO: 295036
  chr21:28338887-28339162
  hyper

SEQ ID NO: 401002 - DNA, 350 bp, Homo sapiens; identical to SEQ ID NO: 205945
  chr21:28339501-28339851
  hyper

SEQ ID NO: 401003 - DNA, 38 bp, Homo sapiens; identical to SEQ ID NO: 241396
  chr21:30257747-30257785
  hyper

SEQ ID NO: 401004 - DNA, 132 bp, Homo sapiens; identical to SEQ ID NO: 205948
  chr21:31312181-31312313
  hyper

SEQ ID NO: 401005 - DNA, 154 bp, Homo sapiens; identical to SEQ ID NO: 205949
  chr21:31312503-31312657
  hyper

SEQ ID NO: 401006 - DNA, 105 bp, Homo sapiens; identical to SEQ ID NO: 226254
  chr21:32932326-32932431
  hyper

SEQ ID NO: 401007 - DNA, 111 bp, Homo sapiens; identical to SEQ ID NO: 241404
  chr21:33031744-33031855
  hyper

SEQ ID NO: 401008 - DNA, 32 bp, Homo sapiens; identical to SEQ ID NO: 226255
  chr21:33058221-33058253
  hyper

SEQ ID NO: 401009 - DNA, 49 bp, Homo sapiens; identical to SEQ ID NO: 241406
  chr21:33651478-33651527
  hyper

SEQ ID NO: 401010 - DNA, 110 bp, Homo sapiens; identical to SEQ ID NO: 241409
  chr21:33984700-33984810
  hyper

SEQ ID NO: 401011 - DNA, 51 bp, Homo sapiens; identical to SEQ ID NO: 205964
  chr21:34100892-34100943
  hyper

SEQ ID NO: 401012 - DNA, 671 bp, Homo sapiens
  chr21:34776086-34776757
  hyper
aggtgggaacctgcgggtgccccaggtgggggtcttgcggggtgcccagggctagaggggcccgctgggagcccgcagcggggctgggatgggcggccaggagttccagacaggagctgggcagcagcaggaagacggggggcacccctcctggcgtcctggccgccgggacacccctctccgggagaggacactcggtgcccctccgtgaagccggtaacctcggctgcgccacctcccccacccgcgcgcccgcgccgggaaagccagcgtggccccagtctccgaatttctcggaatgaacaacagcaaattgaatccagggctccggcgggggccgcctttgctggccactggttctgcagcctggcgagactgcgcttagtccccgcctggagtgcctcccgaaggcctggctggaagctagactcagtccctttgtagtagcagcggtggagcagggaccagcgtcttggacgggtgacccagactcaattccgactttggccgagggcatgtttgacactgggtgtgaaatctagacagttcccgcggtcatagagatggggcagcagcattcaggcagggctcagaactgtccgggtcccatcagtgttggggcggaagaggaagagtgtcaactgagccaggcatttatttattttattgtt

SEQ ID NO: 401013 - DNA, 317 bp, Homo sapiens; identical to SEQ ID NO: 241422
  chr21:34915084-34915401
  hyper

SEQ ID NO: 401014 - DNA, 318 bp, Homo sapiens; identical to SEQ ID NO: 241423
  chr21:34960938-34961256
  hyper

SEQ ID NO: 401015 - DNA, 412 bp, Homo sapiens; identical to SEQ ID NO: 241425
  chr21:35014227-35014639
  hyper

SEQ ID NO: 401016 - DNA, 50 bp, Homo sapiens; identical to SEQ ID NO: 205970
  chr21:35747796-35747846
  hyper

SEQ ID NO: 401017 - DNA, 1937 bp, Homo sapiens
  chr21:36161938-36163875
  hyper
ctatcgccaaaacaactacagtttgattttttttgaaacaattaaatactatatatgctggtaagagtctgtgaaactctaaatgaccaatccagtgagcctacaatagtgacaagccccctccacacatggctttgagagtaaaggttcaatgtaaaagattatctaatcagagcatgaggctggttttgagttggaatatcttcagttaacagaattaaactgaaaaacataattttttccttcatttttctccagcatttttgcaggtcagacatggtaacatgtgctgaaaaaaaacatttacgtttaatttgggggaaatgggctaatggtgcttttcagaaattaaatttttacatttgctgacattttatggtaatttagctgcaaaaatgtaatacggaataatatatgaaactgagttgtggagggaatcctgtcaaaaatgaaagtgaatatattctgagtttgtccgagatctgctatagctcttctctagataagaacgacctgacaacataagctgctttactctttaactcttaccaaagtgctactgcatgtgtgtaaaacaaataatcaatatatatataagaaaactcaaaaacaagttgttttaaataagtccagctgtttttgctgcctgcagccaaagatttgcctaatttgaatgcttaaatttataaaataaaaatcaaacactgttctgaagtcctgctttcaaatactcttcagagttgacctgaaatcgtttcaacgaattttaagaggtacgttaaataaccaccagatcatttggagcacacatgtgtcaaaatcagcagttagtatttatgagttgtacaacaactgcattctgaccaaatcctccaataaaaatagtgccataaaatttacagcgacattggatacctttgaattgtagccacggacagtagtgacatgaatctttcctgtcacactggtgcacaggtaaaagcccatataccccatagggtagggtctcagcctggtgaaagcaacacaaagatgttgttgagtgagcagcacaggacagggggtctcgcacaggtgggaccatgttttcccacttgtctccactgaggcacacagaggcaaattgactcctcgaggcctgcttctggtgggcccttaaattgctataatcgtaacccctaaattcattgatttggttcctatgtaaatgtggctcccctacacagtttactttggctgtgttctgttacacagcatctgtgaaattatcagatgaccttggggtgagcaaatccctgggcagaaatcaaatcctctccaaagatgtaattattggcacctgcctcaaccctctggaactagattgaccttctctgttttaaggaggaagttagatatgagacccttgttgagcctggcagaaaattccatacttctgatccttggagtgaccctcagtgtctaaaaatcctattaaaaacgttgctgcgtgagctactcacttgtttgattaacatgaaagggagtttaatgtaaacaatacttctggataaccaagcgatcacattactcattctttttttctagccttcttcaatgtgatacatttaactttggctactatcaagaacaaaagaaaatgtagtacttgatatttttcttaatataagtacatttaaataattaaaaaattatcaacacataaatgtctgaacatcaagatacataaatatctggggattccttgtgggaatacagtagttaaaaatgacccaaagctgtagctgtttctcaaaaaaacaaaacaaaacaaaaaaaaacaactacccaaaagtccaaaagaaaagttaaataaaacttaaagaaaagggaatcatatttctttccatggtcaaagcaagaaagaagcaagctcaatttatatatatttatataaa

SEQ ID NO: 401018 - DNA, 236 bp, Homo sapiens
  chr21:36164756-36164992
  hyper
gagcccatggccgacatgccgatgccgatgcccgaggtgaccggcgtcggggagtaggtgaaggcgcctggatagtgcatgcgggggtcggagatggagggcagcgcggggaactggcgcgggtcgctgaacgctgtcaggtcgggtgccgctgcagggcgggcaagagaacggagcggaagtgagtaggaggttgcggaggccacagctcttccctctgccccagggggctaccc

SEQ ID NO: 401019 - DNA, 67 bp, Homo sapiens
  chr21:36206695-36206762
  hyper
ctggtacttaccctgcatctgactctgaggctgagggttaaaggcagtggagtggttcagggaggca

SEQ ID NO: 401020 - DNA, 169 bp, Homo sapiens; identical to SEQ ID NO: 205979
  chr21:36260355-36260524
  hyper

SEQ ID NO: 401021 - DNA, 39 bp, Homo sapiens; identical to SEQ ID NO: 205980
  chr21:36265221-36265260
  hyper

SEQ ID NO: 401022 - DNA, 131 bp, Homo sapiens; identical to SEQ ID NO: 205982
  chr21:36421464-36421595
  hyper

SEQ ID NO: 401023 - DNA, 47 bp, Homo sapiens; identical to SEQ ID NO: 295097
  chr21:38069046-38069093
  hyper

SEQ ID NO: 401024 - DNA, 571 bp, Homo sapiens; identical to SEQ ID NO: 205989
  chr21:38071064-38071635
  hyper

SEQ ID NO: 401025 - DNA, 77 bp, Homo sapiens
  chr21:38071687-38071764
  hyper
cgcctccgcctccgcgccggccgcccccaccccccaggaaggccgaggcaggagaggcaggagggaggaaacaggag

SEQ ID NO: 401026 - DNA, 186 bp, Homo sapiens
  chr21:38080899-38081085
  hyper
gcctgtgagagctgggaagcccaaggggtagcgtgtagggggttttttatgcgggaggagctgcctcctgggcggcggggactttctgtctcagcctgtctgcctttgggaaaacaaggagttgccggagaagcagggaaagaaaggagggagggaaggagggtccttgggggaatatttgcgggt

SEQ ID NO: 401027 - DNA, 199 bp, Homo sapiens; identical to SEQ ID NO: 295105
  chr21:38362192-38362391
  hyper

SEQ ID NO: 401028 - DNA, 415 bp, Homo sapiens; identical to SEQ ID NO: 295110
  chr21:38446375-38446790
  hyper

SEQ ID NO: 401029 - DNA, 253 bp, Homo sapiens; identical to SEQ ID NO: 241457
  chr21:38737938-38738191
  hyper

SEQ ID NO: 401030 - DNA, 1120 bp, Homo sapiens; identical to SEQ ID NO: 226282
  chr21:40177485-40178605
  hyper

SEQ ID NO: 401031 - DNA, 99 bp, Homo sapiens; identical to SEQ ID NO: 206011
  chr21:40752032-40752131
  hyper

SEQ ID NO: 401032 - DNA, 123 bp, Homo sapiens; identical to SEQ ID NO: 295136
  chr21:42539420-42539543
  hyper

SEQ ID NO: 401033 - DNA, 781 bp, Homo sapiens
  chr21:42539583-42540364
  hyper
cgccactgccgggcgaatagacccccgcggacccccaagcgcgcggggccggggccctagttcaggccctcgctgcccctttaagggttctcgaaactttccccccggtatcagatgagcctcgtcacatccgttggccgtggccgctggggcgctttccgaggaaattcgggactcgagtttcccggggaagaggcgcggcctgagcccggcgagggtggggagggcaggcgcaggtggaccccggcgccccccgagccccgctgtgaccttggccgcgggggaggggctgggccgctgcggggcagtcgcggccgccagagggggcagcggagaagaacttgcccaacttggcggcgcgggctggggcggctctgcgcctccgcgcccgcctccccggcctccgccttctcccctcccgcgagcctcctcccctcccgcgagcctcctcccctgggccctcctcccgtcctccccgccgccgccggtcccggtgcgcgcccatccctgcccgcagccccgcgcgccggccgagtcgctgagccgcggctgccggacgggacgggaccggctaggctgggcgcgccccccgggccccgccgtgggcatgggcgcactggcccgggcgctgctgctgcctctgctggcccagtggctcctgcgcgccgccccggagctggcccccgcgcccttcacgctgcccctccgggtggccgcggccacgaaccgcgtagttgcgcccaccccgggacccgggacccctgccgagcgccacgccgac

SEQ ID NO: 401034 - DNA, 87 bp, Homo sapiens; identical to SEQ ID NO: 226286
  chr21:43067058-43067145
  hyper

SEQ ID NO: 401035 - DNA, 542 bp, Homo sapiens
  chr21:43373823-43374365
  hyper
acacgcgctggctgcggccacagcgcgctgggggcgtggagggggcgcggcggggtcggagcccggcgaggagcgtggccgggggcctctgggcgggcaagcggggaggaaacgcgcggcggccgcggcccgggctgggcgcaagccccgcacacctgcggaacaggggcgcgagcggaccccgcggcccgcgctcccgactcggcgtctgggaagttcctgggccgctgcgggccgcgcttcctcctgcgcgcgccgccccgggcgtcccgcccgcggcccagcggtggccggaggaggctctggccgcggggcggggcggggcgggggcggtgcccgagggagggggcgcggccgggcctgcgggggccgcagtcctcccccctgctcccaacgcggcgtgcccccgcccccctaaaggcccggccttcccggccccgccacgtgcgcgcgtcgcccgcccctccggcgcctgcccgcgggccgcgaggtgacccgggcctccggattcatcagcccaaccccggcggctgctgtgcggc

SEQ ID NO: 401036 - DNA, 46 bp, Homo sapiens; identical to SEQ ID NO: 206025
  chr21:43639848-43639894
  hyper

SEQ ID NO: 401037 - DNA, 110 bp, Homo sapiens; identical to SEQ ID NO: 206026
  chr21:44513219-44513329
  hyper

SEQ ID NO: 401038 - DNA, 176 bp, Homo sapiens; identical to SEQ ID NO: 206027
  chr21:44514586-44514762
  hyper

SEQ ID NO: 401039 - DNA, 251 bp, Homo sapiens; identical to SEQ ID NO: 241482
  chr21:44527798-44528049
  hyper

SEQ ID NO: 401040 - DNA, 179 bp, Homo sapiens; identical to SEQ ID NO: 226295
  chr21:45182012-45182191
  hyper

SEQ ID NO: 401041 - DNA, 156 bp, Homo sapiens; identical to SEQ ID NO: 295162
  chr21:45182669-45182825
  hyper

SEQ ID NO: 401042 - DNA, 159 bp, Homo sapiens; identical to SEQ ID NO: 241486
  chr21:45286201-45286360
  hyper

SEQ ID NO: 401043 - DNA, 397 bp, Homo sapiens; identical to SEQ ID NO: 226297
  chr21:45381212-45381609
  hyper

SEQ ID NO: 401044 - DNA, 63 bp, Homo sapiens; identical to SEQ ID NO: 206032
  chr21:45553436-45553499
  hyper

SEQ ID NO: 401045 - DNA, 164 bp, Homo sapiens; identical to SEQ ID NO: 206033
  chr21:45660235-45660399
  hyper

SEQ ID NO: 401046 - DNA, 211 bp, Homo sapiens; identical to SEQ ID NO: 384837
  chr21:45662515-45662726
  hyper

SEQ ID NO: 401047 - DNA, 139 bp, Homo sapiens; identical to SEQ ID NO: 241491
  chr21:45719673-45719812
  hyper

SEQ ID NO: 401048 - DNA, 275 bp, Homo sapiens; identical to SEQ ID NO: 241500
  chr21:46293549-46293824
  hyper

SEQ ID NO: 401049 - DNA, 79 bp, Homo sapiens; identical to SEQ ID NO: 241502
  chr21:46359652-46359731
  hyper

SEQ ID NO: 401050 - DNA, 60 bp, Homo sapiens; identical to SEQ ID NO: 241505
  chr21:46824687-46824747
  hyper

SEQ ID NO: 401051 - DNA, 104 bp, Homo sapiens; identical to SEQ ID NO: 206041
  chr21:46950778-46950882
  hyper

SEQ ID NO: 401052 - DNA, 89 bp, Homo sapiens; identical to SEQ ID NO: 295192
  chr21:47010001-47010090
  hyper

SEQ ID NO: 401053 - DNA, 173 bp, Homo sapiens; identical to SEQ ID NO: 226309
  chr21:47050917-47051090
  hyper

SEQ ID NO: 401054 - DNA, 106 bp, Homo sapiens; identical to SEQ ID NO: 206044
  chr21:47394340-47394446
  hyper

SEQ ID NO: 401055 - DNA, 110 bp, Homo sapiens; identical to SEQ ID NO: 206045
  chr21:47717450-47717560
  hyper

SEQ ID NO: 401056 - DNA, 84 bp, Homo sapiens; identical to SEQ ID NO: 206046
  chr21:47717589-47717673
  hyper

SEQ ID NO: 401057 - DNA, 116 bp, Homo sapiens; identical to SEQ ID NO: 206047
  chr21:47717748-47717864
  hyper

SEQ ID NO: 401058 - DNA, 45 bp, Homo sapiens; identical to SEQ ID NO: 295203
  chr21:47717865-47717910
  hyper

SEQ ID NO: 401059 - DNA, 165 bp, Homo sapiens; identical to SEQ ID NO: 241512
  chr21:47744098-47744263
  hyper

SEQ ID NO: 401060 - DNA, 44 bp, Homo sapiens; identical to SEQ ID NO: 206048
  chr21:47799137-47799181
  hyper

SEQ ID NO: 401061 - DNA, 52 bp, Homo sapiens; identical to SEQ ID NO: 206049
  chr21:47799225-47799277
  hyper

SEQ ID NO: 401062 - DNA, 40 bp, Homo sapiens; identical to SEQ ID NO: 241515
  chr22:17565650-17565690
  hyper

SEQ ID NO: 401063 - DNA, 139 bp, Homo sapiens; identical to SEQ ID NO: 295210
  chr22:17602027-17602166
  hyper

SEQ ID NO: 401064 - DNA, 50 bp, Homo sapiens; identical to SEQ ID NO: 241521
  chr22:18257398-18257448
  hyper

SEQ ID NO: 401065 - DNA, 186 bp, Homo sapiens; identical to SEQ ID NO: 241523
  chr22:18507000-18507186
  hyper

SEQ ID NO: 401066 - DNA, 198 bp, Homo sapiens; identical to SEQ ID NO: 241524
  chr22:18560627-18560825
  hyper

SEQ ID NO: 401067 - DNA, 31 bp, Homo sapiens; identical to SEQ ID NO: 206054
  chr22:18593348-18593379
  hyper

SEQ ID NO: 401068 - DNA, 130 bp, Homo sapiens; identical to SEQ ID NO: 241527
  chr22:19132116-19132246
  hyper

SEQ ID NO: 401069 - DNA, 472 bp, Homo sapiens; identical to SEQ ID NO: 241529
  chr22:19466618-19467090
  hyper

SEQ ID NO: 401070 - DNA, 288 bp, Homo sapiens; identical to SEQ ID NO: 295228
  chr22:19748301-19748589
  hyper

SEQ ID NO: 401071 - DNA, 40 bp, Homo sapiens; identical to SEQ ID NO: 133782
  chr22:19749084-19749124
  hyper

SEQ ID NO: 401072 - DNA, 38 bp, Homo sapiens; identical to SEQ ID NO: 241536
  chr22:19754288-19754326
  hyper

SEQ ID NO: 401073 - DNA, 42 bp, Homo sapiens; identical to SEQ ID NO: 241538
  chr22:20004350-20004392
  hyper

SEQ ID NO: 401074 - DNA, 257 bp, Homo sapiens
  chr22:20255237-20255494
  hyper
taaccccttggtggccggggcgctccgaggccgggccccgcccttccagcccacggcccccgccctcgacttggcccagcatcggggaccctcggaccgccaccctcggccctgccgaagccgtcaactttcccgggaagcggcaacttttcctgccgcctccggctccgccctcccggggccggggcgccagcggccccagcctggcgcggcactgcggtggctttccctgccgcccggctacgcttccctcgcct

SEQ ID NO: 401075 - DNA, 116 bp, Homo sapiens; identical to SEQ ID NO: 241546
  chr22:21336323-21336439
  hyper

SEQ ID NO: 401076 - DNA, 156 bp, Homo sapiens; identical to SEQ ID NO: 241547
  chr22:21356377-21356533
  hyper

SEQ ID NO: 401077 - DNA, 195 bp, Homo sapiens; identical to SEQ ID NO: 241551
  chr22:21922624-21922819
  hyper

SEQ ID NO: 401078 - DNA, 96 bp, Homo sapiens; identical to SEQ ID NO: 241555
  chr22:22020155-22020251
  hyper

SEQ ID NO: 401079 - DNA, 42 bp, Homo sapiens; identical to SEQ ID NO: 295252
  chr22:22090486-22090528
  hyper

SEQ ID NO: 401080 - DNA, 226 bp, Homo sapiens; identical to SEQ ID NO: 241556
  chr22:22220990-22221216
  hyper

SEQ ID NO: 401081 - DNA, 311 bp, Homo sapiens; identical to SEQ ID NO: 295256
  chr22:22307056-22307367
  hyper

SEQ ID NO: 401082 - DNA, 257 bp, Homo sapiens; identical to SEQ ID NO: 241558
  chr22:22337127-22337384
  hyper

SEQ ID NO: 401083 - DNA, 166 bp, Homo sapiens; identical to SEQ ID NO: 241561
  chr22:23484157-23484323
  hyper

SEQ ID NO: 401084 - DNA, 80 bp, Homo sapiens; identical to SEQ ID NO: 241562
  chr22:23522446-23522526
  hyper

SEQ ID NO: 401085 - DNA, 458 bp, Homo sapiens; identical to SEQ ID NO: 226339
  chr22:24110419-24110877
  hyper

SEQ ID NO: 401086 - DNA, 89 bp, Homo sapiens; identical to SEQ ID NO: 206070
  chr22:24236849-24236938
  hyper

SEQ ID NO: 401087 - DNA, 237 bp, Homo sapiens; identical to SEQ ID NO: 241572
  chr22:24666726-24666963
  hyper

SEQ ID NO: 401088 - DNA, 91 bp, Homo sapiens; identical to SEQ ID NO: 206073
  chr22:24989196-24989287
  hyper

SEQ ID NO: 401089 - DNA, 514 bp, Homo sapiens; identical to SEQ ID NO: 295277
  chr22:25507304-25507818
  hyper

SEQ ID NO: 401090 - DNA, 215 bp, Homo sapiens; identical to SEQ ID NO: 241580
  chr22:26773510-26773725
  hyper

SEQ ID NO: 401091 - DNA, 139 bp, Homo sapiens; identical to SEQ ID NO: 206084
  chr22:26880366-26880505
  hyper

SEQ ID NO: 401092 - DNA, 45 bp, Homo sapiens; identical to SEQ ID NO: 295289
  chr22:26908201-26908246
  hyper

SEQ ID NO: 401093 - DNA, 99 bp, Homo sapiens; identical to SEQ ID NO: 133898
  chr22:26908292-26908391
  hyper

SEQ ID NO: 401094 - DNA, 345 bp, Homo sapiens; identical to SEQ ID NO: 241585
  chr22:27054544-27054889
  hyper

SEQ ID NO: 401095 - DNA, 163 bp, Homo sapiens; identical to SEQ ID NO: 206087
  chr22:27496885-27497048
  hyper

SEQ ID NO: 401096 - DNA, 210 bp, Homo sapiens; identical to SEQ ID NO: 295301
  chr22:28197049-28197259
  hyper

SEQ ID NO: 401097 - DNA, 66 bp, Homo sapiens; identical to SEQ ID NO: 206089
  chr22:28198503-28198569
  hyper

SEQ ID NO: 401098 - DNA, 48 bp, Homo sapiens; identical to SEQ ID NO: 206090
  chr22:28198605-28198653
  hyper

SEQ ID NO: 401099 - DNA, 88 bp, Homo sapiens; identical to SEQ ID NO: 241596
  chr22:28839653-28839741
  hyper

SEQ ID NO: 401100 - DNA, 95 bp, Homo sapiens; identical to SEQ ID NO: 241598
  chr22:29137894-29137989
  hyper

SEQ ID NO: 401101 - DNA, 73 bp, Homo sapiens; identical to SEQ ID NO: 241599
  chr22:29279556-29279629
  hyper

SEQ ID NO: 401102 - DNA, 73 bp, Homo sapiens; identical to SEQ ID NO: 241600
  chr22:29279911-29279984
  hyper

SEQ ID NO: 401103 - DNA, 321 bp, Homo sapiens; identical to SEQ ID NO: 226353
  chr22:29468748-29469069
  hyper

SEQ ID NO: 401104 - DNA, 44 bp, Homo sapiens; identical to SEQ ID NO: 384852
  chr22:29469129-29469173
  hyper

SEQ ID NO: 401105 - DNA, 202 bp, Homo sapiens; identical to SEQ ID NO: 206096
  chr22:29469213-29469415
  hyper

SEQ ID NO: 401106 - DNA, 45 bp, Homo sapiens; identical to SEQ ID NO: 13392
  chr22:29469460-29469505
  hyper

SEQ ID NO: 401107 - DNA, 40 bp, Homo sapiens; identical to SEQ ID NO: 241606
  chr22:29550779-29550819
  hyper

SEQ ID NO: 401108 - DNA, 213 bp, Homo sapiens; identical to SEQ ID NO: 241607
  chr22:29663973-29664186
  hyper

SEQ ID NO: 401109 - DNA, 676 bp, Homo sapiens; identical to SEQ ID NO: 384855
  chr22:29702500-29703176
  hyper

SEQ ID NO: 401110 - DNA, 42 bp, Homo sapiens; identical to SEQ ID NO: 241610
  chr22:29710517-29710559
  hyper

SEQ ID NO: 401111 - DNA, 566 bp, Homo sapiens; identical to SEQ ID NO: 295328
  chr22:29710589-29711155
  hyper

SEQ ID NO: 401112 - DNA, 490 bp, Homo sapiens; identical to SEQ ID NO: 241614
  chr22:30162876-30163366
  hyper

SEQ ID NO: 401113 - DNA, 112 bp, Homo sapiens; identical to SEQ ID NO: 206100
  chr22:30642966-30643078
  hyper

SEQ ID NO: 401114 - DNA, 69 bp, Homo sapiens; identical to SEQ ID NO: 241618
  chr22:30685652-30685721
  hyper

SEQ ID NO: 401115 - DNA, 192 bp, Homo sapiens; identical to SEQ ID NO: 226359
  chr22:30723111-30723303
  hyper

SEQ ID NO: 401116 - DNA, 36 bp, Homo sapiens; identical to SEQ ID NO: 241619
  chr22:30821612-30821648
  hyper

SEQ ID NO: 401117 - DNA, 328 bp, Homo sapiens; identical to SEQ ID NO: 295344
  chr22:31002803-31003131
  hyper

SEQ ID NO: 401118 - DNA, 43 bp, Homo sapiens; identical to SEQ ID NO: 206104
  chr22:31003186-31003229
  hyper

SEQ ID NO: 401119 - DNA, 211 bp, Homo sapiens; identical to SEQ ID NO: 241624
  chr22:31031671-31031882
  hyper

SEQ ID NO: 401120 - DNA, 120 bp, Homo sapiens; identical to SEQ ID NO: 206107
  chr22:31477077-31477197
  hyper

SEQ ID NO: 401121 - DNA, 127 bp, Homo sapiens; identical to SEQ ID NO: 241633
  chr22:31795654-31795781
  hyper

SEQ ID NO: 401122 - DNA, 304 bp, Homo sapiens; identical to SEQ ID NO: 241637
  chr22:32145988-32146292
  hyper

SEQ ID NO: 401123 - DNA, 105 bp, Homo sapiens; identical to SEQ ID NO: 241644
  chr22:32871125-32871230
  hyper

SEQ ID NO: 401124 - DNA, 348 bp, Homo sapiens; identical to SEQ ID NO: 241649
  chr22:35695611-35695959
  hyper

SEQ ID NO: 401125 - DNA, 262 bp, Homo sapiens; identical to SEQ ID NO: 295372
  chr22:35767972-35768234
  hyper

SEQ ID NO: 401126 - DNA, 82 bp, Homo sapiens; identical to SEQ ID NO: 241650
  chr22:35776987-35777069
  hyper

SEQ ID NO: 401127 - DNA, 99 bp, Homo sapiens; identical to SEQ ID NO: 241653
  chr22:36424035-36424134
  hyper

SEQ ID NO: 401128 - DNA, 58 bp, Homo sapiens; identical to SEQ ID NO: 206117
  chr22:36424337-36424395
  hyper

SEQ ID NO: 401129 - DNA, 78 bp, Homo sapiens; identical to SEQ ID NO: 57980
  chr22:36424418-36424496
  hyper

SEQ ID NO: 401130 - DNA, 40 bp, Homo sapiens; identical to SEQ ID NO: 241654
  chr22:36425341-36425381
  hyper

SEQ ID NO: 401131 - DNA, 93 bp, Homo sapiens; identical to SEQ ID NO: 241655
  chr22:36462236-36462329
  hyper

SEQ ID NO: 401132 - DNA, 333 bp, Homo sapiens; identical to SEQ ID NO: 241656
  chr22:36784309-36784642
  hyper

SEQ ID NO: 401133 - DNA, 129 bp, Homo sapiens; identical to SEQ ID NO: 241658
  chr22:36850993-36851122
  hyper

SEQ ID NO: 401134 - DNA, 169 bp, Homo sapiens; identical to SEQ ID NO: 241659
  chr22:36925411-36925580
  hyper

SEQ ID NO: 401135 - DNA, 50 bp, Homo sapiens; identical to SEQ ID NO: 206122
  chr22:37172609-37172659
  hyper

SEQ ID NO: 401136 - DNA, 234 bp, Homo sapiens; identical to SEQ ID NO: 295389
  chr22:37212906-37213140
  hyper

SEQ ID NO: 401137 - DNA, 40 bp, Homo sapiens; identical to SEQ ID NO: 206125
  chr22:37595694-37595734
  hyper

SEQ ID NO: 401138 - DNA, 169 bp, Homo sapiens; identical to SEQ ID NO: 295394
  chr22:37720792-37720961
  hyper

SEQ ID NO: 401139 - DNA, 93 bp, Homo sapiens; identical to SEQ ID NO: 295395
  chr22:37721163-37721256
  hyper

SEQ ID NO: 401140 - DNA, 290 bp, Homo sapiens; identical to SEQ ID NO: 241672
  chr22:37882383-37882673
  hyper

SEQ ID NO: 401141 - DNA, 35 bp, Homo sapiens; identical to SEQ ID NO: 295402
  chr22:37914844-37914879
  hyper

SEQ ID NO: 401142 - DNA, 500 bp, Homo sapiens; identical to SEQ ID NO: 206127
  chr22:37914933-37915433
  hyper

SEQ ID NO: 401143 - DNA, 83 bp, Homo sapiens; identical to SEQ ID NO: 241675
  chr22:38054576-38054659
  hyper

SEQ ID NO: 401144 - DNA, 47 bp, Homo sapiens; identical to SEQ ID NO: 241678
  chr22:38082317-38082364
  hyper

SEQ ID NO: 401145 - DNA, 114 bp, Homo sapiens; identical to SEQ ID NO: 241680
  chr22:38200880-38200994
  hyper

SEQ ID NO: 401146 - DNA, 94 bp, Homo sapiens; identical to SEQ ID NO: 134095
  chr22:38203676-38203770
  hyper

SEQ ID NO: 401147 - DNA, 125 bp, Homo sapiens; identical to SEQ ID NO: 295416
  chr22:38214527-38214652
  hyper

SEQ ID NO: 401148 - DNA, 163 bp, Homo sapiens; identical to SEQ ID NO: 295417
  chr22:38214685-38214848
  hyper

SEQ ID NO: 401149 - DNA, 390 bp, Homo sapiens; identical to SEQ ID NO: 389876
  chr22:38577754-38578144
  hyper

SEQ ID NO: 401150 - DNA, 155 bp, Homo sapiens; identical to SEQ ID NO: 241691
  chr22:38597888-38598043
  hyper

SEQ ID NO: 401151 - DNA, 320 bp, Homo sapiens; identical to SEQ ID NO: 241692
  chr22:38598861-38599181
  hyper

SEQ ID NO: 401152 - DNA, 31 bp, Homo sapiens; identical to SEQ ID NO: 206133
  chr22:38713592-38713623
  hyper

SEQ ID NO: 401153 - DNA, 95 bp, Homo sapiens; identical to SEQ ID NO: 206134
  chr22:38863833-38863928
  hyper

SEQ ID NO: 401154 - DNA, 72 bp, Homo sapiens; identical to SEQ ID NO: 241698
  chr22:38864201-38864273
  hyper

SEQ ID NO: 401155 - DNA, 236 bp, Homo sapiens; identical to SEQ ID NO: 241701
  chr22:39052538-39052774
  hyper

SEQ ID NO: 401156 - DNA, 166 bp, Homo sapiens; identical to SEQ ID NO: 241702
  chr22:39078160-39078326
  hyper

SEQ ID NO: 401157 - DNA, 71 bp, Homo sapiens; identical to SEQ ID NO: 241704
  chr22:39101417-39101488
  hyper

SEQ ID NO: 401158 - DNA, 95 bp, Homo sapiens; identical to SEQ ID NO: 295436
  chr22:39150552-39150647
  hyper

SEQ ID NO: 401159 - DNA, 293 bp, Homo sapiens; identical to SEQ ID NO: 241707
  chr22:39190104-39190397
  hyper

SEQ ID NO: 401160 - DNA, 253 bp, Homo sapiens; identical to SEQ ID NO: 295439
  chr22:39239093-39239346
  hyper

SEQ ID NO: 401161 - DNA, 32 bp, Homo sapiens; identical to SEQ ID NO: 206137
  chr22:39239412-39239444
  hyper

SEQ ID NO: 401162 - DNA, 189 bp, Homo sapiens; identical to SEQ ID NO: 295441
  chr22:39239935-39240124
  hyper

SEQ ID NO: 401163 - DNA, 31 bp, Homo sapiens; identical to SEQ ID NO: 206138
  chr22:39268735-39268766
  hyper

SEQ ID NO: 401164 - DNA, 47 bp, Homo sapiens; identical to SEQ ID NO: 206139
  chr22:39638593-39638640
  hyper

SEQ ID NO: 401165 - DNA, 173 bp, Homo sapiens; identical to SEQ ID NO: 241712
  chr22:39696377-39696550
  hyper

SEQ ID NO: 401166 - DNA, 89 bp, Homo sapiens; identical to SEQ ID NO: 241713
  chr22:39715082-39715171
  hyper

SEQ ID NO: 401167 - DNA, 189 bp, Homo sapiens; identical to SEQ ID NO: 206140
  chr22:39715621-39715810
  hyper

SEQ ID NO: 401168 - DNA, 131 bp, Homo sapiens; identical to SEQ ID NO: 295452
  chr22:39745646-39745777
  hyper

SEQ ID NO: 401169 - DNA, 278 bp, Homo sapiens; identical to SEQ ID NO: 295453
  chr22:39746119-39746397
  hyper

SEQ ID NO: 401170 - DNA, 177 bp, Homo sapiens; identical to SEQ ID NO: 134161
  chr22:39898684-39898861
  hyper

SEQ ID NO: 401171 - DNA, 40 bp, Homo sapiens; identical to SEQ ID NO: 241718
  chr22:39928913-39928953
  hyper

SEQ ID NO: 401172 - DNA, 91 bp, Homo sapiens; identical to SEQ ID NO: 206142
  chr22:39930975-39931066
  hyper

SEQ ID NO: 401173 - DNA, 119 bp, Homo sapiens
  chr22:39954278-39954397
  hyper
ggtcctctctccaaggccacgaaagttctctcggtgccaatactgaagccagctgagccagcgctgcagaaatttattcaacaagtcaggctgccggccggggcccgggttgtccgcgc

SEQ ID NO: 401174 - DNA, 94 bp, Homo sapiens; identical to SEQ ID NO: 241725
  chr22:41215480-41215574
  hyper

SEQ ID NO: 401175 - DNA, 104 bp, Homo sapiens; identical to SEQ ID NO: 241729
  chr22:41593898-41594002
  hyper

SEQ ID NO: 401176 - DNA, 268 bp, Homo sapiens; identical to SEQ ID NO: 241731
  chr22:41682088-41682356
  hyper

SEQ ID NO: 401177 - DNA, 231 bp, Homo sapiens; identical to SEQ ID NO: 206146
  chr22:41682703-41682934
  hyper

SEQ ID NO: 401178 - DNA, 212 bp, Homo sapiens; identical to SEQ ID NO: 206148
  chr22:41763239-41763451
  hyper

SEQ ID NO: 401179 - DNA, 395 bp, Homo sapiens; identical to SEQ ID NO: 206149
  chr22:41864720-41865115
  hyper

SEQ ID NO: 401180 - DNA, 204 bp, Homo sapiens; identical to SEQ ID NO: 241737
  chr22:41940462-41940666
  hyper

SEQ ID NO: 401181 - DNA, 78 bp, Homo sapiens; identical to SEQ ID NO: 241738
  chr22:41985628-41985706
  hyper

SEQ ID NO: 401182 - DNA, 141 bp, Homo sapiens; identical to SEQ ID NO: 241741
  chr22:42229198-42229339
  hyper

SEQ ID NO: 401183 - DNA, 132 bp, Homo sapiens; identical to SEQ ID NO: 295494
  chr22:42315449-42315581
  hyper

SEQ ID NO: 401184 - DNA, 209 bp, Homo sapiens; identical to SEQ ID NO: 295495
  chr22:42315681-42315890
  hyper

SEQ ID NO: 401185 - DNA, 80 bp, Homo sapiens; identical to SEQ ID NO: 295496
  chr22:42315949-42316029
  hyper

SEQ ID NO: 401186 - DNA, 144 bp, Homo sapiens; identical to SEQ ID NO: 206154
  chr22:42322755-42322899
  hyper

SEQ ID NO: 401187 - DNA, 413 bp, Homo sapiens; identical to SEQ ID NO: 206155
  chr22:42470216-42470629
  hyper

SEQ ID NO: 401188 - DNA, 400 bp, Homo sapiens; identical to SEQ ID NO: 206156
  chr22:42669780-42670180
  hyper

SEQ ID NO: 401189 - DNA, 261 bp, Homo sapiens; identical to SEQ ID NO: 241751
  chr22:43010938-43011199
  hyper

SEQ ID NO: 401190 - DNA, 248 bp, Homo sapiens; identical to SEQ ID NO: 226391
  chr22:43015553-43015801
  hyper

SEQ ID NO: 401191 - DNA, 296 bp, Homo sapiens; identical to SEQ ID NO: 241755
  chr22:43506224-43506520
  hyper

SEQ ID NO: 401192 - DNA, 132 bp, Homo sapiens; identical to SEQ ID NO: 206161
  chr22:44287922-44288054
  hyper

SEQ ID NO: 401193 - DNA, 168 bp, Homo sapiens; identical to SEQ ID NO: 295520
  chr22:44319565-44319733
  hyper

SEQ ID NO: 401194 - DNA, 112 bp, Homo sapiens; identical to SEQ ID NO: 241777
  chr22:45559225-45559337
  hyper

SEQ ID NO: 401195 - DNA, 101 bp, Homo sapiens; identical to SEQ ID NO: 241784
  chr22:46274465-46274566
  hyper

SEQ ID NO: 401196 - DNA, 38 bp, Homo sapiens; identical to SEQ ID NO: 206173
  chr22:46302277-46302315
  hyper

SEQ ID NO: 401197 - DNA, 57 bp, Homo sapiens; identical to SEQ ID NO: 206174
  chr22:46363503-46363560
  hyper

SEQ ID NO: 401198 - DNA, 519 bp, Homo sapiens; identical to SEQ ID NO: 295552
  chr22:46371534-46372053
  hyper

SEQ ID NO: 401199 - DNA, 304 bp, Homo sapiens; identical to SEQ ID NO: 295553
  chr22:46372457-46372761
  hyper

SEQ ID NO: 401200 - DNA, 175 bp, Homo sapiens; identical to SEQ ID NO: 295554
  chr22:46372769-46372944
  hyper

SEQ ID NO: 401201 - DNA, 97 bp, Homo sapiens; identical to SEQ ID NO: 295555
  chr22:46372974-46373071
  hyper

SEQ ID NO: 401202 - DNA, 368 bp, Homo sapiens; identical to SEQ ID NO: 226399
  chr22:46465893-46466261
  hyper

SEQ ID NO: 401203 - DNA, 359 bp, Homo sapiens; identical to SEQ ID NO: 226400
  chr22:46468170-46468529
  hyper

SEQ ID NO: 401204 - DNA, 111 bp, Homo sapiens; identical to SEQ ID NO: 226401
  chr22:46658172-46658283
  hyper

SEQ ID NO: 401205 - DNA, 170 bp, Homo sapiens; identical to SEQ ID NO: 241794
  chr22:46663531-46663701
  hyper

SEQ ID NO: 401206 - DNA, 115 bp, Homo sapiens; identical to SEQ ID NO: 241797
  chr22:47158139-47158254
  hyper

SEQ ID NO: 401207 - DNA, 127 bp, Homo sapiens; identical to SEQ ID NO: 241798
  chr22:47158507-47158634
  hyper

SEQ ID NO: 401208 - DNA, 198 bp, Homo sapiens; identical to SEQ ID NO: 295570
  chr22:50118499-50118697
  hyper

SEQ ID NO: 401209 - DNA, 66 bp, Homo sapiens; identical to SEQ ID NO: 134360
  chr22:50118722-50118788
  hyper

SEQ ID NO: 401210 - DNA, 343 bp, Homo sapiens; identical to SEQ ID NO: 226407
  chr22:50246433-50246776
  hyper

SEQ ID NO: 401211 - DNA, 221 bp, Homo sapiens; identical to SEQ ID NO: 241803
  chr22:50311963-50312184
  hyper

SEQ ID NO: 401212 - DNA, 189 bp, Homo sapiens; identical to SEQ ID NO: 241807
  chr22:50699694-50699883
  hyper

SEQ ID NO: 401213 - DNA, 84 bp, Homo sapiens; identical to SEQ ID NO: 206187
  chr22:50745645-50745729
  hyper

SEQ ID NO: 401214 - DNA, 183 bp, Homo sapiens; identical to SEQ ID NO: 206188
  chr22:50765110-50765293
  hyper

SEQ ID NO: 401215 - DNA, 104 bp, Homo sapiens; identical to SEQ ID NO: 226416
  chr22:50874285-50874389
  hyper

SEQ ID NO: 401216 - DNA, 265 bp, Homo sapiens; identical to SEQ ID NO: 206190
  chr22:50964979-50965244
  hyper

SEQ ID NO: 401217 - DNA, 69 bp, Homo sapiens; identical to SEQ ID NO: 134410
  chr22:51021437-51021506
  hyper

SEQ ID NO: 401218 - DNA, 234 bp, Homo sapiens; identical to SEQ ID NO: 241817
  chr22:51066542-51066776
  hyper

SEQ ID NO: 401219 - DNA, 101 bp, Homo sapiens; identical to SEQ ID NO: 241820
  chrX:2747435-2747536
  hyper

SEQ ID NO: 401220 - DNA, 282 bp, Homo sapiens; identical to SEQ ID NO: 241823
  chrX:3630855-3631137
  hyper

SEQ ID NO: 401221 - DNA, 110 bp, Homo sapiens; identical to SEQ ID NO: 241824
  chrX:3631931-3632041
  hyper

SEQ ID NO: 401222 - DNA, 60 bp, Homo sapiens; identical to SEQ ID NO: 295612
  chrX:6143715-6143775
  hyper

SEQ ID NO: 401223 - DNA, 624 bp, Homo sapiens; identical to SEQ ID NO: 295613
  chrX:6144289-6144913
  hyper

SEQ ID NO: 401224 - DNA, 76 bp, Homo sapiens; identical to SEQ ID NO: 206199
  chrX:6145850-6145926
  hyper

SEQ ID NO: 401225 - DNA, 327 bp, Homo sapiens; identical to SEQ ID NO: 206200
  chrX:7065514-7065841
  hyper

SEQ ID NO: 401226 - DNA, 373 bp, Homo sapiens; identical to SEQ ID NO: 206201
  chrX:7066303-7066676
  hyper

SEQ ID NO: 401227 - DNA, 161 bp, Homo sapiens; identical to SEQ ID NO: 226428
  chrX:11776190-11776351
  hyper

SEQ ID NO: 401228 - DNA, 99 bp, Homo sapiens; identical to SEQ ID NO: 206214
  chrX:15809046-15809145
  hyper

SEQ ID NO: 401229 - DNA, 82 bp, Homo sapiens; identical to SEQ ID NO: 206215
  chrX:15817994-15818076
  hyper

SEQ ID NO: 401230 - DNA, 122 bp, Homo sapiens; identical to SEQ ID NO: 206219
  chrX:15827322-15827444
  hyper

SEQ ID NO: 401231 - DNA, 56 bp, Homo sapiens; identical to SEQ ID NO: 206221
  chrX:15836709-15836765
  hyper

SEQ ID NO: 401232 - DNA, 110 bp, Homo sapiens; identical to SEQ ID NO: 206222
  chrX:15838329-15838439
  hyper

SEQ ID NO: 401233 - DNA, 70 bp, Homo sapiens; identical to SEQ ID NO: 206227
  chrX:27999798-27999868
  hyper

SEQ ID NO: 401234 - DNA, 46 bp, Homo sapiens; identical to SEQ ID NO: 295657
  chrX:39868176-39868222
  hyper

SEQ ID NO: 401235 - DNA, 82 bp, Homo sapiens; identical to SEQ ID NO: 295658
  chrX:39868252-39868334
  hyper

SEQ ID NO: 401236 - DNA, 1155 bp, Homo sapiens; identical to SEQ ID NO: 206230
  chrX:39910498-39911653
  hyper

SEQ ID NO: 401237 - DNA, 157 bp, Homo sapiens; identical to SEQ ID NO: 206231
  chrX:39913138-39913295
  hyper

SEQ ID NO: 401238 - DNA, 78 bp, Homo sapiens; identical to SEQ ID NO: 206232
  chrX:39913508-39913586
  hyper

SEQ ID NO: 401239 - DNA, 146 bp, Homo sapiens; identical to SEQ ID NO: 206233
  chrX:39914620-39914766
  hyper

SEQ ID NO: 401240 - DNA, 167 bp, Homo sapiens; identical to SEQ ID NO: 206234
  chrX:39916407-39916574
  hyper

SEQ ID NO: 401241 - DNA, 345 bp, Homo sapiens; identical to SEQ ID NO: 206237
  chrX:39922860-39923205
  hyper

SEQ ID NO: 401242 - DNA, 264 bp, Homo sapiens; identical to SEQ ID NO: 206238
  chrX:39923588-39923852
  hyper

SEQ ID NO: 401243 - DNA, 1059 bp, Homo sapiens; identical to SEQ ID NO: 384879
  chrX:39932474-39933533
  hyper

SEQ ID NO: 401244 - DNA, 79 bp, Homo sapiens; identical to SEQ ID NO: 206242
  chrX:39935706-39935785
  hyper

SEQ ID NO: 401245 - DNA, 118 bp, Homo sapiens; identical to SEQ ID NO: 241868
  chrX:40506870-40506988
  hyper

SEQ ID NO: 401246 - DNA, 64 bp, Homo sapiens; identical to SEQ ID NO: 241870
  chrX:40944723-40944787
  hyper

SEQ ID NO: 401247 - DNA, 175 bp, Homo sapiens; identical to SEQ ID NO: 206263
  chrX:44733192-44733367
  hyper

SEQ ID NO: 401248 - DNA, 93 bp, Homo sapiens; identical to SEQ ID NO: 295712
  chrX:71524762-71524855
  hyper

SEQ ID NO: 401249 - DNA, 40 bp, Homo sapiens; identical to SEQ ID NO: 134551
  chrX:71524952-71524992
  hyper

SEQ ID NO: 401250 - DNA, 359 bp, Homo sapiens; identical to SEQ ID NO: 226464
  chrX:73163983-73164342
  hyper

SEQ ID NO: 401251 - DNA, 83 bp, Homo sapiens; identical to SEQ ID NO: 241882
  chrX:92928028-92928111
  hyper

SEQ ID NO: 401252 - DNA, 224 bp, Homo sapiens; identical to SEQ ID NO: 206270
  chrX:92928171-92928395
  hyper

SEQ ID NO: 401253 - DNA, 101 bp, Homo sapiens; identical to SEQ ID NO: 206271
  chrX:92928507-92928608
  hyper

SEQ ID NO: 401254 - DNA, 86 bp, Homo sapiens; identical to SEQ ID NO: 206272
  chrX:92928609-92928695
  hyper

SEQ ID NO: 401255 - DNA, 417 bp, Homo sapiens; identical to SEQ ID NO: 295722
  chrX:92928736-92929153
  hyper

SEQ ID NO: 401256 - DNA, 41 bp, Homo sapiens; identical to SEQ ID NO: 206274
  chrX:107003164-107003205
  hyper

SEQ ID NO: 401257 - DNA, 115 bp, Homo sapiens; identical to SEQ ID NO: 241887
  chrX:110342113-110342228
  hyper

SEQ ID NO: 401258 - DNA, 97 bp, Homo sapiens; identical to SEQ ID NO: 206283
  chrX:123171376-123171473
  hyper

SEQ ID NO: 401259 - DNA, 77 bp, Homo sapiens; identical to SEQ ID NO: 206284
  chrX:123176418-123176495
  hyper

SEQ ID NO: 401260 - DNA, 135 bp, Homo sapiens; identical to SEQ ID NO: 206288
  chrX:123184024-123184159
  hyper

SEQ ID NO: 401261 - DNA, 112 bp, Homo sapiens; identical to SEQ ID NO: 206291
  chrX:123191715-123191827
  hyper

SEQ ID NO: 401262 - DNA, 71 bp, Homo sapiens; identical to SEQ ID NO: 206296
  chrX:123199725-123199796
  hyper

SEQ ID NO: 401263 - DNA, 262 bp, Homo sapiens; identical to SEQ ID NO: 206297
  chrX:123200024-123200286
  hyper

SEQ ID NO: 401264 - DNA, 175 bp, Homo sapiens; identical to SEQ ID NO: 206299
  chrX:123204998-123205173
  hyper

SEQ ID NO: 401265 - DNA, 140 bp, Homo sapiens; identical to SEQ ID NO: 206300
  chrX:123210181-123210321
  hyper

SEQ ID NO: 401266 - DNA, 102 bp, Homo sapiens; identical to SEQ ID NO: 206301
  chrX:123211806-123211908
  hyper

SEQ ID NO: 401267 - DNA, 133 bp, Homo sapiens; identical to SEQ ID NO: 206303
  chrX:123217270-123217403
  hyper

SEQ ID NO: 401268 - DNA, 127 bp, Homo sapiens; identical to SEQ ID NO: 206306
  chrX:123227867-123227994
  hyper

SEQ ID NO: 401269 - DNA, 2083 bp, Homo sapiens; identical to SEQ ID NO: 206308
  chrX:123234423-123236506
  hyper

SEQ ID NO: 401270 - DNA, 136 bp, Homo sapiens; identical to SEQ ID NO: 206309
  chrX:129139163-129139299
  hyper

SEQ ID NO: 401271 - DNA, 91 bp, Homo sapiens; identical to SEQ ID NO: 206310
  chrX:129146553-129146644
  hyper

SEQ ID NO: 401272 - DNA, 2398 bp, Homo sapiens; identical to SEQ ID NO: 384886
  chrX:129147791-129150189
  hyper

SEQ ID NO: 401273 - DNA, 81 bp, Homo sapiens; identical to SEQ ID NO: 206313
  chrX:129156871-129156952
  hyper

SEQ ID NO: 401274 - DNA, 227 bp, Homo sapiens; identical to SEQ ID NO: 206315
  chrX:129162609-129162836
  hyper

SEQ ID NO: 401275 - DNA, 222 bp, Homo sapiens; identical to SEQ ID NO: 206316
  chrX:129168429-129168651
  hyper

SEQ ID NO: 401276 - DNA, 48 bp, Homo sapiens
  chrX:129171341-129171389
  hyper
gatgttgttctctactgcctccagaaagacagtgaagatgtgaatcac

SEQ ID NO: 401277 - DNA, 148 bp, Homo sapiens; identical to SEQ ID NO: 206318
  chrX:129173111-129173259
  hyper

SEQ ID NO: 401278 - DNA, 78 bp, Homo sapiens; identical to SEQ ID NO: 206319
  chrX:129184691-129184769
  hyper

SEQ ID NO: 401279 - DNA, 157 bp, Homo sapiens; identical to SEQ ID NO: 206320
  chrX:129185834-129185991
  hyper

SEQ ID NO: 401280 - DNA, 184 bp, Homo sapiens; identical to SEQ ID NO: 206324
  chrX:133511601-133511785
  hyper

SEQ ID NO: 401281 - DNA, 102 bp, Homo sapiens; identical to SEQ ID NO: 206325
  chrX:133512034-133512136
  hyper

SEQ ID NO: 401282 - DNA, 134 bp, Homo sapiens; identical to SEQ ID NO: 206326
  chrX:133527530-133527664
  hyper

SEQ ID NO: 401283 - DNA, 44 bp, Homo sapiens; identical to SEQ ID NO: 206327
  chrX:133527938-133527982
  hyper

SEQ ID NO: 401284 - DNA, 130 bp, Homo sapiens; identical to SEQ ID NO: 206331
  chrX:133559230-133559360
  hyper

SEQ ID NO: 401285 - DNA, 83 bp, Homo sapiens; identical to SEQ ID NO: 206335
  chrY:6778627-6778710
  hyper

SEQ ID NO: 401286 - DNA, 56 bp, Homo sapiens; identical to SEQ ID NO: 206337
  chrY:14533221-14533277
  hyper

SEQ ID NO: 401287 - DNA, 113 bp, Homo sapiens; identical to SEQ ID NO: 206341
  chrY:15591519-15591632
  hyper

SEQ ID NO: 401288 - DNA, 61 bp, Homo sapiens; identical to SEQ ID NO: 206346
  chrY:21729023-21729084
  hyper

SEQ ID NO: 401289 - DNA, 45 bp, Homo sapiens; identical to SEQ ID NO: 206352
  FP325318.4_87426-89530:1058-1103
  hyper

SEQ ID NO: 401290 - DNA, 96 bp, Homo sapiens; identical to SEQ ID NO: 241915
  JH636052.4:1376242-1376338
  hyper

SEQ ID NO: 401291 - DNA, 112 bp, Homo sapiens; identical to SEQ ID NO: 206354
  NW_001838402.2_289580-297926:6069-6181
  hyper

SEQ ID NO: 401292 - DNA, 33 bp, Homo sapiens; identical to SEQ ID NO: 247270
  chr1:809313-809346
  hypo

SEQ ID NO: 401293 - DNA, 149 bp, Homo sapiens; identical to SEQ ID NO: 206356
  chr1:872320-872469
  hypo

SEQ ID NO: 401294 - DNA, 617 bp, Homo sapiens; identical to SEQ ID NO: 247280
  chr1:900230-900847
  hypo

SEQ ID NO: 401295 - DNA, 179 bp, Homo sapiens; identical to SEQ ID NO: 247281
  chr1:906924-907103
  hypo

SEQ ID NO: 401296 - DNA, 1005 bp, Homo sapiens; identical to SEQ ID NO: 247283
  chr1:915023-916028
  hypo

SEQ ID NO: 401297 - DNA, 898 bp, Homo sapiens; identical to SEQ ID NO: 221173
  chr1:935362-936260
  hypo

SEQ ID NO: 401298 - DNA, 392 bp, Homo sapiens; identical to SEQ ID NO: 197235
  chr1:955508-955900
  hypo

SEQ ID NO: 401299 - DNA, 206 bp, Homo sapiens; identical to SEQ ID NO: 247286
  chr1:959107-959313
  hypo

SEQ ID NO: 401300 - DNA, 191 bp, Homo sapiens; identical to SEQ ID NO: 206371
  chr1:982294-982485
  hypo

SEQ ID NO: 401301 - DNA, 1209 bp, Homo sapiens; identical to SEQ ID NO: 247290
  chr1:987799-989008
  hypo

SEQ ID NO: 401302 - DNA, 207 bp, Homo sapiens; identical to SEQ ID NO: 247292
  chr1:990294-990501
  hypo

SEQ ID NO: 401303 - DNA, 61 bp, Homo sapiens; identical to SEQ ID NO: 221176
  chr1:994999-995060
  hypo

SEQ ID NO: 401304 - DNA, 130 bp, Homo sapiens; identical to SEQ ID NO: 221177
  chr1:1052182-1052312
  hypo

SEQ ID NO: 401305 - DNA, 670 bp, Homo sapiens; identical to SEQ ID NO: 247302
  chr1:1062954-1063624
  hypo

SEQ ID NO: 401306 - DNA, 266 bp, Homo sapiens; identical to SEQ ID NO: 206381
  chr1:1064886-1065152
  hypo

SEQ ID NO: 401307 - DNA, 99 bp, Homo sapiens; identical to SEQ ID NO: 247305
  chr1:1066721-1066820
  hypo

SEQ ID NO: 401308 - DNA, 316 bp, Homo sapiens; identical to SEQ ID NO: 206382
  chr1:1069739-1070055
  hypo

SEQ ID NO: 401309 - DNA, 57 bp, Homo sapiens; identical to SEQ ID NO: 206383
  chr1:1079129-1079186
  hypo

SEQ ID NO: 401310 - DNA, 171 bp, Homo sapiens; identical to SEQ ID NO: 247310
  chr1:1084062-1084233
  hypo

SEQ ID NO: 401311 - DNA, 113 bp, Homo sapiens; identical to SEQ ID NO: 247311
  chr1:1091616-1091729
  hypo

SEQ ID NO: 401312 - DNA, 153 bp, Homo sapiens; identical to SEQ ID NO: 247312
  chr1:1094263-1094416
  hypo

SEQ ID NO: 401313 - DNA, 240 bp, Homo sapiens; identical to SEQ ID NO: 247317
  chr1:1111233-1111473
  hypo

SEQ ID NO: 401314 - DNA, 85 bp, Homo sapiens; identical to SEQ ID NO: 247318
  chr1:1114509-1114594
  hypo

SEQ ID NO: 401315 - DNA, 261 bp, Homo sapiens; identical to SEQ ID NO: 206387
  chr1:1151687-1151948
  hypo

SEQ ID NO: 401316 - DNA, 128 bp, Homo sapiens; identical to SEQ ID NO: 206391
  chr1:1190081-1190209
  hypo

SEQ ID NO: 401317 - DNA, 552 bp, Homo sapiens; identical to SEQ ID NO: 295893
  chr1:1190395-1190947
  hypo

SEQ ID NO: 401318 - DNA, 67 bp, Homo sapiens; identical to SEQ ID NO: 206393
  chr1:1221510-1221577
  hypo

SEQ ID NO: 401319 - DNA, 33 bp, Homo sapiens; identical to SEQ ID NO: 247343
  chr1:1258113-1258146
  hypo

SEQ ID NO: 401320 - DNA, 212 bp, Homo sapiens; identical to SEQ ID NO: 295909
  chr1:1264887-1265099
  hypo

SEQ ID NO: 401321 - DNA, 148 bp, Homo sapiens; identical to SEQ ID NO: 247345
  chr1:1265340-1265488
  hypo

SEQ ID NO: 401322 - DNA, 31 bp, Homo sapiens; identical to SEQ ID NO: 247346
  chr1:1265518-1265549
  hypo

SEQ ID NO: 401323 - DNA, 150 bp, Homo sapiens; identical to SEQ ID NO: 206400
  chr1:1266864-1267014
  hypo

SEQ ID NO: 401324 - DNA, 108 bp, Homo sapiens; identical to SEQ ID NO: 206401
  chr1:1272384-1272492
  hypo

SEQ ID NO: 401325 - DNA, 110 bp, Homo sapiens; identical to SEQ ID NO: 206402
  chr1:1273361-1273471
  hypo

SEQ ID NO: 401326 - DNA, 112 bp, Homo sapiens; identical to SEQ ID NO: 247351
  chr1:1277898-1278010
  hypo

SEQ ID NO: 401327 - DNA, 412 bp, Homo sapiens; identical to SEQ ID NO: 247355
  chr1:1377720-1378132
  hypo

SEQ ID NO: 401328 - DNA, 47 bp, Homo sapiens; identical to SEQ ID NO: 206406
  chr1:1389833-1389880
  hypo

SEQ ID NO: 401329 - DNA, 123 bp, Homo sapiens; identical to SEQ ID NO: 247366
  chr1:1496748-1496871
  hypo

SEQ ID NO: 401330 - DNA, 122 bp, Homo sapiens; identical to SEQ ID NO: 247368
  chr1:1519092-1519214
  hypo

SEQ ID NO: 401331 - DNA, 48 bp, Homo sapiens; identical to SEQ ID NO: 247374
  chr1:1610925-1610973
  hypo

SEQ ID NO: 401332 - DNA, 342 bp, Homo sapiens; identical to SEQ ID NO: 247375
  chr1:1611923-1612265
  hypo

SEQ ID NO: 401333 - DNA, 104 bp, Homo sapiens; identical to SEQ ID NO: 295945
  chr1:1625888-1625992
  hypo

SEQ ID NO: 401334 - DNA, 38 bp, Homo sapiens; identical to SEQ ID NO: 247379
  chr1:1652607-1652645
  hypo

SEQ ID NO: 401335 - DNA, 134 bp, Homo sapiens; identical to SEQ ID NO: 247380
  chr1:1668525-1668659
  hypo

SEQ ID NO: 401336 - DNA, 44 bp, Homo sapiens; identical to SEQ ID NO: 247381
  chr1:1671716-1671760
  hypo

SEQ ID NO: 401337 - DNA, 128 bp, Homo sapiens; identical to SEQ ID NO: 247382
  chr1:1691803-1691931
  hypo

SEQ ID NO: 401338 - DNA, 280 bp, Homo sapiens; identical to SEQ ID NO: 247389
  chr1:1724694-1724974
  hypo

SEQ ID NO: 401339 - DNA, 148 bp, Homo sapiens; identical to SEQ ID NO: 221180
  chr1:1737808-1737956
  hypo

SEQ ID NO: 401340 - DNA, 44 bp, Homo sapiens; identical to SEQ ID NO: 197244
  chr1:1747214-1747258
  hypo

SEQ ID NO: 401341 - DNA, 154 bp, Homo sapiens; identical to SEQ ID NO: 295965
  chr1:1861661-1861815
  hypo

SEQ ID NO: 401342 - DNA, 144 bp, Homo sapiens; identical to SEQ ID NO: 206421
  chr1:1888228-1888372
  hypo

SEQ ID NO: 401343 - DNA, 503 bp, Homo sapiens; identical to SEQ ID NO: 247397
  chr1:1888803-1889306
  hypo

SEQ ID NO: 401344 - DNA, 367 bp, Homo sapiens; identical to SEQ ID NO: 247398
  chr1:1901958-1902325
  hypo

SEQ ID NO: 401345 - DNA, 35 bp, Homo sapiens; identical to SEQ ID NO: 389954
  chr1:1974742-1974777
  hypo

SEQ ID NO: 401346 - DNA, 166 bp, Homo sapiens; identical to SEQ ID NO: 247406
  chr1:1999032-1999198
  hypo

SEQ ID NO: 401347 - DNA, 351 bp, Homo sapiens
  chr1:2014199-2014550
  hypo
gggggtggctttgaggacacctgtcctccttcacaggggcactccggatgtagtagcagggagagggtggaggggcggccaagggcgtgagggagagggtggaggggtggtgtgagggtgcaagggagagggtggagagggtggcagtgagggcgcgagagggtggaggggcggcatgagggagcaagccacctcgggcacaggtgaaggacaggtgtccacaccttgggtgcccccgtcctccctctcctcatgtcctaataggtctgaacaggaagttacatttagggcggctgtacagtgagttttaaataccttggtccaaattttcaaacacgtatcgttagcgtt

SEQ ID NO: 401348 - DNA, 101 bp, Homo sapiens; identical to SEQ ID NO: 247409
  chr1:2025268-2025369
  hypo

SEQ ID NO: 401349 - DNA, 185 bp, Homo sapiens; identical to SEQ ID NO: 206429
  chr1:2041058-2041243
  hypo

SEQ ID NO: 401350 - DNA, 218 bp, Homo sapiens; identical to SEQ ID NO: 206430
  chr1:2065387-2065605
  hypo

SEQ ID NO: 401351 - DNA, 154 bp, Homo sapiens; identical to SEQ ID NO: 247416
  chr1:2068692-2068846
  hypo

SEQ ID NO: 401352 - DNA, 167 bp, Homo sapiens; identical to SEQ ID NO: 247417
  chr1:2069360-2069527
  hypo

SEQ ID NO: 401353 - DNA, 521 bp, Homo sapiens; identical to SEQ ID NO: 247420
  chr1:2107353-2107874
  hypo

SEQ ID NO: 401354 - DNA, 264 bp, Homo sapiens; identical to SEQ ID NO: 247421
  chr1:2111815-2112079
  hypo

SEQ ID NO: 401355 - DNA, 64 bp, Homo sapiens; identical to SEQ ID NO: 247424
  chr1:2123197-2123261
  hypo

SEQ ID NO: 401356 - DNA, 246 bp, Homo sapiens; identical to SEQ ID NO: 296004
  chr1:2129650-2129896
  hypo

SEQ ID NO: 401357 - DNA, 114 bp, Homo sapiens; identical to SEQ ID NO: 277832
  chr1:2135930-2136044
  hypo

SEQ ID NO: 401358 - DNA, 251 bp, Homo sapiens; identical to SEQ ID NO: 277833
  chr1:2136088-2136339
  hypo

SEQ ID NO: 401359 - DNA, 100 bp, Homo sapiens; identical to SEQ ID NO: 206441
  chr1:2154150-2154250
  hypo

SEQ ID NO: 401360 - DNA, 337 bp, Homo sapiens; identical to SEQ ID NO: 247432
  chr1:2167223-2167560
  hypo

SEQ ID NO: 401361 - DNA, 496 bp, Homo sapiens; identical to SEQ ID NO: 206444
  chr1:2190967-2191463
  hypo

SEQ ID NO: 401362 - DNA, 131 bp, Homo sapiens; identical to SEQ ID NO: 247436
  chr1:2205382-2205513
  hypo

SEQ ID NO: 401363 - DNA, 472 bp, Homo sapiens; identical to SEQ ID NO: 247438
  chr1:2234639-2235111
  hypo

SEQ ID NO: 401364 - DNA, 162 bp, Homo sapiens; identical to SEQ ID NO: 206447
  chr1:2238918-2239080
  hypo

SEQ ID NO: 401365 - DNA, 693 bp, Homo sapiens; identical to SEQ ID NO: 247453
  chr1:2279094-2279787
  hypo

SEQ ID NO: 401366 - DNA, 324 bp, Homo sapiens; identical to SEQ ID NO: 247455
  chr1:2288153-2288477
  hypo

SEQ ID NO: 401367 - DNA, 31 bp, Homo sapiens; identical to SEQ ID NO: 296043
  chr1:2307894-2307925
  hypo

SEQ ID NO: 401368 - DNA, 150 bp, Homo sapiens; identical to SEQ ID NO: 296044
  chr1:2307955-2308105
  hypo

SEQ ID NO: 401369 - DNA, 195 bp, Homo sapiens; identical to SEQ ID NO: 296045
  chr1:2309953-2310148
  hypo

SEQ ID NO: 401370 - DNA, 162 bp, Homo sapiens; identical to SEQ ID NO: 296046
  chr1:2310244-2310406
  hypo

SEQ ID NO: 401371 - DNA, 36 bp, Homo sapiens; identical to SEQ ID NO: 296048
  chr1:2316466-2316502
  hypo

SEQ ID NO: 401372 - DNA, 619 bp, Homo sapiens; identical to SEQ ID NO: 247462
  chr1:2328571-2329190
  hypo

SEQ ID NO: 401373 - DNA, 218 bp, Homo sapiens; identical to SEQ ID NO: 206469
  chr1:2334771-2334989
  hypo

SEQ ID NO: 401374 - DNA, 335 bp, Homo sapiens; identical to SEQ ID NO: 206470
  chr1:2336000-2336335
  hypo

SEQ ID NO: 401375 - DNA, 32 bp, Homo sapiens; identical to SEQ ID NO: 206471
  chr1:2336365-2336397
  hypo

SEQ ID NO: 401376 - DNA, 308 bp, Homo sapiens; identical to SEQ ID NO: 296058
  chr1:2336427-2336735
  hypo

SEQ ID NO: 401377 - DNA, 268 bp, Homo sapiens; identical to SEQ ID NO: 247473
  chr1:2384535-2384803
  hypo

SEQ ID NO: 401378 - DNA, 161 bp, Homo sapiens; identical to SEQ ID NO: 247474
  chr1:2403083-2403244
  hypo

SEQ ID NO: 401379 - DNA, 54 bp, Homo sapiens; identical to SEQ ID NO: 206475
  chr1:2411364-2411418
  hypo

SEQ ID NO: 401380 - DNA, 35 bp, Homo sapiens; identical to SEQ ID NO: 206477
  chr1:2412563-2412598
  hypo

SEQ ID NO: 401381 - DNA, 114 bp, Homo sapiens; identical to SEQ ID NO: 247479
  chr1:2430550-2430664
  hypo

SEQ ID NO: 401382 - DNA, 361 bp, Homo sapiens; identical to SEQ ID NO: 206479
  chr1:2450394-2450755
  hypo

SEQ ID NO: 401383 - DNA, 177 bp, Homo sapiens; identical to SEQ ID NO: 206481
  chr1:2463122-2463299
  hypo

SEQ ID NO: 401384 - DNA, 109 bp, Homo sapiens; identical to SEQ ID NO: 296076
  chr1:2468442-2468551
  hypo

SEQ ID NO: 401385 - DNA, 60 bp, Homo sapiens; identical to SEQ ID NO: 296077
  chr1:2468582-2468642
  hypo

SEQ ID NO: 401386 - DNA, 100 bp, Homo sapiens; identical to SEQ ID NO: 296078
  chr1:2468792-2468892
  hypo

SEQ ID NO: 401387 - DNA, 89 bp, Homo sapiens; identical to SEQ ID NO: 296082
  chr1:2507183-2507272
  hypo

SEQ ID NO: 401388 - DNA, 89 bp, Homo sapiens; identical to SEQ ID NO: 206485
  chr1:2522316-2522405
  hypo

SEQ ID NO: 401389 - DNA, 151 bp, Homo sapiens; identical to SEQ ID NO: 247499
  chr1:2746955-2747106
  hypo

SEQ ID NO: 401390 - DNA, 68 bp, Homo sapiens; identical to SEQ ID NO: 247501
  chr1:2798429-2798497
  hypo

SEQ ID NO: 401391 - DNA, 143 bp, Homo sapiens; identical to SEQ ID NO: 206489
  chr1:2833979-2834122
  hypo

SEQ ID NO: 401392 - DNA, 129 bp, Homo sapiens; identical to SEQ ID NO: 296105
  chr1:2859551-2859680
  hypo

SEQ ID NO: 401393 - DNA, 276 bp, Homo sapiens; identical to SEQ ID NO: 247511
  chr1:2878440-2878716
  hypo

SEQ ID NO: 401394 - DNA, 186 bp, Homo sapiens; identical to SEQ ID NO: 247512
  chr1:2908573-2908759
  hypo

SEQ ID NO: 401395 - DNA, 153 bp, Homo sapiens; identical to SEQ ID NO: 247520
  chr1:3006837-3006990
  hypo

SEQ ID NO: 401396 - DNA, 514 bp, Homo sapiens; identical to SEQ ID NO: 247521
  chr1:3007587-3008101
  hypo

SEQ ID NO: 401397 - DNA, 100 bp, Homo sapiens; identical to SEQ ID NO: 247524
  chr1:3015909-3016009
  hypo

SEQ ID NO: 401398 - DNA, 260 bp, Homo sapiens; identical to SEQ ID NO: 247526
  chr1:3034298-3034558
  hypo

SEQ ID NO: 401399 - DNA, 269 bp, Homo sapiens; identical to SEQ ID NO: 296127
  chr1:3035176-3035445
  hypo

SEQ ID NO: 401400 - DNA, 329 bp, Homo sapiens; identical to SEQ ID NO: 247532
  chr1:3059516-3059845
  hypo

SEQ ID NO: 401401 - DNA, 189 bp, Homo sapiens; identical to SEQ ID NO: 247533
  chr1:3063570-3063759
  hypo

SEQ ID NO: 401402 - DNA, 50 bp, Homo sapiens; identical to SEQ ID NO: 247537
  chr1:3106931-3106981
  hypo

SEQ ID NO: 401403 - DNA, 146 bp, Homo sapiens; identical to SEQ ID NO: 206501
  chr1:3107294-3107440
  hypo

SEQ ID NO: 401404 - DNA, 145 bp, Homo sapiens; identical to SEQ ID NO: 206502
  chr1:3109586-3109731
  hypo

SEQ ID NO: 401405 - DNA, 146 bp, Homo sapiens; identical to SEQ ID NO: 247543
  chr1:3122495-3122641
  hypo

SEQ ID NO: 401406 - DNA, 414 bp, Homo sapiens; identical to SEQ ID NO: 247544
  chr1:3122848-3123262
  hypo

SEQ ID NO: 401407 - DNA, 122 bp, Homo sapiens; identical to SEQ ID NO: 247548
  chr1:3130375-3130497
  hypo

SEQ ID NO: 401408 - DNA, 94 bp, Homo sapiens; identical to SEQ ID NO: 247549
  chr1:3147314-3147408
  hypo

SEQ ID NO: 401409 - DNA, 133 bp, Homo sapiens; identical to SEQ ID NO: 247555
  chr1:3194281-3194414
  hypo

SEQ ID NO: 401410 - DNA, 196 bp, Homo sapiens; identical to SEQ ID NO: 247560
  chr1:3248786-3248982
  hypo

SEQ ID NO: 401411 - DNA, 238 bp, Homo sapiens; identical to SEQ ID NO: 206519
  chr1:3327630-3327868
  hypo

SEQ ID NO: 401412 - DNA, 341 bp, Homo sapiens; identical to SEQ ID NO: 221196
  chr1:3370921-3371262
  hypo

SEQ ID NO: 401413 - DNA, 77 bp, Homo sapiens; identical to SEQ ID NO: 247575
  chr1:3373241-3373318
  hypo

SEQ ID NO: 401414 - DNA, 110 bp, Homo sapiens; identical to SEQ ID NO: 206525
  chr1:3378249-3378359
  hypo

SEQ ID NO: 401415 - DNA, 152 bp, Homo sapiens; identical to SEQ ID NO: 247581
  chr1:3384392-3384544
  hypo

SEQ ID NO: 401416 - DNA, 379 bp, Homo sapiens; identical to SEQ ID NO: 247586
  chr1:3406736-3407115
  hypo

SEQ ID NO: 401417 - DNA, 517 bp, Homo sapiens; identical to SEQ ID NO: 296201
  chr1:3410515-3411032
  hypo

SEQ ID NO: 401418 - DNA, 493 bp, Homo sapiens; identical to SEQ ID NO: 247590
  chr1:3422675-3423168
  hypo

SEQ ID NO: 401419 - DNA, 187 bp, Homo sapiens; identical to SEQ ID NO: 247593
  chr1:3436853-3437040
  hypo

SEQ ID NO: 401420 - DNA, 197 bp, Homo sapiens; identical to SEQ ID NO: 296211
  chr1:3467544-3467741
  hypo

SEQ ID NO: 401421 - DNA, 195 bp, Homo sapiens; identical to SEQ ID NO: 247600
  chr1:3470763-3470958
  hypo

SEQ ID NO: 401422 - DNA, 137 bp, Homo sapiens; identical to SEQ ID NO: 247601
  chr1:3484124-3484261
  hypo

SEQ ID NO: 401423 - DNA, 212 bp, Homo sapiens; identical to SEQ ID NO: 247602
  chr1:3512769-3512981
  hypo

SEQ ID NO: 401424 - DNA, 365 bp, Homo sapiens; identical to SEQ ID NO: 247607
  chr1:3559616-3559981
  hypo

SEQ ID NO: 401425 - DNA, 151 bp, Homo sapiens; identical to SEQ ID NO: 206537
  chr1:3576146-3576297
  hypo

SEQ ID NO: 401426 - DNA, 674 bp, Homo sapiens; identical to SEQ ID NO: 206538
  chr1:3615176-3615850
  hypo

SEQ ID NO: 401427 - DNA, 37 bp, Homo sapiens; identical to SEQ ID NO: 206539
  chr1:3622993-3623030
  hypo

SEQ ID NO: 401428 - DNA, 303 bp, Homo sapiens; identical to SEQ ID NO: 296226
  chr1:3644396-3644699
  hypo

SEQ ID NO: 401429 - DNA, 42 bp, Homo sapiens; identical to SEQ ID NO: 296227
  chr1:3644774-3644816
  hypo

SEQ ID NO: 401430 - DNA, 149 bp, Homo sapiens; identical to SEQ ID NO: 206541
  chr1:3651334-3651483
  hypo

SEQ ID NO: 401431 - DNA, 211 bp, Homo sapiens; identical to SEQ ID NO: 206542
  chr1:3655597-3655808
  hypo

SEQ ID NO: 401432 - DNA, 35 bp, Homo sapiens; identical to SEQ ID NO: 296234
  chr1:3664741-3664776
  hypo

SEQ ID NO: 401433 - DNA, 357 bp, Homo sapiens; identical to SEQ ID NO: 247629
  chr1:3731493-3731850
  hypo

SEQ ID NO: 401434 - DNA, 64 bp, Homo sapiens; identical to SEQ ID NO: 247631
  chr1:3781806-3781870
  hypo

SEQ ID NO: 401435 - DNA, 185 bp, Homo sapiens; identical to SEQ ID NO: 247633
  chr1:3786685-3786870
  hypo

SEQ ID NO: 401436 - DNA, 208 bp, Homo sapiens; identical to SEQ ID NO: 247634
  chr1:3818733-3818941
  hypo

SEQ ID NO: 401437 - DNA, 283 bp, Homo sapiens; identical to SEQ ID NO: 247636
  chr1:4057085-4057368
  hypo

SEQ ID NO: 401438 - DNA, 202 bp, Homo sapiens; identical to SEQ ID NO: 247638
  chr1:4359785-4359987
  hypo

SEQ ID NO: 401439 - DNA, 35 bp, Homo sapiens; identical to SEQ ID NO: 247639
  chr1:4391727-4391762
  hypo

SEQ ID NO: 401440 - DNA, 34 bp, Homo sapiens; identical to SEQ ID NO: 247640
  chr1:4392062-4392096
  hypo

SEQ ID NO: 401441 - DNA, 124 bp, Homo sapiens; identical to SEQ ID NO: 247641
  chr1:4460854-4460978
  hypo

SEQ ID NO: 401442 - DNA, 283 bp, Homo sapiens; identical to SEQ ID NO: 247646
  chr1:4675281-4675564
  hypo

SEQ ID NO: 401443 - DNA, 53 bp, Homo sapiens; identical to SEQ ID NO: 247647
  chr1:4696907-4696960
  hypo

SEQ ID NO: 401444 - DNA, 98 bp, Homo sapiens; identical to SEQ ID NO: 247649
  chr1:4794016-4794114
  hypo

SEQ ID NO: 401445 - DNA, 95 bp, Homo sapiens; identical to SEQ ID NO: 247651
  chr1:5587302-5587397
  hypo

SEQ ID NO: 401446 - DNA, 289 bp, Homo sapiens; identical to SEQ ID NO: 247653
  chr1:5839922-5840211
  hypo

SEQ ID NO: 401447 - DNA, 235 bp, Homo sapiens; identical to SEQ ID NO: 247655
  chr1:5922581-5922816
  hypo

SEQ ID NO: 401448 - DNA, 73 bp, Homo sapiens; identical to SEQ ID NO: 247658
  chr1:5931364-5931437
  hypo

SEQ ID NO: 401449 - DNA, 121 bp, Homo sapiens; identical to SEQ ID NO: 247659
  chr1:5931724-5931845
  hypo

SEQ ID NO: 401450 - DNA, 87 bp, Homo sapiens; identical to SEQ ID NO: 296277
  chr1:5932999-5933086
  hypo

SEQ ID NO: 401451 - DNA, 229 bp, Homo sapiens; identical to SEQ ID NO: 206558
  chr1:5933144-5933373
  hypo

SEQ ID NO: 401452 - DNA, 199 bp, Homo sapiens; identical to SEQ ID NO: 247663
  chr1:5941341-5941540
  hypo

SEQ ID NO: 401453 - DNA, 709 bp, Homo sapiens; identical to SEQ ID NO: 247664
  chr1:5942073-5942782
  hypo

SEQ ID NO: 401454 - DNA, 244 bp, Homo sapiens; identical to SEQ ID NO: 206562
  chr1:5943159-5943403
  hypo

SEQ ID NO: 401455 - DNA, 216 bp, Homo sapiens; identical to SEQ ID NO: 247668
  chr1:5946683-5946899
  hypo

SEQ ID NO: 401456 - DNA, 145 bp, Homo sapiens; identical to SEQ ID NO: 206565
  chr1:5958567-5958712
  hypo

SEQ ID NO: 401457 - DNA, 78 bp, Homo sapiens; identical to SEQ ID NO: 247672
  chr1:5977997-5978075
  hypo

SEQ ID NO: 401458 - DNA, 129 bp, Homo sapiens; identical to SEQ ID NO: 247673
  chr1:5987704-5987833
  hypo

SEQ ID NO: 401459 - DNA, 394 bp, Homo sapiens; identical to SEQ ID NO: 247676
  chr1:6047768-6048162
  hypo

SEQ ID NO: 401460 - DNA, 104 bp, Homo sapiens; identical to SEQ ID NO: 296298
  chr1:6056053-6056157
  hypo

SEQ ID NO: 401461 - DNA, 68 bp, Homo sapiens; identical to SEQ ID NO: 247681
  chr1:6111618-6111686
  hypo

SEQ ID NO: 401462 - DNA, 45 bp, Homo sapiens; identical to SEQ ID NO: 221207
  chr1:6137261-6137306
  hypo

SEQ ID NO: 401463 - DNA, 60 bp, Homo sapiens; identical to SEQ ID NO: 296313
  chr1:6188971-6189031
  hypo

SEQ ID NO: 401464 - DNA, 73 bp, Homo sapiens; identical to SEQ ID NO: 296314
  chr1:6189061-6189134
  hypo

SEQ ID NO: 401465 - DNA, 416 bp, Homo sapiens; identical to SEQ ID NO: 247692
  chr1:6202201-6202617
  hypo

SEQ ID NO: 401466 - DNA, 64 bp, Homo sapiens; identical to SEQ ID NO: 247693
  chr1:6243323-6243387
  hypo

SEQ ID NO: 401467 - DNA, 329 bp, Homo sapiens; identical to SEQ ID NO: 247694
  chr1:6278215-6278544
  hypo

SEQ ID NO: 401468 - DNA, 161 bp, Homo sapiens; identical to SEQ ID NO: 197279
  chr1:6296163-6296324
  hypo

SEQ ID NO: 401469 - DNA, 82 bp, Homo sapiens; identical to SEQ ID NO: 247698
  chr1:6297113-6297195
  hypo

SEQ ID NO: 401470 - DNA, 39 bp, Homo sapiens; identical to SEQ ID NO: 206577
  chr1:6313883-6313922
  hypo

SEQ ID NO: 401471 - DNA, 101 bp, Homo sapiens; identical to SEQ ID NO: 247701
  chr1:6329524-6329625
  hypo

SEQ ID NO: 401472 - DNA, 85 bp, Homo sapiens; identical to SEQ ID NO: 247707
  chr1:6340040-6340125
  hypo

SEQ ID NO: 401473 - DNA, 110 bp, Homo sapiens; identical to SEQ ID NO: 296337
  chr1:6360870-6360980
  hypo

SEQ ID NO: 401474 - DNA, 138 bp, Homo sapiens; identical to SEQ ID NO: 206587
  chr1:6382126-6382264
  hypo

SEQ ID NO: 401475 - DNA, 282 bp, Homo sapiens; identical to SEQ ID NO: 247718
  chr1:6405497-6405779
  hypo

SEQ ID NO: 401476 - DNA, 179 bp, Homo sapiens; identical to SEQ ID NO: 206589
  chr1:6409753-6409932
  hypo

SEQ ID NO: 401477 - DNA, 159 bp, Homo sapiens; identical to SEQ ID NO: 296349
  chr1:6422666-6422825
  hypo

SEQ ID NO: 401478 - DNA, 53 bp, Homo sapiens; identical to SEQ ID NO: 296351
  chr1:6445425-6445478
  hypo

SEQ ID NO: 401479 - DNA, 205 bp, Homo sapiens; identical to SEQ ID NO: 59004
  chr1:6445510-6445715
  hypo

SEQ ID NO: 401480 - DNA, 328 bp, Homo sapiens; identical to SEQ ID NO: 206590
  chr1:6486768-6487096
  hypo

SEQ ID NO: 401481 - DNA, 87 bp, Homo sapiens; identical to SEQ ID NO: 383686
  chr1:6526181-6526268
  hypo

SEQ ID NO: 401482 - DNA, 372 bp, Homo sapiens; identical to SEQ ID NO: 247732
  chr1:6534593-6534965
  hypo

SEQ ID NO: 401483 - DNA, 62 bp, Homo sapiens; identical to SEQ ID NO: 206593
  chr1:6537439-6537501
  hypo

SEQ ID NO: 401484 - DNA, 190 bp, Homo sapiens; identical to SEQ ID NO: 206594
  chr1:6537537-6537727
  hypo

SEQ ID NO: 401485 - DNA, 160 bp, Homo sapiens; identical to SEQ ID NO: 247734
  chr1:6562949-6563109
  hypo

SEQ ID NO: 401486 - DNA, 32 bp, Homo sapiens; identical to SEQ ID NO: 206595
  chr1:6639452-6639484
  hypo

SEQ ID NO: 401487 - DNA, 348 bp, Homo sapiens; identical to SEQ ID NO: 247738
  chr1:6648178-6648526
  hypo

SEQ ID NO: 401488 - DNA, 89 bp, Homo sapiens; identical to SEQ ID NO: 247739
  chr1:6653433-6653522
  hypo

SEQ ID NO: 401489 - DNA, 194 bp, Homo sapiens; identical to SEQ ID NO: 221214
  chr1:6659237-6659431
  hypo

SEQ ID NO: 401490 - DNA, 40 bp, Homo sapiens; identical to SEQ ID NO: 206596
  chr1:6672155-6672195
  hypo

SEQ ID NO: 401491 - DNA, 436 bp, Homo sapiens; identical to SEQ ID NO: 221215
  chr1:6675302-6675738
  hypo

SEQ ID NO: 401492 - DNA, 141 bp, Homo sapiens; identical to SEQ ID NO: 206597
  chr1:6675989-6676130
  hypo

SEQ ID NO: 401493 - DNA, 83 bp, Homo sapiens; identical to SEQ ID NO: 206603
  chr1:6871010-6871093
  hypo

SEQ ID NO: 401494 - DNA, 135 bp, Homo sapiens; identical to SEQ ID NO: 247752
  chr1:7279268-7279403
  hypo

SEQ ID NO: 401495 - DNA, 84 bp, Homo sapiens; identical to SEQ ID NO: 206605
  chr1:7550323-7550407
  hypo

SEQ ID NO: 401496 - DNA, 144 bp, Homo sapiens; identical to SEQ ID NO: 206606
  chr1:7550707-7550851
  hypo

SEQ ID NO: 401497 - DNA, 523 bp, Homo sapiens; identical to SEQ ID NO: 247756
  chr1:7560633-7561156
  hypo

SEQ ID NO: 401498 - DNA, 125 bp, Homo sapiens; identical to SEQ ID NO: 247758
  chr1:7567307-7567432
  hypo

SEQ ID NO: 401499 - DNA, 237 bp, Homo sapiens; identical to SEQ ID NO: 247759
  chr1:7700371-7700608
  hypo

SEQ ID NO: 401500 - DNA, 110 bp, Homo sapiens; identical to SEQ ID NO: 247761
  chr1:7717013-7717123
  hypo

SEQ ID NO: 401501 - DNA, 80 bp, Homo sapiens; identical to SEQ ID NO: 135597
  chr1:7728716-7728796
  hypo

SEQ ID NO: 401502 - DNA, 162 bp, Homo sapiens; identical to SEQ ID NO: 247764
  chr1:7742818-7742980
  hypo

SEQ ID NO: 401503 - DNA, 267 bp, Homo sapiens; identical to SEQ ID NO: 247765
  chr1:7777934-7778201
  hypo

SEQ ID NO: 401504 - DNA, 40 bp, Homo sapiens; identical to SEQ ID NO: 197291
  chr1:7843653-7843693
  hypo

SEQ ID NO: 401505 - DNA, 255 bp, Homo sapiens; identical to SEQ ID NO: 206613
  chr1:8044977-8045232
  hypo

SEQ ID NO: 401506 - DNA, 34 bp, Homo sapiens; identical to SEQ ID NO: 247769
  chr1:8106657-8106691
  hypo

SEQ ID NO: 401507 - DNA, 147 bp, Homo sapiens; identical to SEQ ID NO: 247770
  chr1:8148903-8149050
  hypo

SEQ ID NO: 401508 - DNA, 105 bp, Homo sapiens; identical to SEQ ID NO: 247774
  chr1:8385999-8386104
  hypo

SEQ ID NO: 401509 - DNA, 69 bp, Homo sapiens; identical to SEQ ID NO: 247775
  chr1:8395503-8395572
  hypo

SEQ ID NO: 401510 - DNA, 213 bp, Homo sapiens; identical to SEQ ID NO: 247776
  chr1:8399490-8399703
  hypo

SEQ ID NO: 401511 - DNA, 300 bp, Homo sapiens; identical to SEQ ID NO: 247778
  chr1:8437575-8437875
  hypo

SEQ ID NO: 401512 - DNA, 120 bp, Homo sapiens; identical to SEQ ID NO: 247782
  chr1:8693558-8693678
  hypo

SEQ ID NO: 401513 - DNA, 123 bp, Homo sapiens; identical to SEQ ID NO: 206623
  chr1:9004947-9005070
  hypo

SEQ ID NO: 401514 - DNA, 152 bp, Homo sapiens; identical to SEQ ID NO: 206624
  chr1:9027898-9028050
  hypo

SEQ ID NO: 401515 - DNA, 150 bp, Homo sapiens; identical to SEQ ID NO: 206625
  chr1:9074712-9074862
  hypo

SEQ ID NO: 401516 - DNA, 81 bp, Homo sapiens; identical to SEQ ID NO: 206626
  chr1:9084938-9085019
  hypo

SEQ ID NO: 401517 - DNA, 268 bp, Homo sapiens; identical to SEQ ID NO: 221223
  chr1:9188954-9189222
  hypo

SEQ ID NO: 401518 - DNA, 52 bp, Homo sapiens; identical to SEQ ID NO: 206629
  chr1:9205248-9205300
  hypo

SEQ ID NO: 401519 - DNA, 48 bp, Homo sapiens; identical to SEQ ID NO: 247797
  chr1:9332433-9332481
  hypo

SEQ ID NO: 401520 - DNA, 189 bp, Homo sapiens; identical to SEQ ID NO: 197299
  chr1:9352965-9353154
  hypo

SEQ ID NO: 401521 - DNA, 87 bp, Homo sapiens; identical to SEQ ID NO: 247798
  chr1:9357986-9358073
  hypo

SEQ ID NO: 401522 - DNA, 187 bp, Homo sapiens; identical to SEQ ID NO: 247802
  chr1:9396673-9396860
  hypo

SEQ ID NO: 401523 - DNA, 62 bp, Homo sapiens; identical to SEQ ID NO: 247803
  chr1:9399461-9399523
  hypo

SEQ ID NO: 401524 - DNA, 252 bp, Homo sapiens; identical to SEQ ID NO: 206635
  chr1:9420430-9420682
  hypo

SEQ ID NO: 401525 - DNA, 425 bp, Homo sapiens; identical to SEQ ID NO: 247807
  chr1:9427427-9427852
  hypo

SEQ ID NO: 401526 - DNA, 37 bp, Homo sapiens; identical to SEQ ID NO: 247809
  chr1:9549417-9549454
  hypo

SEQ ID NO: 401527 - DNA, 111 bp, Homo sapiens; identical to SEQ ID NO: 206641
  chr1:9664794-9664905
  hypo

SEQ ID NO: 401528 - DNA, 127 bp, Homo sapiens; identical to SEQ ID NO: 206642
  chr1:9666790-9666917
  hypo

SEQ ID NO: 401529 - DNA, 132 bp, Homo sapiens; identical to SEQ ID NO: 206643
  chr1:9670774-9670906
  hypo

SEQ ID NO: 401530 - DNA, 177 bp, Homo sapiens; identical to SEQ ID NO: 206645
  chr1:9780744-9780921
  hypo

SEQ ID NO: 401531 - DNA, 149 bp, Homo sapiens; identical to SEQ ID NO: 206646
  chr1:9781134-9781283
  hypo

SEQ ID NO: 401532 - DNA, 143 bp, Homo sapiens; identical to SEQ ID NO: 247823
  chr1:9787397-9787540
  hypo

SEQ ID NO: 401533 - DNA, 116 bp, Homo sapiens; identical to SEQ ID NO: 296473
  chr1:9897085-9897201
  hypo

SEQ ID NO: 401534 - DNA, 82 bp, Homo sapiens; identical to SEQ ID NO: 206652
  chr1:10150449-10150531
  hypo

SEQ ID NO: 401535 - DNA, 360 bp, Homo sapiens; identical to SEQ ID NO: 206653
  chr1:10174923-10175283
  hypo

SEQ ID NO: 401536 - DNA, 104 bp, Homo sapiens; identical to SEQ ID NO: 247837
  chr1:10189656-10189760
  hypo

SEQ ID NO: 401537 - DNA, 120 bp, Homo sapiens; identical to SEQ ID NO: 247838
  chr1:10190000-10190120
  hypo

SEQ ID NO: 401538 - DNA, 164 bp, Homo sapiens; identical to SEQ ID NO: 247839
  chr1:10190420-10190584
  hypo

SEQ ID NO: 401539 - DNA, 213 bp, Homo sapiens; identical to SEQ ID NO: 247841
  chr1:10238658-10238871
  hypo

SEQ ID NO: 401540 - DNA, 175 bp, Homo sapiens; identical to SEQ ID NO: 197307
  chr1:10271266-10271441
  hypo

SEQ ID NO: 401541 - DNA, 52 bp, Homo sapiens; identical to SEQ ID NO: 247844
  chr1:10355725-10355777
  hypo

SEQ ID NO: 401542 - DNA, 123 bp, Homo sapiens; identical to SEQ ID NO: 247848
  chr1:10597301-10597424
  hypo

SEQ ID NO: 401543 - DNA, 90 bp, Homo sapiens; identical to SEQ ID NO: 206657
  chr1:10659098-10659188
  hypo

SEQ ID NO: 401544 - DNA, 263 bp, Homo sapiens; identical to SEQ ID NO: 206663
  chr1:10703773-10704036
  hypo

SEQ ID NO: 401545 - DNA, 227 bp, Homo sapiens; identical to SEQ ID NO: 247857
  chr1:10706750-10706977
  hypo

SEQ ID NO: 401546 - DNA, 309 bp, Homo sapiens; identical to SEQ ID NO: 206665
  chr1:10708278-10708587
  hypo

SEQ ID NO: 401547 - DNA, 86 bp, Homo sapiens; identical to SEQ ID NO: 247860
  chr1:10713572-10713658
  hypo

SEQ ID NO: 401548 - DNA, 149 bp, Homo sapiens; identical to SEQ ID NO: 206668
  chr1:10716607-10716756
  hypo

SEQ ID NO: 401549 - DNA, 46 bp, Homo sapiens; identical to SEQ ID NO: 206671
  chr1:10725222-10725268
  hypo

SEQ ID NO: 401550 - DNA, 107 bp, Homo sapiens; identical to SEQ ID NO: 206672
  chr1:10725478-10725585
  hypo

SEQ ID NO: 401551 - DNA, 183 bp, Homo sapiens; identical to SEQ ID NO: 247868
  chr1:10729047-10729230
  hypo

SEQ ID NO: 401552 - DNA, 250 bp, Homo sapiens; identical to SEQ ID NO: 247869
  chr1:10741779-10742029
  hypo

SEQ ID NO: 401553 - DNA, 365 bp, Homo sapiens; identical to SEQ ID NO: 247870
  chr1:10757887-10758252
  hypo

SEQ ID NO: 401554 - DNA, 216 bp, Homo sapiens; identical to SEQ ID NO: 247871
  chr1:10765349-10765565
  hypo

SEQ ID NO: 401555 - DNA, 316 bp, Homo sapiens; identical to SEQ ID NO: 247872
  chr1:10765943-10766259
  hypo

SEQ ID NO: 401556 - DNA, 105 bp, Homo sapiens; identical to SEQ ID NO: 247873
  chr1:10775033-10775138
  hypo

SEQ ID NO: 401557 - DNA, 75 bp, Homo sapiens; identical to SEQ ID NO: 206676
  chr1:10815561-10815636
  hypo

SEQ ID NO: 401558 - DNA, 51 bp, Homo sapiens; identical to SEQ ID NO: 247880
  chr1:10819916-10819967
  hypo

SEQ ID NO: 401559 - DNA, 204 bp, Homo sapiens; identical to SEQ ID NO: 206677
  chr1:10823336-10823540
  hypo

SEQ ID NO: 401560 - DNA, 612 bp, Homo sapiens; identical to SEQ ID NO: 197312
  chr1:10856315-10856927
  hypo

SEQ ID NO: 401561 - DNA, 254 bp, Homo sapiens; identical to SEQ ID NO: 247883
  chr1:10901208-10901462
  hypo

SEQ ID NO: 401562 - DNA, 211 bp, Homo sapiens; identical to SEQ ID NO: 206680
  chr1:10997239-10997450
  hypo

SEQ ID NO: 401563 - DNA, 43 bp, Homo sapiens; identical to SEQ ID NO: 247891
  chr1:11118320-11118363
  hypo

SEQ ID NO: 401564 - DNA, 38 bp, Homo sapiens; identical to SEQ ID NO: 206683
  chr1:11141852-11141890
  hypo

SEQ ID NO: 401565 - DNA, 33 bp, Homo sapiens; identical to SEQ ID NO: 247897
  chr1:11178562-11178595
  hypo

SEQ ID NO: 401566 - DNA, 90 bp, Homo sapiens; identical to SEQ ID NO: 247898
  chr1:11236360-11236450
  hypo

SEQ ID NO: 401567 - DNA, 76 bp, Homo sapiens; identical to SEQ ID NO: 206684
  chr1:11264689-11264765
  hypo

SEQ ID NO: 401568 - DNA, 262 bp, Homo sapiens; identical to SEQ ID NO: 206687
  chr1:11315988-11316250
  hypo

SEQ ID NO: 401569 - DNA, 44 bp, Homo sapiens; identical to SEQ ID NO: 206688
  chr1:11323832-11323876
  hypo

SEQ ID NO: 401570 - DNA, 148 bp, Homo sapiens; identical to SEQ ID NO: 247906
  chr1:11825794-11825942
  hypo

SEQ ID NO: 401571 - DNA, 76 bp, Homo sapiens; identical to SEQ ID NO: 247907
  chr1:11848614-11848690
  hypo

SEQ ID NO: 401572 - DNA, 136 bp, Homo sapiens; identical to SEQ ID NO: 247908
  chr1:11852475-11852611
  hypo

SEQ ID NO: 401573 - DNA, 333 bp, Homo sapiens; identical to SEQ ID NO: 247912
  chr1:11940052-11940385
  hypo

SEQ ID NO: 401574 - DNA, 143 bp, Homo sapiens; identical to SEQ ID NO: 206695
  chr1:12041765-12041908
  hypo

SEQ ID NO: 401575 - DNA, 99 bp, Homo sapiens; identical to SEQ ID NO: 206697
  chr1:12078706-12078805
  hypo

SEQ ID NO: 401576 - DNA, 42 bp, Homo sapiens; identical to SEQ ID NO: 206699
  chr1:12188609-12188651
  hypo

SEQ ID NO: 401577 - DNA, 142 bp, Homo sapiens; identical to SEQ ID NO: 247923
  chr1:12218910-12219052
  hypo

SEQ ID NO: 401578 - DNA, 215 bp, Homo sapiens; identical to SEQ ID NO: 247926
  chr1:12252961-12253176
  hypo

SEQ ID NO: 401579 - DNA, 37 bp, Homo sapiens; identical to SEQ ID NO: 206703
  chr1:12267963-12268000
  hypo

SEQ ID NO: 401580 - DNA, 71 bp, Homo sapiens; identical to SEQ ID NO: 247932
  chr1:12368222-12368293
  hypo

SEQ ID NO: 401581 - DNA, 212 bp, Homo sapiens; identical to SEQ ID NO: 247933
  chr1:12368504-12368716
  hypo

SEQ ID NO: 401582 - DNA, 106 bp, Homo sapiens; identical to SEQ ID NO: 206706
  chr1:12565969-12566075
  hypo

SEQ ID NO: 401583 - DNA, 65 bp, Homo sapiens; identical to SEQ ID NO: 247938
  chr1:12567168-12567233
  hypo

SEQ ID NO: 401584 - DNA, 165 bp, Homo sapiens; identical to SEQ ID NO: 206707
  chr1:12607962-12608127
  hypo

SEQ ID NO: 401585 - DNA, 35 bp, Homo sapiens; identical to SEQ ID NO: 247945
  chr1:12639822-12639857
  hypo

SEQ ID NO: 401586 - DNA, 173 bp, Homo sapiens; identical to SEQ ID NO: 206710
  chr1:12663579-12663752
  hypo

SEQ ID NO: 401587 - DNA, 191 bp, Homo sapiens; identical to SEQ ID NO: 206711
  chr1:12711251-12711442
  hypo

SEQ ID NO: 401588 - DNA, 78 bp, Homo sapiens; identical to SEQ ID NO: 247948
  chr1:13852559-13852637
  hypo

SEQ ID NO: 401589 - DNA, 224 bp, Homo sapiens; identical to SEQ ID NO: 247949
  chr1:13881447-13881671
  hypo

SEQ ID NO: 401590 - DNA, 31 bp, Homo sapiens; identical to SEQ ID NO: 247952
  chr1:13952441-13952472
  hypo

SEQ ID NO: 401591 - DNA, 120 bp, Homo sapiens; identical to SEQ ID NO: 247954
  chr1:14025409-14025529
  hypo

SEQ ID NO: 401592 - DNA, 223 bp, Homo sapiens; identical to SEQ ID NO: 247955
  chr1:14087920-14088143
  hypo

SEQ ID NO: 401593 - DNA, 130 bp, Homo sapiens; identical to SEQ ID NO: 247956
  chr1:14105492-14105622
  hypo

SEQ ID NO: 401594 - DNA, 194 bp, Homo sapiens; identical to SEQ ID NO: 206715
  chr1:14121945-14122139
  hypo

SEQ ID NO: 401595 - DNA, 120 bp, Homo sapiens; identical to SEQ ID NO: 206716
  chr1:14746304-14746424
  hypo

SEQ ID NO: 401596 - DNA, 35 bp, Homo sapiens; identical to SEQ ID NO: 247968
  chr1:15127830-15127865
  hypo

SEQ ID NO: 401597 - DNA, 210 bp, Homo sapiens; identical to SEQ ID NO: 206719
  chr1:15129598-15129808
  hypo

SEQ ID NO: 401598 - DNA, 160 bp, Homo sapiens; identical to SEQ ID NO: 247972
  chr1:15149510-15149670
  hypo

SEQ ID NO: 401599 - DNA, 244 bp, Homo sapiens; identical to SEQ ID NO: 247976
  chr1:15262964-15263208
  hypo

SEQ ID NO: 401600 - DNA, 35 bp, Homo sapiens; identical to SEQ ID NO: 247978
  chr1:15344012-15344047
  hypo

SEQ ID NO: 401601 - DNA, 137 bp, Homo sapiens; identical to SEQ ID NO: 247979
  chr1:15356675-15356812
  hypo

SEQ ID NO: 401602 - DNA, 42 bp, Homo sapiens; identical to SEQ ID NO: 247982
  chr1:15524065-15524107
  hypo

SEQ ID NO: 401603 - DNA, 236 bp, Homo sapiens; identical to SEQ ID NO: 247984
  chr1:15556611-15556847
  hypo

SEQ ID NO: 401604 - DNA, 35 bp, Homo sapiens; identical to SEQ ID NO: 247985
  chr1:15751733-15751768
  hypo

SEQ ID NO: 401605 - DNA, 92 bp, Homo sapiens; identical to SEQ ID NO: 247989
  chr1:15885334-15885426
  hypo

SEQ ID NO: 401606 - DNA, 155 bp, Homo sapiens; identical to SEQ ID NO: 206725
  chr1:15892452-15892607
  hypo

SEQ ID NO: 401607 - DNA, 104 bp, Homo sapiens; identical to SEQ ID NO: 221241
  chr1:15905420-15905524
  hypo

SEQ ID NO: 401608 - DNA, 75 bp, Homo sapiens; identical to SEQ ID NO: 277994
  chr1:15928914-15928989
  hypo

SEQ ID NO: 401609 - DNA, 75 bp, Homo sapiens; identical to SEQ ID NO: 387523
  chr1:15929019-15929094
  hypo

SEQ ID NO: 401610 - DNA, 104 bp, Homo sapiens; identical to SEQ ID NO: 206727
  chr1:15930726-15930830
  hypo

SEQ ID NO: 401611 - DNA, 52 bp, Homo sapiens; identical to SEQ ID NO: 296648
  chr1:16049774-16049826
  hypo

SEQ ID NO: 401612 - DNA, 124 bp, Homo sapiens; identical to SEQ ID NO: 248001
  chr1:16092326-16092450
  hypo

SEQ ID NO: 401613 - DNA, 120 bp, Homo sapiens; identical to SEQ ID NO: 206729
  chr1:16101036-16101156
  hypo

SEQ ID NO: 401614 - DNA, 425 bp, Homo sapiens; identical to SEQ ID NO: 248006
  chr1:16254608-16255033
  hypo

SEQ ID NO: 401615 - DNA, 42 bp, Homo sapiens; identical to SEQ ID NO: 248008
  chr1:16264532-16264574
  hypo

SEQ ID NO: 401616 - DNA, 206 bp, Homo sapiens; identical to SEQ ID NO: 248010
  chr1:16272642-16272848
  hypo

SEQ ID NO: 401617 - DNA, 219 bp, Homo sapiens; identical to SEQ ID NO: 206733
  chr1:16283816-16284035
  hypo

SEQ ID NO: 401618 - DNA, 102 bp, Homo sapiens; identical to SEQ ID NO: 206737
  chr1:16466891-16466993
  hypo

SEQ ID NO: 401619 - DNA, 79 bp, Homo sapiens; identical to SEQ ID NO: 248022
  chr1:16509214-16509293
  hypo

SEQ ID NO: 401620 - DNA, 92 bp, Homo sapiens; identical to SEQ ID NO: 296678
  chr1:16535205-16535297
  hypo

SEQ ID NO: 401621 - DNA, 54 bp, Homo sapiens; identical to SEQ ID NO: 206742
  chr1:16567830-16567884
  hypo

SEQ ID NO: 401622 - DNA, 274 bp, Homo sapiens; identical to SEQ ID NO: 248026
  chr1:16577954-16578228
  hypo

SEQ ID NO: 401623 - DNA, 33 bp, Homo sapiens; identical to SEQ ID NO: 248030
  chr1:16689684-16689717
  hypo

SEQ ID NO: 401624 - DNA, 135 bp, Homo sapiens; identical to SEQ ID NO: 206744
  chr1:16810656-16810791
  hypo

SEQ ID NO: 401625 - DNA, 329 bp, Homo sapiens; identical to SEQ ID NO: 248033
  chr1:16943749-16944078
  hypo

SEQ ID NO: 401626 - DNA, 137 bp, Homo sapiens; identical to SEQ ID NO: 248035
  chr1:17256389-17256526
  hypo

SEQ ID NO: 401627 - DNA, 37 bp, Homo sapiens; identical to SEQ ID NO: 206747
  chr1:17330879-17330916
  hypo

SEQ ID NO: 401628 - DNA, 208 bp, Homo sapiens; identical to SEQ ID NO: 197347
  chr1:17591036-17591244
  hypo

SEQ ID NO: 401629 - DNA, 60 bp, Homo sapiens; identical to SEQ ID NO: 248047
  chr1:17631994-17632054
  hypo

SEQ ID NO: 401630 - DNA, 200 bp, Homo sapiens; identical to SEQ ID NO: 248049
  chr1:17702234-17702434
  hypo

SEQ ID NO: 401631 - DNA, 324 bp, Homo sapiens; identical to SEQ ID NO: 248050
  chr1:17733440-17733764
  hypo

SEQ ID NO: 401632 - DNA, 130 bp, Homo sapiens; identical to SEQ ID NO: 206752
  chr1:17897819-17897949
  hypo

SEQ ID NO: 401633 - DNA, 213 bp, Homo sapiens; identical to SEQ ID NO: 248057
  chr1:17919150-17919363
  hypo

SEQ ID NO: 401634 - DNA, 51 bp, Homo sapiens; identical to SEQ ID NO: 206754
  chr1:17934561-17934612
  hypo

SEQ ID NO: 401635 - DNA, 225 bp, Homo sapiens; identical to SEQ ID NO: 248061
  chr1:17949438-17949663
  hypo

SEQ ID NO: 401636 - DNA, 169 bp, Homo sapiens; identical to SEQ ID NO: 248062
  chr1:17972154-17972323
  hypo

SEQ ID NO: 401637 - DNA, 67 bp, Homo sapiens; identical to SEQ ID NO: 206756
  chr1:17996867-17996934
  hypo

SEQ ID NO: 401638 - DNA, 35 bp, Homo sapiens; identical to SEQ ID NO: 206757
  chr1:17997213-17997248
  hypo

SEQ ID NO: 401639 - DNA, 56 bp, Homo sapiens; identical to SEQ ID NO: 206758
  chr1:18021388-18021444
  hypo

SEQ ID NO: 401640 - DNA, 91 bp, Homo sapiens; identical to SEQ ID NO: 248071
  chr1:18606300-18606391
  hypo

SEQ ID NO: 401641 - DNA, 379 bp, Homo sapiens; identical to SEQ ID NO: 206763
  chr1:19208520-19208899
  hypo

SEQ ID NO: 401642 - DNA, 137 bp, Homo sapiens; identical to SEQ ID NO: 248074
  chr1:19217051-19217188
  hypo

SEQ ID NO: 401643 - DNA, 143 bp, Homo sapiens; identical to SEQ ID NO: 206764
  chr1:19245955-19246098
  hypo

SEQ ID NO: 401644 - DNA, 57 bp, Homo sapiens; identical to SEQ ID NO: 248078
  chr1:19403632-19403689
  hypo

SEQ ID NO: 401645 - DNA, 194 bp, Homo sapiens; identical to SEQ ID NO: 248079
  chr1:19426355-19426549
  hypo

SEQ ID NO: 401646 - DNA, 232 bp, Homo sapiens; identical to SEQ ID NO: 248082
  chr1:19491254-19491486
  hypo

SEQ ID NO: 401647 - DNA, 325 bp, Homo sapiens; identical to SEQ ID NO: 197362
  chr1:19639187-19639512
  hypo

SEQ ID NO: 401648 - DNA, 388 bp, Homo sapiens; identical to SEQ ID NO: 206770
  chr1:20060808-20061196
  hypo

SEQ ID NO: 401649 - DNA, 156 bp, Homo sapiens; identical to SEQ ID NO: 248100
  chr1:20090954-20091110
  hypo

SEQ ID NO: 401650 - DNA, 116 bp, Homo sapiens; identical to SEQ ID NO: 296765
  chr1:20205178-20205294
  hypo

SEQ ID NO: 401651 - DNA, 274 bp, Homo sapiens; identical to SEQ ID NO: 296766
  chr1:20205324-20205598
  hypo

SEQ ID NO: 401652 - DNA, 118 bp, Homo sapiens; identical to SEQ ID NO: 248110
  chr1:20247673-20247791
  hypo

SEQ ID NO: 401653 - DNA, 136 bp, Homo sapiens; identical to SEQ ID NO: 206780
  chr1:20983634-20983770
  hypo

SEQ ID NO: 401654 - DNA, 256 bp, Homo sapiens; identical to SEQ ID NO: 248116
  chr1:21037714-21037970
  hypo

SEQ ID NO: 401655 - DNA, 157 bp, Homo sapiens; identical to SEQ ID NO: 206781
  chr1:21062548-21062705
  hypo

SEQ ID NO: 401656 - DNA, 42 bp, Homo sapiens; identical to SEQ ID NO: 248127
  chr1:21786548-21786590
  hypo

SEQ ID NO: 401657 - DNA, 252 bp, Homo sapiens; identical to SEQ ID NO: 248130
  chr1:21902093-21902345
  hypo

SEQ ID NO: 401658 - DNA, 166 bp, Homo sapiens; identical to SEQ ID NO: 206786
  chr1:21944017-21944183
  hypo

SEQ ID NO: 401659 - DNA, 409 bp, Homo sapiens; identical to SEQ ID NO: 248132
  chr1:21953296-21953705
  hypo

SEQ ID NO: 401660 - DNA, 193 bp, Homo sapiens; identical to SEQ ID NO: 206791
  chr1:22032531-22032724
  hypo

SEQ ID NO: 401661 - DNA, 49 bp, Homo sapiens; identical to SEQ ID NO: 248139
  chr1:22166018-22166067
  hypo

SEQ ID NO: 401662 - DNA, 118 bp, Homo sapiens; identical to SEQ ID NO: 206794
  chr1:22202123-22202241
  hypo

SEQ ID NO: 401663 - DNA, 157 bp, Homo sapiens; identical to SEQ ID NO: 206795
  chr1:22465799-22465956
  hypo

SEQ ID NO: 401664 - DNA, 187 bp, Homo sapiens; identical to SEQ ID NO: 248154
  chr1:22566065-22566252
  hypo

SEQ ID NO: 401665 - DNA, 68 bp, Homo sapiens; identical to SEQ ID NO: 384966
  chr1:22777322-22777390
  hypo

SEQ ID NO: 401666 - DNA, 134 bp, Homo sapiens; identical to SEQ ID NO: 248159
  chr1:22852708-22852842
  hypo

SEQ ID NO: 401667 - DNA, 133 bp, Homo sapiens; identical to SEQ ID NO: 206801
  chr1:23063031-23063164
  hypo

SEQ ID NO: 401668 - DNA, 33 bp, Homo sapiens; identical to SEQ ID NO: 206802
  chr1:23063499-23063532
  hypo

SEQ ID NO: 401669 - DNA, 85 bp, Homo sapiens; identical to SEQ ID NO: 206803
  chr1:23091396-23091481
  hypo

SEQ ID NO: 401670 - DNA, 386 bp, Homo sapiens; identical to SEQ ID NO: 248169
  chr1:23110981-23111367
  hypo

SEQ ID NO: 401671 - DNA, 132 bp, Homo sapiens; identical to SEQ ID NO: 248171
  chr1:23168730-23168862
  hypo

SEQ ID NO: 401672 - DNA, 343 bp, Homo sapiens; identical to SEQ ID NO: 248172
  chr1:23191506-23191849
  hypo

SEQ ID NO: 401673 - DNA, 97 bp, Homo sapiens; identical to SEQ ID NO: 248174
  chr1:23205285-23205382
  hypo

SEQ ID NO: 401674 - DNA, 48 bp, Homo sapiens; identical to SEQ ID NO: 278078
  chr1:23280132-23280180
  hypo

SEQ ID NO: 401675 - DNA, 169 bp, Homo sapiens; identical to SEQ ID NO: 102782
  chr1:23280211-23280380
  hypo

SEQ ID NO: 401676 - DNA, 82 bp, Homo sapiens; identical to SEQ ID NO: 248179
  chr1:23566833-23566915
  hypo

SEQ ID NO: 401677 - DNA, 120 bp, Homo sapiens; identical to SEQ ID NO: 206810
  chr1:23567755-23567875
  hypo

SEQ ID NO: 401678 - DNA, 168 bp, Homo sapiens; identical to SEQ ID NO: 296852
  chr1:23693910-23694078
  hypo

SEQ ID NO: 401679 - DNA, 137 bp, Homo sapiens; identical to SEQ ID NO: 248183
  chr1:23698583-23698720
  hypo

SEQ ID NO: 401680 - DNA, 197 bp, Homo sapiens; identical to SEQ ID NO: 197388
  chr1:23857853-23858050
  hypo

SEQ ID NO: 401681 - DNA, 143 bp, Homo sapiens; identical to SEQ ID NO: 206814
  chr1:23963133-23963276
  hypo

SEQ ID NO: 401682 - DNA, 34 bp, Homo sapiens; identical to SEQ ID NO: 248189
  chr1:24016636-24016670
  hypo

SEQ ID NO: 401683 - DNA, 38 bp, Homo sapiens; identical to SEQ ID NO: 248194
  chr1:24153112-24153150
  hypo

SEQ ID NO: 401684 - DNA, 45 bp, Homo sapiens; identical to SEQ ID NO: 206819
  chr1:24611879-24611924
  hypo

SEQ ID NO: 401685 - DNA, 106 bp, Homo sapiens; identical to SEQ ID NO: 206820
  chr1:24611967-24612073
  hypo

SEQ ID NO: 401686 - DNA, 105 bp, Homo sapiens; identical to SEQ ID NO: 248200
  chr1:24620325-24620430
  hypo

SEQ ID NO: 401687 - DNA, 32 bp, Homo sapiens; identical to SEQ ID NO: 206821
  chr1:24683006-24683038
  hypo

SEQ ID NO: 401688 - DNA, 142 bp, Homo sapiens; identical to SEQ ID NO: 206822
  chr1:24701524-24701666
  hypo

SEQ ID NO: 401689 - DNA, 58 bp, Homo sapiens; identical to SEQ ID NO: 248203
  chr1:24702011-24702069
  hypo

SEQ ID NO: 401690 - DNA, 88 bp, Homo sapiens; identical to SEQ ID NO: 206823
  chr1:24706236-24706324
  hypo

SEQ ID NO: 401691 - DNA, 33 bp, Homo sapiens; identical to SEQ ID NO: 248205
  chr1:24708666-24708699
  hypo

SEQ ID NO: 401692 - DNA, 43 bp, Homo sapiens; identical to SEQ ID NO: 248207
  chr1:24945574-24945617
  hypo

SEQ ID NO: 401693 - DNA, 287 bp, Homo sapiens; identical to SEQ ID NO: 248209
  chr1:24976291-24976578
  hypo

SEQ ID NO: 401694 - DNA, 570 bp, Homo sapiens; identical to SEQ ID NO: 296887
  chr1:25228637-25229207
  hypo

SEQ ID NO: 401695 - DNA, 42 bp, Homo sapiens; identical to SEQ ID NO: 248216
  chr1:25247524-25247566
  hypo

SEQ ID NO: 401696 - DNA, 230 bp, Homo sapiens; identical to SEQ ID NO: 248217
  chr1:25269413-25269643
  hypo

SEQ ID NO: 401697 - DNA, 133 bp, Homo sapiens; identical to SEQ ID NO: 206829
  chr1:25396320-25396453
  hypo

SEQ ID NO: 401698 - DNA, 192 bp, Homo sapiens; identical to SEQ ID NO: 248220
  chr1:25510193-25510385
  hypo

SEQ ID NO: 401699 - DNA, 201 bp, Homo sapiens; identical to SEQ ID NO: 248225
  chr1:25856754-25856955
  hypo

SEQ ID NO: 401700 - DNA, 110 bp, Homo sapiens; identical to SEQ ID NO: 248226
  chr1:25862319-25862429
  hypo

SEQ ID NO: 401701 - DNA, 168 bp, Homo sapiens; identical to SEQ ID NO: 197396
  chr1:25870618-25870786
  hypo

SEQ ID NO: 401702 - DNA, 263 bp, Homo sapiens; identical to SEQ ID NO: 248228
  chr1:25889407-25889670
  hypo

SEQ ID NO: 401703 - DNA, 158 bp, Homo sapiens; identical to SEQ ID NO: 206831
  chr1:25890394-25890552
  hypo

SEQ ID NO: 401704 - DNA, 76 bp, Homo sapiens; identical to SEQ ID NO: 248230
  chr1:25895704-25895780
  hypo

SEQ ID NO: 401705 - DNA, 214 bp, Homo sapiens; identical to SEQ ID NO: 206834
  chr1:26121478-26121692
  hypo

SEQ ID NO: 401706 - DNA, 120 bp, Homo sapiens; identical to SEQ ID NO: 206835
  chr1:26634350-26634470
  hypo

SEQ ID NO: 401707 - DNA, 194 bp, Homo sapiens; identical to SEQ ID NO: 248239
  chr1:26670609-26670803
  hypo

SEQ ID NO: 401708 - DNA, 97 bp, Homo sapiens; identical to SEQ ID NO: 206838
  chr1:26807958-26808055
  hypo

SEQ ID NO: 401709 - DNA, 43 bp, Homo sapiens; identical to SEQ ID NO: 248245
  chr1:26874361-26874404
  hypo

SEQ ID NO: 401710 - DNA, 39 bp, Homo sapiens; identical to SEQ ID NO: 248247
  chr1:26969659-26969698
  hypo

SEQ ID NO: 401711 - DNA, 125 bp, Homo sapiens; identical to SEQ ID NO: 197408
  chr1:27286497-27286622
  hypo

SEQ ID NO: 401712 - DNA, 68 bp, Homo sapiens; identical to SEQ ID NO: 248259
  chr1:27627840-27627908
  hypo

SEQ ID NO: 401713 - DNA, 102 bp, Homo sapiens; identical to SEQ ID NO: 248262
  chr1:27694479-27694581
  hypo

SEQ ID NO: 401714 - DNA, 372 bp, Homo sapiens; identical to SEQ ID NO: 278147
  chr1:27718844-27719216
  hypo

SEQ ID NO: 401715 - DNA, 52 bp, Homo sapiens; identical to SEQ ID NO: 248264
  chr1:27750893-27750945
  hypo

SEQ ID NO: 401716 - DNA, 44 bp, Homo sapiens; identical to SEQ ID NO: 206849
  chr1:27798548-27798592
  hypo

SEQ ID NO: 401717 - DNA, 75 bp, Homo sapiens; identical to SEQ ID NO: 296944
  chr1:27844443-27844518
  hypo

SEQ ID NO: 401718 - DNA, 76 bp, Homo sapiens; identical to SEQ ID NO: 248268
  chr1:27862696-27862772
  hypo

SEQ ID NO: 401719 - DNA, 279 bp, Homo sapiens; identical to SEQ ID NO: 278153
  chr1:27929078-27929357
  hypo

SEQ ID NO: 401720 - DNA, 33 bp, Homo sapiens; identical to SEQ ID NO: 206857
  chr1:28148833-28148866
  hypo

SEQ ID NO: 401721 - DNA, 37 bp, Homo sapiens; identical to SEQ ID NO: 206858
  chr1:28364954-28364991
  hypo

SEQ ID NO: 401722 - DNA, 185 bp, Homo sapiens; identical to SEQ ID NO: 248279
  chr1:28447726-28447911
  hypo

SEQ ID NO: 401723 - DNA, 216 bp, Homo sapiens; identical to SEQ ID NO: 278166
  chr1:28586719-28586935
  hypo

SEQ ID NO: 401724 - DNA, 280 bp, Homo sapiens; identical to SEQ ID NO: 102957
  chr1:28586972-28587252
  hypo

SEQ ID NO: 401725 - DNA, 91 bp, Homo sapiens; identical to SEQ ID NO: 206859
  chr1:28663349-28663440
  hypo

SEQ ID NO: 401726 - DNA, 33 bp, Homo sapiens; identical to SEQ ID NO: 248286
  chr1:28853112-28853145
  hypo

SEQ ID NO: 401727 - DNA, 52 bp, Homo sapiens; identical to SEQ ID NO: 206861
  chr1:28853770-28853822
  hypo

SEQ ID NO: 401728 - DNA, 38 bp, Homo sapiens; identical to SEQ ID NO: 248290
  chr1:28867211-28867249
  hypo

SEQ ID NO: 401729 - DNA, 120 bp, Homo sapiens; identical to SEQ ID NO: 248291
  chr1:28881382-28881502
  hypo

SEQ ID NO: 401730 - DNA, 97 bp, Homo sapiens; identical to SEQ ID NO: 248300
  chr1:29273976-29274073
  hypo

SEQ ID NO: 401731 - DNA, 82 bp, Homo sapiens; identical to SEQ ID NO: 395362
  chr1:29448433-29448515
  hypo

SEQ ID NO: 401732 - DNA, 119 bp, Homo sapiens; identical to SEQ ID NO: 296990
  chr1:29463322-29463441
  hypo

SEQ ID NO: 401733 - DNA, 79 bp, Homo sapiens; identical to SEQ ID NO: 248304
  chr1:29473803-29473882
  hypo

SEQ ID NO: 401734 - DNA, 54 bp, Homo sapiens; identical to SEQ ID NO: 206870
  chr1:29605969-29606023
  hypo

SEQ ID NO: 401735 - DNA, 140 bp, Homo sapiens; identical to SEQ ID NO: 197428
  chr1:31192212-31192352
  hypo

SEQ ID NO: 401736 - DNA, 116 bp, Homo sapiens; identical to SEQ ID NO: 297001
  chr1:31249895-31250011
  hypo

SEQ ID NO: 401737 - DNA, 88 bp, Homo sapiens; identical to SEQ ID NO: 206875
  chr1:31260793-31260881
  hypo

SEQ ID NO: 401738 - DNA, 178 bp, Homo sapiens; identical to SEQ ID NO: 248317
  chr1:31407298-31407476
  hypo

SEQ ID NO: 401739 - DNA, 64 bp, Homo sapiens; identical to SEQ ID NO: 206877
  chr1:31478716-31478780
  hypo

SEQ ID NO: 401740 - DNA, 143 bp, Homo sapiens; identical to SEQ ID NO: 248321
  chr1:31633840-31633983
  hypo

SEQ ID NO: 401741 - DNA, 64 bp, Homo sapiens; identical to SEQ ID NO: 248323
  chr1:31676127-31676191
  hypo

SEQ ID NO: 401742 - DNA, 36 bp, Homo sapiens; identical to SEQ ID NO: 206879
  chr1:31732224-31732260
  hypo

SEQ ID NO: 401743 - DNA, 37 bp, Homo sapiens; identical to SEQ ID NO: 206880
  chr1:31871814-31871851
  hypo

SEQ ID NO: 401744 - DNA, 668 bp, Homo sapiens; identical to SEQ ID NO: 248329
  chr1:32091929-32092597
  hypo

SEQ ID NO: 401745 - DNA, 126 bp, Homo sapiens; identical to SEQ ID NO: 248332
  chr1:32208523-32208649
  hypo

SEQ ID NO: 401746 - DNA, 77 bp, Homo sapiens; identical to SEQ ID NO: 206883
  chr1:32407225-32407302
  hypo

SEQ ID NO: 401747 - DNA, 121 bp, Homo sapiens; identical to SEQ ID NO: 221290
  chr1:32666272-32666393
  hypo

SEQ ID NO: 401748 - DNA, 39 bp, Homo sapiens; identical to SEQ ID NO: 248337
  chr1:32674989-32675028
  hypo

SEQ ID NO: 401749 - DNA, 113 bp, Homo sapiens; identical to SEQ ID NO: 297028
  chr1:32705375-32705488
  hypo

SEQ ID NO: 401750 - DNA, 82 bp, Homo sapiens; identical to SEQ ID NO: 297029
  chr1:32705579-32705661
  hypo

SEQ ID NO: 401751 - DNA, 106 bp, Homo sapiens
  chr1:32742405-32742511
  hypo
ggctaccaggggatactgctctccctgctgtccctgccagagggtggaaatacaccttttcttctggcccaaagctcaagcaaggagggtttcttgagctttcctg

SEQ ID NO: 401752 - DNA, 47 bp, Homo sapiens; identical to SEQ ID NO: 206884
  chr1:32751094-32751141
  hypo

SEQ ID NO: 401753 - DNA, 137 bp, Homo sapiens; identical to SEQ ID NO: 221291
  chr1:32757550-32757687
  hypo

SEQ ID NO: 401754 - DNA, 156 bp, Homo sapiens; identical to SEQ ID NO: 248343
  chr1:32788457-32788613
  hypo

SEQ ID NO: 401755 - DNA, 76 bp, Homo sapiens; identical to SEQ ID NO: 248344
  chr1:32804501-32804577
  hypo

SEQ ID NO: 401756 - DNA, 140 bp, Homo sapiens; identical to SEQ ID NO: 248347
  chr1:32950770-32950910
  hypo

SEQ ID NO: 401757 - DNA, 36 bp, Homo sapiens; identical to SEQ ID NO: 197442
  chr1:33005606-33005642
  hypo

SEQ ID NO: 401758 - DNA, 33 bp, Homo sapiens; identical to SEQ ID NO: 248350
  chr1:33154203-33154236
  hypo

SEQ ID NO: 401759 - DNA, 322 bp, Homo sapiens; identical to SEQ ID NO: 248351
  chr1:33169543-33169865
  hypo

SEQ ID NO: 401760 - DNA, 138 bp, Homo sapiens; identical to SEQ ID NO: 221294
  chr1:33207544-33207682
  hypo

SEQ ID NO: 401761 - DNA, 35 bp, Homo sapiens; identical to SEQ ID NO: 248353
  chr1:33225964-33225999
  hypo

SEQ ID NO: 401762 - DNA, 93 bp, Homo sapiens; identical to SEQ ID NO: 248354
  chr1:33226462-33226555
  hypo

SEQ ID NO: 401763 - DNA, 502 bp, Homo sapiens; identical to SEQ ID NO: 248357
  chr1:33237281-33237783
  hypo

SEQ ID NO: 401764 - DNA, 37 bp, Homo sapiens; identical to SEQ ID NO: 206895
  chr1:33432070-33432107
  hypo

SEQ ID NO: 401765 - DNA, 498 bp, Homo sapiens; identical to SEQ ID NO: 197450
  chr1:33721208-33721706
  hypo

SEQ ID NO: 401766 - DNA, 42 bp, Homo sapiens; identical to SEQ ID NO: 248366
  chr1:33763431-33763473
  hypo

SEQ ID NO: 401767 - DNA, 94 bp, Homo sapiens; identical to SEQ ID NO: 248367
  chr1:33817184-33817278
  hypo

SEQ ID NO: 401768 - DNA, 80 bp, Homo sapiens; identical to SEQ ID NO: 206899
  chr1:33985125-33985205
  hypo

SEQ ID NO: 401769 - DNA, 250 bp, Homo sapiens; identical to SEQ ID NO: 248370
  chr1:35116224-35116474
  hypo

SEQ ID NO: 401770 - DNA, 292 bp, Homo sapiens; identical to SEQ ID NO: 248371
  chr1:35223069-35223361
  hypo

SEQ ID NO: 401771 - DNA, 46 bp, Homo sapiens; identical to SEQ ID NO: 248373
  chr1:35442224-35442270
  hypo

SEQ ID NO: 401772 - DNA, 39 bp, Homo sapiens; identical to SEQ ID NO: 206905
  chr1:36056553-36056592
  hypo

SEQ ID NO: 401773 - DNA, 156 bp, Homo sapiens; identical to SEQ ID NO: 278247
  chr1:36173085-36173241
  hypo

SEQ ID NO: 401774 - DNA, 414 bp, Homo sapiens; identical to SEQ ID NO: 278248
  chr1:36173282-36173696
  hypo

SEQ ID NO: 401775 - DNA, 44 bp, Homo sapiens; identical to SEQ ID NO: 248380
  chr1:36271181-36271225
  hypo

SEQ ID NO: 401776 - DNA, 201 bp, Homo sapiens; identical to SEQ ID NO: 248382
  chr1:36549011-36549212
  hypo

SEQ ID NO: 401777 - DNA, 88 bp, Homo sapiens; identical to SEQ ID NO: 248387
  chr1:36637143-36637231
  hypo

SEQ ID NO: 401778 - DNA, 62 bp, Homo sapiens; identical to SEQ ID NO: 248388
  chr1:36638185-36638247
  hypo

SEQ ID NO: 401779 - DNA, 155 bp, Homo sapiens; identical to SEQ ID NO: 248391
  chr1:36773758-36773913
  hypo

SEQ ID NO: 401780 - DNA, 116 bp, Homo sapiens; identical to SEQ ID NO: 248393
  chr1:36807404-36807520
  hypo

SEQ ID NO: 401781 - DNA, 66 bp, Homo sapiens; identical to SEQ ID NO: 248394
  chr1:36814516-36814582
  hypo

SEQ ID NO: 401782 - DNA, 223 bp, Homo sapiens; identical to SEQ ID NO: 206910
  chr1:36881339-36881562
  hypo

SEQ ID NO: 401783 - DNA, 866 bp, Homo sapiens; identical to SEQ ID NO: 197462
  chr1:36931643-36932509
  hypo

SEQ ID NO: 401784 - DNA, 218 bp, Homo sapiens; identical to SEQ ID NO: 197463
  chr1:36933230-36933448
  hypo

SEQ ID NO: 401785 - DNA, 150 bp, Homo sapiens; identical to SEQ ID NO: 206915
  chr1:36979463-36979613
  hypo

SEQ ID NO: 401786 - DNA, 142 bp, Homo sapiens; identical to SEQ ID NO: 248401
  chr1:37324710-37324852
  hypo

SEQ ID NO: 401787 - DNA, 44 bp, Homo sapiens; identical to SEQ ID NO: 248402
  chr1:37851536-37851580
  hypo

SEQ ID NO: 401788 - DNA, 45 bp, Homo sapiens; identical to SEQ ID NO: 248403
  chr1:37863807-37863852
  hypo

SEQ ID NO: 401789 - DNA, 181 bp, Homo sapiens; identical to SEQ ID NO: 248407
  chr1:38171209-38171390
  hypo

SEQ ID NO: 401790 - DNA, 58 bp, Homo sapiens; identical to SEQ ID NO: 248409
  chr1:38206997-38207055
  hypo

SEQ ID NO: 401791 - DNA, 98 bp, Homo sapiens; identical to SEQ ID NO: 221316
  chr1:38580185-38580283
  hypo

SEQ ID NO: 401792 - DNA, 31 bp, Homo sapiens; identical to SEQ ID NO: 206921
  chr1:39739272-39739303
  hypo

SEQ ID NO: 401793 - DNA, 31 bp, Homo sapiens; identical to SEQ ID NO: 248431
  chr1:40179273-40179304
  hypo

SEQ ID NO: 401794 - DNA, 344 bp, Homo sapiens; identical to SEQ ID NO: 278290
  chr1:40254463-40254807
  hypo

SEQ ID NO: 401795 - DNA, 121 bp, Homo sapiens; identical to SEQ ID NO: 278291
  chr1:40254922-40255043
  hypo

SEQ ID NO: 401796 - DNA, 35 bp, Homo sapiens; identical to SEQ ID NO: 278292
  chr1:40255068-40255103
  hypo

SEQ ID NO: 401797 - DNA, 81 bp, Homo sapiens; identical to SEQ ID NO: 278293
  chr1:40255104-40255185
  hypo

SEQ ID NO: 401798 - DNA, 280 bp, Homo sapiens; identical to SEQ ID NO: 278294
  chr1:40367951-40368231
  hypo

SEQ ID NO: 401799 - DNA, 31 bp, Homo sapiens; identical to SEQ ID NO: 221329
  chr1:40420568-40420599
  hypo

SEQ ID NO: 401800 - DNA, 162 bp, Homo sapiens; identical to SEQ ID NO: 248435
  chr1:41116838-41117000
  hypo

SEQ ID NO: 401801 - DNA, 32 bp, Homo sapiens; identical to SEQ ID NO: 248436
  chr1:41170004-41170036
  hypo

SEQ ID NO: 401802 - DNA, 79 bp, Homo sapiens; identical to SEQ ID NO: 248438
  chr1:41295714-41295793
  hypo

SEQ ID NO: 401803 - DNA, 394 bp, Homo sapiens; identical to SEQ ID NO: 248440
  chr1:41472915-41473309
  hypo

SEQ ID NO: 401804 - DNA, 137 bp, Homo sapiens; identical to SEQ ID NO: 248441
  chr1:41483523-41483660
  hypo

SEQ ID NO: 401805 - DNA, 51 bp, Homo sapiens; identical to SEQ ID NO: 248443
  chr1:41488287-41488338
  hypo

SEQ ID NO: 401806 - DNA, 98 bp, Homo sapiens; identical to SEQ ID NO: 248445
  chr1:41933801-41933899
  hypo

SEQ ID NO: 401807 - DNA, 253 bp, Homo sapiens; identical to SEQ ID NO: 248446
  chr1:41934216-41934469
  hypo

SEQ ID NO: 401808 - DNA, 211 bp, Homo sapiens; identical to SEQ ID NO: 248448
  chr1:41970958-41971169
  hypo

SEQ ID NO: 401809 - DNA, 35 bp, Homo sapiens; identical to SEQ ID NO: 206930
  chr1:42120784-42120819
  hypo

SEQ ID NO: 401810 - DNA, 178 bp, Homo sapiens; identical to SEQ ID NO: 248454
  chr1:42212494-42212672
  hypo

SEQ ID NO: 401811 - DNA, 183 bp, Homo sapiens; identical to SEQ ID NO: 248460
  chr1:43209438-43209621
  hypo

SEQ ID NO: 401812 - DNA, 88 bp, Homo sapiens; identical to SEQ ID NO: 206933
  chr1:43296453-43296541
  hypo

SEQ ID NO: 401813 - DNA, 319 bp, Homo sapiens; identical to SEQ ID NO: 297183
  chr1:43400386-43400705
  hypo

SEQ ID NO: 401814 - DNA, 31 bp, Homo sapiens; identical to SEQ ID NO: 97386
  chr1:43478271-43478302
  hypo

SEQ ID NO: 401815 - DNA, 83 bp, Homo sapiens; identical to SEQ ID NO: 206938
  chr1:43533472-43533555
  hypo

SEQ ID NO: 401816 - DNA, 404 bp, Homo sapiens; identical to SEQ ID NO: 206939
  chr1:43534661-43535065
  hypo

SEQ ID NO: 401817 - DNA, 35 bp, Homo sapiens; identical to SEQ ID NO: 248472
  chr1:43626939-43626974
  hypo

SEQ ID NO: 401818 - DNA, 70 bp, Homo sapiens; identical to SEQ ID NO: 297193
  chr1:43750607-43750677
  hypo

SEQ ID NO: 401819 - DNA, 151 bp, Homo sapiens; identical to SEQ ID NO: 297194
  chr1:43750707-43750858
  hypo

SEQ ID NO: 401820 - DNA, 201 bp, Homo sapiens; identical to SEQ ID NO: 248477
  chr1:43782856-43783057
  hypo

SEQ ID NO: 401821 - DNA, 67 bp, Homo sapiens; identical to SEQ ID NO: 197494
  chr1:43814927-43814994
  hypo

SEQ ID NO: 401822 - DNA, 287 bp, Homo sapiens; identical to SEQ ID NO: 197497
  chr1:43919241-43919528
  hypo

SEQ ID NO: 401823 - DNA, 119 bp, Homo sapiens; identical to SEQ ID NO: 391
  chr1:43919541-43919660
  hypo

SEQ ID NO: 401824 - DNA, 189 bp, Homo sapiens; identical to SEQ ID NO: 206952
  chr1:43987296-43987485
  hypo

SEQ ID NO: 401825 - DNA, 45 bp, Homo sapiens; identical to SEQ ID NO: 248488
  chr1:44030403-44030448
  hypo

SEQ ID NO: 401826 - DNA, 93 bp, Homo sapiens; identical to SEQ ID NO: 206956
  chr1:44063579-44063672
  hypo

SEQ ID NO: 401827 - DNA, 148 bp, Homo sapiens; identical to SEQ ID NO: 206957
  chr1:44069555-44069703
  hypo

SEQ ID NO: 401828 - DNA, 238 bp, Homo sapiens; identical to SEQ ID NO: 248495
  chr1:44072459-44072697
  hypo

SEQ ID NO: 401829 - DNA, 73 bp, Homo sapiens; identical to SEQ ID NO: 248500
  chr1:44138998-44139071
  hypo

SEQ ID NO: 401830 - DNA, 42 bp, Homo sapiens; identical to SEQ ID NO: 248502
  chr1:44303658-44303700
  hypo

SEQ ID NO: 401831 - DNA, 112 bp, Homo sapiens; identical to SEQ ID NO: 278338
  chr1:44402260-44402372
  hypo

SEQ ID NO: 401832 - DNA, 577 bp, Homo sapiens; identical to SEQ ID NO: 297235
  chr1:44463253-44463830
  hypo

SEQ ID NO: 401833 - DNA, 137 bp, Homo sapiens; identical to SEQ ID NO: 248511
  chr1:44490960-44491097
  hypo

SEQ ID NO: 401834 - DNA, 242 bp, Homo sapiens; identical to SEQ ID NO: 248516
  chr1:44792160-44792402
  hypo

SEQ ID NO: 401835 - DNA, 194 bp, Homo sapiens; identical to SEQ ID NO: 248520
  chr1:45090554-45090748
  hypo

SEQ ID NO: 401836 - DNA, 348 bp, Homo sapiens; identical to SEQ ID NO: 248526
  chr1:45190029-45190377
  hypo

SEQ ID NO: 401837 - DNA, 43 bp, Homo sapiens; identical to SEQ ID NO: 248528
  chr1:45190571-45190614
  hypo

SEQ ID NO: 401838 - DNA, 132 bp, Homo sapiens; identical to SEQ ID NO: 248529
  chr1:45190897-45191029
  hypo

SEQ ID NO: 401839 - DNA, 378 bp, Homo sapiens; identical to SEQ ID NO: 248530
  chr1:45253065-45253443
  hypo

SEQ ID NO: 401840 - DNA, 43 bp, Homo sapiens; identical to SEQ ID NO: 297259
  chr1:45280616-45280659
  hypo

SEQ ID NO: 401841 - DNA, 123 bp, Homo sapiens; identical to SEQ ID NO: 297260
  chr1:45293094-45293217
  hypo

SEQ ID NO: 401842 - DNA, 83 bp, Homo sapiens; identical to SEQ ID NO: 206973
  chr1:45454356-45454439
  hypo

SEQ ID NO: 401843 - DNA, 105 bp, Homo sapiens; identical to SEQ ID NO: 248539
  chr1:45529304-45529409
  hypo

SEQ ID NO: 401844 - DNA, 167 bp, Homo sapiens; identical to SEQ ID NO: 248541
  chr1:45759290-45759457
  hypo

SEQ ID NO: 401845 - DNA, 79 bp, Homo sapiens; identical to SEQ ID NO: 206975
  chr1:46131435-46131514
  hypo

SEQ ID NO: 401846 - DNA, 34 bp, Homo sapiens; identical to SEQ ID NO: 248550
  chr1:46618505-46618539
  hypo

SEQ ID NO: 401847 - DNA, 134 bp, Homo sapiens; identical to SEQ ID NO: 297276
  chr1:46653315-46653449
  hypo

SEQ ID NO: 401848 - DNA, 89 bp, Homo sapiens; identical to SEQ ID NO: 206976
  chr1:46751246-46751335
  hypo

SEQ ID NO: 401849 - DNA, 97 bp, Homo sapiens; identical to SEQ ID NO: 248554
  chr1:46751628-46751725
  hypo

SEQ ID NO: 401850 - DNA, 59 bp, Homo sapiens; identical to SEQ ID NO: 206977
  chr1:46752071-46752130
  hypo

SEQ ID NO: 401851 - DNA, 327 bp, Homo sapiens; identical to SEQ ID NO: 278378
  chr1:46932180-46932507
  hypo

SEQ ID NO: 401852 - DNA, 66 bp, Homo sapiens; identical to SEQ ID NO: 248566
  chr1:47974505-47974571
  hypo

SEQ ID NO: 401853 - DNA, 102 bp, Homo sapiens; identical to SEQ ID NO: 248567
  chr1:48187539-48187641
  hypo

SEQ ID NO: 401854 - DNA, 66 bp, Homo sapiens; identical to SEQ ID NO: 297299
  chr1:48246983-48247049
  hypo

SEQ ID NO: 401855 - DNA, 188 bp, Homo sapiens; identical to SEQ ID NO: 248569
  chr1:48257294-48257482
  hypo

SEQ ID NO: 401856 - DNA, 355 bp, Homo sapiens; identical to SEQ ID NO: 248574
  chr1:51165682-51166037
  hypo

SEQ ID NO: 401857 - DNA, 74 bp, Homo sapiens; identical to SEQ ID NO: 206993
  chr1:51761677-51761751
  hypo

SEQ ID NO: 401858 - DNA, 83 bp, Homo sapiens; identical to SEQ ID NO: 248579
  chr1:51848399-51848482
  hypo

SEQ ID NO: 401859 - DNA, 38 bp, Homo sapiens; identical to SEQ ID NO: 206997
  chr1:52089596-52089634
  hypo

SEQ ID NO: 401860 - DNA, 42 bp, Homo sapiens; identical to SEQ ID NO: 248584
  chr1:52284963-52285005
  hypo

SEQ ID NO: 401861 - DNA, 45 bp, Homo sapiens; identical to SEQ ID NO: 248585
  chr1:52310965-52311010
  hypo

SEQ ID NO: 401862 - DNA, 98 bp, Homo sapiens; identical to SEQ ID NO: 248588
  chr1:52505300-52505398
  hypo

SEQ ID NO: 401863 - DNA, 43 bp, Homo sapiens; identical to SEQ ID NO: 248590
  chr1:52549396-52549439
  hypo

SEQ ID NO: 401864 - DNA, 180 bp, Homo sapiens; identical to SEQ ID NO: 221355
  chr1:52608469-52608649
  hypo

SEQ ID NO: 401865 - DNA, 79 bp, Homo sapiens; identical to SEQ ID NO: 207000
  chr1:53129044-53129123
  hypo

SEQ ID NO: 401866 - DNA, 92 bp, Homo sapiens; identical to SEQ ID NO: 248598
  chr1:53535642-53535734
  hypo

SEQ ID NO: 401867 - DNA, 263 bp, Homo sapiens; identical to SEQ ID NO: 248599
  chr1:53544125-53544388
  hypo

SEQ ID NO: 401868 - DNA, 91 bp, Homo sapiens; identical to SEQ ID NO: 248601
  chr1:53583644-53583735
  hypo

SEQ ID NO: 401869 - DNA, 326 bp, Homo sapiens; identical to SEQ ID NO: 248604
  chr1:53769484-53769810
  hypo

SEQ ID NO: 401870 - DNA, 236 bp, Homo sapiens; identical to SEQ ID NO: 248605
  chr1:53905598-53905834
  hypo

SEQ ID NO: 401871 - DNA, 56 bp, Homo sapiens; identical to SEQ ID NO: 248606
  chr1:53986260-53986316
  hypo

SEQ ID NO: 401872 - DNA, 77 bp, Homo sapiens; identical to SEQ ID NO: 248607
  chr1:54009675-54009752
  hypo

SEQ ID NO: 401873 - DNA, 82 bp, Homo sapiens; identical to SEQ ID NO: 248608
  chr1:54009966-54010048
  hypo

SEQ ID NO: 401874 - DNA, 37 bp, Homo sapiens; identical to SEQ ID NO: 248609
  chr1:54037530-54037567
  hypo

SEQ ID NO: 401875 - DNA, 204 bp, Homo sapiens; identical to SEQ ID NO: 207009
  chr1:54605374-54605578
  hypo

SEQ ID NO: 401876 - DNA, 63 bp, Homo sapiens; identical to SEQ ID NO: 297351
  chr1:54722603-54722666
  hypo

SEQ ID NO: 401877 - DNA, 207 bp, Homo sapiens; identical to SEQ ID NO: 207012
  chr1:54746227-54746434
  hypo

SEQ ID NO: 401878 - DNA, 105 bp, Homo sapiens; identical to SEQ ID NO: 248626
  chr1:54756002-54756107
  hypo

SEQ ID NO: 401879 - DNA, 43 bp, Homo sapiens; identical to SEQ ID NO: 248627
  chr1:54757160-54757203
  hypo

SEQ ID NO: 401880 - DNA, 92 bp, Homo sapiens; identical to SEQ ID NO: 248628
  chr1:54757486-54757578
  hypo

SEQ ID NO: 401881 - DNA, 279 bp, Homo sapiens; identical to SEQ ID NO: 248632
  chr1:54808633-54808912
  hypo

SEQ ID NO: 401882 - DNA, 138 bp, Homo sapiens; identical to SEQ ID NO: 248635
  chr1:54880303-54880441
  hypo

SEQ ID NO: 401883 - DNA, 36 bp, Homo sapiens; identical to SEQ ID NO: 248636
  chr1:54944840-54944876
  hypo

SEQ ID NO: 401884 - DNA, 44 bp, Homo sapiens; identical to SEQ ID NO: 248637
  chr1:55009517-55009561
  hypo

SEQ ID NO: 401885 - DNA, 94 bp, Homo sapiens; identical to SEQ ID NO: 207015
  chr1:55033218-55033312
  hypo

SEQ ID NO: 401886 - DNA, 269 bp, Homo sapiens; identical to SEQ ID NO: 248645
  chr1:55261713-55261982
  hypo

SEQ ID NO: 401887 - DNA, 134 bp, Homo sapiens; identical to SEQ ID NO: 248646
  chr1:55317920-55318054
  hypo

SEQ ID NO: 401888 - DNA, 485 bp, Homo sapiens; identical to SEQ ID NO: 278443
  chr1:55462188-55462673
  hypo

SEQ ID NO: 401889 - DNA, 198 bp, Homo sapiens; identical to SEQ ID NO: 207022
  chr1:55517831-55518029
  hypo

SEQ ID NO: 401890 - DNA, 118 bp, Homo sapiens; identical to SEQ ID NO: 248651
  chr1:55560944-55561062
  hypo

SEQ ID NO: 401891 - DNA, 40 bp, Homo sapiens; identical to SEQ ID NO: 248653
  chr1:55583107-55583147
  hypo

SEQ ID NO: 401892 - DNA, 293 bp, Homo sapiens; identical to SEQ ID NO: 248655
  chr1:55740624-55740917
  hypo

SEQ ID NO: 401893 - DNA, 331 bp, Homo sapiens; identical to SEQ ID NO: 221363
  chr1:56943370-56943701
  hypo

SEQ ID NO: 401894 - DNA, 747 bp, Homo sapiens; identical to SEQ ID NO: 221364
  chr1:57044295-57045042
  hypo

SEQ ID NO: 401895 - DNA, 190 bp, Homo sapiens; identical to SEQ ID NO: 278458
  chr1:59369778-59369968
  hypo

SEQ ID NO: 401896 - DNA, 34 bp, Homo sapiens; identical to SEQ ID NO: 248656
  chr1:59500703-59500737
  hypo

SEQ ID NO: 401897 - DNA, 46 bp, Homo sapiens; identical to SEQ ID NO: 248657
  chr1:59500767-59500813
  hypo

SEQ ID NO: 401898 - DNA, 54 bp, Homo sapiens; identical to SEQ ID NO: 248658
  chr1:59893085-59893139
  hypo

SEQ ID NO: 401899 - DNA, 279 bp, Homo sapiens; identical to SEQ ID NO: 35762
  chr1:60280812-60281091
  hypo

SEQ ID NO: 401900 - DNA, 198 bp, Homo sapiens; identical to SEQ ID NO: 248661
  chr1:60382733-60382931
  hypo

SEQ ID NO: 401901 - DNA, 133 bp, Homo sapiens; identical to SEQ ID NO: 278466
  chr1:61508554-61508687
  hypo

SEQ ID NO: 401902 - DNA, 215 bp, Homo sapiens; identical to SEQ ID NO: 278467
  chr1:61508954-61509169
  hypo

SEQ ID NO: 401903 - DNA, 40 bp, Homo sapiens; identical to SEQ ID NO: 197558
  chr1:61516034-61516074
  hypo

SEQ ID NO: 401904 - DNA, 159 bp, Homo sapiens; identical to SEQ ID NO: 248670
  chr1:61875330-61875489
  hypo

SEQ ID NO: 401905 - DNA, 316 bp, Homo sapiens; identical to SEQ ID NO: 395479
  chr1:62208494-62208810
  hypo

SEQ ID NO: 401906 - DNA, 36 bp, Homo sapiens; identical to SEQ ID NO: 248673
  chr1:62213623-62213659
  hypo

SEQ ID NO: 401907 - DNA, 58 bp, Homo sapiens; identical to SEQ ID NO: 207042
  chr1:62729380-62729438
  hypo

SEQ ID NO: 401908 - DNA, 41 bp, Homo sapiens; identical to SEQ ID NO: 248678
  chr1:64014770-64014811
  hypo

SEQ ID NO: 401909 - DNA, 130 bp, Homo sapiens; identical to SEQ ID NO: 207044
  chr1:64383872-64384002
  hypo

SEQ ID NO: 401910 - DNA, 419 bp, Homo sapiens; identical to SEQ ID NO: 35809
  chr1:65210939-65211358
  hypo

SEQ ID NO: 401911 - DNA, 91 bp, Homo sapiens; identical to SEQ ID NO: 248683
  chr1:65513412-65513503
  hypo

SEQ ID NO: 401912 - DNA, 39 bp, Homo sapiens; identical to SEQ ID NO: 197579
  chr1:65720329-65720368
  hypo

SEQ ID NO: 401913 - DNA, 74 bp, Homo sapiens; identical to SEQ ID NO: 383730
  chr1:66259003-66259077
  hypo

SEQ ID NO: 401914 - DNA, 111 bp, Homo sapiens; identical to SEQ ID NO: 248686
  chr1:68174580-68174691
  hypo

SEQ ID NO: 401915 - DNA, 36 bp, Homo sapiens; identical to SEQ ID NO: 248687
  chr1:68344803-68344839
  hypo

SEQ ID NO: 401916 - DNA, 130 bp, Homo sapiens; identical to SEQ ID NO: 248688
  chr1:68629018-68629148
  hypo

SEQ ID NO: 401917 - DNA, 35 bp, Homo sapiens; identical to SEQ ID NO: 248690
  chr1:69982630-69982665
  hypo

SEQ ID NO: 401918 - DNA, 36 bp, Homo sapiens; identical to SEQ ID NO: 207050
  chr1:71555024-71555060
  hypo

SEQ ID NO: 401919 - DNA, 73 bp, Homo sapiens; identical to SEQ ID NO: 248701
  chr1:77165571-77165644
  hypo

SEQ ID NO: 401920 - DNA, 162 bp, Homo sapiens; identical to SEQ ID NO: 207053
  chr1:78254759-78254921
  hypo

SEQ ID NO: 401921 - DNA, 90 bp, Homo sapiens; identical to SEQ ID NO: 207054
  chr1:78458353-78458443
  hypo

SEQ ID NO: 401922 - DNA, 35 bp, Homo sapiens; identical to SEQ ID NO: 248707
  chr1:78510240-78510275
  hypo

SEQ ID NO: 401923 - DNA, 129 bp, Homo sapiens; identical to SEQ ID NO: 207056
  chr1:83243221-83243350
  hypo

SEQ ID NO: 401924 - DNA, 38 bp, Homo sapiens; identical to SEQ ID NO: 248711
  chr1:85646087-85646125
  hypo

SEQ ID NO: 401925 - DNA, 395 bp, Homo sapiens; identical to SEQ ID NO: 221394
  chr1:85666768-85667163
  hypo

SEQ ID NO: 401926 - DNA, 86 bp, Homo sapiens
  chr1:85743256-85743342
  hypo
caaacatttattgagtccttactaatatgttctaggcaacttatactatgagtcctccattttatagggggagactgatgaagaga

SEQ ID NO: 401927 - DNA, 153 bp, Homo sapiens; identical to SEQ ID NO: 278585
  chr1:86042081-86042234
  hypo

SEQ ID NO: 401928 - DNA, 98 bp, Homo sapiens; identical to SEQ ID NO: 248713
  chr1:86048506-86048604
  hypo

SEQ ID NO: 401929 - DNA, 212 bp, Homo sapiens; identical to SEQ ID NO: 248717
  chr1:86973442-86973654
  hypo

SEQ ID NO: 401930 - DNA, 168 bp, Homo sapiens; identical to SEQ ID NO: 248719
  chr1:87607280-87607448
  hypo

SEQ ID NO: 401931 - DNA, 84 bp, Homo sapiens; identical to SEQ ID NO: 207063
  chr1:89148474-89148558
  hypo

SEQ ID NO: 401932 - DNA, 77 bp, Homo sapiens; identical to SEQ ID NO: 248721
  chr1:89228941-89229018
  hypo

SEQ ID NO: 401933 - DNA, 36 bp, Homo sapiens; identical to SEQ ID NO: 248722
  chr1:89451827-89451863
  hypo

SEQ ID NO: 401934 - DNA, 34 bp, Homo sapiens; identical to SEQ ID NO: 248724
  chr1:89984977-89985011
  hypo

SEQ ID NO: 401935 - DNA, 255 bp, Homo sapiens; identical to SEQ ID NO: 248725
  chr1:90075874-90076129
  hypo

SEQ ID NO: 401936 - DNA, 143 bp, Homo sapiens; identical to SEQ ID NO: 221399
  chr1:90228347-90228490
  hypo

SEQ ID NO: 401937 - DNA, 45 bp, Homo sapiens; identical to SEQ ID NO: 248728
  chr1:90725982-90726027
  hypo

SEQ ID NO: 401938 - DNA, 34 bp, Homo sapiens; identical to SEQ ID NO: 248729
  chr1:91072761-91072795
  hypo

SEQ ID NO: 401939 - DNA, 44 bp, Homo sapiens; identical to SEQ ID NO: 248734
  chr1:92371564-92371608
  hypo

SEQ ID NO: 401940 - DNA, 190 bp, Homo sapiens; identical to SEQ ID NO: 248736
  chr1:92683500-92683690
  hypo

SEQ ID NO: 401941 - DNA, 35 bp, Homo sapiens; identical to SEQ ID NO: 221405
  chr1:92946278-92946313
  hypo

SEQ ID NO: 401942 - DNA, 300 bp, Homo sapiens; identical to SEQ ID NO: 221409
  chr1:93250632-93250932
  hypo

SEQ ID NO: 401943 - DNA, 34 bp, Homo sapiens; identical to SEQ ID NO: 248737
  chr1:93647454-93647488
  hypo

SEQ ID NO: 401944 - DNA, 340 bp, Homo sapiens; identical to SEQ ID NO: 395531
  chr1:93913410-93913750
  hypo

SEQ ID NO: 401945 - DNA, 475 bp, Homo sapiens; identical to SEQ ID NO: 395532
  chr1:93913990-93914465
  hypo

SEQ ID NO: 401946 - DNA, 44 bp, Homo sapiens; identical to SEQ ID NO: 248738
  chr1:93973207-93973251
  hypo

SEQ ID NO: 401947 - DNA, 99 bp, Homo sapiens; identical to SEQ ID NO: 248740
  chr1:94033359-94033458
  hypo

SEQ ID NO: 401948 - DNA, 140 bp, Homo sapiens; identical to SEQ ID NO: 248741
  chr1:94041432-94041572
  hypo

SEQ ID NO: 401949 - DNA, 167 bp, Homo sapiens; identical to SEQ ID NO: 248742
  chr1:94043256-94043423
  hypo

SEQ ID NO: 401950 - DNA, 52 bp, Homo sapiens; identical to SEQ ID NO: 297515
  chr1:94345695-94345747
  hypo

SEQ ID NO: 401951 - DNA, 43 bp, Homo sapiens; identical to SEQ ID NO: 207073
  chr1:94507308-94507351
  hypo

SEQ ID NO: 401952 - DNA, 102 bp, Homo sapiens; identical to SEQ ID NO: 207075
  chr1:94546400-94546502
  hypo

SEQ ID NO: 401953 - DNA, 618 bp, Homo sapiens; identical to SEQ ID NO: 395534
  chr1:95006902-95007520
  hypo

SEQ ID NO: 401954 - DNA, 31 bp, Homo sapiens; identical to SEQ ID NO: 248753
  chr1:95222491-95222522
  hypo

SEQ ID NO: 401955 - DNA, 151 bp, Homo sapiens; identical to SEQ ID NO: 248756
  chr1:95343781-95343932
  hypo

SEQ ID NO: 401956 - DNA, 935 bp, Homo sapiens; identical to SEQ ID NO: 278667
  chr1:95582633-95583568
  hypo

SEQ ID NO: 401957 - DNA, 372 bp, Homo sapiens; identical to SEQ ID NO: 278670
  chr1:98386195-98386567
  hypo

SEQ ID NO: 401958 - DNA, 52 bp, Homo sapiens; identical to SEQ ID NO: 395542
  chr1:98386618-98386670
  hypo

SEQ ID NO: 401959 - DNA, 168 bp, Homo sapiens; identical to SEQ ID NO: 207088
  chr1:99667088-99667256
  hypo

SEQ ID NO: 401960 - DNA, 181 bp, Homo sapiens; identical to SEQ ID NO: 207089
  chr1:100500499-100500680
  hypo

SEQ ID NO: 401961 - DNA, 216 bp, Homo sapiens; identical to SEQ ID NO: 248765
  chr1:100931955-100932171
  hypo

SEQ ID NO: 401962 - DNA, 35 bp, Homo sapiens; identical to SEQ ID NO: 207092
  chr1:101675509-101675544
  hypo

SEQ ID NO: 401963 - DNA, 38 bp, Homo sapiens; identical to SEQ ID NO: 297550
  chr1:101721447-101721485
  hypo

SEQ ID NO: 401964 - DNA, 90 bp, Homo sapiens; identical to SEQ ID NO: 248768
  chr1:101721807-101721897
  hypo

SEQ ID NO: 401965 - DNA, 32 bp, Homo sapiens; identical to SEQ ID NO: 248769
  chr1:102292873-102292905
  hypo

SEQ ID NO: 401966 - DNA, 105 bp, Homo sapiens; identical to SEQ ID NO: 248770
  chr1:108230624-108230729
  hypo

SEQ ID NO: 401967 - DNA, 350 bp, Homo sapiens; identical to SEQ ID NO: 248772
  chr1:108735214-108735564
  hypo

SEQ ID NO: 401968 - DNA, 294 bp, Homo sapiens; identical to SEQ ID NO: 297563
  chr1:109646918-109647212
  hypo

SEQ ID NO: 401969 - DNA, 145 bp, Homo sapiens; identical to SEQ ID NO: 248782
  chr1:109741855-109742000
  hypo

SEQ ID NO: 401970 - DNA, 287 bp, Homo sapiens; identical to SEQ ID NO: 297569
  chr1:109797580-109797867
  hypo

SEQ ID NO: 401971 - DNA, 40 bp, Homo sapiens; identical to SEQ ID NO: 297570
  chr1:109797897-109797937
  hypo

SEQ ID NO: 401972 - DNA, 31 bp, Homo sapiens; identical to SEQ ID NO: 248788
  chr1:109805822-109805853
  hypo

SEQ ID NO: 401973 - DNA, 78 bp, Homo sapiens; identical to SEQ ID NO: 207105
  chr1:110042271-110042349
  hypo

SEQ ID NO: 401974 - DNA, 105 bp, Homo sapiens; identical to SEQ ID NO: 221431
  chr1:110052180-110052285
  hypo

SEQ ID NO: 401975 - DNA, 260 bp, Homo sapiens; identical to SEQ ID NO: 248793
  chr1:110073072-110073332
  hypo

SEQ ID NO: 401976 - DNA, 170 bp, Homo sapiens; identical to SEQ ID NO: 207107
  chr1:110085339-110085509
  hypo

SEQ ID NO: 401977 - DNA, 37 bp, Homo sapiens; identical to SEQ ID NO: 207111
  chr1:110338324-110338361
  hypo

SEQ ID NO: 401978 - DNA, 147 bp, Homo sapiens; identical to SEQ ID NO: 197694
  chr1:110453160-110453307
  hypo

SEQ ID NO: 401979 - DNA, 421 bp, Homo sapiens; identical to SEQ ID NO: 197695
  chr1:110453531-110453952
  hypo

SEQ ID NO: 401980 - DNA, 151 bp, Homo sapiens; identical to SEQ ID NO: 248801
  chr1:110471934-110472085
  hypo

SEQ ID NO: 401981 - DNA, 189 bp, Homo sapiens; identical to SEQ ID NO: 248802
  chr1:110561015-110561204
  hypo

SEQ ID NO: 401982 - DNA, 37 bp, Homo sapiens; identical to SEQ ID NO: 248804
  chr1:110737245-110737282
  hypo

SEQ ID NO: 401983 - DNA, 290 bp, Homo sapiens; identical to SEQ ID NO: 248805
  chr1:110737984-110738274
  hypo

SEQ ID NO: 401984 - DNA, 107 bp, Homo sapiens; identical to SEQ ID NO: 248806
  chr1:110765710-110765817
  hypo

SEQ ID NO: 401985 - DNA, 177 bp, Homo sapiens; identical to SEQ ID NO: 248807
  chr1:110771215-110771392
  hypo

SEQ ID NO: 401986 - DNA, 33 bp, Homo sapiens; identical to SEQ ID NO: 207116
  chr1:110947365-110947398
  hypo

SEQ ID NO: 401987 - DNA, 120 bp, Homo sapiens; identical to SEQ ID NO: 207117
  chr1:110947698-110947818
  hypo

SEQ ID NO: 401988 - DNA, 151 bp, Homo sapiens; identical to SEQ ID NO: 207118
  chr1:111022638-111022789
  hypo

SEQ ID NO: 401989 - DNA, 320 bp, Homo sapiens; identical to SEQ ID NO: 395559
  chr1:111149268-111149588
  hypo

SEQ ID NO: 401990 - DNA, 227 bp, Homo sapiens; identical to SEQ ID NO: 248815
  chr1:111216247-111216474
  hypo

SEQ ID NO: 401991 - DNA, 99 bp, Homo sapiens; identical to SEQ ID NO: 248816
  chr1:111296098-111296197
  hypo

SEQ ID NO: 401992 - DNA, 1035 bp, Homo sapiens; identical to SEQ ID NO: 207122
  chr1:112524370-112525405
  hypo

SEQ ID NO: 401993 - DNA, 426 bp, Homo sapiens; identical to SEQ ID NO: 278753
  chr1:113051157-113051583
  hypo

SEQ ID NO: 401994 - DNA, 150 bp, Homo sapiens; identical to SEQ ID NO: 248824
  chr1:113067109-113067259
  hypo

SEQ ID NO: 401995 - DNA, 117 bp, Homo sapiens; identical to SEQ ID NO: 248826
  chr1:113230414-113230531
  hypo

SEQ ID NO: 401996 - DNA, 205 bp, Homo sapiens; identical to SEQ ID NO: 207124
  chr1:113244294-113244499
  hypo

SEQ ID NO: 401997 - DNA, 155 bp, Homo sapiens; identical to SEQ ID NO: 207126
  chr1:113290951-113291106
  hypo

SEQ ID NO: 401998 - DNA, 91 bp, Homo sapiens; identical to SEQ ID NO: 248829
  chr1:113412275-113412366
  hypo

SEQ ID NO: 401999 - DNA, 41 bp, Homo sapiens; identical to SEQ ID NO: 248833
  chr1:114246758-114246799
  hypo

SEQ ID NO: 402000 - DNA, 34 bp, Homo sapiens; identical to SEQ ID NO: 248835
  chr1:114435047-114435081
  hypo

SEQ ID NO: 402001 - DNA, 149 bp, Homo sapiens; identical to SEQ ID NO: 221448
  chr1:114695147-114695296
  hypo

SEQ ID NO: 402002 - DNA, 105 bp, Homo sapiens; identical to SEQ ID NO: 221451
  chr1:114697920-114698025
  hypo

SEQ ID NO: 402003 - DNA, 279 bp, Homo sapiens; identical to SEQ ID NO: 248840
  chr1:115829155-115829434
  hypo

SEQ ID NO: 402004 - DNA, 36 bp, Homo sapiens; identical to SEQ ID NO: 207135
  chr1:116224397-116224433
  hypo

SEQ ID NO: 402005 - DNA, 100 bp, Homo sapiens; identical to SEQ ID NO: 207136
  chr1:116226508-116226608
  hypo

SEQ ID NO: 402006 - DNA, 143 bp, Homo sapiens; identical to SEQ ID NO: 248851
  chr1:116935455-116935598
  hypo

SEQ ID NO: 402007 - DNA, 56 bp, Homo sapiens; identical to SEQ ID NO: 248852
  chr1:116952565-116952621
  hypo

SEQ ID NO: 402008 - DNA, 203 bp, Homo sapiens; identical to SEQ ID NO: 207137
  chr1:117076615-117076818
  hypo

SEQ ID NO: 402009 - DNA, 76 bp, Homo sapiens; identical to SEQ ID NO: 248856
  chr1:117127238-117127314
  hypo

SEQ ID NO: 402010 - DNA, 34 bp, Homo sapiens; identical to SEQ ID NO: 207140
  chr1:117157580-117157614
  hypo

SEQ ID NO: 402011 - DNA, 338 bp, Homo sapiens; identical to SEQ ID NO: 197729
  chr1:117209809-117210147
  hypo

SEQ ID NO: 402012 - DNA, 37 bp, Homo sapiens; identical to SEQ ID NO: 248859
  chr1:117250043-117250080
  hypo

SEQ ID NO: 402013 - DNA, 35 bp, Homo sapiens; identical to SEQ ID NO: 207143
  chr1:117451189-117451224
  hypo

SEQ ID NO: 402014 - DNA, 75 bp, Homo sapiens; identical to SEQ ID NO: 248865
  chr1:117527381-117527456
  hypo

SEQ ID NO: 402015 - DNA, 226 bp, Homo sapiens; identical to SEQ ID NO: 248866
  chr1:117529538-117529764
  hypo

SEQ ID NO: 402016 - DNA, 42 bp, Homo sapiens; identical to SEQ ID NO: 248867
  chr1:117560924-117560966
  hypo

SEQ ID NO: 402017 - DNA, 113 bp, Homo sapiens; identical to SEQ ID NO: 248869
  chr1:117665255-117665368
  hypo

SEQ ID NO: 402018 - DNA, 52 bp, Homo sapiens; identical to SEQ ID NO: 248872
  chr1:118114932-118114984
  hypo

SEQ ID NO: 402019 - DNA, 80 bp, Homo sapiens; identical to SEQ ID NO: 207146
  chr1:118163137-118163217
  hypo

SEQ ID NO: 402020 - DNA, 186 bp, Homo sapiens; identical to SEQ ID NO: 248886
  chr1:150484152-150484338
  hypo

SEQ ID NO: 402021 - DNA, 39 bp, Homo sapiens; identical to SEQ ID NO: 248890
  chr1:150519664-150519703
  hypo

SEQ ID NO: 402022 - DNA, 110 bp, Homo sapiens; identical to SEQ ID NO: 207155
  chr1:150529747-150529857
  hypo

SEQ ID NO: 402023 - DNA, 87 bp, Homo sapiens; identical to SEQ ID NO: 207156
  chr1:150579404-150579491
  hypo

SEQ ID NO: 402024 - DNA, 43 bp, Homo sapiens; identical to SEQ ID NO: 207157
  chr1:150581803-150581846
  hypo

SEQ ID NO: 402025 - DNA, 120 bp, Homo sapiens; identical to SEQ ID NO: 248902
  chr1:150850362-150850482
  hypo

SEQ ID NO: 402026 - DNA, 37 bp, Homo sapiens; identical to SEQ ID NO: 248903
  chr1:150858612-150858649
  hypo

SEQ ID NO: 402027 - DNA, 77 bp, Homo sapiens; identical to SEQ ID NO: 248904
  chr1:150889716-150889793
  hypo

SEQ ID NO: 402028 - DNA, 42 bp, Homo sapiens; identical to SEQ ID NO: 248905
  chr1:150890073-150890115
  hypo

SEQ ID NO: 402029 - DNA, 64 bp, Homo sapiens; identical to SEQ ID NO: 207164
  chr1:151148217-151148281
  hypo

SEQ ID NO: 402030 - DNA, 35 bp, Homo sapiens; identical to SEQ ID NO: 248916
  chr1:151231642-151231677
  hypo

SEQ ID NO: 402031 - DNA, 125 bp, Homo sapiens; identical to SEQ ID NO: 207165
  chr1:151252542-151252667
  hypo

SEQ ID NO: 402032 - DNA, 47 bp, Homo sapiens; identical to SEQ ID NO: 207166
  chr1:151252761-151252808
  hypo

SEQ ID NO: 402033 - DNA, 123 bp, Homo sapiens; identical to SEQ ID NO: 297722
  chr1:151345676-151345799
  hypo

SEQ ID NO: 402034 - DNA, 237 bp, Homo sapiens; identical to SEQ ID NO: 297723
  chr1:151345829-151346066
  hypo

SEQ ID NO: 402035 - DNA, 177 bp, Homo sapiens; identical to SEQ ID NO: 248924
  chr1:151356360-151356537
  hypo

SEQ ID NO: 402036 - DNA, 149 bp, Homo sapiens; identical to SEQ ID NO: 207170
  chr1:151481647-151481796
  hypo

SEQ ID NO: 402037 - DNA, 256 bp, Homo sapiens; identical to SEQ ID NO: 221464
  chr1:151763859-151764115
  hypo

SEQ ID NO: 402038 - DNA, 33 bp, Homo sapiens; identical to SEQ ID NO: 248934
  chr1:151952135-151952168
  hypo

SEQ ID NO: 402039 - DNA, 90 bp, Homo sapiens; identical to SEQ ID NO: 278845
  chr1:152084599-152084689
  hypo

SEQ ID NO: 402040 - DNA, 336 bp, Homo sapiens; identical to SEQ ID NO: 248935
  chr1:152191329-152191665
  hypo

SEQ ID NO: 402041 - DNA, 153 bp, Homo sapiens; identical to SEQ ID NO: 207178
  chr1:153537353-153537506
  hypo

SEQ ID NO: 402042 - DNA, 419 bp, Homo sapiens; identical to SEQ ID NO: 395602
  chr1:153651023-153651442
  hypo

SEQ ID NO: 402043 - DNA, 122 bp, Homo sapiens; identical to SEQ ID NO: 207181
  chr1:153914346-153914468
  hypo

SEQ ID NO: 402044 - DNA, 180 bp, Homo sapiens; identical to SEQ ID NO: 207183
  chr1:153937388-153937568
  hypo

SEQ ID NO: 402045 - DNA, 31 bp, Homo sapiens; identical to SEQ ID NO: 207189
  chr1:154243765-154243796
  hypo

SEQ ID NO: 402046 - DNA, 78 bp, Homo sapiens; identical to SEQ ID NO: 248953
  chr1:154273378-154273456
  hypo

SEQ ID NO: 402047 - DNA, 95 bp, Homo sapiens; identical to SEQ ID NO: 207192
  chr1:154343720-154343815
  hypo

SEQ ID NO: 402048 - DNA, 133 bp, Homo sapiens; identical to SEQ ID NO: 248957
  chr1:154407564-154407697
  hypo

SEQ ID NO: 402049 - DNA, 39 bp, Homo sapiens; identical to SEQ ID NO: 248961
  chr1:154933540-154933579
  hypo

SEQ ID NO: 402050 - DNA, 61 bp, Homo sapiens; identical to SEQ ID NO: 248962
  chr1:154933609-154933670
  hypo

SEQ ID NO: 402051 - DNA, 37 bp, Homo sapiens; identical to SEQ ID NO: 248963
  chr1:154944721-154944758
  hypo

SEQ ID NO: 402052 - DNA, 154 bp, Homo sapiens; identical to SEQ ID NO: 248965
  chr1:154965405-154965559
  hypo

SEQ ID NO: 402053 - DNA, 31 bp, Homo sapiens; identical to SEQ ID NO: 248967
  chr1:155005174-155005205
  hypo

SEQ ID NO: 402054 - DNA, 106 bp, Homo sapiens; identical to SEQ ID NO: 248969
  chr1:155065377-155065483
  hypo

SEQ ID NO: 402055 - DNA, 37 bp, Homo sapiens; identical to SEQ ID NO: 207198
  chr1:155082409-155082446
  hypo

SEQ ID NO: 402056 - DNA, 377 bp, Homo sapiens; identical to SEQ ID NO: 395607
  chr1:155099556-155099933
  hypo

SEQ ID NO: 402057 - DNA, 261 bp, Homo sapiens; identical to SEQ ID NO: 395608
  chr1:155152251-155152512
  hypo

SEQ ID NO: 402058 - DNA, 147 bp, Homo sapiens; identical to SEQ ID NO: 248975
  chr1:155156247-155156394
  hypo

SEQ ID NO: 402059 - DNA, 223 bp, Homo sapiens; identical to SEQ ID NO: 248980
  chr1:155363622-155363845
  hypo

SEQ ID NO: 402060 - DNA, 183 bp, Homo sapiens; identical to SEQ ID NO: 207206
  chr1:155403643-155403826
  hypo

SEQ ID NO: 402061 - DNA, 34 bp, Homo sapiens; identical to SEQ ID NO: 248982
  chr1:155412080-155412114
  hypo

SEQ ID NO: 402062 - DNA, 82 bp, Homo sapiens; identical to SEQ ID NO: 207207
  chr1:155466712-155466794
  hypo

SEQ ID NO: 402063 - DNA, 180 bp, Homo sapiens; identical to SEQ ID NO: 248984
  chr1:155516123-155516303
  hypo

SEQ ID NO: 402064 - DNA, 135 bp, Homo sapiens; identical to SEQ ID NO: 248985
  chr1:155518910-155519045
  hypo

SEQ ID NO: 402065 - DNA, 33 bp, Homo sapiens; identical to SEQ ID NO: 248991
  chr1:155674456-155674489
  hypo

SEQ ID NO: 402066 - DNA, 82 bp, Homo sapiens; identical to SEQ ID NO: 248992
  chr1:155862237-155862319
  hypo

SEQ ID NO: 402067 - DNA, 36 bp, Homo sapiens; identical to SEQ ID NO: 248999
  chr1:155972836-155972872
  hypo

SEQ ID NO: 402068 - DNA, 105 bp, Homo sapiens; identical to SEQ ID NO: 221480
  chr1:156084256-156084361
  hypo

SEQ ID NO: 402069 - DNA, 331 bp, Homo sapiens; identical to SEQ ID NO: 221481
  chr1:156084629-156084960
  hypo

SEQ ID NO: 402070 - DNA, 48 bp, Homo sapiens; identical to SEQ ID NO: 297817
  chr1:156111314-156111362
  hypo

SEQ ID NO: 402071 - DNA, 201 bp, Homo sapiens; identical to SEQ ID NO: 138312
  chr1:156111379-156111580
  hypo

SEQ ID NO: 402072 - DNA, 143 bp, Homo sapiens; identical to SEQ ID NO: 207216
  chr1:156143323-156143466
  hypo

SEQ ID NO: 402073 - DNA, 38 bp, Homo sapiens; identical to SEQ ID NO: 207218
  chr1:156239861-156239899
  hypo

SEQ ID NO: 402074 - DNA, 37 bp, Homo sapiens; identical to SEQ ID NO: 60959
  chr1:156254134-156254171
  hypo

SEQ ID NO: 402075 - DNA, 190 bp, Homo sapiens; identical to SEQ ID NO: 207221
  chr1:156256080-156256270
  hypo

SEQ ID NO: 402076 - DNA, 150 bp, Homo sapiens; identical to SEQ ID NO: 207223
  chr1:156362387-156362537
  hypo

SEQ ID NO: 402077 - DNA, 144 bp, Homo sapiens; identical to SEQ ID NO: 207225
  chr1:156432942-156433086
  hypo

SEQ ID NO: 402078 - DNA, 288 bp, Homo sapiens; identical to SEQ ID NO: 249019
  chr1:156445328-156445616
  hypo

SEQ ID NO: 402079 - DNA, 262 bp, Homo sapiens; identical to SEQ ID NO: 278906
  chr1:156541960-156542222
  hypo

SEQ ID NO: 402080 - DNA, 113 bp, Homo sapiens; identical to SEQ ID NO: 221488
  chr1:156542391-156542504
  hypo

SEQ ID NO: 402081 - DNA, 39 bp, Homo sapiens; identical to SEQ ID NO: 207229
  chr1:156664565-156664604
  hypo

SEQ ID NO: 402082 - DNA, 101 bp, Homo sapiens; identical to SEQ ID NO: 249023
  chr1:156667364-156667465
  hypo

SEQ ID NO: 402083 - DNA, 425 bp, Homo sapiens; identical to SEQ ID NO: 395624
  chr1:156675831-156676256
  hypo

SEQ ID NO: 402084 - DNA, 341 bp, Homo sapiens; identical to SEQ ID NO: 249024
  chr1:156754046-156754387
  hypo

SEQ ID NO: 402085 - DNA, 42 bp, Homo sapiens; identical to SEQ ID NO: 249025
  chr1:156768640-156768682
  hypo

SEQ ID NO: 402086 - DNA, 132 bp, Homo sapiens; identical to SEQ ID NO: 249026
  chr1:156785630-156785762
  hypo

SEQ ID NO: 402087 - DNA, 203 bp, Homo sapiens; identical to SEQ ID NO: 297847
  chr1:156823676-156823879
  hypo

SEQ ID NO: 402088 - DNA, 132 bp, Homo sapiens; identical to SEQ ID NO: 297848
  chr1:156823935-156824067
  hypo

SEQ ID NO: 402089 - DNA, 41 bp, Homo sapiens; identical to SEQ ID NO: 297850
  chr1:156849661-156849702
  hypo

SEQ ID NO: 402090 - DNA, 82 bp, Homo sapiens; identical to SEQ ID NO: 249034
  chr1:158098452-158098534
  hypo

SEQ ID NO: 402091 - DNA, 75 bp, Homo sapiens; identical to SEQ ID NO: 207236
  chr1:158237172-158237247
  hypo

SEQ ID NO: 402092 - DNA, 45 bp, Homo sapiens; identical to SEQ ID NO: 207241
  chr1:159229596-159229641
  hypo

SEQ ID NO: 402093 - DNA, 32 bp, Homo sapiens; identical to SEQ ID NO: 278940
  chr1:159750347-159750379
  hypo

SEQ ID NO: 402094 - DNA, 145 bp, Homo sapiens; identical to SEQ ID NO: 383759
  chr1:159750772-159750917
  hypo

SEQ ID NO: 402095 - DNA, 518 bp, Homo sapiens; identical to SEQ ID NO: 221497
  chr1:159824506-159825024
  hypo

SEQ ID NO: 402096 - DNA, 60 bp, Homo sapiens; identical to SEQ ID NO: 207247
  chr1:160063720-160063780
  hypo

SEQ ID NO: 402097 - DNA, 217 bp, Homo sapiens; identical to SEQ ID NO: 249051
  chr1:160121081-160121298
  hypo

SEQ ID NO: 402098 - DNA, 104 bp, Homo sapiens; identical to SEQ ID NO: 249053
  chr1:160155212-160155316
  hypo

SEQ ID NO: 402099 - DNA, 156 bp, Homo sapiens; identical to SEQ ID NO: 249056
  chr1:160385715-160385871
  hypo

SEQ ID NO: 402100 - DNA, 78 bp, Homo sapiens; identical to SEQ ID NO: 249062
  chr1:160865083-160865161
  hypo

SEQ ID NO: 402101 - DNA, 36 bp, Homo sapiens; identical to SEQ ID NO: 207254
  chr1:160985844-160985880
  hypo

SEQ ID NO: 402102 - DNA, 152 bp, Homo sapiens; identical to SEQ ID NO: 278962
  chr1:161068574-161068726
  hypo

SEQ ID NO: 402103 - DNA, 189 bp, Homo sapiens; identical to SEQ ID NO: 207256
  chr1:161145675-161145864
  hypo

SEQ ID NO: 402104 - DNA, 274 bp, Homo sapiens; identical to SEQ ID NO: 249073
  chr1:161166336-161166610
  hypo

SEQ ID NO: 402105 - DNA, 224 bp, Homo sapiens; identical to SEQ ID NO: 207266
  chr1:162343771-162343995
  hypo

SEQ ID NO: 402106 - DNA, 34 bp, Homo sapiens; identical to SEQ ID NO: 207271
  chr1:164518130-164518164
  hypo

SEQ ID NO: 402107 - DNA, 104 bp, Homo sapiens; identical to SEQ ID NO: 207273
  chr1:164590520-164590624
  hypo

SEQ ID NO: 402108 - DNA, 63 bp, Homo sapiens; identical to SEQ ID NO: 249104
  chr1:164658204-164658267
  hypo

SEQ ID NO: 402109 - DNA, 42 bp, Homo sapiens; identical to SEQ ID NO: 249106
  chr1:164723970-164724012
  hypo

SEQ ID NO: 402110 - DNA, 193 bp, Homo sapiens; identical to SEQ ID NO: 207280
  chr1:164790953-164791146
  hypo

SEQ ID NO: 402111 - DNA, 189 bp, Homo sapiens; identical to SEQ ID NO: 279005
  chr1:165345284-165345473
  hypo

SEQ ID NO: 402112 - DNA, 32 bp, Homo sapiens; identical to SEQ ID NO: 249113
  chr1:165495513-165495545
  hypo

SEQ ID NO: 402113 - DNA, 31 bp, Homo sapiens; identical to SEQ ID NO: 249119
  chr1:166958567-166958598
  hypo

SEQ ID NO: 402114 - DNA, 109 bp, Homo sapiens; identical to SEQ ID NO: 249120
  chr1:167032009-167032118
  hypo

SEQ ID NO: 402115 - DNA, 141 bp, Homo sapiens; identical to SEQ ID NO: 221512
  chr1:167190260-167190401
  hypo

SEQ ID NO: 402116 - DNA, 150 bp, Homo sapiens; identical to SEQ ID NO: 221513
  chr1:167423964-167424114
  hypo

SEQ ID NO: 402117 - DNA, 161 bp, Homo sapiens; identical to SEQ ID NO: 207288
  chr1:167487339-167487500
  hypo

SEQ ID NO: 402118 - DNA, 202 bp, Homo sapiens; identical to SEQ ID NO: 138615
  chr1:168054754-168054956
  hypo

SEQ ID NO: 402119 - DNA, 65 bp, Homo sapiens; identical to SEQ ID NO: 207290
  chr1:168058062-168058127
  hypo

SEQ ID NO: 402120 - DNA, 41 bp, Homo sapiens; identical to SEQ ID NO: 249136
  chr1:168062078-168062119
  hypo

SEQ ID NO: 402121 - DNA, 141 bp, Homo sapiens; identical to SEQ ID NO: 249142
  chr1:168198888-168199029
  hypo

SEQ ID NO: 402122 - DNA, 186 bp, Homo sapiens; identical to SEQ ID NO: 249144
  chr1:168260494-168260680
  hypo

SEQ ID NO: 402123 - DNA, 233 bp, Homo sapiens; identical to SEQ ID NO: 249145
  chr1:168399587-168399820
  hypo

SEQ ID NO: 402124 - DNA, 126 bp, Homo sapiens; identical to SEQ ID NO: 249149
  chr1:168882770-168882896
  hypo

SEQ ID NO: 402125 - DNA, 41 bp, Homo sapiens; identical to SEQ ID NO: 249151
  chr1:169355662-169355703
  hypo

SEQ ID NO: 402126 - DNA, 88 bp, Homo sapiens; identical to SEQ ID NO: 249153
  chr1:169575559-169575647
  hypo

SEQ ID NO: 402127 - DNA, 78 bp, Homo sapiens; identical to SEQ ID NO: 249155
  chr1:169850180-169850258
  hypo

SEQ ID NO: 402128 - DNA, 159 bp, Homo sapiens; identical to SEQ ID NO: 207300
  chr1:171707391-171707550
  hypo

SEQ ID NO: 402129 - DNA, 77 bp, Homo sapiens; identical to SEQ ID NO: 207301
  chr1:172449159-172449236
  hypo

SEQ ID NO: 402130 - DNA, 36 bp, Homo sapiens; identical to SEQ ID NO: 249170
  chr1:174048026-174048062
  hypo

SEQ ID NO: 402131 - DNA, 148 bp, Homo sapiens; identical to SEQ ID NO: 249173
  chr1:175014791-175014939
  hypo

SEQ ID NO: 402132 - DNA, 36 bp, Homo sapiens; identical to SEQ ID NO: 249180
  chr1:175385845-175385881
  hypo

SEQ ID NO: 402133 - DNA, 37 bp, Homo sapiens; identical to SEQ ID NO: 249182
  chr1:176694918-176694955
  hypo

SEQ ID NO: 402134 - DNA, 37 bp, Homo sapiens; identical to SEQ ID NO: 249183
  chr1:176695195-176695232
  hypo

SEQ ID NO: 402135 - DNA, 44 bp, Homo sapiens; identical to SEQ ID NO: 249184
  chr1:178099911-178099955
  hypo

SEQ ID NO: 402136 - DNA, 150 bp, Homo sapiens; identical to SEQ ID NO: 207312
  chr1:178271749-178271899
  hypo

SEQ ID NO: 402137 - DNA, 39 bp, Homo sapiens; identical to SEQ ID NO: 249187
  chr1:178465304-178465343
  hypo

SEQ ID NO: 402138 - DNA, 131 bp, Homo sapiens; identical to SEQ ID NO: 249188
  chr1:178469645-178469776
  hypo

SEQ ID NO: 402139 - DNA, 41 bp, Homo sapiens; identical to SEQ ID NO: 249192
  chr1:178829083-178829124
  hypo

SEQ ID NO: 402140 - DNA, 229 bp, Homo sapiens; identical to SEQ ID NO: 207315
  chr1:178928477-178928706
  hypo

SEQ ID NO: 402141 - DNA, 43 bp, Homo sapiens; identical to SEQ ID NO: 207318
  chr1:179229272-179229315
  hypo

SEQ ID NO: 402142 - DNA, 299 bp, Homo sapiens; identical to SEQ ID NO: 249204
  chr1:180097383-180097682
  hypo

SEQ ID NO: 402143 - DNA, 291 bp, Homo sapiens; identical to SEQ ID NO: 249205
  chr1:180134709-180135000
  hypo

SEQ ID NO: 402144 - DNA, 96 bp, Homo sapiens; identical to SEQ ID NO: 249208
  chr1:180223403-180223499
  hypo

SEQ ID NO: 402145 - DNA, 34 bp, Homo sapiens; identical to SEQ ID NO: 249210
  chr1:180302703-180302737
  hypo

SEQ ID NO: 402146 - DNA, 136 bp, Homo sapiens; identical to SEQ ID NO: 249211
  chr1:180404662-180404798
  hypo

SEQ ID NO: 402147 - DNA, 120 bp, Homo sapiens; identical to SEQ ID NO: 207324
  chr1:180497354-180497474
  hypo

SEQ ID NO: 402148 - DNA, 94 bp, Homo sapiens; identical to SEQ ID NO: 207329
  chr1:180885147-180885241
  hypo

SEQ ID NO: 402149 - DNA, 41 bp, Homo sapiens; identical to SEQ ID NO: 207330
  chr1:180891951-180891992
  hypo

SEQ ID NO: 402150 - DNA, 126 bp, Homo sapiens; identical to SEQ ID NO: 207332
  chr1:180896512-180896638
  hypo

SEQ ID NO: 402151 - DNA, 296 bp, Homo sapiens; identical to SEQ ID NO: 249222
  chr1:180918319-180918615
  hypo

SEQ ID NO: 402152 - DNA, 151 bp, Homo sapiens; identical to SEQ ID NO: 207334
  chr1:181066372-181066523
  hypo

SEQ ID NO: 402153 - DNA, 65 bp, Homo sapiens; identical to SEQ ID NO: 249227
  chr1:181111089-181111154
  hypo

SEQ ID NO: 402154 - DNA, 40 bp, Homo sapiens; identical to SEQ ID NO: 249232
  chr1:182148663-182148703
  hypo

SEQ ID NO: 402155 - DNA, 33 bp, Homo sapiens; identical to SEQ ID NO: 249233
  chr1:182230564-182230597
  hypo

SEQ ID NO: 402156 - DNA, 69 bp, Homo sapiens; identical to SEQ ID NO: 249234
  chr1:182637878-182637947
  hypo

SEQ ID NO: 402157 - DNA, 39 bp, Homo sapiens; identical to SEQ ID NO: 207340
  chr1:182767636-182767675
  hypo

SEQ ID NO: 402158 - DNA, 190 bp, Homo sapiens; identical to SEQ ID NO: 207341
  chr1:182827758-182827948
  hypo

SEQ ID NO: 402159 - DNA, 289 bp, Homo sapiens; identical to SEQ ID NO: 221528
  chr1:182992844-182993133
  hypo

SEQ ID NO: 402160 - DNA, 291 bp, Homo sapiens; identical to SEQ ID NO: 221529
  chr1:183155179-183155470
  hypo

SEQ ID NO: 402161 - DNA, 136 bp, Homo sapiens; identical to SEQ ID NO: 207345
  chr1:183338766-183338902
  hypo

SEQ ID NO: 402162 - DNA, 174 bp, Homo sapiens; identical to SEQ ID NO: 249245
  chr1:183944151-183944325
  hypo

SEQ ID NO: 402163 - DNA, 165 bp, Homo sapiens; identical to SEQ ID NO: 249246
  chr1:184333001-184333166
  hypo

SEQ ID NO: 402164 - DNA, 507 bp, Homo sapiens; identical to SEQ ID NO: 197878
  chr1:184355381-184355888
  hypo

SEQ ID NO: 402165 - DNA, 278 bp, Homo sapiens; identical to SEQ ID NO: 197879
  chr1:184355936-184356214
  hypo

SEQ ID NO: 402166 - DNA, 146 bp, Homo sapiens; identical to SEQ ID NO: 197880
  chr1:184356541-184356687
  hypo

SEQ ID NO: 402167 - DNA, 259 bp, Homo sapiens; identical to SEQ ID NO: 207349
  chr1:184448490-184448749
  hypo

SEQ ID NO: 402168 - DNA, 60 bp, Homo sapiens; identical to SEQ ID NO: 383773
  chr1:184722970-184723030
  hypo

SEQ ID NO: 402169 - DNA, 52 bp, Homo sapiens; identical to SEQ ID NO: 249251
  chr1:184764469-184764521
  hypo

SEQ ID NO: 402170 - DNA, 39 bp, Homo sapiens; identical to SEQ ID NO: 207353
  chr1:185024836-185024875
  hypo

SEQ ID NO: 402171 - DNA, 167 bp, Homo sapiens; identical to SEQ ID NO: 249255
  chr1:185554768-185554935
  hypo

SEQ ID NO: 402172 - DNA, 65 bp, Homo sapiens; identical to SEQ ID NO: 279127
  chr1:186344948-186345013
  hypo

SEQ ID NO: 402173 - DNA, 176 bp, Homo sapiens; identical to SEQ ID NO: 207355
  chr1:188612098-188612274
  hypo

SEQ ID NO: 402174 - DNA, 164 bp, Homo sapiens; identical to SEQ ID NO: 249261
  chr1:193377400-193377564
  hypo

SEQ ID NO: 402175 - DNA, 33 bp, Homo sapiens; identical to SEQ ID NO: 249262
  chr1:195578617-195578650
  hypo

SEQ ID NO: 402176 - DNA, 53 bp, Homo sapiens; identical to SEQ ID NO: 207358
  chr1:197091652-197091705
  hypo

SEQ ID NO: 402177 - DNA, 32 bp, Homo sapiens; identical to SEQ ID NO: 207359
  chr1:197116742-197116774
  hypo

SEQ ID NO: 402178 - DNA, 38 bp, Homo sapiens; identical to SEQ ID NO: 207360
  chr1:197324919-197324957
  hypo

SEQ ID NO: 402179 - DNA, 92 bp, Homo sapiens; identical to SEQ ID NO: 207362
  chr1:197704760-197704852
  hypo

SEQ ID NO: 402180 - DNA, 181 bp, Homo sapiens; identical to SEQ ID NO: 207363
  chr1:198828046-198828227
  hypo

SEQ ID NO: 402181 - DNA, 81 bp, Homo sapiens; identical to SEQ ID NO: 249279
  chr1:200486650-200486731
  hypo

SEQ ID NO: 402182 - DNA, 34 bp, Homo sapiens; identical to SEQ ID NO: 207366
  chr1:200556912-200556946
  hypo

SEQ ID NO: 402183 - DNA, 92 bp, Homo sapiens; identical to SEQ ID NO: 207367
  chr1:200588800-200588892
  hypo

SEQ ID NO: 402184 - DNA, 111 bp, Homo sapiens; identical to SEQ ID NO: 207370
  chr1:200942600-200942711
  hypo

SEQ ID NO: 402185 - DNA, 78 bp, Homo sapiens; identical to SEQ ID NO: 207372
  chr1:201055718-201055796
  hypo

SEQ ID NO: 402186 - DNA, 816 bp, Homo sapiens; identical to SEQ ID NO: 279158
  chr1:201083266-201084082
  hypo

SEQ ID NO: 402187 - DNA, 31 bp, Homo sapiens; identical to SEQ ID NO: 249293
  chr1:201238522-201238553
  hypo

SEQ ID NO: 402188 - DNA, 47 bp, Homo sapiens; identical to SEQ ID NO: 298146
  chr1:201244195-201244242
  hypo

SEQ ID NO: 402189 - DNA, 152 bp, Homo sapiens; identical to SEQ ID NO: 249295
  chr1:201244944-201245096
  hypo

SEQ ID NO: 402190 - DNA, 42 bp, Homo sapiens; identical to SEQ ID NO: 249298
  chr1:201325776-201325818
  hypo

SEQ ID NO: 402191 - DNA, 96 bp, Homo sapiens; identical to SEQ ID NO: 249300
  chr1:201351265-201351361
  hypo

SEQ ID NO: 402192 - DNA, 169 bp, Homo sapiens; identical to SEQ ID NO: 207379
  chr1:201355458-201355627
  hypo

SEQ ID NO: 402193 - DNA, 120 bp, Homo sapiens; identical to SEQ ID NO: 249304
  chr1:201432876-201432996
  hypo

SEQ ID NO: 402194 - DNA, 59 bp, Homo sapiens; identical to SEQ ID NO: 249308
  chr1:201981829-201981888
  hypo

SEQ ID NO: 402195 - DNA, 49 bp, Homo sapiens; identical to SEQ ID NO: 298161
  chr1:201982339-201982388
  hypo

SEQ ID NO: 402196 - DNA, 37 bp, Homo sapiens; identical to SEQ ID NO: 207384
  chr1:201984009-201984046
  hypo

SEQ ID NO: 402197 - DNA, 89 bp, Homo sapiens; identical to SEQ ID NO: 207385
  chr1:201997730-201997819
  hypo

SEQ ID NO: 402198 - DNA, 70 bp, Homo sapiens
  chr1:202009883-202009953
  hypo
ggtgaattctgtgcctacttaacctaacctgtgctgactctgcacaatgttaacacactcttcttttttt

SEQ ID NO: 402199 - DNA, 42 bp, Homo sapiens; identical to SEQ ID NO: 249315
  chr1:202022787-202022829
  hypo

SEQ ID NO: 402200 - DNA, 79 bp, Homo sapiens; identical to SEQ ID NO: 249316
  chr1:202032892-202032971
  hypo

SEQ ID NO: 402201 - DNA, 56 bp, Homo sapiens; identical to SEQ ID NO: 298170
  chr1:202042308-202042364
  hypo

SEQ ID NO: 402202 - DNA, 79 bp, Homo sapiens; identical to SEQ ID NO: 298171
  chr1:202042487-202042566
  hypo

SEQ ID NO: 402203 - DNA, 38 bp, Homo sapiens; identical to SEQ ID NO: 249319
  chr1:202052584-202052622
  hypo

SEQ ID NO: 402204 - DNA, 42 bp, Homo sapiens; identical to SEQ ID NO: 249320
  chr1:202058380-202058422
  hypo

SEQ ID NO: 402205 - DNA, 61 bp, Homo sapiens; identical to SEQ ID NO: 207386
  chr1:202097362-202097423
  hypo

SEQ ID NO: 402206 - DNA, 289 bp, Homo sapiens; identical to SEQ ID NO: 249323
  chr1:202134668-202134957
  hypo

SEQ ID NO: 402207 - DNA, 549 bp, Homo sapiens; identical to SEQ ID NO: 221540
  chr1:202162904-202163453
  hypo

SEQ ID NO: 402208 - DNA, 189 bp, Homo sapiens; identical to SEQ ID NO: 249324
  chr1:202218132-202218321
  hypo

SEQ ID NO: 402209 - DNA, 98 bp, Homo sapiens; identical to SEQ ID NO: 249325
  chr1:202237360-202237458
  hypo

SEQ ID NO: 402210 - DNA, 461 bp, Homo sapiens; identical to SEQ ID NO: 249326
  chr1:202287405-202287866
  hypo

SEQ ID NO: 402211 - DNA, 190 bp, Homo sapiens; identical to SEQ ID NO: 221542
  chr1:202612832-202613022
  hypo

SEQ ID NO: 402212 - DNA, 385 bp, Homo sapiens; identical to SEQ ID NO: 395712
  chr1:202830481-202830866
  hypo

SEQ ID NO: 402213 - DNA, 136 bp, Homo sapiens; identical to SEQ ID NO: 207391
  chr1:202934401-202934537
  hypo

SEQ ID NO: 402214 - DNA, 163 bp, Homo sapiens; identical to SEQ ID NO: 249337
  chr1:203014550-203014713
  hypo

SEQ ID NO: 402215 - DNA, 267 bp, Homo sapiens; identical to SEQ ID NO: 249339
  chr1:203098029-203098296
  hypo

SEQ ID NO: 402216 - DNA, 231 bp, Homo sapiens; identical to SEQ ID NO: 249343
  chr1:203192503-203192734
  hypo

SEQ ID NO: 402217 - DNA, 153 bp, Homo sapiens; identical to SEQ ID NO: 249346
  chr1:203455859-203456012
  hypo

SEQ ID NO: 402218 - DNA, 114 bp, Homo sapiens; identical to SEQ ID NO: 385105
  chr1:203690678-203690792
  hypo

SEQ ID NO: 402219 - DNA, 161 bp, Homo sapiens; identical to SEQ ID NO: 249351
  chr1:204003761-204003922
  hypo

SEQ ID NO: 402220 - DNA, 76 bp, Homo sapiens; identical to SEQ ID NO: 249353
  chr1:204123782-204123858
  hypo

SEQ ID NO: 402221 - DNA, 35 bp, Homo sapiens; identical to SEQ ID NO: 249356
  chr1:204137844-204137879
  hypo

SEQ ID NO: 402222 - DNA, 58 bp, Homo sapiens; identical to SEQ ID NO: 207398
  chr1:204212336-204212394
  hypo

SEQ ID NO: 402223 - DNA, 103 bp, Homo sapiens; identical to SEQ ID NO: 207399
  chr1:204217170-204217273
  hypo

SEQ ID NO: 402224 - DNA, 52 bp, Homo sapiens; identical to SEQ ID NO: 249363
  chr1:204217934-204217986
  hypo

SEQ ID NO: 402225 - DNA, 100 bp, Homo sapiens; identical to SEQ ID NO: 249366
  chr1:204299942-204300042
  hypo

SEQ ID NO: 402226 - DNA, 43 bp, Homo sapiens; identical to SEQ ID NO: 207404
  chr1:204486800-204486843
  hypo

SEQ ID NO: 402227 - DNA, 43 bp, Homo sapiens; identical to SEQ ID NO: 207405
  chr1:204487138-204487181
  hypo

SEQ ID NO: 402228 - DNA, 120 bp, Homo sapiens; identical to SEQ ID NO: 249372
  chr1:204493508-204493628
  hypo

SEQ ID NO: 402229 - DNA, 200 bp, Homo sapiens; identical to SEQ ID NO: 279200
  chr1:204518656-204518856
  hypo

SEQ ID NO: 402230 - DNA, 100 bp, Homo sapiens; identical to SEQ ID NO: 249378
  chr1:204607424-204607524
  hypo

SEQ ID NO: 402231 - DNA, 212 bp, Homo sapiens; identical to SEQ ID NO: 249384
  chr1:204950968-204951180
  hypo

SEQ ID NO: 402232 - DNA, 199 bp, Homo sapiens; identical to SEQ ID NO: 207412
  chr1:204954945-204955144
  hypo

SEQ ID NO: 402233 - DNA, 101 bp, Homo sapiens; identical to SEQ ID NO: 249390
  chr1:205210756-205210857
  hypo

SEQ ID NO: 402234 - DNA, 70 bp, Homo sapiens; identical to SEQ ID NO: 249391
  chr1:205238244-205238314
  hypo

SEQ ID NO: 402235 - DNA, 48 bp, Homo sapiens; identical to SEQ ID NO: 249396
  chr1:205476129-205476177
  hypo

SEQ ID NO: 402236 - DNA, 189 bp, Homo sapiens; identical to SEQ ID NO: 207422
  chr1:207088568-207088757
  hypo

SEQ ID NO: 402237 - DNA, 98 bp, Homo sapiens; identical to SEQ ID NO: 249404
  chr1:207105076-207105174
  hypo

SEQ ID NO: 402238 - DNA, 183 bp, Homo sapiens; identical to SEQ ID NO: 249405
  chr1:207130059-207130242
  hypo

SEQ ID NO: 402239 - DNA, 140 bp, Homo sapiens; identical to SEQ ID NO: 207423
  chr1:207182657-207182797
  hypo

SEQ ID NO: 402240 - DNA, 36 bp, Homo sapiens; identical to SEQ ID NO: 249417
  chr1:207880637-207880673
  hypo

SEQ ID NO: 402241 - DNA, 282 bp, Homo sapiens; identical to SEQ ID NO: 249425
  chr1:207994389-207994671
  hypo

SEQ ID NO: 402242 - DNA, 208 bp, Homo sapiens; identical to SEQ ID NO: 279219
  chr1:207995189-207995397
  hypo

SEQ ID NO: 402243 - DNA, 165 bp, Homo sapiens; identical to SEQ ID NO: 249430
  chr1:208328464-208328629
  hypo

SEQ ID NO: 402244 - DNA, 751 bp, Homo sapiens; identical to SEQ ID NO: 249431
  chr1:208404328-208405079
  hypo

SEQ ID NO: 402245 - DNA, 257 bp, Homo sapiens; identical to SEQ ID NO: 221561
  chr1:208416772-208417029
  hypo

SEQ ID NO: 402246 - DNA, 55 bp, Homo sapiens; identical to SEQ ID NO: 221563
  chr1:208418731-208418786
  hypo

SEQ ID NO: 402247 - DNA, 34 bp, Homo sapiens; identical to SEQ ID NO: 249432
  chr1:208441467-208441501
  hypo

SEQ ID NO: 402248 - DNA, 197 bp, Homo sapiens; identical to SEQ ID NO: 249437
  chr1:209803089-209803286
  hypo

SEQ ID NO: 402249 - DNA, 96 bp, Homo sapiens; identical to SEQ ID NO: 249440
  chr1:209989431-209989527
  hypo

SEQ ID NO: 402250 - DNA, 113 bp, Homo sapiens; identical to SEQ ID NO: 249444
  chr1:210495070-210495183
  hypo

SEQ ID NO: 402251 - DNA, 105 bp, Homo sapiens; identical to SEQ ID NO: 249450
  chr1:211430456-211430561
  hypo

SEQ ID NO: 402252 - DNA, 70 bp, Homo sapiens; identical to SEQ ID NO: 249454
  chr1:211824879-211824949
  hypo

SEQ ID NO: 402253 - DNA, 735 bp, Homo sapiens; identical to SEQ ID NO: 221566
  chr1:212003416-212004151
  hypo

SEQ ID NO: 402254 - DNA, 33 bp, Homo sapiens; identical to SEQ ID NO: 207444
  chr1:212321601-212321634
  hypo

SEQ ID NO: 402255 - DNA, 40 bp, Homo sapiens
  chr1:212605273-212605313
  hypo
gttcctcacacctgtaatcccagcactttgggtggatgag

SEQ ID NO: 402256 - DNA, 209 bp, Homo sapiens; identical to SEQ ID NO: 249463
  chr1:212647420-212647629
  hypo

SEQ ID NO: 402257 - DNA, 204 bp, Homo sapiens; identical to SEQ ID NO: 249467
  chr1:213134379-213134583
  hypo

SEQ ID NO: 402258 - DNA, 38 bp, Homo sapiens; identical to SEQ ID NO: 249472
  chr1:214557876-214557914
  hypo

SEQ ID NO: 402259 - DNA, 124 bp, Homo sapiens; identical to SEQ ID NO: 249473
  chr1:214566283-214566407
  hypo

SEQ ID NO: 402260 - DNA, 32 bp, Homo sapiens; identical to SEQ ID NO: 390334
  chr1:214638124-214638156
  hypo

SEQ ID NO: 402261 - DNA, 51 bp, Homo sapiens; identical to SEQ ID NO: 207454
  chr1:214638186-214638237
  hypo

SEQ ID NO: 402262 - DNA, 200 bp, Homo sapiens; identical to SEQ ID NO: 249477
  chr1:214662584-214662784
  hypo

SEQ ID NO: 402263 - DNA, 209 bp, Homo sapiens; identical to SEQ ID NO: 207455
  chr1:214788823-214789032
  hypo

SEQ ID NO: 402264 - DNA, 351 bp, Homo sapiens; identical to SEQ ID NO: 279272
  chr1:215740687-215741038
  hypo

SEQ ID NO: 402265 - DNA, 37 bp, Homo sapiens; identical to SEQ ID NO: 207464
  chr1:220426847-220426884
  hypo

SEQ ID NO: 402266 - DNA, 378 bp, Homo sapiens; identical to SEQ ID NO: 249488
  chr1:221060168-221060546
  hypo

SEQ ID NO: 402267 - DNA, 116 bp, Homo sapiens; identical to SEQ ID NO: 249490
  chr1:221910203-221910319
  hypo

SEQ ID NO: 402268 - DNA, 195 bp, Homo sapiens; identical to SEQ ID NO: 207468
  chr1:222260739-222260934
  hypo

SEQ ID NO: 402269 - DNA, 44 bp, Homo sapiens; identical to SEQ ID NO: 207469
  chr1:223003690-223003734
  hypo

SEQ ID NO: 402270 - DNA, 405 bp, Homo sapiens; identical to SEQ ID NO: 249495
  chr1:223210752-223211157
  hypo

SEQ ID NO: 402271 - DNA, 164 bp, Homo sapiens; identical to SEQ ID NO: 207474
  chr1:223813496-223813660
  hypo

SEQ ID NO: 402272 - DNA, 42 bp, Homo sapiens; identical to SEQ ID NO: 249504
  chr1:223908289-223908331
  hypo

SEQ ID NO: 402273 - DNA, 63 bp, Homo sapiens; identical to SEQ ID NO: 298372
  chr1:223927891-223927954
  hypo

SEQ ID NO: 402274 - DNA, 61 bp, Homo sapiens; identical to SEQ ID NO: 249507
  chr1:223953251-223953312
  hypo

SEQ ID NO: 402275 - DNA, 104 bp, Homo sapiens; identical to SEQ ID NO: 207479
  chr1:224051404-224051508
  hypo

SEQ ID NO: 402276 - DNA, 89 bp, Homo sapiens; identical to SEQ ID NO: 249514
  chr1:224400597-224400686
  hypo

SEQ ID NO: 402277 - DNA, 34 bp, Homo sapiens; identical to SEQ ID NO: 249515
  chr1:224447975-224448009
  hypo

SEQ ID NO: 402278 - DNA, 43 bp, Homo sapiens; identical to SEQ ID NO: 249517
  chr1:224490849-224490892
  hypo

SEQ ID NO: 402279 - DNA, 33 bp, Homo sapiens; identical to SEQ ID NO: 207491
  chr1:225608023-225608056
  hypo

SEQ ID NO: 402280 - DNA, 243 bp, Homo sapiens; identical to SEQ ID NO: 207493
  chr1:225637174-225637417
  hypo

SEQ ID NO: 402281 - DNA, 45 bp, Homo sapiens; identical to SEQ ID NO: 249523
  chr1:225696995-225697040
  hypo

SEQ ID NO: 402282 - DNA, 92 bp, Homo sapiens; identical to SEQ ID NO: 249524
  chr1:225907936-225908028
  hypo

SEQ ID NO: 402283 - DNA, 36 bp, Homo sapiens; identical to SEQ ID NO: 249528
  chr1:225956132-225956168
  hypo

SEQ ID NO: 402284 - DNA, 55 bp, Homo sapiens; identical to SEQ ID NO: 249530
  chr1:226026645-226026700
  hypo

SEQ ID NO: 402285 - DNA, 108 bp, Homo sapiens; identical to SEQ ID NO: 207495
  chr1:226053432-226053540
  hypo

SEQ ID NO: 402286 - DNA, 130 bp, Homo sapiens; identical to SEQ ID NO: 249532
  chr1:226059446-226059576
  hypo

SEQ ID NO: 402287 - DNA, 35 bp, Homo sapiens; identical to SEQ ID NO: 249539
  chr1:226304036-226304071
  hypo

SEQ ID NO: 402288 - DNA, 56 bp, Homo sapiens; identical to SEQ ID NO: 221594
  chr1:226497394-226497450
  hypo

SEQ ID NO: 402289 - DNA, 342 bp, Homo sapiens; identical to SEQ ID NO: 207503
  chr1:226789939-226790281
  hypo

SEQ ID NO: 402290 - DNA, 152 bp, Homo sapiens; identical to SEQ ID NO: 249548
  chr1:226833941-226834093
  hypo

SEQ ID NO: 402291 - DNA, 69 bp, Homo sapiens; identical to SEQ ID NO: 249549
  chr1:226834885-226834954
  hypo

SEQ ID NO: 402292 - DNA, 98 bp, Homo sapiens; identical to SEQ ID NO: 249552
  chr1:226910144-226910242
  hypo

SEQ ID NO: 402293 - DNA, 82 bp, Homo sapiens; identical to SEQ ID NO: 207508
  chr1:227248038-227248120
  hypo

SEQ ID NO: 402294 - DNA, 171 bp, Homo sapiens; identical to SEQ ID NO: 249557
  chr1:227370569-227370740
  hypo

SEQ ID NO: 402295 - DNA, 181 bp, Homo sapiens; identical to SEQ ID NO: 249565
  chr1:227947116-227947297
  hypo

SEQ ID NO: 402296 - DNA, 204 bp, Homo sapiens; identical to SEQ ID NO: 207514
  chr1:227948693-227948897
  hypo

SEQ ID NO: 402297 - DNA, 78 bp, Homo sapiens; identical to SEQ ID NO: 207516
  chr1:228003875-228003953
  hypo

SEQ ID NO: 402298 - DNA, 32 bp, Homo sapiens; identical to SEQ ID NO: 207519
  chr1:228111802-228111834
  hypo

SEQ ID NO: 402299 - DNA, 354 bp, Homo sapiens; identical to SEQ ID NO: 249579
  chr1:228126652-228127006
  hypo

SEQ ID NO: 402300 - DNA, 207 bp, Homo sapiens; identical to SEQ ID NO: 197993
  chr1:228135899-228136106
  hypo

SEQ ID NO: 402301 - DNA, 119 bp, Homo sapiens; identical to SEQ ID NO: 197994
  chr1:228136152-228136271
  hypo

SEQ ID NO: 402302 - DNA, 149 bp, Homo sapiens; identical to SEQ ID NO: 279347
  chr1:228193977-228194126
  hypo

SEQ ID NO: 402303 - DNA, 95 bp, Homo sapiens; identical to SEQ ID NO: 298460
  chr1:228201126-228201221
  hypo

SEQ ID NO: 402304 - DNA, 142 bp, Homo sapiens; identical to SEQ ID NO: 249584
  chr1:228282125-228282267
  hypo

SEQ ID NO: 402305 - DNA, 65 bp, Homo sapiens; identical to SEQ ID NO: 249585
  chr1:228285354-228285419
  hypo

SEQ ID NO: 402306 - DNA, 356 bp, Homo sapiens; identical to SEQ ID NO: 249586
  chr1:228295266-228295622
  hypo

SEQ ID NO: 402307 - DNA, 42 bp, Homo sapiens; identical to SEQ ID NO: 249590
  chr1:228406668-228406710
  hypo

SEQ ID NO: 402308 - DNA, 76 bp, Homo sapiens; identical to SEQ ID NO: 298475
  chr1:228461082-228461158
  hypo

SEQ ID NO: 402309 - DNA, 94 bp, Homo sapiens; identical to SEQ ID NO: 249595
  chr1:228464861-228464955
  hypo

SEQ ID NO: 402310 - DNA, 330 bp, Homo sapiens; identical to SEQ ID NO: 207530
  chr1:228465319-228465649
  hypo

SEQ ID NO: 402311 - DNA, 254 bp, Homo sapiens; identical to SEQ ID NO: 249598
  chr1:228468385-228468639
  hypo

SEQ ID NO: 402312 - DNA, 57 bp, Homo sapiens; identical to SEQ ID NO: 249602
  chr1:228479782-228479839
  hypo

SEQ ID NO: 402313 - DNA, 397 bp, Homo sapiens; identical to SEQ ID NO: 249606
  chr1:228509315-228509712
  hypo

SEQ ID NO: 402314 - DNA, 234 bp, Homo sapiens; identical to SEQ ID NO: 249607
  chr1:228526490-228526724
  hypo

SEQ ID NO: 402315 - DNA, 60 bp, Homo sapiens; identical to SEQ ID NO: 249609
  chr1:228529845-228529905
  hypo

SEQ ID NO: 402316 - DNA, 91 bp, Homo sapiens; identical to SEQ ID NO: 207537
  chr1:228552502-228552593
  hypo

SEQ ID NO: 402317 - DNA, 82 bp, Homo sapiens; identical to SEQ ID NO: 207538
  chr1:228552623-228552705
  hypo

SEQ ID NO: 402318 - DNA, 190 bp, Homo sapiens; identical to SEQ ID NO: 249612
  chr1:228553842-228554032
  hypo

SEQ ID NO: 402319 - DNA, 38 bp, Homo sapiens; identical to SEQ ID NO: 249615
  chr1:228613059-228613097
  hypo

SEQ ID NO: 402320 - DNA, 37 bp, Homo sapiens; identical to SEQ ID NO: 249616
  chr1:228614003-228614040
  hypo

SEQ ID NO: 402321 - DNA, 35 bp, Homo sapiens; identical to SEQ ID NO: 249617
  chr1:228857021-228857056
  hypo

SEQ ID NO: 402322 - DNA, 54 bp, Homo sapiens; identical to SEQ ID NO: 207543
  chr1:229073283-229073337
  hypo

SEQ ID NO: 402323 - DNA, 90 bp, Homo sapiens; identical to SEQ ID NO: 249622
  chr1:229136329-229136419
  hypo

SEQ ID NO: 402324 - DNA, 130 bp, Homo sapiens; identical to SEQ ID NO: 207545
  chr1:229155568-229155698
  hypo

SEQ ID NO: 402325 - DNA, 158 bp, Homo sapiens; identical to SEQ ID NO: 207547
  chr1:229202157-229202315
  hypo

SEQ ID NO: 402326 - DNA, 148 bp, Homo sapiens; identical to SEQ ID NO: 207548
  chr1:229252027-229252175
  hypo

SEQ ID NO: 402327 - DNA, 143 bp, Homo sapiens; identical to SEQ ID NO: 207549
  chr1:229462409-229462552
  hypo

SEQ ID NO: 402328 - DNA, 35 bp, Homo sapiens; identical to SEQ ID NO: 207552
  chr1:229678578-229678613
  hypo

SEQ ID NO: 402329 - DNA, 219 bp, Homo sapiens; identical to SEQ ID NO: 198009
  chr1:230223230-230223449
  hypo

SEQ ID NO: 402330 - DNA, 99 bp, Homo sapiens; identical to SEQ ID NO: 249640
  chr1:230250129-230250228
  hypo

SEQ ID NO: 402331 - DNA, 219 bp, Homo sapiens; identical to SEQ ID NO: 249646
  chr1:230378964-230379183
  hypo

SEQ ID NO: 402332 - DNA, 41 bp, Homo sapiens; identical to SEQ ID NO: 207558
  chr1:230393113-230393154
  hypo

SEQ ID NO: 402333 - DNA, 76 bp, Homo sapiens; identical to SEQ ID NO: 207559
  chr1:230393524-230393600
  hypo

SEQ ID NO: 402334 - DNA, 312 bp, Homo sapiens; identical to SEQ ID NO: 249650
  chr1:230398099-230398411
  hypo

SEQ ID NO: 402335 - DNA, 206 bp, Homo sapiens; identical to SEQ ID NO: 249651
  chr1:230399606-230399812
  hypo

SEQ ID NO: 402336 - DNA, 245 bp, Homo sapiens; identical to SEQ ID NO: 249653
  chr1:230415001-230415246
  hypo

SEQ ID NO: 402337 - DNA, 72 bp, Homo sapiens; identical to SEQ ID NO: 298548
  chr1:230453225-230453297
  hypo

SEQ ID NO: 402338 - DNA, 103 bp, Homo sapiens; identical to SEQ ID NO: 298549
  chr1:230453705-230453808
  hypo

SEQ ID NO: 402339 - DNA, 42 bp, Homo sapiens; identical to SEQ ID NO: 249659
  chr1:230841595-230841637
  hypo

SEQ ID NO: 402340 - DNA, 509 bp, Homo sapiens; identical to SEQ ID NO: 249661
  chr1:230882795-230883304
  hypo

SEQ ID NO: 402341 - DNA, 196 bp, Homo sapiens; identical to SEQ ID NO: 249663
  chr1:230888881-230889077
  hypo

SEQ ID NO: 402342 - DNA, 359 bp, Homo sapiens; identical to SEQ ID NO: 207566
  chr1:230898511-230898870
  hypo

SEQ ID NO: 402343 - DNA, 120 bp, Homo sapiens; identical to SEQ ID NO: 207568
  chr1:230980022-230980142
  hypo

SEQ ID NO: 402344 - DNA, 131 bp, Homo sapiens; identical to SEQ ID NO: 298565
  chr1:230992696-230992827
  hypo

SEQ ID NO: 402345 - DNA, 31 bp, Homo sapiens; identical to SEQ ID NO: 207574
  chr1:231409278-231409309
  hypo

SEQ ID NO: 402346 - DNA, 126 bp, Homo sapiens; identical to SEQ ID NO: 207575
  chr1:231475548-231475674
  hypo

SEQ ID NO: 402347 - DNA, 90 bp, Homo sapiens; identical to SEQ ID NO: 207576
  chr1:231476372-231476462
  hypo

SEQ ID NO: 402348 - DNA, 131 bp, Homo sapiens; identical to SEQ ID NO: 249686
  chr1:231893611-231893742
  hypo

SEQ ID NO: 402349 - DNA, 87 bp, Homo sapiens; identical to SEQ ID NO: 249689
  chr1:232466923-232467010
  hypo

SEQ ID NO: 402350 - DNA, 192 bp, Homo sapiens; identical to SEQ ID NO: 249692
  chr1:232568782-232568974
  hypo

SEQ ID NO: 402351 - DNA, 91 bp, Homo sapiens; identical to SEQ ID NO: 395776
  chr1:232766006-232766097
  hypo

SEQ ID NO: 402352 - DNA, 61 bp, Homo sapiens; identical to SEQ ID NO: 207581
  chr1:232909165-232909226
  hypo

SEQ ID NO: 402353 - DNA, 153 bp, Homo sapiens; identical to SEQ ID NO: 249697
  chr1:233116464-233116617
  hypo

SEQ ID NO: 402354 - DNA, 32 bp, Homo sapiens; identical to SEQ ID NO: 207583
  chr1:233264703-233264735
  hypo

SEQ ID NO: 402355 - DNA, 39 bp, Homo sapiens; identical to SEQ ID NO: 249700
  chr1:233601999-233602038
  hypo

SEQ ID NO: 402356 - DNA, 127 bp, Homo sapiens; identical to SEQ ID NO: 249703
  chr1:234452341-234452468
  hypo

SEQ ID NO: 402357 - DNA, 277 bp, Homo sapiens; identical to SEQ ID NO: 249706
  chr1:234587511-234587788
  hypo

SEQ ID NO: 402358 - DNA, 91 bp, Homo sapiens; identical to SEQ ID NO: 249707
  chr1:234604775-234604866
  hypo

SEQ ID NO: 402359 - DNA, 92 bp, Homo sapiens; identical to SEQ ID NO: 298606
  chr1:234621343-234621435
  hypo

SEQ ID NO: 402360 - DNA, 45 bp, Homo sapiens; identical to SEQ ID NO: 249709
  chr1:234690619-234690664
  hypo

SEQ ID NO: 402361 - DNA, 181 bp, Homo sapiens; identical to SEQ ID NO: 207588
  chr1:234691150-234691331
  hypo

SEQ ID NO: 402362 - DNA, 207 bp, Homo sapiens; identical to SEQ ID NO: 249713
  chr1:234797012-234797219
  hypo

SEQ ID NO: 402363 - DNA, 110 bp, Homo sapiens; identical to SEQ ID NO: 249714
  chr1:234808101-234808211
  hypo

SEQ ID NO: 402364 - DNA, 141 bp, Homo sapiens; identical to SEQ ID NO: 198023
  chr1:234828214-234828355
  hypo

SEQ ID NO: 402365 - DNA, 35 bp, Homo sapiens; identical to SEQ ID NO: 249717
  chr1:234863731-234863766
  hypo

SEQ ID NO: 402366 - DNA, 383 bp, Homo sapiens; identical to SEQ ID NO: 249720
  chr1:234869963-234870346
  hypo

SEQ ID NO: 402367 - DNA, 284 bp, Homo sapiens; identical to SEQ ID NO: 207597
  chr1:234871741-234872025
  hypo

SEQ ID NO: 402368 - DNA, 159 bp, Homo sapiens; identical to SEQ ID NO: 207599
  chr1:234895630-234895789
  hypo

SEQ ID NO: 402369 - DNA, 191 bp, Homo sapiens; identical to SEQ ID NO: 207600
  chr1:234957454-234957645
  hypo

SEQ ID NO: 402370 - DNA, 83 bp, Homo sapiens; identical to SEQ ID NO: 298628
  chr1:234964830-234964913
  hypo

SEQ ID NO: 402371 - DNA, 169 bp, Homo sapiens; identical to SEQ ID NO: 207601
  chr1:235037109-235037278
  hypo

SEQ ID NO: 402372 - DNA, 79 bp, Homo sapiens; identical to SEQ ID NO: 207602
  chr1:235042107-235042186
  hypo

SEQ ID NO: 402373 - DNA, 99 bp, Homo sapiens; identical to SEQ ID NO: 249740
  chr1:235542866-235542965
  hypo

SEQ ID NO: 402374 - DNA, 242 bp, Homo sapiens; identical to SEQ ID NO: 207607
  chr1:235613456-235613698
  hypo

SEQ ID NO: 402375 - DNA, 70 bp, Homo sapiens; identical to SEQ ID NO: 207608
  chr1:235665736-235665806
  hypo

SEQ ID NO: 402376 - DNA, 31 bp, Homo sapiens; identical to SEQ ID NO: 207610
  chr1:235855354-235855385
  hypo

SEQ ID NO: 402377 - DNA, 68 bp, Homo sapiens; identical to SEQ ID NO: 249746
  chr1:235973154-235973222
  hypo

SEQ ID NO: 402378 - DNA, 39 bp, Homo sapiens; identical to SEQ ID NO: 249748
  chr1:236069953-236069992
  hypo

SEQ ID NO: 402379 - DNA, 185 bp, Homo sapiens; identical to SEQ ID NO: 249751
  chr1:236143072-236143257
  hypo

SEQ ID NO: 402380 - DNA, 202 bp, Homo sapiens; identical to SEQ ID NO: 249754
  chr1:236161321-236161523
  hypo

SEQ ID NO: 402381 - DNA, 181 bp, Homo sapiens; identical to SEQ ID NO: 207612
  chr1:236189253-236189434
  hypo

SEQ ID NO: 402382 - DNA, 84 bp, Homo sapiens; identical to SEQ ID NO: 207614
  chr1:236194737-236194821
  hypo

SEQ ID NO: 402383 - DNA, 180 bp, Homo sapiens; identical to SEQ ID NO: 249761
  chr1:236281071-236281251
  hypo

SEQ ID NO: 402384 - DNA, 33 bp, Homo sapiens; identical to SEQ ID NO: 249763
  chr1:236318110-236318143
  hypo

SEQ ID NO: 402385 - DNA, 199 bp, Homo sapiens; identical to SEQ ID NO: 249766
  chr1:236451640-236451839
  hypo

SEQ ID NO: 402386 - DNA, 44 bp, Homo sapiens; identical to SEQ ID NO: 249767
  chr1:236514730-236514774
  hypo

SEQ ID NO: 402387 - DNA, 56 bp, Homo sapiens; identical to SEQ ID NO: 207622
  chr1:236561305-236561361
  hypo

SEQ ID NO: 402388 - DNA, 75 bp, Homo sapiens; identical to SEQ ID NO: 249771
  chr1:236645856-236645931
  hypo

SEQ ID NO: 402389 - DNA, 59 bp, Homo sapiens; identical to SEQ ID NO: 249773
  chr1:236723110-236723169
  hypo

SEQ ID NO: 402390 - DNA, 161 bp, Homo sapiens; identical to SEQ ID NO: 249777
  chr1:237053951-237054112
  hypo

SEQ ID NO: 402391 - DNA, 271 bp, Homo sapiens; identical to SEQ ID NO: 249778
  chr1:237144673-237144944
  hypo

SEQ ID NO: 402392 - DNA, 38 bp, Homo sapiens; identical to SEQ ID NO: 249779
  chr1:237584239-237584277
  hypo

SEQ ID NO: 402393 - DNA, 181 bp, Homo sapiens; identical to SEQ ID NO: 298684
  chr1:237947071-237947252
  hypo

SEQ ID NO: 402394 - DNA, 479 bp, Homo sapiens; identical to SEQ ID NO: 298685
  chr1:237947323-237947802
  hypo

SEQ ID NO: 402395 - DNA, 162 bp, Homo sapiens; identical to SEQ ID NO: 249783
  chr1:239138492-239138654
  hypo

SEQ ID NO: 402396 - DNA, 82 bp, Homo sapiens; identical to SEQ ID NO: 207627
  chr1:239509033-239509115
  hypo

SEQ ID NO: 402397 - DNA, 121 bp, Homo sapiens; identical to SEQ ID NO: 249785
  chr1:240048929-240049050
  hypo

SEQ ID NO: 402398 - DNA, 200 bp, Homo sapiens; identical to SEQ ID NO: 249786
  chr1:240064135-240064335
  hypo

SEQ ID NO: 402399 - DNA, 84 bp, Homo sapiens; identical to SEQ ID NO: 207633
  chr1:241541312-241541396
  hypo

SEQ ID NO: 402400 - DNA, 33 bp, Homo sapiens; identical to SEQ ID NO: 221633
  chr1:241588237-241588270
  hypo

SEQ ID NO: 402401 - DNA, 80 bp, Homo sapiens; identical to SEQ ID NO: 207635
  chr1:241753331-241753411
  hypo

SEQ ID NO: 402402 - DNA, 49 bp, Homo sapiens; identical to SEQ ID NO: 249797
  chr1:241755369-241755418
  hypo

SEQ ID NO: 402403 - DNA, 129 bp, Homo sapiens; identical to SEQ ID NO: 249799
  chr1:242121115-242121244
  hypo

SEQ ID NO: 402404 - DNA, 87 bp, Homo sapiens; identical to SEQ ID NO: 249800
  chr1:242153594-242153681
  hypo

SEQ ID NO: 402405 - DNA, 144 bp, Homo sapiens; identical to SEQ ID NO: 249801
  chr1:242689621-242689765
  hypo

SEQ ID NO: 402406 - DNA, 77 bp, Homo sapiens; identical to SEQ ID NO: 249803
  chr1:243432191-243432268
  hypo

SEQ ID NO: 402407 - DNA, 131 bp, Homo sapiens; identical to SEQ ID NO: 207638
  chr1:243566401-243566532
  hypo

SEQ ID NO: 402408 - DNA, 39 bp, Homo sapiens; identical to SEQ ID NO: 207640
  chr1:243750610-243750649
  hypo

SEQ ID NO: 402409 - DNA, 73 bp, Homo sapiens; identical to SEQ ID NO: 298718
  chr1:244243852-244243925
  hypo

SEQ ID NO: 402410 - DNA, 216 bp, Homo sapiens; identical to SEQ ID NO: 207642
  chr1:244345254-244345470
  hypo

SEQ ID NO: 402411 - DNA, 143 bp, Homo sapiens; identical to SEQ ID NO: 207643
  chr1:244641921-244642064
  hypo

SEQ ID NO: 402412 - DNA, 95 bp, Homo sapiens; identical to SEQ ID NO: 249822
  chr1:244896511-244896606
  hypo

SEQ ID NO: 402413 - DNA, 92 bp, Homo sapiens; identical to SEQ ID NO: 249829
  chr1:245209851-245209943
  hypo

SEQ ID NO: 402414 - DNA, 157 bp, Homo sapiens; identical to SEQ ID NO: 249832
  chr1:245370678-245370835
  hypo

SEQ ID NO: 402415 - DNA, 95 bp, Homo sapiens; identical to SEQ ID NO: 249834
  chr1:245446511-245446606
  hypo

SEQ ID NO: 402416 - DNA, 52 bp, Homo sapiens; identical to SEQ ID NO: 249838
  chr1:245496614-245496666
  hypo

SEQ ID NO: 402417 - DNA, 99 bp, Homo sapiens; identical to SEQ ID NO: 207648
  chr1:245497279-245497378
  hypo

SEQ ID NO: 402418 - DNA, 97 bp, Homo sapiens; identical to SEQ ID NO: 249845
  chr1:245537644-245537741
  hypo

SEQ ID NO: 402419 - DNA, 175 bp, Homo sapiens; identical to SEQ ID NO: 249846
  chr1:245548882-245549057
  hypo

SEQ ID NO: 402420 - DNA, 105 bp, Homo sapiens; identical to SEQ ID NO: 249847
  chr1:245576121-245576226
  hypo

SEQ ID NO: 402421 - DNA, 192 bp, Homo sapiens; identical to SEQ ID NO: 207653
  chr1:245576466-245576658
  hypo

SEQ ID NO: 402422 - DNA, 282 bp, Homo sapiens; identical to SEQ ID NO: 207654
  chr1:245582887-245583169
  hypo

SEQ ID NO: 402423 - DNA, 126 bp, Homo sapiens; identical to SEQ ID NO: 298760
  chr1:245633325-245633451
  hypo

SEQ ID NO: 402424 - DNA, 35 bp, Homo sapiens; identical to SEQ ID NO: 249854
  chr1:245704935-245704970
  hypo

SEQ ID NO: 402425 - DNA, 37 bp, Homo sapiens; identical to SEQ ID NO: 249855
  chr1:245722717-245722754
  hypo

SEQ ID NO: 402426 - DNA, 112 bp, Homo sapiens; identical to SEQ ID NO: 249856
  chr1:245752683-245752795
  hypo

SEQ ID NO: 402427 - DNA, 128 bp, Homo sapiens; identical to SEQ ID NO: 298764
  chr1:245753334-245753462
  hypo

SEQ ID NO: 402428 - DNA, 147 bp, Homo sapiens; identical to SEQ ID NO: 298765
  chr1:245753500-245753647
  hypo

SEQ ID NO: 402429 - DNA, 211 bp, Homo sapiens; identical to SEQ ID NO: 249859
  chr1:245765879-245766090
  hypo

SEQ ID NO: 402430 - DNA, 193 bp, Homo sapiens; identical to SEQ ID NO: 249865
  chr1:245866076-245866269
  hypo

SEQ ID NO: 402431 - DNA, 183 bp, Homo sapiens; identical to SEQ ID NO: 249869
  chr1:246019929-246020112
  hypo

SEQ ID NO: 402432 - DNA, 87 bp, Homo sapiens; identical to SEQ ID NO: 249870
  chr1:246026894-246026981
  hypo

SEQ ID NO: 402433 - DNA, 78 bp, Homo sapiens; identical to SEQ ID NO: 249871
  chr1:246032887-246032965
  hypo

SEQ ID NO: 402434 - DNA, 92 bp, Homo sapiens; identical to SEQ ID NO: 249872
  chr1:246033506-246033598
  hypo

SEQ ID NO: 402435 - DNA, 32 bp, Homo sapiens; identical to SEQ ID NO: 249875
  chr1:246171646-246171678
  hypo

SEQ ID NO: 402436 - DNA, 95 bp, Homo sapiens; identical to SEQ ID NO: 249884
  chr1:246518821-246518916
  hypo

SEQ ID NO: 402437 - DNA, 156 bp, Homo sapiens; identical to SEQ ID NO: 249885
  chr1:246569252-246569408
  hypo

SEQ ID NO: 402438 - DNA, 74 bp, Homo sapiens; identical to SEQ ID NO: 207664
  chr1:246582057-246582131
  hypo

SEQ ID NO: 402439 - DNA, 86 bp, Homo sapiens; identical to SEQ ID NO: 249887
  chr1:246611518-246611604
  hypo

SEQ ID NO: 402440 - DNA, 85 bp, Homo sapiens; identical to SEQ ID NO: 207665
  chr1:246783954-246784039
  hypo

SEQ ID NO: 402441 - DNA, 330 bp, Homo sapiens; identical to SEQ ID NO: 221641
  chr1:246887311-246887641
  hypo

SEQ ID NO: 402442 - DNA, 149 bp, Homo sapiens; identical to SEQ ID NO: 249891
  chr1:246899321-246899470
  hypo

SEQ ID NO: 402443 - DNA, 91 bp, Homo sapiens; identical to SEQ ID NO: 249895
  chr1:246944244-246944335
  hypo

SEQ ID NO: 402444 - DNA, 155 bp, Homo sapiens; identical to SEQ ID NO: 249900
  chr1:247109075-247109230
  hypo

SEQ ID NO: 402445 - DNA, 181 bp, Homo sapiens; identical to SEQ ID NO: 249902
  chr1:247253910-247254091
  hypo

SEQ ID NO: 402446 - DNA, 87 bp, Homo sapiens; identical to SEQ ID NO: 249904
  chr1:247399634-247399721
  hypo

SEQ ID NO: 402447 - DNA, 180 bp, Homo sapiens; identical to SEQ ID NO: 249905
  chr1:247527170-247527350
  hypo

SEQ ID NO: 402448 - DNA, 142 bp, Homo sapiens; identical to SEQ ID NO: 298820
  chr1:247590117-247590259
  hypo

SEQ ID NO: 402449 - DNA, 180 bp, Homo sapiens; identical to SEQ ID NO: 249912
  chr1:248003051-248003231
  hypo

SEQ ID NO: 402450 - DNA, 35 bp, Homo sapiens; identical to SEQ ID NO: 249914
  chr1:248036242-248036277
  hypo

SEQ ID NO: 402451 - DNA, 87 bp, Homo sapiens; identical to SEQ ID NO: 249917
  chr1:248047953-248048040
  hypo

SEQ ID NO: 402452 - DNA, 222 bp, Homo sapiens; identical to SEQ ID NO: 249923
  chr1:248685314-248685536
  hypo

SEQ ID NO: 402453 - DNA, 38 bp, Homo sapiens; identical to SEQ ID NO: 207681
  chr1:249172380-249172418
  hypo

SEQ ID NO: 402454 - DNA, 123 bp, Homo sapiens; identical to SEQ ID NO: 207682
  chr1:249212002-249212125
  hypo

SEQ ID NO: 402455 - DNA, 91 bp, Homo sapiens; identical to SEQ ID NO: 298844
  chr2:142722-142813
  hypo

SEQ ID NO: 402456 - DNA, 136 bp, Homo sapiens; identical to SEQ ID NO: 249935
  chr2:249730-249866
  hypo

SEQ ID NO: 402457 - DNA, 42 bp, Homo sapiens; identical to SEQ ID NO: 249944
  chr2:416712-416754
  hypo

SEQ ID NO: 402458 - DNA, 117 bp, Homo sapiens; identical to SEQ ID NO: 249946
  chr2:465771-465888
  hypo

SEQ ID NO: 402459 - DNA, 232 bp, Homo sapiens; identical to SEQ ID NO: 298859
  chr2:495958-496190
  hypo

SEQ ID NO: 402460 - DNA, 361 bp, Homo sapiens; identical to SEQ ID NO: 249948
  chr2:497070-497431
  hypo

SEQ ID NO: 402461 - DNA, 32 bp, Homo sapiens; identical to SEQ ID NO: 298866
  chr2:720804-720836
  hypo

SEQ ID NO: 402462 - DNA, 99 bp, Homo sapiens; identical to SEQ ID NO: 298867
  chr2:720897-720996
  hypo

SEQ ID NO: 402463 - DNA, 103 bp, Homo sapiens; identical to SEQ ID NO: 207693
  chr2:816916-817019
  hypo

SEQ ID NO: 402464 - DNA, 67 bp, Homo sapiens; identical to SEQ ID NO: 207694
  chr2:817049-817116
  hypo

SEQ ID NO: 402465 - DNA, 183 bp, Homo sapiens; identical to SEQ ID NO: 207695
  chr2:817146-817329
  hypo

SEQ ID NO: 402466 - DNA, 42 bp, Homo sapiens; identical to SEQ ID NO: 249965
  chr2:911370-911412
  hypo

SEQ ID NO: 402467 - DNA, 35 bp, Homo sapiens; identical to SEQ ID NO: 249969
  chr2:1130681-1130716
  hypo

SEQ ID NO: 402468 - DNA, 269 bp, Homo sapiens; identical to SEQ ID NO: 249970
  chr2:1204032-1204301
  hypo

SEQ ID NO: 402469 - DNA, 177 bp, Homo sapiens; identical to SEQ ID NO: 249976
  chr2:1506966-1507143
  hypo

SEQ ID NO: 402470 - DNA, 257 bp, Homo sapiens; identical to SEQ ID NO: 249977
  chr2:1516283-1516540
  hypo

SEQ ID NO: 402471 - DNA, 197 bp, Homo sapiens; identical to SEQ ID NO: 298902
  chr2:1669971-1670168
  hypo

SEQ ID NO: 402472 - DNA, 98 bp, Homo sapiens; identical to SEQ ID NO: 249993
  chr2:1796265-1796363
  hypo

SEQ ID NO: 402473 - DNA, 84 bp, Homo sapiens; identical to SEQ ID NO: 249995
  chr2:1828326-1828410
  hypo

SEQ ID NO: 402474 - DNA, 226 bp, Homo sapiens; identical to SEQ ID NO: 249999
  chr2:1887329-1887555
  hypo

SEQ ID NO: 402475 - DNA, 309 bp, Homo sapiens; identical to SEQ ID NO: 207713
  chr2:1926247-1926556
  hypo

SEQ ID NO: 402476 - DNA, 167 bp, Homo sapiens; identical to SEQ ID NO: 207714
  chr2:1932938-1933105
  hypo

SEQ ID NO: 402477 - DNA, 64 bp, Homo sapiens; identical to SEQ ID NO: 250005
  chr2:1987513-1987577
  hypo

SEQ ID NO: 402478 - DNA, 135 bp, Homo sapiens; identical to SEQ ID NO: 250007
  chr2:2142636-2142771
  hypo

SEQ ID NO: 402479 - DNA, 336 bp, Homo sapiens; identical to SEQ ID NO: 385162
  chr2:2189143-2189479
  hypo

SEQ ID NO: 402480 - DNA, 64 bp, Homo sapiens; identical to SEQ ID NO: 250012
  chr2:2325021-2325085
  hypo

SEQ ID NO: 402481 - DNA, 71 bp, Homo sapiens; identical to SEQ ID NO: 298928
  chr2:2569470-2569541
  hypo

SEQ ID NO: 402482 - DNA, 260 bp, Homo sapiens; identical to SEQ ID NO: 250016
  chr2:2584324-2584584
  hypo

SEQ ID NO: 402483 - DNA, 102 bp, Homo sapiens; identical to SEQ ID NO: 250019
  chr2:2667399-2667501
  hypo

SEQ ID NO: 402484 - DNA, 49 bp, Homo sapiens; identical to SEQ ID NO: 250021
  chr2:2672247-2672296
  hypo

SEQ ID NO: 402485 - DNA, 55 bp, Homo sapiens; identical to SEQ ID NO: 250026
  chr2:2724721-2724776
  hypo

SEQ ID NO: 402486 - DNA, 150 bp, Homo sapiens; identical to SEQ ID NO: 250030
  chr2:2734984-2735134
  hypo

SEQ ID NO: 402487 - DNA, 168 bp, Homo sapiens; identical to SEQ ID NO: 250035
  chr2:2795035-2795203
  hypo

SEQ ID NO: 402488 - DNA, 160 bp, Homo sapiens; identical to SEQ ID NO: 250037
  chr2:2799592-2799752
  hypo

SEQ ID NO: 402489 - DNA, 159 bp, Homo sapiens; identical to SEQ ID NO: 250038
  chr2:2800085-2800244
  hypo

SEQ ID NO: 402490 - DNA, 147 bp, Homo sapiens; identical to SEQ ID NO: 207722
  chr2:2849145-2849292
  hypo

SEQ ID NO: 402491 - DNA, 122 bp, Homo sapiens; identical to SEQ ID NO: 250047
  chr2:2940296-2940418
  hypo

SEQ ID NO: 402492 - DNA, 150 bp, Homo sapiens; identical to SEQ ID NO: 250049
  chr2:3039119-3039269
  hypo

SEQ ID NO: 402493 - DNA, 167 bp, Homo sapiens; identical to SEQ ID NO: 250053
  chr2:3113370-3113537
  hypo

SEQ ID NO: 402494 - DNA, 65 bp, Homo sapiens; identical to SEQ ID NO: 250054
  chr2:3118887-3118952
  hypo

SEQ ID NO: 402495 - DNA, 101 bp, Homo sapiens; identical to SEQ ID NO: 207726
  chr2:3173339-3173440
  hypo

SEQ ID NO: 402496 - DNA, 220 bp, Homo sapiens; identical to SEQ ID NO: 207727
  chr2:3176062-3176282
  hypo

SEQ ID NO: 402497 - DNA, 72 bp, Homo sapiens; identical to SEQ ID NO: 207728
  chr2:3201717-3201789
  hypo

SEQ ID NO: 402498 - DNA, 286 bp, Homo sapiens; identical to SEQ ID NO: 250058
  chr2:3214976-3215262
  hypo

SEQ ID NO: 402499 - DNA, 433 bp, Homo sapiens; identical to SEQ ID NO: 207730
  chr2:3260562-3260995
  hypo

SEQ ID NO: 402500 - DNA, 91 bp, Homo sapiens; identical to SEQ ID NO: 250063
  chr2:3281349-3281440
  hypo

SEQ ID NO: 402501 - DNA, 292 bp, Homo sapiens; identical to SEQ ID NO: 298982
  chr2:3285953-3286245
  hypo

SEQ ID NO: 402502 - DNA, 428 bp, Homo sapiens; identical to SEQ ID NO: 298983
  chr2:3286275-3286703
  hypo

SEQ ID NO: 402503 - DNA, 56 bp, Homo sapiens; identical to SEQ ID NO: 250065
  chr2:3289697-3289753
  hypo

SEQ ID NO: 402504 - DNA, 53 bp, Homo sapiens; identical to SEQ ID NO: 207733
  chr2:3290045-3290098
  hypo

SEQ ID NO: 402505 - DNA, 387 bp, Homo sapiens; identical to SEQ ID NO: 207734
  chr2:3290128-3290515
  hypo

SEQ ID NO: 402506 - DNA, 77 bp, Homo sapiens; identical to SEQ ID NO: 250067
  chr2:3290886-3290963
  hypo

SEQ ID NO: 402507 - DNA, 300 bp, Homo sapiens; identical to SEQ ID NO: 250068
  chr2:3291143-3291443
  hypo

SEQ ID NO: 402508 - DNA, 79 bp, Homo sapiens; identical to SEQ ID NO: 298989
  chr2:3292428-3292507
  hypo

SEQ ID NO: 402509 - DNA, 473 bp, Homo sapiens; identical to SEQ ID NO: 140516
  chr2:3293007-3293480
  hypo

SEQ ID NO: 402510 - DNA, 191 bp, Homo sapiens; identical to SEQ ID NO: 207736
  chr2:3303473-3303664
  hypo

SEQ ID NO: 402511 - DNA, 42 bp, Homo sapiens; identical to SEQ ID NO: 250078
  chr2:3347859-3347901
  hypo

SEQ ID NO: 402512 - DNA, 214 bp, Homo sapiens; identical to SEQ ID NO: 250085
  chr2:3427286-3427500
  hypo

SEQ ID NO: 402513 - DNA, 154 bp, Homo sapiens; identical to SEQ ID NO: 207744
  chr2:3446897-3447051
  hypo

SEQ ID NO: 402514 - DNA, 360 bp, Homo sapiens; identical to SEQ ID NO: 250088
  chr2:3452857-3453217
  hypo

SEQ ID NO: 402515 - DNA, 192 bp, Homo sapiens; identical to SEQ ID NO: 250089
  chr2:3456147-3456339
  hypo

SEQ ID NO: 402516 - DNA, 80 bp, Homo sapiens; identical to SEQ ID NO: 250090
  chr2:3458785-3458865
  hypo

SEQ ID NO: 402517 - DNA, 161 bp, Homo sapiens; identical to SEQ ID NO: 221651
  chr2:3465103-3465264
  hypo

SEQ ID NO: 402518 - DNA, 42 bp, Homo sapiens; identical to SEQ ID NO: 250093
  chr2:3498265-3498307
  hypo

SEQ ID NO: 402519 - DNA, 71 bp, Homo sapiens; identical to SEQ ID NO: 207750
  chr2:3593598-3593669
  hypo

SEQ ID NO: 402520 - DNA, 80 bp, Homo sapiens; identical to SEQ ID NO: 250098
  chr2:3648215-3648295
  hypo

SEQ ID NO: 402521 - DNA, 186 bp, Homo sapiens; identical to SEQ ID NO: 250099
  chr2:3649283-3649469
  hypo

SEQ ID NO: 402522 - DNA, 91 bp, Homo sapiens; identical to SEQ ID NO: 207751
  chr2:3675048-3675139
  hypo

SEQ ID NO: 402523 - DNA, 282 bp, Homo sapiens; identical to SEQ ID NO: 207752
  chr2:3675169-3675451
  hypo

SEQ ID NO: 402524 - DNA, 36 bp, Homo sapiens; identical to SEQ ID NO: 250108
  chr2:3888395-3888431
  hypo

SEQ ID NO: 402525 - DNA, 198 bp, Homo sapiens; identical to SEQ ID NO: 299033
  chr2:3990922-3991120
  hypo

SEQ ID NO: 402526 - DNA, 79 bp, Homo sapiens; identical to SEQ ID NO: 250113
  chr2:5694955-5695034
  hypo

SEQ ID NO: 402527 - DNA, 141 bp, Homo sapiens; identical to SEQ ID NO: 250114
  chr2:6024405-6024546
  hypo

SEQ ID NO: 402528 - DNA, 57 bp, Homo sapiens; identical to SEQ ID NO: 207755
  chr2:6402889-6402946
  hypo

SEQ ID NO: 402529 - DNA, 110 bp, Homo sapiens; identical to SEQ ID NO: 250116
  chr2:6635591-6635701
  hypo

SEQ ID NO: 402530 - DNA, 130 bp, Homo sapiens; identical to SEQ ID NO: 250118
  chr2:7099078-7099208
  hypo

SEQ ID NO: 402531 - DNA, 98 bp, Homo sapiens; identical to SEQ ID NO: 207758
  chr2:7109819-7109917
  hypo

SEQ ID NO: 402532 - DNA, 33 bp, Homo sapiens; identical to SEQ ID NO: 250123
  chr2:7180010-7180043
  hypo

SEQ ID NO: 402533 - DNA, 112 bp, Homo sapiens; identical to SEQ ID NO: 250124
  chr2:7229710-7229822
  hypo

SEQ ID NO: 402534 - DNA, 102 bp, Homo sapiens; identical to SEQ ID NO: 207760
  chr2:7237053-7237155
  hypo

SEQ ID NO: 402535 - DNA, 41 bp, Homo sapiens; identical to SEQ ID NO: 250127
  chr2:7931304-7931345
  hypo

SEQ ID NO: 402536 - DNA, 101 bp, Homo sapiens; identical to SEQ ID NO: 250128
  chr2:7931525-7931626
  hypo

SEQ ID NO: 402537 - DNA, 57 bp, Homo sapiens; identical to SEQ ID NO: 250131
  chr2:8476167-8476224
  hypo

SEQ ID NO: 402538 - DNA, 120 bp, Homo sapiens; identical to SEQ ID NO: 207762
  chr2:8647532-8647652
  hypo

SEQ ID NO: 402539 - DNA, 183 bp, Homo sapiens; identical to SEQ ID NO: 250138
  chr2:8706973-8707156
  hypo

SEQ ID NO: 402540 - DNA, 145 bp, Homo sapiens; identical to SEQ ID NO: 207768
  chr2:8768417-8768562
  hypo

SEQ ID NO: 402541 - DNA, 665 bp, Homo sapiens; identical to SEQ ID NO: 221657
  chr2:8818829-8819494
  hypo

SEQ ID NO: 402542 - DNA, 169 bp, Homo sapiens; identical to SEQ ID NO: 198061
  chr2:8821592-8821761
  hypo

SEQ ID NO: 402543 - DNA, 709 bp, Homo sapiens; identical to SEQ ID NO: 198062
  chr2:8821976-8822685
  hypo

SEQ ID NO: 402544 - DNA, 208 bp, Homo sapiens; identical to SEQ ID NO: 198064
  chr2:8825635-8825843
  hypo

SEQ ID NO: 402545 - DNA, 166 bp, Homo sapiens; identical to SEQ ID NO: 207779
  chr2:9002474-9002640
  hypo

SEQ ID NO: 402546 - DNA, 459 bp, Homo sapiens; identical to SEQ ID NO: 221662
  chr2:9144090-9144549
  hypo

SEQ ID NO: 402547 - DNA, 96 bp, Homo sapiens; identical to SEQ ID NO: 207783
  chr2:9218664-9218760
  hypo

SEQ ID NO: 402548 - DNA, 75 bp, Homo sapiens; identical to SEQ ID NO: 299092
  chr2:9244226-9244301
  hypo

SEQ ID NO: 402549 - DNA, 165 bp, Homo sapiens; identical to SEQ ID NO: 299093
  chr2:9244331-9244496
  hypo

SEQ ID NO: 402550 - DNA, 141 bp, Homo sapiens; identical to SEQ ID NO: 250163
  chr2:9250220-9250361
  hypo

SEQ ID NO: 402551 - DNA, 174 bp, Homo sapiens; identical to SEQ ID NO: 250164
  chr2:9250674-9250848
  hypo

SEQ ID NO: 402552 - DNA, 59 bp, Homo sapiens; identical to SEQ ID NO: 207785
  chr2:9251105-9251164
  hypo

SEQ ID NO: 402553 - DNA, 174 bp, Homo sapiens; identical to SEQ ID NO: 207789
  chr2:9409365-9409539
  hypo

SEQ ID NO: 402554 - DNA, 95 bp, Homo sapiens; identical to SEQ ID NO: 250170
  chr2:9427258-9427353
  hypo

SEQ ID NO: 402555 - DNA, 470 bp, Homo sapiens; identical to SEQ ID NO: 207790
  chr2:9455454-9455924
  hypo

SEQ ID NO: 402556 - DNA, 138 bp, Homo sapiens; identical to SEQ ID NO: 207791
  chr2:9456808-9456946
  hypo

SEQ ID NO: 402557 - DNA, 180 bp, Homo sapiens; identical to SEQ ID NO: 207792
  chr2:9513162-9513342
  hypo

SEQ ID NO: 402558 - DNA, 488 bp, Homo sapiens; identical to SEQ ID NO: 250175
  chr2:9518892-9519380
  hypo

SEQ ID NO: 402559 - DNA, 42 bp, Homo sapiens; identical to SEQ ID NO: 250176
  chr2:9608090-9608132
  hypo

SEQ ID NO: 402560 - DNA, 216 bp, Homo sapiens; identical to SEQ ID NO: 250178
  chr2:9649999-9650215
  hypo

SEQ ID NO: 402561 - DNA, 45 bp, Homo sapiens
  chr2:9720411-9720456
  hypo
atgaagtgtgggttaaggagtaaactggcaagtttgccccaaatt

SEQ ID NO: 402562 - DNA, 49 bp, Homo sapiens; identical to SEQ ID NO: 250182
  chr2:9727412-9727461
  hypo

SEQ ID NO: 402563 - DNA, 104 bp, Homo sapiens; identical to SEQ ID NO: 250184
  chr2:9768526-9768630
  hypo

SEQ ID NO: 402564 - DNA, 42 bp, Homo sapiens; identical to SEQ ID NO: 250190
  chr2:9942207-9942249
  hypo

SEQ ID NO: 402565 - DNA, 235 bp, Homo sapiens; identical to SEQ ID NO: 250191
  chr2:9948880-9949115
  hypo

SEQ ID NO: 402566 - DNA, 175 bp, Homo sapiens; identical to SEQ ID NO: 250192
  chr2:9952204-9952379
  hypo

SEQ ID NO: 402567 - DNA, 134 bp, Homo sapiens; identical to SEQ ID NO: 250195
  chr2:10008084-10008218
  hypo

SEQ ID NO: 402568 - DNA, 213 bp, Homo sapiens; identical to SEQ ID NO: 207796
  chr2:10110633-10110846
  hypo

SEQ ID NO: 402569 - DNA, 531 bp, Homo sapiens; identical to SEQ ID NO: 250206
  chr2:10161988-10162519
  hypo

SEQ ID NO: 402570 - DNA, 114 bp, Homo sapiens; identical to SEQ ID NO: 250208
  chr2:10181969-10182083
  hypo

SEQ ID NO: 402571 - DNA, 126 bp, Homo sapiens; identical to SEQ ID NO: 250209
  chr2:10195850-10195976
  hypo

SEQ ID NO: 402572 - DNA, 42 bp, Homo sapiens; identical to SEQ ID NO: 250210
  chr2:10226144-10226186
  hypo

SEQ ID NO: 402573 - DNA, 152 bp, Homo sapiens; identical to SEQ ID NO: 250215
  chr2:10307112-10307264
  hypo

SEQ ID NO: 402574 - DNA, 139 bp, Homo sapiens; identical to SEQ ID NO: 250221
  chr2:10381451-10381590
  hypo

SEQ ID NO: 402575 - DNA, 84 bp, Homo sapiens; identical to SEQ ID NO: 250222
  chr2:10400306-10400390
  hypo

SEQ ID NO: 402576 - DNA, 512 bp, Homo sapiens; identical to SEQ ID NO: 279506
  chr2:10443618-10444130
  hypo

SEQ ID NO: 402577 - DNA, 165 bp, Homo sapiens; identical to SEQ ID NO: 279507
  chr2:10444193-10444358
  hypo

SEQ ID NO: 402578 - DNA, 163 bp, Homo sapiens; identical to SEQ ID NO: 250223
  chr2:10465386-10465549
  hypo

SEQ ID NO: 402579 - DNA, 66 bp, Homo sapiens; identical to SEQ ID NO: 250226
  chr2:10517629-10517695
  hypo

SEQ ID NO: 402580 - DNA, 160 bp, Homo sapiens; identical to SEQ ID NO: 250228
  chr2:10519035-10519195
  hypo

SEQ ID NO: 402581 - DNA, 40 bp, Homo sapiens; identical to SEQ ID NO: 250229
  chr2:10519315-10519355
  hypo

SEQ ID NO: 402582 - DNA, 540 bp, Homo sapiens; identical to SEQ ID NO: 299170
  chr2:10525735-10526275
  hypo

SEQ ID NO: 402583 - DNA, 42 bp, Homo sapiens; identical to SEQ ID NO: 250231
  chr2:10536068-10536110
  hypo

SEQ ID NO: 402584 - DNA, 57 bp, Homo sapiens; identical to SEQ ID NO: 250234
  chr2:10554979-10555036
  hypo

SEQ ID NO: 402585 - DNA, 78 bp, Homo sapiens; identical to SEQ ID NO: 250235
  chr2:10566539-10566617
  hypo

SEQ ID NO: 402586 - DNA, 171 bp, Homo sapiens; identical to SEQ ID NO: 299177
  chr2:10577346-10577517
  hypo

SEQ ID NO: 402587 - DNA, 100 bp, Homo sapiens; identical to SEQ ID NO: 207820
  chr2:10601535-10601635
  hypo

SEQ ID NO: 402588 - DNA, 79 bp, Homo sapiens; identical to SEQ ID NO: 207821
  chr2:10615284-10615363
  hypo

SEQ ID NO: 402589 - DNA, 84 bp, Homo sapiens; identical to SEQ ID NO: 207822
  chr2:10615573-10615657
  hypo

SEQ ID NO: 402590 - DNA, 166 bp, Homo sapiens; identical to SEQ ID NO: 250244
  chr2:10616028-10616194
  hypo

SEQ ID NO: 402591 - DNA, 43 bp, Homo sapiens; identical to SEQ ID NO: 250246
  chr2:10642586-10642629
  hypo

SEQ ID NO: 402592 - DNA, 461 bp, Homo sapiens; identical to SEQ ID NO: 250252
  chr2:10686607-10687068
  hypo

SEQ ID NO: 402593 - DNA, 102 bp, Homo sapiens; identical to SEQ ID NO: 250253
  chr2:10687534-10687636
  hypo

SEQ ID NO: 402594 - DNA, 117 bp, Homo sapiens; identical to SEQ ID NO: 207826
  chr2:10732499-10732616
  hypo

SEQ ID NO: 402595 - DNA, 691 bp, Homo sapiens; identical to SEQ ID NO: 250258
  chr2:10917385-10918076
  hypo

SEQ ID NO: 402596 - DNA, 58 bp, Homo sapiens; identical to SEQ ID NO: 250259
  chr2:10920052-10920110
  hypo

SEQ ID NO: 402597 - DNA, 95 bp, Homo sapiens; identical to SEQ ID NO: 207829
  chr2:10926448-10926543
  hypo

SEQ ID NO: 402598 - DNA, 32 bp, Homo sapiens; identical to SEQ ID NO: 250262
  chr2:11030196-11030228
  hypo

SEQ ID NO: 402599 - DNA, 241 bp, Homo sapiens; identical to SEQ ID NO: 250265
  chr2:11238183-11238424
  hypo

SEQ ID NO: 402600 - DNA, 68 bp, Homo sapiens; identical to SEQ ID NO: 299212
  chr2:11311987-11312055
  hypo

SEQ ID NO: 402601 - DNA, 39 bp, Homo sapiens; identical to SEQ ID NO: 299213
  chr2:11312087-11312126
  hypo

SEQ ID NO: 402602 - DNA, 67 bp, Homo sapiens; identical to SEQ ID NO: 299214
  chr2:11487872-11487939
  hypo

SEQ ID NO: 402603 - DNA, 79 bp, Homo sapiens; identical to SEQ ID NO: 250270
  chr2:11702174-11702253
  hypo

SEQ ID NO: 402604 - DNA, 260 bp, Homo sapiens; identical to SEQ ID NO: 207831
  chr2:12005882-12006142
  hypo

SEQ ID NO: 402605 - DNA, 157 bp, Homo sapiens; identical to SEQ ID NO: 250276
  chr2:12078414-12078571
  hypo

SEQ ID NO: 402606 - DNA, 160 bp, Homo sapiens; identical to SEQ ID NO: 299226
  chr2:12245941-12246101
  hypo

SEQ ID NO: 402607 - DNA, 38 bp, Homo sapiens; identical to SEQ ID NO: 250283
  chr2:12631200-12631238
  hypo

SEQ ID NO: 402608 - DNA, 38 bp, Homo sapiens; identical to SEQ ID NO: 250286
  chr2:14961050-14961088
  hypo

SEQ ID NO: 402609 - DNA, 37 bp, Homo sapiens; identical to SEQ ID NO: 207835
  chr2:14961328-14961365
  hypo

SEQ ID NO: 402610 - DNA, 87 bp, Homo sapiens; identical to SEQ ID NO: 250289
  chr2:15084089-15084176
  hypo

SEQ ID NO: 402611 - DNA, 74 bp, Homo sapiens; identical to SEQ ID NO: 250294
  chr2:15950473-15950547
  hypo

SEQ ID NO: 402612 - DNA, 312 bp, Homo sapiens; identical to SEQ ID NO: 250295
  chr2:15982989-15983301
  hypo

SEQ ID NO: 402613 - DNA, 87 bp, Homo sapiens; identical to SEQ ID NO: 105506
  chr2:16080304-16080391
  hypo

SEQ ID NO: 402614 - DNA, 152 bp, Homo sapiens; identical to SEQ ID NO: 221679
  chr2:16080622-16080774
  hypo

SEQ ID NO: 402615 - DNA, 42 bp, Homo sapiens; identical to SEQ ID NO: 250296
  chr2:16105582-16105624
  hypo

SEQ ID NO: 402616 - DNA, 42 bp, Homo sapiens; identical to SEQ ID NO: 207841
  chr2:16274079-16274121
  hypo

SEQ ID NO: 402617 - DNA, 39 bp, Homo sapiens; identical to SEQ ID NO: 250300
  chr2:17090481-17090520
  hypo

SEQ ID NO: 402618 - DNA, 68 bp, Homo sapiens; identical to SEQ ID NO: 207842
  chr2:17830610-17830678
  hypo

SEQ ID NO: 402619 - DNA, 254 bp, Homo sapiens; identical to SEQ ID NO: 250302
  chr2:17998149-17998403
  hypo

SEQ ID NO: 402620 - DNA, 284 bp, Homo sapiens; identical to SEQ ID NO: 250303
  chr2:18112741-18113025
  hypo

SEQ ID NO: 402621 - DNA, 169 bp, Homo sapiens; identical to SEQ ID NO: 207844
  chr2:20111757-20111926
  hypo

SEQ ID NO: 402622 - DNA, 81 bp, Homo sapiens; identical to SEQ ID NO: 250308
  chr2:20521041-20521122
  hypo

SEQ ID NO: 402623 - DNA, 163 bp, Homo sapiens; identical to SEQ ID NO: 207848
  chr2:20594843-20595006
  hypo

SEQ ID NO: 402624 - DNA, 361 bp, Homo sapiens; identical to SEQ ID NO: 198108
  chr2:20646413-20646774
  hypo

SEQ ID NO: 402625 - DNA, 48 bp, Homo sapiens; identical to SEQ ID NO: 250314
  chr2:20705785-20705833
  hypo

SEQ ID NO: 402626 - DNA, 162 bp, Homo sapiens; identical to SEQ ID NO: 250317
  chr2:20965392-20965554
  hypo

SEQ ID NO: 402627 - DNA, 101 bp, Homo sapiens; identical to SEQ ID NO: 250318
  chr2:21079879-21079980
  hypo

SEQ ID NO: 402628 - DNA, 130 bp, Homo sapiens; identical to SEQ ID NO: 250319
  chr2:21346724-21346854
  hypo

SEQ ID NO: 402629 - DNA, 109 bp, Homo sapiens; identical to SEQ ID NO: 250322
  chr2:23650984-23651093
  hypo

SEQ ID NO: 402630 - DNA, 214 bp, Homo sapiens; identical to SEQ ID NO: 207856
  chr2:23793022-23793236
  hypo

SEQ ID NO: 402631 - DNA, 76 bp, Homo sapiens; identical to SEQ ID NO: 250327
  chr2:23795841-23795917
  hypo

SEQ ID NO: 402632 - DNA, 150 bp, Homo sapiens; identical to SEQ ID NO: 250328
  chr2:23798774-23798924
  hypo

SEQ ID NO: 402633 - DNA, 210 bp, Homo sapiens; identical to SEQ ID NO: 207857
  chr2:23842953-23843163
  hypo

SEQ ID NO: 402634 - DNA, 179 bp, Homo sapiens; identical to SEQ ID NO: 250332
  chr2:23850377-23850556
  hypo

SEQ ID NO: 402635 - DNA, 149 bp, Homo sapiens; identical to SEQ ID NO: 250336
  chr2:23918665-23918814
  hypo

SEQ ID NO: 402636 - DNA, 174 bp, Homo sapiens; identical to SEQ ID NO: 207859
  chr2:24060295-24060469
  hypo

SEQ ID NO: 402637 - DNA, 98 bp, Homo sapiens; identical to SEQ ID NO: 250338
  chr2:24160944-24161042
  hypo

SEQ ID NO: 402638 - DNA, 39 bp, Homo sapiens; identical to SEQ ID NO: 207861
  chr2:24279835-24279874
  hypo

SEQ ID NO: 402639 - DNA, 38 bp, Homo sapiens; identical to SEQ ID NO: 250342
  chr2:24318006-24318044
  hypo

SEQ ID NO: 402640 - DNA, 40 bp, Homo sapiens; identical to SEQ ID NO: 250346
  chr2:24678878-24678918
  hypo

SEQ ID NO: 402641 - DNA, 36 bp, Homo sapiens; identical to SEQ ID NO: 207864
  chr2:24763333-24763369
  hypo

SEQ ID NO: 402642 - DNA, 43 bp, Homo sapiens; identical to SEQ ID NO: 250348
  chr2:24844611-24844654
  hypo

SEQ ID NO: 402643 - DNA, 155 bp, Homo sapiens; identical to SEQ ID NO: 250349
  chr2:25034777-25034932
  hypo

SEQ ID NO: 402644 - DNA, 79 bp, Homo sapiens; identical to SEQ ID NO: 198120
  chr2:25265055-25265134
  hypo

SEQ ID NO: 402645 - DNA, 59 bp, Homo sapiens; identical to SEQ ID NO: 207870
  chr2:25369951-25370010
  hypo

SEQ ID NO: 402646 - DNA, 32 bp, Homo sapiens; identical to SEQ ID NO: 250356
  chr2:25374806-25374838
  hypo

SEQ ID NO: 402647 - DNA, 120 bp, Homo sapiens; identical to SEQ ID NO: 198121
  chr2:25440006-25440126
  hypo

SEQ ID NO: 402648 - DNA, 149 bp, Homo sapiens; identical to SEQ ID NO: 198122
  chr2:25457152-25457301
  hypo

SEQ ID NO: 402649 - DNA, 139 bp, Homo sapiens; identical to SEQ ID NO: 198123
  chr2:25458563-25458702
  hypo

SEQ ID NO: 402650 - DNA, 52 bp, Homo sapiens; identical to SEQ ID NO: 387734
  chr2:25464537-25464589
  hypo

SEQ ID NO: 402651 - DNA, 162 bp, Homo sapiens; identical to SEQ ID NO: 198133
  chr2:25470449-25470611
  hypo

SEQ ID NO: 402652 - DNA, 192 bp, Homo sapiens; identical to SEQ ID NO: 198134
  chr2:25470892-25471084
  hypo

SEQ ID NO: 402653 - DNA, 90 bp, Homo sapiens; identical to SEQ ID NO: 198135
  chr2:25497816-25497906
  hypo

SEQ ID NO: 402654 - DNA, 237 bp, Homo sapiens; identical to SEQ ID NO: 198136
  chr2:25505304-25505541
  hypo

SEQ ID NO: 402655 - DNA, 188 bp, Homo sapiens; identical to SEQ ID NO: 250358
  chr2:25533430-25533618
  hypo

SEQ ID NO: 402656 - DNA, 161 bp, Homo sapiens; identical to SEQ ID NO: 250360
  chr2:25536307-25536468
  hypo

SEQ ID NO: 402657 - DNA, 180 bp, Homo sapiens; identical to SEQ ID NO: 207887
  chr2:25536757-25536937
  hypo

SEQ ID NO: 402658 - DNA, 84 bp, Homo sapiens; identical to SEQ ID NO: 250362
  chr2:25551561-25551645
  hypo

SEQ ID NO: 402659 - DNA, 89 bp, Homo sapiens; identical to SEQ ID NO: 207888
  chr2:25627711-25627800
  hypo

SEQ ID NO: 402660 - DNA, 44 bp, Homo sapiens; identical to SEQ ID NO: 250368
  chr2:25924790-25924834
  hypo

SEQ ID NO: 402661 - DNA, 40 bp, Homo sapiens; identical to SEQ ID NO: 207889
  chr2:25980217-25980257
  hypo

SEQ ID NO: 402662 - DNA, 104 bp, Homo sapiens; identical to SEQ ID NO: 207890
  chr2:26027551-26027655
  hypo

SEQ ID NO: 402663 - DNA, 115 bp, Homo sapiens; identical to SEQ ID NO: 250373
  chr2:26217601-26217716
  hypo

SEQ ID NO: 402664 - DNA, 37 bp, Homo sapiens; identical to SEQ ID NO: 250374
  chr2:26320144-26320181
  hypo

SEQ ID NO: 402665 - DNA, 330 bp, Homo sapiens; identical to SEQ ID NO: 221709
  chr2:26395999-26396329
  hypo

SEQ ID NO: 402666 - DNA, 94 bp, Homo sapiens; identical to SEQ ID NO: 250380
  chr2:26527933-26528027
  hypo

SEQ ID NO: 402667 - DNA, 43 bp, Homo sapiens; identical to SEQ ID NO: 250386
  chr2:26566584-26566627
  hypo

SEQ ID NO: 402668 - DNA, 131 bp, Homo sapiens; identical to SEQ ID NO: 207896
  chr2:26706036-26706167
  hypo

SEQ ID NO: 402669 - DNA, 92 bp, Homo sapiens; identical to SEQ ID NO: 250389
  chr2:26788281-26788373
  hypo

SEQ ID NO: 402670 - DNA, 203 bp, Homo sapiens; identical to SEQ ID NO: 250390
  chr2:26800292-26800495
  hypo

SEQ ID NO: 402671 - DNA, 94 bp, Homo sapiens; identical to SEQ ID NO: 207897
  chr2:26832824-26832918
  hypo

SEQ ID NO: 402672 - DNA, 120 bp, Homo sapiens; identical to SEQ ID NO: 207899
  chr2:27007230-27007350
  hypo

SEQ ID NO: 402673 - DNA, 142 bp, Homo sapiens; identical to SEQ ID NO: 395851
  chr2:27072010-27072152
  hypo

SEQ ID NO: 402674 - DNA, 42 bp, Homo sapiens; identical to SEQ ID NO: 250396
  chr2:27224548-27224590
  hypo

SEQ ID NO: 402675 - DNA, 226 bp, Homo sapiens; identical to SEQ ID NO: 279632
  chr2:27485733-27485959
  hypo

SEQ ID NO: 402676 - DNA, 71 bp, Homo sapiens; identical to SEQ ID NO: 250401
  chr2:27538034-27538105
  hypo

SEQ ID NO: 402677 - DNA, 208 bp, Homo sapiens; identical to SEQ ID NO: 207904
  chr2:27703854-27704062
  hypo

SEQ ID NO: 402678 - DNA, 35 bp, Homo sapiens; identical to SEQ ID NO: 250407
  chr2:27764227-27764262
  hypo

SEQ ID NO: 402679 - DNA, 45 bp, Homo sapiens
  chr2:28065675-28065720
  hypo
ttctacttgtaccatttctgccagctacattgaagatttatattg

SEQ ID NO: 402680 - DNA, 149 bp, Homo sapiens; identical to SEQ ID NO: 207906
  chr2:28586480-28586629
  hypo

SEQ ID NO: 402681 - DNA, 251 bp, Homo sapiens; identical to SEQ ID NO: 250414
  chr2:28819617-28819868
  hypo

SEQ ID NO: 402682 - DNA, 34 bp, Homo sapiens; identical to SEQ ID NO: 207907
  chr2:28919660-28919694
  hypo

SEQ ID NO: 402683 - DNA, 102 bp, Homo sapiens; identical to SEQ ID NO: 207910
  chr2:29469962-29470064
  hypo

SEQ ID NO: 402684 - DNA, 210 bp, Homo sapiens; identical to SEQ ID NO: 250419
  chr2:30480379-30480589
  hypo

SEQ ID NO: 402685 - DNA, 399 bp, Homo sapiens; identical to SEQ ID NO: 250420
  chr2:30481975-30482374
  hypo

SEQ ID NO: 402686 - DNA, 36 bp, Homo sapiens; identical to SEQ ID NO: 250423
  chr2:30587093-30587129
  hypo

SEQ ID NO: 402687 - DNA, 90 bp, Homo sapiens; identical to SEQ ID NO: 250425
  chr2:30794970-30795060
  hypo

SEQ ID NO: 402688 - DNA, 161 bp, Homo sapiens; identical to SEQ ID NO: 250426
  chr2:30863077-30863238
  hypo

SEQ ID NO: 402689 - DNA, 121 bp, Homo sapiens; identical to SEQ ID NO: 250428
  chr2:30982467-30982588
  hypo

SEQ ID NO: 402690 - DNA, 265 bp, Homo sapiens; identical to SEQ ID NO: 207919
  chr2:31477235-31477500
  hypo

SEQ ID NO: 402691 - DNA, 46 bp, Homo sapiens; identical to SEQ ID NO: 250430
  chr2:31480289-31480335
  hypo

SEQ ID NO: 402692 - DNA, 111 bp, Homo sapiens; identical to SEQ ID NO: 250431
  chr2:31480365-31480476
  hypo

SEQ ID NO: 402693 - DNA, 95 bp, Homo sapiens; identical to SEQ ID NO: 207921
  chr2:31551361-31551456
  hypo

SEQ ID NO: 402694 - DNA, 231 bp, Homo sapiens; identical to SEQ ID NO: 207922
  chr2:32142425-32142656
  hypo

SEQ ID NO: 402695 - DNA, 120 bp, Homo sapiens; identical to SEQ ID NO: 207923
  chr2:32244332-32244452
  hypo

SEQ ID NO: 402696 - DNA, 40 bp, Homo sapiens; identical to SEQ ID NO: 250439
  chr2:32315098-32315138
  hypo

SEQ ID NO: 402697 - DNA, 104 bp, Homo sapiens; identical to SEQ ID NO: 250440
  chr2:32361185-32361289
  hypo

SEQ ID NO: 402698 - DNA, 36 bp, Homo sapiens; identical to SEQ ID NO: 250444
  chr2:32798532-32798568
  hypo

SEQ ID NO: 402699 - DNA, 45 bp, Homo sapiens; identical to SEQ ID NO: 250447
  chr2:33215245-33215290
  hypo

SEQ ID NO: 402700 - DNA, 240 bp, Homo sapiens; identical to SEQ ID NO: 207925
  chr2:33281381-33281621
  hypo

SEQ ID NO: 402701 - DNA, 37 bp, Homo sapiens; identical to SEQ ID NO: 250449
  chr2:33304098-33304135
  hypo

SEQ ID NO: 402702 - DNA, 34 bp, Homo sapiens; identical to SEQ ID NO: 250452
  chr2:33513604-33513638
  hypo

SEQ ID NO: 402703 - DNA, 156 bp, Homo sapiens; identical to SEQ ID NO: 250453
  chr2:33534845-33535001
  hypo

SEQ ID NO: 402704 - DNA, 75 bp, Homo sapiens; identical to SEQ ID NO: 250456
  chr2:34065553-34065628
  hypo

SEQ ID NO: 402705 - DNA, 181 bp, Homo sapiens; identical to SEQ ID NO: 250458
  chr2:36668406-36668587
  hypo

SEQ ID NO: 402706 - DNA, 99 bp, Homo sapiens; identical to SEQ ID NO: 250461
  chr2:37027667-37027766
  hypo

SEQ ID NO: 402707 - DNA, 195 bp, Homo sapiens; identical to SEQ ID NO: 207926
  chr2:37076576-37076771
  hypo

SEQ ID NO: 402708 - DNA, 38 bp, Homo sapiens; identical to SEQ ID NO: 207927
  chr2:37149992-37150030
  hypo

SEQ ID NO: 402709 - DNA, 150 bp, Homo sapiens; identical to SEQ ID NO: 250466
  chr2:37195422-37195572
  hypo

SEQ ID NO: 402710 - DNA, 120 bp, Homo sapiens; identical to SEQ ID NO: 250467
  chr2:37227182-37227302
  hypo

SEQ ID NO: 402711 - DNA, 160 bp, Homo sapiens; identical to SEQ ID NO: 207930
  chr2:38157989-38158149
  hypo

SEQ ID NO: 402712 - DNA, 177 bp, Homo sapiens; identical to SEQ ID NO: 250471
  chr2:38201226-38201403
  hypo

SEQ ID NO: 402713 - DNA, 221 bp, Homo sapiens; identical to SEQ ID NO: 250473
  chr2:38489624-38489845
  hypo

SEQ ID NO: 402714 - DNA, 156 bp, Homo sapiens; identical to SEQ ID NO: 250474
  chr2:38546334-38546490
  hypo

SEQ ID NO: 402715 - DNA, 31 bp, Homo sapiens; identical to SEQ ID NO: 207933
  chr2:38551439-38551470
  hypo

SEQ ID NO: 402716 - DNA, 84 bp, Homo sapiens; identical to SEQ ID NO: 207934
  chr2:38585486-38585570
  hypo

SEQ ID NO: 402717 - DNA, 44 bp, Homo sapiens; identical to SEQ ID NO: 250477
  chr2:38594452-38594496
  hypo

SEQ ID NO: 402718 - DNA, 82 bp, Homo sapiens; identical to SEQ ID NO: 250478
  chr2:38610902-38610984
  hypo

SEQ ID NO: 402719 - DNA, 120 bp, Homo sapiens; identical to SEQ ID NO: 207936
  chr2:39016315-39016435
  hypo

SEQ ID NO: 402720 - DNA, 162 bp, Homo sapiens; identical to SEQ ID NO: 250487
  chr2:39406776-39406938
  hypo

SEQ ID NO: 402721 - DNA, 102 bp, Homo sapiens; identical to SEQ ID NO: 250489
  chr2:40560220-40560322
  hypo

SEQ ID NO: 402722 - DNA, 174 bp, Homo sapiens; identical to SEQ ID NO: 250491
  chr2:42155747-42155921
  hypo

SEQ ID NO: 402723 - DNA, 161 bp, Homo sapiens; identical to SEQ ID NO: 250492
  chr2:42157839-42158000
  hypo

SEQ ID NO: 402724 - DNA, 141 bp, Homo sapiens; identical to SEQ ID NO: 250494
  chr2:42282412-42282553
  hypo

SEQ ID NO: 402725 - DNA, 35 bp, Homo sapiens; identical to SEQ ID NO: 207942
  chr2:42403393-42403428
  hypo

SEQ ID NO: 402726 - DNA, 94 bp, Homo sapiens; identical to SEQ ID NO: 250497
  chr2:42530714-42530808
  hypo

SEQ ID NO: 402727 - DNA, 43 bp, Homo sapiens; identical to SEQ ID NO: 207944
  chr2:43002056-43002099
  hypo

SEQ ID NO: 402728 - DNA, 72 bp, Homo sapiens; identical to SEQ ID NO: 207945
  chr2:43103590-43103662
  hypo

SEQ ID NO: 402729 - DNA, 75 bp, Homo sapiens; identical to SEQ ID NO: 207947
  chr2:43148273-43148348
  hypo

SEQ ID NO: 402730 - DNA, 101 bp, Homo sapiens; identical to SEQ ID NO: 207948
  chr2:43173213-43173314
  hypo

SEQ ID NO: 402731 - DNA, 200 bp, Homo sapiens; identical to SEQ ID NO: 250506
  chr2:43185203-43185403
  hypo

SEQ ID NO: 402732 - DNA, 146 bp, Homo sapiens; identical to SEQ ID NO: 250509
  chr2:43266043-43266189
  hypo

SEQ ID NO: 402733 - DNA, 189 bp, Homo sapiens; identical to SEQ ID NO: 207951
  chr2:43373136-43373325
  hypo

SEQ ID NO: 402734 - DNA, 145 bp, Homo sapiens; identical to SEQ ID NO: 250519
  chr2:43420537-43420682
  hypo

SEQ ID NO: 402735 - DNA, 35 bp, Homo sapiens; identical to SEQ ID NO: 207954
  chr2:43820774-43820809
  hypo

SEQ ID NO: 402736 - DNA, 35 bp, Homo sapiens; identical to SEQ ID NO: 207955
  chr2:43821049-43821084
  hypo

SEQ ID NO: 402737 - DNA, 157 bp, Homo sapiens; identical to SEQ ID NO: 250524
  chr2:44047673-44047830
  hypo

SEQ ID NO: 402738 - DNA, 116 bp, Homo sapiens; identical to SEQ ID NO: 250525
  chr2:44104773-44104889
  hypo

SEQ ID NO: 402739 - DNA, 33 bp, Homo sapiens; identical to SEQ ID NO: 207956
  chr2:44113283-44113316
  hypo

SEQ ID NO: 402740 - DNA, 63 bp, Homo sapiens; identical to SEQ ID NO: 250529
  chr2:44315198-44315261
  hypo

SEQ ID NO: 402741 - DNA, 40 bp, Homo sapiens; identical to SEQ ID NO: 250530
  chr2:44402110-44402150
  hypo

SEQ ID NO: 402742 - DNA, 32 bp, Homo sapiens; identical to SEQ ID NO: 207959
  chr2:44439162-44439194
  hypo

SEQ ID NO: 402743 - DNA, 35 bp, Homo sapiens; identical to SEQ ID NO: 250533
  chr2:44468999-44469034
  hypo

SEQ ID NO: 402744 - DNA, 35 bp, Homo sapiens; identical to SEQ ID NO: 250534
  chr2:44469274-44469309
  hypo

SEQ ID NO: 402745 - DNA, 149 bp, Homo sapiens; identical to SEQ ID NO: 250536
  chr2:44502842-44502991
  hypo

SEQ ID NO: 402746 - DNA, 35 bp, Homo sapiens; identical to SEQ ID NO: 250538
  chr2:44528016-44528051
  hypo

SEQ ID NO: 402747 - DNA, 96 bp, Homo sapiens; identical to SEQ ID NO: 250543
  chr2:44999266-44999362
  hypo

SEQ ID NO: 402748 - DNA, 205 bp, Homo sapiens; identical to SEQ ID NO: 207962
  chr2:45927198-45927403
  hypo

SEQ ID NO: 402749 - DNA, 39 bp, Homo sapiens; identical to SEQ ID NO: 250548
  chr2:46635255-46635294
  hypo

SEQ ID NO: 402750 - DNA, 63 bp, Homo sapiens; identical to SEQ ID NO: 279735
  chr2:46770636-46770699
  hypo

SEQ ID NO: 402751 - DNA, 128 bp, Homo sapiens; identical to SEQ ID NO: 279736
  chr2:46770831-46770959
  hypo

SEQ ID NO: 402752 - DNA, 223 bp, Homo sapiens; identical to SEQ ID NO: 250551
  chr2:47095093-47095316
  hypo

SEQ ID NO: 402753 - DNA, 160 bp, Homo sapiens; identical to SEQ ID NO: 250552
  chr2:47102026-47102186
  hypo

SEQ ID NO: 402754 - DNA, 307 bp, Homo sapiens; identical to SEQ ID NO: 250555
  chr2:47232013-47232320
  hypo

SEQ ID NO: 402755 - DNA, 96 bp, Homo sapiens; identical to SEQ ID NO: 141542
  chr2:47234721-47234817
  hypo

SEQ ID NO: 402756 - DNA, 80 bp, Homo sapiens; identical to SEQ ID NO: 250560
  chr2:47370888-47370968
  hypo

SEQ ID NO: 402757 - DNA, 83 bp, Homo sapiens; identical to SEQ ID NO: 250564
  chr2:47595493-47595576
  hypo

SEQ ID NO: 402758 - DNA, 438 bp, Homo sapiens; identical to SEQ ID NO: 221743
  chr2:47630103-47630541
  hypo

SEQ ID NO: 402759 - DNA, 155 bp, Homo sapiens; identical to SEQ ID NO: 221744
  chr2:47635539-47635694
  hypo

SEQ ID NO: 402760 - DNA, 147 bp, Homo sapiens; identical to SEQ ID NO: 221746
  chr2:47639552-47639699
  hypo

SEQ ID NO: 402761 - DNA, 134 bp, Homo sapiens; identical to SEQ ID NO: 221748
  chr2:47643434-47643568
  hypo

SEQ ID NO: 402762 - DNA, 67 bp, Homo sapiens; identical to SEQ ID NO: 395893
  chr2:47656880-47656947
  hypo

SEQ ID NO: 402763 - DNA, 60 bp, Homo sapiens; identical to SEQ ID NO: 395894
  chr2:47657020-47657080
  hypo

SEQ ID NO: 402764 - DNA, 110 bp, Homo sapiens; identical to SEQ ID NO: 221750
  chr2:47672686-47672796
  hypo

SEQ ID NO: 402765 - DNA, 98 bp, Homo sapiens; identical to SEQ ID NO: 221753
  chr2:47698103-47698201
  hypo

SEQ ID NO: 402766 - DNA, 450 bp, Homo sapiens; identical to SEQ ID NO: 221758
  chr2:47709917-47710367
  hypo

SEQ ID NO: 402767 - DNA, 197 bp, Homo sapiens; identical to SEQ ID NO: 221762
  chr2:48018065-48018262
  hypo

SEQ ID NO: 402768 - DNA, 2545 bp, Homo sapiens; identical to SEQ ID NO: 221764
  chr2:48025749-48028294
  hypo

SEQ ID NO: 402769 - DNA, 266 bp, Homo sapiens; identical to SEQ ID NO: 221765
  chr2:48030558-48030824
  hypo

SEQ ID NO: 402770 - DNA, 90 bp, Homo sapiens; identical to SEQ ID NO: 221767
  chr2:48032756-48032846
  hypo

SEQ ID NO: 402771 - DNA, 750 bp, Homo sapiens; identical to SEQ ID NO: 221768
  chr2:48033342-48034092
  hypo

SEQ ID NO: 402772 - DNA, 100 bp, Homo sapiens; identical to SEQ ID NO: 207979
  chr2:48539633-48539733
  hypo

SEQ ID NO: 402773 - DNA, 107 bp, Homo sapiens; identical to SEQ ID NO: 250572
  chr2:48742859-48742966
  hypo

SEQ ID NO: 402774 - DNA, 91 bp, Homo sapiens; identical to SEQ ID NO: 207980
  chr2:49621663-49621754
  hypo

SEQ ID NO: 402775 - DNA, 88 bp, Homo sapiens; identical to SEQ ID NO: 250576
  chr2:54027326-54027414
  hypo

SEQ ID NO: 402776 - DNA, 159 bp, Homo sapiens; identical to SEQ ID NO: 250578
  chr2:54124939-54125098
  hypo

SEQ ID NO: 402777 - DNA, 292 bp, Homo sapiens; identical to SEQ ID NO: 250580
  chr2:54312128-54312420
  hypo

SEQ ID NO: 402778 - DNA, 140 bp, Homo sapiens; identical to SEQ ID NO: 221769
  chr2:54683032-54683172
  hypo

SEQ ID NO: 402779 - DNA, 31 bp, Homo sapiens; identical to SEQ ID NO: 250584
  chr2:55098810-55098841
  hypo

SEQ ID NO: 402780 - DNA, 360 bp, Homo sapiens; identical to SEQ ID NO: 250585
  chr2:55173805-55174165
  hypo

SEQ ID NO: 402781 - DNA, 207 bp, Homo sapiens; identical to SEQ ID NO: 250586
  chr2:55175832-55176039
  hypo

SEQ ID NO: 402782 - DNA, 84 bp, Homo sapiens; identical to SEQ ID NO: 207986
  chr2:55499046-55499130
  hypo

SEQ ID NO: 402783 - DNA, 101 bp, Homo sapiens; identical to SEQ ID NO: 279798
  chr2:55646327-55646428
  hypo

SEQ ID NO: 402784 - DNA, 680 bp, Homo sapiens; identical to SEQ ID NO: 279799
  chr2:55646458-55647138
  hypo

SEQ ID NO: 402785 - DNA, 84 bp, Homo sapiens
  chr2:55687115-55687199
  hypo
gtatgacccaaccaatcagcactccccaactcactgcccctcccctcccaccaaattgtcttgaaaaactttgatccccaaatg

SEQ ID NO: 402786 - DNA, 42 bp, Homo sapiens; identical to SEQ ID NO: 250596
  chr2:55825329-55825371
  hypo

SEQ ID NO: 402787 - DNA, 34 bp, Homo sapiens; identical to SEQ ID NO: 250600
  chr2:58788931-58788965
  hypo

SEQ ID NO: 402788 - DNA, 38 bp, Homo sapiens; identical to SEQ ID NO: 250601
  chr2:59382731-59382769
  hypo

SEQ ID NO: 402789 - DNA, 205 bp, Homo sapiens; identical to SEQ ID NO: 250605
  chr2:60704080-60704285
  hypo

SEQ ID NO: 402790 - DNA, 36 bp, Homo sapiens; identical to SEQ ID NO: 207990
  chr2:60705871-60705907
  hypo

SEQ ID NO: 402791 - DNA, 58 bp, Homo sapiens; identical to SEQ ID NO: 250609
  chr2:60779104-60779162
  hypo

SEQ ID NO: 402792 - DNA, 261 bp, Homo sapiens; identical to SEQ ID NO: 250612
  chr2:61035610-61035871
  hypo

SEQ ID NO: 402793 - DNA, 85 bp, Homo sapiens; identical to SEQ ID NO: 250614
  chr2:61088705-61088790
  hypo

SEQ ID NO: 402794 - DNA, 53 bp, Homo sapiens; identical to SEQ ID NO: 207995
  chr2:61175238-61175291
  hypo

SEQ ID NO: 402795 - DNA, 40 bp, Homo sapiens; identical to SEQ ID NO: 250618
  chr2:61186779-61186819
  hypo

SEQ ID NO: 402796 - DNA, 126 bp, Homo sapiens; identical to SEQ ID NO: 207997
  chr2:61304102-61304228
  hypo

SEQ ID NO: 402797 - DNA, 139 bp, Homo sapiens; identical to SEQ ID NO: 207998
  chr2:61448896-61449035
  hypo

SEQ ID NO: 402798 - DNA, 40 bp, Homo sapiens; identical to SEQ ID NO: 207999
  chr2:61471724-61471764
  hypo

SEQ ID NO: 402799 - DNA, 163 bp, Homo sapiens; identical to SEQ ID NO: 250629
  chr2:61816741-61816904
  hypo

SEQ ID NO: 402800 - DNA, 32 bp, Homo sapiens; identical to SEQ ID NO: 250630
  chr2:61885815-61885847
  hypo

SEQ ID NO: 402801 - DNA, 508 bp, Homo sapiens; identical to SEQ ID NO: 395926
  chr2:61990960-61991468
  hypo

SEQ ID NO: 402802 - DNA, 250 bp, Homo sapiens; identical to SEQ ID NO: 250634
  chr2:62406299-62406549
  hypo

SEQ ID NO: 402803 - DNA, 33 bp, Homo sapiens; identical to SEQ ID NO: 250637
  chr2:62585418-62585451
  hypo

SEQ ID NO: 402804 - DNA, 71 bp, Homo sapiens; identical to SEQ ID NO: 250639
  chr2:62685374-62685445
  hypo

SEQ ID NO: 402805 - DNA, 169 bp, Homo sapiens; identical to SEQ ID NO: 208009
  chr2:63118747-63118916
  hypo

SEQ ID NO: 402806 - DNA, 237 bp, Homo sapiens; identical to SEQ ID NO: 208010
  chr2:63123375-63123612
  hypo

SEQ ID NO: 402807 - DNA, 217 bp, Homo sapiens; identical to SEQ ID NO: 208011
  chr2:63192034-63192251
  hypo

SEQ ID NO: 402808 - DNA, 149 bp, Homo sapiens; identical to SEQ ID NO: 208012
  chr2:63272200-63272349
  hypo

SEQ ID NO: 402809 - DNA, 31 bp, Homo sapiens; identical to SEQ ID NO: 250646
  chr2:64372516-64372547
  hypo

SEQ ID NO: 402810 - DNA, 142 bp, Homo sapiens; identical to SEQ ID NO: 221780
  chr2:64872367-64872509
  hypo

SEQ ID NO: 402811 - DNA, 36 bp, Homo sapiens; identical to SEQ ID NO: 250652
  chr2:65062638-65062674
  hypo

SEQ ID NO: 402812 - DNA, 357 bp, Homo sapiens; identical to SEQ ID NO: 221781
  chr2:65086836-65087193
  hypo

SEQ ID NO: 402813 - DNA, 38 bp, Homo sapiens; identical to SEQ ID NO: 250655
  chr2:65456602-65456640
  hypo

SEQ ID NO: 402814 - DNA, 92 bp, Homo sapiens; identical to SEQ ID NO: 208017
  chr2:66604303-66604395
  hypo

SEQ ID NO: 402815 - DNA, 34 bp, Homo sapiens; identical to SEQ ID NO: 250663
  chr2:67721499-67721533
  hypo

SEQ ID NO: 402816 - DNA, 79 bp, Homo sapiens; identical to SEQ ID NO: 208020
  chr2:68433262-68433341
  hypo

SEQ ID NO: 402817 - DNA, 64 bp, Homo sapiens; identical to SEQ ID NO: 250670
  chr2:69612624-69612688
  hypo

SEQ ID NO: 402818 - DNA, 45 bp, Homo sapiens; identical to SEQ ID NO: 250675
  chr2:70005612-70005657
  hypo

SEQ ID NO: 402819 - DNA, 141 bp, Homo sapiens; identical to SEQ ID NO: 299699
  chr2:70055299-70055440
  hypo

SEQ ID NO: 402820 - DNA, 48 bp, Homo sapiens; identical to SEQ ID NO: 208026
  chr2:70204037-70204085
  hypo

SEQ ID NO: 402821 - DNA, 224 bp, Homo sapiens; identical to SEQ ID NO: 250682
  chr2:70393988-70394212
  hypo

SEQ ID NO: 402822 - DNA, 200 bp, Homo sapiens; identical to SEQ ID NO: 395947
  chr2:70418116-70418316
  hypo

SEQ ID NO: 402823 - DNA, 34 bp, Homo sapiens; identical to SEQ ID NO: 299708
  chr2:70418627-70418661
  hypo

SEQ ID NO: 402824 - DNA, 53 bp, Homo sapiens; identical to SEQ ID NO: 299710
  chr2:70430895-70430948
  hypo

SEQ ID NO: 402825 - DNA, 40 bp, Homo sapiens; identical to SEQ ID NO: 250686
  chr2:70521965-70522005
  hypo

SEQ ID NO: 402826 - DNA, 39 bp, Homo sapiens; identical to SEQ ID NO: 250687
  chr2:70557159-70557198
  hypo

SEQ ID NO: 402827 - DNA, 212 bp, Homo sapiens; identical to SEQ ID NO: 250688
  chr2:71355399-71355611
  hypo

SEQ ID NO: 402828 - DNA, 53 bp, Homo sapiens; identical to SEQ ID NO: 221793
  chr2:71502836-71502889
  hypo

SEQ ID NO: 402829 - DNA, 87 bp, Homo sapiens; identical to SEQ ID NO: 250689
  chr2:71564761-71564848
  hypo

SEQ ID NO: 402830 - DNA, 293 bp, Homo sapiens; identical to SEQ ID NO: 250690
  chr2:71753210-71753503
  hypo

SEQ ID NO: 402831 - DNA, 49 bp, Homo sapiens; identical to SEQ ID NO: 250693
  chr2:71839446-71839495
  hypo

SEQ ID NO: 402832 - DNA, 33 bp, Homo sapiens; identical to SEQ ID NO: 250696
  chr2:72316766-72316799
  hypo

SEQ ID NO: 402833 - DNA, 78 bp, Homo sapiens; identical to SEQ ID NO: 395957
  chr2:73143409-73143487
  hypo

SEQ ID NO: 402834 - DNA, 189 bp, Homo sapiens; identical to SEQ ID NO: 250709
  chr2:74120176-74120365
  hypo

SEQ ID NO: 402835 - DNA, 33 bp, Homo sapiens; identical to SEQ ID NO: 250710
  chr2:74126220-74126253
  hypo

SEQ ID NO: 402836 - DNA, 245 bp, Homo sapiens; identical to SEQ ID NO: 250714
  chr2:74213648-74213893
  hypo

SEQ ID NO: 402837 - DNA, 120 bp, Homo sapiens; identical to SEQ ID NO: 208052
  chr2:74350566-74350686
  hypo

SEQ ID NO: 402838 - DNA, 211 bp, Homo sapiens; identical to SEQ ID NO: 208057
  chr2:74663402-74663613
  hypo

SEQ ID NO: 402839 - DNA, 38 bp, Homo sapiens; identical to SEQ ID NO: 208058
  chr2:74672959-74672997
  hypo

SEQ ID NO: 402840 - DNA, 86 bp, Homo sapiens; identical to SEQ ID NO: 250721
  chr2:74679101-74679187
  hypo

SEQ ID NO: 402841 - DNA, 134 bp, Homo sapiens; identical to SEQ ID NO: 250726
  chr2:75078340-75078474
  hypo

SEQ ID NO: 402842 - DNA, 151 bp, Homo sapiens; identical to SEQ ID NO: 250730
  chr2:75825236-75825387
  hypo

SEQ ID NO: 402843 - DNA, 138 bp, Homo sapiens; identical to SEQ ID NO: 250731
  chr2:76642426-76642564
  hypo

SEQ ID NO: 402844 - DNA, 37 bp, Homo sapiens; identical to SEQ ID NO: 250732
  chr2:78904026-78904063
  hypo

SEQ ID NO: 402845 - DNA, 38 bp, Homo sapiens; identical to SEQ ID NO: 250733
  chr2:79824567-79824605
  hypo

SEQ ID NO: 402846 - DNA, 89 bp, Homo sapiens; identical to SEQ ID NO: 208063
  chr2:79933147-79933236
  hypo

SEQ ID NO: 402847 - DNA, 105 bp, Homo sapiens; identical to SEQ ID NO: 299775
  chr2:81421431-81421536
  hypo

SEQ ID NO: 402848 - DNA, 499 bp, Homo sapiens; identical to SEQ ID NO: 250736
  chr2:81422010-81422509
  hypo

SEQ ID NO: 402849 - DNA, 115 bp, Homo sapiens; identical to SEQ ID NO: 279966
  chr2:85107819-85107934
  hypo

SEQ ID NO: 402850 - DNA, 37 bp, Homo sapiens; identical to SEQ ID NO: 208064
  chr2:85227244-85227281
  hypo

SEQ ID NO: 402851 - DNA, 37 bp, Homo sapiens; identical to SEQ ID NO: 208065
  chr2:85227521-85227558
  hypo

SEQ ID NO: 402852 - DNA, 54 bp, Homo sapiens; identical to SEQ ID NO: 208067
  chr2:85290474-85290528
  hypo

SEQ ID NO: 402853 - DNA, 149 bp, Homo sapiens; identical to SEQ ID NO: 250743
  chr2:85515479-85515628
  hypo

SEQ ID NO: 402854 - DNA, 94 bp, Homo sapiens; identical to SEQ ID NO: 250744
  chr2:85521476-85521570
  hypo

SEQ ID NO: 402855 - DNA, 155 bp, Homo sapiens; identical to SEQ ID NO: 250745
  chr2:85596563-85596718
  hypo

SEQ ID NO: 402856 - DNA, 34 bp, Homo sapiens; identical to SEQ ID NO: 208070
  chr2:85729115-85729149
  hypo

SEQ ID NO: 402857 - DNA, 44 bp, Homo sapiens; identical to SEQ ID NO: 250750
  chr2:85789679-85789723
  hypo

SEQ ID NO: 402858 - DNA, 224 bp, Homo sapiens; identical to SEQ ID NO: 221813
  chr2:85829251-85829475
  hypo

SEQ ID NO: 402859 - DNA, 88 bp, Homo sapiens; identical to SEQ ID NO: 250754
  chr2:85836532-85836620
  hypo

SEQ ID NO: 402860 - DNA, 90 bp, Homo sapiens; identical to SEQ ID NO: 208074
  chr2:85870244-85870334
  hypo

SEQ ID NO: 402861 - DNA, 47 bp, Homo sapiens; identical to SEQ ID NO: 385228
  chr2:85878798-85878845
  hypo

SEQ ID NO: 402862 - DNA, 44 bp, Homo sapiens; identical to SEQ ID NO: 208077
  chr2:85885944-85885988
  hypo

SEQ ID NO: 402863 - DNA, 32 bp, Homo sapiens; identical to SEQ ID NO: 208080
  chr2:86344875-86344907
  hypo

SEQ ID NO: 402864 - DNA, 92 bp, Homo sapiens; identical to SEQ ID NO: 208081
  chr2:86345207-86345299
  hypo

SEQ ID NO: 402865 - DNA, 60 bp, Homo sapiens; identical to SEQ ID NO: 208082
  chr2:86425628-86425688
  hypo

SEQ ID NO: 402866 - DNA, 123 bp, Homo sapiens; identical to SEQ ID NO: 208084
  chr2:86783960-86784083
  hypo

SEQ ID NO: 402867 - DNA, 89 bp, Homo sapiens; identical to SEQ ID NO: 250767
  chr2:86809396-86809485
  hypo

SEQ ID NO: 402868 - DNA, 76 bp, Homo sapiens; identical to SEQ ID NO: 208087
  chr2:87569214-87569290
  hypo

SEQ ID NO: 402869 - DNA, 120 bp, Homo sapiens; identical to SEQ ID NO: 250770
  chr2:88341849-88341969
  hypo

SEQ ID NO: 402870 - DNA, 196 bp, Homo sapiens; identical to SEQ ID NO: 250773
  chr2:88559425-88559621
  hypo

SEQ ID NO: 402871 - DNA, 39 bp, Homo sapiens; identical to SEQ ID NO: 208088
  chr2:89601945-89601984
  hypo

SEQ ID NO: 402872 - DNA, 34 bp, Homo sapiens; identical to SEQ ID NO: 250779
  chr2:95715631-95715665
  hypo

SEQ ID NO: 402873 - DNA, 345 bp, Homo sapiens; identical to SEQ ID NO: 280001
  chr2:95825283-95825628
  hypo

SEQ ID NO: 402874 - DNA, 246 bp, Homo sapiens; identical to SEQ ID NO: 250784
  chr2:95960727-95960973
  hypo

SEQ ID NO: 402875 - DNA, 160 bp, Homo sapiens; identical to SEQ ID NO: 250786
  chr2:95992199-95992359
  hypo

SEQ ID NO: 402876 - DNA, 121 bp, Homo sapiens; identical to SEQ ID NO: 208093
  chr2:96829031-96829152
  hypo

SEQ ID NO: 402877 - DNA, 37 bp, Homo sapiens; identical to SEQ ID NO: 250792
  chr2:96839116-96839153
  hypo

SEQ ID NO: 402878 - DNA, 215 bp, Homo sapiens; identical to SEQ ID NO: 395987
  chr2:96987312-96987527
  hypo

SEQ ID NO: 402879 - DNA, 33 bp, Homo sapiens; identical to SEQ ID NO: 250793
  chr2:96993131-96993164
  hypo

SEQ ID NO: 402880 - DNA, 189 bp, Homo sapiens; identical to SEQ ID NO: 250794
  chr2:97068616-97068805
  hypo

SEQ ID NO: 402881 - DNA, 226 bp, Homo sapiens; identical to SEQ ID NO: 198325
  chr2:97175214-97175440
  hypo

SEQ ID NO: 402882 - DNA, 228 bp, Homo sapiens; identical to SEQ ID NO: 280023
  chr2:97303973-97304201
  hypo

SEQ ID NO: 402883 - DNA, 77 bp, Homo sapiens; identical to SEQ ID NO: 208100
  chr2:97361031-97361108
  hypo

SEQ ID NO: 402884 - DNA, 154 bp, Homo sapiens; identical to SEQ ID NO: 250800
  chr2:97364039-97364193
  hypo

SEQ ID NO: 402885 - DNA, 35 bp, Homo sapiens; identical to SEQ ID NO: 250803
  chr2:97431125-97431160
  hypo

SEQ ID NO: 402886 - DNA, 88 bp, Homo sapiens; identical to SEQ ID NO: 250805
  chr2:97434629-97434717
  hypo

SEQ ID NO: 402887 - DNA, 43 bp, Homo sapiens
  chr2:97435335-97435378
  hypo
aggacagtgcagggggtgtcagtgtgtaaaagccaggctgagg

SEQ ID NO: 402888 - DNA, 129 bp, Homo sapiens; identical to SEQ ID NO: 250807
  chr2:97436177-97436306
  hypo

SEQ ID NO: 402889 - DNA, 230 bp, Homo sapiens; identical to SEQ ID NO: 250810
  chr2:97454844-97455074
  hypo

SEQ ID NO: 402890 - DNA, 97 bp, Homo sapiens; identical to SEQ ID NO: 208105
  chr2:97479660-97479757
  hypo

SEQ ID NO: 402891 - DNA, 156 bp, Homo sapiens; identical to SEQ ID NO: 221833
  chr2:97482863-97483019
  hypo

SEQ ID NO: 402892 - DNA, 112 bp, Homo sapiens; identical to SEQ ID NO: 208107
  chr2:97485585-97485697
  hypo

SEQ ID NO: 402893 - DNA, 36 bp, Homo sapiens; identical to SEQ ID NO: 208108
  chr2:97485727-97485763
  hypo

SEQ ID NO: 402894 - DNA, 33 bp, Homo sapiens; identical to SEQ ID NO: 208110
  chr2:97511924-97511957
  hypo

SEQ ID NO: 402895 - DNA, 99 bp, Homo sapiens; identical to SEQ ID NO: 250821
  chr2:97552035-97552134
  hypo

SEQ ID NO: 402896 - DNA, 86 bp, Homo sapiens; identical to SEQ ID NO: 250824
  chr2:97568145-97568231
  hypo

SEQ ID NO: 402897 - DNA, 32 bp, Homo sapiens; identical to SEQ ID NO: 250827
  chr2:97578424-97578456
  hypo

SEQ ID NO: 402898 - DNA, 68 bp, Homo sapiens; identical to SEQ ID NO: 390578
  chr2:97588990-97589058
  hypo

SEQ ID NO: 402899 - DNA, 161 bp, Homo sapiens; identical to SEQ ID NO: 250831
  chr2:97655847-97656008
  hypo

SEQ ID NO: 402900 - DNA, 146 bp, Homo sapiens; identical to SEQ ID NO: 250833
  chr2:98330282-98330428
  hypo

SEQ ID NO: 402901 - DNA, 47 bp, Homo sapiens; identical to SEQ ID NO: 250840
  chr2:98674829-98674876
  hypo

SEQ ID NO: 402902 - DNA, 164 bp, Homo sapiens; identical to SEQ ID NO: 250841
  chr2:98871119-98871283
  hypo

SEQ ID NO: 402903 - DNA, 90 bp, Homo sapiens; identical to SEQ ID NO: 208121
  chr2:99386853-99386943
  hypo

SEQ ID NO: 402904 - DNA, 206 bp, Homo sapiens; identical to SEQ ID NO: 250847
  chr2:99444496-99444702
  hypo

SEQ ID NO: 402905 - DNA, 38 bp, Homo sapiens; identical to SEQ ID NO: 250848
  chr2:99487423-99487461
  hypo

SEQ ID NO: 402906 - DNA, 47 bp, Homo sapiens; identical to SEQ ID NO: 250850
  chr2:99537760-99537807
  hypo

SEQ ID NO: 402907 - DNA, 120 bp, Homo sapiens; identical to SEQ ID NO: 250859
  chr2:100141754-100141874
  hypo

SEQ ID NO: 402908 - DNA, 66 bp, Homo sapiens; identical to SEQ ID NO: 208123
  chr2:100618385-100618451
  hypo

SEQ ID NO: 402909 - DNA, 476 bp, Homo sapiens; identical to SEQ ID NO: 280049
  chr2:100721429-100721905
  hypo

SEQ ID NO: 402910 - DNA, 391 bp, Homo sapiens; identical to SEQ ID NO: 221837
  chr2:100898414-100898805
  hypo

SEQ ID NO: 402911 - DNA, 103 bp, Homo sapiens; identical to SEQ ID NO: 250862
  chr2:100910680-100910783
  hypo

SEQ ID NO: 402912 - DNA, 70 bp, Homo sapiens; identical to SEQ ID NO: 299917
  chr2:101009997-101010067
  hypo

SEQ ID NO: 402913 - DNA, 125 bp, Homo sapiens; identical to SEQ ID NO: 250865
  chr2:101013988-101014113
  hypo

SEQ ID NO: 402914 - DNA, 43 bp, Homo sapiens; identical to SEQ ID NO: 208125
  chr2:101022688-101022731
  hypo

SEQ ID NO: 402915 - DNA, 177 bp, Homo sapiens; identical to SEQ ID NO: 208128
  chr2:101520349-101520526
  hypo

SEQ ID NO: 402916 - DNA, 40 bp, Homo sapiens; identical to SEQ ID NO: 250872
  chr2:101574054-101574094
  hypo

SEQ ID NO: 402917 - DNA, 40 bp, Homo sapiens; identical to SEQ ID NO: 250873
  chr2:101574394-101574434
  hypo

SEQ ID NO: 402918 - DNA, 93 bp, Homo sapiens; identical to SEQ ID NO: 250875
  chr2:101638838-101638931
  hypo

SEQ ID NO: 402919 - DNA, 38 bp, Homo sapiens; identical to SEQ ID NO: 208132
  chr2:101772516-101772554
  hypo

SEQ ID NO: 402920 - DNA, 248 bp, Homo sapiens; identical to SEQ ID NO: 250879
  chr2:101882441-101882689
  hypo

SEQ ID NO: 402921 - DNA, 163 bp, Homo sapiens; identical to SEQ ID NO: 250883
  chr2:102232955-102233118
  hypo

SEQ ID NO: 402922 - DNA, 82 bp, Homo sapiens; identical to SEQ ID NO: 250884
  chr2:102320123-102320205
  hypo

SEQ ID NO: 402923 - DNA, 39 bp, Homo sapiens; identical to SEQ ID NO: 250892
  chr2:102804745-102804784
  hypo

SEQ ID NO: 402924 - DNA, 64 bp, Homo sapiens; identical to SEQ ID NO: 250893
  chr2:102866731-102866795
  hypo

SEQ ID NO: 402925 - DNA, 42 bp, Homo sapiens; identical to SEQ ID NO: 208144
  chr2:103130075-103130117
  hypo

SEQ ID NO: 402926 - DNA, 209 bp, Homo sapiens; identical to SEQ ID NO: 396012
  chr2:105471213-105471422
  hypo

SEQ ID NO: 402927 - DNA, 120 bp, Homo sapiens; identical to SEQ ID NO: 250899
  chr2:105695482-105695602
  hypo

SEQ ID NO: 402928 - DNA, 55 bp, Homo sapiens; identical to SEQ ID NO: 250902
  chr2:105859043-105859098
  hypo

SEQ ID NO: 402929 - DNA, 244 bp, Homo sapiens; identical to SEQ ID NO: 250905
  chr2:105910432-105910676
  hypo

SEQ ID NO: 402930 - DNA, 91 bp, Homo sapiens; identical to SEQ ID NO: 208154
  chr2:106064705-106064796
  hypo

SEQ ID NO: 402931 - DNA, 36 bp, Homo sapiens; identical to SEQ ID NO: 208155
  chr2:106081974-106082010
  hypo

SEQ ID NO: 402932 - DNA, 241 bp, Homo sapiens; identical to SEQ ID NO: 250913
  chr2:106227199-106227440
  hypo

SEQ ID NO: 402933 - DNA, 214 bp, Homo sapiens; identical to SEQ ID NO: 198372
  chr2:106362018-106362232
  hypo

SEQ ID NO: 402934 - DNA, 167 bp, Homo sapiens; identical to SEQ ID NO: 250917
  chr2:106499100-106499267
  hypo

SEQ ID NO: 402935 - DNA, 240 bp, Homo sapiens; identical to SEQ ID NO: 250918
  chr2:106713428-106713668
  hypo

SEQ ID NO: 402936 - DNA, 61 bp, Homo sapiens; identical to SEQ ID NO: 250919
  chr2:106722162-106722223
  hypo

SEQ ID NO: 402937 - DNA, 152 bp, Homo sapiens; identical to SEQ ID NO: 208159
  chr2:106778555-106778707
  hypo

SEQ ID NO: 402938 - DNA, 299 bp, Homo sapiens; identical to SEQ ID NO: 250924
  chr2:106927123-106927422
  hypo

SEQ ID NO: 402939 - DNA, 78 bp, Homo sapiens; identical to SEQ ID NO: 250928
  chr2:107204235-107204313
  hypo

SEQ ID NO: 402940 - DNA, 57 bp, Homo sapiens; identical to SEQ ID NO: 208162
  chr2:107459358-107459415
  hypo

SEQ ID NO: 402941 - DNA, 199 bp, Homo sapiens
  chr2:107459445-107459644
  hypo
cactggctcaagacagggcgacctggtccccccgctgagacctacctatttcctcgcccaaggaagagttgaggattgcgcctgcagacatgacgacagcgcagctgcgcaggccgcgggggtgcagctggctcaggggcacggcgggcaccaggcgccgccagcccagcgcagaaaagggcgcctcggtgccgtccag

SEQ ID NO: 402942 - DNA, 75 bp, Homo sapiens; identical to SEQ ID NO: 250933
  chr2:108086318-108086393
  hypo

SEQ ID NO: 402943 - DNA, 87 bp, Homo sapiens; identical to SEQ ID NO: 208166
  chr2:108918020-108918107
  hypo

SEQ ID NO: 402944 - DNA, 83 bp, Homo sapiens; identical to SEQ ID NO: 250939
  chr2:109328951-109329034
  hypo

SEQ ID NO: 402945 - DNA, 102 bp, Homo sapiens; identical to SEQ ID NO: 250940
  chr2:109329294-109329396
  hypo

SEQ ID NO: 402946 - DNA, 37 bp, Homo sapiens; identical to SEQ ID NO: 208168
  chr2:109536234-109536271
  hypo

SEQ ID NO: 402947 - DNA, 37 bp, Homo sapiens; identical to SEQ ID NO: 208169
  chr2:109556840-109556877
  hypo

SEQ ID NO: 402948 - DNA, 474 bp, Homo sapiens; identical to SEQ ID NO: 250944
  chr2:109558967-109559441
  hypo

SEQ ID NO: 402949 - DNA, 197 bp, Homo sapiens; identical to SEQ ID NO: 250947
  chr2:109723678-109723875
  hypo

SEQ ID NO: 402950 - DNA, 40 bp, Homo sapiens; identical to SEQ ID NO: 208173
  chr2:110008967-110009007
  hypo

SEQ ID NO: 402951 - DNA, 40 bp, Homo sapiens; identical to SEQ ID NO: 208174
  chr2:110009247-110009287
  hypo

SEQ ID NO: 402952 - DNA, 72 bp, Homo sapiens; identical to SEQ ID NO: 250957
  chr2:110021041-110021113
  hypo

SEQ ID NO: 402953 - DNA, 157 bp, Homo sapiens; identical to SEQ ID NO: 250961
  chr2:110026466-110026623
  hypo

SEQ ID NO: 402954 - DNA, 49 bp, Homo sapiens; identical to SEQ ID NO: 208181
  chr2:110256842-110256891
  hypo

SEQ ID NO: 402955 - DNA, 194 bp, Homo sapiens; identical to SEQ ID NO: 208182
  chr2:110259063-110259257
  hypo

SEQ ID NO: 402956 - DNA, 126 bp, Homo sapiens; identical to SEQ ID NO: 250967
  chr2:110260107-110260233
  hypo

SEQ ID NO: 402957 - DNA, 37 bp, Homo sapiens; identical to SEQ ID NO: 208183
  chr2:110352252-110352289
  hypo

SEQ ID NO: 402958 - DNA, 161 bp, Homo sapiens; identical to SEQ ID NO: 250970
  chr2:110483973-110484134
  hypo

SEQ ID NO: 402959 - DNA, 145 bp, Homo sapiens; identical to SEQ ID NO: 250972
  chr2:110855514-110855659
  hypo

SEQ ID NO: 402960 - DNA, 175 bp, Homo sapiens; identical to SEQ ID NO: 250973
  chr2:110861845-110862020
  hypo

SEQ ID NO: 402961 - DNA, 32 bp, Homo sapiens; identical to SEQ ID NO: 300044
  chr2:111438523-111438555
  hypo

SEQ ID NO: 402962 - DNA, 310 bp, Homo sapiens; identical to SEQ ID NO: 250978
  chr2:111911293-111911603
  hypo

SEQ ID NO: 402963 - DNA, 147 bp, Homo sapiens; identical to SEQ ID NO: 250981
  chr2:112745416-112745563
  hypo

SEQ ID NO: 402964 - DNA, 106 bp, Homo sapiens; identical to SEQ ID NO: 250983
  chr2:112785956-112786062
  hypo

SEQ ID NO: 402965 - DNA, 142 bp, Homo sapiens; identical to SEQ ID NO: 250985
  chr2:112810885-112811027
  hypo

SEQ ID NO: 402966 - DNA, 188 bp, Homo sapiens; identical to SEQ ID NO: 208193
  chr2:113286635-113286823
  hypo

SEQ ID NO: 402967 - DNA, 33 bp, Homo sapiens; identical to SEQ ID NO: 208194
  chr2:113494876-113494909
  hypo

SEQ ID NO: 402968 - DNA, 32 bp, Homo sapiens; identical to SEQ ID NO: 250992
  chr2:113498451-113498483
  hypo

SEQ ID NO: 402969 - DNA, 31 bp, Homo sapiens; identical to SEQ ID NO: 208195
  chr2:113804066-113804097
  hypo

SEQ ID NO: 402970 - DNA, 86 bp, Homo sapiens; identical to SEQ ID NO: 250996
  chr2:113908444-113908530
  hypo

SEQ ID NO: 402971 - DNA, 342 bp, Homo sapiens; identical to SEQ ID NO: 250997
  chr2:113967316-113967658
  hypo

SEQ ID NO: 402972 - DNA, 188 bp, Homo sapiens; identical to SEQ ID NO: 208196
  chr2:113973331-113973519
  hypo

SEQ ID NO: 402973 - DNA, 31 bp, Homo sapiens; identical to SEQ ID NO: 251002
  chr2:114736319-114736350
  hypo

SEQ ID NO: 402974 - DNA, 43 bp, Homo sapiens; identical to SEQ ID NO: 251004
  chr2:115183213-115183256
  hypo

SEQ ID NO: 402975 - DNA, 145 bp, Homo sapiens; identical to SEQ ID NO: 251007
  chr2:118743611-118743756
  hypo

SEQ ID NO: 402976 - DNA, 85 bp, Homo sapiens; identical to SEQ ID NO: 251008
  chr2:118743816-118743901
  hypo

SEQ ID NO: 402977 - DNA, 185 bp, Homo sapiens; identical to SEQ ID NO: 251011
  chr2:120003178-120003363
  hypo

SEQ ID NO: 402978 - DNA, 82 bp, Homo sapiens; identical to SEQ ID NO: 208201
  chr2:120069741-120069823
  hypo

SEQ ID NO: 402979 - DNA, 35 bp, Homo sapiens; identical to SEQ ID NO: 251016
  chr2:120230476-120230511
  hypo

SEQ ID NO: 402980 - DNA, 162 bp, Homo sapiens; identical to SEQ ID NO: 251018
  chr2:120282306-120282468
  hypo

SEQ ID NO: 402981 - DNA, 129 bp, Homo sapiens; identical to SEQ ID NO: 198413
  chr2:120770809-120770938
  hypo

SEQ ID NO: 402982 - DNA, 218 bp, Homo sapiens; identical to SEQ ID NO: 106596
  chr2:120770966-120771184
  hypo

SEQ ID NO: 402983 - DNA, 172 bp, Homo sapiens; identical to SEQ ID NO: 251026
  chr2:120987006-120987178
  hypo

SEQ ID NO: 402984 - DNA, 46 bp, Homo sapiens; identical to SEQ ID NO: 251028
  chr2:120996940-120996986
  hypo

SEQ ID NO: 402985 - DNA, 523 bp, Homo sapiens; identical to SEQ ID NO: 251032
  chr2:121116365-121116888
  hypo

SEQ ID NO: 402986 - DNA, 134 bp, Homo sapiens; identical to SEQ ID NO: 208210
  chr2:121243025-121243159
  hypo

SEQ ID NO: 402987 - DNA, 136 bp, Homo sapiens; identical to SEQ ID NO: 251036
  chr2:121266977-121267113
  hypo

SEQ ID NO: 402988 - DNA, 39 bp, Homo sapiens; identical to SEQ ID NO: 208211
  chr2:121327691-121327730
  hypo

SEQ ID NO: 402989 - DNA, 33 bp, Homo sapiens; identical to SEQ ID NO: 251039
  chr2:121436963-121436996
  hypo

SEQ ID NO: 402990 - DNA, 96 bp, Homo sapiens; identical to SEQ ID NO: 208212
  chr2:121542641-121542737
  hypo

SEQ ID NO: 402991 - DNA, 80 bp, Homo sapiens; identical to SEQ ID NO: 251047
  chr2:121628105-121628185
  hypo

SEQ ID NO: 402992 - DNA, 201 bp, Homo sapiens; identical to SEQ ID NO: 251048
  chr2:121692170-121692371
  hypo

SEQ ID NO: 402993 - DNA, 130 bp, Homo sapiens; identical to SEQ ID NO: 208214
  chr2:121726279-121726409
  hypo

SEQ ID NO: 402994 - DNA, 1125 bp, Homo sapiens; identical to SEQ ID NO: 208216
  chr2:121745649-121746774
  hypo

SEQ ID NO: 402995 - DNA, 197 bp, Homo sapiens; identical to SEQ ID NO: 251055
  chr2:121932346-121932543
  hypo

SEQ ID NO: 402996 - DNA, 94 bp, Homo sapiens; identical to SEQ ID NO: 251056
  chr2:121962011-121962105
  hypo

SEQ ID NO: 402997 - DNA, 332 bp, Homo sapiens; identical to SEQ ID NO: 251057
  chr2:121970083-121970415
  hypo

SEQ ID NO: 402998 - DNA, 36 bp, Homo sapiens; identical to SEQ ID NO: 251062
  chr2:122013597-122013633
  hypo

SEQ ID NO: 402999 - DNA, 88 bp, Homo sapiens; identical to SEQ ID NO: 208219
  chr2:122102164-122102252
  hypo

SEQ ID NO: 403000 - DNA, 103 bp, Homo sapiens; identical to SEQ ID NO: 251068
  chr2:122118646-122118749
  hypo

SEQ ID NO: 403001 - DNA, 46 bp, Homo sapiens; identical to SEQ ID NO: 251070
  chr2:122260203-122260249
  hypo

SEQ ID NO: 403002 - DNA, 31 bp, Homo sapiens; identical to SEQ ID NO: 208222
  chr2:122497730-122497761
  hypo

SEQ ID NO: 403003 - DNA, 90 bp, Homo sapiens; identical to SEQ ID NO: 251075
  chr2:122498001-122498091
  hypo

SEQ ID NO: 403004 - DNA, 320 bp, Homo sapiens; identical to SEQ ID NO: 251078
  chr2:122976046-122976366
  hypo

SEQ ID NO: 403005 - DNA, 101 bp, Homo sapiens; identical to SEQ ID NO: 251080
  chr2:125119894-125119995
  hypo

SEQ ID NO: 403006 - DNA, 314 bp, Homo sapiens; identical to SEQ ID NO: 251085
  chr2:127734331-127734645
  hypo

SEQ ID NO: 403007 - DNA, 173 bp, Homo sapiens; identical to SEQ ID NO: 251089
  chr2:127895962-127896135
  hypo

SEQ ID NO: 403008 - DNA, 215 bp, Homo sapiens; identical to SEQ ID NO: 251090
  chr2:127933496-127933711
  hypo

SEQ ID NO: 403009 - DNA, 242 bp, Homo sapiens; identical to SEQ ID NO: 251092
  chr2:128128833-128129075
  hypo

SEQ ID NO: 403010 - DNA, 45 bp, Homo sapiens; identical to SEQ ID NO: 251094
  chr2:128214276-128214321
  hypo

SEQ ID NO: 403011 - DNA, 78 bp, Homo sapiens; identical to SEQ ID NO: 208229
  chr2:128273731-128273809
  hypo

SEQ ID NO: 403012 - DNA, 77 bp, Homo sapiens; identical to SEQ ID NO: 208230
  chr2:128273869-128273946
  hypo

SEQ ID NO: 403013 - DNA, 187 bp, Homo sapiens; identical to SEQ ID NO: 251100
  chr2:128398930-128399117
  hypo

SEQ ID NO: 403014 - DNA, 128 bp, Homo sapiens; identical to SEQ ID NO: 251102
  chr2:128415009-128415137
  hypo

SEQ ID NO: 403015 - DNA, 69 bp, Homo sapiens; identical to SEQ ID NO: 251103
  chr2:128434220-128434289
  hypo

SEQ ID NO: 403016 - DNA, 84 bp, Homo sapiens; identical to SEQ ID NO: 208235
  chr2:128600135-128600219
  hypo

SEQ ID NO: 403017 - DNA, 41 bp, Homo sapiens; identical to SEQ ID NO: 208236
  chr2:128679951-128679992
  hypo

SEQ ID NO: 403018 - DNA, 40 bp, Homo sapiens; identical to SEQ ID NO: 208237
  chr2:128680172-128680212
  hypo

SEQ ID NO: 403019 - DNA, 35 bp, Homo sapiens; identical to SEQ ID NO: 251112
  chr2:128826705-128826740
  hypo

SEQ ID NO: 403020 - DNA, 200 bp, Homo sapiens; identical to SEQ ID NO: 251113
  chr2:129021514-129021714
  hypo

SEQ ID NO: 403021 - DNA, 170 bp, Homo sapiens; identical to SEQ ID NO: 208239
  chr2:129250623-129250793
  hypo

SEQ ID NO: 403022 - DNA, 152 bp, Homo sapiens; identical to SEQ ID NO: 251119
  chr2:129539249-129539401
  hypo

SEQ ID NO: 403023 - DNA, 78 bp, Homo sapiens; identical to SEQ ID NO: 300202
  chr2:130886699-130886777
  hypo

SEQ ID NO: 403024 - DNA, 209 bp, Homo sapiens; identical to SEQ ID NO: 221870
  chr2:131113001-131113210
  hypo

SEQ ID NO: 403025 - DNA, 128 bp, Homo sapiens; identical to SEQ ID NO: 251131
  chr2:131116461-131116589
  hypo

SEQ ID NO: 403026 - DNA, 291 bp, Homo sapiens; identical to SEQ ID NO: 251134
  chr2:131583609-131583900
  hypo

SEQ ID NO: 403027 - DNA, 138 bp, Homo sapiens; identical to SEQ ID NO: 208245
  chr2:131639163-131639301
  hypo

SEQ ID NO: 403028 - DNA, 39 bp, Homo sapiens; identical to SEQ ID NO: 208246
  chr2:131639331-131639370
  hypo

SEQ ID NO: 403029 - DNA, 240 bp, Homo sapiens; identical to SEQ ID NO: 251138
  chr2:131818832-131819072
  hypo

SEQ ID NO: 403030 - DNA, 394 bp, Homo sapiens; identical to SEQ ID NO: 208248
  chr2:131878434-131878828
  hypo

SEQ ID NO: 403031 - DNA, 100 bp, Homo sapiens; identical to SEQ ID NO: 251141
  chr2:131962504-131962604
  hypo

SEQ ID NO: 403032 - DNA, 159 bp, Homo sapiens; identical to SEQ ID NO: 208251
  chr2:132348675-132348834
  hypo

SEQ ID NO: 403033 - DNA, 84 bp, Homo sapiens; identical to SEQ ID NO: 251149
  chr2:132403830-132403914
  hypo

SEQ ID NO: 403034 - DNA, 87 bp, Homo sapiens; identical to SEQ ID NO: 208253
  chr2:132586579-132586666
  hypo

SEQ ID NO: 403035 - DNA, 99 bp, Homo sapiens; identical to SEQ ID NO: 198434
  chr2:132767530-132767629
  hypo

SEQ ID NO: 403036 - DNA, 171 bp, Homo sapiens; identical to SEQ ID NO: 251153
  chr2:134897881-134898052
  hypo

SEQ ID NO: 403037 - DNA, 133 bp, Homo sapiens; identical to SEQ ID NO: 251154
  chr2:134948636-134948769
  hypo

SEQ ID NO: 403038 - DNA, 180 bp, Homo sapiens; identical to SEQ ID NO: 251157
  chr2:135718101-135718281
  hypo

SEQ ID NO: 403039 - DNA, 217 bp, Homo sapiens; identical to SEQ ID NO: 251158
  chr2:135926165-135926382
  hypo

SEQ ID NO: 403040 - DNA, 133 bp, Homo sapiens; identical to SEQ ID NO: 251159
  chr2:136555620-136555753
  hypo

SEQ ID NO: 403041 - DNA, 164 bp, Homo sapiens; identical to SEQ ID NO: 251161
  chr2:136721521-136721685
  hypo

SEQ ID NO: 403042 - DNA, 221 bp, Homo sapiens; identical to SEQ ID NO: 208261
  chr2:136785592-136785813
  hypo

SEQ ID NO: 403043 - DNA, 33 bp, Homo sapiens; identical to SEQ ID NO: 251164
  chr2:136911820-136911853
  hypo

SEQ ID NO: 403044 - DNA, 32 bp, Homo sapiens; identical to SEQ ID NO: 251165
  chr2:137088316-137088348
  hypo

SEQ ID NO: 403045 - DNA, 74 bp, Homo sapiens; identical to SEQ ID NO: 251169
  chr2:144227051-144227125
  hypo

SEQ ID NO: 403046 - DNA, 1152 bp, Homo sapiens; identical to SEQ ID NO: 396064
  chr2:148601349-148602501
  hypo

SEQ ID NO: 403047 - DNA, 193 bp, Homo sapiens; identical to SEQ ID NO: 251173
  chr2:148965103-148965296
  hypo

SEQ ID NO: 403048 - DNA, 41 bp, Homo sapiens; identical to SEQ ID NO: 251174
  chr2:149016010-149016051
  hypo

SEQ ID NO: 403049 - DNA, 49 bp, Homo sapiens; identical to SEQ ID NO: 251175
  chr2:149016081-149016130
  hypo

SEQ ID NO: 403050 - DNA, 37 bp, Homo sapiens; identical to SEQ ID NO: 208271
  chr2:149045675-149045712
  hypo

SEQ ID NO: 403051 - DNA, 194 bp, Homo sapiens; identical to SEQ ID NO: 208272
  chr2:149227323-149227517
  hypo

SEQ ID NO: 403052 - DNA, 143 bp, Homo sapiens; identical to SEQ ID NO: 208276
  chr2:150131807-150131950
  hypo

SEQ ID NO: 403053 - DNA, 237 bp, Homo sapiens; identical to SEQ ID NO: 383864
  chr2:150186614-150186851
  hypo

SEQ ID NO: 403054 - DNA, 79 bp, Homo sapiens; identical to SEQ ID NO: 251184
  chr2:150394600-150394679
  hypo

SEQ ID NO: 403055 - DNA, 278 bp, Homo sapiens; identical to SEQ ID NO: 251186
  chr2:152153950-152154228
  hypo

SEQ ID NO: 403056 - DNA, 33 bp, Homo sapiens; identical to SEQ ID NO: 251187
  chr2:152265327-152265360
  hypo

SEQ ID NO: 403057 - DNA, 100 bp, Homo sapiens; identical to SEQ ID NO: 198475
  chr2:152956050-152956150
  hypo

SEQ ID NO: 403058 - DNA, 405 bp, Homo sapiens; identical to SEQ ID NO: 280290
  chr2:157189365-157189770
  hypo

SEQ ID NO: 403059 - DNA, 34 bp, Homo sapiens; identical to SEQ ID NO: 251195
  chr2:157340915-157340949
  hypo

SEQ ID NO: 403060 - DNA, 90 bp, Homo sapiens; identical to SEQ ID NO: 251197
  chr2:158674928-158675018
  hypo

SEQ ID NO: 403061 - DNA, 119 bp, Homo sapiens; identical to SEQ ID NO: 251201
  chr2:159638827-159638946
  hypo

SEQ ID NO: 403062 - DNA, 39 bp, Homo sapiens; identical to SEQ ID NO: 251203
  chr2:159964843-159964882
  hypo

SEQ ID NO: 403063 - DNA, 86 bp, Homo sapiens; identical to SEQ ID NO: 251205
  chr2:160061390-160061476
  hypo

SEQ ID NO: 403064 - DNA, 244 bp, Homo sapiens; identical to SEQ ID NO: 251206
  chr2:160086244-160086488
  hypo

SEQ ID NO: 403065 - DNA, 175 bp, Homo sapiens; identical to SEQ ID NO: 396085
  chr2:160654718-160654893
  hypo

SEQ ID NO: 403066 - DNA, 115 bp, Homo sapiens; identical to SEQ ID NO: 208298
  chr2:161113756-161113871
  hypo

SEQ ID NO: 403067 - DNA, 228 bp, Homo sapiens; identical to SEQ ID NO: 221914
  chr2:161126710-161126938
  hypo

SEQ ID NO: 403068 - DNA, 91 bp, Homo sapiens; identical to SEQ ID NO: 208299
  chr2:161127528-161127619
  hypo

SEQ ID NO: 403069 - DNA, 152 bp, Homo sapiens; identical to SEQ ID NO: 208300
  chr2:161128081-161128233
  hypo

SEQ ID NO: 403070 - DNA, 38 bp, Homo sapiens; identical to SEQ ID NO: 251212
  chr2:161141483-161141521
  hypo

SEQ ID NO: 403071 - DNA, 126 bp, Homo sapiens; identical to SEQ ID NO: 280307
  chr2:161263704-161263830
  hypo

SEQ ID NO: 403072 - DNA, 147 bp, Homo sapiens; identical to SEQ ID NO: 396089
  chr2:161263896-161264043
  hypo

SEQ ID NO: 403073 - DNA, 208 bp, Homo sapiens; identical to SEQ ID NO: 251217
  chr2:162096297-162096505
  hypo

SEQ ID NO: 403074 - DNA, 59 bp, Homo sapiens; identical to SEQ ID NO: 251218
  chr2:162838347-162838406
  hypo

SEQ ID NO: 403075 - DNA, 138 bp, Homo sapiens; identical to SEQ ID NO: 251220
  chr2:164966392-164966530
  hypo

SEQ ID NO: 403076 - DNA, 214 bp, Homo sapiens; identical to SEQ ID NO: 208307
  chr2:165637158-165637372
  hypo

SEQ ID NO: 403077 - DNA, 299 bp, Homo sapiens; identical to SEQ ID NO: 396096
  chr2:165698370-165698669
  hypo

SEQ ID NO: 403078 - DNA, 106 bp, Homo sapiens; identical to SEQ ID NO: 251225
  chr2:168921849-168921955
  hypo

SEQ ID NO: 403079 - DNA, 32 bp, Homo sapiens; identical to SEQ ID NO: 251230
  chr2:169561125-169561157
  hypo

SEQ ID NO: 403080 - DNA, 31 bp, Homo sapiens; identical to SEQ ID NO: 251231
  chr2:169561397-169561428
  hypo

SEQ ID NO: 403081 - DNA, 268 bp, Homo sapiens; identical to SEQ ID NO: 198518
  chr2:170218861-170219129
  hypo

SEQ ID NO: 403082 - DNA, 49 bp, Homo sapiens; identical to SEQ ID NO: 251235
  chr2:170337117-170337166
  hypo

SEQ ID NO: 403083 - DNA, 77 bp, Homo sapiens; identical to SEQ ID NO: 208323
  chr2:170373534-170373611
  hypo

SEQ ID NO: 403084 - DNA, 180 bp, Homo sapiens; identical to SEQ ID NO: 208329
  chr2:170620609-170620789
  hypo

SEQ ID NO: 403085 - DNA, 54 bp, Homo sapiens; identical to SEQ ID NO: 208330
  chr2:170682331-170682385
  hypo

SEQ ID NO: 403086 - DNA, 82 bp, Homo sapiens; identical to SEQ ID NO: 251245
  chr2:171542904-171542986
  hypo

SEQ ID NO: 403087 - DNA, 49 bp, Homo sapiens; identical to SEQ ID NO: 198527
  chr2:171627264-171627313
  hypo

SEQ ID NO: 403088 - DNA, 600 bp, Homo sapiens; identical to SEQ ID NO: 396103
  chr2:171627346-171627946
  hypo

SEQ ID NO: 403089 - DNA, 70 bp, Homo sapiens; identical to SEQ ID NO: 251251
  chr2:171860310-171860380
  hypo

SEQ ID NO: 403090 - DNA, 41 bp, Homo sapiens; identical to SEQ ID NO: 251252
  chr2:172302764-172302805
  hypo

SEQ ID NO: 403091 - DNA, 296 bp, Homo sapiens; identical to SEQ ID NO: 396106
  chr2:172379778-172380074
  hypo

SEQ ID NO: 403092 - DNA, 152 bp, Homo sapiens; identical to SEQ ID NO: 251255
  chr2:172424323-172424475
  hypo

SEQ ID NO: 403093 - DNA, 32 bp, Homo sapiens; identical to SEQ ID NO: 251256
  chr2:172424535-172424567
  hypo

SEQ ID NO: 403094 - DNA, 32 bp, Homo sapiens; identical to SEQ ID NO: 251258
  chr2:173422953-173422985
  hypo

SEQ ID NO: 403095 - DNA, 59 bp, Homo sapiens; identical to SEQ ID NO: 251261
  chr2:173909415-173909474
  hypo

SEQ ID NO: 403096 - DNA, 120 bp, Homo sapiens; identical to SEQ ID NO: 251263
  chr2:174049586-174049706
  hypo

SEQ ID NO: 403097 - DNA, 103 bp, Homo sapiens; identical to SEQ ID NO: 221936
  chr2:174147823-174147926
  hypo

SEQ ID NO: 403098 - DNA, 74 bp, Homo sapiens; identical to SEQ ID NO: 251265
  chr2:174278557-174278631
  hypo

SEQ ID NO: 403099 - DNA, 217 bp, Homo sapiens; identical to SEQ ID NO: 198553
  chr2:174349951-174350168
  hypo

SEQ ID NO: 403100 - DNA, 72 bp, Homo sapiens; identical to SEQ ID NO: 251268
  chr2:175113858-175113930
  hypo

SEQ ID NO: 403101 - DNA, 35 bp, Homo sapiens; identical to SEQ ID NO: 208342
  chr2:175383905-175383940
  hypo

SEQ ID NO: 403102 - DNA, 35 bp, Homo sapiens; identical to SEQ ID NO: 208343
  chr2:175384180-175384215
  hypo

SEQ ID NO: 403103 - DNA, 32 bp, Homo sapiens; identical to SEQ ID NO: 208345
  chr2:176569574-176569606
  hypo

SEQ ID NO: 403104 - DNA, 104 bp, Homo sapiens; identical to SEQ ID NO: 280444
  chr2:177022459-177022563
  hypo

SEQ ID NO: 403105 - DNA, 136 bp, Homo sapiens; identical to SEQ ID NO: 251277
  chr2:178090224-178090360
  hypo

SEQ ID NO: 403106 - DNA, 48 bp, Homo sapiens; identical to SEQ ID NO: 300404
  chr2:178131810-178131858
  hypo

SEQ ID NO: 403107 - DNA, 59 bp, Homo sapiens; identical to SEQ ID NO: 251281
  chr2:178936539-178936598
  hypo

SEQ ID NO: 403108 - DNA, 293 bp, Homo sapiens; identical to SEQ ID NO: 251282
  chr2:178936628-178936921
  hypo

SEQ ID NO: 403109 - DNA, 31 bp, Homo sapiens; identical to SEQ ID NO: 251286
  chr2:180019921-180019952
  hypo

SEQ ID NO: 403110 - DNA, 80 bp, Homo sapiens; identical to SEQ ID NO: 208355
  chr2:180027694-180027774
  hypo

SEQ ID NO: 403111 - DNA, 69 bp, Homo sapiens; identical to SEQ ID NO: 251288
  chr2:180128504-180128573
  hypo

SEQ ID NO: 403112 - DNA, 85 bp, Homo sapiens; identical to SEQ ID NO: 198592
  chr2:180129611-180129696
  hypo

SEQ ID NO: 403113 - DNA, 163 bp, Homo sapiens; identical to SEQ ID NO: 251290
  chr2:182413425-182413588
  hypo

SEQ ID NO: 403114 - DNA, 43 bp, Homo sapiens; identical to SEQ ID NO: 251294
  chr2:186081368-186081411
  hypo

SEQ ID NO: 403115 - DNA, 32 bp, Homo sapiens; identical to SEQ ID NO: 251295
  chr2:188404596-188404628
  hypo

SEQ ID NO: 403116 - DNA, 82 bp, Homo sapiens; identical to SEQ ID NO: 251296
  chr2:190369341-190369423
  hypo

SEQ ID NO: 403117 - DNA, 139 bp, Homo sapiens; identical to SEQ ID NO: 198615
  chr2:191512982-191513121
  hypo

SEQ ID NO: 403118 - DNA, 120 bp, Homo sapiens; identical to SEQ ID NO: 208367
  chr2:191794489-191794609
  hypo

SEQ ID NO: 403119 - DNA, 111 bp, Homo sapiens; identical to SEQ ID NO: 251303
  chr2:191829751-191829862
  hypo

SEQ ID NO: 403120 - DNA, 84 bp, Homo sapiens; identical to SEQ ID NO: 208371
  chr2:192342592-192342676
  hypo

SEQ ID NO: 403121 - DNA, 42 bp, Homo sapiens; identical to SEQ ID NO: 251306
  chr2:196362209-196362251
  hypo

SEQ ID NO: 403122 - DNA, 44 bp, Homo sapiens; identical to SEQ ID NO: 208374
  chr2:196402553-196402597
  hypo

SEQ ID NO: 403123 - DNA, 31 bp, Homo sapiens; identical to SEQ ID NO: 251312
  chr2:197003966-197003997
  hypo

SEQ ID NO: 403124 - DNA, 89 bp, Homo sapiens; identical to SEQ ID NO: 251313
  chr2:197038938-197039027
  hypo

SEQ ID NO: 403125 - DNA, 38 bp, Homo sapiens; identical to SEQ ID NO: 208376
  chr2:197095851-197095889
  hypo

SEQ ID NO: 403126 - DNA, 178 bp, Homo sapiens; identical to SEQ ID NO: 198634
  chr2:198265429-198265607
  hypo

SEQ ID NO: 403127 - DNA, 376 bp, Homo sapiens; identical to SEQ ID NO: 198636
  chr2:198267374-198267750
  hypo

SEQ ID NO: 403128 - DNA, 70 bp, Homo sapiens; identical to SEQ ID NO: 198637
  chr2:198268366-198268436
  hypo

SEQ ID NO: 403129 - DNA, 93 bp, Homo sapiens; identical to SEQ ID NO: 198638
  chr2:198269812-198269905
  hypo

SEQ ID NO: 403130 - DNA, 147 bp, Homo sapiens; identical to SEQ ID NO: 198640
  chr2:198273117-198273264
  hypo

SEQ ID NO: 403131 - DNA, 781 bp, Homo sapiens; identical to SEQ ID NO: 221975
  chr2:200323016-200323797
  hypo

SEQ ID NO: 403132 - DNA, 582 bp, Homo sapiens; identical to SEQ ID NO: 221976
  chr2:200324029-200324611
  hypo

SEQ ID NO: 403133 - DNA, 143 bp, Homo sapiens; identical to SEQ ID NO: 208393
  chr2:201218934-201219077
  hypo

SEQ ID NO: 403134 - DNA, 317 bp, Homo sapiens; identical to SEQ ID NO: 251322
  chr2:201273680-201273997
  hypo

SEQ ID NO: 403135 - DNA, 323 bp, Homo sapiens; identical to SEQ ID NO: 208394
  chr2:201354840-201355163
  hypo

SEQ ID NO: 403136 - DNA, 339 bp, Homo sapiens; identical to SEQ ID NO: 251325
  chr2:201652446-201652785
  hypo

SEQ ID NO: 403137 - DNA, 182 bp, Homo sapiens; identical to SEQ ID NO: 251328
  chr2:202003519-202003701
  hypo

SEQ ID NO: 403138 - DNA, 35 bp, Homo sapiens; identical to SEQ ID NO: 251330
  chr2:202119808-202119843
  hypo

SEQ ID NO: 403139 - DNA, 97 bp, Homo sapiens; identical to SEQ ID NO: 251331
  chr2:202261466-202261563
  hypo

SEQ ID NO: 403140 - DNA, 43 bp, Homo sapiens; identical to SEQ ID NO: 251334
  chr2:202893412-202893455
  hypo

SEQ ID NO: 403141 - DNA, 104 bp, Homo sapiens; identical to SEQ ID NO: 221980
  chr2:203242328-203242432
  hypo

SEQ ID NO: 403142 - DNA, 34 bp, Homo sapiens; identical to SEQ ID NO: 208400
  chr2:203250365-203250399
  hypo

SEQ ID NO: 403143 - DNA, 162 bp, Homo sapiens; identical to SEQ ID NO: 208401
  chr2:203431925-203432087
  hypo

SEQ ID NO: 403144 - DNA, 209 bp, Homo sapiens; identical to SEQ ID NO: 208402
  chr2:203484399-203484608
  hypo

SEQ ID NO: 403145 - DNA, 45 bp, Homo sapiens; identical to SEQ ID NO: 208404
  chr2:204055398-204055443
  hypo

SEQ ID NO: 403146 - DNA, 31 bp, Homo sapiens; identical to SEQ ID NO: 251347
  chr2:204206113-204206144
  hypo

SEQ ID NO: 403147 - DNA, 195 bp, Homo sapiens; identical to SEQ ID NO: 198663
  chr2:204399768-204399963
  hypo

SEQ ID NO: 403148 - DNA, 69 bp, Homo sapiens; identical to SEQ ID NO: 251349
  chr2:204803398-204803467
  hypo

SEQ ID NO: 403149 - DNA, 126 bp, Homo sapiens; identical to SEQ ID NO: 251350
  chr2:204803497-204803623
  hypo

SEQ ID NO: 403150 - DNA, 44 bp, Homo sapiens; identical to SEQ ID NO: 208407
  chr2:206166494-206166538
  hypo

SEQ ID NO: 403151 - DNA, 106 bp, Homo sapiens; identical to SEQ ID NO: 280581
  chr2:206546583-206546689
  hypo

SEQ ID NO: 403152 - DNA, 175 bp, Homo sapiens; identical to SEQ ID NO: 396178
  chr2:206546770-206546945
  hypo

SEQ ID NO: 403153 - DNA, 103 bp, Homo sapiens; identical to SEQ ID NO: 251359
  chr2:206670208-206670311
  hypo

SEQ ID NO: 403154 - DNA, 153 bp, Homo sapiens; identical to SEQ ID NO: 208409
  chr2:206826960-206827113
  hypo

SEQ ID NO: 403155 - DNA, 41 bp, Homo sapiens; identical to SEQ ID NO: 208414
  chr2:206971482-206971523
  hypo

SEQ ID NO: 403156 - DNA, 43 bp, Homo sapiens; identical to SEQ ID NO: 208415
  chr2:207021944-207021987
  hypo

SEQ ID NO: 403157 - DNA, 37 bp, Homo sapiens; identical to SEQ ID NO: 251368
  chr2:207068777-207068814
  hypo

SEQ ID NO: 403158 - DNA, 178 bp, Homo sapiens; identical to SEQ ID NO: 251369
  chr2:208003599-208003777
  hypo

SEQ ID NO: 403159 - DNA, 40 bp, Homo sapiens; identical to SEQ ID NO: 251372
  chr2:208339132-208339172
  hypo

SEQ ID NO: 403160 - DNA, 137 bp, Homo sapiens; identical to SEQ ID NO: 208420
  chr2:208622063-208622200
  hypo

SEQ ID NO: 403161 - DNA, 68 bp, Homo sapiens; identical to SEQ ID NO: 208422
  chr2:208692452-208692520
  hypo

SEQ ID NO: 403162 - DNA, 95 bp, Homo sapiens; identical to SEQ ID NO: 251381
  chr2:208865897-208865992
  hypo

SEQ ID NO: 403163 - DNA, 110 bp, Homo sapiens; identical to SEQ ID NO: 251382
  chr2:208993012-208993122
  hypo

SEQ ID NO: 403164 - DNA, 150 bp, Homo sapiens; identical to SEQ ID NO: 208423
  chr2:208994585-208994735
  hypo

SEQ ID NO: 403165 - DNA, 78 bp, Homo sapiens; identical to SEQ ID NO: 198673
  chr2:209108240-209108318
  hypo

SEQ ID NO: 403166 - DNA, 261 bp, Homo sapiens; identical to SEQ ID NO: 198674
  chr2:209113128-209113389
  hypo

SEQ ID NO: 403167 - DNA, 211 bp, Homo sapiens; identical to SEQ ID NO: 198675
  chr2:209118761-209118972
  hypo

SEQ ID NO: 403168 - DNA, 300 bp, Homo sapiens; identical to SEQ ID NO: 251387
  chr2:210673260-210673560
  hypo

SEQ ID NO: 403169 - DNA, 110 bp, Homo sapiens; identical to SEQ ID NO: 251388
  chr2:211036650-211036760
  hypo

SEQ ID NO: 403170 - DNA, 41 bp, Homo sapiens; identical to SEQ ID NO: 208430
  chr2:211055940-211055981
  hypo

SEQ ID NO: 403171 - DNA, 44 bp, Homo sapiens; identical to SEQ ID NO: 251392
  chr2:215581840-215581884
  hypo

SEQ ID NO: 403172 - DNA, 58 bp, Homo sapiens; identical to SEQ ID NO: 251394
  chr2:216195106-216195164
  hypo

SEQ ID NO: 403173 - DNA, 82 bp, Homo sapiens; identical to SEQ ID NO: 251397
  chr2:216824991-216825073
  hypo

SEQ ID NO: 403174 - DNA, 45 bp, Homo sapiens; identical to SEQ ID NO: 208432
  chr2:216852232-216852277
  hypo

SEQ ID NO: 403175 - DNA, 183 bp, Homo sapiens; identical to SEQ ID NO: 208433
  chr2:216885426-216885609
  hypo

SEQ ID NO: 403176 - DNA, 310 bp, Homo sapiens; identical to SEQ ID NO: 280618
  chr2:217236253-217236563
  hypo

SEQ ID NO: 403177 - DNA, 56 bp, Homo sapiens; identical to SEQ ID NO: 208435
  chr2:217472021-217472077
  hypo

SEQ ID NO: 403178 - DNA, 116 bp, Homo sapiens; identical to SEQ ID NO: 251401
  chr2:217475514-217475630
  hypo

SEQ ID NO: 403179 - DNA, 75 bp, Homo sapiens; identical to SEQ ID NO: 251406
  chr2:217750176-217750251
  hypo

SEQ ID NO: 403180 - DNA, 202 bp, Homo sapiens; identical to SEQ ID NO: 208448
  chr2:218757381-218757583
  hypo

SEQ ID NO: 403181 - DNA, 87 bp, Homo sapiens; identical to SEQ ID NO: 251422
  chr2:218762564-218762651
  hypo

SEQ ID NO: 403182 - DNA, 44 bp, Homo sapiens; identical to SEQ ID NO: 251425
  chr2:219080906-219080950
  hypo

SEQ ID NO: 403183 - DNA, 37 bp, Homo sapiens; identical to SEQ ID NO: 251428
  chr2:219180148-219180185
  hypo

SEQ ID NO: 403184 - DNA, 89 bp, Homo sapiens; identical to SEQ ID NO: 251429
  chr2:219204242-219204331
  hypo

SEQ ID NO: 403185 - DNA, 57 bp, Homo sapiens
  chr2:219256291-219256348
  hypo
gagccttgtgggtcctcttttcttttctttcttttcttcctttttttttgtttttgt

SEQ ID NO: 403186 - DNA, 241 bp, Homo sapiens; identical to SEQ ID NO: 221992
  chr2:219262922-219263163
  hypo

SEQ ID NO: 403187 - DNA, 989 bp, Homo sapiens; identical to SEQ ID NO: 280637
  chr2:219263453-219264442
  hypo

SEQ ID NO: 403188 - DNA, 170 bp, Homo sapiens; identical to SEQ ID NO: 251435
  chr2:219295536-219295706
  hypo

SEQ ID NO: 403189 - DNA, 37 bp, Homo sapiens; identical to SEQ ID NO: 251440
  chr2:219609749-219609786
  hypo

SEQ ID NO: 403190 - DNA, 48 bp, Homo sapiens; identical to SEQ ID NO: 251441
  chr2:219694762-219694810
  hypo

SEQ ID NO: 403191 - DNA, 177 bp, Homo sapiens; identical to SEQ ID NO: 208461
  chr2:219892664-219892841
  hypo

SEQ ID NO: 403192 - DNA, 127 bp, Homo sapiens; identical to SEQ ID NO: 251450
  chr2:220092640-220092767
  hypo

SEQ ID NO: 403193 - DNA, 130 bp, Homo sapiens; identical to SEQ ID NO: 251452
  chr2:220161581-220161711
  hypo

SEQ ID NO: 403194 - DNA, 199 bp, Homo sapiens; identical to SEQ ID NO: 198718
  chr2:220407985-220408184
  hypo

SEQ ID NO: 403195 - DNA, 234 bp, Homo sapiens; identical to SEQ ID NO: 251458
  chr2:220419207-220419441
  hypo

SEQ ID NO: 403196 - DNA, 79 bp, Homo sapiens; identical to SEQ ID NO: 251459
  chr2:220420853-220420932
  hypo

SEQ ID NO: 403197 - DNA, 176 bp, Homo sapiens; identical to SEQ ID NO: 251462
  chr2:220424030-220424206
  hypo

SEQ ID NO: 403198 - DNA, 57 bp, Homo sapiens; identical to SEQ ID NO: 208472
  chr2:220431758-220431815
  hypo

SEQ ID NO: 403199 - DNA, 237 bp, Homo sapiens; identical to SEQ ID NO: 280691
  chr2:220492470-220492707
  hypo

SEQ ID NO: 403200 - DNA, 119 bp, Homo sapiens; identical to SEQ ID NO: 251469
  chr2:220505456-220505575
  hypo

SEQ ID NO: 403201 - DNA, 86 bp, Homo sapiens; identical to SEQ ID NO: 251471
  chr2:220553963-220554049
  hypo

SEQ ID NO: 403202 - DNA, 230 bp, Homo sapiens; identical to SEQ ID NO: 251472
  chr2:222389989-222390219
  hypo

SEQ ID NO: 403203 - DNA, 32 bp, Homo sapiens; identical to SEQ ID NO: 251475
  chr2:223743763-223743795
  hypo

SEQ ID NO: 403204 - DNA, 120 bp, Homo sapiens; identical to SEQ ID NO: 251477
  chr2:223764176-223764296
  hypo

SEQ ID NO: 403205 - DNA, 317 bp, Homo sapiens; identical to SEQ ID NO: 396215
  chr2:224904324-224904641
  hypo

SEQ ID NO: 403206 - DNA, 48 bp, Homo sapiens; identical to SEQ ID NO: 208484
  chr2:225692101-225692149
  hypo

SEQ ID NO: 403207 - DNA, 40 bp, Homo sapiens; identical to SEQ ID NO: 251489
  chr2:227818767-227818807
  hypo

SEQ ID NO: 403208 - DNA, 87 bp, Homo sapiens; identical to SEQ ID NO: 251493
  chr2:228255400-228255487
  hypo

SEQ ID NO: 403209 - DNA, 37 bp, Homo sapiens; identical to SEQ ID NO: 208490
  chr2:228638407-228638444
  hypo

SEQ ID NO: 403210 - DNA, 41 bp, Homo sapiens; identical to SEQ ID NO: 300687
  chr2:228735639-228735680
  hypo

SEQ ID NO: 403211 - DNA, 60 bp, Homo sapiens; identical to SEQ ID NO: 300688
  chr2:228735736-228735796
  hypo

SEQ ID NO: 403212 - DNA, 94 bp, Homo sapiens; identical to SEQ ID NO: 251499
  chr2:228741009-228741103
  hypo

SEQ ID NO: 403213 - DNA, 120 bp, Homo sapiens; identical to SEQ ID NO: 208491
  chr2:230743170-230743290
  hypo

SEQ ID NO: 403214 - DNA, 45 bp, Homo sapiens; identical to SEQ ID NO: 251502
  chr2:230796254-230796299
  hypo

SEQ ID NO: 403215 - DNA, 250 bp, Homo sapiens; identical to SEQ ID NO: 251504
  chr2:231522219-231522469
  hypo

SEQ ID NO: 403216 - DNA, 268 bp, Homo sapiens; identical to SEQ ID NO: 251505
  chr2:231530668-231530936
  hypo

SEQ ID NO: 403217 - DNA, 34 bp, Homo sapiens; identical to SEQ ID NO: 251506
  chr2:231585404-231585438
  hypo

SEQ ID NO: 403218 - DNA, 237 bp, Homo sapiens; identical to SEQ ID NO: 198744
  chr2:231692871-231693108
  hypo

SEQ ID NO: 403219 - DNA, 42 bp, Homo sapiens; identical to SEQ ID NO: 251514
  chr2:232162354-232162396
  hypo

SEQ ID NO: 403220 - DNA, 154 bp, Homo sapiens; identical to SEQ ID NO: 251517
  chr2:232264149-232264303
  hypo

SEQ ID NO: 403221 - DNA, 78 bp, Homo sapiens; identical to SEQ ID NO: 208499
  chr2:232458617-232458695
  hypo

SEQ ID NO: 403222 - DNA, 92 bp, Homo sapiens; identical to SEQ ID NO: 300716
  chr2:232485559-232485651
  hypo

SEQ ID NO: 403223 - DNA, 551 bp, Homo sapiens; identical to SEQ ID NO: 222027
  chr2:232545577-232546128
  hypo

SEQ ID NO: 403224 - DNA, 245 bp, Homo sapiens; identical to SEQ ID NO: 251523
  chr2:232760319-232760564
  hypo

SEQ ID NO: 403225 - DNA, 120 bp, Homo sapiens; identical to SEQ ID NO: 251525
  chr2:233159520-233159640
  hypo

SEQ ID NO: 403226 - DNA, 94 bp, Homo sapiens; identical to SEQ ID NO: 251526
  chr2:233183056-233183150
  hypo

SEQ ID NO: 403227 - DNA, 82 bp, Homo sapiens; identical to SEQ ID NO: 222033
  chr2:233284387-233284469
  hypo

SEQ ID NO: 403228 - DNA, 235 bp, Homo sapiens; identical to SEQ ID NO: 280762
  chr2:233286008-233286243
  hypo

SEQ ID NO: 403229 - DNA, 45 bp, Homo sapiens; identical to SEQ ID NO: 208506
  chr2:233355393-233355438
  hypo

SEQ ID NO: 403230 - DNA, 42 bp, Homo sapiens; identical to SEQ ID NO: 251531
  chr2:233357813-233357855
  hypo

SEQ ID NO: 403231 - DNA, 116 bp, Homo sapiens; identical to SEQ ID NO: 251537
  chr2:233750024-233750140
  hypo

SEQ ID NO: 403232 - DNA, 165 bp, Homo sapiens; identical to SEQ ID NO: 251539
  chr2:233753188-233753353
  hypo

SEQ ID NO: 403233 - DNA, 187 bp, Homo sapiens; identical to SEQ ID NO: 251540
  chr2:233753918-233754105
  hypo

SEQ ID NO: 403234 - DNA, 171 bp, Homo sapiens; identical to SEQ ID NO: 251543
  chr2:233845597-233845768
  hypo

SEQ ID NO: 403235 - DNA, 192 bp, Homo sapiens; identical to SEQ ID NO: 208511
  chr2:234093875-234094067
  hypo

SEQ ID NO: 403236 - DNA, 94 bp, Homo sapiens; identical to SEQ ID NO: 251549
  chr2:234121798-234121892
  hypo

SEQ ID NO: 403237 - DNA, 33 bp, Homo sapiens; identical to SEQ ID NO: 251550
  chr2:234122192-234122225
  hypo

SEQ ID NO: 403238 - DNA, 49 bp, Homo sapiens; identical to SEQ ID NO: 390704
  chr2:234206623-234206672
  hypo

SEQ ID NO: 403239 - DNA, 304 bp, Homo sapiens; identical to SEQ ID NO: 251556
  chr2:234389316-234389620
  hypo

SEQ ID NO: 403240 - DNA, 291 bp, Homo sapiens; identical to SEQ ID NO: 251557
  chr2:234394404-234394695
  hypo

SEQ ID NO: 403241 - DNA, 103 bp, Homo sapiens; identical to SEQ ID NO: 251558
  chr2:234396520-234396623
  hypo

SEQ ID NO: 403242 - DNA, 283 bp, Homo sapiens; identical to SEQ ID NO: 251559
  chr2:234399624-234399907
  hypo

SEQ ID NO: 403243 - DNA, 154 bp, Homo sapiens; identical to SEQ ID NO: 251560
  chr2:234545055-234545209
  hypo

SEQ ID NO: 403244 - DNA, 46 bp, Homo sapiens; identical to SEQ ID NO: 251561
  chr2:234545415-234545461
  hypo

SEQ ID NO: 403245 - DNA, 89 bp, Homo sapiens; identical to SEQ ID NO: 208517
  chr2:235460414-235460503
  hypo

SEQ ID NO: 403246 - DNA, 97 bp, Homo sapiens; identical to SEQ ID NO: 251573
  chr2:235897309-235897406
  hypo

SEQ ID NO: 403247 - DNA, 93 bp, Homo sapiens; identical to SEQ ID NO: 251579
  chr2:235950684-235950777
  hypo

SEQ ID NO: 403248 - DNA, 227 bp, Homo sapiens; identical to SEQ ID NO: 251581
  chr2:236014701-236014928
  hypo

SEQ ID NO: 403249 - DNA, 186 bp, Homo sapiens; identical to SEQ ID NO: 251582
  chr2:236015360-236015546
  hypo

SEQ ID NO: 403250 - DNA, 199 bp, Homo sapiens; identical to SEQ ID NO: 208524
  chr2:236024875-236025074
  hypo

SEQ ID NO: 403251 - DNA, 115 bp, Homo sapiens; identical to SEQ ID NO: 300795
  chr2:236417496-236417611
  hypo

SEQ ID NO: 403252 - DNA, 322 bp, Homo sapiens; identical to SEQ ID NO: 208529
  chr2:236541634-236541956
  hypo

SEQ ID NO: 403253 - DNA, 94 bp, Homo sapiens; identical to SEQ ID NO: 208530
  chr2:236553452-236553546
  hypo

SEQ ID NO: 403254 - DNA, 194 bp, Homo sapiens; identical to SEQ ID NO: 251593
  chr2:236571425-236571619
  hypo

SEQ ID NO: 403255 - DNA, 109 bp, Homo sapiens; identical to SEQ ID NO: 208534
  chr2:236616175-236616284
  hypo

SEQ ID NO: 403256 - DNA, 174 bp, Homo sapiens; identical to SEQ ID NO: 208535
  chr2:236617715-236617889
  hypo

SEQ ID NO: 403257 - DNA, 188 bp, Homo sapiens; identical to SEQ ID NO: 208538
  chr2:236624442-236624630
  hypo

SEQ ID NO: 403258 - DNA, 421 bp, Homo sapiens; identical to SEQ ID NO: 251607
  chr2:236663445-236663866
  hypo

SEQ ID NO: 403259 - DNA, 530 bp, Homo sapiens; identical to SEQ ID NO: 251610
  chr2:236673974-236674504
  hypo

SEQ ID NO: 403260 - DNA, 62 bp, Homo sapiens; identical to SEQ ID NO: 251613
  chr2:236708151-236708213
  hypo

SEQ ID NO: 403261 - DNA, 328 bp, Homo sapiens; identical to SEQ ID NO: 251615
  chr2:236716147-236716475
  hypo

SEQ ID NO: 403262 - DNA, 59 bp, Homo sapiens; identical to SEQ ID NO: 208549
  chr2:236727033-236727092
  hypo

SEQ ID NO: 403263 - DNA, 98 bp, Homo sapiens; identical to SEQ ID NO: 208550
  chr2:236733470-236733568
  hypo

SEQ ID NO: 403264 - DNA, 188 bp, Homo sapiens; identical to SEQ ID NO: 208551
  chr2:236738719-236738907
  hypo

SEQ ID NO: 403265 - DNA, 192 bp, Homo sapiens; identical to SEQ ID NO: 208552
  chr2:236739767-236739959
  hypo

SEQ ID NO: 403266 - DNA, 188 bp, Homo sapiens; identical to SEQ ID NO: 208553
  chr2:236741689-236741877
  hypo

SEQ ID NO: 403267 - DNA, 228 bp, Homo sapiens; identical to SEQ ID NO: 251625
  chr2:236759876-236760104
  hypo

SEQ ID NO: 403268 - DNA, 127 bp, Homo sapiens; identical to SEQ ID NO: 251628
  chr2:236777009-236777136
  hypo

SEQ ID NO: 403269 - DNA, 35 bp, Homo sapiens; identical to SEQ ID NO: 208564
  chr2:236853751-236853786
  hypo

SEQ ID NO: 403270 - DNA, 35 bp, Homo sapiens; identical to SEQ ID NO: 208565
  chr2:236854026-236854061
  hypo

SEQ ID NO: 403271 - DNA, 147 bp, Homo sapiens; identical to SEQ ID NO: 251643
  chr2:236870521-236870668
  hypo

SEQ ID NO: 403272 - DNA, 197 bp, Homo sapiens; identical to SEQ ID NO: 208569
  chr2:236872390-236872587
  hypo

SEQ ID NO: 403273 - DNA, 216 bp, Homo sapiens; identical to SEQ ID NO: 251650
  chr2:236901340-236901556
  hypo

SEQ ID NO: 403274 - DNA, 171 bp, Homo sapiens; identical to SEQ ID NO: 208575
  chr2:236909411-236909582
  hypo

SEQ ID NO: 403275 - DNA, 155 bp, Homo sapiens; identical to SEQ ID NO: 251652
  chr2:236945110-236945265
  hypo

SEQ ID NO: 403276 - DNA, 176 bp, Homo sapiens; identical to SEQ ID NO: 251654
  chr2:236950837-236951013
  hypo

SEQ ID NO: 403277 - DNA, 211 bp, Homo sapiens; identical to SEQ ID NO: 251655
  chr2:236954182-236954393
  hypo

SEQ ID NO: 403278 - DNA, 45 bp, Homo sapiens; identical to SEQ ID NO: 251656
  chr2:236970389-236970434
  hypo

SEQ ID NO: 403279 - DNA, 56 bp, Homo sapiens; identical to SEQ ID NO: 251658
  chr2:236976366-236976422
  hypo

SEQ ID NO: 403280 - DNA, 188 bp, Homo sapiens; identical to SEQ ID NO: 251659
  chr2:236994423-236994611
  hypo

SEQ ID NO: 403281 - DNA, 39 bp, Homo sapiens; identical to SEQ ID NO: 208579
  chr2:237007808-237007847
  hypo

SEQ ID NO: 403282 - DNA, 133 bp, Homo sapiens; identical to SEQ ID NO: 208580
  chr2:237015289-237015422
  hypo

SEQ ID NO: 403283 - DNA, 54 bp, Homo sapiens; identical to SEQ ID NO: 251670
  chr2:237034241-237034295
  hypo

SEQ ID NO: 403284 - DNA, 161 bp, Homo sapiens; identical to SEQ ID NO: 208586
  chr2:237037749-237037910
  hypo

SEQ ID NO: 403285 - DNA, 421 bp, Homo sapiens; identical to SEQ ID NO: 222045
  chr2:237476438-237476859
  hypo

SEQ ID NO: 403286 - DNA, 373 bp, Homo sapiens; identical to SEQ ID NO: 251672
  chr2:237489568-237489941
  hypo

SEQ ID NO: 403287 - DNA, 209 bp, Homo sapiens; identical to SEQ ID NO: 251676
  chr2:237629784-237629993
  hypo

SEQ ID NO: 403288 - DNA, 54 bp, Homo sapiens; identical to SEQ ID NO: 251677
  chr2:237925352-237925406
  hypo

SEQ ID NO: 403289 - DNA, 159 bp, Homo sapiens; identical to SEQ ID NO: 251680
  chr2:238249170-238249329
  hypo

SEQ ID NO: 403290 - DNA, 535 bp, Homo sapiens; identical to SEQ ID NO: 208593
  chr2:238283029-238283564
  hypo

SEQ ID NO: 403291 - DNA, 151 bp, Homo sapiens; identical to SEQ ID NO: 198779
  chr2:238384223-238384374
  hypo

SEQ ID NO: 403292 - DNA, 41 bp, Homo sapiens; identical to SEQ ID NO: 251686
  chr2:238392737-238392778
  hypo

SEQ ID NO: 403293 - DNA, 144 bp, Homo sapiens; identical to SEQ ID NO: 251687
  chr2:238486156-238486300
  hypo

SEQ ID NO: 403294 - DNA, 205 bp, Homo sapiens; identical to SEQ ID NO: 251688
  chr2:238486659-238486864
  hypo

SEQ ID NO: 403295 - DNA, 176 bp, Homo sapiens; identical to SEQ ID NO: 222048
  chr2:238599864-238600040
  hypo

SEQ ID NO: 403296 - DNA, 332 bp, Homo sapiens; identical to SEQ ID NO: 251694
  chr2:238706995-238707327
  hypo

SEQ ID NO: 403297 - DNA, 176 bp, Homo sapiens; identical to SEQ ID NO: 208600
  chr2:238786045-238786221
  hypo

SEQ ID NO: 403298 - DNA, 33 bp, Homo sapiens; identical to SEQ ID NO: 208601
  chr2:238793664-238793697
  hypo

SEQ ID NO: 403299 - DNA, 185 bp, Homo sapiens; identical to SEQ ID NO: 251699
  chr2:238794726-238794911
  hypo

SEQ ID NO: 403300 - DNA, 32 bp, Homo sapiens; identical to SEQ ID NO: 208602
  chr2:238820428-238820460
  hypo

SEQ ID NO: 403301 - DNA, 157 bp, Homo sapiens; identical to SEQ ID NO: 208603
  chr2:238822319-238822476
  hypo

SEQ ID NO: 403302 - DNA, 210 bp, Homo sapiens; identical to SEQ ID NO: 198784
  chr2:238876150-238876360
  hypo

SEQ ID NO: 403303 - DNA, 39 bp, Homo sapiens; identical to SEQ ID NO: 208605
  chr2:239005248-239005287
  hypo

SEQ ID NO: 403304 - DNA, 278 bp, Homo sapiens; identical to SEQ ID NO: 251706
  chr2:239010179-239010457
  hypo

SEQ ID NO: 403305 - DNA, 71 bp, Homo sapiens; identical to SEQ ID NO: 208606
  chr2:239011437-239011508
  hypo

SEQ ID NO: 403306 - DNA, 169 bp, Homo sapiens; identical to SEQ ID NO: 208607
  chr2:239041690-239041859
  hypo

SEQ ID NO: 403307 - DNA, 512 bp, Homo sapiens; identical to SEQ ID NO: 208610
  chr2:239059358-239059870
  hypo

SEQ ID NO: 403308 - DNA, 174 bp, Homo sapiens; identical to SEQ ID NO: 208611
  chr2:239065004-239065178
  hypo

SEQ ID NO: 403309 - DNA, 139 bp, Homo sapiens; identical to SEQ ID NO: 251719
  chr2:239091203-239091342
  hypo

SEQ ID NO: 403310 - DNA, 316 bp, Homo sapiens; identical to SEQ ID NO: 251721
  chr2:239133161-239133477
  hypo

SEQ ID NO: 403311 - DNA, 708 bp, Homo sapiens; identical to SEQ ID NO: 222052
  chr2:239148240-239148948
  hypo

SEQ ID NO: 403312 - DNA, 190 bp, Homo sapiens; identical to SEQ ID NO: 251724
  chr2:239186416-239186606
  hypo

SEQ ID NO: 403313 - DNA, 131 bp, Homo sapiens; identical to SEQ ID NO: 251726
  chr2:239189367-239189498
  hypo

SEQ ID NO: 403314 - DNA, 78 bp, Homo sapiens; identical to SEQ ID NO: 251727
  chr2:239192200-239192278
  hypo

SEQ ID NO: 403315 - DNA, 206 bp, Homo sapiens; identical to SEQ ID NO: 251729
  chr2:239212968-239213174
  hypo

SEQ ID NO: 403316 - DNA, 241 bp, Homo sapiens; identical to SEQ ID NO: 208620
  chr2:239306052-239306293
  hypo

SEQ ID NO: 403317 - DNA, 56 bp, Homo sapiens; identical to SEQ ID NO: 251736
  chr2:239467687-239467743
  hypo

SEQ ID NO: 403318 - DNA, 240 bp, Homo sapiens; identical to SEQ ID NO: 251738
  chr2:239494957-239495197
  hypo

SEQ ID NO: 403319 - DNA, 43 bp, Homo sapiens; identical to SEQ ID NO: 251743
  chr2:239947345-239947388
  hypo

SEQ ID NO: 403320 - DNA, 152 bp, Homo sapiens; identical to SEQ ID NO: 251748
  chr2:239971451-239971603
  hypo

SEQ ID NO: 403321 - DNA, 205 bp, Homo sapiens; identical to SEQ ID NO: 251750
  chr2:239986521-239986726
  hypo

SEQ ID NO: 403322 - DNA, 169 bp, Homo sapiens; identical to SEQ ID NO: 300972
  chr2:239997291-239997460
  hypo

SEQ ID NO: 403323 - DNA, 1132 bp, Homo sapiens; identical to SEQ ID NO: 300974
  chr2:240002664-240003796
  hypo

SEQ ID NO: 403324 - DNA, 258 bp, Homo sapiens; identical to SEQ ID NO: 300975
  chr2:240003826-240004084
  hypo

SEQ ID NO: 403325 - DNA, 169 bp, Homo sapiens; identical to SEQ ID NO: 251754
  chr2:240014779-240014948
  hypo

SEQ ID NO: 403326 - DNA, 388 bp, Homo sapiens; identical to SEQ ID NO: 251756
  chr2:240016397-240016785
  hypo

SEQ ID NO: 403327 - DNA, 156 bp, Homo sapiens; identical to SEQ ID NO: 251760
  chr2:240032302-240032458
  hypo

SEQ ID NO: 403328 - DNA, 552 bp, Homo sapiens; identical to SEQ ID NO: 251761
  chr2:240054228-240054780
  hypo

SEQ ID NO: 403329 - DNA, 40 bp, Homo sapiens; identical to SEQ ID NO: 208629
  chr2:240064716-240064756
  hypo

SEQ ID NO: 403330 - DNA, 215 bp, Homo sapiens; identical to SEQ ID NO: 251766
  chr2:240077356-240077571
  hypo

SEQ ID NO: 403331 - DNA, 152 bp, Homo sapiens; identical to SEQ ID NO: 251768
  chr2:240103122-240103274
  hypo

SEQ ID NO: 403332 - DNA, 274 bp, Homo sapiens; identical to SEQ ID NO: 300992
  chr2:240103304-240103578
  hypo

SEQ ID NO: 403333 - DNA, 188 bp, Homo sapiens; identical to SEQ ID NO: 208635
  chr2:240117493-240117681
  hypo

SEQ ID NO: 403334 - DNA, 36 bp, Homo sapiens; identical to SEQ ID NO: 251775
  chr2:240129719-240129755
  hypo

SEQ ID NO: 403335 - DNA, 41 bp, Homo sapiens; identical to SEQ ID NO: 208639
  chr2:240169831-240169872
  hypo

SEQ ID NO: 403336 - DNA, 131 bp, Homo sapiens; identical to SEQ ID NO: 208641
  chr2:240172542-240172673
  hypo

SEQ ID NO: 403337 - DNA, 312 bp, Homo sapiens; identical to SEQ ID NO: 251785
  chr2:240232940-240233252
  hypo

SEQ ID NO: 403338 - DNA, 46 bp, Homo sapiens; identical to SEQ ID NO: 208645
  chr2:240234573-240234619
  hypo

SEQ ID NO: 403339 - DNA, 112 bp, Homo sapiens; identical to SEQ ID NO: 251787
  chr2:240262930-240263042
  hypo

SEQ ID NO: 403340 - DNA, 245 bp, Homo sapiens; identical to SEQ ID NO: 251790
  chr2:240291771-240292016
  hypo

SEQ ID NO: 403341 - DNA, 210 bp, Homo sapiens; identical to SEQ ID NO: 222053
  chr2:240294231-240294441
  hypo

SEQ ID NO: 403342 - DNA, 246 bp, Homo sapiens; identical to SEQ ID NO: 251791
  chr2:240298221-240298467
  hypo

SEQ ID NO: 403343 - DNA, 43 bp, Homo sapiens; identical to SEQ ID NO: 208648
  chr2:240312832-240312875
  hypo

SEQ ID NO: 403344 - DNA, 38 bp, Homo sapiens; identical to SEQ ID NO: 251796
  chr2:240320282-240320320
  hypo

SEQ ID NO: 403345 - DNA, 42 bp, Homo sapiens; identical to SEQ ID NO: 251797
  chr2:240342330-240342372
  hypo

SEQ ID NO: 403346 - DNA, 120 bp, Homo sapiens; identical to SEQ ID NO: 208649
  chr2:240361083-240361203
  hypo

SEQ ID NO: 403347 - DNA, 259 bp, Homo sapiens; identical to SEQ ID NO: 208651
  chr2:240599653-240599912
  hypo

SEQ ID NO: 403348 - DNA, 34 bp, Homo sapiens; identical to SEQ ID NO: 208652
  chr2:240612328-240612362
  hypo

SEQ ID NO: 403349 - DNA, 110 bp, Homo sapiens; identical to SEQ ID NO: 251807
  chr2:240618673-240618783
  hypo

SEQ ID NO: 403350 - DNA, 225 bp, Homo sapiens; identical to SEQ ID NO: 251808
  chr2:240639523-240639748
  hypo

SEQ ID NO: 403351 - DNA, 151 bp, Homo sapiens; identical to SEQ ID NO: 251809
  chr2:240643423-240643574
  hypo

SEQ ID NO: 403352 - DNA, 206 bp, Homo sapiens; identical to SEQ ID NO: 208654
  chr2:240733615-240733821
  hypo
